United States Patent Application Publication US 2007/0214517 A1 - sequence listing, part 45

SEQ ID NO: 53502 - protein, 236 aa, Glycine max
  peptide (1)..(236): Ceres Seq. ID no. 14303879
  misc_feature (76)..(127): Pfam Name: Helix-loop-helix DNA-binding domain Pfam Description: Helix-loop-helix DNA-binding domain
  misc_feature (48)..(236): Homolog of NCBI NO: 30682847 NR Description: bHLH protein [Arabidopsis thaliana]
  misc_feature (48)..(236): Homolog of NCBI NO: 18414212 NR Description: bHLH protein [Arabidopsis thaliana]
  misc_feature (40)..(236): Homolog of NCBI NO: 22331274 NR Description: bHLH protein [Arabidopsis thaliana]
  misc_feature (40)..(236): Homolog of NCBI NO: 20127030 NR Description: putative bHLH transcription factor [Arabidopsis
  misc_feature (36)..(236): Homolog of NCBI NO: 32352190 NR Description: hypothetical protein [Oryza sativa (japonica
  misc_feature (32)..(236): Homolog of NCBI NO: 29367409 NR Description: helix-loop-helix-like protein
  misc_feature (8)..(236): Homolog of NCBI NO: 38636768 NR Description: helix-loop-helix-like protein
  misc_feature (1)..(236): Homolog of NCBI NO: 15223710 NR Description: bHLH protein [Arabidopsis thaliana]
  misc_feature (1)..(236): Homolog of NCBI NO: 21592325 NR Description: bHLH transcription factor, putative [Arabidopsis
  misc_feature (1)..(236): Homolog of NCBI NO: 15239706 NR Description: bHLH protein [Arabidopsis thaliana]
MVSRENTNWLFDYGLIDDIPVPDATFGVNSSAFTWPPNALNASSNVGVEIDGSLGDSDSLKESGSKKRVRSESCAASGSKACREKLRRDRLNDKFVELGAILEPGRPAKTDKAAILIDAVRMVTQLRGEAQKLKDTNQGLQEKIKELKAEKNELRDEKQRLKAEKEKLEQQLKSLNAQPSFMPPPAAMPAAFAAQGQAHGNKLVPFISYPGVAMWQFMPPAAVDTSQDHVLRPPVA

SEQ ID NO: 53503 - DNA, 1875 bp, Glycine max
  misc_feature (1)..(1875): Ceres Seq. ID no. 14311313
gtgaaacttcccaaaaaatatacagcactatggaacaccaaaaagaggagcaactagaaccagtgagtcctgtgggacaatacttcaacagctctgtgctatgcatatacatcattggagttttagaattcgaagttccaatagatgacttgcaaacatatgctcttcttaaagatgttttccttcccatcaatccacgcttctcctccatcatggtccaagataaagatggagagaaaagatggaagcaagttgatgtaaacttgacggaccatgtcaacatccccacattccccgaaggaaaaacagcggaatcttatgataaatattttcatgattatttatcaagcatagcaatggagcaattaccacaaagcagaccattatgggatattcacataatcaattaccttacaagtgatgcatccagcactataatatttaagcttcaccatgcacttggagatggctattctctcatgggtgctcttctttcttgtcttcaacgagccgatgacccttctcttcccttgtcctttccttctctcaaacaatctaaacaagaaccttcttccactaaaagcttttgcagaaaattttcttggatgtgttcctctgccttcaacactgtctcagattttggatggagtgtattgaagagtagcatcattagtgatgataaaacaccgataaggtttggagacgaaggagccgactatcaaccaatttccatatcaagcatgacattctccattgaccacatcagggacatcaaatcaaggctcggagtgacaataaatgatgtggtcactggaattgtcttctatggaactagattatatatgcaagatatggactccaaatcaaagaccgcacactccacagcattggtattactgaatacgagaaacgttgaaggttaccaatcgatcaatgatatgctaaatactaaagccacgggtccatgggggaacagaattaccttcttgcatgttccaataccgaaattaaatgaaacaagaactacaaaccctcttgaatttatttgggacacacataacataatcaagaggaagaaacaatctctaggagttgtactcaccgggacacttttgaagatagagggcaaattgaggggacaagaggcagtagctaaacgcattcgtggcacattgacaaaatcaagtgcagtgatttcaaacttggctggaccaatacaacaaatggctttagctaaccatcctgtgaaaggcttgtatttcacattggccggtggacctgaaagtctagtcatttcagttatgagctatatgggagtcctaagtgttaccctcaaaacggaaaaagacttcatagacgaacataaattgaagttgtgcatgcaaagtgcatttgagataattctccaagcagctatggaaattcctcaggaaaccaaaccttagtatttggtttggatgattggaacagcttattacgaaaattagagagagagagagatatggagaatttaccatattatttctccggatttatcaacgccttaagtaattgcttgtctatagtatatttgtcgtatgtttggaaagatcaatacacgaggcccaccttattttggatctgtttaggcctattcttgtttggaagaatcttattgtctgatctcacttggtaatcatttcttgtttgtttcacaaactaaaaagtgtacaagagttgttatatttttaattatgtagtcttttgtaaaaattttgtacatcacatttcttatcctcttgtctccaacactccaacattaattaacaacaatattaaaaatttagctcaaatctcacaatgtagggggctaattcaatagaaggttttcaatcc

SEQ ID NO: 53504 - protein, 480 aa, Glycine max
  peptide (1)..(480): Ceres Seq. ID no. 14311314
  misc_feature (14)..(281): Pfam Name: Condensation domain Pfam Description: Condensation domain
  misc_feature (81)..(448): Homolog of NCBI NO: 34911182 NR Description: P0019E03.6 [Oryza sativa (japonica
  misc_feature (5)..(479): Homolog of NCBI NO: 18421632 NR Description: expressed protein [Arabidopsis thaliana]
  misc_feature (3)..(479): Homolog of NCBI NO: 9758716 NR Description: emb|CAB66398.1~gene_id:MNJ8.9~strong similarity
  misc_feature (10)..(471): Homolog of NCBI NO: 15218351 NR Description: expressed protein [Arabidopsis thaliana]
  misc_feature (10)..(456): Homolog of NCBI NO: 15242259 NR Description: hypothetical protein [Arabidopsis thaliana]
  misc_feature (19)..(473): Homolog of NCBI NO: 9759186 NR Description: emb|CAB66399.1~gene_id:K19E1.19~strong similarity
  misc_feature (19)..(473): Homolog of NCBI NO: 26451548 NR Description: unknown protein [Arabidopsis thaliana]
  misc_feature (19)..(473): Homolog of NCBI NO: 30696326 NR Description: expressed protein [Arabidopsis thaliana]
  misc_feature (11)..(473): Homolog of NCBI NO: 30687731 NR Description: hypothetical protein [Arabidopsis thaliana]
  misc_feature (19)..(474): Homolog of NCBI NO: 34909900 NR Description: P0665A11.10 [Oryza sativa (japonica
ETSQKIYSTMEHQKEEQLEPVSPVGQYFNSSVLCIYIIGVLEFEVPIDDLQTYALLKDVFLPINPRFSSIMVQDKDGEKRWKQVDVNLTDHVNIPTFPEGKTAESYDKYFHDYLSSIAMEQLPQSRPLWDIHIINYLTSDASSTIIFKLHHALGDGYSLMGALLSCLQRADDPSLPLSFPSLKQSKQEPSSTKSFCRKFSWMCSSAFNTVSDFGWSVLKSSIISDDKTPIRFGDEGADYQPISISSMTFSIDHIRDIKSRLGVTINDVVTGIVFYGTRLYMQDMDSKSKTAHSTALVLLNTRNVEGYQSINDMLNTKATGPWGNRITFLHVPIPKLNETRTTNPLEFIWDTHNIIKRKKQSLGVVLTGTLLKIEGKLRGQEAVAKRIRGTLTKSSAVISNLAGPIQQMALANHPVKGLYFTLAGGPESLVISVMSYMGVLSVTLKTEKDFIDEHKLKLCMQSAFEIILQAAMEIPQETKP

SEQ ID NO: 53505 - protein, 471 aa, Glycine max
  peptide (1)..(471): Ceres Seq. ID no. 14311315
  misc_feature (5)..(272): Pfam Name: Condensation domain Pfam Description: Condensation domain
  misc_feature (72)..(439): Homolog of NCBI NO: 34911182 NR Description: P0019E03.6 [Oryza sativa (japonica
  misc_feature (1)..(470): Homolog of NCBI NO: 18421632 NR Description: expressed protein [Arabidopsis thaliana]
  misc_feature (1)..(470): Homolog of NCBI NO: 9758716 NR Description: emb|CAB66398.1~gene_id:MNJ8.9~strong similarity
  misc_feature (1)..(462): Homolog of NCBI NO: 15218351 NR Description: expressed protein [Arabidopsis thaliana]
  misc_feature (1)..(447): Homolog of NCBI NO: 15242259 NR Description: hypothetical protein [Arabidopsis thaliana]
  misc_feature (10)..(464): Homolog of NCBI NO: 9759186 NR Description: emb|CAB66399.1~gene_id:K19E1.19~strong similarity
  misc_feature (10)..(464): Homolog of NCBI NO: 26451548 NR Description: unknown protein [Arabidopsis thaliana]
  misc_feature (10)..(464): Homolog of NCBI NO: 30696326 NR Description: expressed protein [Arabidopsis thaliana]
  misc_feature (2)..(464): Homolog of NCBI NO: 30687731 NR Description: hypothetical protein [Arabidopsis thaliana]
  misc_feature (10)..(465): Homolog of NCBI NO: 34909900 NR Description: P0665A11.10 [Oryza sativa (japonica
MEHQKEEQLEPVSPVGQYFNSSVLCIYIIGVLEFEVPIDDLQTYALLKDVFLPINPRFSSIMVQDKDGEKRWKQVDVNLTDHVNIPTFPEGKTAESYDKYFHDYLSSIAMEQLPQSRPLWDIHIINYLTSDASSTIIFKLHHALGDGYSLMGALLSCLQRADDPSLPLSFPSLKQSKQEPSSTKSFCRKFSWMCSSAFNTVSDFGWSVLKSSIISDDKTPIRFGDEGADYQPISISSMTFSIDHIRDIKSRLGVTINDVVTGIVFYGTRLYMQDMDSKSKTAHSTALVLLNTRNVEGYQSINDMLNTKATGPWGNRITFLHVPIPKLNETRTTNPLEFIWDTHNIIKRKKQSLGVVLTGTLLKIEGKLRGQEAVAKRIRGTLTKSSAVISNLAGPIQQMALANHPVKGLYFTLAGGPESLVISVMSYMGVLSVTLKTEKDFIDEHKLKLCMQSAFEIILQAAMEIPQETKP

SEQ ID NO: 53506 - protein, 410 aa, Glycine max
  peptide (1)..(410): Ceres Seq. ID no. 14311316
  misc_feature (1)..(211): Pfam Name: Condensation domain Pfam Description: Condensation domain
  misc_feature (11)..(378): Homolog of NCBI NO: 34911182 NR Description: P0019E03.6 [Oryza sativa (japonica
  misc_feature (1)..(409): Homolog of NCBI NO: 18421632 NR Description: expressed protein [Arabidopsis thaliana]
  misc_feature (1)..(409): Homolog of NCBI NO: 9758716 NR Description: emb|CAB66398.1~gene_id:MNJ8.9~strong similarity
  misc_feature (1)..(401): Homolog of NCBI NO: 15218351 NR Description: expressed protein [Arabidopsis thaliana]
  misc_feature (1)..(386): Homolog of NCBI NO: 15242259 NR Description: hypothetical protein [Arabidopsis thaliana]
  misc_feature (1)..(403): Homolog of NCBI NO: 9759186 NR Description: emb|CAB66399.1~gene_id:K19E1.19~strong similarity
  misc_feature (1)..(403): Homolog of NCBI NO: 26451548 NR Description: unknown protein [Arabidopsis thaliana]
  misc_feature (1)..(403): Homolog of NCBI NO: 30696326 NR Description: expressed protein [Arabidopsis thaliana]
  misc_feature (1)..(403): Homolog of NCBI NO: 30687731 NR Description: hypothetical protein [Arabidopsis thaliana]
  misc_feature (1)..(404): Homolog of NCBI NO: 34909900 NR Description: P0665A11.10 [Oryza sativa (japonica
MVQDKDGEKRWKQVDVNLTDHVNIPTFPEGKTAESYDKYFHDYLSSIAMEQLPQSRPLWDIHIINYLTSDASSTIIFKLHHALGDGYSLMGALLSCLQRADDPSLPLSFPSLKQSKQEPSSTKSFCRKFSWMCSSAFNTVSDFGWSVLKSSIISDDKTPIRFGDEGADYQPISISSMTFSIDHIRDIKSRLGVTINDVVTGIVFYGTRLYMQDMDSKSKTAHSTALVLLNTRNVEGYQSINDMLNTKATGPWGNRITFLHVPIPKLNETRTTNPLEFIWDTHNIIKRKKQSLGVVLTGTLLKIEGKLRGQEAVAKRIRGTLTKSSAVISNLAGPIQQMALANHPVKGLYFTLAGGPESLVISVMSYMGVLSVTLKTEKDFIDEHKLKLCMQSAFEIILQAAMEIPQETKP

SEQ ID NO: 53507 - DNA, 1419 bp, Glycine max
  misc_feature (1)..(1419): Ceres Seq. ID no. 14304495
agtaattgaaacttgtctccatgaaaatggctatcaaagttcaagagataacaaaagcactttgataccagatggggtttcagatttgctgagtgtgaaggcaaggattagagcggttgaaaaatcaatggtggaagaaatcaagaagcttgtgaaggaagacaatttaaccactaaagctaatccaggagctctgacaaaggcaacaaatgtggaagtttcaccctatgtggagaattgcaacagaaaagaagacaaggtacccaaggatgagagcacacatgatgtcaactcgtggagaacaaaaactgaaaatgggtcattgatgaaagatattccacttgatcacatctcagacaattcagcctccaaaagttgcaggagagaaaatagtggtactgatgatcagatgcttgaattatgggaaactgccgagcaagattgctttgctagttccatgattagtgaagcaatgaaacaaagttctgttccaacagaggatgttattgcataccatcagtcagatcattcaggtaaattccaaaatacctcttcagaattggatgtggaaaaggaattgggtgttgacaggcttcagttgtcgagaagtataaaagagagaactcaagatggcaagaggagaaagatactggagaggctttcttctgatgcgcagaaactgaccattctcaagacagctgtgcaagatttgaaacagaaaatggagacgaagagaagcaagaagggagtcgagactgaatatgaaacagtcaaaagacaaatagacgaagttgagggagctgttgtcaaattagtagatactaatgatcaactgacaaaggatcttgaagagagcgccccatctctaaacaggcagacttcagccgagttggaaaagagtagacacatccagagaaaaagagtaaccgagcaggcgcgaaaaggttctgaacagataggaaggttgcagtttgaggtgcagaacatccaatacactttgctgaaattggctgatgaaaagagcaaagggaagagcagattcactggaaaaacagtggtcttgcttaaggactttattcacagtggcaagagaagtagcaaaaagcgcaacaaggggttctgtggatgctcaaggccttcaactaatgaggactaagtgagaaaatttagaatcattttgttgtaagtaccttctttaattggtatgtgtctaatcttagcataataattttaattttagctgttaaagatgctgttaggctttatctgatcacagtaacttatgtcagatttgtatgttctagctttcagaggacatgtactgagcgacattttcgctaaggagttgcgctgtcatgtttgacaatgtttaagctatgaaagcacagagcagagaataaagcttttcaccctttcttc

SEQ ID NO: 53508 - protein, 384 aa, Glycine max
  peptide (1)..(384): Ceres Seq. ID no. 14304496
  misc_feature (33)..(357): Pfam Name: Myosin tail Pfam Description: Myosin tail
  misc_feature (108)..(306): Homolog of NCBI NO: 29370236 NR Description: centromere protein-like protein
  misc_feature (109)..(376): Homolog of NCBI NO: 15235468 NR Description: expressed protein [Arabidopsis thaliana]
  misc_feature (19)..(327): Homolog of NCBI NO: 9279697 NR Description: centromere protein [Arabidopsis thaliana]
  misc_feature (19)..(327): Homolog of NCBI NO: 15228859 NR Description: expressed protein [Arabidopsis thaliana]
  misc_feature (181)..(384): Homolog of NCBI NO: 9279697 NR Description: centromere protein [Arabidopsis thaliana]
  misc_feature (181)..(384): Homolog of NCBI NO: 15228859 NR Description: expressed protein [Arabidopsis thaliana]
  misc_feature (179)..(384): Homolog of NCBI NO: 15233570 NR Description: centromere protein homolog [Arabidopsis thaliana]
  misc_feature (22)..(381): Homolog of NCBI NO: 37534452 NR Description: putative centromere protein
  misc_feature (25)..(379): Homolog of NCBI NO: 15218702 NR Description: expressed protein [Arabidopsis thaliana]
  misc_feature (159)..(382): Homolog of NCBI NO: 4894628 NR Description: NT3 [Nicotiana tabacum]
VIETCLHENGYQSSRDNKSTLIPDGVSDLLSVKARIRAVEKSMVEEIKKLVKEDNLTTKANPGALTKATNVEVSPYVENCNRKEDKVPKDESTHDVNSWRTKTENGSLMKDIPLDHISDNSASKSCRRENSGTDDQMLELWETAEQDCFASSMISEAMKQSSVPTEDVIAYHQSDHSGKFQNTSSELDVEKELGVDRLQLSRSIKERTQDGKRRKILERLSSDAQKLTILKTAVQDLKQKMETKRSKKGVETEYETVKRQIDEVEGAVVKLVDTNDQLTKDLEESAPSLNRQTSAELEKSRHIQRKRVTEQARKGSEQIGRLQFEVQNIQYTLLKLADEKSKGKSRFTGKTVVLLKDFIHSGKRSSKKRNKGFCGCSRPSTNED

SEQ ID NO: 53509 - protein, 342 aa, Glycine max
  peptide (1)..(342): Ceres Seq. ID no. 14304497
  misc_feature (1)..(315): Pfam Name: Myosin tail Pfam Description: Myosin tail
  misc_feature (66)..(264): Homolog of NCBI NO: 29370236 NR Description: centromere protein-like protein
  misc_feature (67)..(334): Homolog of NCBI NO: 15235468 NR Description: expressed protein [Arabidopsis thaliana]
  misc_feature (1)..(285): Homolog of NCBI NO: 9279697 NR Description: centromere protein [Arabidopsis thaliana]
  misc_feature (1)..(285): Homolog of NCBI NO: 15228859 NR Description: expressed protein [Arabidopsis thaliana]
  misc_feature (139)..(342): Homolog of NCBI NO: 9279697 NR Description: centromere protein [Arabidopsis thaliana]
  misc_feature (139)..(342): Homolog of NCBI NO: 15228859 NR Description: expressed protein [Arabidopsis thaliana]
  misc_feature (137)..(342): Homolog of NCBI NO: 15233570 NR Description: centromere protein homolog [Arabidopsis thaliana]
  misc_feature (1)..(339): Homolog of NCBI NO: 37534452 NR Description: putative centromere protein
  misc_feature (1)..(337): Homolog of NCBI NO: 15218702 NR Description: expressed protein [Arabidopsis thaliana]
  misc_feature (117)..(340): Homolog of NCBI NO: 4894628 NR Description: NT3 [Nicotiana tabacum]
MVEEIKKLVKEDNLTTKANPGALTKATNVEVSPYVENCNRKEDKVPKDESTHDVNSWRTKTENGSLMKDIPLDHISDNSASKSCRRENSGTDDQMLELWETAEQDCFASSMISEAMKQSSVPTEDVIAYHQSDHSGKFQNTSSELDVEKELGVDRLQLSRSIKERTQDGKRRKILERLSSDAQKLTILKTAVQDLKQKMETKRSKKGVETEYETVKRQIDEVEGAVVKLVDTNDQLTKDLEESAPSLNRQTSAELEKSRHIQRKRVTEQARKGSEQIGRLQFEVQNIQYTLLKLADEKSKGKSRFTGKTVVLLKDFIHSGKRSSKKRNKGFCGCSRPSTNED

SEQ ID NO: 53510 - protein, 276 aa, Glycine max
  peptide (1)..(276): Ceres Seq. ID no. 14304498
  misc_feature (1)..(249): Pfam Name: Myosin tail Pfam Description: Myosin tail
  misc_feature (1)..(198): Homolog of NCBI NO: 29370236 NR Description: centromere protein-like protein
  misc_feature (1)..(268): Homolog of NCBI NO: 15235468 NR Description: expressed protein [Arabidopsis thaliana]
  misc_feature (1)..(219): Homolog of NCBI NO: 9279697 NR Description: centromere protein [Arabidopsis thaliana]
  misc_feature (1)..(219): Homolog of NCBI NO: 15228859 NR Description: expressed protein [Arabidopsis thaliana]
  misc_feature (73)..(276): Homolog of NCBI NO: 9279697 NR Description: centromere protein [Arabidopsis thaliana]
  misc_feature (73)..(276): Homolog of NCBI NO: 15228859 NR Description: expressed protein [Arabidopsis thaliana]
  misc_feature (71)..(276): Homolog of NCBI NO: 15233570 NR Description: centromere protein homolog [Arabidopsis thaliana]
  misc_feature (1)..(273): Homolog of NCBI NO: 37534452 NR Description: putative centromere protein
  misc_feature (1)..(271): Homolog of NCBI NO: 15218702 NR Description: expressed protein [Arabidopsis thaliana]
  misc_feature (51)..(274): Homolog of NCBI NO: 4894628 NR Description: NT3 [Nicotiana tabacum]
MKDIPLDHISDNSASKSCRRENSGTDDQMLELWETAEQDCFASSMISEAMKQSSVPTEDVIAYHQSDHSGKFQNTSSELDVEKELGVDRLQLSRSIKERTQDGKRRKILERLSSDAQKLTILKTAVQDLKQKMETKRSKKGVETEYETVKRQIDEVEGAVVKLVDTNDQLTKDLEESAPSLNRQTSAELEKSRHIQRKRVTEQARKGSEQIGRLQFEVQNIQYTLLKLADEKSKGKSRFTGKTVVLLKDFIHSGKRSSKKRNKGFCGCSRPSTNED

SEQ ID NO: 53511 - DNA, 1055 bp, Glycine max
  misc_feature (1)..(1055): Ceres Seq. ID no. 14303993
agaaacagaacagaagcatcaattatcagttatcagcatggtcaaaactgtagtttggtccacttttgtgagaccgcaatataaacctgcacatttcaatcactcaccccttccatttctgaagctcagtacacccaatttgagctttcgtgggaccaacacagtacataataagcgatccaattggccaaaacctttgtcactgcgctcaaaatctgttcttgctgttgctggggctgaccctttggaaatggcagaggattggaaccgcacagcccttcttgtgatcgacatgcagaaagattttatagaagatgggggtcccatgctagtaaaaggagggaaagacattgtcccaaatgttattaaggctgtcgatgttgctaggcagcgtggaattctcatagtttgggtagtacgggaacatgatcccttaggaagagatgttgaactctttcgtcggcatctatatgcagcagggaaagttggtccaacctctaaaggaagtgaaggtgcagaattagttgatggactggtaattaaagaaggggattataaacttgtgaaaaccaggtttagtgcattctttgctacacaccttcattcagtccttcaaggagcaggaattaatagtcttgtggtcactggtgttcaaactcctaactgtattaggcaaactgtctatgatgctgtagcattggactatcaacctgtaactgttattgttgatgctacagcagcagccacacctgatattcatctcgccaatgtgtttgacatggaaaatattggagttgcaaccccaacattacaagaatggagcgaacccaaagcttgatctatatgaactatgaagcatgctactttttgcacccagtggtgtactggtgttcaattccaagactcaagaaaggtttgaagtgaagcaaacgtatctatgtttactgcataataaaatgatttacatggctaagtttgtttattttggtattcacttcacttttgttgtgactactatgaacttattttttctagtccaatgcactccaatttag

SEQ ID NO: 53512 - protein, 278 aa, Glycine max
  peptide (1)..(278): Ceres Seq. ID no. 14303994
  misc_feature (91)..(275): Pfam Name: Isochorismatase family Pfam Description: Isochorismatase family
  misc_feature (91)..(249): Homolog of NCBI NO: 15920799 NR Description: 200aa long hypothetical isochorismatase
  misc_feature (90)..(247): Homolog of NCBI NO: 16081574 NR Description: N-carbamoylsarcosine amidase related protein
  misc_feature (70)..(253): Homolog of NCBI NO: 27377836 NR Description: blr2725 [Bradyrhizobium japonicum]
  misc_feature (89)..(263): Homolog of NCBI NO: 15643241 NR Description: pyrazinamidase/nicotinamidase-related protein
  misc_feature (92)..(263): Homolog of NCBI NO: 11499734 NR Description: isochorismatase (entB) [Archaeoglobus fulgidus
  misc_feature (90)..(275): Homolog of NCBI NO: 18313752 NR Description: isochorismatase, putative [Pyrobaculum
  misc_feature (92)..(261): Homolog of NCBI NO: 23110315 NR Description: hypothetical protein [Novosphingobium
  misc_feature (71)..(273): Homolog of NCBI NO: 33599706 NR Description: putative isochorismatase [Bordetella
  misc_feature (92)..(272): Homolog of NCBI NO: 20093942 NR Description: Amidase related to nicotinamidase [Methanopyrus
  misc_feature (84)..(278): Homolog of NCBI NO: 18401044 NR Description: isochorismatase hydrolase family [Arabidopsis
ETEQKHQLSVISMVKTVVWSTFVRPQYKPAHFNHSPLPFLKLSTPNLSFRGTNTVHNKRSNWPKPLSLRSKSVLAVAGADPLEMAEDWNRTALLVIDMQKDFIEDGGPMLVKGGKDIVPNVIKAVDVARQRGILIVWVVREHDPLGRDVELFRRHLYAAGKVGPTSKGSEGAELVDGLVIKEGDYKLVKTRFSAFFATHLHSVLQGAGINSLVVTGVQTPNCIRQTVYDAVALDYQPVTVIVDATAAATPDIHLANVFDMENIGVATPTLQEWSEPKA

SEQ ID NO: 53513 - protein, 266 aa, Glycine max
  peptide (1)..(266): Ceres Seq. ID no. 14303995
  misc_feature (79)..(263): Pfam Name: Isochorismatase family Pfam Description: Isochorismatase family
  misc_feature (79)..(237): Homolog of NCBI NO: 15920799 NR Description: 200aa long hypothetical isochorismatase
  misc_feature (78)..(235): Homolog of NCBI NO: 16081574 NR Description: N-carbamoylsarcosine amidase related protein
  misc_feature (58)..(241): Homolog of NCBI NO: 27377836 NR Description: blr2725 [Bradyrhizobium japonicum]
  misc_feature (77)..(251): Homolog of NCBI NO: 15643241 NR Description: pyrazinamidase/nicotinamidase-related protein
  misc_feature (80)..(251): Homolog of NCBI NO: 11499734 NR Description: isochorismatase (entB) [Archaeoglobus fulgidus
  misc_feature (78)..(263): Homolog of NCBI NO: 18313752 NR Description: isochorismatase, putative [Pyrobaculum
  misc_feature (80)..(249): Homolog of NCBI NO: 23110315 NR Description: hypothetical protein [Novosphingobium
  misc_feature (59)..(261): Homolog of NCBI NO: 33599706 NR Description: putative isochorismatase [Bordetella
  misc_feature (80)..(260): Homolog of NCBI NO: 20093942 NR Description: Amidase related to nicotinamidase [Methanopyrus
  misc_feature (72)..(266): Homolog of NCBI NO: 18401044 NR Description: isochorismatase hydrolase family [Arabidopsis
MVKTVVWSTFVRPQYKPAHFNHSPLPFLKLSTPNLSFRGTNTVHNKRSNWPKPLSLRSKSVLAVAGADPLEMAEDWNRTALLVIDMQKDFIEDGGPMLVKGGKDIVPNVIKAVDVARQRGILIVWVVREHDPLGRDVELFRRHLYAAGKVGPTSKGSEGAELVDGLVIKEGDYKLVKTRFSAFFATHLHSVLQGAGINSLVVTGVQTPNCIRQTVYDAVALDYQPVTVIVDATAAATPDIHLANVFDMENIGVATPTLQEWSEPKA

SEQ ID NO: 53514 - protein, 195 aa, Glycine max
  peptide (1)..(195): Ceres Seq. ID no. 14303996
  misc_feature (8)..(192): Pfam Name: Isochorismatase family Pfam Description: Isochorismatase family
  misc_feature (8)..(166): Homolog of NCBI NO: 15920799 NR Description: 200aa long hypothetical isochorismatase
  misc_feature (7)..(164): Homolog of NCBI NO: 16081574 NR Description: N-carbamoylsarcosine amidase related protein
  misc_feature (1)..(170): Homolog of NCBI NO: 27377836 NR Description: blr2725 [Bradyrhizobium japonicum]
  misc_feature (6)..(180): Homolog of NCBI NO: 15643241 NR Description: pyrazinamidase/nicotinamidase-related protein
  misc_feature (9)..(180): Homolog of NCBI NO: 11499734 NR Description: isochorismatase (entB) [Archaeoglobus fulgidus
  misc_feature (7)..(192): Homolog of NCBI NO: 18313752 NR Description: isochorismatase, putative [Pyrobaculum
  misc_feature (9)..(178): Homolog of NCBI NO: 23110315 NR Description: hypothetical protein [Novosphingobium
  misc_feature (1)..(190): Homolog of NCBI NO: 33599706 NR Description: putative isochorismatase [Bordetella
  misc_feature (9)..(189): Homolog of NCBI NO: 20093942 NR Description: Amidase related to nicotinamidase [Methanopyrus
  misc_feature (1)..(195): Homolog of NCBI NO: 18401044 NR Description: isochorismatase hydrolase family [Arabidopsis
MAEDWNRTALLVIDMQKDFIEDGGPMLVKGGKDIVPNVIKAVDVARQRGILIVWVVREHDPLGRDVELFRRHLYAAGKVGPTSKGSEGAELVDGLVIKEGDYKLVKTRFSAFFATHLHSVLQGAGINSLVVTGVQTPNCIRQTVYDAVALDYQPVTVIVDATAAATPDIHLANVFDMENIGVATPTLQEWSEPKA

SEQ ID NO: 53515 - DNA, 1642 bp, Glycine max
  misc_feature (1)..(1642): Ceres Seq. ID no. 14315606
tcctgcctcccaggtgaaaaagaaaacacactgacgaagacagttccttctagaattgatagtatgcctctacacattgcaatgctcccgtggctcgcagtgggtcatgtgaacccttatttggagctgtcaaagattcttgctcaaaagggacactttgttacctttataagcactccaaaaaacattgatggcatgcccaaaatcccggaaaccttacagccatccatcaaattggtgaggctacccttgccacacacagatcatcatcatcatctcccagaagatgctgagagcacaatggacattccctcaaacaaaagctattacctcaagctggcttacgaggctctccaaggccctgtatcggagttgctcaaaacttcaaagcccgattgggttttttacgatttcgcaaccgagtggttaccaccaatagccaagagcctcaacattccctgtgcacactacaacttaaccgcagcgtggaacaaagtgttcattgatccacccaaggattatcaactgaacaactcaattacgcttcaagacatgtgtctccctcccacgtggcttcctttcaccacaaccgttcatctcaggcctcacgaaatcagaagagcaacaagttctatcaaagattcggacacaggacgcatggcaaattttgatctcagaaaggcatattccagctgcgacatgtttcttctcagaacatgcagagaactcgaaggagaatggttggattatcttgctcacaagtacaaggttcctgtggttccggtagggttggttccaccatccattcagataagggatgttgaagaggaagacaataaccctgactgggtcaaaattaaggattggttggacaaacaagagtcatcatccgtggtttatatagggtttgggagcgagttgaggctgagtcagcaggacgtcaccgagttggctcatggtattgagctttctgggttgcgtttcttttgggctttgaggaacctgcagaaagaggatttgccacatgggtttgaggagagaaccaaggaacgtggcattgtttggaagagttgggcaccccagattaagatcttaggccatgcagctattggaggatgcatcactcactgtggtaccaattctctcgttgagatgcttaattttgggcatgtgcttgtgactcttccctatttgctagaccaagctttgttttcgagggtgctagaggaaaagaaagtgggtattgaggtgccaaggagcgagaaagatgggtcctttactcgagacgatgtggccaagacattaaagttggcaatagtagatgaggaagggagtgattataggaagaatgccaaagaaatgggcaaggttttcagttccacggatcttcatagtcgatacattgacgactgcattgttgctcttcaaaagtacaagactcctaattccaactgttaagcacggctattcatgccagcaaggattccactccagtttcttctctgtttttgttttgcaattaagtttttcttttatttctgcaaatgcttgaacttttatccttaaatatttccaatcttcaatcatcatcatgtgtacgtttagttttgtaataaagaaggttatgagtaattacctaccc

SEQ ID NO: 53516 - protein, 485 aa, Glycine max
  peptide (1)..(485): Ceres Seq. ID no. 14315607
  misc_feature (21)..(485): Homolog of NCBI NO: 37530678 NR Description: putative anthocyanidin-3-glucoside
  misc_feature (23)..(480): Homolog of NCBI NO: 34393985 NR Description: putative UDP-glucosyltransferase
  misc_feature (24)..(479): Homolog of NCBI NO: 34908562 NR Description: putative anthocyanidine rhamnosyl-transferase
  misc_feature (24)..(476): Homolog of NCBI NO: 26452040 NR Description: putative anthocyanidin-3-glucoside
  misc_feature (24)..(476): Homolog of NCBI NO: 15238503 NR Description: UDP-glycosyltransferase family [Arabidopsis
  misc_feature (20)..(469): Homolog of NCBI NO: 18400022 NR Description: glycosyltransferase family [Arabidopsis thaliana]
  misc_feature (20)..(477): Homolog of NCBI NO: 21435782 NR Description: UDP-glucosyltransferase [Stevia rebaudiana]
  misc_feature (24)..(484): Homolog of NCBI NO: 15240534 NR Description: UDP-glycosyltransferase family [Arabidopsis
  misc_feature (20)..(469): Homolog of NCBI NO: 15450577 NR Description: At2g22590/T9I22.3 [Arabidopsis thaliana]
  misc_feature (24)..(479): Homolog of NCBI NO: 20149064 NR Description: putative anthocyanidine rhamnosyl-transferase
SCLPGEKENTLTKTVPSRIDSMPLHIAMLPWLAVGHVNPYLELSKILAQKGHFVTFISTPKNIDGMPKIPETLQPSIKLVRLPLPHTDHHHHLPEDAESTMDIPSNKSYYLKLAYEALQGPVSELLKTSKPDWVFYDFATEWLPPIAKSLNIPCAHYNLTAAWNKVFIDPPKDYQLNNSITLQDMCLPPTWLPFTTTVHLRPHEIRRATSSIKDSDTGRMANFDLRKAYSSCDMFLLRTCRELEGEWLDYLAHKYKVPVVPVGLVPPSIQIRDVEEEDNNPDWVKIKDWLDKQESSSVVYIGFGSELRLSQQDVTELAHGIELSGLRFFWALRNLQKEDLPHGFEERTKERGIVWKSWAPQIKILGHAAIGGCITHCGTNSLVEMLNFGHVLVTLPYLLDQALFSRVLEEKKVGIEVPRSEKDGSFTRDDVAKTLKLAIVDEEGSDYRKNAKEMGKVFSSTDLHSRYIDDCIVALQKYKTPNSNC

SEQ ID NO: 53517 - protein, 464 aa, Glycine max
  peptide (1)..(464): Ceres Seq. ID no. 14315608
  misc_feature (1)..(464): Homolog of NCBI NO: 37530678 NR Description: putative anthocyanidin-3-glucoside
  misc_feature (2)..(459): Homolog of NCBI NO: 34393985 NR Description: putative UDP-glucosyltransferase
  misc_feature (3)..(458): Homolog of NCBI NO: 34908562 NR Description: putative anthocyanidine rhamnosyl-transferase
  misc_feature (3)..(455): Homolog of NCBI NO: 26452040 NR Description: putative anthocyanidin-3-glucoside
  misc_feature (3)..(455): Homolog of NCBI NO: 15238503 NR Description: UDP-glycosyltransferase family [Arabidopsis
  misc_feature (1)..(448): Homolog of NCBI NO: 18400022 NR Description: glycosyltransferase family [Arabidopsis thaliana]
  misc_feature (1)..(456): Homolog of NCBI NO: 21435782 NR Description: UDP-glucosyltransferase [Stevia rebaudiana]
  misc_feature (3)..(463): Homolog of NCBI NO: 15240534 NR Description: UDP-glycosyltransferase family [Arabidopsis
  misc_feature (1)..(448): Homolog of NCBI NO: 15450577 NR Description: At2g22590/T9I22.3 [Arabidopsis thaliana]
  misc_feature (3)..(458): Homolog of NCBI NO: 20149064 NR Description: putative anthocyanidine rhamnosyl-transferase
MPLHIAMLPWLAVGHVNPYLELSKILAQKGHFVTFISTPKNIDGMPKIPETLQPSIKLVRLPLPHTDHHHHLPEDAESTMDIPSNKSYYLKLAYEALQGPVSELLKTSKPDWVFYDFATEWLPPIAKSLNIPCAHYNLTAAWNKVFIDPPKDYQLNNSITLQDMCLPPTWLPFTTTVHLRPHEIRRATSSIKDSDTGRMANFDLRKAYSSCDMFLLRTCRELEGEWLDYLAHKYKVPVVPVGLVPPSIQIRDVEEEDNNPDWVKIKDWLDKQESSSVVYIGFGSELRLSQQDVTELAHGIELSGLRFFWALRNLQKEDLPHGFEERTKERGIVWKSWAPQIKILGHAAIGGCITHCGTNSLVEMLNFGHVLVTLPYLLDQALFSRVLEEKKVGIEVPRSEKDGSFTRDDVAKTLKLAIVDEEGSDYRKNAKEMGKVFSSTDLHSRYIDDCIVALQKYKTPNSNC

SEQ ID NO: 53518 - protein, 458 aa, Glycine max
  peptide (1)..(458): Ceres Seq. ID no. 14315609
  misc_feature (1)..(458): Homolog of NCBI NO: 37530678 NR Description: putative anthocyanidin-3-glucoside
  misc_feature (1)..(453): Homolog of NCBI NO: 34393985 NR Description: putative UDP-glucosyltransferase
  misc_feature (1)..(452): Homolog of NCBI NO: 34908562 NR Description: putative anthocyanidine rhamnosyl-transferase
  misc_feature (1)..(449): Homolog of NCBI NO: 26452040 NR Description: putative anthocyanidin-3-glucoside
  misc_feature (1)..(449): Homolog of NCBI NO: 15238503 NR Description: UDP-glycosyltransferase family [Arabidopsis
  misc_feature (1)..(442): Homolog of NCBI NO: 18400022 NR Description: glycosyltransferase family [Arabidopsis thaliana]
  misc_feature (1)..(450): Homolog of NCBI NO: 21435782 NR Description: UDP-glucosyltransferase [Stevia rebaudiana]
  misc_feature (1)..(457): Homolog of NCBI NO: 15240534 NR Description: UDP-glycosyltransferase family [Arabidopsis
  misc_feature (1)..(442): Homolog of NCBI NO: 15450577 NR Description: At2g22590/T9I22.3 [Arabidopsis thaliana]
  misc_feature (1)..(452): Homolog of NCBI NO: 20149064 NR Description: putative anthocyanidine rhamnosyl-transferase
MLPWLAVGHVNPYLELSKILAQKGHFVTFISTPKNIDGMPKIPETLQPSIKLVRLPLPHTDHHHHLPEDAESTMDIPSNKSYYLKLAYEALQGPVSELLKTSKPDWVFYDFATEWLPPIAKSLNIPCAHYNLTAAWNKVFIDPPKDYQLNNSITLQDMCLPPTWLPFTTTVHLRPHEIRRATSSIKDSDTGRMANFDLRKAYSSCDMFLLRTCRELEGEWLDYLAHKYKVPVVPVGLVPPSIQIRDVEEEDNNPDWVKIKDWLDKQESSSVVYIGFGSELRLSQQDVTELAHGIELSGLRFFWALRNLQKEDLPHGFEERTKERGIVWKSWAPQIKILGHAAIGGCITHCGTNSLVEMLNFGHVLVTLPYLLDQALFSRVLEEKKVGIEVPRSEKDGSFTRDDVAKTLKLAIVDEEGSDYRKNAKEMGKVFSSTDLHSRYIDDCIVALQKYKTPNSNC

SEQ ID NO: 53519 - DNA, 1371 bp, Glycine max
  misc_feature (1)..(1371): Ceres Seq. ID no. 14311005
ttaactctgcatctggccaaaatgtccaggagtcagttgactgagattatctctgagctgaagggaatggctacacagaacaaggaactggctcgtcagctgttgctttcaaggccacagttgcccaaggctctttttcaggctcagataatgctaggaatggtgacttcccaagtgttacaaatgccgaaccttaggctggtttcagatcaaacctcacagtctttaatgaatgaaggccagctgggtcagccatcattggttcaaactctgtcaggccttcctcctcctgggcagggcaagttgcagcctggtttgacaccttatgctcaagaaggccaagtcaacaccatacctcataatcctttggctcctaatcaattaactgcacatccaaagcctccagtgcagcctcggattccccttcagcaacatccaaacaatcttgtactgccaggaacattgtcagggcagtctaatttaatgcttccttctgcacgtcctccaggtttgggcagtttgtctgttaggcctctaattcaaccgggaacttcaactgctctgaaccagcaaatgcatccctctttgctacagcattctgtacatgttggaaactcaactgtaggacataatattcaaatgcattgcccctccatgtcatcagcaaattctcagttactgagtaaaggtgataaatcttctaaagttattgaggatttaaattgggccaagagagctaatacacattcaaaatcaaacattcctttgggagtagagaaaacaaacatggttcatgattcttcagaatcttttactcggccgtcaaaggtcatgaaattggatgagggaaggagtgcccctctttcttcaggaatttcagacatgcctttcaccgatggatcatctcatatcctgggaagaagttcattacctgtacatgcagctcctaaagcggaagggcaatactctgagcaacaattttctcagcttccacctgatgtggagtctgttttgctgcaacaagtattgaatctgacaccagaacaattgagttccttgccaccagatcagcaacaacaggtcattcagctccagcaggctctacggcgagatcagatacagccctcataacaaacagggaactcatcaacagttcaaatagcataaacttatttgtatactagcattttctgtagattagcatcagaatatccaaattctttcaaccactattgcttctttttgtaatttgttttctaattccttgtccaaatattcgatgtagcattgaggggctccagatgggcgtataaatcatttagaagagatgtacaataataattttgacgataaatttttttccgttgacac

SEQ ID NO: 53520 - protein, 376 aa, Glycine max
  peptide (1)..(376): Ceres Seq. ID no. 14311006
  misc_feature (333)..(370): Homolog of NCBI NO: 22330606 NR Description: proline-rich protein family [Arabidopsis
  misc_feature (1)..(193): Homolog of NCBI NO: 22330606 NR Description: proline-rich protein family [Arabidopsis
  misc_feature (308)..(376): Homolog of NCBI NO: 22330574 NR Description: cleavage stimulation factor, putative
  misc_feature (308)..(376): Homolog of NCBI NO: 21591633 NR Description: cleavage stimulation factor 64 [Arabidopsis
  misc_feature (1)..(232): Homolog of NCBI NO: 22330574 NR Description: cleavage stimulation factor, putative
  misc_feature (1)..(232): Homolog of NCBI NO: 21591633 NR Description: cleavage stimulation factor 64 [Arabidopsis
LTLHLAKMSRSQLTEIISELKGMATQNKELARQLLLSRPQLPKALFQAQIMLGMVTSQVLQMPNLRLVSDQTSQSLMNEGQLGQPSLVQTLSGLPPPGQGKLQPGLTPYAQEGQVNTIPHNPLAPNQLTAHPKPPVQPRIPLQQHPNNLVLPGTLSGQSNLMLPSARPPGLGSLSVRPLIQPGTSTALNQQMHPSLLQHSVHVGNSTVGHNIQMHCPSMSSANSQLLSKGDKSSKVIEDLNWAKRANTHSKSNIPLGVEKTNMVHDSSESFTRPSKVMKLDEGRSAPLSSGISDMPFTDGSSHILGRSSLPVHAAPKAEGQYSEQQFSQLPPDVESVLLQQVLNLTPEQLSSLPPDQQQQVIQLQQALRRDQIQPS

SEQ ID NO: 53521 - protein, 369 aa, Glycine max
  peptide (1)..(369): Ceres Seq. ID no. 14311007
  misc_feature (326)..(363): Homolog of NCBI NO: 22330606 NR Description: proline-rich protein family [Arabidopsis
  misc_feature (1)..(186): Homolog of NCBI NO: 22330606 NR Description: proline-rich protein family [Arabidopsis
  misc_feature (301)..(369): Homolog of NCBI NO: 22330574 NR Description: cleavage stimulation factor, putative
  misc_feature (301)..(369): Homolog of NCBI NO: 21591633 NR Description: cleavage stimulation factor 64 [Arabidopsis
  misc_feature (1)..(225): Homolog of NCBI NO: 22330574 NR Description: cleavage stimulation factor, putative
  misc_feature (1)..(225): Homolog of NCBI NO: 21591633 NR Description: cleavage stimulation factor 64 [Arabidopsis
MSRSQLTEIISELKGMATQNKELARQLLLSRPQLPKALFQAQIMLGMVTSQVLQMPNLRLVSDQTSQSLMNEGQLGQPSLVQTLSGLPPPGQGKLQPGLTPYAQEGQVNTIPHNPLAPNQLTAHPKPPVQPRIPLQQHPNNLVLPGTLSGQSNLMLPSARPPGLGSLSVRPLIQPGTSTALNQQMHPSLLQHSVHVGNSTVGHNIQMHCPSMSSANSQLLSKGDKSSKVIEDLNWAKRANTHSKSNIPLGVEKTNMVHDSSESFTRPSKVMKLDEGRSAPLSSGISDMPFTDGSSHILGRSSLPVHAAPKAEGQYSEQQFSQLPPDVESVLLQQVLNLTPEQLSSLPPDQQQQVIQLQQALRRDQIQPS

SEQ ID NO: 53522 - protein, 354 aa, Glycine max
  peptide (1)..(354): Ceres Seq. ID no. 14311008
  misc_feature (311)..(348): Homolog of NCBI NO: 22330606 NR Description: proline-rich protein family [Arabidopsis
  misc_feature (1)..(171): Homolog of NCBI NO: 22330606 NR Description: proline-rich protein family [Arabidopsis
  misc_feature (286)..(354): Homolog of NCBI NO: 22330574 NR Description: cleavage stimulation factor, putative
  misc_feature (286)..(354): Homolog of NCBI NO: 21591633 NR Description: cleavage stimulation factor 64 [Arabidopsis
  misc_feature (1)..(210): Homolog of NCBI NO: 22330574 NR Description: cleavage stimulation factor, putative
  misc_feature (1)..(210): Homolog of NCBI NO: 21591633 NR Description: cleavage stimulation factor 64 [Arabidopsis
MATQNKELARQLLLSRPQLPKALFQAQIMLGMVTSQVLQMPNLRLVSDQTSQSLMNEGQLGQPSLVQTLSGLPPPGQGKLQPGLTPYAQEGQVNTIPHNPLAPNQLTAHPKPPVQPRIPLQQHPNNLVLPGTLSGQSNLMLPSARPPGLGSLSVRPLIQPGTSTALNQQMHPSLLQHSVHVGNSTVGHNIQMHCPSMSSANSQLLSKGDKSSKVIEDLNWAKRANTHSKSNIPLGVEKTNMVHDSSESFTRPSKVMKLDEGRSAPLSSGISDMPFTDGSSHILGRSSLPVHAAPKAEGQYSEQQFSQLPPDVESVLLQQVLNLTPEQLSSLPPDQQQQVIQLQQALRRDQIQPS

SEQ ID NO: 53523 - protein, 300 aa, Glycine max
  peptide (1)..(300): Ceres Seq. ID no. 14311009
  misc_feature (257)..(294): Homolog of NCBI NO: 22330606 NR Description: proline-rich protein family [Arabidopsis
  misc_feature (1)..(117): Homolog of NCBI NO: 22330606 NR Description: proline-rich protein family [Arabidopsis
  misc_feature (232)..(300): Homolog of NCBI NO: 22330574 NR Description: cleavage stimulation factor, putative
  misc_feature (232)..(300): Homolog of NCBI NO: 21591633 NR Description: cleavage stimulation factor 64 [Arabidopsis
  misc_feature (1)..(156): Homolog of NCBI NO: 22330574 NR Description: cleavage stimulation factor, putative
  misc_feature (1)..(156): Homolog of NCBI NO: 21591633 NR Description: cleavage stimulation factor 64 [Arabidopsis
MNEGQLGQPSLVQTLSGLPPPGQGKLQPGLTPYAQEGQVNTIPHNPLAPNQLTAHPKPPVQPRIPLQQHPNNLVLPGTLSGQSNLMLPSARPPGLGSLSVRPLIQPGTSTALNQQMHPSLLQHSVHVGNSTVGHNIQMHCPSMSSANSQLLSKGDKSSKVIEDLNWAKRANTHSKSNIPLGVEKTNMVHDSSESFTRPSKVMKLDEGRSAPLSSGISDMPFTDGSSHILGRSSLPVHAAPKAEGQYSEQQFSQLPPDVESVLLQQVLNLTPEQLSSLPPDQQQQVIQLQQALRRDQIQPS

SEQ ID NO: 53524 - DNA, 1743 bp, Glycine max
  misc_feature (1)..(1743): Ceres Seq. ID no. 14301413
gattctccttgaaggcactgcagcataccacaaaaccccttgtccctctctcacgttaaacggcagagccactgcaacaagaagcagcagagttcgccgctgctccgcaaccttaccctatcaattttcgtccttgttttcgtaattgcagcgaagaatggggaagcgtaaggagcggattcagaacccggaacccttcgatccgtacggcgccgaccccgcgaaaacgaagaagcgctcgaaggcgccgaagcggcaccagcaggaggagcagttcatcgctcccaaactcagctccaagatcatgaagcaggcgctaatccagcagaaggaggaggagaaggaggaggcgcccgagaacaacgccgcaaatttattcgaagaggttccggatgtcgaggaagacggcggcgacgacatcgacgactttgccgggttctccgaaacgcagagtcagttcgccgaatatgatgaggaaattaatgaggaggatgagagactaatggaagcatttgcattgaaggagcctggtcagcagaaaacacttgctgacctcattgtccaaagaataaaagaaaaggatgcgtctgttgcttcagaaaatcgacccgttccaaaattggataactccataattgacatatacaagggggttgggactcatctcagcagatatacaataggcaaaatacccaaggcattcaaacacattccctctatgcaactttgggaggaggtcttgtatataaccgaacctgagaattggtctccaaatgctctttatcaagccactaggatttttgcttctaattttggtgcaaaaaaggcagagcgcttctacaagcttgtgttgcttccaagagtgagagaagatataaggaagaacaaacggctgcattttgctttatatcaaactctgaaaaaggctttgtacaaacctgctgcattctttaagggcatactgttttcactatgcgagtcacgcacttgcactcttagggaagcagtcatcataggaagcattatagaaaaggtttctattcctccacttcattcaagtgttgcgctattgaagctttctggaatggaatattgtggcaccacaagctatttcataaagcttcttctggagaaaaaatatgctttgccatatcgtgtggttgatgcagttgttgctcattttacaagatttctcaatgaaaccaggataatgcctgttatatggcaccagtcacttcttgcttttgtgcagaggtacaaaaatgagctgcagaaggaagataaggatagattaaggaatctactggaaaagcaaaaacataaattggttacacctgaaattagtagagagctagaccacagccgcaaccgaggtgaaaaggaggaagatcttatgtcaatttccagtccagtatatgtgataaacaagactattgaagaagatagatttgacattccagatgtaccaatggaggaggattaatttattgtggatttttcatcgctattcacttgggagggagaaaatgtttagagacatgtcctcgtttagtttcacaagggtgcagttttgagcgtcagcaatcttgtactgcaatgcatgggatttataattattatttggccattttatattttttcagtggttttttgacaaatgcaatctttttctgatgtattcttaccttaagtgccctaaaatacaattcaacttgctataatatttctagtgttttaaatgtg

SEQ ID NO: 53525 - protein, 441 aa, Glycine max
  peptide (1)..(441): Ceres Seq. ID no. 14301414
  misc_feature (119)..(416): Pfam Name: Bystin Pfam Description: Bystin
  misc_feature (122)..(399): Homolog of NCBI NO: 15011984 NR Description: bystin [Homo sapiens]
  misc_feature (122)..(399): Homolog of NCBI NO: 15208645 NR Description: bystin [Homo sapiens]
  misc_feature (1)..(405): Homolog of NCBI NO: 31206059 NR Description: ENSANGP00000010976 [Anopheles gambiae]
  misc_feature (108)..(399): Homolog of NCBI NO: 33873575 NR Description: BYSL protein [Homo sapiens]
  misc_feature (108)..(399): Homolog of NCBI NO: 32996727 NR Description: bystin-like [Rattus norvegicus]
  misc_feature (108)..(399): Homolog of NCBI NO: 38566213 NR Description: BYSL protein [Homo sapiens]
  misc_feature (23)..(399): Homolog of NCBI NO: 29792064 NR Description: bystin-like [Homo sapiens]
  misc_feature (20)..(415): Homolog of NCBI NO: 31419416 NR Description: Unknown (protein for MGC:63889) [Danio rerio]
  misc_feature (1)..(441): Homolog of NCBI NO: 15222394 NR Description: bystin -related [Arabidopsis thaliana]
  misc_feature (1)..(441): Homolog of NCBI NO: 20268780 NR Description: putative bystin [Arabidopsis thaliana]
MGKRKERIQNPEPFDPYGADPAKTKKRSKAPKRHQQEEQFIAPKLSSKIMKQALIQQKEEEKEEAPENNAANLFEEVPDVEEDGGDDIDDFAGFSETQSQFAEYDEEINEEDERLMEAFALKEPGQQKTLADLIVQRIKEKDASVASENRPVPKLDNSIIDIYKGVGTHLSRYTIGKIPKAFKHIPSMQLWEEVLYITEPENWSPNALYQATRIFASNFGAKKAERFYKLVLLPRVREDIRKNKRLHFALYQTLKKALYKPAAFFKGILFSLCESRTCTLREAVIIGSIIEKVSIPPLHSSVALLKLSGMEYCGTTSYFIKLLLEKKYALPYRVVDAVVAHFTRFLNETRIMPVIWHQSLLAFVQRYKNELQKEDKDRLRNLLEKQKHKLVTPEISRELDHSRNRGEKEEDLMSISSPVYVINKTIEEDRFDIPDVPMEED

SEQ ID NO: 53526 - protein, 392 aa, Glycine max
  peptide (1)..(392): Ceres Seq. ID no. 14301415
  misc_feature (70)..(367): Pfam Name: Bystin Pfam Description: Bystin
  misc_feature (73)..(350): Homolog of NCBI NO: 15011984 NR Description: bystin [Homo sapiens]
  misc_feature (73)..(350): Homolog of NCBI NO: 15208645 NR Description: bystin [Homo sapiens]
  misc_feature (1)..(356): Homolog of NCBI NO: 31206059 NR Description: ENSANGP00000010976 [Anopheles gambiae]
  misc_feature (59)..(350): Homolog of NCBI NO: 33873575 NR Description: BYSL protein [Homo sapiens]
  misc_feature (59)..(350): Homolog of NCBI NO: 32996727 NR Description: bystin-like [Rattus norvegicus]
  misc_feature (59)..(350): Homolog of NCBI NO: 38566213 NR Description: BYSL protein [Homo sapiens]
  misc_feature (1)..(350): Homolog of NCBI NO: 29792064 NR Description: bystin-like [Homo sapiens]
  misc_feature (1)..(366): Homolog of NCBI NO: 31419416 NR Description: Unknown (protein for MGC:63889) [Danio rerio]
  misc_feature (1)..(392): Homolog of NCBI NO: 15222394 NR Description: bystin -related [Arabidopsis thaliana]
  misc_feature (1)..(392): Homolog of NCBI NO: 20268780 NR Description: putative bystin [Arabidopsis thaliana]
MKQALIQQKEEEKEEAPENNAANLFEEVPDVEEDGGDDIDDFAGFSETQSQFAEYDEEINEEDERLMEAFALKEPGQQKTLADLIVQRIKEKDASVASENRPVPKLDNSIIDIYKGVGTHLSRYTIGKIPKAFKHIPSMQLWEEVLYITEPENWSPNALYQATRIFASNFGAKKAERFYKLVLLPRVREDIRKNKRLHFALYQTLKKALYKPAAFFKGILFSLCESRTCTLREAVIIGSIIEKVSIPPLHSSVALLKLSGMEYCGTTSYFIKLLLEKKYALPYRVVDAVVAHFTRFLNETRIMPVIWHQSLLAFVQRYKNELQKEDKDRLRNLLEKQKHKLVTPEISRELDHSRNRGEKEEDLMSISSPVYVINKTIEEDRFDIPDVPMEED

SEQ ID NO: 53527 - protein, 326 aa, Glycine max
  peptide (1)..(326): Ceres Seq. ID no. 14301416
  misc_feature (4)..(301): Pfam Name: Bystin Pfam Description: Bystin
  misc_feature (7)..(284): Homolog of NCBI NO: 15011984 NR Description: bystin [Homo sapiens]
  misc_feature (7)..(284): Homolog of NCBI NO: 15208645 NR Description: bystin [Homo sapiens]
  misc_feature (1)..(290): Homolog of NCBI NO: 31206059 NR Description: ENSANGP00000010976 [Anopheles gambiae]
  misc_feature (1)..(284): Homolog of NCBI NO: 33873575 NR Description: BYSL protein [Homo sapiens]
  misc_feature (1)..(284): Homolog of NCBI NO: 32996727 NR Description: bystin-like [Rattus norvegicus]
  misc_feature (1)..(284): Homolog of NCBI NO: 38566213 NR Description: BYSL protein [Homo sapiens]
  misc_feature (1)..(284): Homolog of NCBI NO: 29792064 NR Description: bystin-like [Homo sapiens]
  misc_feature (1)..(300): Homolog of NCBI NO: 31419416 NR Description: Unknown (protein for MGC:63889) [Danio rerio]
  misc_feature (1)..(326): Homolog of NCBI NO: 15222394 NR Description: bystin -related [Arabidopsis thaliana]
  misc_feature (1)..(326): Homolog of NCBI NO: 20268780 NR Description: putative bystin [Arabidopsis thaliana]
MEAFALKEPGQQKTLADLIVQRIKEKDASVASENRPVPKLDNSIIDIYKGVGTHLSRYTIGKIPKAFKHIPSMQLWEEVLYITEPENWSPNALYQATRIFASNFGAKKAERFYKLVLLPRVREDIRKNKRLHFALYQTLKKALYKPAAFFKGILFSLCESRTCTLREAVIIGSIIEKVSIPPLHSSVALLKLSGMEYCGTTSYFIKLLLEKKYALPYRVVDAVVAHFTRFLNETRIMPVIWHQSLLAFVQRYKNELQKEDKDRLRNLLEKQKHKLVTPEISRELDHSRNRGEKEEDLMSISSPVYVINKTIEEDRFDIPDVPMEED

SEQ ID NO: 53528 - DNA, 1547 bp, Glycine max
  misc_feature (1)..(1547): Ceres Seq. ID no. 15174780
tcgaaaaagaaaaaaagagaagggggaaatctcttcttcaatggcggcagagtcatctcgcagtagcgctaaacgcccctttatggaagaagacgacaatgaattctccaaaaagccaccagaaaaaagggttaggtttccaaagggaaagaaagtgaagccaggagatgaagtggtggtggacaaagcaaatgttgaggagggtgaagttgacttggtgaatgctaaaactgccaccaatgctgcaaaagagcgggaaaaactcagaaggtttctaaagggaaagaaagtgaagccaggagatgaagtggtggtggacaaagcaaatgttgaggagggtgaagaagttgacttgatgaatcctaaaattgctgctgccaaagaacgggcaaaactcagaaatcaaattacttctgaactccttagtgagggcgctggaggtatcacaaacgatttatcggctgctgaagtgacatatgaggataacgagaattttgttgatgatgggattcaaattgagcctttcaacctagagaaagaaagggaagaaggttattttgatgctgcaggaaattttgttgaatatgtaagagagaatgagattaaggatgcatggcttgataatgttgaagttgatccaaaatatgctgcattaagctctgtagcaacaaatgatgaagatgagggccccccagacctttcttctaaagatattggaatcatgaagaggcgcattgcaaatgttcttgaacctggggaaacggtcttgcaagccttaagaaggttaaaaggtaacagtgatagaaaggcaaaaatgtctgctgagactaagattgtatttgaccagctaactgaggatgctatgaagctgatggagaatggtgaatacaatgtttatcatgaaaagcaagaggtttttgatcgtgaagcagaaggatatgagaagttagcccaggcaaattatgatatgtttgctgatgatgacgagcatgataccagtaagccatctacagatgaaaataatgcagtcagtcaatcttcttcagttgccataaattctggtcctgagggtggagcatcacaaaacgattatgtgtatgatgaatcttctgggtactattacagcagcactttgggctattattatgatccaaatacagggctttattgctcagcagcatcagggcaatggtactcatataatgaggagactagcgcatatgaagaagttcacgaggttgcatccaatgtgagttgagtgactagtttaaggggagaataggctatttagcatagccacaatcactgtctcagtggctcatgtacagaccgaagcactcttgatctttttgtacgttatgggggattttcttcttaggtgctactgctaacagttgtgtttttatctctttaaggttcctgttttatagttccttaaacttttcgcctaaaaattacttagaatgatcccttgaagttaggagctgtacaatgtttactcttatcaatttgtgagttatatgcagttttgccttcaaattgcaaat

SEQ ID NO: 53529 - protein, 418 aa, Glycine max
  peptide (1)..(418): Ceres Seq. ID no. 15174781
  misc_feature (338)..(407): Homolog of NCBI NO: 17979131 NR Description: unknown protein [Arabidopsis thaliana]
  misc_feature (100)..(322): Homolog of NCBI NO: 17505208 NR Description: CD2 antigen (cytoplasmic tail) binding protein 2
  misc_feature (100)..(349): Homolog of NCBI NO: 5174409 NR Description: CD2 antigen (cytoplasmic tail) binding protein 2
  misc_feature (105)..(270): Homolog of NCBI NO: 39850142 NR Description: Unknown (protein for MGC:76157) [Silurana
  misc_feature (100)..(322): Homolog of NCBI NO: 34859280 NR Description: similar to CD2 antigen (cytoplasmic tail) binding
  misc_feature (110)..(347): Homolog of NCBI NO: 28279437 NR Description: Similar to CD2 antigen (cytoplasmic tail) binding
  misc_feature (111)..(373): Homolog of NCBI NO: 3355658 NR Description: SMC2orf [Podocoryne carnea]
  misc_feature (86)..(415): Homolog of NCBI NO: 9955526 NR Description: putative protein [Arabidopsis thaliana]
  misc_feature (86)..(415): Homolog of NCBI NO: 18415962 NR Description: expressed protein [Arabidopsis thaliana]
RKRKKEKGEISSSMAAESSRSSAKRPFMEEDDNEFSKKPPEKRVRFPKGKKVKPGDEVVVDKANVEEGEVDLVNAKTATNAAKEREKLRRFLKGKKVKPGDEVVVDKANVEEGEEVDLMNPKIAAAKERAKLRNQITSELLSEGAGGITNDLSAAEVTYEDNENFVDDGIQIEPFNLEKEREEGYFDAAGNFVEYVRENEIKDAWLDNVEVDPKYAALSSVATNDEDEGPPDLSSKDIGIMKRRIANVLEPGETVLQALRRLKGNSDRKAKMSAETKIVFDQLTEDAMKLMENGEYNVYHEKQEVFDREAEGYEKLAQANYDMFADDDEHDTSKPSTDENNAVSQSSSVAINSGPEGGASQNDYVYDESSGYYYSSTLGYYYDPNTGLYCSAASGQWYSYNEETSAYEEVHEVASNVS

SEQ ID NO: 53530 - protein, 405 aa, Glycine max
  peptide (1)..(405): Ceres Seq. ID no. 15174782
  misc_feature (325)..(394): Homolog of NCBI NO: 17979131 NR Description: unknown protein [Arabidopsis thaliana]
  misc_feature (87)..(309): Homolog of NCBI NO: 17505208 NR Description: CD2 antigen (cytoplasmic tail) binding protein 2
  misc_feature (87)..(336): Homolog of NCBI NO: 5174409 NR Description: CD2 antigen (cytoplasmic tail) binding protein 2
  misc_feature (92)..(257): Homolog of NCBI NO: 39850142 NR Description: Unknown (protein for MGC:76157) [Silurana
  misc_feature (87)..(309): Homolog of NCBI NO: 34859280 NR Description: similar to CD2 antigen (cytoplasmic tail) binding
  misc_feature (97)..(334): Homolog of NCBI NO: 28279437 NR Description: Similar to CD2 antigen (cytoplasmic tail) binding
  misc_feature (98)..(360): Homolog of NCBI NO: 3355658 NR Description: SMC2orf [Podocoryne carnea]
  misc_feature (73)..(402): Homolog of NCBI NO: 9955526 NR Description: putative protein [Arabidopsis thaliana]
  misc_feature (73)..(402): Homolog of NCBI NO: 18415962 NR Description: expressed protein [Arabidopsis thaliana]
MAAESSRSSAKRPFMEEDDNEFSKKPPEKRVRFPKGKKVKPGDEVVVDKANVEEGEVDLVNAKTATNAAKEREKLRRFLKGKKVKPGDEVVVDKANVEEGEEVDLMNPKIAAAKERAKLRNQITSELLSEGAGGITNDLSAAEVTYEDNENFVDDGIQIEPFNLEKEREEGYFDAAGNFVEYVRENEIKDAWLDNVEVDPKYAALSSVATNDEDEGPPDLSSKDIGIMKRRIANVLEPGETVLQALRRLKGNSDRKAKMSAETKIVFDQLTEDAMKLMENGEYNVYHEKQEVFDREAEGYEKLAQANYDMFADDDEHDTSKPSTDENNAVSQSSSVAINSGPEGGASQNDYVYDESSGYYYSSTLGYYYDPNTGLYCSAASGQWYSYNEETSAYEEVHEVASNVS

SEQ ID NO: 53531 - protein, 391 aa, Glycine max
  peptide (1)..(391): Ceres Seq. ID no. 15174783
  misc_feature (311)..(380): Homolog of NCBI NO: 17979131 NR Description: unknown protein [Arabidopsis thaliana]
  misc_feature (73)..(295): Homolog of NCBI NO: 17505208 NR Description: CD2 antigen (cytoplasmic tail) binding protein 2
  misc_feature (73)..(322): Homolog of NCBI NO: 5174409 NR Description: CD2 antigen (cytoplasmic tail) binding protein 2
  misc_feature (78)..(243): Homolog of NCBI NO: 39850142 NR Description: Unknown (protein for MGC:76157) [Silurana
  misc_feature (73)..(295): Homolog of NCBI NO: 34859280 NR Description: similar to CD2 antigen (cytoplasmic tail) binding
  misc_feature (83)..(320): Homolog of NCBI NO: 28279437 NR Description: Similar to CD2 antigen (cytoplasmic tail) binding
  misc_feature (84)..(346): Homolog of NCBI NO: 3355658 NR Description: SMC2orf [Podocoryne carnea]
  misc_feature (59)..(388): Homolog of NCBI NO: 9955526 NR Description: putative protein [Arabidopsis thaliana]
  misc_feature (59)..(388): Homolog of NCBI NO: 18415962 NR Description: expressed protein [Arabidopsis thaliana]
MEEDDNEFSKKPPEKRVRFPKGKKVKPGDEVVVDKANVEEGEVDLVNAKTATNAAKEREKLRRFLKGKKVKPGDEVVVDKANVEEGEEVDLMNPKIAAAKERAKLRNQITSELLSEGAGGITNDLSAAEVTYEDNENFVDDGIQIEPFNLEKEREEGYFDAAGNFVEYVRENEIKDAWLDNVEVDPKYAALSSVATNDEDEGPPDLSSKDIGIMKRRIANVLEPGETVLQALRRLKGNSDRKAKMSAETKIVFDQLTEDAMKLMENGEYNVYHEKQEVFDREAEGYEKLAQANYDMFADDDEHDTSKPSTDENNAVSQSSSVAINSGPEGGASQNDYVYDESSGYYYSSTLGYYYDPNTGLYCSAASGQWYSYNEETSAYEEVHEVASNVS

SEQ ID NO: 53532 - DNA, 821 bp, Glycine max
  misc_feature (1)..(821): Ceres Seq. ID no. 14310659
actcaagcacaacatctctatcgagtaaattaactatgaagcctaccctactattatccctttccttcctgcctctctttgctttcctggctctttcagaagatgttgaacaagttgtggacataagtggcaaccccattttcccaggtggcacatattacattatgccatcaacttggggcgctgccggtggtggattgaaactaggccggacaggaaactcaaactgcccagttactgttttgcaagattactcagaaatcttccgtggcacaccagtcaaattcagcatacctgggataagccctggaatcatctttacaggtactccacttgaaatcgagttcgcagagaaaccttattgtgctgaatcctccaaatgggtggcgtttgtggacaatgaaatccaaaaggcatgtgtgggtattggtggtcctgaaggtcatcctggtcaacaaacatttagtggcacatttagcattcagaaatataaatttggatacaaacttgtgttctgtatcactggctcaggcacttgtttagatattggaaggtttgatgccaaaaatggtgagggaggaagacgtttgaatctcactgagcatgaggccttcgacattgttttcatagaagcttctaaggttgatggaattatcaagtccgtagtttgaatcaaatcaaataatgtcaagggtagctagatagtgttgagttaatgcttaatcatatgtttgtcgttgtgatatgcattaagtactctgctcccggttgctaacaaaaccccaatgcaaaaataagtgataaaataatggttttgcttt

SEQ ID NO: 53533 - protein, 222 aa, Glycine max
  peptide (1)..(222): Ceres Seq. ID no. 14310660
  misc_feature (55)..(210): Pfam Name: Trypsin and protease inhibitor Pfam Description: Trypsin and protease inhibitor
SSTTSLSSKLTMKPTLLLSLSFLPLFAFLALSEDVEQVVDISGNPIFPGGTYYIMPSTWGAAGGGLKLGRTGNSNCPVTVLQDYSEIFRGTPVKFSIPGISPGIIFTGTPLEIEFAEKPYCAESSKWVAFVDNEIQKACVGIGGPEGHPGQQTFSGTFSIQKYKFGYKLVFCITGSGTCLDIGRFDAKNGEGGRRLNLTEHEAFDIVFIEASKVDGIIKSVV

SEQ ID NO: 53534 - protein, 211 aa, Glycine max
  peptide (1)..(211): Ceres Seq. ID no. 14310661
  misc_feature (44)..(199): Pfam Name: Trypsin and protease inhibitor Pfam Description: Trypsin and protease inhibitor
MKPTLLLSLSFLPLFAFLALSEDVEQVVDISGNPIFPGGTYYIMPSTWGAAGGGLKLGRTGNSNCPVTVLQDYSEIFRGTPVKFSIPGISPGIIFTGTPLEIEFAEKPYCAESSKWVAFVDNEIQKACVGIGGPEGHPGQQTFSGTFSIQKYKFGYKLVFCITGSGTCLDIGRFDAKNGEGGRRLNLTEHEAFDIVFIEASKVDGIIKSVV

SEQ ID NO: 53535 - protein, 168 aa, Glycine max
  peptide (1)..(168): Ceres Seq. ID no. 14310662
  misc_feature (1)..(156): Pfam Name: Trypsin and protease inhibitor Pfam Description: Trypsin and protease inhibitor
MPSTWGAAGGGLKLGRTGNSNCPVTVLQDYSEIFRGTPVKFSIPGISPGIIFTGTPLEIEFAEKPYCAESSKWVAFVDNEIQKACVGIGGPEGHPGQQTFSGTFSIQKYKFGYKLVFCITGSGTCLDIGRFDAKNGEGGRRLNLTEHEAFDIVFIEASKVDGIIKSVV

SEQ ID NO: 53536 - DNA, 1418 bp, Glycine max
  misc_feature (1)..(1418): Ceres Seq. ID no. 14303113
taattgttatttttatataccagtgactgtccctgtaactcttgacatgctcttgcacatggaccgcagtagtaaatcatgcacgaccttgtacgtgttgtagaggttcctggtgtatcgatggaactttgtggtgggactcatgtccgtaatacttctgaaattcgtggttttaaaattatctcagaacagggtattgcatctggaatcagacgtatcgaagctgtagctggggaagctttcattgaatatatcaatgcccgagacttttatctgaagcagctatgttccactctcaaagttaaaccagaagaagtgacaacaaggatagaaaacctattagaggagttacgggtagtgagaaatgaaaattctgctgtgcgtgcaaaagcagcaatctacaaagcctcggtcattgcaagcaaagcattgttggtgggaaattcaaaacagtacagggtactagttgagtgctttgatgatgttgatgctgagtcacttaaaagtgccgcagaatatttactggaaacactaacagatccagcagctgtgatactaggctcatgtccaggtgaagggaaggttagtctagttgctgcttttactccaggggtggttgatcaggggattcaggcaggaaagtttattggacaaatagcaaaattatgtggtggtggaggaggtggaaggccaaattttgctcaggctggtgggaggaagcctgaaaatttggcaagtgcccttgataaggctcggtcagagcttatagccactctatgtgaaaaagggaattgaatttaagtacacttagcagatagatctttttatgctaaagcagcagaaaatattgattctctgttgtcgaagaattcatcacaaaacaattcacaagcaaaaggggcggaagctgctgaagttttaacgagttttcttgcaattccagggggcatgtaattgaagtttcaaaatagtatagagcatttgttcgtgtgactttattctcctgacaacctggcctgcattcacacattccaacttgtaaattttgacatgcgcatctcagattggttgcaggatgtaagtgcaaacactatatatatacacctgaaagatagttgagagtgaatgacggcggtggattcactcctttctcttttgattgccttggaggaagttgggaccccatagaattaaaagtgatagaactgaaggttaaactgtttggtgaaagtaagtgaatgatgttatgtctagcaacttgacggtcaagaaaattgtcaattgttgtgggtgaaacgctacttaaaaagaaagaaaaaatccatgattatcccggatgtgaaattgtgttatagaattatgtcactaaacggtagatgagaaattgtcacgtcccaaaatatggcctattttatgtc

SEQ ID NO: 53537 - protein, 238 aa, Glycine max
  peptide (1)..(238): Ceres Seq. ID no. 14303114
  misc_feature (154)..(226): Pfam Name: DHHA1 domain Pfam Description: DHHA1 domain
  misc_feature (5)..(229): Homolog of NCBI NO: 34222740 NR Description: Alanyl-tRNA synthetase (Alanine--tRNA ligase)
  misc_feature (5)..(233): Homolog of NCBI NO: 16331117 NR Description: alanyl-tRNA synthetase [Synechocystis sp. PCC
  misc_feature (3)..(233): Homolog of NCBI NO: 33866890 NR Description: Alanyl-tRNA synthetase [Synechococcus sp. WH
  misc_feature (5)..(233): Homolog of NCBI NO: 37521917 NR Description: alanyl-tRNA synthetase [Gloeobacter violaceus]
  misc_feature (3)..(229): Homolog of NCBI NO: 33864421 NR Description: Alanyl-tRNA synthetase:DHHA1 domain
  misc_feature (3)..(233): Homolog of NCBI NO: 23125083 NR Description: hypothetical protein [Nostoc punctiforme]
  misc_feature (3)..(233): Homolog of NCBI NO: 17229910 NR Description: alanyl-tRNA synthetase [Nostoc sp. PCC 7120]
  misc_feature (3)..(230): Homolog of NCBI NO: 23041239 NR Description: hypothetical protein [Trichodesmium erythraeum
  misc_feature (5)..(236): Homolog of NCBI NO: 30688660 NR Description: alanine--tRNA ligase -related [Arabidopsis
  misc_feature (5)..(236): Homolog of NCBI NO: 10177227 NR Description: alanyl-tRNA synthetase [Arabidopsis thaliana]
MHDLVRVVEVPGVSMELCGGTHVRNTSEIRGFKIISEQGIASGIRRIEAVAGEAFIEYINARDFYLKQLCSTLKVKPEEVTTRIENLLEELRVVRNENSAVRAKAAIYKASVIASKALLVGNSKQYRVLVECFDDVDAESLKSAAEYLLETLTDPAAVILGSCPGEGKVSLVAAFTPGVVDQGIQAGKFIGQIAKLCGGGGGGRPNFAQAGGRKPENLASALDKARSELIATLCEKGN

SEQ ID NO: 53538 - protein, 224 aa, Glycine max
  peptide (1)..(224): Ceres Seq. ID no. 14303115
  misc_feature (140)..(212): Pfam Name: DHHA1 domain Pfam Description: DHHA1 domain
  misc_feature (1)..(215): Homolog of NCBI NO: 34222740 NR Description: Alanyl-tRNA synthetase (Alanine--tRNA ligase)
  misc_feature (1)..(219): Homolog of NCBI NO: 16331117 NR Description: alanyl-tRNA synthetase [Synechocystis sp. PCC
  misc_feature (1)..(219): Homolog of NCBI NO: 33866890 NR Description: Alanyl-tRNA synthetase [Synechococcus sp. WH
  misc_feature (1)..(219): Homolog of NCBI NO: 37521917 NR Description: alanyl-tRNA synthetase [Gloeobacter violaceus]
  misc_feature (1)..(215): Homolog of NCBI NO: 33864421 NR Description: Alanyl-tRNA synthetase:DHHA1 domain
  misc_feature (1)..(219): Homolog of NCBI NO: 23125083 NR Description: hypothetical protein [Nostoc punctiforme]
  misc_feature (1)..(219): Homolog of NCBI NO: 17229910 NR Description: alanyl-tRNA synthetase [Nostoc sp. PCC 7120]
  misc_feature (1)..(216): Homolog of NCBI NO: 23041239 NR Description: hypothetical protein [Trichodesmium erythraeum
  misc_feature (1)..(222): Homolog of NCBI NO: 30688660 NR Description: alanine--tRNA ligase -related [Arabidopsis
  misc_feature (1)..(222): Homolog of NCBI NO: 10177227 NR Description: alanyl-tRNA synthetase [Arabidopsis thaliana]
MELCGGTHVRNTSEIRGFKIISEQGIASGIRRIEAVAGEAFIEYINARDFYLKQLCSTLKVKPEEVTTRIENLLEELRVVRNENSAVRAKAAIYKASVIASKALLVGNSKQYRVLVECFDDVDAESLKSAAEYLLETLTDPAAVILGSCPGEGKVSLVAAFTPGVVDQGIQAGKFIGQIAKLCGGGGGGRPNFAQAGGRKPENLASALDKARSELIATLCEKGN

SEQ ID NO: 53539 - DNA, 1800 bp, Glycine max
  misc_feature (1)..(1800): Ceres Seq. ID no. 14316208
actcatataaataactcagggcggtggctatgtcaaactgagaactaagatcccgctggcggttggcgcaacctttcgatcttcatccaacggggcaacgttggatctgctgaactgaacttctttttatatgcactctgtgatttcactctgcttcgccatcctatgggggacaacaacagcaacaacgatgccttcatgcgcaaccaaaacgccgccgttcaggcccgcaccaaagcgcagaaccgctccaacgtccttcagctcaaactgattggacagagtcacccaaccggtctcacagcgaacctgttgaagctcttcgagcctaggcctccgttggagtacaagccacctccggagaaacgaaaatgcccaccgttatcagggatggcacaatttgtgagcaagtttgccgagcctggcgagccagaatacgctccacctgtcccagaaactgagactcctgcacaaaaaagagccagaatacacaagctaaggcttgagaagggagctgcaaaggctgctgaggagcttgagaaatatgatccacataatgacccaaatgtgtcgggagatccatacaagacattgtttgtggctaaactcagttacgagaccactgagagcagaatcaaaagggagtttgagtcatatggtccaatcaaacgggttcgattagttgctgacaaagatataaataagcccaggggttatgctttcattgagtatctgcatacaagagacatgaaagctgcttataaacaagctgatggtaggaaaattgatggtagaagggtgcttgtggatgttgagcgtgggaggactgttccaaattggagaccccgtcgcttaggtggtggacttggtaccactagagttggaggtgaagaagttaatcagcgacattctgggagggagcaacaacagtctcgttctgaagaaccgagagtgcgagaggaccgacacgctgatagagacagggaaatatcacgtgaaagaggtagggacaaagacagagaacgggagcgatcacgtgaacattctcatgaaagggtcagggatcgtgatcatagggaggataggcaccacagagaccgggataggaacagggacagagaccgagacagggaaagagatagagatcgtgggcgtgatcgagatagaacacgggaccgtgatcgtgagcgagggagggaccgtgatcgggatcgagaatatgatcgacatcgtgagagggatagagattatgaagttggtgaccctgatcgaggacgctcacgtgatagggagtctgattatgatcgtgttgaatctaaacatggggaaaggaatcatgactatgaacctgaggatgatcgtggtaggcataaccagtatgaacatggacgtaggcatgcagaccctgatcatgaccctgagcggtatgaccactacaatcatggagatgaccatggtgaccattacaatcagtatcgtgaccatgatgggatggaagatgactaccatgctggacgtgcaacatctgaatcgcatgaaaaggagagaagtcatgatgtggaccgtgaatatcaacgctcagagagatcacattcccgggagtatgattattaggacttgggcatagttcttctcaactttgttggtaagattttataatttggtatgtttacttttgaatcttgctcacctgccggtattggtagttgttgaatggattaaggcacagtgtgatcattaaaaagaaaactgtagctgctgctatccatatggcccatatttgaaagctgccttttgtcg

SEQ ID NO: 53540 - protein, 482 aa, Glycine max
  peptide (1)..(482): Ceres Seq. ID no. 14316209
  misc_feature (143)..(214): Pfam Name: RNA recognition motif. (a.k.a. RRM, RBD, or RNP domain) Pfam Description: RNA recognition motif. (a.k.a. RRM, RBD, or RNP
  misc_feature (110)..(407): Homolog of NCBI NO: 322618 NR Description: U1 snRNP 70K protein - Arabidopsis thaliana
  misc_feature (45)..(449): Homolog of NCBI NO: 337445 NR Description: ribonucleoprotein antigen
  misc_feature (45)..(449): Homolog of NCBI NO: 29568103 NR Description: U1 small nuclear ribonucleoprotein 70 kDa
  misc_feature (45)..(449): Homolog of NCBI NO: 88959 NR Description: U1 snRNP 70K protein - human
  misc_feature (45)..(400): Homolog of NCBI NO: 34856077 NR Description: similar to U1 small nuclear ribonucleoprotein 70
  misc_feature (45)..(474): Homolog of NCBI NO: 134091 NR Description: U1 small nuclear ribonucleoprotein 70 kDa (U1
  misc_feature (280)..(480): Homolog of NCBI NO: 37530562 NR Description: putative U1 small nuclear ribonucleoprotein
  misc_feature (1)..(169): Homolog of NCBI NO: 37530562 NR Description: putative U1 small nuclear ribonucleoprotein
  misc_feature (245)..(445): Homolog of NCBI NO: 37530562 NR Description: putative U1 small nuclear ribonucleoprotein
  misc_feature (1)..(422): Homolog of NCBI NO: 15229825 NR Description: U1 small nuclear ribonucleoprotein 70 (U1-70k)
MGDNNSNNDAFMRNQNAAVQARTKAQNRSNVLQLKLIGQSHPTGLTANLLKLFEPRPPLEYKPPPEKRKCPPLSGMAQFVSKFAEPGEPEYAPPVPETETPAQKRARIHKLRLEKGAAKAAEELEKYDPHNDPNVSGDPYKTLFVAKLSYETTESRIKREFESYGPIKRVRLVADKDINKPRGYAFIEYLHTRDMKAAYKQADGRKIDGRRVLVDVERGRTVPNWRPRRLGGGLGTTRVGGEEVNQRHSGREQQQSRSEEPRVREDRHADRDREISRERGRDKDRERERSREHSHERVRDRDHREDRHHRDRDRNRDRDRDRERDRDRGRDRDRTRDRDRERGRDRDRDREYDRHRERDRDYEVGDPDRGRSRDRESDYDRVESKHGERNHDYEPEDDRGRHNQYEHGRRHADPDHDPERYDHYNHGDDHGDHYNQYRDHDGMEDDYHAGRATSESHEKERSHDVDREYQRSERSHSREYDY

SEQ ID NO: 53541 - protein, 471 aa, Glycine max
  peptide (1)..(471): Ceres Seq. ID no. 14316210
  misc_feature (132)..(203): Pfam Name: RNA recognition motif. (a.k.a. RRM, RBD, or RNP domain) Pfam Description: RNA recognition motif. (a.k.a. RRM, RBD, or RNP
  misc_feature (99)..(396): Homolog of NCBI NO: 322618 NR Description: U1 snRNP 70K protein - Arabidopsis thaliana
  misc_feature (34)..(438): Homolog of NCBI NO: 337445 NR Description: ribonucleoprotein antigen
  misc_feature (34)..(438): Homolog of NCBI NO: 29568103 NR Description: U1 small nuclear ribonucleoprotein 70 kDa
  misc_feature (34)..(438): Homolog of NCBI NO: 88959 NR Description: U1 snRNP 70K protein - human
  misc_feature (34)..(389): Homolog of NCBI NO: 34856077 NR Description: similar to U1 small nuclear ribonucleoprotein 70
  misc_feature (34)..(463): Homolog of NCBI NO: 134091 NR Description: U1 small nuclear ribonucleoprotein 70 kDa (U1
  misc_feature (269)..(469): Homolog of NCBI NO: 37530562 NR Description: putative U1 small nuclear ribonucleoprotein
  misc_feature (1)..(158): Homolog of NCBI NO: 37530562 NR Description: putative U1 small nuclear ribonucleoprotein
  misc_feature (234)..(434): Homolog of NCBI NO: 37530562 NR Description: putative U1 small nuclear ribonucleoprotein
  misc_feature (1)..(411): Homolog of NCBI NO: 15229825 NR Description: U1 small nuclear ribonucleoprotein 70 (U1-70k)
MRNQNAAVQARTKAQNRSNVLQLKLIGQSHPTGLTANLLKLFEPRPPLEYKPPPEKRKCPPLSGMAQFVSKFAEPGEPEYAPPVPETETPAQKRARIHKLRLEKGAAKAAEELEKYDPHNDPNVSGDPYKTLFVAKLSYETTESRIKREFESYGPIKRVRLVADKDINKPRGYAFIEYLHTRDMKAAYKQADGRKIDGRRVLVDVERGRTVPNWRPRRLGGGLGTTRVGGEEVNQRHSGREQQQSRSEEPRVREDRHADRDREISRERGRDKDRERERSREHSHERVRDRDHREDRHHRDRDRNRDRDRDRERDRDRGRDRDRTRDRDRERGRDRDRDREYDRHRERDRDYEVGDPDRGRSRDRESDYDRVESKHGERNHDYEPEDDRGRHNQYEHGRRHADPDHDPERYDHYNHGDDHGDHYNQYRDHDGMEDDYHAGRATSESHEKERSHDVDREYQRSERSHSREYDY

SEQ ID NO: 53542 - protein, 407 aa, Glycine max
  peptide (1)..(407): Ceres Seq. ID no. 14316211
  misc_feature (68)..(139): Pfam Name: RNA recognition motif. (a.k.a. RRM, RBD, or RNP domain) Pfam Description: RNA recognition motif. (a.k.a. RRM, RBD, or RNP
  misc_feature (35)..(332): Homolog of NCBI NO: 322618 NR Description: U1 snRNP 70K protein - Arabidopsis thaliana
  misc_feature (1)..(374): Homolog of NCBI NO: 337445 NR Description: ribonucleoprotein antigen
  misc_feature (1)..(374): Homolog of NCBI NO: 29568103 NR Description: U1 small nuclear ribonucleoprotein 70 kDa
  misc_feature (1)..(374): Homolog of NCBI NO: 88959 NR Description: U1 snRNP 70K protein - human
  misc_feature (1)..(325): Homolog of NCBI NO: 34856077 NR Description: similar to U1 small nuclear ribonucleoprotein 70
  misc_feature (1)..(399): Homolog of NCBI NO: 134091 NR Description: U1 small nuclear ribonucleoprotein 70 kDa (U1
  misc_feature (205)..(405): Homolog of NCBI NO: 37530562 NR Description: putative U1 small nuclear ribonucleoprotein
  misc_feature (1)..(94): Homolog of NCBI NO: 37530562 NR Description: putative U1 small nuclear ribonucleoprotein
  misc_feature (170)..(370): Homolog of NCBI NO: 37530562 NR Description: putative U1 small nuclear ribonucleoprotein
  misc_feature (1)..(347): Homolog of NCBI NO: 15229825 NR Description: U1 small nuclear ribonucleoprotein 70 (U1-70k)
MAQFVSKFAEPGEPEYAPPVPETETPAQKRARIHKLRLEKGAAKAAEELEKYDPHNDPNVSGDPYKTLFVAKLSYETTESRIKREFESYGPIKRVRLVADKDINKPRGYAFIEYLHTRDMKAAYKQADGRKIDGRRVLVDVERGRTVPNWRPRRLGGGLGTTRVGGEEVNQRHSGREQQQSRSEEPRVREDRHADRDREISRERGRDKDRERERSREHSHERVRDRDHREDRHHRDRDRNRDRDRDRERDRDRGRDRDRTRDRDRERGRDRDRDREYDRHRERDRDYEVGDPDRGRSRDRESDYDRVESKHGERNHDYEPEDDRGRHNQYEHGRRHADPDHDPERYDHYNHGDDHGDHYNQYRDHDGMEDDYHAGRATSESHEKERSHDVDREYQRSERSHSREYDY

SEQ ID NO: 53543 - DNA, 1108 bp, Glycine max
  misc_feature (1)..(1108): Ceres Seq. ID no. 14316188
gttgacattacttgaaaaggtttgctcagattttcctacttttggcgattatgtgaaaaatacatggctgattcctcacaaggaaaaatttgttatggcatgggtagatcgagtgatgcatttgggtaacactacaatcgacaggtttgaaacagcacattggaggctggagaacttgcttcaagatagtgggggggatatgtgtagttgttgggatgctgtgaacaacatgattaaattgcaacacacacagattaaggtgtcgtttgagaaaagtataaacattgtggaatacaatgatccattctatagcaagctgcggggatttgtatcaaggaatgcattgagttatatagctgaccattatgaccgagttaagaccgttggtattgatattgatggttctttatgtggatgcacaattagaactacacatggtctaccttgtgcgtgtgaacttgctaagtatagtaggacgtggcacccaattcccttgcaagcaattcatgttcattggaggacattaaacttcagtgaccaagaaatgaacaatgaggggctcgagttagcgttgcaacgtgaagtggatgctttgcacaatcaatttcaggaacttgattatgctggaaaaattactttgaaggccaaattgcgtgaactagcatttcctgatgcaattttaatgtgtccgtctcctgaaaattactttgatgctccaaaggctctgggtttccgcgagagacaaatcaattgaatgtgatcctttatgtccggagcatgctgatgcataacattctgaccatgatagcatgttagctcacccttcatcttagaaatcagcccatgagagttttgcccaaattccggttgagattcatccttttattgaagacattgtagatgtgaaacagacgagaaatgtggttaattgtcttagatatattgtggtcttagtttctttatcttcacatggaagcattacgtttttccttcttggaggttaaccaacgttatgtcagtcaagtcacctacttaggtttgtgcataaatgtcactctgtacaactatgatatgtagtttgtttaaaatcaggtctttaatttaatct

SEQ ID NO: 53544 - protein, 250 aa, Glycine max
  peptide (1)..(250): Ceres Seq. ID no. 14316189
  misc_feature (17)..(172): Homolog of NCBI NO: 30421204 NR Description: transposase [Fusarium oxysporum f. sp. melonis]
LTLLEKVCSDFPTFGDYVKNTWLIPHKEKFVMAWVDRVMHLGNTTIDRFETAHWRLENLLQDSGGDMCSCWDAVNNMIKLQHTQIKVSFEKSINIVEYNDPFYSKLRGFVSRNALSYIADHYDRVKTVGIDIDGSLCGCTIRTTHGLPCACELAKYSRTWHPIPLQAIHVHWRTLNFSDQEMNNEGLELALQREVDALHNQFQELDYAGKITLKAKLRELAFPDAILMCPSPENYFDAPKALGFRERQIN

SEQ ID NO: 53545 - protein, 219 aa, Glycine max
  peptide (1)..(219): Ceres Seq. ID no. 14316190
  misc_feature (1)..(141): Homolog of NCBI NO: 30421204 NR Description: transposase [Fusarium oxysporum f. sp. melonis]
MAWVDRVMHLGNTTIDRFETAHWRLENLLQDSGGDMCSCWDAVNNMIKLQHTQIKVSFEKSINIVEYNDPFYSKLRGFVSRNALSYIADHYDRVKTVGIDIDGSLCGCTIRTTHGLPCACELAKYSRTWHPIPLQAIHVHWRTLNFSDQEMNNEGLELALQREVDALHNQFQELDYAGKITLKAKLRELAFPDAILMCPSPENYFDAPKALGFRERQIN

SEQ ID NO: 53546 - protein, 212 aa, Glycine max
  peptide (1)..(212): Ceres Seq. ID no. 14316191
  misc_feature (1)..(134): Homolog of NCBI NO: 30421204 NR Description: transposase [Fusarium oxysporum f. sp. melonis]
MHLGNTTIDRFETAHWRLENLLQDSGGDMCSCWDAVNNMIKLQHTQIKVSFEKSINIVEYNDPFYSKLRGFVSRNALSYIADHYDRVKTVGIDIDGSLCGCTIRTTHGLPCACELAKYSRTWHPIPLQAIHVHWRTLNFSDQEMNNEGLELALQREVDALHNQFQELDYAGKITLKAKLRELAFPDAILMCPSPENYFDAPKALGFRERQIN

SEQ ID NO: 53547 - DNA, 1691 bp, Glycine max
  misc_feature (1)..(1691): Ceres Seq. ID no. 14304479
gaagattgtatttcttcttgcagaagtagagaaaagttgaagaaggaatctcctaagactgaaaaaaacccaatggatttgaattcctctccttccaacaacacaattgccgtgaatggaacaatccccgtcgcttccacgttcgcaaccgccaccgcgccgtcggataaccctccgccggcggacagctccggcgaccggaaacccatcgccctgtggccggggatgtaccattctccggtgaccaccgccctatgggaagctcgcagcaatattttcgagaggcttctggaccctcccagggacgctcctccgcagagtgaattgctcacgagaaccccctcgcagagcaggaccagcatcttgtacaacttctcctctgatttcgtgctcagagaacagtatagggatccctggaatgaggttcgaattgggaagttgctcgaagatcttgatgccctcgctggaactatttccgtcaagcattgttctgatgaagctagcacaacaaggccacttatagttgtcactgcttcagttgataagattgtactaaagaagccaattagtgttgacattgatctcaagatagttggttttgttatatgggttgggcactcttcaatagagattcaactggaggttactcagtccaatgaagagggcaatgattcagactcagtagcactgacagccaacttcatatttgttgctcgggactcaaaaactgggaaagctgctccggtgaatcgactttcaccagaaaatgctcatgaaaaacttctgtttgaacaagctgaggcaagaagtaatttgaggaaaacgaaaagaggaggggaaaagagggactttgagaatggggagaaaaataggcttcgggccctattggctgaaggaagaatcttctgtgacatgccagctttagcagaccgaaacagcattcttctaaaggataccagccttgagaatgccttaatatgccagccacagcaaaggaacatccatggtcgaatatttggaggtttcttgatgcatcgtgcatttgaattggctttctcaacagcatatgcctttgctggattagctccttgctttcttgaagttgatcatgttgatttcttaagacctgttgatgtaggggactttttgcgtctcaaatcttgtgttctgtacacggaggttcacgatccagatcagccacttattaacgttgaagttgttgctcatgttacacgacccgagctgcgtactagtgaggtatcaaatactttccacttctctttcactgtccgtccagaagccaaggcgatgaaaaatggatttaaacttcgcaatgtagtaccagcaacggaggaagaagcacgacgtatattagagcgcatagatgctgacaacttgaatgaattcttcagagcataagaagaaaaacatcaattagctgataaagtatttaaaatatccaccgctaattatgtgagcagaatttcaaagatgattaactctcttatataataaatttttctgcccaattttaagagggaactagtatgccttatatgtctagcatcattggacttgatagaaggcaactggtgtttagacaagtatatgaacctgaatctagtaggcacctgctgtgcaagttgtataaggaaaaacataggtaagccaatgaaagaaagtttacaatg

SEQ ID NO: 53548 - protein, 472 aa, Glycine max
  peptide (1)..(472): Ceres Seq. ID no. 14304480
  misc_feature (86)..(441): Homolog of NCBI NO: 40741147 NR Description: hypothetical protein AN4420.2 [Aspergillus
  misc_feature (103)..(363): Homolog of NCBI NO: 33284898 NR Description: SI:bZ1F1.1.1 (novel protein similar to acyl-CoA
  misc_feature (106)..(433): Homolog of NCBI NO: 12331400 NR Description: acyl-Coenzyme A thioesterase 3, mitochondrial;
  misc_feature (106)..(433): Homolog of NCBI NO: 5103680 NR Description: U8 [Mus musculus]
  misc_feature (103)..(433): Homolog of NCBI NO: 6912518 NR Description: Mitochondrial Acyl-CoA Thioesterase [Homo
  misc_feature (103)..(433): Homolog of NCBI NO: 34880562 NR Description: similar to acyl-CoA thioesterase [Rattus
  misc_feature (106)..(433): Homolog of NCBI NO: 31980998 NR Description: acyl-Coenzyme A thioesterase 2, mitochondrial
  misc_feature (51)..(120): Homolog of NCBI NO: 15224555 NR Description: thioesterase family [Arabidopsis thaliana]
  misc_feature (137)..(464): Homolog of NCBI NO: 15224555 NR Description: thioesterase family [Arabidopsis thaliana]
  misc_feature (42)..(466): Homolog of NCBI NO: 15238956 NR Description: thioesterase family [Arabidopsis thaliana]
EDCISSCRSREKLKKESPKTEKNPMDLNSSPSNNTIAVNGTIPVASTFATATAPSDNPPPADSSGDRKPIALWPGMYHSPVTTALWEARSNIFERLLDPPRDAPPQSELLTRTPSQSRTSILYNFSSDFVLREQYRDPWNEVRIGKLLEDLDALAGTISVKHCSDEASTTRPLIVVTASVDKIVLKKPISVDIDLKIVGFVIWVGHSSIEIQLEVTQSNEEGNDSDSVALTANFIFVARDSKTGKAAPVNRLSPENAHEKLLFEQAEARSNLRKTKRGGEKRDFENGEKNRLRALLAEGRIFCDMPALADRNSILLKDTSLENALICQPQQRNIHGRIFGGFLMHRAFELAFSTAYAFAGLAPCFLEVDHVDFLRPVDVGDFLRLKSCVLYTEVHDPDQPLINVEVVAHVTRPELRTSEVSNTFHFSFTVRPEAKAMKNGFKLRNVVPATEEEARRILERIDADNLNEFFRA

SEQ ID NO: 53549 - protein, 448 aa, Glycine max
  peptide (1)..(448): Ceres Seq. ID no. 14304481
  misc_feature (62)..(417): Homolog of NCBI NO: 40741147 NR Description: hypothetical protein AN4420.2 [Aspergillus
  misc_feature (79)..(339): Homolog of NCBI NO: 33284898 NR Description: SI:bZ1F1.1.1 (novel protein similar to acyl-CoA
  misc_feature (82)..(409): Homolog of NCBI NO: 12331400 NR Description: acyl-Coenzyme A thioesterase 3, mitochondrial;
  misc_feature (82)..(409): Homolog of NCBI NO: 5103680 NR Description: U8 [Mus musculus]
  misc_feature (79)..(409): Homolog of NCBI NO: 6912518 NR Description: Mitochondrial Acyl-CoA Thioesterase [Homo
  misc_feature (79)..(409): Homolog of NCBI NO: 34880562 NR Description: similar to acyl-CoA thioesterase [Rattus
  misc_feature (82)..(409): Homolog of NCBI NO: 31980998 NR Description: acyl-Coenzyme A thioesterase 2, mitochondrial
  misc_feature (27)..(96): Homolog of NCBI NO: 15224555 NR Description: thioesterase family [Arabidopsis thaliana]
  misc_feature (113)..(440): Homolog of NCBI NO: 15224555 NR Description: thioesterase family [Arabidopsis thaliana]
  misc_feature (18)..(442): Homolog of NCBI NO: 15238956 NR Description: thioesterase family [Arabidopsis thaliana]
MDLNSSPSNNTIAVNGTIPVASTFATATAPSDNPPPADSSGDRKPIALWPGMYHSPVTTALWEARSNIFERLLDPPRDAPPQSELLTRTPSQSRTSILYNFSSDFVLREQYRDPWNEVRIGKLLEDLDALAGTISVKHCSDEASTTRPLIVVTASVDKIVLKKPISVDIDLKIVGFVIWVGHSSIEIQLEVTQSNEEGNDSDSVALTANFIFVARDSKTGKAAPVNRLSPENAHEKLLFEQAEARSNLRKTKRGGEKRDFENGEKNRLRALLAEGRIFCDMPALADRNSILLKDTSLENALICQPQQRNIHGRIFGGFLMHRAFELAFSTAYAFAGLAPCFLEVDHVDFLRPVDVGDFLRLKSCVLYTEVHDPDQPLINVEVVAHVTRPELRTSEVSNTFHFSFTVRPEAKAMKNGFKLRNVVPATEEEARRILERIDADNLNEFFRA

SEQ ID NO: 53550 - protein, 397 aa, Glycine max
  peptide (1)..(397): Ceres Seq. ID no. 14304482
  misc_feature (11)..(366): Homolog of NCBI NO: 40741147 NR Description: hypothetical protein AN4420.2 [Aspergillus
  misc_feature (28)..(288): Homolog of NCBI NO: 33284898 NR Description: SI:bZ1F1.1.1 (novel protein similar to acyl-CoA
  misc_feature (31)..(358): Homolog of NCBI NO: 12331400 NR Description: acyl-Coenzyme A thioesterase 3, mitochondrial;
  misc_feature (31)..(358): Homolog of NCBI NO: 5103680 NR Description: U8 [Mus musculus]
  misc_feature (28)..(358): Homolog of NCBI NO: 6912518 NR Description: Mitochondrial Acyl-CoA Thioesterase [Homo
  misc_feature (28)..(358): Homolog of NCBI NO: 34880562 NR Description: similar to acyl-CoA thioesterase [Rattus
  misc_feature (31)..(358): Homolog of NCBI NO: 31980998 NR Description: acyl-Coenzyme A thioesterase 2, mitochondrial
  misc_feature (1)..(45): Homolog of NCBI NO: 15224555 NR Description: thioesterase family [Arabidopsis thaliana]
  misc_feature (62)..(389): Homolog of NCBI NO: 15224555 NR Description: thioesterase family [Arabidopsis thaliana]
  misc_feature (1)..(391): Homolog of NCBI NO: 15238956 NR Description: thioesterase family [Arabidopsis thaliana]
MYHSPVTTALWEARSNIFERLLDPPRDAPPQSELLTRTPSQSRTSILYNFSSDFVLREQYRDPWNEVRIGKLLEDLDALAGTISVKHCSDEASTTRPLIVVTASVDKIVLKKPISVDIDLKIVGFVIWVGHSSIEIQLEVTQSNEEGNDSDSVALTANFIFVARDSKTGKAAPVNRLSPENAHEKLLFEQAEARSNLRKTKRGGEKRDFENGEKNRLRALLAEGRIFCDMPALADRNSILLKDTSLENALICQPQQRNIHGRIFGGFLMHRAFELAFSTAYAFAGLAPCFLEVDHVDFLRPVDVGDFLRLKSCVLYTEVHDPDQPLINVEVVAHVTRPELRTSEVSNTFHFSFTVRPEAKAMKNGFKLRNVVPATEEEARRILERIDADNLNEFFRA

SEQ ID NO: 53551 - DNA, 920 bp, Glycine max
  misc_feature (1)..(920): Ceres Seq. ID no. 13593834
cccgtttcctacaagcatgcacttcctgcccaaattttgcatttgactggagcgtattgttagatatatatcttacctgcccctctactcagttctgggtttattacgcatgtttcatgtatccagccttcattggagcttgatcattatttgcatcccagacaaagaagatgaatcggggccaatcatacttcatttggattctttgggtcttcactctagtaaatcagtttttgataatattaaaagctatttgattgaagaaaagaactacatggatcgagaagacatggcttcagatgtttcaattgcggatagaatatggaagtgccttcctcgtagaatcgaatctcaaatcattcaggttccccaacagaagaatgactatgactgtggtctttttgtattgtacttcattgaacgtttcatggaggaggcaccggaaagactgaaaatgaaagatttagatatgtttggaaggcgatggttcaaacctcaagaggcgtccaatttgagagtgaaaatccgtaagttgcttgtagaaaaattacagaattcagtcacggataattgtaatttggaatcttctccttcatcatctgctggccctgcaactgattgtgttgagactgccagggattctcttactggccctgcaactgattgtgttgagaccaccgaggattctgtgacttaacatggcagaattgcaattgtcatttccttgaacgaacaatctgttgatattcgtatggttggtgccagttttttttttccttgtacagaagccagctattcagctggtaatttttggatagagttttcctatgacctggtaaatagtccatcagtctttaatccaagcaagggtggctaacagttggctgtgcagaaataacaaacaactctagttcctaacc

SEQ ID NO: 53552 - protein, 195 aa, Glycine max
  peptide (1)..(195): Ceres Seq. ID no. 13593835
  misc_feature (86)..(131): Homolog of NCBI NO: 15228382 NR Description: hypothetical protein [Arabidopsis thaliana]
  misc_feature (47)..(186): Homolog of NCBI NO: 15218250 NR Description: Ulp1 protease family [Arabidopsis thaliana]
  misc_feature (83)..(186): Homolog of NCBI NO: 22135830 NR Description: At1g09730/F21M12_12 [Arabidopsis thaliana]
  misc_feature (6)..(143): Homolog of NCBI NO: 30689748 NR Description: Ulp1 protease family [Arabidopsis thaliana]
  misc_feature (1)..(164): Homolog of NCBI NO: 34909336 NR Description: OSJNBb0021A09.14 [Oryza sativa (japonica
  misc_feature (7)..(145): Homolog of NCBI NO: 5091551 NR Description: T10O24.20 [Arabidopsis thaliana]
  misc_feature (7)..(145): Homolog of NCBI NO: 22329476 NR Description: Ulp1 protease family [Arabidopsis thaliana]
  misc_feature (7)..(145): Homolog of NCBI NO: 15219025 NR Description: Ulp1 protease family [Arabidopsis thaliana]
  misc_feature (7)..(145): Homolog of NCBI NO: 7486914 NR Description: hypothetical protein T13D8.11 - Arabidopsis
MFHVSSLHWSLIIICIPDKEDESGPIILHLDSLGLHSSKSVFDNIKSYLIEEKNYMDREDMASDVSIADRIWKCLPRRIESQIIQVPQQKNDYDCGLFVLYFIERFMEEAPERLKMKDLDMFGRRWFKPQEASNLRVKIRKLLVEKLQNSVTDNCNLESSPSSSAGPATDCVETARDSLTGPATDCVETTEDSVT

SEQ ID NO: 53553 - protein, 140 aa, Glycine max
  peptide (1)..(140): Ceres Seq. ID no. 13593836
  misc_feature (31)..(76): Homolog of NCBI NO: 15228382 NR Description: hypothetical protein [Arabidopsis thaliana]
  misc_feature (1)..(131): Homolog of NCBI NO: 15218250 NR Description: Ulp1 protease family [Arabidopsis thaliana]
  misc_feature (28)..(131): Homolog of NCBI NO: 22135830 NR Description: At1g09730/F21M12_12 [Arabidopsis thaliana]
  misc_feature (1)..(88): Homolog of NCBI NO: 30689748 NR Description: Ulp1 protease family [Arabidopsis thaliana]
  misc_feature (1)..(109): Homolog of NCBI NO: 34909336 NR Description: OSJNBb0021A09.14 [Oryza sativa (japonica
  misc_feature (1)..(90): Homolog of NCBI NO: 5091551 NR Description: T10O24.20 [Arabidopsis thaliana]
  misc_feature (1)..(90): Homolog of NCBI NO: 22329476 NR Description: Ulp1 protease family [Arabidopsis thaliana]
  misc_feature (1)..(90): Homolog of NCBI NO: 15219025 NR Description: Ulp1 protease family [Arabidopsis thaliana]
  misc_feature (1)..(90): Homolog of NCBI NO: 7486914 NR Description: hypothetical protein T13D8.11 - Arabidopsis
MDREDMASDVSIADRIWKCLPRRIESQIIQVPQQKNDYDCGLFVLYFIERFMEEAPERLKMKDLDMFGRRWFKPQEASNLRVKIRKLLVEKLQNSVTDNCNLESSPSSSAGPATDCVETARDSLTGPATDCVETTEDSVT

SEQ ID NO: 53554 - protein, 135 aa, Glycine max
  peptide (1)..(135): Ceres Seq. ID no. 13593837
  misc_feature (26)..(71): Homolog of NCBI NO: 15228382 NR Description: hypothetical protein [Arabidopsis thaliana]
  misc_feature (1)..(126): Homolog of NCBI NO: 15218250 NR Description: Ulp1 protease family [Arabidopsis thaliana]
  misc_feature (23)..(126): Homolog of NCBI NO: 22135830 NR Description: At1g09730/F21M12_12 [Arabidopsis thaliana]
  misc_feature (1)..(83): Homolog of NCBI NO: 30689748 NR Description: Ulp1 protease family [Arabidopsis thaliana]
  misc_feature (1)..(104): Homolog of NCBI NO: 34909336 NR Description: OSJNBb0021A09.14 [Oryza sativa (japonica
  misc_feature (1)..(85): Homolog of NCBI NO: 5091551 NR Description: T10O24.20 [Arabidopsis thaliana]
  misc_feature (1)..(85): Homolog of NCBI NO: 22329476 NR Description: Ulp1 protease family [Arabidopsis thaliana]
  misc_feature (1)..(85): Homolog of NCBI NO: 15219025 NR Description: Ulp1 protease family [Arabidopsis thaliana]
  misc_feature (1)..(85): Homolog of NCBI NO: 7486914 NR Description: hypothetical protein T13D8.11 - Arabidopsis
MASDVSIADRIWKCLPRRIESQIIQVPQQKNDYDCGLFVLYFIERFMEEAPERLKMKDLDMFGRRWFKPQEASNLRVKIRKLLVEKLQNSVTDNCNLESSPSSSAGPATDCVETARDSLTGPATDCVETTEDSVT

SEQ ID NO: 53555 - DNA, 1129 bp, Glycine max
  misc_feature (1)..(1129): Ceres Seq. ID no. 14304457
tttgtgtgtattccttttcagggagttaagtggaagatggggttgtcaacagcaaggacaagcataggatcagtttgtgtttgtgccatctcaaagcctctccgccgtcactgccatttcctcccaacctctgtttctcctgtcttctcatgtcttcagaaaaagtgcaaattgaattttcaaaaaccagttcaagatgctgcagactcaaaaatatcatgtagcttagtgaatgtggaagatgggatagatgatgaagcatgtgaattagtcagtggagtggagctttcacttgaggagggtgatgaaaatatccgtgcttatctgttcaaggcagtaaaaaataacaatggaactggcctattgcttctttcagatgttttcgggtttgaggattctttcaccagagattttgcatatcgagtagcttgcaatggttacaacattctagttccagacttatttcgtggaaatccatggacaaaggaccagcaagatccagatgtgtttgaaaaatggattgctagacaaaacccagagaggatcgcagaagacattaccagatggacaaaatggctggttgatgaattcatggctgtaggaatttccaagaaacttggcattattggattctgctttggaggtggccaagtgttgaaggtgctggccaaagaccaaggtgcttgttttggcaccggagtctccttttatggtacaaggatagatccccttgctgcttctgatataaaagctcctgtcttgtttattttaggggacaatgacccactttgccaggtaagtgaaattgagaatgttgagaaaaaaattgctagcggctccaaagtagtcttattccctggtagaggtcacggatttgcccaccgacctggatctcctgaagaagatgtggatgctgaacaagcctatgtgattatgagagactggctatatgatcgtttggtcgtataaaattatatgtattgtatatatccaacacttgcgtcttaacatgtcaatagtgacctgtcaacattttgaatacattctcttttcagtcaaggaaattcccttgtactaacataattctagggccgttacttgatgatgcattatagtttaaattaggaac

SEQ ID NO: 53556 - protein, 322 aa, Glycine max
  peptide (1)..(322): Ceres Seq. ID no. 14304458
  misc_feature (105)..(320): Pfam Name: Dienelactone hydrolase family Pfam Description: Dienelactone hydrolase family
  misc_feature (120)..(308): Homolog of NCBI NO: 16124733 NR Description: dienelactone hydrolase, putative [Caulobacter
  misc_feature (107)..(320): Homolog of NCBI NO: 40253303 NR Description: putative Endo-1,3;1,4-beta-D-glucanase precursor
  misc_feature (116)..(315): Homolog of NCBI NO: 40253306 NR Description: putative Endo-1,3;1,4-beta-D-glucanase precursor
  misc_feature (103)..(316): Homolog of NCBI NO: 31712014 NR Description: RIKEN cDNA 2310016A09 [Mus musculus]
  misc_feature (103)..(317): Homolog of NCBI NO: 38181938 NR Description: Unknown (protein for MGC:76315) [Silurana
  misc_feature (103)..(316): Homolog of NCBI NO: 34854915 NR Description: similar to Ab2-225 [Rattus norvegicus]
  misc_feature (103)..(316): Homolog of NCBI NO: 18676733 NR Description: unnamed protein product [Homo sapiens]
  misc_feature (103)..(316): Homolog of NCBI NO: 20270371 NR Description: hypothetical protein BC001573 [Homo sapiens]
  misc_feature (15)..(321): Homolog of NCBI NO: 21553574 NR Description: unknown [Arabidopsis thaliana]
  misc_feature (15)..(321): Homolog of NCBI NO: 18399662 NR Description: expressed protein [Arabidopsis thaliana]
FVCIPFQGVKWKMGLSTARTSIGSVCVCAISKPLRRHCHFLPTSVSPVFSCLQKKCKLNFQKPVQDAADSKISCSLVNVEDGIDDEACELVSGVELSLEEGDENIRAYLFKAVKNNNGTGLLLLSDVFGFEDSFTRDFAYRVACNGYNILVPDLFRGNPWTKDQQDPDVFEKWIARQNPERIAEDITRWTKWLVDEFMAVGISKKLGIIGFCFGGGQVLKVLAKDQGACFGTGVSFYGTRIDPLAASDIKAPVLFILGDNDPLCQVSEIENVEKKIASGSKVVLFPGRGHGFAHRPGSPEEDVDAEQAYVIMRDWLYDRLVV

SEQ ID NO: 53557 - protein, 310 aa, Glycine max
  peptide (1)..(310): Ceres Seq. ID no. 14304459
  misc_feature (93)..(308): Pfam Name: Dienelactone hydrolase family Pfam Description: Dienelactone hydrolase family
  misc_feature (108)..(296): Homolog of NCBI NO: 16124733 NR Description: dienelactone hydrolase, putative [Caulobacter
  misc_feature (95)..(308): Homolog of NCBI NO: 40253303 NR Description: putative Endo-1,3;1,4-beta-D-glucanase precursor
  misc_feature (104)..(303): Homolog of NCBI NO: 40253306 NR Description: putative Endo-1,3;1,4-beta-D-glucanase precursor
  misc_feature (91)..(304): Homolog of NCBI NO: 31712014 NR Description: RIKEN cDNA 2310016A09 [Mus musculus]
  misc_feature (91)..(305): Homolog of NCBI NO: 38181938 NR Description: Unknown (protein for MGC:76315) [Silurana
  misc_feature (91)..(304): Homolog of NCBI NO: 34854915 NR Description: similar to Ab2-225 [Rattus norvegicus]
  misc_feature (91)..(304): Homolog of NCBI NO: 18676733 NR Description: unnamed protein product [Homo sapiens]
  misc_feature (91)..(304): Homolog of NCBI NO: 20270371 NR Description: hypothetical protein BC001573 [Homo sapiens]
  misc_feature (3)..(309): Homolog of NCBI NO: 21553574 NR Description: unknown [Arabidopsis thaliana]
  misc_feature (3)..(309): Homolog of NCBI NO: 18399662 NR Description: expressed protein [Arabidopsis thaliana]
MGLSTARTSIGSVCVCAISKPLRRHCHFLPTSVSPVFSCLQKKCKLNFQKPVQDAADSKISCSLVNVEDGIDDEACELVSGVELSLEEGDENIRAYLFKAVKNNNGTGLLLLSDVFGFEDSFTRDFAYRVACNGYNILVPDLFRGNPWTKDQQDPDVFEKWIARQNPERIAEDITRWTKWLVDEFMAVGISKKLGIIGFCFGGGQVLKVLAKDQGACFGTGVSFYGTRIDPLAASDIKAPVLFILGDNDPLCQVSEIENVEKKIASGSKVVLFPGRGHGFAHRPGSPEEDVDAEQAYVIMRDWLYDRLVV

SEQ ID NO: 53558 - DNA, 1198 bp, Glycine max
  misc_feature (1)..(1198): Ceres Seq. ID no. 15227099
cagctccgtaggccccccccccggagagatagaattagaattaaaaagcgtgaagghcagtgataggtttggtttggaaggaagaagaaaatgaaggccatagtgataacgaggccaggaggtcccgaagtgctccaacttgaggaagtggaagatccccaagtcggagacgacgagcttctcatcggagtccacgccacttcccttaacagagccgatacctttcagaggaaaggctcctaccctccccctaagggcgccagcccttacctcggtctcgaatgttccggaactgtcctttccctgggtaaaaacgtttccagctggaaaatcggtgatcaggtgtgtgctcttctcgccggaggcggatatgccgagaaagttgcagttccggtaggacaagttcttccggttccagccggtgtttctctcacggatgcagctagttttcctgaggttgcttgcactgtctggtcaactgttttcatgatgagtcgcttatctcaaggggaaaccttgttggttcatggaggttccagtgggattggtacatttgcaattcagatagccaagtatcgagggtcacgagtgtttgttactgcaggaagtgaggagaagctagctttttgcaagagtatcggagctgatgtgggcatcaattataaaacagaagactttgttgcgcgggtaaaggaagaaactggtggccaaggtgttgatgttattcttgattgtatgggagcatcctactatcaaagaaatcttgatagcttgaattttgatggaaggctttttattattggctttcaaggtggggttagtacacaagcagatctacgccctttacttgctaagcgtctcacagtacaaggagctggtttacgcaatagaagtctggaaaataaagctgtgattgttagtgaagtggagaagaatgtttggcctgcaattgccgaaggaaaggttaagcctgtggtctacaaatctttcccgctttctgaggcagcggaggctcaccagcttatggaaagcagccagcatattgggaagatattgcttttgccatgaaaattgtcgtaaatactgaagttcgtgacatacttctggatcctttgtgtttggacttgtttctttgttaagatctcaggattctaatatggttgcggattaaaataacagctaaaggaattgatatggc

SEQ ID NO: 53559 - protein, 325 aa, Glycine max
  peptide (1)..(325): Ceres Seq. ID no. 15227100
  misc_feature (1)..(323): Homolog of NCBI NO: 13473234 NR Description: NADPH quinone oxidoreductase [Mesorhizobium loti]
  misc_feature (1)..(323): Homolog of NCBI NO: 15610913 NR Description: hypothetical protein Rv3777 [Mycobacterium
  misc_feature (1)..(323): Homolog of NCBI NO: 15843400 NR Description: quinone oxidoreductase [Mycobacterium
  misc_feature (1)..(323): Homolog of NCBI NO: 17934733 NR Description: quinone oxidoreductase
  misc_feature (1)..(323): Homolog of NCBI NO: 15888165 NR Description: AGR_C_1508p [Agrobacterium tumefaciens]
  misc_feature (1)..(324): Homolog of NCBI NO: 29830911 NR Description: putative quinone oxidoreductase
  misc_feature (1)..(324): Homolog of NCBI NO: 21222233 NR Description: putative quinone oxidoreductase [Streptomyces
  misc_feature (1)..(324): Homolog of NCBI NO: 23017076 NR Description: COG0604: NADPH:quinone reductase and related
  misc_feature (1)..(325): Homolog of NCBI NO: 15451578 NR Description: Putative quinone oxidoreductase [Oryza sativa]
  misc_feature (1)..(323): Homolog of NCBI NO: 15234529 NR Description: oxidoreductase, zinc-binding dehydrogenase family
MKAIVITRPGGPEVLQLEEVEDPQVGDDELLIGVHATSLNRADTFQRKGSYPPPKGASPYLGLECSGTVLSLGKNVSSWKIGDQVCALLAGGGYAEKVAVPVGQVLPVPAGVSLTDAASFPEVACTVWSTVFMMSRLSQGETLLVHGGSSGIGTFAIQIAKYRGSRVFVTAGSEEKLAFCKSIGADVGINYKTEDFVARVKEETGGQGVDVILDCMGASYYQRNLDSLNFDGRLFIIGFQGGVSTQADLRPLLAKRLTVQGAGLRNRSLENKAVIVSEVEKNVWPAIAEGKVKPVVYKSFPLSEAAEAHQLMESSQHIGKILLLP

SEQ ID NO: 53560 - protein, 193 aa, Glycine max
  peptide (1)..(193): Ceres Seq. ID no. 15227101
  misc_feature (1)..(191): Homolog of NCBI NO: 13473234 NR Description: NADPH quinone oxidoreductase [Mesorhizobium loti]
  misc_feature (1)..(191): Homolog of NCBI NO: 15610913 NR Description: hypothetical protein Rv3777 [Mycobacterium
  misc_feature (1)..(191): Homolog of NCBI NO: 15843400 NR Description: quinone oxidoreductase [Mycobacterium
  misc_feature (1)..(191): Homolog of NCBI NO: 17934733 NR Description: quinone oxidoreductase
  misc_feature (1)..(191): Homolog of NCBI NO: 15888165 NR Description: AGR_C_1508p [Agrobacterium tumefaciens]
  misc_feature (1)..(192): Homolog of NCBI NO: 29830911 NR Description: putative quinone oxidoreductase
  misc_feature (1)..(192): Homolog of NCBI NO: 21222233 NR Description: putative quinone oxidoreductase [Streptomyces
  misc_feature (1)..(192): Homolog of NCBI NO: 23017076 NR Description: COG0604: NADPH:quinone reductase and related
  misc_feature (1)..(193): Homolog of NCBI NO: 15451578 NR Description: Putative quinone oxidoreductase [Oryza sativa]
  misc_feature (1)..(191): Homolog of NCBI NO: 15234529 NR Description: oxidoreductase, zinc-binding dehydrogenase family
MMSRLSQGETLLVHGGSSGIGTFAIQIAKYRGSRVFVTAGSEEKLAFCKSIGADVGINYKTEDFVARVKEETGGQGVDVILDCMGASYYQRNLDSLNFDGRLFIIGFQGGVSTQADLRPLLAKRLTVQGAGLRNRSLENKAVIVSEVEKNVWPAIAEGKVKPVVYKSFPLSEAAEAHQLMESSQHIGKILLLP

SEQ ID NO: 53561 - protein, 192 aa, Glycine max
  peptide (1)..(192): Ceres Seq. ID no. 15227102
  misc_feature (1)..(190): Homolog of NCBI NO: 13473234 NR Description: NADPH quinone oxidoreductase [Mesorhizobium loti]
  misc_feature (1)..(190): Homolog of NCBI NO: 15610913 NR Description: hypothetical protein Rv3777 [Mycobacterium
  misc_feature (1)..(190): Homolog of NCBI NO: 15843400 NR Description: quinone oxidoreductase [Mycobacterium
  misc_feature (1)..(190): Homolog of NCBI NO: 17934733 NR Description: quinone oxidoreductase
  misc_feature (1)..(190): Homolog of NCBI NO: 15888165 NR Description: AGR_C_1508p [Agrobacterium tumefaciens]
  misc_feature (1)..(191): Homolog of NCBI NO: 29830911 NR Description: putative quinone oxidoreductase
  misc_feature (1)..(191): Homolog of NCBI NO: 21222233 NR Description: putative quinone oxidoreductase [Streptomyces
  misc_feature (1)..(191): Homolog of NCBI NO: 23017076 NR Description: COG0604: NADPH:quinone reductase and related
  misc_feature (1)..(192): Homolog of NCBI NO: 15451578 NR Description: Putative quinone oxidoreductase [Oryza sativa]
  misc_feature (1)..(190): Homolog of NCBI NO: 15234529 NR Description: oxidoreductase, zinc-binding dehydrogenase family
MSRLSQGETLLVHGGSSGIGTFAIQIAKYRGSRVFVTAGSEEKLAFCKSIGADVGINYKTEDFVARVKEETGGQGVDVILDCMGASYYQRNLDSLNFDGRLFIIGFQGGVSTQADLRPLLAKRLTVQGAGLRNRSLENKAVIVSEVEKNVWPAIAEGKVKPVVYKSFPLSEAAEAHQLMESSQHIGKILLLP

SEQ ID NO: 53562 - DNA, 1218 bp, Glycine max
  misc_feature (1)..(1218): Ceres Seq. ID no. 14304791
actccctcacatcacaagaagcacaatttctctctttctttttgtgtccaaaatggctcctagttctactcacaatactgggttctatgtgcttatgctagttgggatagtgattagcactatggttgctacctgtgctggtagcttctaccaagactttgatctaacatggggtggtgaccgtgctaagatattcaatggtggccagcttctatctctttcccttgacaaagtctctggctctggcttcaaatcaaagaaagaatacctatttgggaggattgatatgcagctcaagctcgttgctggcaactctgctggcactgtcactgcttactacttgtcatcccaagggccaacacatgatgagattgatttcgagtttttgggaaacctaagtggggacccttatattctccacacaaacatcttcacgcaaggcaaaggtaacagggagcaacagttctatctctggttcgaccccaccagaaacttccacacttattctatcatttggaagccccagcacatcatattcttggttgataacacaccaataagggtattcaagaatgctgaatctcttggtgttccttttccaaagaaccagcccatgagaatctattctagcctctggaatgctgatgactgggccaccagaggaggattggtgaaaactgattggtccaaagcaccctttacagcatactaccgcaatttcaaagccactgagttctcactcaagtcttccatttcaaattctggtgctgaatatgaggcaaatgagcttgattcttatagcagaagaagactgagatgggttcagaagtacttcatgatctataactactgcagtgatctcaagcgattcccacaaggtcttcctgctgaatgtagacgctgaaggttccaagagatgaagagaatggccactttctgattggatttgaatcgtctatgtaaaatatgctatgtttattatgtcttagattctttattgacttctgtcttttttttcttcctttttttttagtttctattttatagttgctaatgtatatgtatattaaggggtcttaacaataaatcatattctttgtaccacttttcttgtcaatatgggcagttagtctcatcctagctcgtccacccggtgaaattgatcatgttggaatcaatttctatctgttcatataataaaaaggtgtagtcaagttt

SEQ ID NO: 53563 - protein, 300 aa, Glycine max
  peptide (1)..(300): Ceres Seq. ID no. 14304792
  misc_feature (49)..(230): Pfam Name: Glycosyl hydrolases family 16 Pfam Description: Glycosyl hydrolases family 16
  misc_feature (47)..(299): Homolog of NCBI NO: 8886865 NR Description: xyloglucan endotransglycosylase XET1 [Asparagus
  misc_feature (18)..(300): Homolog of NCBI NO: 15236412 NR Description: xyloglucan endotransglycosylase (XTR7)
  misc_feature (18)..(300): Homolog of NCBI NO: 38605153 NR Description: Probable xyloglucan
  misc_feature (32)..(300): Homolog of NCBI NO: 21536689 NR Description: xyloglucan endotransglycosylase, putative
  misc_feature (32)..(300): Homolog of NCBI NO: 18403867 NR Description: xyloglucan endotransglycosylase, putative
  misc_feature (18)..(300): Homolog of NCBI NO: 543905 NR Description: Brassinosteroid-regulated protein BRU1 precursor
LPHITRSTISLFLFVSKMAPSSTHNTGFYVLMLVGIVISTMVATCAGSFYQDFDLTWGGDRAKIFNGGQLLSLSLDKVSGSGFKSKKEYLFGRIDMQLKLVAGNSAGTVTAYYLSSQGPTHDEIDFEFLGNLSGDPYILHTNIFTQGKGNREQQFYLWFDPTRNFHTYSIIWKPQHIIFLVDNTPIRVFKNAESLGVPFPKNQPMRIYSSLWNADDWATRGGLVKTDWSKAPFTAYYRNFKATEFSLKSSISNSGAEYEANELDSYSRRRLRWVQKYFMIYNYCSDLKRFPQGLPAECRR

SEQ ID NO: 53564 - protein, 283 aa, Glycine max
  peptide (1)..(283): Ceres Seq. ID no. 14304793
  misc_feature (32)..(213): Pfam Name: Glycosyl hydrolases family 16 Pfam Description: Glycosyl hydrolases family 16
  misc_feature (30)..(282): Homolog of NCBI NO: 8886865 NR Description: xyloglucan endotransglycosylase XET1 [Asparagus
  misc_feature (1)..(283): Homolog of NCBI NO: 15236412 NR Description: xyloglucan endotransglycosylase (XTR7)
  misc_feature (1)..(283): Homolog of NCBI NO: 38605153 NR Description: Probable xyloglucan
  misc_feature (15)..(283): Homolog of NCBI NO: 21536689 NR Description: xyloglucan endotransglycosylase, putative
  misc_feature (15)..(283): Homolog of NCBI NO: 18403867 NR Description: xyloglucan endotransglycosylase, putative
  misc_feature (1)..(283): Homolog of NCBI NO: 543905 NR Description: Brassinosteroid-regulated protein BRU1 precursor
MAPSSTHNTGFYVLMLVGIVISTMVATCAGSFYQDFDLTWGGDRAKIFNGGQLLSLSLDKVSGSGFKSKKEYLFGRIDMQLKLVAGNSAGTVTAYYLSSQGPTHDEIDFEFLGNLSGDPYILHTNIFTQGKGNREQQFYLWFDPTRNFHTYSIIWKPQHIIFLVDNTPIRVFKNAESLGVPFPKNQPMRIYSSLWNADDWATRGGLVKTDWSKAPFTAYYRNFKATEFSLKSSISNSGAEYEANELDSYSRRRLRWVQKYFMIYNYCSDLKRFPQGLPAECRR

SEQ ID NO: 53565 - protein, 269 aa, Glycine max
  peptide (1)..(269): Ceres Seq. ID no. 14304794
  misc_feature (18)..(199): Pfam Name: Glycosyl hydrolases family 16 Pfam Description: Glycosyl hydrolases family 16
  misc_feature (16)..(268): Homolog of NCBI NO: 8886865 NR Description: xyloglucan endotransglycosylase XET1 [Asparagus
  misc_feature (1)..(269): Homolog of NCBI NO: 15236412 NR Description: xyloglucan endotransglycosylase (XTR7)
  misc_feature (1)..(269): Homolog of NCBI NO: 38605153 NR Description: Probable xyloglucan
  misc_feature (1)..(269): Homolog of NCBI NO: 21536689 NR Description: xyloglucan endotransglycosylase, putative
  misc_feature (1)..(269): Homolog of NCBI NO: 18403867 NR Description: xyloglucan endotransglycosylase, putative
  misc_feature (1)..(269): Homolog of NCBI NO: 543905 NR Description: Brassinosteroid-regulated protein BRU1 precursor
MLVGIVISTMVATCAGSFYQDFDLTWGGDRAKIFNGGQLLSLSLDKVSGSGFKSKKEYLFGRIDMQLKLVAGNSAGTVTAYYLSSQGPTHDEIDFEFLGNLSGDPYILHTNIFTQGKGNREQQFYLWFDPTRNFHTYSIIWKPQHIIFLVDNTPIRVFKNAESLGVPFPKNQPMRIYSSLWNADDWATRGGLVKTDWSKAPFTAYYRNFKATEFSLKSSISNSGAEYEANELDSYSRRRLRWVQKYFMIYNYCSDLKRFPQGLPAECRR

SEQ ID NO: 53566 - DNA, 2065 bp, Glycine max
  misc_feature (1)..(2065): Ceres Seq. ID no. 14306904
gaacgaaacaaagtggacgaatcacaaccaaaaaacaaagaaacagaggcagagatatatgattatgaatttctcaacagaaccctctgcctcacgcttaccattctgatctccacttcttcgctgtttgtaacacgtttcatgcaatttaattcttcttcttcttgattttatgctgccctttttctcagacacccgttactgggaatttcaattttcattggttttgtcaaatcgattttcccaaaaccactcgccaattttattttatttttgctatgttttcgtcaattcttccttgtttgttgttaaagattgaatctttcctttcaattttgaaacttctgattatggggtatgtgtagttgcgacgaagtgaaatttcgttgctgcaaatagtgagaatttgctgtctttggtcagagttgctccgagtgatcgcttcccctggtgcgacgaagtgaaatttcgttgctgcaaatagtgagaatttgctgtctttggtcagagtggctccgagtgatcgcttcccctggtgcgacgaagtgaaatttcgttgctgcaaatagtgagaatttgctgtctttggtcagagtggctcagagtgatcgcttcccctggaatatttacaacttcaagaattggaagtagtgaatcccccaatagtggggcctcttcttcttttacccagcctatggaagatatgaatgaaaatgaagaaacagacttgctctcaatatcatggaatcaggactatgggtgctttgctgctggcacaagtcatgggtttcgtatctataattgtgagccttgcaaagaaactttcagacgtgatttaaaaagtggtggttttaaaattgtagagatgctgttccgatgcaatattctagcacttgttggtgctgtagctaattctcactatccaccaaataaagttttgatatgggatgatcatcagagcaggtgcattggtgaatttacatttaggtctgatgttcgtggagtgaaattaagacgcgatcgaattgtggttgttcttgagcacaagatatatgtttataacttcacagatttgaagcttcttcatcagattgagactctggcaaatcctagagggttgtgctgtctttcacactattcaaatacatttgttttggcttgtccaggtcttcacaagggacaggttcgagttgaacacttcggactgaacgtgacaaaattgatcaatgctcatgattctcaaattgcttgcttcactctgacattggatgggctccttcttgcaactgctagtgtaaagggcactttgattagaatcttcaatacaatggatgggtctcgtttacaagaagtaagaagaggggtagatagagctgaaatcaacagtatagctttgtctccaaatgtccagtggttagcagcatcaagtgacaaaggcactgttcatgtattcagcttgagagtgagagtgtttggggaggatagtgtgactcagccaaatgctgttcaagggcctgcactgtttcatcagaattcttcatcttctttagatcccttgatttctccaaatactggtgccaaccccaattcatcattatctttcatgagaggagttttaccaaaatattttagctcagaatggtcatttgcacagttccacttgcctgaatacactcctttcattgtggcatttggatctcagaactctgtgataattgttggtatggatgggagtttctacaaatgcagctttgatcaagtacatgggggagagatggtgcaacaggagtatgttcgtttcctaaaatttgaaaataggcccagataaaagcatttcaagttgctcaacatccttgccaagcagcaattatcctcaagccatgtaaatatgtgtccagcaccaggcaataaaactcttctcattttgtgtaaatacgattcccctgtattggaggatctggagacattttttttgtatatcttgtatattttgggggggaaattgaaagtaaaaaggagaaatatcgaagcaacagctgcatcacaaataaatcacttgctgaag

SEQ ID NO: 53567 - protein, 377 aa, Glycine max
  peptide (1)..(377): Ceres Seq. ID no. 14306905
  misc_feature (218)..(254): Pfam Name: WD domain, G-beta repeat Pfam Description: WD domain, G-beta repeat
  misc_feature (1)..(305): Homolog of NCBI NO: 11288366 NR Description: hypothetical protein T5P19.90 - Arabidopsis
  misc_feature (1)..(371): Homolog of NCBI NO: 11288364 NR Description: hypothetical protein F26K9.200 - Arabidopsis
  misc_feature (287)..(371): Homolog of NCBI NO: 34907164 NR Description: P0423A12.19 [Oryza sativa (japonica
  misc_feature (11)..(284): Homolog of NCBI NO: 34907164 NR Description: P0423A12.19 [Oryza sativa (japonica
  misc_feature (280)..(371): Homolog of NCBI NO: 14517420 NR Description: AT3g62770/F26K9_200 [Arabidopsis thaliana]
  misc_feature (1)..(257): Homolog of NCBI NO: 14517420 NR Description: AT3g62770/F26K9_200 [Arabidopsis thaliana]
  misc_feature (1)..(306): Homolog of NCBI NO: 34896164 NR Description: hypothetical protein~similar to Arabidopsis
  misc_feature (6)..(376): Homolog of NCBI NO: 7487233 NR Description: hypothetical protein At2g40810 [imported] -
  misc_feature (1)..(377): Homolog of NCBI NO: 30694449 NR Description: WD-40 repeat protein family [Arabidopsis thaliana]
  misc_feature (1)..(376): Homolog of NCBI NO: 30688413 NR Description: WD-40 repeat protein family [Arabidopsis
MEDMNENEETDLLSISWNQDYGCFAAGTSHGFRIYNCEPCKETFRRDLKSGGFKIVEMLFRCNILALVGAVANSHYPPNKVLIWDDHQSRCIGEFTFRSDVRGVKLRRDRIVVVLEHKIYVYNFTDLKLLHQIETLANPRGLCCLSHYSNTFVLACPGLHKGQVRVEHFGLNVTKLINAHDSQIACFTLTLDGLLLATASVKGTLIRIFNTMDGSRLQEVRRGVDRAEINSIALSPNVQWLAASSDKGTVHVFSLRVRVFGEDSVTQPNAVQGPALFHQNSSSSLDPLISPNTGANPNSSLSFMRGVLPKYFSSEWSFAQFHLPEYTPFIVAFGSQNSVIIVGMDGSFYKCSFDQVHGGEMVQQEYVRFLKFENRPR

SEQ ID NO: 53568 - protein, 374 aa, Glycine max
  peptide (1)..(374): Ceres Seq. ID no. 14306906
  misc_feature (215)..(251): Pfam Name: WD domain, G-beta repeat Pfam Description: WD domain, G-beta repeat
  misc_feature (1)..(302): Homolog of NCBI NO: 11288366 NR Description: hypothetical protein T5P19.90 - Arabidopsis
  misc_feature (1)..(368): Homolog of NCBI NO: 11288364 NR Description: hypothetical protein F26K9.200 - Arabidopsis
  misc_feature (284)..(368): Homolog of NCBI NO: 34907164 NR Description: P0423A12.19 [Oryza sativa (japonica
  misc_feature (8)..(281): Homolog of NCBI NO: 34907164 NR Description: P0423A12.19 [Oryza sativa (japonica
  misc_feature (277)..(368): Homolog of NCBI NO: 14517420 NR Description: AT3g62770/F26K9_200 [Arabidopsis thaliana]
  misc_feature (1)..(254): Homolog of NCBI NO: 14517420 NR Description: AT3g62770/F26K9_200 [Arabidopsis thaliana]
  misc_feature (1)..(303): Homolog of NCBI NO: 34896164 NR Description: hypothetical protein~similar to Arabidopsis
  misc_feature (3)..(373): Homolog of NCBI NO: 7487233 NR Description: hypothetical protein At2g40810 [imported] -
  misc_feature (1)..(374): Homolog of NCBI NO: 30694449 NR Description: WD-40 repeat protein family [Arabidopsis thaliana]
  misc_feature (1)..(373): Homolog of NCBI NO: 30688413 NR Description: WD-40 repeat protein family [Arabidopsis
MNENEETDLLSISWNQDYGCFAAGTSHGFRIYNCEPCKETFRRDLKSGGFKIVEMLFRCNILALVGAVANSHYPPNKVLIWDDHQSRCIGEFTFRSDVRGVKLRRDRIVVVLEHKIYVYNFTDLKLLHQIETLANPRGLCCLSHYSNTFVLACPGLHKGQVRVEHFGLNVTKLINAHDSQIACFTLTLDGLLLATASVKGTLIRIFNTMDGSRLQEVRRGVDRAEINSIALSPNVQWLAASSDKGTVHVFSLRVRVFGEDSVTQPNAVQGPALFHQNSSSSLDPLISPNTGANPNSSLSFMRGVLPKYFSSEWSFAQFHLPEYTPFIVAFGSQNSVIIVGMDGSFYKCSFDQVHGGEMVQQEYVRFLKFENRPR

SEQ ID NO: 53569 - protein, 320 aa, Glycine max
  peptide (1)..(320): Ceres Seq. ID no. 14306907
  misc_feature (161)..(197): Pfam Name: WD domain, G-beta repeat Pfam Description: WD domain, G-beta repeat
  misc_feature (1)..(248): Homolog of NCBI NO: 11288366 NR Description: hypothetical protein T5P19.90 - Arabidopsis
  misc_feature (1)..(314): Homolog of NCBI NO: 11288364 NR Description: hypothetical protein F26K9.200 - Arabidopsis
  misc_feature (230)..(314): Homolog of NCBI NO: 34907164 NR Description: P0423A12.19 [Oryza sativa (japonica
  misc_feature (1)..(227): Homolog of NCBI NO: 34907164 NR Description: P0423A12.19 [Oryza sativa (japonica
  misc_feature (223)..(314): Homolog of NCBI NO: 14517420 NR Description: AT3g62770/F26K9_200 [Arabidopsis thaliana]
  misc_feature (1)..(200): Homolog of NCBI NO: 14517420 NR Description: AT3g62770/F26K9_200 [Arabidopsis thaliana]
  misc_feature (1)..(249): Homolog of NCBI NO: 34896164 NR Description: hypothetical protein~similar to Arabidopsis
  misc_feature (1)..(319): Homolog of NCBI NO: 7487233 NR Description: hypothetical protein At2g40810 [imported] -
  misc_feature (1)..(320): Homolog of NCBI NO: 30694449 NR Description: WD-40 repeat protein family [Arabidopsis thaliana]
  misc_feature (1)..(319): Homolog of NCBI NO: 30688413 NR Description: WD-40 repeat protein family [Arabidopsis
MLFRCNILALVGAVANSHYPPNKVLIWDDHQSRCIGEFTFRSDVRGVKLRRDRIVVVLEHKIYVYNFTDLKLLHQIETLANPRGLCCLSHYSNTFVLACPGLHKGQVRVEHFGLNVTKLINAHDSQIACFTLTLDGLLLATASVKGTLIRIFNTMDGSRLQEVRRGVDRAEINSIALSPNVQWLAASSDKGTVHVFSLRVRVFGEDSVTQPNAVQGPALFHQNSSSSLDPLISPNTGANPNSSLSFMRGVLPKYFSSEWSFAQFHLPEYTPFIVAFGSQNSVIIVGMDGSFYKCSFDQVHGGEMVQQEYVRFLKFENRPR

SEQ ID NO: 53570 - DNA, 1610 bp, Glycine max
  misc_feature (1)..(1610): Ceres Seq. ID no. 15174571
atctcttcctcttcaatttcgcatcttctccttctcattccaactccaaaatacacacacacgatggaaaccttcctcttcacctcagaatctgtaaacgagggccaccccgacaagatctgtgaccaggtttctgatgccatcctcgatgcttgcttggagcaagacccagagagcaaggttgcctgcgagacctgtacaaaaaccaacatggtcatggtctttggggagatcacaaccaaggccaaggtgaactacgagaaaatagtccgcgacacttgcagaggtattgggtttgtgtctgctgatgttggtctcgatgctgacaagtgcaatgttcttgtcaacattgagcaacagagccctgacattgcacagggagttcacggccacttgaccaagaagcccgaggaaatcggagccggtgaccaaggccacatgtttggttatgccacagacgaaacacccgaactaatgccactcactcatgtgcttgctaccaagcttggtgccaagctcactgaagtgagaaagaacaagacatgtccttggttgaggcctgatggcaaaacccaagtgactgttgagtacaggaatgatggtggggcaatggtccctatccgtgtgcacacagtcctcatctcaacccaacatgatgaaactgtgacaaatgatcaaattgcgaaagatttgaaagaacatgtgataaagcctgtgatcccagctgagtaccttgatgacaataccatcttccacctcaacccttctggtaggtttgtgattggaggacctcatggagatgcaggactcactgggaggaagatcatcattgatacctatggtgggtggggtgctcatggtggaggtgccttctctggcaaggatcctaccaaggttgataggagtggtgcatacattgttaggcaagcagcaaagagtgtggtggcttcagggctcgcgcgccgttgcattgtgcaggtttcctatgcaattggggtgcctgatccactgtctgtgtttgtggatacctacaaaactgggaagattccagacagtgatattctggctttgattaaggagcattttgacctcaggcctggaatgatttccatcaatcttgacctcatgagagggggaaacttcaggtaccagaagactgctgcttatggccattttggaagagatgatcctgatttcacatgggagacagtgaagatactcaagcccagtgcttgactgattcattggcattggtgttgtttcttaaggtggttatcatcgtaattggtaaccatctttctgattttgggttaggaaaataataataaaggagcttcggtgagtacatacttcatttaagattgtgtttctcggcttggatgaggaatgggagcggaaatgtgctgtgtcctaagtggaggcgtttgcacaataggagcatgcaagcagcattagctggctagctacctcttttggtttttgccttttctcttgaaattttctttgttgttcacctttttttatccctcgcctttctgatatttgattattttgcaaccaatcttgcgtggttggggtaaacttagaatgccatttgtttgattctttct

SEQ ID NO: 53571 - protein, 411 aa, Glycine max
  peptide (1)..(411): Ceres Seq. ID no. 15174572
  misc_feature (261)..(403): Pfam Name: S-adenosylmethionine synthetase, C-terminal domain Pfam Description: S-adenosylmethionine synthetase, C-terminal
  misc_feature (22)..(411): Homolog of NCBI NO: 38261499 NR Description: S-adenosyl-L-methionine synthetase [Nicotiana
  misc_feature (22)..(411): Homolog of NCBI NO: 14600070 NR Description: S-adenosylmethionine synthetase [Brassica juncea]
  misc_feature (22)..(411): Homolog of NCBI NO: 15228048 NR Description: s-adenosylmethionine synthetase -related
  misc_feature (22)..(411): Homolog of NCBI NO: 1708995 NR Description: S-adenosylmethionine synthetase 1 (Methionine
  misc_feature (22)..(411): Homolog of NCBI NO: 5923879 NR Description: S-adenosyl-L-methionine synthetase [Petunia x
  misc_feature (22)..(411): Homolog of NCBI NO: 7230379 NR Description: S-adenosyl-L-methionine synthetase [Nicotiana
  misc_feature (22)..(411): Homolog of NCBI NO: 3024148 NR Description: S-adenosylmethionine synthetase 3 (Methionine
  misc_feature (22)..(411): Homolog of NCBI NO: 1346523 NR Description: S-adenosylmethionine synthetase (Methionine
  misc_feature (22)..(411): Homolog of NCBI NO: 1709004 NR Description: S-adenosylmethionine synthetase 2 (Methionine
  misc_feature (22)..(411): Homolog of NCBI NO: 1170939 NR Description: S-adenosylmethionine synthetase 3 (Methionine
ISSSSISHLLLLIPTPKYTHTMETFLFTSESVNEGHPDKICDQVSDAILDACLEQDPESKVACETCTKTNMVMVFGEITTKAKVNYEKIVRDTCRGIGFVSADVGLDADKCNVLVNIEQQSPDIAQGVHGHLTKKPEEIGAGDQGHMFGYATDETPELMPLTHVLATKLGAKLTEVRKNKTCPWLRPDGKTQVTVEYRNDGGAMVPIRVHTVLISTQHDETVTNDQIAKDLKEHVIKPVIPAEYLDDNTIFHLNPSGRFVIGGPHGDAGLTGRKIIIDTYGGWGAHGGGAFSGKDPTKVDRSGAYIVRQAAKSVVASGLARRCIVQVSYAIGVPDPLSVFVDTYKTGKIPDSDILALIKEHFDLRPGMISINLDLMRGGNFRYQKTAAYGHFGRDDPDFTWETVKILKPSA

SEQ ID NO: 53572 - protein, 390 aa, Glycine max
  peptide (1)..(390): Ceres Seq. ID no. 15174573
  misc_feature (240)..(382): Pfam Name: S-adenosylmethionine synthetase, C-terminal domain Pfam Description: S-adenosylmethionine synthetase, C-terminal
  misc_feature (1)..(390): Homolog of NCBI NO: 38261499 NR Description: S-adenosyl-L-methionine synthetase [Nicotiana
  misc_feature (1)..(390): Homolog of NCBI NO: 14600070 NR Description: S-adenosylmethionine synthetase [Brassica juncea]
  misc_feature (1)..(390): Homolog of NCBI NO: 15228048 NR Description: s-adenosylmethionine synthetase -related
  misc_feature (1)..(390): Homolog of NCBI NO: 1708995 NR Description: S-adenosylmethionine synthetase 1 (Methionine
  misc_feature (1)..(390): Homolog of NCBI NO: 5923879 NR Description: S-adenosyl-L-methionine synthetase [Petunia x
  misc_feature (1)..(390): Homolog of NCBI NO: 7230379 NR Description: S-adenosyl-L-methionine synthetase [Nicotiana
  misc_feature (1)..(390): Homolog of NCBI NO: 3024148 NR Description: S-adenosylmethionine synthetase 3 (Methionine
  misc_feature (1)..(390): Homolog of NCBI NO: 1346523 NR Description: S-adenosylmethionine synthetase (Methionine
  misc_feature (1)..(390): Homolog of NCBI NO: 1709004 NR Description: S-adenosylmethionine synthetase 2 (Methionine
  misc_feature (1)..(390): Homolog of NCBI NO: 1170939 NR Description: S-adenosylmethionine synthetase 3 (Methionine
METFLFTSESVNEGHPDKICDQVSDAILDACLEQDPESKVACETCTKTNMVMVFGEITTKAKVNYEKIVRDTCRGIGFVSADVGLDADKCNVLVNIEQQSPDIAQGVHGHLTKKPEEIGAGDQGHMFGYATDETPELMPLTHVLATKLGAKLTEVRKNKTCPWLRPDGKTQVTVEYRNDGGAMVPIRVHTVLISTQHDETVTNDQIAKDLKEHVIKPVIPAEYLDDNTIFHLNPSGRFVIGGPHGDAGLTGRKIIIDTYGGWGAHGGGAFSGKDPTKVDRSGAYIVRQAAKSVVASGLARRCIVQVSYAIGVPDPLSVFVDTYKTGKIPDSDILALIKEHFDLRPGMISINLDLMRGGNFRYQKTAAYGHFGRDDPDFTWETVKILKPSA

SEQ ID NO: 53573 - protein, 341 aa, Glycine max
  peptide (1)..(341): Ceres Seq. ID no. 15174574
  misc_feature (191)..(333): Pfam Name: S-adenosylmethionine synthetase, C-terminal domain Pfam Description: S-adenosylmethionine synthetase, C-terminal
  misc_feature (1)..(341): Homolog of NCBI NO: 38261499 NR Description: S-adenosyl-L-methionine synthetase [Nicotiana
  misc_feature (1)..(341): Homolog of NCBI NO: 14600070 NR Description: S-adenosylmethionine synthetase [Brassica juncea]
  misc_feature (1)..(341): Homolog of NCBI NO: 15228048 NR Description: s-adenosylmethionine synthetase -related
  misc_feature (1)..(341): Homolog of NCBI NO: 1708995 NR Description: S-adenosylmethionine synthetase 1 (Methionine
  misc_feature (1)..(341): Homolog of NCBI NO: 5923879 NR Description: S-adenosyl-L-methionine synthetase [Petunia x
  misc_feature (1)..(341): Homolog of NCBI NO: 7230379 NR Description: S-adenosyl-L-methionine synthetase [Nicotiana
  misc_feature (1)..(341): Homolog of NCBI NO: 3024148 NR Description: S-adenosylmethionine synthetase 3 (Methionine
  misc_feature (1)..(341): Homolog of NCBI NO: 1346523 NR Description: S-adenosylmethionine synthetase (Methionine
  misc_feature (1)..(341): Homolog of NCBI NO: 1709004 NR Description: S-adenosylmethionine synthetase 2 (Methionine
  misc_feature (1)..(341): Homolog of NCBI NO: 1170939 NR Description: S-adenosylmethionine synthetase 3 (Methionine
MVMVFGEITTKAKVNYEKIVRDTCRGIGFVSADVGLDADKCNVLVNIEQQSPDIAQGVHGHLTKKPEEIGAGDQGHMFGYATDETPELMPLTHVLATKLGAKLTEVRKNKTCPWLRPDGKTQVTVEYRNDGGAMVPIRVHTVLISTQHDETVTNDQIAKDLKEHVIKPVIPAEYLDDNTIFHLNPSGRFVIGGPHGDAGLTGRKIIIDTYGGWGAHGGGAFSGKDPTKVDRSGAYIVRQAAKSVVASGLARRCIVQVSYAIGVPDPLSVFVDTYKTGKIPDSDILALIKEHFDLRPGMISINLDLMRGGNFRYQKTAAYGHFGRDDPDFTWETVKILKPSA

SEQ ID NO: 53574 - DNA, 1480 bp, Glycine max
  misc_feature (1)..(1480): Ceres Seq. ID no. 15169376
gagaatttaaaccacactgaaaacaaggaatcacgtccagatagcagttcacctgcatcctatttgcattttgacatgtctgaacaattgtctggggaaacccctgtggttacaccacgttttcagaatataacttctagtaatgagaaagtaagtcccggtttaactcttgatcactcaagccaaaatgctgaggtaatgctttcttctgatgatagtttttccataaatcaaaggacttcatctgctggctccaggtgtgatgatagatcagtagatccctctgctgaaatcacagaagaagatatttcaaaggaaatgacttcgaccaagtctctccaacagccgctccccatttttggagaaaagtctgtttgtgaagaatttggtccagcaagcaagccaaataataggtttgataaagttagcccgccaaaactcatgtgcatctcaactggtgatgaccaattcatggtgaggggaagactgtcatcagtggatgaaactgctcctttgattatttctactaatatttcaagccagaaagttttgcaagaagagaaagcaacagttttacagaatccagcaccagaaaggccagctgttgggcatcttcctccagcttttgatgatgtcattcatgtcatacgccatagcagttatcgcgtggggagtgagcagccagtgaaggaatctctggagatgggagttcaaagtgtagatgttggtaagtttatcaacattgtaagggatgatttagaaatgagaaatgtgagcactcctttgactctgaaatcttcaaattgctctgaagctattggcttgaagtcaaatatttctgataatatggaaatcagaaacttaagtaatcctcctaacttaaaatcttcaagttgcaccgacttgatgaacatcaaatcaagtttttctgatcatcctgttgttaggcaacaagatgtggaaaacactgattctcttgtttcaaaatctgattcctccgagtataccaaacataagactcctacagctgcagagggaacacccccaaaggaaattttggatgttaaatcttccaggcagagagctgaagcacttgaaggactgctagaattatctgcagatttgctgcagcaaaatagattggaggaacttgcagttgttctgaagccctttggaaaagataaagtttccccaagggagacggccatttggttagccaagagtctaaaaggattgatgattgaggaaagtgggggacgcagttaatgggtgttttttttaatccatggtaagtttgctactttgcttctatttgatattttctattactttttccacttcattgcttctcaagtgccacttgaattgagagaacaaacaggctttatcgtttcttctttcattttttgtaattctttttatgctgatgtaaatagtaaccatacgaatgaataccatcaacttacgatcaattgtgtgg

SEQ ID NO: 53575 - protein, 421 aa, Glycine max
  peptide (1)..(421): Ceres Seq. ID no. 15169377
  misc_feature (313)..(410): Homolog of NCBI NO: 15637110 NR Description: LSTK-1-like kinase [Lycopersicon esculentum]
  misc_feature (274)..(410): Homolog of NCBI NO: 15229361 NR Description: protein kinase, putative [Arabidopsis thaliana]
  misc_feature (328)..(410): Homolog of NCBI NO: 15241745 NR Description: protein kinase, putative [Arabidopsis thaliana]
  misc_feature (295)..(410): Homolog of NCBI NO: 15221843 NR Description: protein kinase family [Arabidopsis thaliana]
  misc_feature (295)..(410): Homolog of NCBI NO: 25405742 NR Description: hypothetical protein F20D21.32 [imported] -
  misc_feature (291)..(411): Homolog of NCBI NO: 34393832 NR Description: putative NIMA-related protein kinase
  misc_feature (274)..(410): Homolog of NCBI NO: 21954065 NR Description: putative kinase [Arabidopsis thaliana]
  misc_feature (63)..(421): Homolog of NCBI NO: 34908554 NR Description: putative kinase [Oryza sativa (japonica
  misc_feature (279)..(416): Homolog of NCBI NO: 15229902 NR Description: protein kinase family [Arabidopsis thaliana]
  misc_feature (70)..(261): Homolog of NCBI NO: 15229902 NR Description: protein kinase family [Arabidopsis thaliana]
ENLNHTENKESRPDSSSPASYLHFDMSEQLSGETPVVTPRFQNITSSNEKVSPGLTLDHSSQNAEVMLSSDDSFSINQRTSSAGSRCDDRSVDPSAEITEEDISKEMTSTKSLQQPLPIFGEKSVCEEFGPASKPNNRFDKVSPPKLMCISTGDDQFMVRGRLSSVDETAPLIISTNISSQKVLQEEKATVLQNPAPERPAVGHLPPAFDDVIHVIRHSSYRVGSEQPVKESLEMGVQSVDVGKFINIVRDDLEMRNVSTPLTLKSSNCSEAIGLKSNISDNMEIRNLSNPPNLKSSSCTDLMNIKSSFSDHPVVRQQDVENTDSLVSKSDSSEYTKHKTPTAAEGTPPKEILDVKSSRQRAEALEGLLELSADLLQQNRLEELAVVLKPFGKDKVSPRETAIWLAKSLKGLMIEESGGRS

SEQ ID NO: 53576 - protein, 396 aa, Glycine max
  peptide (1)..(396): Ceres Seq. ID no. 15169378
  misc_feature (288)..(385): Homolog of NCBI NO: 15637110 NR Description: LSTK-1-like kinase [Lycopersicon esculentum]
  misc_feature (249)..(385): Homolog of NCBI NO: 15229361 NR Description: protein kinase, putative [Arabidopsis thaliana]
  misc_feature (303)..(385): Homolog of NCBI NO: 15241745 NR Description: protein kinase, putative [Arabidopsis thaliana]
  misc_feature (270)..(385): Homolog of NCBI NO: 15221843 NR Description: protein kinase family [Arabidopsis thaliana]
  misc_feature (270)..(385): Homolog of NCBI NO: 25405742 NR Description: hypothetical protein F20D21.32 [imported] -
  misc_feature (266)..(386): Homolog of NCBI NO: 34393832 NR Description: putative NIMA-related protein kinase
  misc_feature (249)..(385): Homolog of NCBI NO: 21954065 NR Description: putative kinase [Arabidopsis thaliana]
  misc_feature (38)..(396): Homolog of NCBI NO: 34908554 NR Description: putative kinase [Oryza sativa (japonica
  misc_feature (254)..(391): Homolog of NCBI NO: 15229902 NR Description: protein kinase family [Arabidopsis thaliana]
  misc_feature (45)..(236): Homolog of NCBI NO: 15229902 NR Description: protein kinase family [Arabidopsis thaliana]
MSEQLSGETPVVTPRFQNITSSNEKVSPGLTLDHSSQNAEVMLSSDDSFSINQRTSSAGSRCDDRSVDPSAEITEEDISKEMTSTKSLQQPLPIFGEKSVCEEFGPASKPNNRFDKVSPPKLMCISTGDDQFMVRGRLSSVDETAPLIISTNISSQKVLQEEKATVLQNPAPERPAVGHLPPAFDDVIHVIRHSSYRVGSEQPVKESLEMGVQSVDVGKFINIVRDDLEMRNVSTPLTLKSSNCSEAIGLKSNISDNMEIRNLSNPPNLKSSSCTDLMNIKSSFSDHPVVRQQDVENTDSLVSKSDSSEYTKHKTPTAAEGTPPKEILDVKSSRQRAEALEGLLELSADLLQQNRLEELAVVLKPFGKDKVSPRETAIWLAKSLKGLMIEESGGRS

SEQ ID NO: 53577 - protein, 355 aa, Glycine max
  peptide (1)..(355): Ceres Seq. ID no. 15169379
  misc_feature (247)..(344): Homolog of NCBI NO: 15637110 NR Description: LSTK-1-like kinase [Lycopersicon esculentum]
  misc_feature (208)..(344): Homolog of NCBI NO: 15229361 NR Description: protein kinase, putative [Arabidopsis thaliana]
  misc_feature (262)..(344): Homolog of NCBI NO: 15241745 NR Description: protein kinase, putative [Arabidopsis thaliana]
  misc_feature (229)..(344): Homolog of NCBI NO: 15221843 NR Description: protein kinase family [Arabidopsis thaliana]
  misc_feature (229)..(344): Homolog of NCBI NO: 25405742 NR Description: hypothetical protein F20D21.32 [imported] -
  misc_feature (225)..(345): Homolog of NCBI NO: 34393832 NR Description: putative NIMA-related protein kinase
  misc_feature (208)..(344): Homolog of NCBI NO: 21954065 NR Description: putative kinase [Arabidopsis thaliana]
  misc_feature (1)..(355): Homolog of NCBI NO: 34908554 NR Description: putative kinase [Oryza sativa (japonica
  misc_feature (213)..(350): Homolog of NCBI NO: 15229902 NR Description: protein kinase family [Arabidopsis thaliana]
  misc_feature (4)..(195): Homolog of NCBI NO: 15229902 NR Description: protein kinase family [Arabidopsis thaliana]
MLSSDDSFSINQRTSSAGSRCDDRSVDPSAEITEEDISKEMTSTKSLQQPLPIFGEKSVCEEFGPASKPNNRFDKVSPPKLMCISTGDDQFMVRGRLSSVDETAPLIISTNISSQKVLQEEKATVLQNPAPERPAVGHLPPAFDDVIHVIRHSSYRVGSEQPVKESLEMGVQSVDVGKFINIVRDDLEMRNVSTPLTLKSSNCSEAIGLKSNISDNMEIRNLSNPPNLKSSSCTDLMNIKSSFSDHPVVRQQDVENTDSLVSKSDSSEYTKHKTPTAAEGTPPKEILDVKSSRQRAEALEGLLELSADLLQQNRLEELAVVLKPFGKDKVSPRETAIWLAKSLKGLMIEESGGRS

SEQ ID NO: 53578 - DNA, 1710 bp, Glycine max
  misc_feature (1)..(1710): Ceres Seq. ID no. 15169326
aaggcaatggcaaagccaagaagatcaaagatgatgtctttgaaactccctttcctgttgaccttgttcctcgcactctcccaagctcaaccgcattccgatgatccaccgccgccaccctcctccaacgtctgcgtcatcggcgctggcatcggtggctcctccgtcgctcacttcctccgcaaatactcgccgtcctccactccctccaccaaaatccgagtgttcgagcgcaacggccgcgtcgggggacgcatcgccaccgtgacggtggcgggcgagaccttcgaggccggagcgtccattctccatccaaagaacctgcacacagtggattacgttaagatcctgaagctgaaggtcaaagagccgaccgcgtcggaggattccctctctctcggcatttgggatgggaacaagttcgttttcaaaacggtgtcgccgcttagttccactgttcccctcatcgataagcttctcaaacttccgtttgttaatactctcgtatcgttcgttaattccgcactcatgttcgttcgctacggcttctcgctctttaagatgcagaacttcgttgagattgctgtggataaattcgtaaagtactatgaagatcctggttcaagacctatttttgagactgtggatgagatgctgcagtgggctggtctgtataatcttactaccaggactttgcgggatgaattggtggatgctgggttgtctacctcgttgatcaatgaacttgttactgtcatcacacgcattaattatggccagagtgtctccatgagtgggttgggtggtgtggtttctctagcaggatcaggtggaggattatggtccatcgaaggaggcaactggcaaatggctgctggactgattaatcagtcagatgtggcattacacctgcatgaagaaataaaatctgttgctgaccttggagattactacgaactcaactcaacaaaaggaaacagttacagatgtgaagttgctgtggttgctacaccactggatgagttagatattcaatttattcctccaatttcaattcctgagagaaaattacagcacacatttacaacttttgtcaggggccttctaaaccctgcatattttggtctgaaggctgtgacaaaaattccagatcttgtgggcacaatagaggaccctgagcttccattttcatgcattgcagttctcaagaagcacaatgaaaaagaatctacttataaattattttctcgtcaaccaatggcagacacattactggatagcatcttcagtgtgaggaaggagaccattcggataaactgggctgcatatcctcattaccacgccccagaagtatttgcaccatttatattggacgggcgacatctatactacgttaatgcatttgaaaatgcagctagcaccatggagacaagtgctgtggcagctgagaatattgcccgactcatactgtcaagatattttggccaagtaattgtgcattcatctaatttgtctgcaagttctcaaggagagggtactcatttagatttgtgagacagtgatcgtaagatattgttagtttggatgatggtagattttatataaattgcatctgaattctgaaaatttggaaaatcatacaatgtataaacactgggtcaataaatgattactctctccacccataaagccgatacattgcctgtttac

SEQ ID NO: 53579 - protein, 517 aa, Glycine max
  peptide (1)..(517): Ceres Seq. ID no. 15169327
  misc_feature (19)..(495): Homolog of NCBI NO: 12643885 NR Description: Prenylcysteine oxidase precursor
  misc_feature (19)..(495): Homolog of NCBI NO: 21708072 NR Description: prenylcysteine lyase [Homo sapiens]
  misc_feature (19)..(495): Homolog of NCBI NO: 33620751 NR Description: prenylcysteine lyase [Homo sapiens]
  misc_feature (19)..(495): Homolog of NCBI NO: 4240305 NR Description: KIAA0908 protein [Homo sapiens]
  misc_feature (19)..(495): Homolog of NCBI NO: 14388370 NR Description: hypothetical protein [Macaca fascicularis]
  misc_feature (12)..(144): Homolog of NCBI NO: 34932038 NR Description: similar to hypothetical protein C630049M13
  misc_feature (181)..(375): Homolog of NCBI NO: 34932038 NR Description: similar to hypothetical protein C630049M13
  misc_feature (12)..(144): Homolog of NCBI NO: 27370248 NR Description: hypothetical protein C630049M13 [Mus musculus]
  misc_feature (181)..(375): Homolog of NCBI NO: 27370248 NR Description: hypothetical protein C630049M13 [Mus musculus]
  misc_feature (34)..(510): Homolog of NCBI NO: 15237560 NR Description: expressed protein [Arabidopsis thaliana]
KAMAKPRRSKMMSLKLPFLLTLFLALSQAQPHSDDPPPPPSSNVCVIGAGIGGSSVAHFLRKYSPSSTPSTKIRVFERNGRVGGRIATVTVAGETFEAGASILHPKNLHTVDYVKILKLKVKEPTASEDSLSLGIWDGNKFVFKTVSPLSSTVPLIDKLLKLPFVNTLVSFVNSALMFVRYGFSLFKMQNFVEIAVDKFVKYYEDPGSRPIFETVDEMLQWAGLYNLTTRTLRDELVDAGLSTSLINELVTVITRINYGQSVSMSGLGGVVSLAGSGGGLWSIEGGNWQMAAGLINQSDVALHLHEEIKSVADLGDYYELNSTKGNSYRCEVAVVATPLDELDIQFIPPISIPERKLQHTFTTFVRGLLNPAYFGLKAVTKIPDLVGTIEDPELPFSCIAVLKKHNEKESTYKLFSRQPMADTLLDSIFSVRKETIRINWAAYPHYHAPEVFAPFILDGRHLYYVNAFENAASTMETSAVAAENIARLILSRYFGQVIVHSSNLSASSQGEGTHLDL

SEQ ID NO: 53580 - protein, 515 aa, Glycine max
  peptide (1)..(515): Ceres Seq. ID no. 15169328
  misc_feature (17)..(493): Homolog of NCBI NO: 12643885 NR Description: Prenylcysteine oxidase precursor
  misc_feature (17)..(493): Homolog of NCBI NO: 33620751 NR Description: prenylcysteine lyase [Homo sapiens]
  misc_feature (17)..(493): Homolog of NCBI NO: 21708072 NR Description: prenylcysteine lyase [Homo sapiens]
  misc_feature (17)..(493): Homolog of NCBI NO: 4240305 NR Description: KIAA0908 protein [Homo sapiens]
  misc_feature (17)..(493): Homolog of NCBI NO: 14388370 NR Description: hypothetical protein [Macaca fascicularis]
  misc_feature (10)..(142): Homolog of NCBI NO: 34932038 NR Description: similar to hypothetical protein C630049M13
  misc_feature (179)..(373): Homolog of NCBI NO: 34932038 NR Description: similar to hypothetical protein C630049M13
  misc_feature (10)..(142): Homolog of NCBI NO: 27370248 NR Description: hypothetical protein C630049M13 [Mus musculus]
  misc_feature (179)..(373): Homolog of NCBI NO: 27370248 NR Description: hypothetical protein C630049M13 [Mus musculus]
  misc_feature (32)..(508): Homolog of NCBI NO: 15237560 NR Description: expressed protein [Arabidopsis thaliana]
MAKPRRSKMMSLKLPFLLTLFLALSQAQPHSDDPPPPPSSNVCVIGAGIGGSSVAHFLRKYSPSSTPSTKIRVFERNGRVGGRIATVTVAGETFEAGASILHPKNLHTVDYVKILKLKVKEPTASEDSLSLGIWDGNKFVFKTVSPLSSTVPLIDKLLKLPFVNTLVSFVNSALMFVRYGFSLFKMQNFVEIAVDKFVKYYEDPGSRPIFETVDEMLQWAGLYNLTTRTLRDELVDAGLSTSLINELVTVITRINYGQSVSMSGLGGVVSLAGSGGGLWSIEGGNWQMAAGLINQSDVALHLHEEIKSVADLGDYYELNSTKGNSYRCEVAVVATPLDELDIQFIPPISIPERKLQHTFTTFVRGLLNPAYFGLKAVTKIPDLVGTIEDPELPFSCIAVLKKHNEKESTYKLFSRQPMADTLLDSIFSVRKETIRINWAAYPHYHAPEVFAPFILDGRHLYYVNAFENAASTMETSAVAAENIARLILSRYFGQVIVHSSNLSASSQGEGTHLDL

SEQ ID NO: 53581 - protein, 507 aa, Glycine max
  peptide (1)..(507): Ceres Seq. ID no. 15169329
  misc_feature (9)..(485): Homolog of NCBI NO: 12643885 NR Description: Prenylcysteine oxidase precursor
  misc_feature (9)..(485): Homolog of NCBI NO: 33620751 NR Description: prenylcysteine lyase [Homo sapiens]
  misc_feature (9)..(485): Homolog of NCBI NO: 21708072 NR Description: prenylcysteine lyase [Homo sapiens]
  misc_feature (9)..(485): Homolog of NCBI NO: 4240305 NR Description: KIAA0908 protein [Homo sapiens]
  misc_feature (9)..(485): Homolog of NCBI NO: 14388370 NR Description: hypothetical protein [Macaca fascicularis]
  misc_feature (2)..(134): Homolog of NCBI NO: 34932038 NR Description: similar to hypothetical protein C630049M13
  misc_feature (171)..(365): Homolog of NCBI NO: 34932038 NR Description: similar to hypothetical protein C630049M13
  misc_feature (2)..(134): Homolog of NCBI NO: 27370248 NR Description: hypothetical protein C630049M13 [Mus musculus]
  misc_feature (171)..(365): Homolog of NCBI NO: 27370248 NR Description: hypothetical protein C630049M13 [Mus musculus]
  misc_feature (24)..(500): Homolog of NCBI NO: 15237560 NR Description: expressed protein [Arabidopsis thaliana]
MMSLKLPFLLTLFLALSQAQPHSDDPPPPPSSNVCVIGAGIGGSSVAHFLRKYSPSSTPSTKIRVFERNGRVGGRIATVTVAGETFEAGASILHPKNLHTVDYVKILKLKVKEPTASEDSLSLGIWDGNKFVFKTVSPLSSTVPLIDKLLKLPFVNTLVSFVNSALMFVRYGFSLFKMQNFVEIAVDKFVKYYEDPGSRPIFETVDEMLQWAGLYNLTTRTLRDELVDAGLSTSLINELVTVITRINYGQSVSMSGLGGVVSLAGSGGGLWSIEGGNWQMAAGLINQSDVALHLHEEIKSVADLGDYYELNSTKGNSYRCEVAVVATPLDELDIQFIPPISIPERKLQHTFTTFVRGLLNPAYFGLKAVTKIPDLVGTIEDPELPFSCIAVLKKHNEKESTYKLFSRQPMADTLLDSIFSVRKETIRINWAAYPHYHAPEVFAPFILDGRHLYYVNAFENAASTMETSAVAAENIARLILSRYFGQVIVHSSNLSASSQGEGTHLDL

SEQ ID NO: 53582 - DNA, 1613 bp, Glycine max
  misc_feature (1)..(1613): Ceres Seq. ID no. 14310713
gtgttctcttcgaaagcggaatcaatcaatccctcatctcattgctgagatctgcaagctggctatggactacgaaccctacgacagtagcggaactgatgatgaccttccaccaacccatcaaaatagaatttccaggggaggaggaggacgtctcgctgggaatgggagatctgctgttggttcaattccttacccaaggatgtatggtgaaattgatatggagacccaaattcatcagcttgagcaagaagcatacagttcagttctaagagcctttaaagctcaagccgatgccattacttgggagaaagaaagtttgattacagagctgagaaaagaactgagattgtcaaatgaggagcacagagaacttctaggtcgagttaatgctgatgatgtgatacggaggataagggaatggagacaggcaggtggccatcagcctggtgtacttagcactggtcaaggacttcatgattcaattcccagtcccacagtctctgcttctcgcaaaaagcagaagattacaccatctgtaccaccatcacgatctttttgcggaccttctcctccatttcacccccaaacactgactgcgccccaccaaccatcttctgcagcaaaacgtggatctgctcgtgggtcaaagggaaagaagcacaaacctggtcaaatattacctggtgtatcttcaatgaagcagtatccttcgtcaggaccaggtggaaggaatcaggtacctaatagagctgccatgggtgagcatgccgagggagcatcatttgattcgttggttggtaggagagtgcggacaaagtggcctgacgacaataacttctatgaagctgttatcacgaactacaatccagctgatggacgacataatctggtctatgacatggggagtgcaaatgaaacatgggaatgggttaatctatcagagatatctcctgaagatattcagtgggtaggtgaggatcctggaatcaatcatcgtgggggttttgggggccctggtcatgggatgaataggtctgttggacgagatggtgttccaggagctggaagaggtagaggagcagcaaaggggcaatccagaaaagattttttgtcatcacagaatggcataggaaagaaggcgcctgatgatatacaaatacttcacacagacacactaatcaaggaggtggagaaggtattcagtgcaaatcaccctgatccccttgaagttgagaaagcaaagaaagtattgaaggatcatgagcaagctcttattgatgcaattgcaagacttaatgatctttctgatggtgaaagtgatggggctggggctgcccaccatttctcacatgctcaatcaatggatcgagagtgatgagcacctgttaatttgtacaatgagcagaggaggcattaagatagcataattctggaaaagggtgtatttctattgtattatcacataaagattattaccctctaacagtttatagctgtaggcatggttcttgtggattaggcattatgtaggatggcaaatattgtagtttggtaataattatttatttcagtttgaaagttgacctaggaccagctgatgatacttgtac

SEQ ID NO: 53583 - protein, 458 aa, Glycine max
  peptide (1)..(458): Ceres Seq. ID no. 14310714
  misc_feature (74)..(144): Pfam Name: ENT domain Pfam Description: ENT domain
  misc_feature (153)..(445): Homolog of NCBI NO: 11358228 NR Description: hypothetical protein T24H18.190 - Arabidopsis
  misc_feature (74)..(207): Homolog of NCBI NO: 21553685 NR Description: unknown [Arabidopsis thaliana]
  misc_feature (232)..(448): Homolog of NCBI NO: 21553685 NR Description: unknown [Arabidopsis thaliana]
  misc_feature (68)..(207): Homolog of NCBI NO: 15240146 NR Description: expressed protein [Arabidopsis thaliana]
  misc_feature (232)..(448): Homolog of NCBI NO: 15240146 NR Description: expressed protein [Arabidopsis thaliana]
  misc_feature (74)..(183): Homolog of NCBI NO: 9294111 NR Description: emb|CAB88266.1~gene_id:T23B7.8~similar to unknown
  misc_feature (237)..(439): Homolog of NCBI NO: 9294111 NR Description: emb|CAB88266.1~gene_id:T23B7.8~similar to unknown
  misc_feature (74)..(183): Homolog of NCBI NO: 15229958 NR Description: expressed protein [Arabidopsis thaliana]
  misc_feature (237)..(442): Homolog of NCBI NO: 15229958 NR Description: expressed protein [Arabidopsis thaliana]
  misc_feature (22)..(441): Homolog of NCBI NO: 38637206 NR Description: unknown protein [Oryza sativa (japonica
CSLRKRNQSIPHLIAEICKLAMDYEPYDSSGTDDDLPPTHQNRISRGGGGRLAGNGRSAVGSIPYPRMYGEIDMETQIHQLEQEAYSSVLRAFKAQADAITWEKESLITELRKELRLSNEEHRELLGRVNADDVIRRIREWRQAGGHQPGVLSTGQGLHDSIPSPTVSASRKKQKITPSVPPSRSFCGPSPPFHPQTLTAPHQPSSAAKRGSARGSKGKKHKPGQILPGVSSMKQYPSSGPGGRNQVPNRAAMGEHAEGASFDSLVGRRVRTKWPDDNNFYEAVITNYNPADGRHNLVYDMGSANETWEWVNLSEISPEDIQWVGEDPGINHRGGFGGPGHGMNRSVGRDGVPGAGRGRGAAKGQSRKDFLSSQNGIGKKAPDDIQILHTDTLIKEVEKVFSANHPDPLEVEKAKKVLKDHEQALIDAIARLNDLSDGESDGAGAAHHFSHAQSMDRE

SEQ ID NO: 53584 - protein, 437 aa, Glycine max
  peptide (1)..(437): Ceres Seq. ID no. 14310715
  misc_feature (53)..(123): Pfam Name: ENT domain Pfam Description: ENT domain
  misc_feature (132)..(424): Homolog of NCBI NO: 11358228 NR Description: hypothetical protein T24H18.190 - Arabidopsis
  misc_feature (53)..(186): Homolog of NCBI NO: 21553685 NR Description: unknown [Arabidopsis thaliana]
  misc_feature (211)..(427): Homolog of NCBI NO: 21553685 NR Description: unknown [Arabidopsis thaliana]
  misc_feature (47)..(186): Homolog of NCBI NO: 15240146 NR Description: expressed protein [Arabidopsis thaliana]
  misc_feature (211)..(427): Homolog of NCBI NO: 15240146 NR Description: expressed protein [Arabidopsis thaliana]
  misc_feature (53)..(162): Homolog of NCBI NO: 9294111 NR Description: emb|CAB88266.1~gene_id:T23B7.8~similar to unknown
  misc_feature (216)..(418): Homolog of NCBI NO: 9294111 NR Description: emb|CAB88266.1~gene_id:T23B7.8~similar to unknown
  misc_feature (53)..(162): Homolog of NCBI NO: 15229958 NR Description: expressed protein [Arabidopsis thaliana]
  misc_feature (216)..(421): Homolog of NCBI NO: 15229958 NR Description: expressed protein [Arabidopsis thaliana]
  misc_feature (1)..(420): Homolog of NCBI NO: 38637206 NR Description: unknown protein [Oryza sativa (japonica
MDYEPYDSSGTDDDLPPTHQNRISRGGGGRLAGNGRSAVGSIPYPRMYGEIDMETQIHQLEQEAYSSVLRAFKAQADAITWEKESLITELRKELRLSNEEHRELLGRVNADDVIRRIREWRQAGGHQPGVLSTGQGLHDSIPSPTVSASRKKQKITPSVPPSRSFCGPSPPFHPQTLTAPHQPSSAAKRGSARGSKGKKHKPGQILPGVSSMKQYPSSGPGGRNQVPNRAAMGEHAEGASFDSLVGRRVRTKWPDDNNFYEAVITNYNPADGRHNLVYDMGSANETWEWVNLSEISPEDIQWVGEDPGINHRGGFGGPGHGMNRSVGRDGVPGAGRGRGAAKGQSRKDFLSSQNGIGKKAPDDIQILHTDTLIKEVEKVFSANHPDPLEVEKAKKVLKDHEQALIDAIARLNDLSDGESDGAGAAHHFSHAQSMDRE

SEQ ID NO: 53585 - protein, 391 aa, Glycine max
  peptide (1)..(391): Ceres Seq. ID no. 14310716
  misc_feature (7)..(77): Pfam Name: ENT domain Pfam Description: ENT domain
  misc_feature (86)..(378): Homolog of NCBI NO: 11358228 NR Description: hypothetical protein T24H18.190 - Arabidopsis
  misc_feature (7)..(140): Homolog of NCBI NO: 21553685 NR Description: unknown [Arabidopsis thaliana]
  misc_feature (165)..(381): Homolog of NCBI NO: 21553685 NR Description: unknown [Arabidopsis thaliana]
  misc_feature (1)..(140): Homolog of NCBI NO: 15240146 NR Description: expressed protein [Arabidopsis thaliana]
  misc_feature (165)..(381): Homolog of NCBI NO: 15240146 NR Description: expressed protein [Arabidopsis thaliana]
  misc_feature (7)..(116): Homolog of NCBI NO: 9294111 NR Description: emb|CAB88266.1~gene_id:T23B7.8~similar to unknown
  misc_feature (170)..(372): Homolog of NCBI NO: 9294111 NR Description: emb|CAB88266.1~gene_id:T23B7.8~similar to unknown
  misc_feature (7)..(116): Homolog of NCBI NO: 15229958 NR Description: expressed protein [Arabidopsis thaliana]
  misc_feature (170)..(375): Homolog of NCBI NO: 15229958 NR Description: expressed protein [Arabidopsis thaliana]
  misc_feature (1)..(374): Homolog of NCBI NO: 38637206 NR Description: unknown protein [Oryza sativa (japonica
MYGEIDMETQIHQLEQEAYSSVLRAFKAQADAITWEKESLITELRKELRLSNEEHRELLGRVNADDVIRRIREWRQAGGHQPGVLSTGQGLHDSIPSPTVSASRKKQKITPSVPPSRSFCGPSPPFHPQTLTAPHQPSSAAKRGSARGSKGKKHKPGQILPGVSSMKQYPSSGPGGRNQVPNRAAMGEHAEGASFDSLVGRRVRTKWPDDNNFYEAVITNYNPADGRHNLVYDMGSANETWEWVNLSEISPEDIQWVGEDPGINHRGGFGGPGHGMNRSVGRDGVPGAGRGRGAAKGQSRKDFLSSQNGIGKKAPDDIQILHTDTLIKEVEKVFSANHPDPLEVEKAKKVLKDHEQALIDAIARLNDLSDGESDGAGAAHHFSHAQSMDRE

SEQ ID NO: 53586 - DNA, 1065 bp, Glycine max
  misc_feature (1)..(1065): Ceres Seq. ID no. 14305022
gagaaatgggtctgctttctaacagagtggagagacatgagatcaagcctggcgatcacatctacacatacagagctgttttcacctattctcatcatggcatttttgttgggggaagcaaggttgtacatttcagacctgaaagaaacttaaagtcaatgactgagacatcatcaaactgggatgatccaacatcaaacccatgtccaacctttcctgattgtggattcagacaaccaaacagtggagtagtcctttcttgcttagactgcttccttcgaaatgggtctctttactgttttgagtatgaggtttcaccatctgttttcctcagcagaataaggggtggcacatgcactactgcatcagctgacccaccagagactgttattcatcgagctatgtatcttcttcaaaacggctttggaaattataatgtttttcagaacaattgtgaggattttgccttgtactgcaaaactggtcttttgatacaagacaagcaaggggttggaagaagtggccaagcttcttctgttattggtgctccattggctgcaatgatctcttctcctctcaagttgttaatgccaagtcctgttggtgttgctactgtaactgcaggaatgtactgcatgagcagatatgcaactgatattggtgtcagaagtgatgtgatcaaggtgccagtgggagacttggctgtgaaccttggatggatttgtcaagaggaggaggaggtagctgaacatgaaaatccagacagacagattaccaccagatgatctagcattgctcttcatccttactatgcacatgaaactgttgcatgtgtcactgttagttatacactagttcatagcagatatgtcttcattcatgttatatcttctgtgattggtgtctagttattcaagttgtgtctgggatgaaaatggaacaatattattacttatagtagtaactataatgtgatgtattcctttgagacaaattttcttctagttgcctataataatgcaacattctacccacaatagtgattgaaccatcttgttgtgcatc

SEQ ID NO: 53587 - protein, 260 aa, Glycine max
  peptide (1)..(260): Ceres Seq. ID no. 14305023
  misc_feature (98)..(179): Pfam Name: NC domain Pfam Description: NC domain
  misc_feature (1)..(233): Homolog of NCBI NO: 15237327 NR Description: hypothetical protein [Arabidopsis thaliana]
  misc_feature (33)..(237): Homolog of NCBI NO: 9758417 NR Description: gb|AAF32477.1~gene_id:MHF15.11~similar to unknown
  misc_feature (173)..(238): Homolog of NCBI NO: 15237330 NR Description: expressed protein [Arabidopsis thaliana]
  misc_feature (2)..(195): Homolog of NCBI NO: 15237330 NR Description: expressed protein [Arabidopsis thaliana]
  misc_feature (2)..(259): Homolog of NCBI NO: 21594170 NR Description: unknown [Arabidopsis thaliana]
  misc_feature (2)..(259): Homolog of NCBI NO: 18396282 NR Description: expressed protein [Arabidopsis thaliana]
  misc_feature (2)..(237): Homolog of NCBI NO: 18415178 NR Description: expressed protein [Arabidopsis thaliana]
  misc_feature (2)..(238): Homolog of NCBI NO: 22328196 NR Description: expressed protein [Arabidopsis thaliana]
  misc_feature (2)..(254): Homolog of NCBI NO: 21592684 NR Description: unknown [Arabidopsis thaliana]
  misc_feature (2)..(254): Homolog of NCBI NO: 18378812 NR Description: expressed protein [Arabidopsis thaliana]
EMGLLSNRVERHEIKPGDHIYTYRAVFTYSHHGIFVGGSKVVHFRPERNLKSMTETSSNWDDPTSNPCPTFPDCGFRQPNSGVVLSCLDCFLRNGSLYCFEYEVSPSVFLSRIRGGTCTTASADPPETVIHRAMYLLQNGFGNYNVFQNNCEDFALYCKTGLLIQDKQGVGRSGQASSVIGAPLAAMISSPLKLLMPSPVGVATVTAGMYCMSRYATDIGVRSDVIKVPVGDLAVNLGWICQEEEEVAEHENPDRQITTR

SEQ ID NO: 53588 - protein, 259 aa, Glycine max
  peptide (1)..(259): Ceres Seq. ID no. 14305024
  misc_feature (97)..(178): Pfam Name: NC domain Pfam Description: NC domain
  misc_feature (1)..(232): Homolog of NCBI NO: 15237327 NR Description: hypothetical protein [Arabidopsis thaliana]
  misc_feature (32)..(236): Homolog of NCBI NO: 9758417 NR Description: gb|AAF32477.1~gene_id:MHF15.11~similar to unknown
  misc_feature (172)..(237): Homolog of NCBI NO: 15237330 NR Description: expressed protein [Arabidopsis thaliana]
  misc_feature (1)..(194): Homolog of NCBI NO: 15237330 NR Description: expressed protein [Arabidopsis thaliana]
  misc_feature (1)..(258): Homolog of NCBI NO: 21594170 NR Description: unknown [Arabidopsis thaliana]
  misc_feature (1)..(258): Homolog of NCBI NO: 18396282 NR Description: expressed protein [Arabidopsis thaliana]
  misc_feature (1)..(236): Homolog of NCBI NO: 18415178 NR Description: expressed protein [Arabidopsis thaliana]
  misc_feature (1)..(237): Homolog of NCBI NO: 22328196 NR Description: expressed protein [Arabidopsis thaliana]
  misc_feature (1)..(253): Homolog of NCBI NO: 21592684 NR Description: unknown [Arabidopsis thaliana]
  misc_feature (1)..(253): Homolog of NCBI NO: 18378812 NR Description: expressed protein [Arabidopsis thaliana]
MGLLSNRVERHEIKPGDHIYTYRAVFTYSHHGIFVGGSKVVHFRPERNLKSMTETSSNWDDPTSNPCPTFPDCGFRQPNSGVVLSCLDCFLRNGSLYCFEYEVSPSVFLSRIRGGTCTTASADPPETVIHRAMYLLQNGFGNYNVFQNNCEDFALYCKTGLLIQDKQGVGRSGQASSVIGAPLAAMISSPLKLLMPSPVGVATVTAGMYCMSRYATDIGVRSDVIKVPVGDLAVNLGWICQEEEEVAEHENPDRQITTR

SEQ ID NO: 53589 - protein, 208 aa, Glycine max
  peptide (1)..(208): Ceres Seq. ID no. 14305025
  misc_feature (46)..(127): Pfam Name: NC domain Pfam Description: NC domain
  misc_feature (1)..(181): Homolog of NCBI NO: 15237327 NR Description: hypothetical protein [Arabidopsis thaliana]
  misc_feature (1)..(185): Homolog of NCBI NO: 9758417 NR Description: gb|AAF32477.1~gene_id:MHF15.11~similar to unknown
  misc_feature (121)..(186): Homolog of NCBI NO: 15237330 NR Description: expressed protein [Arabidopsis thaliana]
  misc_feature (1)..(143): Homolog of NCBI NO: 15237330 NR Description: expressed protein [Arabidopsis thaliana]
  misc_feature (1)..(207): Homolog of NCBI NO: 21594170 NR Description: unknown [Arabidopsis thaliana]
  misc_feature (1)..(207): Homolog of NCBI NO: 18396282 NR Description: expressed protein [Arabidopsis thaliana]
  misc_feature (1)..(185): Homolog of NCBI NO: 18415178 NR Description: expressed protein [Arabidopsis thaliana]
  misc_feature (1)..(186): Homolog of NCBI NO: 22328196 NR Description: expressed protein [Arabidopsis thaliana]
  misc_feature (1)..(202): Homolog of NCBI NO: 21592684 NR Description: unknown [Arabidopsis thaliana]
  misc_feature (1)..(202): Homolog of NCBI NO: 18378812 NR Description: expressed protein [Arabidopsis thaliana]
MTETSSNWDDPTSNPCPTFPDCGFRQPNSGVVLSCLDCFLRNGSLYCFEYEVSPSVFLSRIRGGTCTTASADPPETVIHRAMYLLQNGFGNYNVFQNNCEDFALYCKTGLLIQDKQGVGRSGQASSVIGAPLAAMISSPLKLLMPSPVGVATVTAGMYCMSRYATDIGVRSDVIKVPVGDLAVNLGWICQEEEEVAEHENPDRQITTR

SEQ ID NO: 53590 - DNA, 1063 bp, Glycine max
  misc_feature (1)..(1063): Ceres Seq. ID no. 14304662
tctcgtcccgcaagtattcctccaatctccgtcgatcaccaccaccatgtcgtggctcctccgatccaccaagtctaagttcctctcttcctcttcctcttcttctctttctagaaccttcccctctctccctcgccctcagattggagccatctctcccctccccgatctcttccaccgcaacaccgccaccatgcctttcgcgaaggaaaacgcttccggtggaaacttgaccggtcttcccaaagttcccgcgaataagcttggcagtgattctgatgcgaccaattcttcgaggtacaaagcttctggactgaacaccaatgtgctggctggagctagatatgtctctagagtttgggctgcacagggtcaaatgccattgggagtcaatactgtgatggctagaagttttgagagaagtatggaagctggcacattgggaatgattggtcataaacgttttatgagtgacatcccaagtaaaaccagtgagacaaacccatctggttttcgtccgttatctcctcatcttcctctttatcagccccaactttcttcgaccctctcaattttcaatagaattgctggagctttcctagctggtgtcattttggttttttatatgatctatatgaagttgggtttggttagcctcacctatgactctttctaccagttcatattttattcatcgaaactcaacctacttgtcatggagatttctgccttagccgtgtcctatcatctgtatagtgcaattcgtcatttattcttatgatttgaatcagcaactgacgcctgaactttaggtttgaacctgaggtggaactttgcataattcgaccttggaggcatacttccatatgtctgtcagtcataaggaacttcatttagaaatgtgattttgcttaattgtagttatgtattatcggcttaataattacaattgtggcacaacttaaggagtattttgcacctgacattcggtcatgctttttgctgccctctcaaattgcatgcaagtaactgttgcatttaataaatgcatttgagttttggc

SEQ ID NO: 53591 - protein, 259 aa, Glycine max
  peptide (1)..(259): Ceres Seq. ID no. 14304663
LVPQVFLQSPSITTTMSWLLRSTKSKFLSSSSSSSLSRTFPSLPRPQIGAISPLPDLFHRNTATMPFAKENASGGNLTGLPKVPANKLGSDSDATNSSRYKASGLNTNVLAGARYVSRVWAAQGQMPLGVNTVMARSFERSMEAGTLGMIGHKRFMSDIPSKTSETNPSGFRPLSPHLPLYQPQLSSTLSIFNRIAGAFLAGVILVFYMIYMKLGLVSLTYDSFYQFIFYSSKLNLLVMEISALAVSYHLYSAIRHLFL

SEQ ID NO: 53592 - protein, 244 aa, Glycine max
  peptide (1)..(244): Ceres Seq. ID no. 14304664
MSWLLRSTKSKFLSSSSSSSLSRTFPSLPRPQIGAISPLPDLFHRNTATMPFAKENASGGNLTGLPKVPANKLGSDSDATNSSRYKASGLNTNVLAGARYVSRVWAAQGQMPLGVNTVMARSFERSMEAGTLGMIGHKRFMSDIPSKTSETNPSGFRPLSPHLPLYQPQLSSTLSIFNRIAGAFLAGVILVFYMIYMKLGLVSLTYDSFYQFIFYSSKLNLLVMEISALAVSYHLYSAIRHLFL

SEQ ID NO: 53593 - protein, 195 aa, Glycine max
  peptide (1)..(195): Ceres Seq. ID no. 14304665
MPFAKENASGGNLTGLPKVPANKLGSDSDATNSSRYKASGLNTNVLAGARYVSRVWAAQGQMPLGVNTVMARSFERSMEAGTLGMIGHKRFMSDIPSKTSETNPSGFRPLSPHLPLYQPQLSSTLSIFNRIAGAFLAGVILVFYMIYMKLGLVSLTYDSFYQFIFYSSKLNLLVMEISALAVSYHLYSAIRHLFL

SEQ ID NO: 53594 - DNA, 1651 bp, Glycine max
  misc_feature (1)..(1651): Ceres Seq. ID no. 14303137
aatgcatctagagctagagacttggacaattttggttgctattgtgtgcatcttggtctttgttctgaaggagattgttatgggagggaagagctcaaaagggagtggtaggaggtatgattttggtgcttcttcatcttcacgggataataactatggtggataccatccacaatcaccatacccttcttatcaaacacctcagcacccgcgtgcatcagctccattttatgactatggacagccaaaaaggaagttggataagaagtattccaggatagctgataattaccgttctttggatgaggttacagctgcacttgcaaatgctgggctggaatcttctaatctcattgttggcattgatttcaccaagagcaatgagtggacagggaagaggtcattcaatcgaaaaagtttacatgacattagaagtggtcaaaacccttatgaacaagcaatttctattatcgggaaaactttatctgctttcgatgaagataacttgattccttgttttggatttggagatgcatctacacacgatcaagatgtatttagtttctattcagaagagaggttctgcaatgggtttgaggaagttctgacacgatacagacaaattattccttccctaaaactcgcaggacccacttcgtttgcccctattattgaaatggctatgactattgttgagcaaagtggtggccaatatcatgtcttgctaataattgcagatggacaggtgactagaagcgttgatacacaaaatggcaacttaagtccgcaagagcagaacacaatagatgcaatagtaaaagccagtgagtatccactgtcaatagttttggtgggagttggagatggaccatgggaaatgatgagggaatttgatgataacatcccttctcgggcatttgacaattttcagtttgtgaattttactgaaataatgacaaggaatgtagattcaaccagaaaagagacagattttgccctttcagctttgatggagataccttctcaatacaaggcaaccctagagcttggcatattgggttcacggagggggcattcaccagatagggttgctctacccccacctctttatagtagaacctcttccagcatcagcacaaaatctacaaggtctaacagttttcagcagaggacacctacacatactagctatgatagcagtgttcacacagagacatcatcaagttctttatatgataataaggtttgccccatttgtcttaccaatgcaaaggatatggcctttggttgtgggcatcagacttgttgcgagtgtggagaggacctccaattctgtcccatttgccggagcacaatccatactagaataaggctttactagttagctttgatgcagaagtcctgtcaatgaaaatttcgtcatttccagaataaggggctgcaaaaggatgtgcagagttggtctggctcttttcacagatggtttcttgtccataaaaactgcatttgcaatttcgaggcgaaacttgtattcccagttacacttaggaagagctctttacagaaagaattggccttccccgttgtatatatgtagttcatgtgtctcggaaggcgtcatgtttttaaatgaactgcttgcattaaaatt

SEQ ID NO: 53595 - protein, 459 aa, Glycine max
  peptide (1)..(459): Ceres Seq. ID no. 14303138
  misc_feature (85)..(432): Homolog of NCBI NO: 8777310 NR Description: gb|AAF01562.1~gene_id:MBM17.7~strong similarity
  misc_feature (85)..(459): Homolog of NCBI NO: 22328041 NR Description: copine-related [Arabidopsis thaliana]
  misc_feature (412)..(432): Homolog of NCBI NO: 18481708 NR Description: hypothetical protein [Sorghum bicolor]
  misc_feature (80)..(385): Homolog of NCBI NO: 18481708 NR Description: hypothetical protein [Sorghum bicolor]
  misc_feature (93)..(459): Homolog of NCBI NO: 34905794 NR Description: P0401G10.23 [Oryza sativa (japonica
  misc_feature (28)..(447): Homolog of NCBI NO: 20804894 NR Description: P0497A05.19 [Oryza sativa (japonica
  misc_feature (43)..(459): Homolog of NCBI NO: 15232157 NR Description: copine-related [Arabidopsis thaliana]
  misc_feature (56)..(459): Homolog of NCBI NO: 15241400 NR Description: copine-related [Arabidopsis thaliana]
  misc_feature (27)..(459): Homolog of NCBI NO: 18408863 NR Description: copine-related [Arabidopsis thaliana]
  misc_feature (10)..(459): Homolog of NCBI NO: 30697566 NR Description: copine-related [Arabidopsis thaliana]
MHLELETWTILVAIVCILVFVLKEIVMGGKSSKGSGRRYDFGASSSSRDNNYGGYHPQSPYPSYQTPQHPRASAPFYDYGQPKRKLDKKYSRIADNYRSLDEVTAALANAGLESSNLIVGIDFTKSNEWTGKRSFNRKSLHDIRSGQNPYEQAISIIGKTLSAFDEDNLIPCFGFGDASTHDQDVFSFYSEERFCNGFEEVLTRYRQIIPSLKLAGPTSFAPIIEMAMTIVEQSGGQYHVLLIIADGQVTRSVDTQNGNLSPQEQNTIDAIVKASEYPLSIVLVGVGDGPWEMMREFDDNIPSRAFDNFQFVNFTEIMTRNVDSTRKETDFALSALMEIPSQYKATLELGILGSRRGHSPDRVALPPPLYSRTSSSISTKSTRSNSFQQRTPTHTSYDSSVHTETSSSSLYDNKVCPICLTNAKDMAFGCGHQTCCECGEDLQFCPICRSTIHTRIRLY

SEQ ID NO: 53596 - protein, 433 aa, Glycine max
  peptide (1)..(433): Ceres Seq. ID no. 14303139
  misc_feature (59)..(406): Homolog of NCBI NO: 8777310 NR Description: gb|AAF01562.1~gene_id:MBM17.7~strong similarity
  misc_feature (59)..(433): Homolog of NCBI NO: 22328041 NR Description: copine-related [Arabidopsis thaliana]
  misc_feature (386)..(406): Homolog of NCBI NO: 18481708 NR Description: hypothetical protein [Sorghum bicolor]
  misc_feature (54)..(359): Homolog of NCBI NO: 18481708 NR Description: hypothetical protein [Sorghum bicolor]
  misc_feature (67)..(433): Homolog of NCBI NO: 34905794 NR Description: P0401G10.23 [Oryza sativa (japonica
  misc_feature (2)..(421): Homolog of NCBI NO: 20804894 NR Description: P0497A05.19 [Oryza sativa (japonica
  misc_feature (17)..(433): Homolog of NCBI NO: 15232157 NR Description: copine-related [Arabidopsis thaliana]
  misc_feature (30)..(433): Homolog of NCBI NO: 15241400 NR Description: copine-related [Arabidopsis thaliana]
  misc_feature (1)..(433): Homolog of NCBI NO: 18408863 NR Description: copine-related [Arabidopsis thaliana]
  misc_feature (1)..(433): Homolog of NCBI NO: 30697566 NR Description: copine-related [Arabidopsis thaliana]
MGGKSSKGSGRRYDFGASSSSRDNNYGGYHPQSPYPSYQTPQHPRASAPFYDYGQPKRKLDKKYSRIADNYRSLDEVTAALANAGLESSNLIVGIDFTKSNEWTGKRSFNRKSLHDIRSGQNPYEQAISIIGKTLSAFDEDNLIPCFGFGDASTHDQDVFSFYSEERFCNGFEEVLTRYRQIIPSLKLAGPTSFAPIIEMAMTIVEQSGGQYHVLLIIADGQVTRSVDTQNGNLSPQEQNTIDAIVKASEYPLSIVLVGVGDGPWEMMREFDDNIPSRAFDNFQFVNFTEIMTRNVDSTRKETDFALSALMEIPSQYKATLELGILGSRRGHSPDRVALPPPLYSRTSSSISTKSTRSNSFQQRTPTHTSYDSSVHTETSSSSLYDNKVCPICLTNAKDMAFGCGHQTCCECGEDLQFCPICRSTIHTRIRLY

SEQ ID NO: 53597 - protein, 234 aa, Glycine max
  peptide (1)..(234): Ceres Seq. ID no. 14303140
  misc_feature (1)..(207): Homolog of NCBI NO: 8777310 NR Description: gb|AAF01562.1~gene_id:MBM17.7~strong similarity
  misc_feature (1)..(234): Homolog of NCBI NO: 22328041 NR Description: copine-related [Arabidopsis thaliana]
  misc_feature (187)..(207): Homolog of NCBI NO: 18481708 NR Description: hypothetical protein [Sorghum bicolor]
  misc_feature (1)..(160): Homolog of NCBI NO: 18481708 NR Description: hypothetical protein [Sorghum bicolor]
  misc_feature (1)..(234): Homolog of NCBI NO: 34905794 NR Description: P0401G10.23 [Oryza sativa (japonica
  misc_feature (1)..(222): Homolog of NCBI NO: 20804894 NR Description: P0497A05.19 [Oryza sativa (japonica
  misc_feature (1)..(234): Homolog of NCBI NO: 15232157 NR Description: copine-related [Arabidopsis thaliana]
  misc_feature (1)..(234): Homolog of NCBI NO: 15241400 NR Description: copine-related [Arabidopsis thaliana]
  misc_feature (1)..(234): Homolog of NCBI NO: 18408863 NR Description: copine-related [Arabidopsis thaliana]
  misc_feature (1)..(234): Homolog of NCBI NO: 30697566 NR Description: copine-related [Arabidopsis thaliana]
MAMTIVEQSGGQYHVLLIIADGQVTRSVDTQNGNLSPQEQNTIDAIVKASEYPLSIVLVGVGDGPWEMMREFDDNIPSRAFDNFQFVNFTEIMTRNVDSTRKETDFALSALMEIPSQYKATLELGILGSRRGHSPDRVALPPPLYSRTSSSISTKSTRSNSFQQRTPTHTSYDSSVHTETSSSSLYDNKVCPICLTNAKDMAFGCGHQTCCECGEDLQFCPICRSTIHTRIRLY

SEQ ID NO: 53598 - DNA, 1255 bp, Glycine max
  misc_feature (1)..(1255): Ceres Seq. ID no. 14304898
gaatggtcaatctcacactaactcactggatcgggataagctcctcactgggattgacctagagccaccagatttctcatttcatcaaagtgaccaccaccaccaccacacttataccatgtcatataatcatcatcatagtaataacaatgattttcccactacaagcaccatgggaagtagtagcttatcctatgatgaagatgcaagctttgatgagaggcatggcaaaatgctcaagtgtaatagctcaaactccatcaatatttctcaagatgttgccaattcacacataccctcctcctcttcagcaccttccaaatctaccttcattttgtcctttgaaaactcaactgttgaacctgccctccatgatagagtacctaattattataataattcccctaataagcattttgaggccacatgttcttcccttttgagctcagaaataacactcatcagcagtgaccatgtcatcactaaaccaaaagcaaagcaaggggccaagaagtatagaacctcatcagagatcaaagatcacataatggctgagaggaaaaggagacaagacctcactgagaggttcattgcactttctgccaccatacccggattgaagaagacagacaaggcctatatacttcaagaagctatcacatatatgaaacaacttcaggagagagtgaaagtgctagagaatgagaacaagaggaaaacaacatattcaaaaatattcatcaagaaatcacaagtgtgctcaagagaagaagccacatcatcatgtgaaacaaactctaattatagatccacgccaccaccactacctcaagttgaagcaagaatgttggaaaaggaagttctcattggaatccactgccagaaacaaaaggatattgtgctcaaaatcatggccttgcttcaaaatctccatctctctcttgctagtagtagtgtattgccatttgggacttctacagtaaaagttacaatcattgcccagatgggcgacaaatacggtatgacagtgaatgatctagtaaaaagactgaggcaagatctcttgaagtcacatgacattcaagagtcacattccaaagagtgccaaatatgatatgcaattgtttatggagagtgaggtttgcagaaattttagttttgcccttcttaaatttcaataagaaaaaaatgatgaggatttgtttgtaatgaaattgaacctcataatgtattaaaaatatgcacagcacttatc

SEQ ID NO: 53599 - protein, 370 aa, Glycine max
  peptide (1)..(370): Ceres Seq. ID no. 14304899
  misc_feature (178)..(226): Pfam Name: Helix-loop-helix DNA-binding domain Pfam Description: Helix-loop-helix DNA-binding domain
NGQSHTNSLDRDKLLTGIDLEPPDFSFHQSDHHHHHTYTMSYNHHHSNNNDFPTTSTMGSSSLSYDEDASFDERHGKMLKCNSSNSINISQDVANSHIPSSSSAPSKSTFILSFENSTVEPALHDRVPNYYNNSPNKHFEATCSSLLSSEITLISSDHVITKPKAKQGAKKYRTSSEIKDHIMAERKRRQDLTERFIALSATIPGLKKTDKAYILQEAITYMKQLQERVKVLENENKRKTTYSKIFIKKSQVCSREEATSSCETNSNYRSTPPPLPQVEARMLEKEVLIGIHCQKQKDIVLKIMALLQNLHLSLASSSVLPFGTSTVKVTIIAQMGDKYGMTVNDLVKRLRQDLLKSHDIQESHSKECQI

SEQ ID NO: 53600 - protein, 331 aa, Glycine max
  peptide (1)..(331): Ceres Seq. ID no. 14304900
  misc_feature (139)..(187): Pfam Name: Helix-loop-helix DNA-binding domain Pfam Description: Helix-loop-helix DNA-binding domain
MSYNHHHSNNNDFPTTSTMGSSSLSYDEDASFDERHGKMLKCNSSNSINISQDVANSHIPSSSSAPSKSTFILSFENSTVEPALHDRVPNYYNNSPNKHFEATCSSLLSSEITLISSDHVITKPKAKQGAKKYRTSSEIKDHIMAERKRRQDLTERFIALSATIPGLKKTDKAYILQEAITYMKQLQERVKVLENENKRKTTYSKIFIKKSQVCSREEATSSCETNSNYRSTPPPLPQVEARMLEKEVLIGIHCQKQKDIVLKIMALLQNLHLSLASSSVLPFGTSTVKVTIIAQMGDKYGMTVNDLVKRLRQDLLKSHDIQESHSKECQI

SEQ ID NO: 53601 - protein, 313 aa, Glycine max
  peptide (1)..(313): Ceres Seq. ID no. 14304901
  misc_feature (121)..(169): Pfam Name: Helix-loop-helix DNA-binding domain Pfam Description: Helix-loop-helix DNA-binding domain
MGSSSLSYDEDASFDERHGKMLKCNSSNSINISQDVANSHIPSSSSAPSKSTFILSFENSTVEPALHDRVPNYYNNSPNKHFEATCSSLLSSEITLISSDHVITKPKAKQGAKKYRTSSEIKDHIMAERKRRQDLTERFIALSATIPGLKKTDKAYILQEAITYMKQLQERVKVLENENKRKTTYSKIFIKKSQVCSREEATSSCETNSNYRSTPPPLPQVEARMLEKEVLIGIHCQKQKDIVLKIMALLQNLHLSLASSSVLPFGTSTVKVTIIAQMGDKYGMTVNDLVKRLRQDLLKSHDIQESHSKECQI

SEQ ID NO: 53602 - DNA, 1309 bp, Glycine max
  misc_feature (1)..(1309): Ceres Seq. ID no. 14310864
tcaacctcacttgatcaattctccaaatacctaatatggagtttcacattcttcccatcattacttttctcatgcttgttgtggcaactaatgctgatgctgcattacctcctgcattttactggaagtccaagcttcctaccacaccaatgccgaaagccatcactgatttgctacaacctgattggaaggaagagaaagacacctctgtggatgtagggaaaggtggagtaaatgttggtgtagaaaagggaaaccaaggaccaggagatggcactgatgttaatgttggtggtggagacggtggagtgaatgtgcacacaggaccaaagggtaagccagttcacgttggagtgggcccacattctccatttgattacaactatgcagccagcgagacccaattacatgatgaccccaatgtggcactcttcttcttggaaaaggacttgcaccacggaacaaaattgaaccttcacttcactatctactacacctcaaatgttgatgccacgttcttgcctcgatcagtttctgattccatacccttttcgtcaaacaaggtgaatgatgtattaaacaagttttcaatcaaggacgggtcagatgaggctaaaactgtgaagaacactattaatgagtgtgaaggacctagcattaagggagaggaaaagcgttgcgtgacttcacttgagtccatggttgatttcgccactaccaagctcgggagcaacaatgttgatgctgtttccacagaagtgacaaaaaaagataatgagttacaacagtatacaatggcaccaggggttaagaggttgggtgaggacaaggctagtgttgtgtgtcacaaggagaattacccttatgcagtgttttattgccacaaatcagaaaccacaaaagcctattctgtcccattggagggtgctgatggaagcagggtcaaagcagttgcagtgtgccatactgacacatcaaagtggaatcccaagcatttggcgtttcaagtgcttaaggttcagccaggaactgttcctgtctgccacttcctgcctcaggatcatgttgtctttgttcccaagtagaaacacacacgagtcccatttctgatgttggtgaataatttggcagttttaatagcatgaaatgagcttttaaaactgaatgcgtagtatttgcattatgttatcctacgttgtcagcatgtttgcttttacaggtttactgttatctcaatatatgtatatgtactagtgatgtattaaatgtgctaatatgtgatatatatatatatatagctttttcattc

SEQ ID NO: 53603 - protein, 349 aa, Glycine max
  peptide (1)..(349): Ceres Seq. ID no. 14310865
  misc_feature (58)..(346): Homolog of NCBI NO: 15239478 NR Description: dehydration-induced protein RD22 [Arabidopsis
  misc_feature (12)..(68): Homolog of NCBI NO: 14422442 NR Description: BURP domain-containing protein [Bruguiera
  misc_feature (89)..(349): Homolog of NCBI NO: 14422442 NR Description: BURP domain-containing protein [Bruguiera
  misc_feature (12)..(85): Homolog of NCBI NO: 14422448 NR Description: BURP domain-containing protein [Bruguiera
  misc_feature (80)..(349): Homolog of NCBI NO: 14422448 NR Description: BURP domain-containing protein [Bruguiera
  misc_feature (1)..(349): Homolog of NCBI NO: 14422446 NR Description: BURP domain-containing protein [Bruguiera
  misc_feature (7)..(349): Homolog of NCBI NO: 33578034 NR Description: BURP domain-containing protein [Gossypium
  misc_feature (12)..(349): Homolog of NCBI NO: 14422444 NR Description: BURP domain-containing protein [Bruguiera
  misc_feature (22)..(349): Homolog of NCBI NO: 16588826 NR Description: dehydration-responsive protein RD22 [Prunus
  misc_feature (7)..(349): Homolog of NCBI NO: 18447761 NR Description: dehydration-induced protein RD22-like protein
MEFHILPIITFLMLVVATNADAALPPAFYWKSKLPTTPMPKAITDLLQPDWKEEKDTSVDVGKGGVNVGVEKGNQGPGDGTDVNVGGGDGGVNVHTGPKGKPVHVGVGPHSPFDYNYAASETQLHDDPNVALFFLEKDLHHGTKLNLHFTIYYTSNVDATFLPRSVSDSIPFSSNKVNDVLNKFSIKDGSDEAKTVKNTINECEGPSIKGEEKRCVTSLESMVDFATTKLGSNNVDAVSTEVTKKDNELQQYTMAPGVKRLGEDKASVVCHKENYPYAVFYCHKSETTKAYSVPLEGADGSRVKAVAVCHTDTSKWNPKHLAFQVLKVQPGTVPVCHFLPQDHVVFVPK

SEQ ID NO: 53604 - protein, 337 aa, Glycine max
  peptide (1)..(337): Ceres Seq. ID no. 14310866
  misc_feature (46)..(334): Homolog of NCBI NO: 15239478 NR Description: dehydration-induced protein RD22 [Arabidopsis
  misc_feature (1)..(56): Homolog of NCBI NO: 14422442 NR Description: BURP domain-containing protein [Bruguiera
  misc_feature (77)..(337): Homolog of NCBI NO: 14422442 NR Description: BURP domain-containing protein [Bruguiera
  misc_feature (1)..(73): Homolog of NCBI NO: 14422448 NR Description: BURP domain-containing protein [Bruguiera
  misc_feature (68)..(337): Homolog of NCBI NO: 14422448 NR Description: BURP domain-containing protein [Bruguiera
  misc_feature (1)..(337): Homolog of NCBI NO: 14422446 NR Description: BURP domain-containing protein [Bruguiera
  misc_feature (1)..(337): Homolog of NCBI NO: 33578034 NR Description: BURP domain-containing protein [Gossypium
  misc_feature (1)..(337): Homolog of NCBI NO: 14422444 NR Description: BURP domain-containing protein [Bruguiera
  misc_feature (10)..(337): Homolog of NCBI NO: 16588826 NR Description: dehydration-responsive protein RD22 [Prunus
  misc_feature (1)..(337): Homolog of NCBI NO: 18447761 NR Description: dehydration-induced protein RD22-like protein
MLVVATNADAALPPAFYWKSKLPTTPMPKAITDLLQPDWKEEKDTSVDVGKGGVNVGVEKGNQGPGDGTDVNVGGGDGGVNVHTGPKGKPVHVGVGPHSPFDYNYAASETQLHDDPNVALFFLEKDLHHGTKLNLHFTIYYTSNVDATFLPRSVSDSIPFSSNKVNDVLNKFSIKDGSDEAKTVKNTINECEGPSIKGEEKRCVTSLESMVDFATTKLGSNNVDAVSTEVTKKDNELQQYTMAPGVKRLGEDKASVVCHKENYPYAVFYCHKSETTKAYSVPLEGADGSRVKAVAVCHTDTSKWNPKHLAFQVLKVQPGTVPVCHFLPQDHVVFVPK

SEQ ID NO: 53605 - protein, 311 aa, Glycine max
  peptide (1)..(311): Ceres Seq. ID no. 14310867
  misc_feature (20)..(308): Homolog of NCBI NO: 15239478 NR Description: dehydration-induced protein RD22 [Arabidopsis
  misc_feature (1)..(30): Homolog of NCBI NO: 14422442 NR Description: BURP domain-containing protein [Bruguiera
  misc_feature (51)..(311): Homolog of NCBI NO: 14422442 NR Description: BURP domain-containing protein [Bruguiera
  misc_feature (1)..(47): Homolog of NCBI NO: 14422448 NR Description: BURP domain-containing protein [Bruguiera
  misc_feature (42)..(311): Homolog of NCBI NO: 14422448 NR Description: BURP domain-containing protein [Bruguiera
  misc_feature (1)..(311): Homolog of NCBI NO: 14422446 NR Description: BURP domain-containing protein [Bruguiera
  misc_feature (1)..(311): Homolog of NCBI NO: 33578034 NR Description: BURP domain-containing protein [Gossypium
  misc_feature (1)..(311): Homolog of NCBI NO: 14422444 NR Description: BURP domain-containing protein [Bruguiera
  misc_feature (1)..(311): Homolog of NCBI NO: 16588826 NR Description: dehydration-responsive protein RD22 [Prunus
  misc_feature (1)..(311): Homolog of NCBI NO: 18447761 NR Description: dehydration-induced protein RD22-like protein
MPKAITDLLQPDWKEEKDTSVDVGKGGVNVGVEKGNQGPGDGTDVNVGGGDGGVNVHTGPKGKPVHVGVGPHSPFDYNYAASETQLHDDPNVALFFLEKDLHHGTKLNLHFTIYYTSNVDATFLPRSVSDSIPFSSNKVNDVLNKFSIKDGSDEAKTVKNTINECEGPSIKGEEKRCVTSLESMVDFATTKLGSNNVDAVSTEVTKKDNELQQYTMAPGVKRLGEDKASVVCHKENYPYAVFYCHKSETTKAYSVPLEGADGSRVKAVAVCHTDTSKWNPKHLAFQVLKVQPGTVPVCHFLPQDHVVFVPK

SEQ ID NO: 53606 - DNA, 1230 bp, Glycine max
  misc_feature (1)..(1230): Ceres Seq. ID no. 14311014
aagagaagaagatggatagtgaaattgaaaagaagaagaacctgttttcggaactaaccgacgacatcgttctgaacatcttctacaaactcgaagacgatcctcgccactgggctcgcttagcctgtgtctgcaccaaattctcttccctcgttagggatttctgttggaagaccaaatgctccctcaccatcccccaagacctcctctccgccgccgcctccgacccccctctctccctccacaaactctccttctgctgccccggcctccgccacgccggcctcctgttcgacacctccgatttcggcctcgaacgcgacctcggccccggcaacttcaacgtcatcaccgatgattctccttcgaacaccactccaccaccaccaccaccaccaccacaacaacaacaacaacaacctcctcaatccgatgattgttcttcctcttgttggtccctttacgatgacctctactacgacacgctctacgtcccaaccgagtccgagtcgccgcgattaacggaatccgttagcgtaagagcgggcgtggatgtggcttcgatcagcgcgtgcagcaagaagcgcaagctctcccgcgcgtggagctcacacctggcttcgggaagctggacactaagccgtgaacaaggaagcaagctcctggcgcgtaagttccggtacgattgcttgtacgtgtgcgagtggccagggtgcgtgcacaaggaggagaagcgcaagtactgcctcttcagaggggttttcaagaacttcaggcgaactatggtttggaggactattcaggatgggaagaagaggaagatggatctgccttgcgccttctgcgcgtgtgagttcacgtgggatctgcactcttccttttgcttgaggcctggctttggcttccatgacgatggggagcctatggttagggcttatgtttgtgagaatggacatgtctctggtgcctggaccgatcttcccatctacacttgaactctctactgcattttatgcctaatttatgtcattttcattttcgcaatcttagtttctcctttaaataactcctgagaaggccgctatacgctgttttcacattccattccattatttcaactattacttaagattggaaatctgctttgtgaaattccgatcgcagtgtgattgcagtggaaaagcctttttaggtttttcttttatgagattcaaaacccattcgcgtttg

SEQ ID NO: 53607 - protein, 330 aa, Glycine max
  peptide (1)..(330): Ceres Seq. ID no. 14311015
  misc_feature (15)..(60): Pfam Name: F-box domain Pfam Description: F-box domain
  misc_feature (18)..(100): Homolog of NCBI NO: 15242296 NR Description: expressed protein [Arabidopsis thaliana]
  misc_feature (213)..(328): Homolog of NCBI NO: 15242296 NR Description: expressed protein [Arabidopsis thaliana]
  misc_feature (12)..(330): Homolog of NCBI NO: 21553661 NR Description: unknown [Arabidopsis thaliana]
  misc_feature (12)..(330): Homolog of NCBI NO: 15235367 NR Description: F-box protein family [Arabidopsis thaliana]
EKKMDSEIEKKKNLFSELTDDIVLNIFYKLEDDPRHWARLACVCTKFSSLVRDFCWKTKCSLTIPQDLLSAAASDPPLSLHKLSFCCPGLRHAGLLFDTSDFGLERDLGPGNFNVITDDSPSNTTPPPPPPPPQQQQQQPPQSDDCSSSCWSLYDDLYYDTLYVPTESESPRLTESVSVRAGVDVASISACSKKRKLSRAWSSHLASGSWTLSREQGSKLLARKFRYDCLYVCEWPGCVHKEEKRKYCLFRGVFKNFRRTMVWRTIQDGKKRKMDLPCAFCACEFTWDLHSSFCLRPGFGFHDDGEPMVRAYVCENGHVSGAWTDLPIYT

SEQ ID NO: 53608 - protein, 327 aa, Glycine max
  peptide (1)..(327): Ceres Seq. ID no. 14311016
  misc_feature (12)..(57): Pfam Name: F-box domain Pfam Description: F-box domain
  misc_feature (15)..(97): Homolog of NCBI NO: 15242296 NR Description: expressed protein [Arabidopsis thaliana]
  misc_feature (210)..(325): Homolog of NCBI NO: 15242296 NR Description: expressed protein [Arabidopsis thaliana]
  misc_feature (9)..(327): Homolog of NCBI NO: 21553661 NR Description: unknown [Arabidopsis thaliana]
  misc_feature (9)..(327): Homolog of NCBI NO: 15235367 NR Description: F-box protein family [Arabidopsis thaliana]
MDSEIEKKKNLFSELTDDIVLNIFYKLEDDPRHWARLACVCTKFSSLVRDFCWKTKCSLTIPQDLLSAAASDPPLSLHKLSFCCPGLRHAGLLFDTSDFGLERDLGPGNFNVITDDSPSNTTPPPPPPPPQQQQQQPPQSDDCSSSCWSLYDDLYYDTLYVPTESESPRLTESVSVRAGVDVASISACSKKRKLSRAWSSHLASGSWTLSREQGSKLLARKFRYDCLYVCEWPGCVHKEEKRKYCLFRGVFKNFRRTMVWRTIQDGKKRKMDLPCAFCACEFTWDLHSSFCLRPGFGFHDDGEPMVRAYVCENGHVSGAWTDLPIYT

SEQ ID NO: 53609 - DNA, 1099 bp, Glycine max
  misc_feature (1)..(1099): Ceres Seq. ID no. 14304460
agataaaggaattgaaatcgaggctgctgcaagaagagaacacagcaggaagcggtgtttcggtgaaggaagaagagataacaacgatgcctgcagactcagaagagaaaacgatggaacaaagtaagagtgacccaccttctgaaacctcgaacattaatcctagttcggagtcgtcggaggaggaccacttgaattacgaatgtttcaacaacaacagcgacgactgtgtcgtcggaggatccgccgcagcatcgctcttgcaagtggacttcatgaaagacggttcttccgacagcgacggatcaagcgcgatcttgaacgaagacaccatgtacttgccgtcttcgatgaactgttttcagttccagaaaccgtatcatcacgcgcagtacgtgaagacggaggagcacaatttcttgagcgccgatgaggcctgcaatttcttctccgatgaacaagcaccgaccctgcaatggtactgtccagaacagtggagctgagatagaagaaacatgggaaaattggaaaccgctttcagaaatttttgtttaatatgttgcacggttgtgttgaacacagctcattgaggtaaaagttgtaaaaaaaggttgccacttgccaacagaggctgcttgaaggtagaaaatgaaacactgtgcagaagatagagttacgaaagagagaacagagatcaatggctgcatggcgtggggtcggagatgaaggatgacgattaaggttaattattactctcgatcgtgggtaatatcaataattattcaatcgtaaagcaaaccatgctgtaaaaaacaaatttcaattcaagtatagaataacgatgtagtactttatcaaacagaaaacgaaaaaaaaaattataaatctgttaaacaatatccttttgcctcactgaactcagtttactagtgtttatgattgattatccttttcctgtaaaagtatttttttttcaccaacaattgctactaaactgaatttgagttggaggcaacatatgagttgttttttaatgttcatttccattgacattgtttattcattagtcgtgtcaagtaaaaatatttttgttattagt

SEQ ID NO: 53610 - protein, 166 aa, Glycine max
  peptide (1)..(166): Ceres Seq. ID no. 14304461
  misc_feature (1)..(166): Homolog of NCBI NO: 15148916 NR Description: homeodomain leucine zipper protein HDZ1
IKELKSRLLQEENTAGSGVSVKEEEITTMPADSEEKTMEQSKSDPPSETSNINPSSESSEEDHLNYECFNNNSDDCVVGGSAAASLLQVDFMKDGSSDSDGSSAILNEDTMYLPSSMNCFQFQKPYHHAQYVKTEEHNFLSADEACNFFSDEQAPTLQWYCPEQWS

SEQ ID NO: 53611 - protein, 138 aa, Glycine max
  peptide (1)..(138): Ceres Seq. ID no. 14304462
  misc_feature (1)..(138): Homolog of NCBI NO: 15148916 NR Description: homeodomain leucine zipper protein HDZ1
MPADSEEKTMEQSKSDPPSETSNINPSSESSEEDHLNYECFNNNSDDCVVGGSAAASLLQVDFMKDGSSDSDGSSAILNEDTMYLPSSMNCFQFQKPYHHAQYVKTEEHNFLSADEACNFFSDEQAPTLQWYCPEQWS

SEQ ID NO: 53612 - protein, 129 aa, Glycine max
  peptide (1)..(129): Ceres Seq. ID no. 14304463
  misc_feature (1)..(129): Homolog of NCBI NO: 15148916 NR Description: homeodomain leucine zipper protein HDZ1
MEQSKSDPPSETSNINPSSESSEEDHLNYECFNNNSDDCVVGGSAAASLLQVDFMKDGSSDSDGSSAILNEDTMYLPSSMNCFQFQKPYHHAQYVKTEEHNFLSADEACNFFSDEQAPTLQWYCPEQWS

SEQ ID NO: 53613 - DNA, 1633 bp, Glycine max
  misc_feature (1)..(1633): Ceres Seq. ID no. 14310834
gggagaggtgaattcgcagacgaacattccgctcccatcgcatctgtaacaatggaagcgcgccatgcaactcttggtcgacgaacgttggaggaaattcggcaaaagagggccgcggagagattgagtaaaacctcttcgggaccagatctcacgcaggttcccagcacctccgagattgcgggaatgagcaagtccgagagcgcaaataagctctctgagacagatcttagtgctctattgtctcaattgaaaggactgcaaaagaagaacacggagttggaggaagaaaacacaaaaattagtttaaagcttcaaacgatggaaattgataatgagacaatgcacaagcaattaaatgatgtggaacaaaatacagtgccatctctaaggaaagctctgagggatgtcgcaatggagaaagatgctgcagttgttgcacgggaggacctttcagcacagcttcgtaccctgaagaaacgtcttaaggaagcagaagatgagcaatatcgtgccgaggaagatgcagcagcgttgagagcagaattgaactcaattcagcaacaagcaatgactaatacagttagcacaatttcatcatttggtaatccacccgatcattttcaaattcaaagattacaaaaggagctagatgatttaaaactggaactgcagcgagaatcacttttgaggcaccaggagcaggaacaattagcaaaagagcaagcctgcattgcctcactgatatctgaaaagcaggagttggaagagaaactcatgtccatatctagagagcctgcagaagcctcagataaagctgctcacaaagcattttctttggaagacaagcagaaacttgataggcagttgtatgatatggctatagccattgagaggttggaaagcagtaggcagaaacttctaatggagattgactcacaatctacagaaatagagaggctttttgaggaaaattctagtctctcaaattcataccaagaggcaattggagcagcagcgagatgggaaaaccaggtgatggattgtcttaagcaaaatgaagagcttcgtgggattctagataatttgagaatggaacaggctaggggtttgccagactcttctaaaaatggggcacatgagattgcttccttggcatctatgaagggccaacttgtgacagaacagagcagagcagaggcgctatctgcagaagtcatgcagctttctgctcaacttgaacaagtcaaacaagcatatgatggtcttgcacgcttctataggccagtgctgcgcaacattgaaagcaatctcataaaaatgaagcaagacaactcgttggctgtacgatgatggtaatgagcagtttcatgatgatattccggttgtaattgtgaagcccttctttgaagacatttccaatgcccacagaattgtttttaaccatttgatgttattagtttggtaaaagtggaacgagatggctcagtaactggtggtaatggttcttcattcttgagctgttttgttttgtggtaatactctgcataagaagcccttgttatacccaaacgtgaatttgtaaaacttgtcattctttatactaatattaatttgtaaacaagcacaaccg

SEQ ID NO: 53614 - protein, 450 aa, Glycine max
  peptide (1)..(450): Ceres Seq. ID no. 14310835
  misc_feature (2)..(442): Pfam Name: Myosin tail Pfam Description: Myosin tail
  misc_feature (2)..(442): Homolog of NCBI NO: 20137006 NR Description: myosin heavy chain IX [Mus musculus]
  misc_feature (2)..(442): Homolog of NCBI NO: 28277050 NR Description: Similar to myosin heavy chain IX [Mus musculus]
  misc_feature (2)..(442): Homolog of NCBI NO: 6981236 NR Description: myosin, heavy polypeptide 9
  misc_feature (18)..(356): Homolog of NCBI NO: 9759242 NR Description: gene_id:MNC17.12~unknown protein [Arabidopsis
  misc_feature (91)..(446): Homolog of NCBI NO: 34860755 NR Description: similar to hypothetical protein [Rattus
  misc_feature (104)..(428): Homolog of NCBI NO: 34902040 NR Description: hypothetical protein [Oryza sativa (japonica
  misc_feature (206)..(450): Homolog of NCBI NO: 29367485 NR Description: myosin-like protein [Oryza sativa (japonica
  misc_feature (58)..(449): Homolog of NCBI NO: 9759242 NR Description: gene_id:MNC17.12~unknown protein [Arabidopsis
  misc_feature (18)..(449): Homolog of NCBI NO: 30697188 NR Description: expressed protein [Arabidopsis thaliana]
  misc_feature (18)..(449): Homolog of NCBI NO: 30697185 NR Description: expressed protein [Arabidopsis thaliana]
GRGEFADEHSAPIASVTMEARHATLGRRTLEEIRQKRAAERLSKTSSGPDLTQVPSTSEIAGMSKSESANKLSETDLSALLSQLKGLQKKNTELEEENTKISLKLQTMEIDNETMHKQLNDVEQNTVPSLRKALRDVAMEKDAAVVAREDLSAQLRTLKKRLKEAEDEQYRAEEDAAALRAELNSIQQQAMTNTVSTISSFGNPPDHFQIQRLQKELDDLKLELQRESLLRHQEQEQLAKEQACIASLISEKQELEEKLMSISREPAEASDKAAHKAFSLEDKQKLDRQLYDMAIAIERLESSRQKLLMEIDSQSTEIERLFEENSSLSNSYQEAIGAAARWENQVMDCLKQNEELRGILDNLRMEQARGLPDSSKNGAHEIASLASMKGQLVTEQSRAEALSAEVMQLSAQLEQVKQAYDGLARFYRPVLRNIESNLIKMKQDNSLAVR

SEQ ID NO: 53615 - protein, 433 aa, Glycine max
  peptide (1)..(433): Ceres Seq. ID no. 14310836
  misc_feature (1)..(425): Pfam Name: Myosin tail Pfam Description: Myosin tail
  misc_feature (1)..(425): Homolog of NCBI NO: 20137006 NR Description: myosin heavy chain IX [Mus musculus]
  misc_feature (1)..(425): Homolog of NCBI NO: 28277050 NR Description: Similar to myosin heavy chain IX [Mus musculus]
  misc_feature (1)..(425): Homolog of NCBI NO: 6981236 NR Description: myosin, heavy polypeptide 9
  misc_feature (1)..(339): Homolog of NCBI NO: 9759242 NR Description: gene_id:MNC17.12~unknown protein [Arabidopsis
  misc_feature (74)..(429): Homolog of NCBI NO: 34860755 NR Description: similar to hypothetical protein [Rattus
  misc_feature (87)..(411): Homolog of NCBI NO: 34902040 NR Description: hypothetical protein [Oryza sativa (japonica
  misc_feature (189)..(433): Homolog of NCBI NO: 29367485 NR Description: myosin-like protein [Oryza sativa (japonica
  misc_feature (41)..(432): Homolog of NCBI NO: 9759242 NR Description: gene_id:MNC17.12~unknown protein [Arabidopsis
  misc_feature (1)..(432): Homolog of NCBI NO: 30697188 NR Description: expressed protein [Arabidopsis thaliana]
  misc_feature (1)..(432): Homolog of NCBI NO: 30697185 NR Description: expressed protein [Arabidopsis thaliana]
MEARHATLGRRTLEEIRQKRAAERLSKTSSGPDLTQVPSTSEIAGMSKSESANKLSETDLSALLSQLKGLQKKNTELEEENTKISLKLQTMEIDNETMHKQLNDVEQNTVPSLRKALRDVAMEKDAAVVAREDLSAQLRTLKKRLKEAEDEQYRAEEDAAALRAELNSIQQQAMTNTVSTISSFGNPPDHFQIQRLQKELDDLKLELQRESLLRHQEQEQLAKEQACIASLISEKQELEEKLMSISREPAEASDKAAHKAFSLEDKQKLDRQLYDMAIAIERLESSRQKLLMEIDSQSTEIERLFEENSSLSNSYQEAIGAAARWENQVMDCLKQNEELRGILDNLRMEQARGLPDSSKNGAHEIASLASMKGQLVTEQSRAEALSAEVMQLSAQLEQVKQAYDGLARFYRPVLRNIESNLIKMKQDNSLAVR

SEQ ID NO: 53616 - protein, 388 aa, Glycine max
  peptide (1)..(388): Ceres Seq. ID no. 14310837
  misc_feature (1)..(380): Pfam Name: Myosin tail Pfam Description: Myosin tail
  misc_feature (1)..(380): Homolog of NCBI NO: 20137006 NR Description: myosin heavy chain IX [Mus musculus]
  misc_feature (1)..(380): Homolog of NCBI NO: 28277050 NR Description: Similar to myosin heavy chain IX [Mus musculus]
  misc_feature (1)..(380): Homolog of NCBI NO: 6981236 NR Description: myosin, heavy polypeptide 9
  misc_feature (1)..(294): Homolog of NCBI NO: 9759242 NR Description: gene_id:MNC17.12~unknown protein [Arabidopsis
  misc_feature (29)..(384): Homolog of NCBI NO: 34860755 NR Description: similar to hypothetical protein [Rattus
  misc_feature (42)..(366): Homolog of NCBI NO: 34902040 NR Description: hypothetical protein [Oryza sativa (japonica
  misc_feature (144)..(388): Homolog of NCBI NO: 29367485 NR Description: myosin-like protein [Oryza sativa (japonica
  misc_feature (1)..(387): Homolog of NCBI NO: 9759242 NR Description: gene_id:MNC17.12~unknown protein [Arabidopsis
  misc_feature (1)..(387): Homolog of NCBI NO: 30697188 NR Description: expressed protein [Arabidopsis thaliana]
  misc_feature (1)..(387): Homolog of NCBI NO: 30697185 NR Description: expressed protein [Arabidopsis thaliana]
MSKSESANKLSETDLSALLSQLKGLQKKNTELEEENTKISLKLQTMEIDNETMHKQLNDVEQNTVPSLRKALRDVAMEKDAAVVAREDLSAQLRTLKKRLKEAEDEQYRAEEDAAALRAELNSIQQQAMTNTVSTISSFGNPPDHFQIQRLQKELDDLKLELQRESLLRHQEQEQLAKEQACIASLISEKQELEEKLMSISREPAEASDKAAHKAFSLEDKQKLDRQLYDMAIAIERLESSRQKLLMEIDSQSTEIERLFEENSSLSNSYQEAIGAAARWENQVMDCLKQNEELRGILDNLRMEQARGLPDSSKNGAHEIASLASMKGQLVTEQSRAEALSAEVMQLSAQLEQVKQAYDGLARFYRPVLRNIESNLIKMKQDNSLAVR

SEQ ID NO: 53617 - DNA, 542 bp, Glycine max
  misc_feature (1)..(542): Ceres Seq. ID no. 12581561
gcacaggacccttgggttgtgttccatcagaattggcccaacgtggtagaaatggacaatgtgctcctgaactacaacaagctgcagcactcttcaacccacaactcgaacaaatgttacttcaactcaaccgcaaaattgcaactgacgttttcattgctgcaaacactggaaaagctcacaacgacttcgttactaacgcccaacaatttggatttgttacatcacaagtagcttgttgtgggcaaggaccttacaatggtattgggctatgcacagcactctccaacctttgctccaacagagaccaatatgcattttgggatgcattccatccatctgaaaaggccaataggcttattgtggaggaaattatgtcaggttctaaagcctacatgaacccaatgaaccttagcaccatcctagctttggactcaaacacatgaagataacacaaatctaatatatcctagcacttgtattggccttccatgctagnttcaaagacatctctcttttctanatttttagtattgtaattg

SEQ ID NO: 53618 - protein, 147 aa, Glycine max
  peptide (1)..(147): Ceres Seq. ID no. 12581562
  misc_feature (1)..(124): Pfam Name: GDSL-like Lipase/Acylhydrolase Pfam Description: GDSL-like Lipase/Acylhydrolase
  misc_feature (1)..(143): Homolog of NCBI NO: 18417760 NR Description: putative protein
  misc_feature (1)..(143): Homolog of NCBI NO: 11280578 NR Description: hypothetical protein F14F8_100 - Arabidopsis
  misc_feature (1)..(145): Homolog of NCBI NO: 37535146 NR Description: putative early nodulin gene (Enod) related
  misc_feature (1)..(145): Homolog of NCBI NO: 22758315 NR Description: putative early nodulin gene (Enod) related
  misc_feature (1)..(147): Homolog of NCBI NO: 28071322 NR Description: P0705A05.30 [Oryza sativa (japonica
  misc_feature (1)..(144): Homolog of NCBI NO: 32489520 NR Description: OSJNBa0043L24.11 [Oryza sativa (japonica
  misc_feature (2)..(143): Homolog of NCBI NO: 15238814 NR Description: putative protein; protein id: At5g18430.1
  misc_feature (1)..(146): Homolog of NCBI NO: 15229265 NR Description: putative GDSL-motif lipase/acylhydrolase
  misc_feature (1)..(145): Homolog of NCBI NO: 15235421 NR Description: Proline-rich APG - like protein
  misc_feature (1)..(147): Homolog of NCBI NO: 15242808 NR Description: putative protein
TGPLGCVPSELAQRGRNGQCAPELQQAAALFNPQLEQMLLQLNRKIATDVFIAANTGKAHNDFVTNAQQFGFVTSQVACCGQGPYNGIGLCTALSNLCSNRDQYAFWDAFHPSEKANRLIVEEIMSGSKAYMNPMNLSTILALDSNT

SEQ ID NO: 53619 - protein, 110 aa, Glycine max
  peptide (1)..(110): Ceres Seq. ID no. 12581563
  misc_feature (1)..(87): Pfam Name: GDSL-like Lipase/Acylhydrolase Pfam Description: GDSL-like Lipase/Acylhydrolase
  misc_feature (1)..(106): Homolog of NCBI NO: 18417760 NR Description: putative protein
  misc_feature (1)..(106): Homolog of NCBI NO: 11280578 NR Description: hypothetical protein F14F8_100 - Arabidopsis
  misc_feature (1)..(108): Homolog of NCBI NO: 37535146 NR Description: putative early nodulin gene (Enod) related
  misc_feature (1)..(108): Homolog of NCBI NO: 22758315 NR Description: putative early nodulin gene (Enod) related
  misc_feature (1)..(110): Homolog of NCBI NO: 28071322 NR Description: P0705A05.30 [Oryza sativa (japonica
  misc_feature (1)..(107): Homolog of NCBI NO: 32489520 NR Description: OSJNBa0043L24.11 [Oryza sativa (japonica
  misc_feature (1)..(106): Homolog of NCBI NO: 15238814 NR Description: putative protein; protein id: At5g18430.1
  misc_feature (1)..(109): Homolog of NCBI NO: 15229265 NR Description: putative GDSL-motif lipase/acylhydrolase
  misc_feature (1)..(108): Homolog of NCBI NO: 15235421 NR Description: Proline-rich APG - like protein
  misc_feature (1)..(110): Homolog of NCBI NO: 15242808 NR Description: putative protein
MLLQLNRKIATDVFIAANTGKAHNDFVTNAQQFGFVTSQVACCGQGPYNGIGLCTALSNLCSNRDQYAFWDAFHPSEKANRLIVEEIMSGSKAYMNPMNLSTILALDSNT

SEQ ID NO: 53620 - protein, 77 aa, Glycine max
  peptide (1)..(77): Ceres Seq. ID no. 12581564
AQDPWVVFHQNWPNVVEMDNVLLNYNKLQHSSTHNSNKCYFNSTAKLQLTFSLLQTLEKLTTTSLLTPNNLDLLHHK

SEQ ID NO: 53621 - DNA, 1512 bp, Glycine max
  misc_feature (1)..(1512): Ceres Seq. ID no. 14304273
gatcagtaaacaatcacacacgccgcccctcttacagaacggagatcaggtgtggtcggcggcggcacgagggaggttggaaagtgtccgacacggcggatttcgcttgggcttcagtgtcgcagcacccaaacgctccaaccgcgactctaaaacgcaacgtgaccgaggtcttcgtcgggcctccgctccggccgctatttactactgtggctgtataaacattctagttatggaagattctgatcaaccagccaaatctgctgaaaaccagcaaactgaacaagtgtgtagttttttcagaaagccagttaataaaaagaatataaggaaacgaactattgttaatgaagataatgaggaggactcaaacaatgaaacttctctgttgcatattcagaagaagaccttaaagcctgataataagttgtacttttccactggttcttcaaaaagctctgcatctgctgaacccagtgaagaaccaggaaaaccagtctttcagttcgagtcttcaaaagagattcaagttcagcatgatagcaaagcaactgcaacactagagaccgagactgagttttcaaaagatgctcgtgccatccgtgaaagagctcttaagcaagcagaggagagtctgaaagggaaaagcccaagttctaagaatgaaaaattatataagggaatgaacagttacaaagactacaaggctggctttcgtagggagcaaacaattgctagtgaaaaagctggcgggtcacatggtcctcttagggcttcagctcatataagagtttcagcgaggtttgattatcagcctgacatatgtaaggattataaggaaactggttactgtggatatggtgattcatgtaagtttatgcatgatcgaggggactacaagtctgggtggcagatggagaaggaatgggaagaagctgagaaagcaaggaagatgagattggctgcaggagaggatgcagatgaggagggtgctaatttgactgatgaagatgatgaggattctttaccatttgcctgtttcatttgtagaaacacttttgtggatcctgtagtaaccaagtgcaagcactacttctgcgagcattgtgcattgaagcatcatgcaaagaataagaagtgttttgtctgcaaccagccaactcttggcatttttaacgttgctcatgagatacgcaggaagatggccgaggataaatcataaaaatgtctctctaggatccatggatctctttacttcatggaagttatcttttctcccccattttagtttcatgttaaagattgatgctatgtaatgagttgaaaacataccagaagtttgcacagtggaattagttgattcattttgttgtatttctttgccttatagattccagaatatctaatggtgagagacatttatgatatacccgtttgtatatagggtcatactgtggttctttttacagtagtttgttaccaaataaattttgaatagagcgacctttactc

SEQ ID NO: 53622 - protein, 406 aa, Glycine max
  peptide (1)..(406): Ceres Seq. ID no. 14304274
  misc_feature (346)..(383): Pfam Name: Zinc finger, C3HC4 type (RING finger) Pfam Description: Zinc finger, C3HC4 type (RING finger)
  misc_feature (88)..(397): Homolog of NCBI NO: 27374394 NR Description: CG4973-PA [Drosophila willistoni]
  misc_feature (88)..(401): Homolog of NCBI NO: 34935361 NR Description: similar to RIKEN cDNA 2310020H19 [Rattus
  misc_feature (93)..(406): Homolog of NCBI NO: 27715515 NR Description: similar to RIKEN cDNA 2810428C21
  misc_feature (93)..(406): Homolog of NCBI NO: 23943840 NR Description: RIKEN cDNA 2810428C21 [Mus musculus]
  misc_feature (88)..(401): Homolog of NCBI NO: 21313494 NR Description: RIKEN cDNA 2310020H19 [Mus musculus]
  misc_feature (79)..(372): Homolog of NCBI NO: 25406720 NR Description: probable zinc finger protein [imported] -
  misc_feature (39)..(406): Homolog of NCBI NO: 22531136 NR Description: putative protein [Arabidopsis thaliana]
  misc_feature (39)..(406): Homolog of NCBI NO: 15240037 NR Description: expressed protein [Arabidopsis thaliana]
  misc_feature (79)..(406): Homolog of NCBI NO: 26451788 NR Description: unknown protein [Arabidopsis thaliana]
  misc_feature (79)..(406): Homolog of NCBI NO: 15223384 NR Description: expressed protein [Arabidopsis thaliana]
ISKQSHTPPLLQNGDQVWSAAARGRLESVRHGGFRLGFSVAAPKRSNRDSKTQRDRGLRRASAPAAIYYCGCINILVMEDSDQPAKSAENQQTEQVCSFFRKPVNKKNIRKRTIVNEDNEEDSNNETSLLHIQKKTLKPDNKLYFSTGSSKSSASAEPSEEPGKPVFQFESSKEIQVQHDSKATATLETETEFSKDARAIRERALKQAEESLKGKSPSSKNEKLYKGMNSYKDYKAGFRREQTIASEKAGGSHGPLRASAHIRVSARFDYQPDICKDYKETGYCGYGDSCKFMHDRGDYKSGWQMEKEWEEAEKARKMRLAAGEDADEEGANLTDEDDEDSLPFACFICRNTFVDPVVTKCKHYFCEHCALKHHAKNKKCFVCNQPTLGIFNVAHEIRRKMAEDKS

SEQ ID NO: 53623 - protein, 329 aa, Glycine max
  peptide (1)..(329): Ceres Seq. ID no. 14304275
  misc_feature (269)..(306): Pfam Name: Zinc finger, C3HC4 type (RING finger) Pfam Description: Zinc finger, C3HC4 type (RING finger)
  misc_feature (11)..(320): Homolog of NCBI NO: 27374394 NR Description: CG4973-PA [Drosophila willistoni]
  misc_feature (11)..(324): Homolog of NCBI NO: 34935361 NR Description: similar to RIKEN cDNA 2310020H19 [Rattus
  misc_feature (16)..(329): Homolog of NCBI NO: 27715515 NR Description: similar to RIKEN cDNA 2810428C21
  misc_feature (16)..(329): Homolog of NCBI NO: 23943840 NR Description: RIKEN cDNA 2810428C21 [Mus musculus]
  misc_feature (11)..(324): Homolog of NCBI NO: 21313494 NR Description: RIKEN cDNA 2310020H19 [Mus musculus]
  misc_feature (2)..(295): Homolog of NCBI NO: 25406720 NR Description: probable zinc finger protein [imported] -
  misc_feature (1)..(329): Homolog of NCBI NO: 22531136 NR Description: putative protein [Arabidopsis thaliana]
  misc_feature (1)..(329): Homolog of NCBI NO: 15240037 NR Description: expressed protein [Arabidopsis thaliana]
  misc_feature (2)..(329): Homolog of NCBI NO: 26451788 NR Description: unknown protein [Arabidopsis thaliana]
  misc_feature (2)..(329): Homolog of NCBI NO: 15223384 NR Description: expressed protein [Arabidopsis thaliana]
MEDSDQPAKSAENQQTEQVCSFFRKPVNKKNIRKRTIVNEDNEEDSNNETSLLHIQKKTLKPDNKLYFSTGSSKSSASAEPSEEPGKPVFQFESSKEIQVQHDSKATATLETETEFSKDARAIRERALKQAEESLKGKSPSSKNEKLYKGMNSYKDYKAGFRREQTIASEKAGGSHGPLRASAHIRVSARFDYQPDICKDYKETGYCGYGDSCKFMHDRGDYKSGWQMEKEWEEAEKARKMRLAAGEDADEEGANLTDEDDEDSLPFACFICRNTFVDPVVTKCKHYFCEHCALKHHAKNKKCFVCNQPTLGIFNVAHEIRRKMAEDKS

SEQ ID NO: 53624 - DNA, 1110 bp, Glycine max
  misc_feature (1)..(1110): Ceres Seq. ID no. 15174890
atttcatcaggggcaaagagatcgaggaaggtgataatggaattttggccagaatttcttgctagtagtacgggtaaagagtttgtggctggaggatttggaggcactgctggtataatctcaggttacccattagacacgctccgtgtgatgcaacaaagctccaacaatggctctgctgccttcaccatcctcagaaatttggtggccaaggaaggaccaactgctctgtaccgtggcatggctgcacctttggcctctgttacatttcagaacgctatggttttccaaatttacgcagttctctctagggcatttagcacgtccgtttctgtcaacgaccctccttcctacaagggtgttgctttaggaggattttgctctggcgctttgcagagcatgctgctctcccctgttgagttagttaaaattcgccttcagcttcagaacacaggacaatccacagaaccacaaaagggtcccataaaggtcgccaacaacatatggaaaagagagggtcttcgtggcatttatcgaggacttggcatcactatgctaagagatgcacctgcacatggcctctacttttggacatatgaatatgcgagggagaaacttcacccaggttgtagaagaagttgtcaagagaccttgaatactatgttggtatcaggaggattggctggggttgtgagttgggtttttagctaccctttggacgttataaagacaagattgcaggctcagacactttcttcgcggaaatacaaaggcattttggattgtcttcggaagagcgttgaagaggaaggatacgttgtgctatggcggggtttaggaactgcggttgctagagcctttgttgtgaatggtgctatattttctgcttatgagatcactcttaggtgtctgtttgacaaataaataatacctgcattcaaatgtagggagcaatcaagggctgcaaatcaggttttgagggatacgtgacaatgggataccacattcccagttgcatgtgttttcgaaattgtcattcagatatggtatttgataacttgatgtaattgccaaatgccaaacatattcattcacattcaaaaaaaaaag

SEQ ID NO: 53625 - protein, 307 aa, Glycine max
  peptide (1)..(307): Ceres Seq. ID no. 15174891
  misc_feature (27)..(307): Homolog of NCBI NO: 32566691 NR Description: mitochondrial substrate carrier (39.7 kD) (5P134)
  misc_feature (27)..(307): Homolog of NCBI NO: 17558962 NR Description: mitochondrial substrate carrier (34.0 kD) (5P134)
  misc_feature (27)..(301): Homolog of NCBI NO: 28193150 NR Description: unnamed protein product [Homo sapiens]
  misc_feature (27)..(301): Homolog of NCBI NO: 31044469 NR Description: C030003J19Rik; similar to CG4995 gene product
  misc_feature (27)..(301): Homolog of NCBI NO: 13879465 NR Description: Similar to CG4995 gene product [Mus musculus]
  misc_feature (27)..(301): Homolog of NCBI NO: 34867789 NR Description: similar to chromosome 14 open reading frame 69
  misc_feature (19)..(306): Homolog of NCBI NO: 31238945 NR Description: ENSANGP00000010634 [Anopheles gambiae]
  misc_feature (13)..(304): Homolog of NCBI NO: 34904170 NR Description: putative carnitine/acylcarnitine translocase
  misc_feature (13)..(307): Homolog of NCBI NO: 21593041 NR Description: putative carnitine/acylcarnitine translocase
  misc_feature (13)..(307): Homolog of NCBI NO: 15220023 NR Description: mitochondrial carrier protein family [Arabidopsis
ISSGAKRSRKVIMEFWPEFLASSTGKEFVAGGFGGTAGIISGYPLDTLRVMQQSSNNGSAAFTILRNLVAKEGPTALYRGMAAPLASVTFQNAMVFQIYAVLSRAFSTSVSVNDPPSYKGVALGGFCSGALQSMLLSPVELVKIRLQLQNTGQSTEPQKGPIKVANNIWKREGLRGIYRGLGITMLRDAPAHGLYFWTYEYAREKLHPGCRRSCQETLNTMLVSGGLAGVVSWVFSYPLDVIKTRLQAQTLSSRKYKGILDCLRKSVEEEGYVVLWRGLGTAVARAFVVNGAIFSAYEITLRCLFDK

SEQ ID NO: 53626 - protein, 295 aa, Glycine max
  peptide (1)..(295): Ceres Seq. ID no. 15174892
  misc_feature (15)..(295): Homolog of NCBI NO: 32566691 NR Description: mitochondrial substrate carrier (39.7 kD) (5P134)
  misc_feature (15)..(295): Homolog of NCBI NO: 17558962 NR Description: mitochondrial substrate carrier (34.0 kD) (5P134)
  misc_feature (15)..(289): Homolog of NCBI NO: 28193150 NR Description: unnamed protein product [Homo sapiens]
  misc_feature (15)..(289): Homolog of NCBI NO: 31044469 NR Description: C030003J19Rik; similar to CG4995 gene product
  misc_feature (15)..(289): Homolog of NCBI NO: 13879465 NR Description: Similar to CG4995 gene product [Mus musculus]
  misc_feature (15)..(289): Homolog of NCBI NO: 34867789 NR Description: similar to chromosome 14 open reading frame 69
  misc_feature (7)..(294): Homolog of NCBI NO: 31238945 NR Description: ENSANGP00000010634 [Anopheles gambiae]
  misc_feature (1)..(292): Homolog of NCBI NO: 34904170 NR Description: putative carnitine/acylcarnitine translocase
  misc_feature (1)..(295): Homolog of NCBI NO: 21593041 NR Description: putative carnitine/acylcarnitine translocase
  misc_feature (1)..(295): Homolog of NCBI NO: 15220023 NR Description: mitochondrial carrier protein family [Arabidopsis
MEFWPEFLASSTGKEFVAGGFGGTAGIISGYPLDTLRVMQQSSNNGSAAFTILRNLVAKEGPTALYRGMAAPLASVTFQNAMVFQIYAVLSRAFSTSVSVNDPPSYKGVALGGFCSGALQSMLLSPVELVKIRLQLQNTGQSTEPQKGPIKVANNIWKREGLRGIYRGLGITMLRDAPAHGLYFWTYEYAREKLHPGCRRSCQETLNTMLVSGGLAGVVSWVFSYPLDVIKTRLQAQTLSSRKYKGILDCLRKSVEEEGYVVLWRGLGTAVARAFVVNGAIFSAYEITLRCLFDK

SEQ ID NO: 53627 - protein, 257 aa, Glycine max
  peptide (1)..(257): Ceres Seq. ID no. 15174893
  misc_feature (1)..(257): Homolog of NCBI NO: 32566691 NR Description: mitochondrial substrate carrier (39.7 kD) (5P134)
  misc_feature (1)..(257): Homolog of NCBI NO: 17558962 NR Description: mitochondrial substrate carrier (34.0 kD) (5P134)
  misc_feature (1)..(251): Homolog of NCBI NO: 28193150 NR Description: unnamed protein product [Homo sapiens]
  misc_feature (1)..(251): Homolog of NCBI NO: 31044469 NR Description: C030003J19Rik; similar to CG4995 gene product
  misc_feature (1)..(251): Homolog of NCBI NO: 13879465 NR Description: Similar to CG4995 gene product [Mus musculus]
  misc_feature (1)..(251): Homolog of NCBI NO: 34867789 NR Description: similar to chromosome 14 open reading frame 69
  misc_feature (1)..(256): Homolog of NCBI NO: 31238945 NR Description: ENSANGP00000010634 [Anopheles gambiae]
  misc_feature (1)..(254): Homolog of NCBI NO: 34904170 NR Description: putative carnitine/acylcarnitine translocase
  misc_feature (1)..(257): Homolog of NCBI NO: 21593041 NR Description: putative carnitine/acylcarnitine translocase
  misc_feature (1)..(257): Homolog of NCBI NO: 15220023 NR Description: mitochondrial carrier protein family [Arabidopsis
MQQSSNNGSAAFTILRNLVAKEGPTALYRGMAAPLASVTFQNAMVFQIYAVLSRAFSTSVSVNDPPSYKGVALGGFCSGALQSMLLSPVELVKIRLQLQNTGQSTEPQKGPIKVANNIWKREGLRGIYRGLGITMLRDAPAHGLYFWTYEYAREKLHPGCRRSCQETLNTMLVSGGLAGVVSWVFSYPLDVIKTRLQAQTLSSRKYKGILDCLRKSVEEEGYVVLWRGLGTAVARAFVVNGAIFSAYEITLRCLFDK

SEQ ID NO: 53628 - DNA, 1245 bp, Glycine max
  misc_feature (1)..(1245): Ceres Seq. ID no. 14306439
gattggacacgtgtgccaactctctctctctctctctctctctcatacattcccattgaggagaggttggggtgcgcaacacaacaccgcaccaaaactctcgttccctgccacaaccggaaacagaagccacgacacacaacacaaaacacaaagcattggtattcggtacgtaacatactctgtttcctctgacttcgaggttttccttcgctttggttcagaccaagcgatctctgtggctacaaacttggaaccatttttatgttttttttcccctgagccttcggttcccatgttcttcgctccaccgcatgttgtaacttgtaaccgcaattccattcctctattctttctcttacccttgagtcacgcacccaccctttttgcctctcacgtagttattgttgtgtgcatgctggtcctacttgattggtgatttttgtagaaactttgatcgatcgatctcttcatcgtcatgacagcttctgcttcaaattcgttgataaccgttaaccctgatgaacttcgcttccaatttgagttggagaagcaaacatattgcgatcttaaagttctgaataacacagagaactacgttgcctttaaggtcaaaaccacttcaccaaagaagtactttgtacgacctaataccggtgttgtacatccatgggacctatgtatcatcagagtcaccctccaggctcaacaagaataccctccagacatgcaatgcaaagacaagtttctcttgcagagtacaatagtgaatccaaacactgatgttgacgatcttccgccagatacttttaataaggatggcgaaaagtcgatagaggatatgaaactaagagtggtatatatctctcctatgtcaccccaaggaagcacagaagatgacacagtgaagaattcaactcaaaaacttgatgctaattctagtgaaaccgtgcagcgcctgaaggaggaaagagatgcctacgtcttacaatcacggcaactgcagcaggaactggacattctgaaaagaagaaatcgtagaggcgattcaggcttttccttcacttttgccgtgtttgtgggtctcattggattattgtgtggtttgcttttaaaactttcattgtcttcaccacctacagaatgatttcacactgatcaaaacctttgcatgcagacccttccgtgctattaagtgtaaagaattattttttctattgaatgggatttttattcattttgcac

SEQ ID NO: 53629 - protein, 222 aa, Glycine max
  peptide (1)..(222): Ceres Seq. ID no. 14306440
  misc_feature (6)..(155): Homolog of NCBI NO: 15225415 NR Description: VAMP (vesicle-associated membrane
  misc_feature (6)..(178): Homolog of NCBI NO: 18411661 NR Description: VAMP (vesicle-associated membrane
  misc_feature (6)..(178): Homolog of NCBI NO: 21554053 NR Description: putative VAMP-associated protein [Arabidopsis
  misc_feature (3)..(187): Homolog of NCBI NO: 11288307 NR Description: 27k vesicle-associated membrane
  misc_feature (155)..(213): Homolog of NCBI NO: 37535894 NR Description: putative vesicle-associated membrane protein
  misc_feature (4)..(134): Homolog of NCBI NO: 37535894 NR Description: putative vesicle-associated membrane protein
  misc_feature (54)..(219): Homolog of NCBI NO: 28207603 NR Description: putative VAMP-associated protein [Brassica rapa
  misc_feature (8)..(219): Homolog of NCBI NO: 14140121 NR Description: putative vesicle-associated membrane protein
  misc_feature (5)..(219): Homolog of NCBI NO: 37536644 NR Description: putative membrane protein
  misc_feature (1)..(219): Homolog of NCBI NO: 15238034 NR Description: VAMP (vesicle-associated membrane
MTASASNSLITVNPDELRFQFELEKQTYCDLKVLNNTENYVAFKVKTTSPKKYFVRPNTGVVHPWDLCIIRVTLQAQQEYPPDMQCKDKFLLQSTIVNPNTDVDDLPPDTFNKDGEKSIEDMKLRVVYISPMSPQGSTEDDTVKNSTQKLDANSSETVQRLKEERDAYVLQSRQLQQELDILKRRNRRGDSGFSFTFAVFVGLIGLLCGLLLKLSLSSPPTE

SEQ ID NO: 53630 - protein, 145 aa, Glycine max
  peptide (1)..(145): Ceres Seq. ID no. 14306441
IGHVCQLSLSLSLSHTFPLRRGWGAQHNTAPKLSFPATTGNRSHDTQHKTQSIGIRYVTYSVSSDFEVFLRFGSDQAISVATNLEPFLCFFSPEPSVPMFFAPPHVVTCNRNSIPLFFLLPLSHAPTLFASHVVIVVCMLVLLDW

SEQ ID NO: 53631 - protein, 139 aa, Glycine max
  peptide (1)..(139): Ceres Seq. ID no. 14306442
  misc_feature (1)..(72): Homolog of NCBI NO: 15225415 NR Description: VAMP (vesicle-associated membrane
  misc_feature (1)..(95): Homolog of NCBI NO: 18411661 NR Description: VAMP (vesicle-associated membrane
  misc_feature (1)..(95): Homolog of NCBI NO: 21554053 NR Description: putative VAMP-associated protein [Arabidopsis
  misc_feature (1)..(104): Homolog of NCBI NO: 11288307 NR Description: 27k vesicle-associated membrane
  misc_feature (72)..(130): Homolog of NCBI NO: 37535894 NR Description: putative vesicle-associated membrane protein
  misc_feature (1)..(51): Homolog of NCBI NO: 37535894 NR Description: putative vesicle-associated membrane protein
  misc_feature (1)..(136): Homolog of NCBI NO: 28207603 NR Description: putative VAMP-associated protein [Brassica rapa
  misc_feature (1)..(136): Homolog of NCBI NO: 14140121 NR Description: putative vesicle-associated membrane protein
  misc_feature (1)..(136): Homolog of NCBI NO: 37536644 NR Description: putative membrane protein
  misc_feature (1)..(136): Homolog of NCBI NO: 15238034 NR Description: VAMP (vesicle-associated membrane
MQCKDKFLLQSTIVNPNTDVDDLPPDTFNKDGEKSIEDMKLRVVYISPMSPQGSTEDDTVKNSTQKLDANSSETVQRLKEERDAYVLQSRQLQQELDILKRRNRRGDSGFSFTFAVFVGLIGLLCGLLLKLSLSSPPTE

SEQ ID NO: 53632 - DNA, 1330 bp, Glycine max
  misc_feature (1)..(1330): Ceres Seq. ID no. 14303870
agtggacctatcaaacaacaagttcaatggccccataccagccaagtttggtagttcttcaaatttacaactcctcaatgtgtctttcaacaatatctctggttcaataccaacagcaaagtcattcaaattgatgggaagaagtgcatttgttggaaattcagagctatgtggagcaccattgcaaccatgtcctgattcagttggaatattgggaagcaaaggcacgtggaaggttacacgtattgtgcttctctctgtagggttgttaatagtccttctgggacttgtttttggaattctttacttgagaaggggaatcaaaagtcaatggaagatggtctcattcgctggtctacctcaattcacagcaaacgatattttgacaagcctcagtgccacaacaaaacctacagatattcaatcaccatcagttacaaagactgttctgcctacaggaataacagttttggtcaagaagattgaattggaagcaagaagcataaaggttgtgtcagaatttataatgaggctaggaaatgcaaggcacaagaacttaatcagattgttggggttctgccacaaccagcacctagtctatcttttgtatgattacttgcccaatgggaatttggctgagaaaatggaaatgaaatgggattgggcagcaaaattcagaacagtggttggaattgcaaggggactttgcttccttcaccatgaatgttacccagctataccccatggagacttgaggcctagcaacattgtattcgatgaaaatatggaaccccatttggcagaatttgggttcaaacatgtgtcgaggtggagcaaaggctcatcacccaccacaactaagtgggaaacagaatacaatgaagccacaaaagaggaactgagcatggatatctacaaatttggggagatgattctggaaattttaaccagggaaaggttggcaaattcaggagccagcatacacagcaaaccatgggaggttctcttaagagaaatttacaatgagaatggagcaagttcggcaagttcattgcaagagattaaacttgttcttgaggtagcaatgctttgcacccgaagcaggtcatctgaccggccatccatggaagatgttcttaagcttctgtcagggttaaaacatctagaggatggcagaacttcgaaagaagggcaataaaatgttcatttgcatcactgcgttgaaaaccattagaaacatatagtaattgcttagataacaagtttgcacgtatgtaattaaaggagtttgcagcttgtataatagatatttccattgtttcagtgtgcc

SEQ ID NO: 53633 - protein, 398 aa, Glycine max
  peptide (1)..(398): Ceres Seq. ID no. 14303871
  misc_feature (144)..(382): Pfam Name: Protein kinase domain Pfam Description: Protein kinase domain
  misc_feature (1)..(37): Homolog of NCBI NO: 15239123 NR Description: leucine-rich repeat transmembrane protein kinase,
  misc_feature (1)..(388): Homolog of NCBI NO: 15239123 NR Description: leucine-rich repeat transmembrane protein kinase,
  misc_feature (5)..(37): Homolog of NCBI NO: 15242059 NR Description: leucine-rich repeat transmembrane protein kinase,
  misc_feature (1)..(37): Homolog of NCBI NO: 15242059 NR Description: leucine-rich repeat transmembrane protein kinase,
  misc_feature (1)..(383): Homolog of NCBI NO: 15242059 NR Description: leucine-rich repeat transmembrane protein kinase,
VDLSNNKFNGPIPAKFGSSSNLQLLNVSFNNISGSIPTAKSFKLMGRSAFVGNSELCGAPLQPCPDSVGILGSKGTWKVTRIVLLSVGLLIVLLGLVFGILYLRRGIKSQWKMVSFAGLPQFTANDILTSLSATTKPTDIQSPSVTKTVLPTGITVLVKKIELEARSIKVVSEFIMRLGNARHKNLIRLLGFCHNQHLVYLLYDYLPNGNLAEKMEMKWDWAAKFRTVVGIARGLCFLHHECYPAIPHGDLRPSNIVFDENMEPHLAEFGFKHVSRWSKGSSPTTTKWETEYNEATKEELSMDIYKFGEMILEILTRERLANSGASIHSKPWEVLLREIYNENGASSASSLQEIKLVLEVAMLCTRSRSSDRPSMEDVLKLLSGLKHLEDGRTSKEGQ

SEQ ID NO: 53634 - protein, 354 aa, Glycine max
  peptide (1)..(354): Ceres Seq. ID no. 14303872
  misc_feature (100)..(338): Pfam Name: Protein kinase domain Pfam Description: Protein kinase domain
  misc_feature (1)..(344): Homolog of NCBI NO: 15239123 NR Description: leucine-rich repeat transmembrane protein kinase,
  misc_feature (1)..(339): Homolog of NCBI NO: 15242059 NR Description: leucine-rich repeat transmembrane protein kinase,
MGRSAFVGNSELCGAPLQPCPDSVGILGSKGTWKVTRIVLLSVGLLIVLLGLVFGILYLRRGIKSQWKMVSFAGLPQFTANDILTSLSATTKPTDIQSPSVTKTVLPTGITVLVKKIELEARSIKVVSEFIMRLGNARHKNLIRLLGFCHNQHLVYLLYDYLPNGNLAEKMEMKWDWAAKFRTVVGIARGLCFLHHECYPAIPHGDLRPSNIVFDENMEPHLAEFGFKHVSRWSKGSSPTTTKWETEYNEATKEELSMDIYKFGEMILEILTRERLANSGASIHSKPWEVLLREIYNENGASSASSLQEIKLVLEVAMLCTRSRSSDRPSMEDVLKLLSGLKHLEDGRTSKEGQ

SEQ ID NO: 53635 - protein, 286 aa, Glycine max
  peptide (1)..(286): Ceres Seq. ID no. 14303873
  misc_feature (32)..(270): Pfam Name: Protein kinase domain Pfam Description: Protein kinase domain
  misc_feature (1)..(276): Homolog of NCBI NO: 15239123 NR Description: leucine-rich repeat transmembrane protein kinase,
  misc_feature (1)..(271): Homolog of NCBI NO: 15242059 NR Description: leucine-rich repeat transmembrane protein kinase,
MVSFAGLPQFTANDILTSLSATTKPTDIQSPSVTKTVLPTGITVLVKKIELEARSIKVVSEFIMRLGNARHKNLIRLLGFCHNQHLVYLLYDYLPNGNLAEKMEMKWDWAAKFRTVVGIARGLCFLHHECYPAIPHGDLRPSNIVFDENMEPHLAEFGFKHVSRWSKGSSPTTTKWETEYNEATKEELSMDIYKFGEMILEILTRERLANSGASIHSKPWEVLLREIYNENGASSASSLQEIKLVLEVAMLCTRSRSSDRPSMEDVLKLLSGLKHLEDGRTSKEGQ

SEQ ID NO: 53636 - DNA, 1081 bp, Glycine max
  misc_feature (1)..(1081): Ceres Seq. ID no. 15169849
gagagagaggtatataagaggttagggtttggggttttttgggtgccattgttgctgtcatcatccgcagctgctgttattcgcaccgcaaacaaacagtgagccatggccgtcggaaagaacaagcgcatctccaaagggaaaaagggtggcaagaagaaggcagctgatccctttgccaagaaggattggtatgacattaaggccccttctctttttcaagtgaaaaatgttggcaaaaccctcgtctctcgtacgcagggtaccaagattgcttctgaaggacttaaacatagagtgtttgaggtctccttggctgatcttcaaggggatgaggatcatgcattcaagaagattaggttgagagctgaagatgtgcaagggaagaatgtcctgacaaatttctggggaatggatttcacaactgacaagctgaggtcattggtgcgaaaatggcaaactctaattgaagcccatgtggatgtgaagacaactgataactacacattgaggatgttttgcattggatttaccaagagaagagctaaccaagtgaagagaacctgctatgcacaatcaagccagattagacagattcgtaggaagatgagggagatcatgaccacccaggcaacatcctgtgatttgaaggagttggtccgcaagtttattcttgagattattggaaaagagattgagaaggcgacatctagtatttaccctctgcagaaagtgtttgttcgtaaagtcaagatcctgaaagcccctaagtttgatcttgggaaactgatggaggttcatggagattactcagaggatgttggtgccaaggtagacagacctgctgatgaaatagtggcagaggaacccactgaaattgttggagcttgatttcatgatgcattcagtttgttttaggttttctttttcttacgttatcattgaaaattaagttacaaacttctgtccaatgtttctgtgtaagccgagtgacacagttttgtttagacaatcagaagacatttttggcgcgtaatatatctgggttttgttcagaacccaaaatcagatttgcttgctt

SEQ ID NO: 53637 - protein, 261 aa, Glycine max
  peptide (1)..(261): Ceres Seq. ID no. 15169850
  misc_feature (11)..(222): Pfam Name: Ribosomal S3Ae family Pfam Description: Ribosomal S3Ae family
  misc_feature (1)..(238): Homolog of NCBI NO: 1856971 NR Description: This gene is specifically expressed at the S during the cell cycle in the synchronous culture of periwinkle
  misc_feature (1)..(238): Homolog of NCBI NO: 82065 NR Description: ribosomal protein S3a - Madagascar periwinkle
  misc_feature (1)..(261): Homolog of NCBI NO: 1350986 NR Description: 40S RIBOSOMAL PROTEIN S3A (CYC07 PROTEIN)
  misc_feature (1)..(261): Homolog of NCBI NO: 1350981 NR Description: 40S RIBOSOMAL PROTEIN S3A (S PHASE SPECIFIC
  misc_feature (1)..(261): Homolog of NCBI NO: 15236171 NR Description: 40S ribosomal protein S3A (RPS3aB) [Arabidopsis
  misc_feature (1)..(261): Homolog of NCBI NO: 6714564 NR Description: cyc07 [Daucus carota]
  misc_feature (1)..(261): Homolog of NCBI NO: 15229364 NR Description: 40S ribosomal protein S3A (RPS3aA) [Arabidopsis
  misc_feature (1)..(261): Homolog of NCBI NO: 1350984 NR Description: 40S RIBOSOMAL PROTEIN S3A
  misc_feature (1)..(261): Homolog of NCBI NO: 1350983 NR Description: 40S RIBOSOMAL PROTEIN S3A (CYC07 PROTEIN)
  misc_feature (1)..(261): Homolog of NCBI NO: 24817254 NR Description: ribosomal protein S3a [Cicer arietinum]
MAVGKNKRISKGKKGGKKKAADPFAKKDWYDIKAPSLFQVKNVGKTLVSRTQGTKIASEGLKHRVFEVSLADLQGDEDHAFKKIRLRAEDVQGKNVLTNFWGMDFTTDKLRSLVRKWQTLIEAHVDVKTTDNYTLRMFCIGFTKRRANQVKRTCYAQSSQIRQIRRKMREIMTTQATSCDLKELVRKFILEIIGKEIEKATSSIYPLQKVFVRKVKILKAPKFDLGKLMEVHGDYSEDVGAKVDRPADEIVAEEPTEIVGA

SEQ ID NO: 53638 - protein, 159 aa, Glycine max
  peptide (1)..(159): Ceres Seq. ID no. 15169851
  misc_feature (1)..(120): Pfam Name: Ribosomal S3Ae family Pfam Description: Ribosomal S3Ae family
  misc_feature (1)..(136): Homolog of NCBI NO: 1856971 NR Description: This gene is specifically expressed at the S during the cell cycle in the synchronous culture of periwinkle
  misc_feature (1)..(136): Homolog of NCBI NO: 82065 NR Description: ribosomal protein S3a - Madagascar periwinkle
  misc_feature (1)..(159): Homolog of NCBI NO: 1350986 NR Description: 40S RIBOSOMAL PROTEIN S3A (CYC07 PROTEIN)
  misc_feature (1)..(159): Homolog of NCBI NO: 1350981 NR Description: 40S RIBOSOMAL PROTEIN S3A (S PHASE SPECIFIC
  misc_feature (1)..(159): Homolog of NCBI NO: 15236171 NR Description: 40S ribosomal protein S3A (RPS3aB) [Arabidopsis
  misc_feature (1)..(159): Homolog of NCBI NO: 6714564 NR Description: cyc07 [Daucus carota]
  misc_feature (1)..(159): Homolog of NCBI NO: 15229364 NR Description: 40S ribosomal protein S3A (RPS3aA) [Arabidopsis
  misc_feature (1)..(159): Homolog of NCBI NO: 1350984 NR Description: 40S RIBOSOMAL PROTEIN S3A
  misc_feature (1)..(159): Homolog of NCBI NO: 1350983 NR Description: 40S RIBOSOMAL PROTEIN S3A (CYC07 PROTEIN)
  misc_feature (1)..(159): Homolog of NCBI NO: 24817254 NR Description: ribosomal protein S3a [Cicer arietinum]
MDFTTDKLRSLVRKWQTLIEAHVDVKTTDNYTLRMFCIGFTKRRANQVKRTCYAQSSQIRQIRRKMREIMTTQATSCDLKELVRKFILEIIGKEIEKATSSIYPLQKVFVRKVKILKAPKFDLGKLMEVHGDYSEDVGAKVDRPADEIVAEEPTEIVGA

SEQ ID NO: 53639 - DNA, 1657 bp, Glycine max
  misc_feature (1)..(1657): Ceres Seq. ID no. 14311203
gagaaatggaagcaccatgggccacaacaagttcaagcatagtttttgtgatagtgatacttgctctaacatcatgggcatggaggatgttgaattggctatggataaggccaaagaggctagagaggctcctaagggaacaaggccttcaaggaaacccctacaggatattggttggggacttaaaggagattgtgaagttgcaaatggaagcaagatccaaacccatgaatctctcccatgatattgtgccacgtgtgtttgcacatctgcatcagagtgtcctcaaacatggcaagaattcttttatttggtttggaccaaaaccaagggtgaccctcacagatcctgagctgatcaaagatgtacttaacaagatcagtgatttccgaaagcctgaagcaaatccacttgccaaattactagctactggtcttgtaaactatgatggagaaaaatggaacaagcacagaagattaattaatcctgcattcagtttagaaaaattgaagattatgttaccaatattcttcaaaagttgcaatgatctaattatcaagtgggagggaatgttgtcttatgatggatcatgtgaaatggatgtttggcctttccttcaaaatttagctagtgatgttattgcgagaacagcatttggaagtagttttgaagaaggaaaaagaatatttcaacttcaaaaagagctagcggaacttacaatgaaagttatcatgaaagtttacatccctggatggagatttgtacctactgcaaccaatcggagaatgaaggaaattgatagatatataaaagcttcacttacagacatgattaagaagagagagaaagcaccaaagacaggtgaagctactagggatgacttgttaggtatacttctggagtcaaatcacaaggaaatacaagaacacagaaacaatgagaatgttggaatgaatctcaatgatgtaatcgaggaatgcaagttattctactttgcagggcaagagaccacttcagttttacttgtttggacaatggtgttgttaagtaggtaccctgattggcaatcacgtgcaagggaggaagtcttacaagtctttggcaaacaagcaccaaattttgatgggctaagtcaccttaagattgtcaccatgattttgtatgaggttcttagattatacccaccaggaattggccttactagaagtgttcacagagatatgaaactgggaaacctaacattacctgctggagtgcaagtttccttaccaataattatggttcaccatgaccgtgaactctggggtgatgatgcaaaagagttcaatcctgagagattttcagaaggggtttcaaaagcgacaaatggcagagtttcattttttccatttggatggggtcctagaatatgcatcggacaaaacttttccttgttggaggcaaagatggctttgtcgatgatcttacagcatttctcatttgaactttctccagcttatactcatgctccgtttacagtgattactcttcagccccaatatggcgctcatgtcattttacgtaaagttgaaatgtaaaatataataataacccttattttgatttgcatttcgcactgcaaagtttataatgcaataatagtagaagactaattgtc

SEQ ID NO: 53640 - protein, 524 aa, Glycine max
  peptide (1)..(524): Ceres Seq. ID no. 14311204
  misc_feature (11)..(522): Homolog of NCBI NO: 15231901 NR Description: cytochrome P450, putative [Arabidopsis thaliana]
  misc_feature (4)..(522): Homolog of NCBI NO: 21842133 NR Description: cytochrome P450 monooxygenase CYP72A16 [Zea mays
  misc_feature (10)..(522): Homolog of NCBI NO: 15231889 NR Description: cytochrome P450, putative [Arabidopsis thaliana]
  misc_feature (19)..(524): Homolog of NCBI NO: 7488960 NR Description: cytochrome P450 (CYP72C) - Madagascar periwinkle
  misc_feature (2)..(523): Homolog of NCBI NO: 7430703 NR Description: cytochrome P450 - Madagascar periwinkle
  misc_feature (2)..(523): Homolog of NCBI NO: 461812 NR Description: Cytochrome P450 72A1 (CYPLXXII) (Secologanin
  misc_feature (11)..(522): Homolog of NCBI NO: 15231903 NR Description: cytochrome P450, putative [Arabidopsis thaliana]
  misc_feature (2)..(522): Homolog of NCBI NO: 15231899 NR Description: cytochrome P450, putative [Arabidopsis thaliana]
  misc_feature (10)..(522): Homolog of NCBI NO: 15231907 NR Description: cytochrome P450, putative [Arabidopsis thaliana]
  misc_feature (11)..(522): Homolog of NCBI NO: 15231906 NR Description: cytochrome P450, putative [Arabidopsis thaliana]
EMEAPWATTSSSIVFVIVILALTSWAWRMLNWLWIRPKRLERLLREQGLQGNPYRILVGDLKEIVKLQMEARSKPMNLSHDIVPRVFAHLHQSVLKHGKNSFIWFGPKPRVTLTDPELIKDVLNKISDFRKPEANPLAKLLATGLVNYDGEKWNKHRRLINPAFSLEKLKIMLPIFFKSCNDLIIKWEGMLSYDGSCEMDVWPFLQNLASDVIARTAFGSSFEEGKRIFQLQKELAELTMKVIMKVYIPGWRFVPTATNRRMKEIDRYIKASLTDMIKKREKAPKTGEATRDDLLGILLESNHKEIQEHRNNENVGMNLNDVIEECKLFYFAGQETTSVLLVWTMVLLSRYPDWQSRAREEVLQVFGKQAPNFDGLSHLKIVTMILYEVLRLYPPGIGLTRSVHRDMKLGNLTLPAGVQVSLPIIMVHHDRELWGDDAKEFNPERFSEGVSKATNGRVSFFPFGWGPRICIGQNFSLLEAKMALSMILQHFSFELSPAYTHAPFTVITLQPQYGAHVILRKVEM

SEQ ID NO: 53641 - protein, 523 aa, Glycine max
  peptide (1)..(523): Ceres Seq. ID no. 14311205
  misc_feature (10)..(521): Homolog of NCBI NO: 15231901 NR Description: cytochrome P450, putative [Arabidopsis thaliana]
  misc_feature (3)..(521): Homolog of NCBI NO: 21842133 NR Description: cytochrome P450 monooxygenase CYP72A16 [Zea mays
  misc_feature (9)..(521): Homolog of NCBI NO: 15231889 NR Description: cytochrome P450, putative [Arabidopsis thaliana]
  misc_feature (18)..(523): Homolog of NCBI NO: 7488960 NR Description: cytochrome P450 (CYP72C) - Madagascar periwinkle
  misc_feature (1)..(522): Homolog of NCBI NO: 7430703 NR Description: cytochrome P450 - Madagascar periwinkle
  misc_feature (1)..(522): Homolog of NCBI NO: 461812 NR Description: Cytochrome P450 72A1 (CYPLXXII) (Secologanin
  misc_feature (10)..(521): Homolog of NCBI NO: 15231903 NR Description: cytochrome P450, putative [Arabidopsis thaliana]
  misc_feature (1)..(521): Homolog of NCBI NO: 15231899 NR Description: cytochrome P450, putative [Arabidopsis thaliana]
  misc_feature (9)..(521): Homolog of NCBI NO: 15231907 NR Description: cytochrome P450, putative [Arabidopsis thaliana]
  misc_feature (10)..(521): Homolog of NCBI NO: 15231906 NR Description: cytochrome P450, putative [Arabidopsis thaliana]
MEAPWATTSSSIVFVIVILALTSWAWRMLNWLWIRPKRLERLLREQGLQGNPYRILVGDLKEIVKLQMEARSKPMNLSHDIVPRVFAHLHQSVLKHGKNSFIWFGPKPRVTLTDPELIKDVLNKISDFRKPEANPLAKLLATGLVNYDGEKWNKHRRLINPAFSLEKLKIMLPIFFKSCNDLIIKWEGMLSYDGSCEMDVWPFLQNLASDVIARTAFGSSFEEGKRIFQLQKELAELTMKVIMKVYIPGWRFVPTATNRRMKEIDRYIKASLTDMIKKREKAPKTGEATRDDLLGILLESNHKEIQEHRNNENVGMNLNDVIEECKLFYFAGQETTSVLLVWTMVLLSRYPDWQSRAREEVLQVFGKQAPNFDGLSHLKIVTMILYEVLRLYPPGIGLTRSVHRDMKLGNLTLPAGVQVSLPIIMVHHDRELWGDDAKEFNPERFSEGVSKATNGRVSFFPFGWGPRICIGQNFSLLEAKMALSMILQHFSFELSPAYTHAPFTVITLQPQYGAHVILRKVEM

SEQ ID NO: 53642 - protein, 496 aa, Glycine max
  peptide (1)..(496): Ceres Seq. ID no. 14311206
  misc_feature (1)..(494): Homolog of NCBI NO: 15231901 NR Description: cytochrome P450, putative [Arabidopsis thaliana]
  misc_feature (1)..(494): Homolog of NCBI NO: 21842133 NR Description: cytochrome P450 monooxygenase CYP72A16 [Zea mays
  misc_feature (1)..(494): Homolog of NCBI NO: 15231889 NR Description: cytochrome P450, putative [Arabidopsis thaliana]
  misc_feature (1)..(496): Homolog of NCBI NO: 7488960 NR Description: cytochrome P450 (CYP72C) - Madagascar periwinkle
  misc_feature (1)..(495): Homolog of NCBI NO: 7430703 NR Description: cytochrome P450 - Madagascar periwinkle
  misc_feature (1)..(495): Homolog of NCBI NO: 461812 NR Description: Cytochrome P450 72A1 (CYPLXXII) (Secologanin
  misc_feature (1)..(494): Homolog of NCBI NO: 15231903 NR Description: cytochrome P450, putative [Arabidopsis thaliana]
  misc_feature (1)..(494): Homolog of NCBI NO: 15231899 NR Description: cytochrome P450, putative [Arabidopsis thaliana]
  misc_feature (1)..(494): Homolog of NCBI NO: 15231907 NR Description: cytochrome P450, putative [Arabidopsis thaliana]
  misc_feature (1)..(494): Homolog of NCBI NO: 15231906 NR Description: cytochrome P450, putative [Arabidopsis thaliana]
MLNWLWIRPKRLERLLREQGLQGNPYRILVGDLKEIVKLQMEARSKPMNLSHDIVPRVFAHLHQSVLKHGKNSFIWFGPKPRVTLTDPELIKDVLNKISDFRKPEANPLAKLLATGLVNYDGEKWNKHRRLINPAFSLEKLKIMLPIFFKSCNDLIIKWEGMLSYDGSCEMDVWPFLQNLASDVIARTAFGSSFEEGKRIFQLQKELAELTMKVIMKVYIPGWRFVPTATNRRMKEIDRYIKASLTDMIKKREKAPKTGEATRDDLLGILLESNHKEIQEHRNNENVGMNLNDVIEECKLFYFAGQETTSVLLVWTMVLLSRYPDWQSRAREEVLQVFGKQAPNFDGLSHLKIVTMILYEVLRLYPPGIGLTRSVHRDMKLGNLTLPAGVQVSLPIIMVHHDRELWGDDAKEFNPERFSEGVSKATNGRVSFFPFGWGPRICIGQNFSLLEAKMALSMILQHFSFELSPAYTHAPFTVITLQPQYGAHVILRKVEM

SEQ ID NO: 53643 - DNA, 1197 bp, Glycine max
  misc_feature (1)..(1197): Ceres Seq. ID no. 14311044
gctgtgaagtgtgaattaaaatatattcaattttgcgtttctctgcctaaaaggattgaaagatgggtcaagcattcggttgctaccaagtcgatcagtcaaatgtggctatcaaggagcattttggaaaatttgatgatgtcctagagcctggatgtcactgcctgccttggtgtcttgggtaccagattgctggtagtctgtcgctgcgagtgcagcaacttgatgttcgatgtgagacgaaaaccaaggacaatgtctttgtcaatgtggttgcatctgtgcaataccgagctgtgtctgagaaagcatctgatgcattctataggcttaccaacactagggagcagatccaatcatatgtttttgatgtcatcagggccagtgtaccaaagttggagttggattctgtctttgagcagaaaaatgatatagcaaaggctgtggaggaggagcttgagaaggccatgtcaacctatggatttgagatagttcagactctcattgttgatatagagcctgatgttaatgtcaagagagcaatgaacgagataaacgcagctgctagattgaggttggctgcaaatgagaaggctgaagctgagaaaatactgcagatcaagaaagcggagggagaagcagaatccaaatatctgtcaggactcggtatcgctcgtcaacgtcaggccattgtggatggactgagggacagcgtgcttgctttctctgagaacgtgcccgggacatcagctaaagatgtcatggacatggtgctggtgactcaatactttgacaccatgaaagagataggagcatcgtcaaggtcctcgtctgtgttcatacctcacggtcctggggcagttaaagacattgccgtgcaaattcgggatggtctccttcaggccactgcctcacagaattaagctttcttggagttgtaaataacaaatagtatgtgtgtcaggtttttttcaggaaatgcttcttttgtttgaacttataaagtctgcatctttactcttcttatatttgatagattcatagcagtgtctattttatgtgtaagtactgatgtgcagttttgaatacttgtttaaggatagtcttaatgtcaagttgcttgtgaatcattaaggaatttgttatgtaagaattacttcccaaaagatgtgtttttcttttagtgtcctatcttgt

SEQ ID NO: 53644 - protein, 286 aa, Glycine max
  peptide (1)..(286): Ceres Seq. ID no. 14311045
  misc_feature (7)..(193): Pfam Name: SPFH domain / Band 7 family Pfam Description: SPFH domain / Band 7 family
  misc_feature (1)..(281): Homolog of NCBI NO: 28476864 NR Description: hypersensitive-induced reaction protein 2
  misc_feature (1)..(281): Homolog of NCBI NO: 13194676 NR Description: hypersensitivity-induced response-like protein
  misc_feature (1)..(282): Homolog of NCBI NO: 9998903 NR Description: putative membrane protein [Zea mays]
  misc_feature (1)..(281): Homolog of NCBI NO: 7716468 NR Description: hypersensitive-induced response protein [Zea mays]
  misc_feature (1)..(284): Homolog of NCBI NO: 15241939 NR Description: hypersensitive-induced response protein
  misc_feature (1)..(280): Homolog of NCBI NO: 23345042 NR Description: hypersensitive-induced reaction protein 1
  misc_feature (1)..(284): Homolog of NCBI NO: 15222481 NR Description: expressed protein [Arabidopsis thaliana]
  misc_feature (1)..(282): Homolog of NCBI NO: 7716466 NR Description: hypersensitive-induced response protein [Zea mays]
  misc_feature (1)..(281): Homolog of NCBI NO: 14150732 NR Description: hypersensitive-induced response protein [Oryza
  misc_feature (1)..(284): Homolog of NCBI NO: 3928150 NR Description: hypothetical protein [Cicer arietinum]
MGQAFGCYQVDQSNVAIKEHFGKFDDVLEPGCHCLPWCLGYQIAGSLSLRVQQLDVRCETKTKDNVFVNVVASVQYRAVSEKASDAFYRLTNTREQIQSYVFDVIRASVPKLELDSVFEQKNDIAKAVEEELEKAMSTYGFEIVQTLIVDIEPDVNVKRAMNEINAAARLRLAANEKAEAEKILQIKKAEGEAESKYLSGLGIARQRQAIVDGLRDSVLAFSENVPGTSAKDVMDMVLVTQYFDTMKEIGASSRSSSVFIPHGPGAVKDIAVQIRDGLLQATASQN

SEQ ID NO: 53645 - protein, 151 aa, Glycine max
  peptide (1)..(151): Ceres Seq. ID no. 14311046
  misc_feature (1)..(58): Pfam Name: SPFH domain / Band 7 family Pfam Description: SPFH domain / Band 7 family
  misc_feature (1)..(146): Homolog of NCBI NO: 28476864 NR Description: hypersensitive-induced reaction protein 2
  misc_feature (1)..(146): Homolog of NCBI NO: 13194676 NR Description: hypersensitivity-induced response-like protein
  misc_feature (1)..(147): Homolog of NCBI NO: 9998903 NR Description: putative membrane protein [Zea mays]
  misc_feature (1)..(146): Homolog of NCBI NO: 7716468 NR Description: hypersensitive-induced response protein [Zea mays]
  misc_feature (1)..(149): Homolog of NCBI NO: 15241939 NR Description: hypersensitive-induced response protein
  misc_feature (1)..(145): Homolog of NCBI NO: 23345042 NR Description: hypersensitive-induced reaction protein 1
  misc_feature (1)..(149): Homolog of NCBI NO: 15222481 NR Description: expressed protein [Arabidopsis thaliana]
  misc_feature (1)..(147): Homolog of NCBI NO: 7716466 NR Description: hypersensitive-induced response protein [Zea mays]
  misc_feature (1)..(146): Homolog of NCBI NO: 14150732 NR Description: hypersensitive-induced response protein [Oryza
  misc_feature (1)..(149): Homolog of NCBI NO: 3928150 NR Description: hypothetical protein [Cicer arietinum]
MSTYGFEIVQTLIVDIEPDVNVKRAMNEINAAARLRLAANEKAEAEKILQIKKAEGEAESKYLSGLGIARQRQAIVDGLRDSVLAFSENVPGTSAKDVMDMVLVTQYFDTMKEIGASSRSSSVFIPHGPGAVKDIAVQIRDGLLQATASQN

SEQ ID NO: 53646 - DNA, 1741 bp, Glycine max
  misc_feature (1)..(1741): Ceres Seq. ID no. 15174599
gaaaaagtcttcacttcactatgaccaacagcttacccacagcccatctcatgggtcataattgctctatatgattgttttttctcttcttatatgaaatggctcgcattagattccactcacaccattttgcctgttttgtctgagaagccactttggtttctttgcctttctcaatacattttattttccaatggaggtaggaagtgttcttaactttcttgaggacaagaccattttaattgttggagccactggctttctcgccaaaatttttctggagaagatattgagggttcaaccaaatgttaagaagctttttcttcttttaagagcttcggatgccaaatcagctaattatcgcttgcaaaatgagatcatagcgaaggacttatttattgtgctaaaggagaaattgggtgcaaattttaagtcctttatttcggaaaaagtgactctggtgccgggggacatttcttacgaggacttgggcctgaaggattccattctaagggaagagatttgcaaccagacagatgttattgtcaatttggcagcaacaactaactttgatgaaaggtacgatatagcgttgggtctaaatatttttggagttaagcatgtgatgaactttgctaaacaatgtaccaaactcaaagttgttcttcatgtatcaacagcttatgtatgtggtgagagaggtggactaatactagaggaaccttataactttggtgattcactaaatggagtgtctggactagacatcgatgcagaaaggacaatagtgtgtgacaaattggatgaactacgagagcaaggggccacagagcgtgaaattaaaatagctatgaagaacctcggtattagcagggcaaaggtgtatggatggccaaacacatacgtatttacgaaggcagtaggagagatgcttgtggagcaattaaaaggaagactatccgttgttattatgcgtccgaccatcgttacaagcactttaagagaacctttccctggttgggttgagggtgtaagaaccattgacagtttagccgttacttatgggaaaggaaaattaacatgcttccttggaaatatcaacggagttgtggatgcggtaccagctgacatggtggtgaatgcaatgctagtggccatggtggctcatgcaaatcaacctagtgatatcatctatcatgtgggttcctctcttagaaatccactcacatacttaaatctccaagactatggattaaaatatttcacggcaaaaccatggataaacaaggatggaacaccggtcaaggttggcagagtaactgtattgactgacatggatagcttccagagatatatgttcattcgttacctgcttccattaaagggacttgagctggccaatactgcactttgccagtattttcggggaacttatcttgagctccacaggaagatccaggttgtgatgcggatggttgaactttacaggccttacatgttcttcaatggcgtatttgatgatataaacacagagaagttgcgaatagcagcaaaacaaagtggaacagagacagatttgttttactttgatacgaaagaggttaattgggaggattactttatgaagacccatctccccggtattgtcaagcacgttttcaagtgatgataaatgctatacttttaagtgatttgtgaaactagtaactctattaatatcttgtttagacaacctgaaagg

SEQ ID NO: 53647 - protein, 490 aa, Glycine max
  peptide (1)..(490): Ceres Seq. ID no. 15174600
  misc_feature (288)..(488): Pfam Name: Male sterility protein Pfam Description: Male sterility protein
  misc_feature (5)..(490): Homolog of NCBI NO: 22003082 NR Description: fatty acyl coA reductase [Triticum aestivum]
  misc_feature (6)..(488): Homolog of NCBI NO: 22003090 NR Description: fatty acyl coA reductase [Triticum aestivum]
  misc_feature (112)..(489): Homolog of NCBI NO: 30689818 NR Description: male sterility 2-related protein [Arabidopsis
  misc_feature (1)..(488): Homolog of NCBI NO: 35215152 NR Description: putative fatty acyl coA reductase
  misc_feature (1)..(490): Homolog of NCBI NO: 15242260 NR Description: male sterility 2-related protein (emb|CAA68191.1)
  misc_feature (7)..(490): Homolog of NCBI NO: 11357157 NR Description: acyl CoA reductase-protein - Arabidopsis thaliana
  misc_feature (27)..(489): Homolog of NCBI NO: 7487952 NR Description: male sterility protein 2 homolog T16L1.280 -
  misc_feature (1)..(489): Homolog of NCBI NO: 25354587 NR Description: male sterility 2-like protein [imported] -
  misc_feature (1)..(489): Homolog of NCBI NO: 16323107 NR Description: AT4g33790/T16L1_280 [Arabidopsis thaliana]
  misc_feature (2)..(488): Homolog of NCBI NO: 5020215 NR Description: acyl CoA reductase [Simmondsia chinensis]
MEVGSVLNFLEDKTILIVGATGFLAKIFLEKILRVQPNVKKLFLLLRASDAKSANYRLQNEIIAKDLFIVLKEKLGANFKSFISEKVTLVPGDISYEDLGLKDSILREEICNQTDVIVNLAATTNFDERYDIALGLNIFGVKHVMNFAKQCTKLKVVLHVSTAYVCGERGGLILEEPYNFGDSLNGVSGLDIDAERTIVCDKLDELREQGATEREIKIAMKNLGISRAKVYGWPNTYVFTKAVGEMLVEQLKGRLSVVIMRPTIVTSTLREPFPGWVEGVRTIDSLAVTYGKGKLTCFLGNINGVVDAVPADMVVNAMLVAMVAHANQPSDIIYHVGSSLRNPLTYLNLQDYGLKYFTAKPWINKDGTPVKVGRVTVLTDMDSFQRYMFIRYLLPLKGLELANTALCQYFRGTYLELHRKIQVVMRMVELYRPYMFFNGVFDDINTEKLRIAAKQSGTETDLFYFDTKEVNWEDYFMKTHLPGIVKHVFK

SEQ ID NO: 53648 - protein, 346 aa, Glycine max
  peptide (1)..(346): Ceres Seq. ID no. 15174601
  misc_feature (144)..(344): Pfam Name: Male sterility protein Pfam Description: Male sterility protein
  misc_feature (1)..(346): Homolog of NCBI NO: 22003082 NR Description: fatty acyl coA reductase [Triticum aestivum]
  misc_feature (1)..(344): Homolog of NCBI NO: 22003090 NR Description: fatty acyl coA reductase [Triticum aestivum]
  misc_feature (1)..(345): Homolog of NCBI NO: 30689818 NR Description: male sterility 2-related protein [Arabidopsis
  misc_feature (1)..(344): Homolog of NCBI NO: 35215152 NR Description: putative fatty acyl coA reductase
  misc_feature (1)..(346): Homolog of NCBI NO: 15242260 NR Description: male sterility 2-related protein (emb|CAA68191.1)
  misc_feature (1)..(346): Homolog of NCBI NO: 11357157 NR Description: acyl CoA reductase-protein - Arabidopsis thaliana
  misc_feature (1)..(345): Homolog of NCBI NO: 7487952 NR Description: male sterility protein 2 homolog T16L1.280 -
  misc_feature (1)..(345): Homolog of NCBI NO: 25354587 NR Description: male sterility 2-like protein [imported] -
  misc_feature (1)..(345): Homolog of NCBI NO: 16323107 NR Description: AT4g33790/T16L1_280 [Arabidopsis thaliana]
  misc_feature (1)..(344): Homolog of NCBI NO: 5020215 NR Description: acyl CoA reductase [Simmondsia chinensis]
MNFAKQCTKLKVVLHVSTAYVCGERGGLILEEPYNFGDSLNGVSGLDIDAERTIVCDKLDELREQGATEREIKIAMKNLGISRAKVYGWPNTYVFTKAVGEMLVEQLKGRLSVVIMRPTIVTSTLREPFPGWVEGVRTIDSLAVTYGKGKLTCFLGNINGVVDAVPADMVVNAMLVAMVAHANQPSDIIYHVGSSLRNPLTYLNLQDYGLKYFTAKPWINKDGTPVKVGRVTVLTDMDSFQRYMFIRYLLPLKGLELANTALCQYFRGTYLELHRKIQVVMRMVELYRPYMFFNGVFDDINTEKLRIAAKQSGTETDLFYFDTKEVNWEDYFMKTHLPGIVKHVFK

SEQ ID NO: 53649 - protein, 271 aa, Glycine max
  peptide (1)..(271): Ceres Seq. ID no. 15174602
  misc_feature (69)..(269): Pfam Name: Male sterility protein Pfam Description: Male sterility protein
  misc_feature (1)..(271): Homolog of NCBI NO: 22003082 NR Description: fatty acyl coA reductase [Triticum aestivum]
  misc_feature (1)..(269): Homolog of NCBI NO: 22003090 NR Description: fatty acyl coA reductase [Triticum aestivum]
  misc_feature (1)..(270): Homolog of NCBI NO: 30689818 NR Description: male sterility 2-related protein [Arabidopsis
  misc_feature (1)..(269): Homolog of NCBI NO: 35215152 NR Description: putative fatty acyl coA reductase
  misc_feature (1)..(271): Homolog of NCBI NO: 15242260 NR Description: male sterility 2-related protein (emb|CAA68191.1)
  misc_feature (1)..(271): Homolog of NCBI NO: 11357157 NR Description: acyl CoA reductase-protein - Arabidopsis thaliana
  misc_feature (1)..(270): Homolog of NCBI NO: 7487952 NR Description: male sterility protein 2 homolog T16L1.280 -
  misc_feature (1)..(270): Homolog of NCBI NO: 25354587 NR Description: male sterility 2-like protein [imported] -
  misc_feature (1)..(270): Homolog of NCBI NO: 16323107 NR Description: AT4g33790/T16L1_280 [Arabidopsis thaliana]
  misc_feature (1)..(269): Homolog of NCBI NO: 5020215 NR Description: acyl CoA reductase [Simmondsia chinensis]
MKNLGISRAKVYGWPNTYVFTKAVGEMLVEQLKGRLSVVIMRPTIVTSTLREPFPGWVEGVRTIDSLAVTYGKGKLTCFLGNINGVVDAVPADMVVNAMLVAMVAHANQPSDIIYHVGSSLRNPLTYLNLQDYGLKYFTAKPWINKDGTPVKVGRVTVLTDMDSFQRYMFIRYLLPLKGLELANTALCQYFRGTYLELHRKIQVVMRMVELYRPYMFFNGVFDDINTEKLRIAAKQSGTETDLFYFDTKEVNWEDYFMKTHLPGIVKHVFK

SEQ ID NO: 53650 - DNA, 1595 bp, Glycine max
  misc_feature (1)..(1595): Ceres Seq. ID no. 15174917
gaattgacaaatttggccttttcaaaaactgataaaaaaaaaaacttatatttatatattcaacttctcttttattcgatttttcttcctgtctctttctttattttccattgatcataactattaatttcacctatataccctaaaaaggatgtgtatggttaatattttcatatgttataacttttttaaacacaattaataatcagtcacttaaaacttcttcatttgatattatatgcattcatcccaacagaatgtgcatttcttaattctgggatgctaatttattgaaaaggtcattcttaaataaataaatgtattaaaagttttacataaccagtaatcaaaaataaactaaagacatgttaaagtctgatattgattaaaaataatacacaaataaattatataaataaaaaataatcattatcttacaaattaattttatagggatgagttaaatttaaatcagtttttttgacatttgatgttatacattttgattatattacatcagatagtctaatgaatccacatgggaaaaaagatagtgtatgtttgctcatagtggtctttcaagaagattagtatttaataatagtatgttataaagaaataggtattaaaatggcaaaaacacaagatatataaggttgattcactgttgacatccttttagtaattaattgttgtatgcatggttatccatacatcatcttcatggatttgactgttcttcctttctttgtgtaccttgaaatcagcatgctcaaaacacttgaaaggtaccagaaatgcagttatggtgctgtggaagttaccaaacctgccaaagagctcgagagcagctatcgtgaatacttgaagctgaaagcaagatttgaatcacttcaaaggactcaaagaaaccttctaggggaagacctgggcccactgaataccaaagaacttgagcatcttgaacggcaattggattcatctctaaagcaagtgaggtccacaaagacacaattcatgctggaccagttatctgatcttcaaactaaggagcagatgttggtagaagcaaacagatccttgacagtgaagctggaagaaatcaattcaagaaaccactacaggcaatcatgggaagctggtgatcaaagtatgccatacggtggtggtccacagaattctcactctcatcagggcttcttccagccattggaatgcaaccctacattgcagattggtcctgattacaggtacaatgatgtagcttcagatcagataactgccacaactcaacctcaacaagtgagtggctttattccagggtggatgctgtgaaattaggctcagtattcagttggagacataaaagcaaacaccttacaaaagggcaaagccaaaaatgcatcttggtgttggcaaggtgtaaatgtaaccctgcttctattattattttggtataagaaacagatgtgttgtgacttgttcaaacttgtgagaacctttttagccatagacatatggcaatttataacattcggaatcttttgaaggatccttttttattattaaaatatccgagcgaccggtttcaattt

SEQ ID NO: 53651 - protein, 212 aa, Glycine max
  peptide (1)..(212): Ceres Seq. ID no. 15174918
  misc_feature (37)..(135): Pfam Name: K-box region Pfam Description: K-box region
  misc_feature (24)..(212): Homolog of NCBI NO: 81610 NR Description: MADS box protein AGL2 - Arabidopsis thaliana
  misc_feature (24)..(212): Homolog of NCBI NO: 32478027 NR Description: SEPALLATA1-like MADS-box [Heuchera americana]
  misc_feature (24)..(212): Homolog of NCBI NO: 3646336 NR Description: MdMADS9 [Malus x domestica]
  misc_feature (24)..(212): Homolog of NCBI NO: 28372802 NR Description: transcription factor MAGL4 [Populus tremuloides]
  misc_feature (24)..(212): Homolog of NCBI NO: 28372976 NR Description: Apetala 1 protein [Populus tremuloides]
  misc_feature (24)..(212): Homolog of NCBI NO: 3646334 NR Description: MdMADS8 [Malus x domestica]
  misc_feature (24)..(212): Homolog of NCBI NO: 20385584 NR Description: MADS-box protein 2 [Vitis vinifera]
  misc_feature (24)..(212): Homolog of NCBI NO: 7488622 NR Description: MADS box protein 1 - apple tree
  misc_feature (24)..(212): Homolog of NCBI NO: 6683777 NR Description: CAGL2 [Cucumis sativus]
  misc_feature (24)..(212): Homolog of NCBI NO: 13810202 NR Description: MADS2 protein [Cucumis sativus]
MHGYPYIIFMDLTVLPFFVYLEISMLKTLERYQKCSYGAVEVTKPAKELESSYREYLKLKARFESLQRTQRNLLGEDLGPLNTKELEHLERQLDSSLKQVRSTKTQFMLDQLSDLQTKEQMLVEANRSLTVKLEEINSRNHYRQSWEAGDQSMPYGGGPQNSHSHQGFFQPLECNPTLQIGPDYRYNDVASDQITATTQPQQVSGFIPGWML

SEQ ID NO: 53652 - protein, 203 aa, Glycine max
  peptide (1)..(203): Ceres Seq. ID no. 15174919
  misc_feature (28)..(126): Pfam Name: K-box region Pfam Description: K-box region
  misc_feature (15)..(203): Homolog of NCBI NO: 81610 NR Description: MADS box protein AGL2 - Arabidopsis thaliana
  misc_feature (15)..(203): Homolog of NCBI NO: 32478027 NR Description: SEPALLATA1-like MADS-box [Heuchera americana]
  misc_feature (15)..(203): Homolog of NCBI NO: 3646336 NR Description: MdMADS9 [Malus x domestica]
  misc_feature (15)..(203): Homolog of NCBI NO: 28372802 NR Description: transcription factor MAGL4 [Populus tremuloides]
  misc_feature (15)..(203): Homolog of NCBI NO: 28372976 NR Description: Apetala 1 protein [Populus tremuloides]
  misc_feature (15)..(203): Homolog of NCBI NO: 3646334 NR Description: MdMADS8 [Malus x domestica]
  misc_feature (15)..(203): Homolog of NCBI NO: 20385584 NR Description: MADS-box protein 2 [Vitis vinifera]
  misc_feature (15)..(203): Homolog of NCBI NO: 7488622 NR Description: MADS box protein 1 - apple tree
  misc_feature (15)..(203): Homolog of NCBI NO: 6683777 NR Description: CAGL2 [Cucumis sativus]
  misc_feature (15)..(203): Homolog of NCBI NO: 13810202 NR Description: MADS2 protein [Cucumis sativus]
MDLTVLPFFVYLEISMLKTLERYQKCSYGAVEVTKPAKELESSYREYLKLKARFESLQRTQRNLLGEDLGPLNTKELEHLERQLDSSLKQVRSTKTQFMLDQLSDLQTKEQMLVEANRSLTVKLEEINSRNHYRQSWEAGDQSMPYGGGPQNSHSHQGFFQPLECNPTLQIGPDYRYNDVASDQITATTQPQQVSGFIPGWML

SEQ ID NO: 53653 - protein, 188 aa, Glycine max
  peptide (1)..(188): Ceres Seq. ID no. 15174920
  misc_feature (13)..(111): Pfam Name: K-box region Pfam Description: K-box region
  misc_feature (1)..(188): Homolog of NCBI NO: 81610 NR Description: MADS box protein AGL2 - Arabidopsis thaliana
  misc_feature (1)..(188): Homolog of NCBI NO: 32478027 NR Description: SEPALLATA1-like MADS-box [Heuchera americana]
  misc_feature (1)..(188): Homolog of NCBI NO: 3646336 NR Description: MdMADS9 [Malus x domestica]
  misc_feature (1)..(188): Homolog of NCBI NO: 28372802 NR Description: transcription factor MAGL4 [Populus tremuloides]
  misc_feature (1)..(188): Homolog of NCBI NO: 28372976 NR Description: Apetala 1 protein [Populus tremuloides]
  misc_feature (1)..(188): Homolog of NCBI NO: 3646334 NR Description: MdMADS8 [Malus x domestica]
  misc_feature (1)..(188): Homolog of NCBI NO: 20385584 NR Description: MADS-box protein 2 [Vitis vinifera]
  misc_feature (1)..(188): Homolog of NCBI NO: 7488622 NR Description: MADS box protein 1 - apple tree
  misc_feature (1)..(188): Homolog of NCBI NO: 6683777 NR Description: CAGL2 [Cucumis sativus]
  misc_feature (1)..(188): Homolog of NCBI NO: 13810202 NR Description: MADS2 protein [Cucumis sativus]
MLKTLERYQKCSYGAVEVTKPAKELESSYREYLKLKARFESLQRTQRNLLGEDLGPLNTKELEHLERQLDSSLKQVRSTKTQFMLDQLSDLQTKEQMLVEANRSLTVKLEEINSRNHYRQSWEAGDQSMPYGGGPQNSHSHQGFFQPLECNPTLQIGPDYRYNDVASDQITATTQPQQVSGFIPGWML

SEQ ID NO: 53654 - DNA, 1684 bp, Glycine max
  misc_feature (1)..(1684): Ceres Seq. ID no. 15225215
ccgggccccccctsgagtcagcthcgtaggccccccccccaagaaaatctatnacaaatagttttggcccgaccttaaataaagctcaagacatgtactattaaatcatacattatacttctttctatgccaactaaatcaagcacaaaggaatcaccccaaccagaaccgatccctgaaggtaacggttacaaactctacaagtatcgttatgttaccggagttatttttgctttagcagcaatccaaaatattctcatgtggcttatattctctccgatccaactccagttaactcatatttatgacctatctttggtcgttgtgaactttgcaacaatcctcatttctaatgtctcttatattcctgcttattttgttgcttcttacttcattgatacttatggactcagatttggcataattacaggcggtatccttaccacaataggcctttggataagatgtctctgtaaagaaggattcatctatctttttattggacagtgctttgctgggattgctcaacctttcttctacagcgttcctcaaaaaatctccaatgtttggtttggagctgaagaaagaactatggctacttctgtgattgctatttctctcactcttggcaatgcccttggagcttttctcccgcaattttttatcaatcttaaagaaagcgatacaggtatactacttgatcaaatacaaaatatgatgttttggactgctgttattggaagcattttcctggcaatcacaattctcatgttcaaagcaaaaccgccaacaccgccaagcaaagcagctgcagcacaaaagcacaattttcgtctgtcattaaaattacttatcaaagataaaaataccatgctattcttaatctcaagtgctgccgtagctggctcatttatcacttttccttctgttattcaagctactgctgatccttatggaatcaattcagatcaaattggaaacatcatgtttgctgcaatcttatttggattcttgggagctgtaattggaggcttctacgtcaatagaacgaaaaaatataaaaaatcagtcttgttctgctctacatcctctctcgcgcttcttgttgtcgtttatttttgcgctaccacagaaaatgtctttatttttggtgcagcctcttgcgtattcgcgacatttattagtccactcttgccattgtctatggaaactctagttgaatactcgttccctgttgctgaagctacttcaggaggtttctggtttgtgtttaatcaattcttgtcgactgttgaatctttgggtgttgatgctatctttagcaaagaaccaacaaaatcagaaggaagaatcgcgtttattattatgattgtgtatcaagccgtcgcagtgcttttaatggcgtttgttaaagaaaatctccagcggaccaaattcgaaaaagaaggtttgctggttttggatgaaattctcgatccaaataagaaaaacaaggaacagtccatacatcaacattctgttgatcgacaatattatccatagttccatacgtattttattttaaagaactttctgatgataaaaataagcctaaaatatgtttaaataagattgagttcatttgagaatatattattaataatctaaaacctctagtaaaaagtaatgaaattatagtcttaac

SEQ ID NO: 53655 - protein, 471 aa, Glycine max
  peptide (1)..(471): Ceres Seq. ID no. 15225216
  misc_feature (22)..(388): Homolog of NCBI NO: 39645375 NR Description: Unknown (protein for MGC:75569) [Silurana
  misc_feature (14)..(440): Homolog of NCBI NO: 40018586 NR Description: transporter [Rattus norvegicus]
  misc_feature (16)..(440): Homolog of NCBI NO: 21703892 NR Description: cDNA sequence BC011209 [Mus musculus]
  misc_feature (16)..(440): Homolog of NCBI NO: 32699394 NR Description: transporter [Mus musculus]
  misc_feature (1)..(442): Homolog of NCBI NO: 8923350 NR Description: chromosome 14 open reading frame 58 [Homo
  misc_feature (1)..(442): Homolog of NCBI NO: 5764708 NR Description: unknown [Homo sapiens]
  misc_feature (17)..(434): Homolog of NCBI NO: 19921750 NR Description: CG1358-PA [Drosophila melanogaster]
  misc_feature (1)..(434): Homolog of NCBI NO: 7157952 NR Description: feline leukemia virus subgroup C receptor [Felis
  misc_feature (28)..(434): Homolog of NCBI NO: 29387038 NR Description: Feline leukemia virus subgroup C cellular
  misc_feature (28)..(434): Homolog of NCBI NO: 7661708 NR Description: feline leukemia virus subgroup C cellular
MPTKSSTKESPQPEPIPEGNGYKLYKYRYVTGVIFALAAIQNILMWLIFSPIQLQLTHIYDLSLVVVNFATILISNVSYIPAYFVASYFIDTYGLRFGIITGGILTTIGLWIRCLCKEGFIYLFIGQCFAGIAQPFFYSVPQKISNVWFGAEERTMATSVIAISLTLGNALGAFLPQFFINLKESDTGILLDQIQNMMFWTAVIGSIFLAITILMFKAKPPTPPSKAAAAQKHNFRLSLKLLIKDKNTMLFLISSAAVAGSFITFPSVIQATADPYGINSDQIGNIMFAAILFGFLGAVIGGFYVNRTKKYKKSVLFCSTSSLALLVVVYFCATTENVFIFGAASCVFATFISPLLPLSMETLVEYSFPVAEATSGGFWFVFNQFLSTVESLGVDAIFSKEPTKSEGRIAFIIMIVYQAVAVLLMAFVKENLQRTKFEKEGLLVLDEILDPNKKNKEQSIHQHSVDRQYYP

SEQ ID NO: 53656 - protein, 427 aa, Glycine max
  peptide (1)..(427): Ceres Seq. ID no. 15225217
  misc_feature (1)..(344): Homolog of NCBI NO: 39645375 NR Description: Unknown (protein for MGC:75569) [Silurana
  misc_feature (1)..(396): Homolog of NCBI NO: 40018586 NR Description: transporter [Rattus norvegicus]
  misc_feature (1)..(396): Homolog of NCBI NO: 21703892 NR Description: cDNA sequence BC011209 [Mus musculus]
  misc_feature (1)..(396): Homolog of NCBI NO: 32699394 NR Description: transporter [Mus musculus]
  misc_feature (1)..(398): Homolog of NCBI NO: 8923350 NR Description: chromosome 14 open reading frame 58 [Homo
  misc_feature (1)..(398): Homolog of NCBI NO: 5764708 NR Description: unknown [Homo sapiens]
  misc_feature (1)..(390): Homolog of NCBI NO: 19921750 NR Description: CG1358-PA [Drosophila melanogaster]
  misc_feature (1)..(390): Homolog of NCBI NO: 7157952 NR Description: feline leukemia virus subgroup C receptor [Felis
  misc_feature (1)..(390): Homolog of NCBI NO: 29387038 NR Description: Feline leukemia virus subgroup C cellular
  misc_feature (1)..(390): Homolog of NCBI NO: 7661708 NR Description: feline leukemia virus subgroup C cellular
MWLIFSPIQLQLTHIYDLSLVVVNFATILISNVSYIPAYFVASYFIDTYGLRFGIITGGILTTIGLWIRCLCKEGFIYLFIGQCFAGIAQPFFYSVPQKISNVWFGAEERTMATSVIAISLTLGNALGAFLPQFFINLKESDTGILLDQIQNMMFWTAVIGSIFLAITILMFKAKPPTPPSKAAAAQKHNFRLSLKLLIKDKNTMLFLISSAAVAGSFITFPSVIQATADPYGINSDQIGNIMFAAILFGFLGAVIGGFYVNRTKKYKKSVLFCSTSSLALLVVVYFCATTENVFIFGAASCVFATFISPLLPLSMETLVEYSFPVAEATSGGFWFVFNQFLSTVESLGVDAIFSKEPTKSEGRIAFIIMIVYQAVAVLLMAFVKENLQRTKFEKEGLLVLDEILDPNKKNKEQSIHQHSVDRQYYP

SEQ ID NO: 53657 - protein, 316 aa, Glycine max
  peptide (1)..(316): Ceres Seq. ID no. 15225218
  misc_feature (1)..(233): Homolog of NCBI NO: 39645375 NR Description: Unknown (protein for MGC:75569) [Silurana
  misc_feature (1)..(285): Homolog of NCBI NO: 40018586 NR Description: transporter [Rattus norvegicus]
  misc_feature (1)..(285): Homolog of NCBI NO: 21703892 NR Description: cDNA sequence BC011209 [Mus musculus]
  misc_feature (1)..(285): Homolog of NCBI NO: 32699394 NR Description: transporter [Mus musculus]
  misc_feature (1)..(287): Homolog of NCBI NO: 8923350 NR Description: chromosome 14 open reading frame 58 [Homo
  misc_feature (1)..(287): Homolog of NCBI NO: 5764708 NR Description: unknown [Homo sapiens]
  misc_feature (1)..(279): Homolog of NCBI NO: 19921750 NR Description: CG1358-PA [Drosophila melanogaster]
  misc_feature (1)..(279): Homolog of NCBI NO: 7157952 NR Description: feline leukemia virus subgroup C receptor [Felis
  misc_feature (1)..(279): Homolog of NCBI NO: 29387038 NR Description: Feline leukemia virus subgroup C cellular
  misc_feature (1)..(279): Homolog of NCBI NO: 7661708 NR Description: feline leukemia virus subgroup C cellular
MATSVIAISLTLGNALGAFLPQFFINLKESDTGILLDQIQNMMFWTAVIGSIFLAITILMFKAKPPTPPSKAAAAQKHNFRLSLKLLIKDKNTMLFLISSAAVAGSFITFPSVIQATADPYGINSDQIGNIMFAAILFGFLGAVIGGFYVNRTKKYKKSVLFCSTSSLALLVVVYFCATTENVFIFGAASCVFATFISPLLPLSMETLVEYSFPVAEATSGGFWFVFNQFLSTVESLGVDAIFSKEPTKSEGRIAFIIMIVYQAVAVLLMAFVKENLQRTKFEKEGLLVLDEILDPNKKNKEQSIHQHSVDRQYYP

SEQ ID NO: 53658 - DNA, 1278 bp, Glycine max
  misc_feature (1)..(1278): Ceres Seq. ID no. 14306443
ataactgagaacatggccgaaagctcttcggctacgcctccaccaccgaagcccgtggtggttagggtcaaacgcaagccctcgcaatctccacttgatgctttctggctcgaaattaacgagaggccgttgaagcgtcctctcttggattttggaaatttatcaatctcctccaattctgctcaaaaggtggaattttataacaagaaggtttttgtgcaacatgtggagacaataagcagctctgaggtcacctttgatatcgtgcaatcctttgtggatcttggttccagtggtgcatctgattccaagtcaaaaattaaggaaagaaagaaattcttcaacagggacaataagcaagatcagctattgtctaaagctaaacaagaaaaggagtctttggcaaaagatgctcgctttgaacaaatatggaaaaacaggaagggaaacaaagggacagcacatgataaagcattacaagaaatgtgccacttgtatgacattgttcgcattgacaatgaagaaaaaaataaggaagtgcaacaggaagaaatgtcattggaggatcaacgacttttgtctagttacctccctttactgagagagtttattcctaatgcggctgcagaggttgaaactgatttgattgctcagttggttggtcattccaaagaagaaaattatgtgtacgacctctacaccgtgaaagatgagatggatataaacattgatgattcttcgtgttcatatccactagttcaagttgatgaggaggaggactattatgatgggacacagcattcagattatgaatctgatgactcaaatgctgaaaacaatccactgaatgattatccagatgaggtttctgaagaggatgaagaggatgaaaattctgagaatgaatcagaacgtgaggatggcaacacgagcagtgaatcatcagatgagaatatagaacatggtttttctgaagatgatgctgatccattatatgatgaggattttgatgaatatgaaggtgctcatagtgatgatgttgagcatatggatgatgaaaattggaggtggtcgtaccgatgaagttggctttagttttattttgcaaaatgtaaatctgatggggtaaaaatgttgtaggaacaaaatcaaacctaccatgccggagccatccaactagacaggcttttttgctattataagggatgctttaaggcattttttatggacctattagttttatgttgaaatttgagctagaatgcttacaaaaatggc

SEQ ID NO: 53659 - protein, 360 aa, Glycine max
  peptide (1)..(360): Ceres Seq. ID no. 14306444
  misc_feature (101)..(359): Pfam Name: Mpp10 protein Pfam Description: Mpp10 protein
  misc_feature (110)..(354): Homolog of NCBI NO: 23510031 NR Description: hypothetical protein [Plasmodium falciparum 3D7]
  misc_feature (102)..(353): Homolog of NCBI NO: 120943 NR Description: GLUTAMIC ACID-RICH PROTEIN PRECURSOR
  misc_feature (50)..(355): Homolog of NCBI NO: 16805257 NR Description: hypothetical protein [Plasmodium falciparum 3D7]
  misc_feature (78)..(354): Homolog of NCBI NO: 26554099 NR Description: DNA topoisomerase IV subunit A [Mycoplasma
  misc_feature (101)..(359): Homolog of NCBI NO: 23508069 NR Description: hypothetical protein [Plasmodium falciparum 3D7]
  misc_feature (167)..(355): Homolog of NCBI NO: 26554099 NR Description: DNA topoisomerase IV subunit A [Mycoplasma
  misc_feature (107)..(352): Homolog of NCBI NO: 26554099 NR Description: DNA topoisomerase IV subunit A [Mycoplasma
  misc_feature (43)..(353): Homolog of NCBI NO: 23510031 NR Description: hypothetical protein [Plasmodium falciparum 3D7]
  misc_feature (119)..(339): Homolog of NCBI NO: 25408058 NR Description: hypothetical protein At2g30280 [imported] -
  misc_feature (3)..(339): Homolog of NCBI NO: 30684530 NR Description: expressed protein [Arabidopsis thaliana]
ITENMAESSSATPPPPKPVVVRVKRKPSQSPLDAFWLEINERPLKRPLLDFGNLSISSNSAQKVEFYNKKVFVQHVETISSSEVTFDIVQSFVDLGSSGASDSKSKIKERKKFFNRDNKQDQLLSKAKQEKESLAKDARFEQIWKNRKGNKGTAHDKALQEMCHLYDIVRIDNEEKNKEVQQEEMSLEDQRLLSSYLPLLREFIPNAAAEVETDLIAQLVGHSKEENYVYDLYTVKDEMDINIDDSSCSYPLVQVDEEEDYYDGTQHSDYESDDSNAENNPLNDYPDEVSEEDEEDENSENESEREDGNTSSESSDENIEHGFSEDDADPLYDEDFDEYEGAHSDDVEHMDDENWRWSYR

SEQ ID NO: 53660 - protein, 356 aa, Glycine max
  peptide (1)..(356): Ceres Seq. ID no. 14306445
  misc_feature (97)..(355): Pfam Name: Mpp10 protein Pfam Description: Mpp10 protein
  misc_feature (106)..(350): Homolog of NCBI NO: 23510031 NR Description: hypothetical protein [Plasmodium falciparum 3D7]
  misc_feature (98)..(349): Homolog of NCBI NO: 120943 NR Description: GLUTAMIC ACID-RICH PROTEIN PRECURSOR
  misc_feature (46)..(351): Homolog of NCBI NO: 16805257 NR Description: hypothetical protein [Plasmodium falciparum 3D7]
  misc_feature (74)..(350): Homolog of NCBI NO: 26554099 NR Description: DNA topoisomerase IV subunit A [Mycoplasma
  misc_feature (97)..(355): Homolog of NCBI NO: 23508069 NR Description: hypothetical protein [Plasmodium falciparum 3D7]
  misc_feature (163)..(351): Homolog of NCBI NO: 26554099 NR Description: DNA topoisomerase IV subunit A [Mycoplasma
  misc_feature (103)..(348): Homolog of NCBI NO: 26554099 NR Description: DNA topoisomerase IV subunit A [Mycoplasma
  misc_feature (39)..(349): Homolog of NCBI NO: 23510031 NR Description: hypothetical protein [Plasmodium falciparum 3D7]
  misc_feature (115)..(335): Homolog of NCBI NO: 25408058 NR Description: hypothetical protein At2g30280 [imported] -
  misc_feature (1)..(335): Homolog of NCBI NO: 30684530 NR Description: expressed protein [Arabidopsis thaliana]
MAESSSATPPPPKPVVVRVKRKPSQSPLDAFWLEINERPLKRPLLDFGNLSISSNSAQKVEFYNKKVFVQHVETISSSEVTFDIVQSFVDLGSSGASDSKSKIKERKKFFNRDNKQDQLLSKAKQEKESLAKDARFEQIWKNRKGNKGTAHDKALQEMCHLYDIVRIDNEEKNKEVQQEEMSLEDQRLLSSYLPLLREFIPNAAAEVETDLIAQLVGHSKEENYVYDLYTVKDEMDINIDDSSCSYPLVQVDEEEDYYDGTQHSDYESDDSNAENNPLNDYPDEVSEEDEEDENSENESEREDGNTSSESSDENIEHGFSEDDADPLYDEDFDEYEGAHSDDVEHMDDENWRWSYR

SEQ ID NO: 53661 - protein, 199 aa, Glycine max
  peptide (1)..(199): Ceres Seq. ID no. 14306446
  misc_feature (1)..(198): Pfam Name: Mpp10 protein Pfam Description: Mpp10 protein
  misc_feature (1)..(193): Homolog of NCBI NO: 23510031 NR Description: hypothetical protein [Plasmodium falciparum 3D7]
  misc_feature (1)..(192): Homolog of NCBI NO: 120943 NR Description: GLUTAMIC ACID-RICH PROTEIN PRECURSOR
  misc_feature (1)..(194): Homolog of NCBI NO: 16805257 NR Description: hypothetical protein [Plasmodium falciparum 3D7]
  misc_feature (1)..(193): Homolog of NCBI NO: 26554099 NR Description: DNA topoisomerase IV subunit A [Mycoplasma
  misc_feature (1)..(198): Homolog of NCBI NO: 23508069 NR Description: hypothetical protein [Plasmodium falciparum 3D7]
  misc_feature (6)..(194): Homolog of NCBI NO: 26554099 NR Description: DNA topoisomerase IV subunit A [Mycoplasma
  misc_feature (1)..(191): Homolog of NCBI NO: 26554099 NR Description: DNA topoisomerase IV subunit A [Mycoplasma
  misc_feature (1)..(192): Homolog of NCBI NO: 23510031 NR Description: hypothetical protein [Plasmodium falciparum 3D7]
  misc_feature (1)..(178): Homolog of NCBI NO: 25408058 NR Description: hypothetical protein At2g30280 [imported] -
  misc_feature (1)..(178): Homolog of NCBI NO: 30684530 NR Description: expressed protein [Arabidopsis thaliana]
MCHLYDIVRIDNEEKNKEVQQEEMSLEDQRLLSSYLPLLREFIPNAAAEVETDLIAQLVGHSKEENYVYDLYTVKDEMDINIDDSSCSYPLVQVDEEEDYYDGTQHSDYESDDSNAENNPLNDYPDEVSEEDEEDENSENESEREDGNTSSESSDENIEHGFSEDDADPLYDEDFDEYEGAHSDDVEHMDDENWRWSYR

SEQ ID NO: 53662 - DNA, 1174 bp, Glycine max
  misc_feature (1)..(1174): Ceres Seq. ID no. 14310620
aaccaatttccatttcttcatcaggcataattacatagagataatttatctctatattctcacgttgcttataaataaaattgtctccagtctctacaatatgagatagtgaatattgtccttggaaatcttagttaatctgtggatgaacaaatactcgacacagtagcaccaaacaagtactattgtataattcataggttaatgtcatgccttcaggtttgaatttggttttccctcctatttgctcttttaaaaaataaaataaaataagaaagagcatagaatagtcaaatgatcaaatacagtggtgagtaagtgcattttattagtttgattttatgtttgttataacagcatatctcagcatcaaaaggatatgtagatatttcttcctatcttgttgagcaaggtgtaaatatcaactgtgcagataaatttggcaccactcccttgcttgaagccatcaagaatggacacgaagaagtagcatctatacttgttaacgcaggagctatctttaccattgatgatgttggcaattttctctgcatgactgttgccaagaaggagttggaccttttaaaaagggttctgggttgtggagttaatccaaatgccaaaaattatgatcaacgtacacctcttcacatagctgcctctgaaggtttgtttacaatggcggaagtacttctagaagcaggagcgagtgttttatctaaggacagatggggaaatacacctcttcatgaagctcataccggtggggatagaaatatgatcaaaatgcttgaagtggcaaaagcttctcagttggttgagttgtccaataatattcatgaaactcaagcaacaccaacagatgaaattccgaaaaagagatgtatagtatttcctttccacccatgggatgatcagaaagcggatagaaaagagggagtggtcctaacggttccacaaagcattgaagagcttataaaggaggcgacaaaacatttggaaattccaaacgcttcctgtattttgtcagaacaatgtggcaaaattgtttatgtaggcacgattaacaatgatgagaagctatttctagtgagtgaagcacagaatgaatgaggtgaaatgttcagcagtcccaaccccactagcgggttaatatactttttctttcctcccc

SEQ ID NO: 53663 - protein, 186 aa, Glycine max
  peptide (1)..(186): Ceres Seq. ID no. 14310621
  misc_feature (27)..(59): Pfam Name: Ankyrin repeat Pfam Description: Ankyrin repeat
  misc_feature (1)..(84): Homolog of NCBI NO: 38344540 NR Description: OSJNBa0027P08.8 [Oryza sativa (japonica
  misc_feature (1)..(176): Homolog of NCBI NO: 10443349 NR Description: outwardly rectifying potassium channel [Samanea
  misc_feature (1)..(186): Homolog of NCBI NO: 30693099 NR Description: guard cell outward rectifying K+ channel (GORK)
  misc_feature (1)..(186): Homolog of NCBI NO: 15146306 NR Description: AT5g37500/mpa22_p_30 [Arabidopsis thaliana]
  misc_feature (1)..(186): Homolog of NCBI NO: 11414742 NR Description: guard cell outward rectifying K+ channel
  misc_feature (1)..(182): Homolog of NCBI NO: 25295800 NR Description: potassium channel protein SKOR [validated] -
  misc_feature (1)..(182): Homolog of NCBI NO: 15232991 NR Description: stelar K+ outward rectifier (potassium
  misc_feature (1)..(182): Homolog of NCBI NO: 3810676 NR Description: SKOR [Arabidopsis thaliana]
  misc_feature (1)..(182): Homolog of NCBI NO: 27651624 NR Description: shaker-like potassium channel [Vitis vinifera]
  misc_feature (1)..(182): Homolog of NCBI NO: 9955728 NR Description: outward rectifying potassium channel
MTVAKKELDLLKRVLGCGVNPNAKNYDQRTPLHIAASEGLFTMAEVLLEAGASVLSKDRWGNTPLHEAHTGGDRNMIKMLEVAKASQLVELSNNIHETQATPTDEIPKKRCIVFPFHPWDDQKADRKEGVVLTVPQSIEELIKEATKHLEIPNASCILSEQCGKIVYVGTINNDEKLFLVSEAQNE

SEQ ID NO: 53664 - protein, 144 aa, Glycine max
  peptide (1)..(144): Ceres Seq. ID no. 14310622
  misc_feature (1)..(42): Homolog of NCBI NO: 38344540 NR Description: OSJNBa0027P08.8 [Oryza sativa (japonica
  misc_feature (1)..(134): Homolog of NCBI NO: 10443349 NR Description: outwardly rectifying potassium channel [Samanea
  misc_feature (1)..(144): Homolog of NCBI NO: 30693099 NR Description: guard cell outward rectifying K+ channel (GORK)
  misc_feature (1)..(144): Homolog of NCBI NO: 15146306 NR Description: AT5g37500/mpa22_p_30 [Arabidopsis thaliana]
  misc_feature (1)..(144): Homolog of NCBI NO: 11414742 NR Description: guard cell outward rectifying K+ channel
  misc_feature (1)..(140): Homolog of NCBI NO: 25295800 NR Description: potassium channel protein SKOR [validated] -
  misc_feature (1)..(140): Homolog of NCBI NO: 15232991 NR Description: stelar K+ outward rectifier (potassium
  misc_feature (1)..(140): Homolog of NCBI NO: 3810676 NR Description: SKOR [Arabidopsis thaliana]
  misc_feature (1)..(140): Homolog of NCBI NO: 27651624 NR Description: shaker-like potassium channel [Vitis vinifera]
  misc_feature (1)..(140): Homolog of NCBI NO: 9955728 NR Description: outward rectifying potassium channel
MAEVLLEAGASVLSKDRWGNTPLHEAHTGGDRNMIKMLEVAKASQLVELSNNIHETQATPTDEIPKKRCIVFPFHPWDDQKADRKEGVVLTVPQSIEELIKEATKHLEIPNASCILSEQCGKIVYVGTINNDEKLFLVSEAQNE

SEQ ID NO: 53665 - protein, 111 aa, Glycine max
  peptide (1)..(111): Ceres Seq. ID no. 14310623
  misc_feature (1)..(36): Homolog of NCBI NO: 7445895 NR Description: potassium channel protein SKT1 - potato
  misc_feature (1)..(101): Homolog of NCBI NO: 10443349 NR Description: outwardly rectifying potassium channel [Samanea
  misc_feature (1)..(111): Homolog of NCBI NO: 30693099 NR Description: guard cell outward rectifying K+ channel (GORK)
  misc_feature (1)..(111): Homolog of NCBI NO: 15146306 NR Description: AT5g37500/mpa22_p_30 [Arabidopsis thaliana]
  misc_feature (1)..(111): Homolog of NCBI NO: 11414742 NR Description: guard cell outward rectifying K+ channel
  misc_feature (1)..(107): Homolog of NCBI NO: 25295800 NR Description: potassium channel protein SKOR [validated] -
  misc_feature (1)..(107): Homolog of NCBI NO: 15232991 NR Description: stelar K+ outward rectifier (potassium
  misc_feature (1)..(107): Homolog of NCBI NO: 3810676 NR Description: SKOR [Arabidopsis thaliana]
  misc_feature (1)..(107): Homolog of NCBI NO: 27651624 NR Description: shaker-like potassium channel [Vitis vinifera]
  misc_feature (1)..(107): Homolog of NCBI NO: 9955728 NR Description: outward rectifying potassium channel
MIKMLEVAKASQLVELSNNIHETQATPTDEIPKKRCIVFPFHPWDDQKADRKEGVVLTVPQSIEELIKEATKHLEIPNASCILSEQCGKIVYVGTINNDEKLFLVSEAQNE

SEQ ID NO: 53666 - DNA, 1986 bp, Glycine max
  misc_feature (1)..(1986): Ceres Seq. ID no. 14310841
aaaaagaaaaggaagggcgaagttgaaaaaccaaaacccttggcgagtgaagccctagactcactagactacacacttcgcaatggcggttgttgctcaaacccctgacatcgccggcgagcggcagtccggccaagacgttcgcacccaaaacgttgtggcatgccaagccgttgccaacatcgtcaaaagctctttaggccccgttggcctcgacaagatgctcgtcgacgacattggcgacgtcaccatcaccaacgacggcgccacgattctcaagatgctggaagtggagcatcctgctgccaaggttttggttgaactcgccgagcttcaggatcgagaagtcggagacggcactacttctgtcgtcattgtagctgctgagcttctcaaaagggcaaatgaccttgtcaggaacaagattcatcctacctcgattatcagtggatatagacttgctatgcgagaggcttgtaaatatgtagaagaaaaactagctgtcaaggttgaaaagctgggaaaggattcactaattaactgtgccaagaccagtatgtcctcaaagttgatagctggtgatagtgacttctttgccattttggttgtagatgcagtgcaagctgtaaagatgaccaatgctcgaggtgaagttaaatacccaatcaagggaatcaatatcttgaaagctcatggaaaaagtgctagagacagctttctgatgaatggttatgctctaaatactggccgtgctgctcaaggaatgcctcttagggttgcccctgcaagaattgcctgtcttgatttcaatcttcagaagacaaaaatgcagttgggtgttcaagttttagttactgatcctagggagctagagaaaattcgtcaaagagaggctgatatgactaaggaacgtattgaaaaactgctgaaggctggagctaatgttattctgacaactaaaggaattgatgacatggctcttaagtactttgttgaggctggggcaattgctgtaagacgtgtgcggaaagaggacatgcgccatgttgccaaggctactggtgcaacattggtctcaacatttgctgatatggaaggggaggaaacatttgaaccatcttttcttggatatgctgatgaggttgttgaggagcgaatttctgatgatgctgtagttatgatcaaagggaccaaaactacaagcgcagtcactttgattctaagaggtgcaaatgaccatatgcttgatgagatggacagagctctgcatgatgcattgtcaattgtcaagagaactcttgaatcaaatacggtggtagctggtggaggtgctgttgaggcagcattatcagtttatttagagtaccttgctacaactttaggatctcgggagcagttggctatagcagaatttgctgagtctctgttaattattccaaaggtgctttctgttaatgctgctaaggatgccactgagctggtcgcaaaattacgggcctaccaccattcagcacaaactaaagccgataagaaacatttatcaagtatgggtttggacctttctgaagggaaaatcagaaacaacttggaggctggagtcattgagcctgcaatgagcaaagtaaaaattattcagtttgcaactgaagctgccattactatccttcgaattgatgacatgatcaagcttatcaaggatgaaagtcaaaatgaggattaaagtataactgaatctaggaggcatctactccccagtgcttacaaaagggagggttgtgctagtgtgcatttgaagagggtatctgcatttaatcttcaatgcccttgttcttgaaggaaaactgctctaattatttttctgaaagtagctttattatatttacatctttgcattttatattccaacaatttttaggcaaacatttttggtcatgcattggctggttgcatgtttgtacatttctttgaggcagtgtttgatttgtg

SEQ ID NO: 53667 - protein, 545 aa, Glycine max
  peptide (1)..(545): Ceres Seq. ID no. 14310842
  misc_feature (31)..(538): Pfam Name: TCP-1/cpn60 chaperonin family Pfam Description: TCP-1/cpn60 chaperonin family
  misc_feature (10)..(545): Homolog of NCBI NO: 1729865 NR Description: T-complex protein 1, alpha subunit B
  misc_feature (10)..(536): Homolog of NCBI NO: 13540473 NR Description: t-complex 1
  misc_feature (10)..(542): Homolog of NCBI NO: 18859465 NR Description: t-complex polypeptide 1 [Danio rerio]
  misc_feature (10)..(544): Homolog of NCBI NO: 30584211 NR Description: Homo sapiens t-complex 1 [synthetic construct]
  misc_feature (10)..(544): Homolog of NCBI NO: 135538 NR Description: T-complex protein 1, alpha subunit (TCP-1-alpha)
  misc_feature (1)..(542): Homolog of NCBI NO: 27881870 NR Description: Tcp1 protein [Danio rerio]
  misc_feature (1)..(545): Homolog of NCBI NO: 9293959 NR Description: chaperonin, t-complex protein alpha subunit
  misc_feature (1)..(545): Homolog of NCBI NO: 25083339 NR Description: t-complex polypeptide 1 homologue [Arabidopsis
  misc_feature (1)..(545): Homolog of NCBI NO: 15231024 NR Description: T-complex protein 1, alpha subunit/chaperonin
  misc_feature (1)..(545): Homolog of NCBI NO: 24371053 NR Description: t-complex polypeptide 1 [Bruguiera sexangula]
MAVVAQTPDIAGERQSGQDVRTQNVVACQAVANIVKSSLGPVGLDKMLVDDIGDVTITNDGATILKMLEVEHPAAKVLVELAELQDREVGDGTTSVVIVAAELLKRANDLVRNKIHPTSIISGYRLAMREACKYVEEKLAVKVEKLGKDSLINCAKTSMSSKLIAGDSDFFAILVVDAVQAVKMTNARGEVKYPIKGINILKAHGKSARDSFLMNGYALNTGRAAQGMPLRVAPARIACLDFNLQKTKMQLGVQVLVTDPRELEKIRQREADMTKERIEKLLKAGANVILTTKGIDDMALKYFVEAGAIAVRRVRKEDMRHVAKATGATLVSTFADMEGEETFEPSFLGYADEVVEERISDDAVVMIKGTKTTSAVTLILRGANDHMLDEMDRALHDALSIVKRTLESNTVVAGGGAVEAALSVYLEYLATTLGSREQLAIAEFAESLLIIPKVLSVNAAKDATELVAKLRAYHHSAQTKADKKHLSSMGLDLSEGKIRNNLEAGVIEPAMSKVKIIQFATEAAITILRIDDMIKLIKDESQNED

SEQ ID NO: 53668 - protein, 499 aa, Glycine max
  peptide (1)..(499): Ceres Seq. ID no. 14310843
  misc_feature (1)..(492): Pfam Name: TCP-1/cpn60 chaperonin family Pfam Description: TCP-1/cpn60 chaperonin family
  misc_feature (1)..(499): Homolog of NCBI NO: 1729865 NR Description: T-complex protein 1, alpha subunit B
  misc_feature (1)..(490): Homolog of NCBI NO: 13540473 NR Description: t-complex 1
  misc_feature (1)..(496): Homolog of NCBI NO: 18859465 NR Description: t-complex polypeptide 1 [Danio rerio]
  misc_feature (1)..(498): Homolog of NCBI NO: 30584211 NR Description: Homo sapiens t-complex 1 [synthetic construct]
  misc_feature (1)..(498): Homolog of NCBI NO: 135538 NR Description: T-complex protein 1, alpha subunit (TCP-1-alpha)
  misc_feature (1)..(496): Homolog of NCBI NO: 27881870 NR Description: Tcp1 protein [Danio rerio]
  misc_feature (1)..(499): Homolog of NCBI NO: 9293959 NR Description: chaperonin, t-complex protein alpha subunit
  misc_feature (1)..(499): Homolog of NCBI NO: 25083339 NR Description: t-complex polypeptide 1 homologue [Arabidopsis
  misc_feature (1)..(499): Homolog of NCBI NO: 15231024 NR Description: T-complex protein 1, alpha subunit/chaperonin
  misc_feature (1)..(499): Homolog of NCBI NO: 24371053 NR Description: t-complex polypeptide 1 [Bruguiera sexangula]
MLVDDIGDVTITNDGATILKMLEVEHPAAKVLVELAELQDREVGDGTTSVVIVAAELLKRANDLVRNKIHPTSIISGYRLAMREACKYVEEKLAVKVEKLGKDSLINCAKTSMSSKLIAGDSDFFAILVVDAVQAVKMTNARGEVKYPIKGINILKAHGKSARDSFLMNGYALNTGRAAQGMPLRVAPARIACLDFNLQKTKMQLGVQVLVTDPRELEKIRQREADMTKERIEKLLKAGANVILTTKGIDDMALKYFVEAGAIAVRRVRKEDMRHVAKATGATLVSTFADMEGEETFEPSFLGYADEVVEERISDDAVVMIKGTKTTSAVTLILRGANDHMLDEMDRALHDALSIVKRTLESNTVVAGGGAVEAALSVYLEYLATTLGSREQLAIAEFAESLLIIPKVLSVNAAKDATELVAKLRAYHHSAQTKADKKHLSSMGLDLSEGKIRNNLEAGVIEPAMSKVKIIQFATEAAITILRIDDMIKLIKDESQNED

SEQ ID NO: 53669 - protein, 479 aa, Glycine max
  peptide (1)..(479): Ceres Seq. ID no. 14310844
  misc_feature (1)..(472): Pfam Name: TCP-1/cpn60 chaperonin family Pfam Description: TCP-1/cpn60 chaperonin family
  misc_feature (1)..(479): Homolog of NCBI NO: 1729865 NR Description: T-complex protein 1, alpha subunit B
  misc_feature (1)..(470): Homolog of NCBI NO: 13540473 NR Description: t-complex 1
  misc_feature (1)..(476): Homolog of NCBI NO: 18859465 NR Description: t-complex polypeptide 1 [Danio rerio]
  misc_feature (1)..(478): Homolog of NCBI NO: 30584211 NR Description: Homo sapiens t-complex 1 [synthetic construct]
  misc_feature (1)..(478): Homolog of NCBI NO: 135538 NR Description: T-complex protein 1, alpha subunit (TCP-1-alpha)
  misc_feature (1)..(476): Homolog of NCBI NO: 27881870 NR Description: Tcp1 protein [Danio rerio]
  misc_feature (1)..(479): Homolog of NCBI NO: 9293959 NR Description: chaperonin, t-complex protein alpha subunit
  misc_feature (1)..(479): Homolog of NCBI NO: 25083339 NR Description: t-complex polypeptide 1 homologue [Arabidopsis
  misc_feature (1)..(479): Homolog of NCBI NO: 15231024 NR Description: T-complex protein 1, alpha subunit/chaperonin
  misc_feature (1)..(479): Homolog of NCBI NO: 24371053 NR Description: t-complex polypeptide 1 [Bruguiera sexangula]
MLEVEHPAAKVLVELAELQDREVGDGTTSVVIVAAELLKRANDLVRNKIHPTSIISGYRLAMREACKYVEEKLAVKVEKLGKDSLINCAKTSMSSKLIAGDSDFFAILVVDAVQAVKMTNARGEVKYPIKGINILKAHGKSARDSFLMNGYALNTGRAAQGMPLRVAPARIACLDFNLQKTKMQLGVQVLVTDPRELEKIRQREADMTKERIEKLLKAGANVILTTKGIDDMALKYFVEAGAIAVRRVRKEDMRHVAKATGATLVSTFADMEGEETFEPSFLGYADEVVEERISDDAVVMIKGTKTTSAVTLILRGANDHMLDEMDRALHDALSIVKRTLESNTVVAGGGAVEAALSVYLEYLATTLGSREQLAIAEFAESLLIIPKVLSVNAAKDATELVAKLRAYHHSAQTKADKKHLSSMGLDLSEGKIRNNLEAGVIEPAMSKVKIIQFATEAAITILRIDDMIKLIKDESQNED

SEQ ID NO: 53670 - DNA, 1514 bp, Glycine max
  misc_feature (1)..(1514): Ceres Seq. ID no. 14304471
aattcccatctacagttagccccaaatctggggttagggtttcctctgcgtcgatggcttcgaattcgatcgacggcgacgccgttacggggtcgggactgtgcataaacgacgtgttaagggacgacgagctgcgttccattctggggcgagtggagagcgagaaggacaaggaaacgttcgggttggtctgcaagcgatggcttcggttgcagagcacggaaaggaagaaactcgccgcacgtgcgggtccccacatgctccgaaaaatggccgataggttcacacgcttagtcgaactggacctcgctcagtccgtctctcgttccttctatcccggcgtcaccgattccgatctcgccgtcatcgccactgccttcacttgcttgaagatcctcaatttgcataattgtaaaggaattacagatgctggaatgaaggctattggtgaacatctttccttattacagtcgttggatgtgtcttactgtagaaagctgactgacaagggattatcagctgttgccaaaggctgttgtgacttaaggatattgcatatggcgggttgcagatttgttactgatggtgtattagaagctctctccaaaaattgcggtaacttagaggagttgggattgcatggctgcacaagcattactgacaatggactgataaaccttgcaagtggatgtcgacggatcaggtttttagacataaataaatgtagtaatgccactgatgttggggtttctagtgtttctagggcttgttcatcttctctcaagacattgaaattgttagattgctataaaattggggatgaaaccatattatccctcgccgaattctgtggtaatctggagactttaatcattggtggttgccgggatgtctctgctgatgcgataaggtcgctggctgctgcatgtggaagcagccttaaaaacttgaggatggattggtgtttaaacatttctgattcttcattgagctgtgttttaagtcaatgcagaaaccttgaggcactggacattggttgctgtgaagagttgactgatgctgcttttcagctattaagcaatgaggagcctggattgagtttgaagattttgaagattagtaattgtccaaagatcacagtggcaggtataggcatcattgtgggtaaatgcacgtctctgcaatacttggatgtgaggtcatgcccgcatattacaaaggctggcctagatgaggctggtttccattttcctgaatgctgcaagattaattttaatggtagcgttaatgagcctgttgtgcttctttgatactctaattattttaaaagattggcttcatagttaaatgttcctatataaactttattgataaggcgtgcctttgtatatttgatgagaatgtggtctgttctggtgatgttagttttcttgtgcaactcacgtatcatgtatgtcagtaaatgacattggatgtatcatattttattgatcagttcagctgtaaatttgaag

SEQ ID NO: 53671 - protein, 435 aa, Glycine max
  peptide (1)..(435): Ceres Seq. ID no. 14304472
  misc_feature (3)..(417): Homolog of NCBI NO: 24652783 NR Description: CG9003-PA [Drosophila melanogaster]
  misc_feature (113)..(417): Homolog of NCBI NO: 12848653 NR Description: unnamed protein product [Mus musculus]
  misc_feature (113)..(417): Homolog of NCBI NO: 26336707 NR Description: unnamed protein product [Mus musculus]
  misc_feature (113)..(417): Homolog of NCBI NO: 16306582 NR Description: F-box and leucine-rich repeat protein 2
  misc_feature (113)..(417): Homolog of NCBI NO: 7022695 NR Description: unnamed protein product [Homo sapiens]
  misc_feature (113)..(417): Homolog of NCBI NO: 6063090 NR Description: F-box protein FBL2 [Homo sapiens]
  misc_feature (113)..(417): Homolog of NCBI NO: 5919219 NR Description: leucine-rich repeats containing F-box protein
  misc_feature (114)..(409): Homolog of NCBI NO: 21536497 NR Description: F-box protein family, AtFBL4 [Arabidopsis
  misc_feature (114)..(409): Homolog of NCBI NO: 18414458 NR Description: F-box protein family (FBL4) [Arabidopsis
  misc_feature (31)..(435): Homolog of NCBI NO: 15237286 NR Description: expressed protein [Arabidopsis thaliana]
FPSTVSPKSGVRVSSASMASNSIDGDAVTGSGLCINDVLRDDELRSILGRVESEKDKETFGLVCKRWLRLQSTERKKLAARAGPHMLRKMADRFTRLVELDLAQSVSRSFYPGVTDSDLAVIATAFTCLKILNLHNCKGITDAGMKAIGEHLSLLQSLDVSYCRKLTDKGLSAVAKGCCDLRILHMAGCRFVTDGVLEALSKNCGNLEELGLHGCTSITDNGLINLASGCRRIRFLDINKCSNATDVGVSSVSRACSSSLKTLKLLDCYKIGDETILSLAEFCGNLETLIIGGCRDVSADAIRSLAAACGSSLKNLRMDWCLNISDSSLSCVLSQCRNLEALDIGCCEELTDAAFQLLSNEEPGLSLKILKISNCPKITVAGIGIIVGKCTSLQYLDVRSCPHITKAGLDEAGFHFPECCKINFNGSVNEPVVLL

SEQ ID NO: 53672 - protein, 418 aa, Glycine max
  peptide (1)..(418): Ceres Seq. ID no. 14304473
  misc_feature (1)..(400): Homolog of NCBI NO: 24652783 NR Description: CG9003-PA [Drosophila melanogaster]
  misc_feature (96)..(400): Homolog of NCBI NO: 12848653 NR Description: unnamed protein product [Mus musculus]
  misc_feature (96)..(400): Homolog of NCBI NO: 26336707 NR Description: unnamed protein product [Mus musculus]
  misc_feature (96)..(400): Homolog of NCBI NO: 6063090 NR Description: F-box protein FBL2 [Homo sapiens]
  misc_feature (96)..(400): Homolog of NCBI NO: 16306582 NR Description: F-box and leucine-rich repeat protein 2
  misc_feature (96)..(400): Homolog of NCBI NO: 7022695 NR Description: unnamed protein product [Homo sapiens]
  misc_feature (96)..(400): Homolog of NCBI NO: 5919219 NR Description: leucine-rich repeats containing F-box protein
  misc_feature (97)..(392): Homolog of NCBI NO: 21536497 NR Description: F-box protein family, AtFBL4 [Arabidopsis
  misc_feature (97)..(392): Homolog of NCBI NO: 18414458 NR Description: F-box protein family (FBL4) [Arabidopsis
  misc_feature (14)..(418): Homolog of NCBI NO: 15237286 NR Description: expressed protein [Arabidopsis thaliana]
MASNSIDGDAVTGSGLCINDVLRDDELRSILGRVESEKDKETFGLVCKRWLRLQSTERKKLAARAGPHMLRKMADRFTRLVELDLAQSVSRSFYPGVTDSDLAVIATAFTCLKILNLHNCKGITDAGMKAIGEHLSLLQSLDVSYCRKLTDKGLSAVAKGCCDLRILHMAGCRFVTDGVLEALSKNCGNLEELGLHGCTSITDNGLINLASGCRRIRFLDINKCSNATDVGVSSVSRACSSSLKTLKLLDCYKIGDETILSLAEFCGNLETLIIGGCRDVSADAIRSLAAACGSSLKNLRMDWCLNISDSSLSCVLSQCRNLEALDIGCCEELTDAAFQLLSNEEPGLSLKILKISNCPKITVAGIGIIVGKCTSLQYLDVRSCPHITKAGLDEAGFHFPECCKINFNGSVNEPVVLL

SEQ ID NO: 53673 - protein, 350 aa, Glycine max
  peptide (1)..(350): Ceres Seq. ID no. 14304474
  misc_feature (1)..(332): Homolog of NCBI NO: 24652783 NR Description: CG9003-PA [Drosophila melanogaster]
  misc_feature (28)..(332): Homolog of NCBI NO: 12848653 NR Description: unnamed protein product [Mus musculus]
  misc_feature (28)..(332): Homolog of NCBI NO: 26336707 NR Description: unnamed protein product [Mus musculus]
  misc_feature (28)..(332): Homolog of NCBI NO: 16306582 NR Description: F-box and leucine-rich repeat protein 2
  misc_feature (28)..(332): Homolog of NCBI NO: 6063090 NR Description: F-box protein FBL2 [Homo sapiens]
  misc_feature (28)..(332): Homolog of NCBI NO: 7022695 NR Description: unnamed protein product [Homo sapiens]
  misc_feature (28)..(332): Homolog of NCBI NO: 5919219 NR Description: leucine-rich repeats containing F-box protein
  misc_feature (29)..(324): Homolog of NCBI NO: 21536497 NR Description: F-box protein family, AtFBL4 [Arabidopsis
  misc_feature (29)..(324): Homolog of NCBI NO: 18414458 NR Description: F-box protein family (FBL4) [Arabidopsis
  misc_feature (1)..(350): Homolog of NCBI NO: 15237286 NR Description: expressed protein [Arabidopsis thaliana]
MLRKMADRFTRLVELDLAQSVSRSFYPGVTDSDLAVIATAFTCLKILNLHNCKGITDAGMKAIGEHLSLLQSLDVSYCRKLTDKGLSAVAKGCCDLRILHMAGCRFVTDGVLEALSKNCGNLEELGLHGCTSITDNGLINLASGCRRIRFLDINKCSNATDVGVSSVSRACSSSLKTLKLLDCYKIGDETILSLAEFCGNLETLIIGGCRDVSADAIRSLAAACGSSLKNLRMDWCLNISDSSLSCVLSQCRNLEALDIGCCEELTDAAFQLLSNEEPGLSLKILKISNCPKITVAGIGIIVGKCTSLQYLDVRSCPHITKAGLDEAGFHFPECCKINFNGSVNEPVVLL

SEQ ID NO: 53674 - DNA, 1497 bp, Glycine max
  misc_feature (1)..(1497): Ceres Seq. ID no. 13637562
atttcttatagaaaagccaaactcgcttgaactttagacactattctgattctgtccatccatccttcagattctgtgaagaacaatgttaatggcaactctgtattaaaattcttcattttctaaattctactgtctctgttactttttaattccaaccctatcctcttctctaatgctctttctttgtaactaacatagtggcttgcaagcagttcgtcctcctccattaacgtccacttccgacccaccacctctttttgatggcaccaccaggttgtacatcagttattcctgtccctatgcacaacgagtatggataactaggaactacaaggggcttcaagacaagatcaaattggtccctattgatcttcaagacaggccagcttggtataaggagaaagtctaccctgaaaataaggtgccatccttggagcacaatggcaaggtattgggagaaagtcttgatttgatcaaatatgtagatgtcaactttgaagggacacctttggttcccagtgatcctgccaagaaagagtttggtgagcacttgatatcccatgttgatacattcaacaaagacctgaactcttcattgaaaggagatcctgtacagcaagccagtccttcttttgaatacttggagaatgctcttggtaaatttgatgatgggccattcttgcttggtcaattcagtttggtggatattgcctatattccatttattgaaagatatcaaattgtctttgccgagctgttcaaacaagacatcgcagaaggaaggcctaaacttgcagcatggattgaggaggtgaacaagattgatgcttatacacagacaaaaaacgatcctcaagaaatcgctgataaatacaagaaacgtttactgtctcaacagtgatccttggattgttgcaggcttcctctaagatatatagactgtggcaacaaaacgtcctttgcattcatgggatgcatctcttcagtcaaataattatgttcacttttcagcttgcttttttggatgacattataatgtttatgtactagcttgtgatcgctgatcattatggtatagttatcctaccagtactatgttagtatttagctttgatatctctcaagtgtccctgacctcatacatgtcagcaaaggtttattgcatggaaattatacatggttgtgaaaaaaacgttgtgccggaaaaaaaaaaaaaaaaaaaaaaaaaaaaaaaaaaaaaaaaaaaaaaaaaaaaaaaaaaaaaaaaaaaaaaaaaaaaaaaaaaaaaaaaaaaaaaatttccccccccccgggaaacccccaagttttaaaggggcccccaccgggggggagttccagtttttgttccctttaaaggggggtaaatttcgagtttggggaaatcatggccaaaaatttttcctggggaaaaatttaacccccttaaaattccccaaaaaaaaaaaccccaaactaaaaggggaaaagcctggg

SEQ ID NO: 53675 - protein, 106 aa, Glycine max
  peptide (1)..(106): Ceres Seq. ID no. 13637563
  misc_feature (4)..(40): Homolog of NCBI NO: 32411603 NR Description: hypothetical protein [Neurospora crassa]
  misc_feature (4)..(40): Homolog of NCBI NO: 32411603 NR Description: hypothetical protein [Neurospora crassa]
  misc_feature (4)..(40): Homolog of NCBI NO: 32411603 NR Description: hypothetical protein [Neurospora crassa]
  misc_feature (4)..(40): Homolog of NCBI NO: 32411603 NR Description: hypothetical protein [Neurospora crassa]
  misc_feature (4)..(40): Homolog of NCBI NO: 32411603 NR Description: hypothetical protein [Neurospora crassa]
  misc_feature (4)..(40): Homolog of NCBI NO: 32411603 NR Description: hypothetical protein [Neurospora crassa]
  misc_feature (4)..(40): Homolog of NCBI NO: 32411603 NR Description: hypothetical protein [Neurospora crassa]
  misc_feature (4)..(40): Homolog of NCBI NO: 32411603 NR Description: hypothetical protein [Neurospora crassa]
  misc_feature (4)..(40): Homolog of NCBI NO: 32411603 NR Description: hypothetical protein [Neurospora crassa]
  misc_feature (4)..(41): Homolog of NCBI NO: 32411603 NR Description: hypothetical protein [Neurospora crassa]
MVVKKTLCRKKKKKKKKKKKKKKKKKKKKKKKKKKKKKKKNFPPPGKPPSFKGAPTGGEFQFLFPLKGGKFRVWGNHGQKFFLGKNLTPLKFPKKKNPKLKGEKPG

SEQ ID NO: 53676 - protein, 78 aa, Glycine max
  peptide (1)..(78): Ceres Seq. ID no. 13637564
  misc_feature (37)..(68): Homolog of NCBI NO: 32411603 NR Description: hypothetical protein [Neurospora crassa]
  misc_feature (37)..(68): Homolog of NCBI NO: 32411603 NR Description: hypothetical protein [Neurospora crassa]
  misc_feature (37)..(68): Homolog of NCBI NO: 32411603 NR Description: hypothetical protein [Neurospora crassa]
  misc_feature (37)..(68): Homolog of NCBI NO: 32416700 NR Description: predicted protein [Neurospora crassa]
  misc_feature (37)..(68): Homolog of NCBI NO: 32416700 NR Description: predicted protein [Neurospora crassa]
  misc_feature (37)..(68): Homolog of NCBI NO: 32416700 NR Description: predicted protein [Neurospora crassa]
  misc_feature (37)..(68): Homolog of NCBI NO: 32411603 NR Description: hypothetical protein [Neurospora crassa]
  misc_feature (36)..(68): Homolog of NCBI NO: 32411603 NR Description: hypothetical protein [Neurospora crassa]
  misc_feature (31)..(68): Homolog of NCBI NO: 32416700 NR Description: predicted protein [Neurospora crassa]
  misc_feature (17)..(68): Homolog of NCBI NO: 32416700 NR Description: predicted protein [Neurospora crassa]
MLVFSFDISQVSLTSYMSAKVYCMEIIHGCEKNVVPEKKKKKKKKKKKKKKKKKKKKKKKKKKKKKKKFPPPRETPKF

SEQ ID NO: 53677 - protein, 62 aa, Glycine max
  peptide (1)..(62): Ceres Seq. ID no. 13637565
  misc_feature (21)..(52): Homolog of NCBI NO: 32416700 NR Description: predicted protein [Neurospora crassa]
  misc_feature (21)..(52): Homolog of NCBI NO: 32416700 NR Description: predicted protein [Neurospora crassa]
  misc_feature (21)..(52): Homolog of NCBI NO: 32416700 NR Description: predicted protein [Neurospora crassa]
  misc_feature (21)..(52): Homolog of NCBI NO: 32411603 NR Description: hypothetical protein [Neurospora crassa]
  misc_feature (21)..(52): Homolog of NCBI NO: 32411603 NR Description: hypothetical protein [Neurospora crassa]
  misc_feature (21)..(52): Homolog of NCBI NO: 32411603 NR Description: hypothetical protein [Neurospora crassa]
  misc_feature (21)..(52): Homolog of NCBI NO: 32411603 NR Description: hypothetical protein [Neurospora crassa]
  misc_feature (20)..(52): Homolog of NCBI NO: 32411603 NR Description: hypothetical protein [Neurospora crassa]
  misc_feature (15)..(52): Homolog of NCBI NO: 32416700 NR Description: predicted protein [Neurospora crassa]
  misc_feature (1)..(52): Homolog of NCBI NO: 32416700 NR Description: predicted protein [Neurospora crassa]
MSAKVYCMEIIHGCEKNVVPEKKKKKKKKKKKKKKKKKKKKKKKKKKKKKKKFPPPRETPKF

SEQ ID NO: 53678 - DNA, 1409 bp, Glycine max
  misc_feature (1)..(1409): Ceres Seq. ID no. 15176737
atagagacaatttctgaaaccttaaaccttagaataatgtcttggctccttataattctgtttctcagcctcacacatggtagtttttcagagactagccacgacaagaagcttccttatgctgttgtggttggcactgtctactgtgacacatgttctcaacaggaattctccattggaagtcatttcatttcaggtgcctcagtagttgcagaatgcaaagatggaaattcaatacaaagtttcaagaaagaagtgaagacaaatgaacatggggaattcaaagtgcagctaccattcagagtgaggaaacatgttaggagaatcaagggatgcactttcaagttgttaagtagcagtgaacctcattgttctgtggcctcagtttccacttcttcagtgagtctcaaaacaagaaagcaaggagaacacacattctcagcagggttgttctcattcaaaccattacaaaagcccaacgtttgtaaccaaaatcaaaatgaattttctccaaatacatacccatcgaaacctaccccagataagactacagtgttcaaaaccaatccaacaaccaaaagttcagacaaatctaaatcagctaacaaaaatttagctgaagatttcttttttccaccaaacccatttttcccaccaccattggtccccaacccatttcagcctcctcccctaattccaaatccctttcagccacctcctctgattccaaatccactgcaaccaccaagcccaccactcattccaaacccattccaaccaccaagcccaccaccactcatccctaacccattccagccccctccaagcccaccaactctctttcctaatcctttccagccccctccaagcccaccaccacttatccctaacccattccagcctcctccaagcccaccaccatctttgtttccccctttcccaccaatagtaataccaggtttgaccccatcaccaccaccacctccaccaccaaaaccaattttccctcctttgcctcctctattcccacctctgttccctccacctcacacccctggcacaccccctgcttctgcttctaagaaccacccttatccttgattagttagaataccaactagttagtataattttctcaataaatatttacagaaaaagaaaataaaaagaatcaaagaggtgattttaccttatgaattcattattattttcttctttctaaaaatatttattaagaaaatgatcctgattagttttgtatcgtgtacaacttatttactttcattataagtcttgatatatacggtatgatataaatagctaaacatgaggatggatatgtcgctaatacattattgcagtattagtaattagtaataaatatgaggatatggacatcttagagtttc

SEQ ID NO: 53679 - protein, 366 aa, Glycine max
  peptide (1)..(366): Ceres Seq. ID no. 15176738
  misc_feature (43)..(164): Pfam Name: Pollen proteins Ole e I family Pfam Description: Pollen proteins Ole e I family
  misc_feature (212)..(357): Homolog of NCBI NO: 21322711 NR Description: pherophorin-dz1 protein [Volvox carteri f.
  misc_feature (212)..(356): Homolog of NCBI NO: 21322711 NR Description: pherophorin-dz1 protein [Volvox carteri f.
  misc_feature (212)..(366): Homolog of NCBI NO: 21322711 NR Description: pherophorin-dz1 protein [Volvox carteri f.
  misc_feature (212)..(366): Homolog of NCBI NO: 21322711 NR Description: pherophorin-dz1 protein [Volvox carteri f.
  misc_feature (212)..(366): Homolog of NCBI NO: 21322711 NR Description: pherophorin-dz1 protein [Volvox carteri f.
  misc_feature (212)..(366): Homolog of NCBI NO: 21322711 NR Description: pherophorin-dz1 protein [Volvox carteri f.
  misc_feature (213)..(364): Homolog of NCBI NO: 6523547 NR Description: hydroxyproline-rich glycoprotein DZ-HRGP
  misc_feature (212)..(366): Homolog of NCBI NO: 6523547 NR Description: hydroxyproline-rich glycoprotein DZ-HRGP
  misc_feature (213)..(364): Homolog of NCBI NO: 6523547 NR Description: hydroxyproline-rich glycoprotein DZ-HRGP
  misc_feature (15)..(356): Homolog of NCBI NO: 15242391 NR Description: proline-rich protein [Arabidopsis thaliana]
IETISETLNLRIMSWLLIILFLSLTHGSFSETSHDKKLPYAVVVGTVYCDTCSQQEFSIGSHFISGASVVAECKDGNSIQSFKKEVKTNEHGEFKVQLPFRVRKHVRRIKGCTFKLLSSSEPHCSVASVSTSSVSLKTRKQGEHTFSAGLFSFKPLQKPNVCNQNQNEFSPNTYPSKPTPDKTTVFKTNPTTKSSDKSKSANKNLAEDFFFPPNPFFPPPLVPNPFQPPPLIPNPFQPPPLIPNPLQPPSPPLIPNPFQPPSPPPLIPNPFQPPPSPPTLFPNPFQPPPSPPPLIPNPFQPPPSPPPSLFPPFPPIVIPGLTPSPPPPPPPKPIFPPLPPLFPPLFPPPHTPGTPPASASKNHPYP

SEQ ID NO: 53680 - protein, 354 aa, Glycine max
  peptide (1)..(354): Ceres Seq. ID no. 15176739
  misc_feature (31)..(152): Pfam Name: Pollen proteins Ole e I family Pfam Description: Pollen proteins Ole e I family
  misc_feature (200)..(345): Homolog of NCBI NO: 21322711 NR Description: pherophorin-dz1 protein [Volvox carteri f.
  misc_feature (200)..(344): Homolog of NCBI NO: 21322711 NR Description: pherophorin-dz1 protein [Volvox carteri f.
  misc_feature (200)..(354): Homolog of NCBI NO: 21322711 NR Description: pherophorin-dz1 protein [Volvox carteri f.
  misc_feature (200)..(354): Homolog of NCBI NO: 21322711 NR Description: pherophorin-dz1 protein [Volvox carteri f.
  misc_feature (200)..(354): Homolog of NCBI NO: 21322711 NR Description: pherophorin-dz1 protein [Volvox carteri f.
  misc_feature (200)..(354): Homolog of NCBI NO: 21322711 NR Description: pherophorin-dz1 protein [Volvox carteri f.
  misc_feature (201)..(352): Homolog of NCBI NO: 6523547 NR Description: hydroxyproline-rich glycoprotein DZ-HRGP
  misc_feature (200)..(354): Homolog of NCBI NO: 6523547 NR Description: hydroxyproline-rich glycoprotein DZ-HRGP
  misc_feature (201)..(352): Homolog of NCBI NO: 6523547 NR Description: hydroxyproline-rich glycoprotein DZ-HRGP
  misc_feature (3)..(344): Homolog of NCBI NO: 15242391 NR Description: proline-rich protein [Arabidopsis thaliana]
MSWLLIILFLSLTHGSFSETSHDKKLPYAVVVGTVYCDTCSQQEFSIGSHFISGASVVAECKDGNSIQSFKKEVKTNEHGEFKVQLPFRVRKHVRRIKGCTFKLLSSSEPHCSVASVSTSSVSLKTRKQGEHTFSAGLFSFKPLQKPNVCNQNQNEFSPNTYPSKPTPDKTTVFKTNPTTKSSDKSKSANKNLAEDFFFPPNPFFPPPLVPNPFQPPPLIPNPFQPPPLIPNPLQPPSPPLIPNPFQPPSPPPLIPNPFQPPPSPPTLFPNPFQPPPSPPPLIPNPFQPPPSPPPSLFPPFPPIVIPGLTPSPPPPPPPKPIFPPLPPLFPPLFPPPHTPGTPPASASKNHPYP

SEQ ID NO: 53681 - DNA, 1692 bp, Glycine max
  misc_feature (1)..(1692): Ceres Seq. ID no. 14310655
gattacgccgatggccggttattcctccggcgccggcgaagacgaaagcgaaaaccgtcgtggcgaggccgttactgatgaaaccaccgactacatctccgatctccctaacgagtgcctggcttcggtgtttcagtttcttagctccgccgatcggaaccgctgctcgctcgtttgccggcggtggctccagatcgaaggacagagtcgtcacaggctttctctgaacgcggatgaggatctgtttccagcgattccgtcgctgttctctcggttcgattcggtgacgaagctcgcgttgaagtgcgaccgcagatccgtgagcataagcgacgacgcgctcgtgctgatctcgcagcggtgccctaacctcacgcgcctcaagctccgcgcgtgccgcgccctcaccgacgctggaatggaagcgttcgcgaagaactgcaagggattgaagaagctctcctgcggatcgtgcacgttcggatccaaaggcatgaacgcggtgctcgacaactgcgccgcgctggaggagctctcagtcaagcgcctccgcggaatcaccgacgcggcggcggcggagccgatcggtcccggcgtggctgcggcgtcgctgaaaatcgtttgcctgaaggagctctacaacggacagtgtttcggaacgctgattctcggggctaagaatctgaaaaccttgaagcttttccggtgctccggggattgggaccggctctttcagttaatggcagatcgagtcacgaacatggtcgaagttcacctcgagaggcttcagattagcgacgttggattgcaagcgatcgcgaatttttcgagtttggagattttgcatctcgttaagactcctgaatgttctgatattggacttgttgctattgcagacaggtgcaagcttttgcggaagcttcacattgatggatggaaggcaaatcgaattggcgacgaagggttgatagctgttgcaaaaggttgccctaatttgcttgaattagtgctaattggggtaaaccctactaaggcgagtttggaaatgttggcatctaattgccggaatcttgagcggttggctttgtgtggaagtgattcggttggtgatactgagatatcttgcattgctgcaaagtgtgtggctttgaagaaactgtgtattaagagttgtcctgtttcggatcaagggatggaggcattggcaaatgggtgtccgaatttggtgaaagttaaggttaagaagtgtaagggggttacccctgagggtggtgattggttgaggaggactagagggtcagttgctgttaatttagatactggtgaggcagagcttcaggaagcgagtgctagtgatggaggggcacaggacaatgttgtagagtttcctcagatgcctgcccaaatcgtggccgcagcagcatctgcatcaagcagcaccactcggtctagttcgttcaagttgagattagggcttttgtctgggaggagtttagtggctagcacttttaagagatggtcaggtggtagcactagtgcacgccatggttagggatagcagggccaaagcaaacctgagtctttggccatttttcattgttttgggttgttgtatcatttgatttttatatttcttgtacttaaatttgaaatttatgccgtgtgatttttattgcctttggaattgaagct

SEQ ID NO: 53682 - protein, 516 aa, Glycine max
  peptide (1)..(516): Ceres Seq. ID no. 14310656
  misc_feature (34)..(76): Pfam Name: F-box domain Pfam Description: F-box domain
  misc_feature (32)..(409): Homolog of NCBI NO: 34854899 NR Description: similar to F-box and leucine-rich repeat protein 7
  misc_feature (35)..(408): Homolog of NCBI NO: 25151696 NR Description: rad-51 (Fifty one) like, Short RFS-1, f-box
  misc_feature (35)..(408): Homolog of NCBI NO: 25151694 NR Description: rad-51 (Fifty one) like, Short RFS-1, f-box
  misc_feature (30)..(292): Homolog of NCBI NO: 15810227 NR Description: putative SKP1 interacting partner SKIP2
  misc_feature (30)..(485): Homolog of NCBI NO: 21743072 NR Description: OSJNBb0002J11.1 [Oryza sativa (japonica
  misc_feature (26)..(507): Homolog of NCBI NO: 18409012 NR Description: F-box protein family (FBL16) [Arabidopsis
  misc_feature (30)..(507): Homolog of NCBI NO: 18425169 NR Description: SKP1 interacting partner 2 (SKIP2) [Arabidopsis
  misc_feature (19)..(512): Homolog of NCBI NO: 18412996 NR Description: F-box protein family (FBL8) (FBL24) [Arabidopsis
  misc_feature (22)..(505): Homolog of NCBI NO: 15220130 NR Description: F-box protein family [Arabidopsis thaliana]
  misc_feature (27)..(510): Homolog of NCBI NO: 30013671 NR Description: Avr9/Cf-9 rapidly elicited protein 189 [Nicotiana
ITPMAGYSSGAGEDESENRRGEAVTDETTDYISDLPNECLASVFQFLSSADRNRCSLVCRRWLQIEGQSRHRLSLNADEDLFPAIPSLFSRFDSVTKLALKCDRRSVSISDDALVLISQRCPNLTRLKLRACRALTDAGMEAFAKNCKGLKKLSCGSCTFGSKGMNAVLDNCAALEELSVKRLRGITDAAAAEPIGPGVAAASLKIVCLKELYNGQCFGTLILGAKNLKTLKLFRCSGDWDRLFQLMADRVTNMVEVHLERLQISDVGLQAIANFSSLEILHLVKTPECSDIGLVAIADRCKLLRKLHIDGWKANRIGDEGLIAVAKGCPNLLELVLIGVNPTKASLEMLASNCRNLERLALCGSDSVGDTEISCIAAKCVALKKLCIKSCPVSDQGMEALANGCPNLVKVKVKKCKGVTPEGGDWLRRTRGSVAVNLDTGEAELQEASASDGGAQDNVVEFPQMPAQIVAAAASASSSTTRSSSFKLRLGLLSGRSLVASTFKRWSGGSTSARHG

SEQ ID NO: 53683 - protein, 513 aa, Glycine max
  peptide (1)..(513): Ceres Seq. ID no. 14310657
  misc_feature (31)..(73): Pfam Name: F-box domain Pfam Description: F-box domain
  misc_feature (29)..(406): Homolog of NCBI NO: 34854899 NR Description: similar to F-box and leucine-rich repeat protein 7
  misc_feature (32)..(405): Homolog of NCBI NO: 25151696 NR Description: rad-51 (Fifty one) like, Short RFS-1, f-box
  misc_feature (32)..(405): Homolog of NCBI NO: 25151694 NR Description: rad-51 (Fifty one) like, Short RFS-1, f-box
  misc_feature (27)..(289): Homolog of NCBI NO: 15810227 NR Description: putative SKP1 interacting partner SKIP2
  misc_feature (27)..(482): Homolog of NCBI NO: 21743072 NR Description: OSJNBb0002J11.1 [Oryza sativa (japonica
  misc_feature (23)..(504): Homolog of NCBI NO: 18409012 NR Description: F-box protein family (FBL16) [Arabidopsis
  misc_feature (27)..(504): Homolog of NCBI NO: 18425169 NR Description: SKP1 interacting partner 2 (SKIP2) [Arabidopsis
  misc_feature (16)..(509): Homolog of NCBI NO: 18412996 NR Description: F-box protein family (FBL8) (FBL24) [Arabidopsis
  misc_feature (19)..(502): Homolog of NCBI NO: 15220130 NR Description: F-box protein family [Arabidopsis thaliana]
  misc_feature (24)..(507): Homolog of NCBI NO: 30013671 NR Description: Avr9/Cf-9 rapidly elicited protein 189 [Nicotiana
MAGYSSGAGEDESENRRGEAVTDETTDYISDLPNECLASVFQFLSSADRNRCSLVCRRWLQIEGQSRHRLSLNADEDLFPAIPSLFSRFDSVTKLALKCDRRSVSISDDALVLISQRCPNLTRLKLRACRALTDAGMEAFAKNCKGLKKLSCGSCTFGSKGMNAVLDNCAALEELSVKRLRGITDAAAAEPIGPGVAAASLKIVCLKELYNGQCFGTLILGAKNLKTLKLFRCSGDWDRLFQLMADRVTNMVEVHLERLQISDVGLQAIANFSSLEILHLVKTPECSDIGLVAIADRCKLLRKLHIDGWKANRIGDEGLIAVAKGCPNLLELVLIGVNPTKASLEMLASNCRNLERLALCGSDSVGDTEISCIAAKCVALKKLCIKSCPVSDQGMEALANGCPNLVKVKVKKCKGVTPEGGDWLRRTRGSVAVNLDTGEAELQEASASDGGAQDNVVEFPQMPAQIVAAAASASSSTTRSSSFKLRLGLLSGRSLVASTFKRWSGGSTSARHG

SEQ ID NO: 53684 - protein, 377 aa, Glycine max
  peptide (1)..(377): Ceres Seq. ID no. 14310658
  misc_feature (1)..(270): Homolog of NCBI NO: 34854899 NR Description: similar to F-box and leucine-rich repeat protein 7
  misc_feature (1)..(269): Homolog of NCBI NO: 25151696 NR Description: rad-51 (Fifty one) like, Short RFS-1, f-box
  misc_feature (1)..(269): Homolog of NCBI NO: 25151694 NR Description: rad-51 (Fifty one) like, Short RFS-1, f-box
  misc_feature (1)..(153): Homolog of NCBI NO: 15810227 NR Description: putative SKP1 interacting partner SKIP2
  misc_feature (1)..(346): Homolog of NCBI NO: 21743072 NR Description: OSJNBb0002J11.1 [Oryza sativa (japonica
  misc_feature (1)..(368): Homolog of NCBI NO: 18409012 NR Description: F-box protein family (FBL16) [Arabidopsis
  misc_feature (1)..(368): Homolog of NCBI NO: 18425169 NR Description: SKP1 interacting partner 2 (SKIP2) [Arabidopsis
  misc_feature (1)..(373): Homolog of NCBI NO: 18412996 NR Description: F-box protein family (FBL8) (FBL24) [Arabidopsis
  misc_feature (1)..(366): Homolog of NCBI NO: 15220130 NR Description: F-box protein family [Arabidopsis thaliana]
  misc_feature (1)..(371): Homolog of NCBI NO: 30013671 NR Description: Avr9/Cf-9 rapidly elicited protein 189 [Nicotiana
MEAFAKNCKGLKKLSCGSCTFGSKGMNAVLDNCAALEELSVKRLRGITDAAAAEPIGPGVAAASLKIVCLKELYNGQCFGTLILGAKNLKTLKLFRCSGDWDRLFQLMADRVTNMVEVHLERLQISDVGLQAIANFSSLEILHLVKTPECSDIGLVAIADRCKLLRKLHIDGWKANRIGDEGLIAVAKGCPNLLELVLIGVNPTKASLEMLASNCRNLERLALCGSDSVGDTEISCIAAKCVALKKLCIKSCPVSDQGMEALANGCPNLVKVKVKKCKGVTPEGGDWLRRTRGSVAVNLDTGEAELQEASASDGGAQDNVVEFPQMPAQIVAAAASASSSTTRSSSFKLRLGLLSGRSLVASTFKRWSGGSTSARHG

SEQ ID NO: 53685 - DNA, 1429 bp, Glycine max
  misc_feature (1)..(1429): Ceres Seq. ID no. 14303884
ctacgtaggccccccccccccccaaacaaacactatccctggcagtaccaatccatctctttcctctctggcccatgacgacgtcgtccggttccgtgaagaacgcgatgcccccaggcctccaagaacccaacatcaatgccgaaccctcttcctccgccgacgattgctccaactccaacacgaagcccatcgtgttggtcaccaacagtgacggcattgagtctccgggcctcgttcacctcgtcgaagccctcgtgctccagggcctctgcgacgtccatgtctgcgttcctcaatcggacaaatcggcttcggcccactctgtcactcgcggagtaaccgttgaagctttttcggcacaaattaatggcgccaccgcctttgaagtttcaggaactcctgtggattgtgtttcactagcgttatctggggccttgttttcatggtcaaaacctatgctggttattagtggaattaaccggggatcaagctgtggtcatcacatgttctactcaggtgttgttgctggagcaagagaggcgttgttatgtggtgtaccttcattgtcaatatcattaaattggaagaaggatgaaagtcaagagactgatttcaaggatgcagtagtactctgtttacctttaataattgctgctatcagggatgttgtaaacggaactttcaccaaaagttgctttctgaatatagaaattcctacatcgcctttaacctgtaagggcttcaaattaaccaagcaaagtatgtggagatccactctaaactggcaggcagtttcaactagccggtatcctcctggtcatttcttggccagtaaacaaggctttggtcttcagtttgcacagattggccgagatgcctctgctgctggtgcagctcgcagattaactacacagaaaaagaatttggagattgttgaatcaattggagctgctggaaaacctgattccaacagggtgaagaagtacttcaggctagagttttcggagaagcagctggaagatatagatgacgatctagattacagggcacttgaaagtggatttgttgcagttactcctctctctctatctcctcatactgagaccaatattcaaatggcagcttctgattggatttcatctgtgtttcctggtgaacaatagcctcaaacagagttcagcttcagcgtgattatgtacatttgagatttctgattcttttctattttcttcttgaaagcaaaggtggagcagaagcgtctgtcacacccattctatagttgatatcatcaatctgtactctatgtttgtatgtgtgtgtaagatattttgtattcccctcttcattgtttcatttcttttggtcgctagttatttctgatgttatttgcttcctgtaatctcctaggcatattttaaaaatgcca

SEQ ID NO: 53686 - protein, 363 aa, Glycine max
  peptide (1)..(363): Ceres Seq. ID no. 14303885
  misc_feature (39)..(145): Pfam Name: Survival protein SurE Pfam Description: Survival protein SurE
  misc_feature (41)..(181): Homolog of NCBI NO: 39932349 NR Description: Acid phosphatase surE 2
  misc_feature (24)..(181): Homolog of NCBI NO: 29840278 NR Description: phosphatase, SurE family [Chlamydophila caviae
  misc_feature (41)..(242): Homolog of NCBI NO: 15791661 NR Description: SurE protein homolog [Campylobacter jejuni]
  misc_feature (147)..(216): Homolog of NCBI NO: 7485145 NR Description: hypothetical protein - Arabidopsis thaliana
  misc_feature (35)..(145): Homolog of NCBI NO: 7485145 NR Description: hypothetical protein - Arabidopsis thaliana
  misc_feature (27)..(239): Homolog of NCBI NO: 33146601 NR Description: putative stationary phase survival protein SurE
  misc_feature (35)..(306): Homolog of NCBI NO: 18414342 NR Description: expressed protein [Arabidopsis thaliana]
  misc_feature (4)..(145): Homolog of NCBI NO: 25406225 NR Description: hypothetical protein F3N23.8 [imported] -
  misc_feature (150)..(363): Homolog of NCBI NO: 25406225 NR Description: hypothetical protein F3N23.8 [imported] -
  misc_feature (4)..(363): Homolog of NCBI NO: 15218620 NR Description: expressed protein [Arabidopsis thaliana]
MTTSSGSVKNAMPPGLQEPNINAEPSSSADDCSNSNTKPIVLVTNSDGIESPGLVHLVEALVLQGLCDVHVCVPQSDKSASAHSVTRGVTVEAFSAQINGATAFEVSGTPVDCVSLALSGALFSWSKPMLVISGINRGSSCGHHMFYSGVVAGAREALLCGVPSLSISLNWKKDESQETDFKDAVVLCLPLIIAAIRDVVNGTFTKSCFLNIEIPTSPLTCKGFKLTKQSMWRSTLNWQAVSTSRYPPGHFLASKQGFGLQFAQIGRDASAAGAARRLTTQKKNLEIVESIGAAGKPDSNRVKKYFRLEFSEKQLEDIDDDLDYRALESGFVAVTPLSLSPHTETNIQMAASDWISSVFPGEQ

SEQ ID NO: 53687 - protein, 352 aa, Glycine max
  peptide (1)..(352): Ceres Seq. ID no. 14303886
  misc_feature (28)..(134): Pfam Name: Survival protein SurE Pfam Description: Survival protein SurE
  misc_feature (30)..(170): Homolog of NCBI NO: 39932349 NR Description: Acid phosphatase surE 2
  misc_feature (13)..(170): Homolog of NCBI NO: 29840278 NR Description: phosphatase, SurE family [Chlamydophila caviae
  misc_feature (30)..(231): Homolog of NCBI NO: 15791661 NR Description: SurE protein homolog [Campylobacter jejuni]
  misc_feature (136)..(205): Homolog of NCBI NO: 7485145 NR Description: hypothetical protein - Arabidopsis thaliana
  misc_feature (24)..(134): Homolog of NCBI NO: 7485145 NR Description: hypothetical protein - Arabidopsis thaliana
  misc_feature (16)..(228): Homolog of NCBI NO: 33146601 NR Description: putative stationary phase survival protein SurE
  misc_feature (24)..(295): Homolog of NCBI NO: 18414342 NR Description: expressed protein [Arabidopsis thaliana]
  misc_feature (1)..(134): Homolog of NCBI NO: 25406225 NR Description: hypothetical protein F3N23.8 [imported] -
  misc_feature (139)..(352): Homolog of NCBI NO: 25406225 NR Description: hypothetical protein F3N23.8 [imported] -
  misc_feature (1)..(352): Homolog of NCBI NO: 15218620 NR Description: expressed protein [Arabidopsis thaliana]
MPPGLQEPNINAEPSSSADDCSNSNTKPIVLVTNSDGIESPGLVHLVEALVLQGLCDVHVCVPQSDKSASAHSVTRGVTVEAFSAQINGATAFEVSGTPVDCVSLALSGALFSWSKPMLVISGINRGSSCGHHMFYSGVVAGAREALLCGVPSLSISLNWKKDESQETDFKDAVVLCLPLIIAAIRDVVNGTFTKSCFLNIEIPTSPLTCKGFKLTKQSMWRSTLNWQAVSTSRYPPGHFLASKQGFGLQFAQIGRDASAAGAARRLTTQKKNLEIVESIGAAGKPDSNRVKKYFRLEFSEKQLEDIDDDLDYRALESGFVAVTPLSLSPHTETNIQMAASDWISSVFPGEQ

SEQ ID NO: 53688 - protein, 235 aa, Glycine max
  peptide (1)..(235): Ceres Seq. ID no. 14303887
  misc_feature (22)..(105): Pfam Name: Survival protein SurE Pfam Description: Survival protein SurE
  misc_feature (1)..(53): Homolog of NCBI NO: 39932349 NR Description: Acid phosphatase surE 2
  misc_feature (1)..(53): Homolog of NCBI NO: 29840278 NR Description: phosphatase, SurE family [Chlamydophila caviae
  misc_feature (1)..(114): Homolog of NCBI NO: 15791661 NR Description: SurE protein homolog [Campylobacter jejuni]
  misc_feature (19)..(88): Homolog of NCBI NO: 7485145 NR Description: hypothetical protein - Arabidopsis thaliana
  misc_feature (1)..(17): Homolog of NCBI NO: 7485145 NR Description: hypothetical protein - Arabidopsis thaliana
  misc_feature (1)..(111): Homolog of NCBI NO: 33146601 NR Description: putative stationary phase survival protein SurE
  misc_feature (1)..(178): Homolog of NCBI NO: 18414342 NR Description: expressed protein [Arabidopsis thaliana]
  misc_feature (1)..(17): Homolog of NCBI NO: 25406225 NR Description: hypothetical protein F3N23.8 [imported] -
  misc_feature (22)..(235): Homolog of NCBI NO: 25406225 NR Description: hypothetical protein F3N23.8 [imported] -
  misc_feature (1)..(235): Homolog of NCBI NO: 15218620 NR Description: expressed protein [Arabidopsis thaliana]
MLVISGINRGSSCGHHMFYSGVVAGAREALLCGVPSLSISLNWKKDESQETDFKDAVVLCLPLIIAAIRDVVNGTFTKSCFLNIEIPTSPLTCKGFKLTKQSMWRSTLNWQAVSTSRYPPGHFLASKQGFGLQFAQIGRDASAAGAARRLTTQKKNLEIVESIGAAGKPDSNRVKKYFRLEFSEKQLEDIDDDLDYRALESGFVAVTPLSLSPHTETNIQMAASDWISSVFPGEQ

SEQ ID NO: 53689 - DNA, 1323 bp, Glycine max
  misc_feature (1)..(1323): Ceres Seq. ID no. 14303866
acacacactctctcccttgtttctctctcttcggtcagaaacatgaatttggaaacgcaaccaggaacggcgtcgtattggtgctacagctgcacccgtttcgtgcacctctctgtccaaagcaccatcgcctgcccccactgtcaaagcggtttcgtcgaagagatccgtgccggcgccggagccgaagcctcgccacgccatcgactaagtcctttccccgatgatcctcttttgctccggcgacagggcttccgccgccgtaggagagaagcttccggcaaccgctccccgttcaaccccgttatcgtcctccgcggccccggcgacgactccgccgccgccgaccacgacggcgtcagcacgttcgagctcttctacgacgacggcgacggcaccggcctccgccctcttcctcccaccatgtcggagttgctcctcggctctggctttgacaaacttctcgaacagttcgcgcagatcgagatgaacggattcgggcggccggagaatccgccggcgtcaaaggcggcgatcgagtccatgccgacggtcgagatcggagaaacgcacgtggaaaccgaagcgcactgcgccgtgtgcaaagaagcgtttgagctgcacgcggaggcgcgtgagttaccgtgcaagcacatctaccactccgattgcatcctcccgtggctctcgatgcggaattcgtgcccggtgtgccgccacgagcttccttccgatttggaaactagggttcccagccagatcgacgaggagacgatagggttaacgatttggaggcttcccggcggcggattcgccgtggggagattctccggcggccggagaacaggcgagagtcatttcccggtggtgtacacggagatggacggtggactgaacacgaacggtggtgctcctaggagaatttctcgttctgttagaagcaatagggttagggaaagtcgagggtttggtagagttattagcaatttcttttcattctttggaagaattggttctagaaactcttcttctggacatgggtctgtaagtagaagccgtagtcacgtgagttcaatcttcaatagaagctcgcggagacatagcaggacttgggttatggatgattaattggtgaatggtgatggcaattttgcaaagaatagtaatactttcttttttttcagctttgggttatgagattcatttcatactgtaaatagcatgtaactagcaactatagaagcaagttttttagttttccctctctgggaatctttaatatggtttgattcaacatcaatggaaggaagagtgctatttttt

SEQ ID NO: 53690 - protein, 375 aa, Glycine max
  peptide (1)..(375): Ceres Seq. ID no. 14303867
  misc_feature (198)..(238): Pfam Name: Zinc finger, C3HC4 type (RING finger) Pfam Description: Zinc finger, C3HC4 type (RING finger)
  misc_feature (141)..(252): Homolog of NCBI NO: 18405411 NR Description: expressed protein [Arabidopsis thaliana]
  misc_feature (25)..(244): Homolog of NCBI NO: 18410530 NR Description: expressed protein [Arabidopsis thaliana]
  misc_feature (17)..(286): Homolog of NCBI NO: 34908968 NR Description: P0003D09.21 [Oryza sativa (japonica
  misc_feature (151)..(304): Homolog of NCBI NO: 34906008 NR Description: putative RING-H2 finger protein RHC2a
  misc_feature (120)..(352): Homolog of NCBI NO: 34902106 NR Description: unknown protein [Oryza sativa (japonica
  misc_feature (95)..(373): Homolog of NCBI NO: 18405141 NR Description: RING-H2 finger protein (RHC2a) [Arabidopsis
  misc_feature (23)..(364): Homolog of NCBI NO: 15232595 NR Description: expressed protein [Arabidopsis thaliana]
  misc_feature (19)..(365): Homolog of NCBI NO: 18424254 NR Description: expressed protein [Arabidopsis thaliana]
  misc_feature (6)..(365): Homolog of NCBI NO: 8885559 NR Description: emb|CAB62332.1~gene_id:F2O15.22~strong similarity
  misc_feature (22)..(375): Homolog of NCBI NO: 14719329 NR Description: putative RING-H2 finger protein [Oryza sativa]
THTLSLVSLSSVRNMNLETQPGTASYWCYSCTRFVHLSVQSTIACPHCQSGFVEEIRAGAGAEASPRHRLSPFPDDPLLLRRQGFRRRRREASGNRSPFNPVIVLRGPGDDSAAADHDGVSTFELFYDDGDGTGLRPLPPTMSELLLGSGFDKLLEQFAQIEMNGFGRPENPPASKAAIESMPTVEIGETHVETEAHCAVCKEAFELHAEARELPCKHIYHSDCILPWLSMRNSCPVCRHELPSDLETRVPSQIDEETIGLTIWRLPGGGFAVGRFSGGRRTGESHFPVVYTEMDGGLNTNGGAPRRISRSVRSNRVRESRGFGRVISNFFSFFGRIGSRNSSSGHGSVSRSRSHVSSIFNRSSRRHSRTWVMDD

SEQ ID NO: 53691 - protein, 361 aa, Glycine max
  peptide (1)..(361): Ceres Seq. ID no. 14303868
  misc_feature (184)..(224): Pfam Name: Zinc finger, C3HC4 type (RING finger) Pfam Description: Zinc finger, C3HC4 type (RING finger)
  misc_feature (127)..(238): Homolog of NCBI NO: 18405411 NR Description: expressed protein [Arabidopsis thaliana]
  misc_feature (11)..(230): Homolog of NCBI NO: 18410530 NR Description: expressed protein [Arabidopsis thaliana]
  misc_feature (3)..(272): Homolog of NCBI NO: 34908968 NR Description: P0003D09.21 [Oryza sativa (japonica
  misc_feature (137)..(290): Homolog of NCBI NO: 34906008 NR Description: putative RING-H2 finger protein RHC2a
  misc_feature (106)..(338): Homolog of NCBI NO: 34902106 NR Description: unknown protein [Oryza sativa (japonica
  misc_feature (81)..(359): Homolog of NCBI NO: 18405141 NR Description: RING-H2 finger protein (RHC2a) [Arabidopsis
  misc_feature (9)..(350): Homolog of NCBI NO: 15232595 NR Description: expressed protein [Arabidopsis thaliana]
  misc_feature (5)..(351): Homolog of NCBI NO: 18424254 NR Description: expressed protein [Arabidopsis thaliana]
  misc_feature (1)..(351): Homolog of NCBI NO: 8885559 NR Description: emb|CAB62332.1~gene_id:F2O15.22~strong similarity
  misc_feature (8)..(361): Homolog of NCBI NO: 14719329 NR Description: putative RING-H2 finger protein [Oryza sativa]
MNLETQPGTASYWCYSCTRFVHLSVQSTIACPHCQSGFVEEIRAGAGAEASPRHRLSPFPDDPLLLRRQGFRRRRREASGNRSPFNPVIVLRGPGDDSAAADHDGVSTFELFYDDGDGTGLRPLPPTMSELLLGSGFDKLLEQFAQIEMNGFGRPENPPASKAAIESMPTVEIGETHVETEAHCAVCKEAFELHAEARELPCKHIYHSDCILPWLSMRNSCPVCRHELPSDLETRVPSQIDEETIGLTIWRLPGGGFAVGRFSGGRRTGESHFPVVYTEMDGGLNTNGGAPRRISRSVRSNRVRESRGFGRVISNFFSFFGRIGSRNSSSGHGSVSRSRSHVSSIFNRSSRRHSRTWVMDD

SEQ ID NO: 53692 - protein, 234 aa, Glycine max
  peptide (1)..(234): Ceres Seq. ID no. 14303869
  misc_feature (57)..(97): Pfam Name: Zinc finger, C3HC4 type (RING finger) Pfam Description: Zinc finger, C3HC4 type (RING finger)
  misc_feature (1)..(111): Homolog of NCBI NO: 18405411 NR Description: expressed protein [Arabidopsis thaliana]
  misc_feature (1)..(103): Homolog of NCBI NO: 18410530 NR Description: expressed protein [Arabidopsis thaliana]
  misc_feature (1)..(145): Homolog of NCBI NO: 34908968 NR Description: P0003D09.21 [Oryza sativa (japonica
  misc_feature (10)..(163): Homolog of NCBI NO: 34906008 NR Description: putative RING-H2 finger protein RHC2a
  misc_feature (1)..(211): Homolog of NCBI NO: 34902106 NR Description: unknown protein [Oryza sativa (japonica
  misc_feature (1)..(232): Homolog of NCBI NO: 18405141 NR Description: RING-H2 finger protein (RHC2a) [Arabidopsis
  misc_feature (1)..(223): Homolog of NCBI NO: 15232595 NR Description: expressed protein [Arabidopsis thaliana]
  misc_feature (1)..(224): Homolog of NCBI NO: 18424254 NR Description: expressed protein [Arabidopsis thaliana]
  misc_feature (1)..(224): Homolog of NCBI NO: 8885559 NR Description: emb|CAB62332.1~gene_id:F2O15.22~strong similarity
  misc_feature (1)..(234): Homolog of NCBI NO: 14719329 NR Description: putative RING-H2 finger protein [Oryza sativa]
MSELLLGSGFDKLLEQFAQIEMNGFGRPENPPASKAAIESMPTVEIGETHVETEAHCAVCKEAFELHAEARELPCKHIYHSDCILPWLSMRNSCPVCRHELPSDLETRVPSQIDEETIGLTIWRLPGGGFAVGRFSGGRRTGESHFPVVYTEMDGGLNTNGGAPRRISRSVRSNRVRESRGFGRVISNFFSFFGRIGSRNSSSGHGSVSRSRSHVSSIFNRSSRRHSRTWVMDD

SEQ ID NO: 53693 - DNA, 1561 bp, Glycine max
  misc_feature (1)..(1561): Ceres Seq. ID no. 15174583
aggtcatggatgtgttgttgttgttattattatgtgttctcttggttggtttgccaaacctggctatagtagagagtcgcagggctcccgttctggactactttgagtattgtgctatgagctgcagagcttacagtgcctcgttggaagaatttggaggggttggtgatggaacaactttgaacactaaagcctttcaggctgccatagagaatctgagtcagtatgcagcaagtggtggttctcaactttatgttcccccaggaaaatggttaactggcagcttcaatctcaccagccatttcactttattcctacacaaggatgctgtaattcttgcctctcaggatgagaatgactggccagtgattgatcccttgccatcttatggtagagggagggacacacaaggtggaaggtttagcagcctgatttttggaaccaacctcactgatgtaatcataactggggacaatggcacaatagatggacaaggtgatctgtggtggcaaaaattccacaagggtgagctcaagtacacccgtccttacctggttgaaattatgtactcagataatgttcagatatccaatctcactttggttaattctccatcatggaatgtccatcctatatacagcagcaacgttgttgttcaaggaatcacaattcttgctcctgtgacatccccaaatacagatggaatcaacccggattcttgcacagacacacgaattgaggactgttacattgtatccggggatgactgtgttgctgtgaagagtggttgggatgagtatggtatagcttatggaatgccaacaaagcagcttgtaatcagaagactcacttgtatttctccattcagtgctgcgattgctttagggagtgaaatgtctggtgggattcaggatatgagggctgaggacattgtagccatcaatacagaatcaggggtcaggatcaaaactgctgtaggaagaggaggctatgtcaaggacatatttgttagaagaatgaccatgaaaaccatgaaatgggcattttggatgacaggaaattacgggtctcatgctgatgacaactatgatcctaatgcacttcctgtgattcagaacattaattatcgcgatatggttgctgagaatgtcactatggctgcaaggttggagggtatatctggggaccccttcacaggtatatgcatatccaatgtaaccattcaactggcaaagaaggctaaaaaagttccatggacttgcactgatattgctgggatttcaagtgatgtgactcctgcgccttgtgatctgttgcctgaccaaggagaagagaagattggggcatgcaccttcccagaagaaagtttgcccatcgaagatatcaaggttcaaacgtgcacttacagaaggaacttatgatgatagtgtaaaaggaatgactaagttcaagggaacaatccaaagcaatgtaatacttcaaaaattgtatttaaaatagtgtacttgtaaagactctgaacaaggcaatgacaacaatgatacagaaatgagtctataac

SEQ ID NO: 53694 - protein, 472 aa, Glycine max
  peptide (1)..(472): Ceres Seq. ID no. 15174584
  misc_feature (79)..(435): Pfam Name: Glycosyl hydrolases family 28 Pfam Description: Glycosyl hydrolases family 28
  misc_feature (79)..(458): Homolog of NCBI NO: 34393209 NR Description: putative polygalacturonase
  misc_feature (8)..(447): Homolog of NCBI NO: 11263971 NR Description: hypothetical protein T17J13.70 - Arabidopsis
  misc_feature (8)..(447): Homolog of NCBI NO: 18412253 NR Description: polygalacturonase, putative [Arabidopsis
  misc_feature (9)..(446): Homolog of NCBI NO: 40714685 NR Description: putative polygalacturonase
  misc_feature (11)..(467): Homolog of NCBI NO: 15224072 NR Description: polygalacturonase, putative [Arabidopsis
  misc_feature (6)..(466): Homolog of NCBI NO: 15229058 NR Description: polygalacturonase, putative [Arabidopsis
  misc_feature (6)..(468): Homolog of NCBI NO: 34897760 NR Description: ESTs AU029388(E30287),D49277(S16474) correspond a region of the predicted gene.~Similar to Arabidopsis thaliana
  misc_feature (8)..(469): Homolog of NCBI NO: 15233124 NR Description: polygalacturonase, putative [Arabidopsis
  misc_feature (34)..(472): Homolog of NCBI NO: 15236514 NR Description: polygalacturonase, putative [Arabidopsis
  misc_feature (4)..(472): Homolog of NCBI NO: 30692538 NR Description: polygalacturonase-like protein [Fragaria x
VMDVLLLLLLCVLLVGLPNLAIVESRRAPVLDYFEYCAMSCRAYSASLEEFGGVGDGTTLNTKAFQAAIENLSQYAASGGSQLYVPPGKWLTGSFNLTSHFTLFLHKDAVILASQDENDWPVIDPLPSYGRGRDTQGGRFSSLIFGTNLTDVIITGDNGTIDGQGDLWWQKFHKGELKYTRPYLVEIMYSDNVQISNLTLVNSPSWNVHPIYSSNVVVQGITILAPVTSPNTDGINPDSCTDTRIEDCYIVSGDDCVAVKSGWDEYGIAYGMPTKQLVIRRLTCISPFSAAIALGSEMSGGIQDMRAEDIVAINTESGVRIKTAVGRGGYVKDIFVRRMTMKTMKWAFWMTGNYGSHADDNYDPNALPVIQNINYRDMVAENVTMAARLEGISGDPFTGICISNVTIQLAKKAKKVPWTCTDIAGISSDVTPAPCDLLPDQGEEKIGACTFPEESLPIEDIKVQTCTYRRNL

SEQ ID NO: 53695 - protein, 471 aa, Glycine max
  peptide (1)..(471): Ceres Seq. ID no. 15174585
  misc_feature (78)..(434): Pfam Name: Glycosyl hydrolases family 28 Pfam Description: Glycosyl hydrolases family 28
  misc_feature (78)..(457): Homolog of NCBI NO: 34393209 NR Description: putative polygalacturonase
  misc_feature (7)..(446): Homolog of NCBI NO: 11263971 NR Description: hypothetical protein T17J13.70 - Arabidopsis
  misc_feature (7)..(446): Homolog of NCBI NO: 18412253 NR Description: polygalacturonase, putative [Arabidopsis
  misc_feature (8)..(445): Homolog of NCBI NO: 40714685 NR Description: putative polygalacturonase
  misc_feature (10)..(466): Homolog of NCBI NO: 15224072 NR Description: polygalacturonase, putative [Arabidopsis
  misc_feature (5)..(465): Homolog of NCBI NO: 15229058 NR Description: polygalacturonase, putative [Arabidopsis
  misc_feature (5)..(467): Homolog of NCBI NO: 34897760 NR Description: ESTs AU029388(E30287),D49277(S16474) correspond a region of the predicted gene.~Similar to Arabidopsis thaliana
  misc_feature (7)..(468): Homolog of NCBI NO: 15233124 NR Description: polygalacturonase, putative [Arabidopsis
  misc_feature (33)..(471): Homolog of NCBI NO: 15236514 NR Description: polygalacturonase, putative [Arabidopsis
  misc_feature (3)..(471): Homolog of NCBI NO: 30692538 NR Description: polygalacturonase-like protein [Fragaria x
MDVLLLLLLCVLLVGLPNLAIVESRRAPVLDYFEYCAMSCRAYSASLEEFGGVGDGTTLNTKAFQAAIENLSQYAASGGSQLYVPPGKWLTGSFNLTSHFTLFLHKDAVILASQDENDWPVIDPLPSYGRGRDTQGGRFSSLIFGTNLTDVIITGDNGTIDGQGDLWWQKFHKGELKYTRPYLVEIMYSDNVQISNLTLVNSPSWNVHPIYSSNVVVQGITILAPVTSPNTDGINPDSCTDTRIEDCYIVSGDDCVAVKSGWDEYGIAYGMPTKQLVIRRLTCISPFSAAIALGSEMSGGIQDMRAEDIVAINTESGVRIKTAVGRGGYVKDIFVRRMTMKTMKWAFWMTGNYGSHADDNYDPNALPVIQNINYRDMVAENVTMAARLEGISGDPFTGICISNVTIQLAKKAKKVPWTCTDIAGISSDVTPAPCDLLPDQGEEKIGACTFPEESLPIEDIKVQTCTYRRNL

SEQ ID NO: 53696 - protein, 434 aa, Glycine max
  peptide (1)..(434): Ceres Seq. ID no. 15174586
  misc_feature (41)..(397): Pfam Name: Glycosyl hydrolases family 28 Pfam Description: Glycosyl hydrolases family 28
  misc_feature (41)..(420): Homolog of NCBI NO: 34393209 NR Description: putative polygalacturonase
  misc_feature (1)..(409): Homolog of NCBI NO: 11263971 NR Description: hypothetical protein T17J13.70 - Arabidopsis
  misc_feature (1)..(409): Homolog of NCBI NO: 18412253 NR Description: polygalacturonase, putative [Arabidopsis
  misc_feature (1)..(408): Homolog of NCBI NO: 40714685 NR Description: putative polygalacturonase
  misc_feature (1)..(429): Homolog of NCBI NO: 15224072 NR Description: polygalacturonase, putative [Arabidopsis
  misc_feature (1)..(428): Homolog of NCBI NO: 15229058 NR Description: polygalacturonase, putative [Arabidopsis
  misc_feature (1)..(430): Homolog of NCBI NO: 34897760 NR Description: ESTs AU029388(E30287),D49277(S16474) correspond a region of the predicted gene.~Similar to Arabidopsis thaliana
  misc_feature (1)..(431): Homolog of NCBI NO: 15233124 NR Description: polygalacturonase, putative [Arabidopsis
  misc_feature (1)..(434): Homolog of NCBI NO: 15236514 NR Description: polygalacturonase, putative [Arabidopsis
  misc_feature (1)..(434): Homolog of NCBI NO: 30692538 NR Description: polygalacturonase-like protein [Fragaria x
MSCRAYSASLEEFGGVGDGTTLNTKAFQAAIENLSQYAASGGSQLYVPPGKWLTGSFNLTSHFTLFLHKDAVILASQDENDWPVIDPLPSYGRGRDTQGGRFSSLIFGTNLTDVIITGDNGTIDGQGDLWWQKFHKGELKYTRPYLVEIMYSDNVQISNLTLVNSPSWNVHPIYSSNVVVQGITILAPVTSPNTDGINPDSCTDTRIEDCYIVSGDDCVAVKSGWDEYGIAYGMPTKQLVIRRLTCISPFSAAIALGSEMSGGIQDMRAEDIVAINTESGVRIKTAVGRGGYVKDIFVRRMTMKTMKWAFWMTGNYGSHADDNYDPNALPVIQNINYRDMVAENVTMAARLEGISGDPFTGICISNVTIQLAKKAKKVPWTCTDIAGISSDVTPAPCDLLPDQGEEKIGACTFPEESLPIEDIKVQTCTYRRNL

SEQ ID NO: 53697 - DNA, 1575 bp, Glycine max
  misc_feature (1)..(1575): Ceres Seq. ID no. 15176440
gatacacaagaatctcacccccacagtttctggcaccaacatggatcaagagaccgaaccacaacctctgacctcaaagatctcaacagttgtaccagcaaccccgcgaggcgacgaggacggcgcgtaccacctcagcaacatggacctgctcatgaagctgcactacatcagagccgtttatttcttcatcaacgacgcagcgcaagggctctcgatttatgacctcaagaaacccatgttcccgctcctcgaccaggtcgtgcaactctcgggtcggatccgggtttctgaatcgggtcggcccttcttgaagtgcaacgatgctggtgttcgcatcgctgagtaccaccacgaccacacccttggggagtggtttcagaaaaatgggtgctcccttcaaggtctcgtccatgatcatgttcttggccctgaccttggcttctctcctttggtttttgtcaagttcacttggttcaaatgtggagggctctctctaggactcagctggtcccatgttctaggagacgctttttcagccttcagcttcatcaccaagtggagtcaaatactggcgggtcacgcgccgccaaaaatccttccaatgtcaccaactctcaaagaaatccaaaccccacacaataataattcggttaatgcgaataatgggaatcacttttctgtcaaaacagccacaaccatagaagaactttggctcgctacaaacggcataaaaatggttactcacactttccacgtcactgccaaacaacttaaccgtttggtgtcatccacgttcttttcatgtgaccaaaacaaagccaccaaaacctcgtatttcgagattctttcggcgttggtgtggaaacacattgctggcatgagggaagacaccgagccaaaggttgtaacaatttgcacacgtggcatggctaatatcgaattccccaccaatggtttggtgttgagcgttgttgaagccaacgtggcagttggacaatctgacgtgtccgatttggcgaagctgattggcgaggaaaaaagggttgagaatgttgttgtggaaaagttagtggaagagagccaagggaaaggggattttgtggtttatggggcgaatttgacgtttgtggatttggaagaaggtgacatgtacgaggttgtgctgaatggacacaaaccggtcgtgacgaattgcagcatccatggagtgggtgatcaaggtgttgttttggtgcttccgggacttgaagatgaagaaaatgggaggaatattggaagaatggtgactgtttctttgcctgaaaaagaagttgaccagctcaaagagaagctgagaggagaatggggtcctgagtcacttccattctgatagtccaaagcgtatcaactcactgctttcataagtgcaattacgagaaaattaatagctagttaagattgtgaggcatgcaaaatgataataacattattgataaaatgttataagttgattttgtaaagtgtacttttatccctttaaataaattttatggagtgcatgtttgatttgatgttagagaattgattttaaat

SEQ ID NO: 53698 - protein, 456 aa, Glycine max
  peptide (1)..(456): Ceres Seq. ID no. 15176441
  misc_feature (22)..(445): Pfam Name: Transferase family Pfam Description: Transferase family
  misc_feature (26)..(155): Homolog of NCBI NO: 38568009 NR Description: OSJNBa0070C17.1 [Oryza sativa (japonica
  misc_feature (164)..(445): Homolog of NCBI NO: 38568010 NR Description: OSJNBa0070C17.2 [Oryza sativa (japonica
  misc_feature (227)..(446): Homolog of NCBI NO: 18403923 NR Description: transferase family [Arabidopsis thaliana]
  misc_feature (203)..(446): Homolog of NCBI NO: 21593424 NR Description: fatty acid elongase-like protein (cer2-like)
  misc_feature (26)..(354): Homolog of NCBI NO: 2130139 NR Description: hypothetical protein - maize
  misc_feature (16)..(360): Homolog of NCBI NO: 18403923 NR Description: transferase family [Arabidopsis thaliana]
  misc_feature (16)..(360): Homolog of NCBI NO: 21593424 NR Description: fatty acid elongase-like protein (cer2-like)
  misc_feature (26)..(414): Homolog of NCBI NO: 38345799 NR Description: OSJNBa0085I10.16 [Oryza sativa (japonica
  misc_feature (11)..(442): Homolog of NCBI NO: 15236357 NR Description: transferase family [Arabidopsis thaliana]
  misc_feature (19)..(445): Homolog of NCBI NO: 15233851 NR Description: CER2 [Arabidopsis thaliana]
IHKNLTPTVSGTNMDQETEPQPLTSKISTVVPATPRGDEDGAYHLSNMDLLMKLHYIRAVYFFINDAAQGLSIYDLKKPMFPLLDQVVQLSGRIRVSESGRPFLKCNDAGVRIAEYHHDHTLGEWFQKNGCSLQGLVHDHVLGPDLGFSPLVFVKFTWFKCGGLSLGLSWSHVLGDAFSAFSFITKWSQILAGHAPPKILPMSPTLKEIQTPHNNNSVNANNGNHFSVKTATTIEELWLATNGIKMVTHTFHVTAKQLNRLVSSTFFSCDQNKATKTSYFEILSALVWKHIAGMREDTEPKVVTICTRGMANIEFPTNGLVLSVVEANVAVGQSDVSDLAKLIGEEKRVENVVVEKLVEESQGKGDFVVYGANLTFVDLEEGDMYEVVLNGHKPVVTNCSIHGVGDQGVVLVLPGLEDEENGRNIGRMVTVSLPEKEVDQLKEKLRGEWGPESLPF

SEQ ID NO: 53699 - protein, 443 aa, Glycine max
  peptide (1)..(443): Ceres Seq. ID no. 15176442
  misc_feature (9)..(432): Pfam Name: Transferase family Pfam Description: Transferase family
  misc_feature (13)..(142): Homolog of NCBI NO: 38568009 NR Description: OSJNBa0070C17.1 [Oryza sativa (japonica
  misc_feature (151)..(432): Homolog of NCBI NO: 38568010 NR Description: OSJNBa0070C17.2 [Oryza sativa (japonica
  misc_feature (214)..(433): Homolog of NCBI NO: 18403923 NR Description: transferase family [Arabidopsis thaliana]
  misc_feature (190)..(433): Homolog of NCBI NO: 21593424 NR Description: fatty acid elongase-like protein (cer2-like)
  misc_feature (13)..(341): Homolog of NCBI NO: 2130139 NR Description: hypothetical protein - maize
  misc_feature (3)..(347): Homolog of NCBI NO: 18403923 NR Description: transferase family [Arabidopsis thaliana]
  misc_feature (3)..(347): Homolog of NCBI NO: 21593424 NR Description: fatty acid elongase-like protein (cer2-like)
  misc_feature (13)..(401): Homolog of NCBI NO: 38345799 NR Description: OSJNBa0085I10.16 [Oryza sativa (japonica
  misc_feature (1)..(429): Homolog of NCBI NO: 15236357 NR Description: transferase family [Arabidopsis thaliana]
  misc_feature (6)..(432): Homolog of NCBI NO: 15233851 NR Description: CER2 [Arabidopsis thaliana]
MDQETEPQPLTSKISTVVPATPRGDEDGAYHLSNMDLLMKLHYIRAVYFFINDAAQGLSIYDLKKPMFPLLDQVVQLSGRIRVSESGRPFLKCNDAGVRIAEYHHDHTLGEWFQKNGCSLQGLVHDHVLGPDLGFSPLVFVKFTWFKCGGLSLGLSWSHVLGDAFSAFSFITKWSQILAGHAPPKILPMSPTLKEIQTPHNNNSVNANNGNHFSVKTATTIEELWLATNGIKMVTHTFHVTAKQLNRLVSSTFFSCDQNKATKTSYFEILSALVWKHIAGMREDTEPKVVTICTRGMANIEFPTNGLVLSVVEANVAVGQSDVSDLAKLIGEEKRVENVVVEKLVEESQGKGDFVVYGANLTFVDLEEGDMYEVVLNGHKPVVTNCSIHGVGDQGVVLVLPGLEDEENGRNIGRMVTVSLPEKEVDQLKEKLRGEWGPESLPF

SEQ ID NO: 53700 - protein, 409 aa, Glycine max
  peptide (1)..(409): Ceres Seq. ID no. 15176443
  misc_feature (1)..(398): Pfam Name: Transferase family Pfam Description: Transferase family
  misc_feature (1)..(108): Homolog of NCBI NO: 38568009 NR Description: OSJNBa0070C17.1 [Oryza sativa (japonica
  misc_feature (117)..(398): Homolog of NCBI NO: 38568010 NR Description: OSJNBa0070C17.2 [Oryza sativa (japonica
  misc_feature (180)..(399): Homolog of NCBI NO: 18403923 NR Description: transferase family [Arabidopsis thaliana]
  misc_feature (156)..(399): Homolog of NCBI NO: 21593424 NR Description: fatty acid elongase-like protein (cer2-like)
  misc_feature (1)..(307): Homolog of NCBI NO: 2130139 NR Description: hypothetical protein - maize
  misc_feature (1)..(313): Homolog of NCBI NO: 18403923 NR Description: transferase family [Arabidopsis thaliana]
  misc_feature (1)..(313): Homolog of NCBI NO: 21593424 NR Description: fatty acid elongase-like protein (cer2-like)
  misc_feature (1)..(367): Homolog of NCBI NO: 38345799 NR Description: OSJNBa0085I10.16 [Oryza sativa (japonica
  misc_feature (1)..(395): Homolog of NCBI NO: 15236357 NR Description: transferase family [Arabidopsis thaliana]
  misc_feature (1)..(398): Homolog of NCBI NO: 15233851 NR Description: CER2 [Arabidopsis thaliana]
MDLLMKLHYIRAVYFFINDAAQGLSIYDLKKPMFPLLDQVVQLSGRIRVSESGRPFLKCNDAGVRIAEYHHDHTLGEWFQKNGCSLQGLVHDHVLGPDLGFSPLVFVKFTWFKCGGLSLGLSWSHVLGDAFSAFSFITKWSQILAGHAPPKILPMSPTLKEIQTPHNNNSVNANNGNHFSVKTATTIEELWLATNGIKMVTHTFHVTAKQLNRLVSSTFFSCDQNKATKTSYFEILSALVWKHIAGMREDTEPKVVTICTRGMANIEFPTNGLVLSVVEANVAVGQSDVSDLAKLIGEEKRVENVVVEKLVEESQGKGDFVVYGANLTFVDLEEGDMYEVVLNGHKPVVTNCSIHGVGDQGVVLVLPGLEDEENGRNIGRMVTVSLPEKEVDQLKEKLRGEWGPESLPF

SEQ ID NO: 53701 - DNA, 1748 bp, Glycine max
  misc_feature (1)..(1748): Ceres Seq. ID no. 14304910
aataaaaaaacaaagcacacgctccacattggcatcgacttaatgcgtggtttccctcgccggagatcggtggaaaaccggtcatcttcccggcggagaccctccatcttctacggcgccggcaattcggaatctatggacgccgacgacttcgccgacgtctttggtggcccaccgcgaactctccttgcgcacaaattctcgagctctggttctttttacgaggaagttttccgaccaccagagttcacgttcccggcacctaaggatggccggagcttgccggtgttcaggattccggcgaggaatgagggattttacagcgacatattcaggtcggacgatgaccggagatcgagagagcggtcaaggtcactgtcgaaagagaattcgtcgtcggcgatgagttcggaggagttaagccctcgccggccggcgattggagatgacgtggcactttctggttttgcttcaaagctaaggccaatcaatattccatggagatggaatccatccactgtgatgcctgaggctgaggaatacacaagtaaacttggggtgcccctttttgcatgcaaggatcagtcatttgaaattcagcatcaggacaatgaatacaaggagaacttcagaagcccccatttaggatcctcaagaagagcctcatccccagaaaccattagtcttgaatccaattcatatcaaagcaccaaagtgttcactgatgactgggagctcaattccccattttctgtcgtctcttcgctttatcaagaacctgaggcaaaattttctgtgcatgatcgtgtgctttcagaccaaattatagaagatgatgatgacgacgacgacgacgatattatgagctcctatgtcattgaactcaactccaacctcagaagggaagagtgtggagaatcagccattgatgaagcaattgcatgggccaaagagaagtttcaatcgcaaagctctgatgaagaatcaagcataagaaacgatggcaaagagcaaactgttggaataggaggctctgatgcaagtgaataccatgacaatggaattggaatagttcaaactcaggagaagcaacagacagaaacagagaagttagacagagatataagattgtggtcatctggcaaggaaacagatattaggctactactttcaacattacatcatattctaaggcctgagagtggctggtatgctattcctcctaagagtctattagaaagctcacaggtgaagaaggcttatcagaaagcaaggttatgcctgcacccagacaaactgcagcaaagaggagcaacactccttcagaagtatgtagcagagaaggctttctcaattcttcaggatgcatgggctgcattcatttccatagatgtttccttctagccagtggatgactctaatcttgataactcagttttgtcttgagatttgtggacaaacaccaagcttgacattcgaaatgtcgggagtgtttgttgttgacaagcagcatatatagctaaatacatgaaacttgaacacatcagctcttttgtacaaatagtttactgatggatctgctgttctatttatgtttgtatcataacttcataagctgtttgttgcttaggtaggtattgtttctgatgtagttaacagaaggtaatttgattggccttagtatttgatttgtatatgatatgaaatggaaacaagagttagtttgtatgtgattcatatggaaaccc

SEQ ID NO: 53702 - protein, 467 aa, Glycine max
  peptide (1)..(467): Ceres Seq. ID no. 14304911
  misc_feature (392)..(462): Pfam Name: DnaJ domain Pfam Description: DnaJ domain
  misc_feature (358)..(460): Homolog of NCBI NO: 18410769 NR Description: expressed protein [Arabidopsis thaliana]
  misc_feature (362)..(462): Homolog of NCBI NO: 15235483 NR Description: auxilin-related [Arabidopsis thaliana]
  misc_feature (325)..(455): Homolog of NCBI NO: 34915026 NR Description: P0458A05.18 [Oryza sativa (japonica
  misc_feature (325)..(462): Homolog of NCBI NO: 22328585 NR Description: auxilin-related [Arabidopsis thaliana]
  misc_feature (325)..(466): Homolog of NCBI NO: 15219059 NR Description: auxilin-like protein [Arabidopsis thaliana]
  misc_feature (358)..(460): Homolog of NCBI NO: 15221008 NR Description: auxilin-related [Arabidopsis thaliana]
  misc_feature (358)..(460): Homolog of NCBI NO: 10120451 NR Description: Unknown protein - partial protein [Arabidopsis
  misc_feature (361)..(462): Homolog of NCBI NO: 5091607 NR Description: Contains similarity to gb|CAB16841 trichohyalin
  misc_feature (358)..(460): Homolog of NCBI NO: 11357186 NR Description: auxilin-like protein [imported] - Arabidopsis
  misc_feature (46)..(462): Homolog of NCBI NO: 15220709 NR Description: expressed protein [Arabidopsis thaliana]
NKKTKHTLHIGIDLMRGFPRRRSVENRSSSRRRPSIFYGAGNSESMDADDFADVFGGPPRTLLAHKFSSSGSFYEEVFRPPEFTFPAPKDGRSLPVFRIPARNEGFYSDIFRSDDDRRSRERSRSLSKENSSSAMSSEELSPRRPAIGDDVALSGFASKLRPINIPWRWNPSTVMPEAEEYTSKLGVPLFACKDQSFEIQHQDNEYKENFRSPHLGSSRRASSPETISLESNSYQSTKVFTDDWELNSPFSVVSSLYQEPEAKFSVHDRVLSDQIIEDDDDDDDDDIMSSYVIELNSNLRREECGESAIDEAIAWAKEKFQSQSSDEESSIRNDGKEQTVGIGGSDASEYHDNGIGIVQTQEKQQTETEKLDRDIRLWSSGKETDIRLLLSTLHHILRPESGWYAIPPKSLLESSQVKKAYQKARLCLHPDKLQQRGATLLQKYVAEKAFSILQDAWAAFISIDVSF

SEQ ID NO: 53703 - protein, 453 aa, Glycine max
  peptide (1)..(453): Ceres Seq. ID no. 14304912
  misc_feature (378)..(448): Pfam Name: DnaJ domain Pfam Description: DnaJ domain
  misc_feature (344)..(446): Homolog of NCBI NO: 18410769 NR Description: expressed protein [Arabidopsis thaliana]
  misc_feature (348)..(448): Homolog of NCBI NO: 15235483 NR Description: auxilin-related [Arabidopsis thaliana]
  misc_feature (311)..(441): Homolog of NCBI NO: 34915026 NR Description: P0458A05.18 [Oryza sativa (japonica
  misc_feature (311)..(448): Homolog of NCBI NO: 22328585 NR Description: auxilin-related [Arabidopsis thaliana]
  misc_feature (311)..(452): Homolog of NCBI NO: 15219059 NR Description: auxilin-like protein [Arabidopsis thaliana]
  misc_feature (344)..(446): Homolog of NCBI NO: 15221008 NR Description: auxilin-related [Arabidopsis thaliana]
  misc_feature (344)..(446): Homolog of NCBI NO: 10120451 NR Description: Unknown protein - partial protein [Arabidopsis
  misc_feature (347)..(448): Homolog of NCBI NO: 5091607 NR Description: Contains similarity to gb|CAB16841 trichohyalin
  misc_feature (344)..(446): Homolog of NCBI NO: 11357186 NR Description: auxilin-like protein [imported] - Arabidopsis
  misc_feature (32)..(448): Homolog of NCBI NO: 15220709 NR Description: expressed protein [Arabidopsis thaliana]
MRGFPRRRSVENRSSSRRRPSIFYGAGNSESMDADDFADVFGGPPRTLLAHKFSSSGSFYEEVFRPPEFTFPAPKDGRSLPVFRIPARNEGFYSDIFRSDDDRRSRERSRSLSKENSSSAMSSEELSPRRPAIGDDVALSGFASKLRPINIPWRWNPSTVMPEAEEYTSKLGVPLFACKDQSFEIQHQDNEYKENFRSPHLGSSRRASSPETISLESNSYQSTKVFTDDWELNSPFSVVSSLYQEPEAKFSVHDRVLSDQIIEDDDDDDDDDIMSSYVIELNSNLRREECGESAIDEAIAWAKEKFQSQSSDEESSIRNDGKEQTVGIGGSDASEYHDNGIGIVQTQEKQQTETEKLDRDIRLWSSGKETDIRLLLSTLHHILRPESGWYAIPPKSLLESSQVKKAYQKARLCLHPDKLQQRGATLLQKYVAEKAFSILQDAWAAFISIDVSF

SEQ ID NO: 53704 - protein, 422 aa, Glycine max
  peptide (1)..(422): Ceres Seq. ID no. 14304913
  misc_feature (347)..(417): Pfam Name: DnaJ domain Pfam Description: DnaJ domain
  misc_feature (313)..(415): Homolog of NCBI NO: 18410769 NR Description: expressed protein [Arabidopsis thaliana]
  misc_feature (317)..(417): Homolog of NCBI NO: 15235483 NR Description: auxilin-related [Arabidopsis thaliana]
  misc_feature (280)..(410): Homolog of NCBI NO: 34915026 NR Description: P0458A05.18 [Oryza sativa (japonica
  misc_feature (280)..(417): Homolog of NCBI NO: 22328585 NR Description: auxilin-related [Arabidopsis thaliana]
  misc_feature (280)..(421): Homolog of NCBI NO: 15219059 NR Description: auxilin-like protein [Arabidopsis thaliana]
  misc_feature (313)..(415): Homolog of NCBI NO: 15221008 NR Description: auxilin-related [Arabidopsis thaliana]
  misc_feature (313)..(415): Homolog of NCBI NO: 10120451 NR Description: Unknown protein - partial protein [Arabidopsis
  misc_feature (316)..(417): Homolog of NCBI NO: 5091607 NR Description: Contains similarity to gb|CAB16841 trichohyalin
  misc_feature (313)..(415): Homolog of NCBI NO: 11357186 NR Description: auxilin-like protein [imported] - Arabidopsis
  misc_feature (1)..(417): Homolog of NCBI NO: 15220709 NR Description: expressed protein [Arabidopsis thaliana]
MDADDFADVFGGPPRTLLAHKFSSSGSFYEEVFRPPEFTFPAPKDGRSLPVFRIPARNEGFYSDIFRSDDDRRSRERSRSLSKENSSSAMSSEELSPRRPAIGDDVALSGFASKLRPINIPWRWNPSTVMPEAEEYTSKLGVPLFACKDQSFEIQHQDNEYKENFRSPHLGSSRRASSPETISLESNSYQSTKVFTDDWELNSPFSVVSSLYQEPEAKFSVHDRVLSDQIIEDDDDDDDDDIMSSYVIELNSNLRREECGESAIDEAIAWAKEKFQSQSSDEESSIRNDGKEQTVGIGGSDASEYHDNGIGIVQTQEKQQTETEKLDRDIRLWSSGKETDIRLLLSTLHHILRPESGWYAIPPKSLLESSQVKKAYQKARLCLHPDKLQQRGATLLQKYVAEKAFSILQDAWAAFISIDVSF

SEQ ID NO: 53705 - DNA, 1495 bp, Glycine max
  misc_feature (1)..(1495): Ceres Seq. ID no. 14311055
ggagaaaccattgattcaagttaacaacagagaagtagctatgccgaagccttgtgacttgaaaatcaacattgatggtcagcagatattccttttgaaagagaaggttatatcaaaatactgtggagggttgaagaagatcttgaatcaccaaaagagaagatgtcatgtgaaggagttggggattagaatcaatgatttccctggaggaccaaaagggtttgagctagtttcaatgttctgttacaacaatggaaaaatccaaatcactgtggctaatgtgtctctcctccactgttgtgctgtttatcttggaatgactgaggaggcattcagcaacaatctcttgcaacaaacagaaacttttcttgagagaatctattactggaaatggaatgacatacttgcaagtctcaagagttgccagctgttttatacatatgcagatggctatggtctcttggagaagatcattagtgccttagcaaagtttgtccagaattcagattcaaacctcctcacttcctcgccttcggcatcatcatggtcatcttcaccagaaagcaactttgccaagagattctctttctcatccaagaaaactaccccagaaaaaatcaagtcatgtttgccgcgcaaggcatggtggtttgatgatttggcaactttaccaccaacgatcattgagaaactcttccagactattggagcatacaaagctgataacaaggatttaatcctcacaagatttctgttgcattatctgaaaatagctactcaaaccaaaatggttaattgcagaaacagcaatgagtatgctgctcttgcagaaacagctgcttatggggtcatatctgttggtaaagagacattttcttgcagaggccttttttgggtactaaggattgtatctaagtttgggttgagtagagactgcagaactgaattggagaaattgattggtggaatgcttgagcaagctacactggatgatcttctagtctctgggcatgacatgggagtttattatgatgttaatttggtgataagattggttagattatttgttgatatcaatggttctgatggactgtctttacagaaagtgaaaagggttggtagattaattgacaagtatttgagagagatatctcctgaccagaacctcaagatctctaaatttcttggagtagcagaatgcttgccagactctgcaagggattgctatgatggggtctacaaggccattgacatctatcttgaggtgaataacacatacccttcttccattgcttttcatatgaatcatcttcctaaagaaaaggaaatggaaaagagcaaatagattacaggacttgttttgcttgagagagcaattttttgtttttagtttagtttttttttatgaataattacaaaaatgttactttgttttgattttgttttctgacactaaaaatttgtaaaaaaaacaataaagaacactgtttatttt

SEQ ID NO: 53706 - protein, 447 aa, Glycine max
  peptide (1)..(447): Ceres Seq. ID no. 14311056
  misc_feature (215)..(433): Pfam Name: NPH3 family Pfam Description: NPH3 family
  misc_feature (283)..(365): Homolog of NCBI NO: 6224712 NR Description: non-phototropic hypocotyl 3 [Arabidopsis thaliana]
  misc_feature (12)..(254): Homolog of NCBI NO: 18424815 NR Description: non-phototropic hypocotyl 3 (NPH3)/phototropic
  misc_feature (12)..(254): Homolog of NCBI NO: 6224712 NR Description: non-phototropic hypocotyl 3 [Arabidopsis thaliana]
  misc_feature (114)..(423): Homolog of NCBI NO: 33146528 NR Description: putative phototropic response protein family
  misc_feature (18)..(423): Homolog of NCBI NO: 34898504 NR Description: OJ1612_A04.8 [Oryza sativa (japonica
  misc_feature (45)..(421): Homolog of NCBI NO: 15230974 NR Description: hypothetical protein [Arabidopsis thaliana]
  misc_feature (51)..(433): Homolog of NCBI NO: 25405364 NR Description: hypothetical protein F14I3.11 [imported] -
  misc_feature (18)..(421): Homolog of NCBI NO: 11994196 NR Description: gb|AAD50054.1~gene_id:MPN9.9~strong similarity to
  misc_feature (19)..(447): Homolog of NCBI NO: 22330150 NR Description: expressed protein [Arabidopsis thaliana]
  misc_feature (14)..(425): Homolog of NCBI NO: 38344919 NR Description: OSJNBa0018M05.10 [Oryza sativa (japonica
EKPLIQVNNREVAMPKPCDLKINIDGQQIFLLKEKVISKYCGGLKKILNHQKRRCHVKELGIRINDFPGGPKGFELVSMFCYNNGKIQITVANVSLLHCCAVYLGMTEEAFSNNLLQQTETFLERIYYWKWNDILASLKSCQLFYTYADGYGLLEKIISALAKFVQNSDSNLLTSSPSASSWSSSPESNFAKRFSFSSKKTTPEKIKSCLPRKAWWFDDLATLPPTIIEKLFQTIGAYKADNKDLILTRFLLHYLKIATQTKMVNCRNSNEYAALAETAAYGVISVGKETFSCRGLFWVLRIVSKFGLSRDCRTELEKLIGGMLEQATLDDLLVSGHDMGVYYDVNLVIRLVRLFVDINGSDGLSLQKVKRVGRLIDKYLREISPDQNLKISKFLGVAECLPDSARDCYDGVYKAIDIYLEVNNTYPSSIAFHMNHLPKEKEMEKSK

SEQ ID NO: 53707 - protein, 434 aa, Glycine max
  peptide (1)..(434): Ceres Seq. ID no. 14311057
  misc_feature (202)..(420): Pfam Name: NPH3 family Pfam Description: NPH3 family
  misc_feature (270)..(352): Homolog of NCBI NO: 6224712 NR Description: non-phototropic hypocotyl 3 [Arabidopsis thaliana]
  misc_feature (1)..(241): Homolog of NCBI NO: 18424815 NR Description: non-phototropic hypocotyl 3 (NPH3)/phototropic
  misc_feature (1)..(241): Homolog of NCBI NO: 6224712 NR Description: non-phototropic hypocotyl 3 [Arabidopsis thaliana]
  misc_feature (101)..(410): Homolog of NCBI NO: 33146528 NR Description: putative phototropic response protein family
  misc_feature (5)..(410): Homolog of NCBI NO: 34898504 NR Description: OJ1612_A04.8 [Oryza sativa (japonica
  misc_feature (32)..(408): Homolog of NCBI NO: 15230974 NR Description: hypothetical protein [Arabidopsis thaliana]
  misc_feature (38)..(420): Homolog of NCBI NO: 25405364 NR Description: hypothetical protein F14I3.11 [imported] -
  misc_feature (5)..(408): Homolog of NCBI NO: 11994196 NR Description: gb|AAD50054.1~gene_id:MPN9.9~strong similarity to
  misc_feature (6)..(434): Homolog of NCBI NO: 22330150 NR Description: expressed protein [Arabidopsis thaliana]
  misc_feature (1)..(412): Homolog of NCBI NO: 38344919 NR Description: OSJNBa0018M05.10 [Oryza sativa (japonica
MPKPCDLKINIDGQQIFLLKEKVISKYCGGLKKILNHQKRRCHVKELGIRINDFPGGPKGFELVSMFCYNNGKIQITVANVSLLHCCAVYLGMTEEAFSNNLLQQTETFLERIYYWKWNDILASLKSCQLFYTYADGYGLLEKIISALAKFVQNSDSNLLTSSPSASSWSSSPESNFAKRFSFSSKKTTPEKIKSCLPRKAWWFDDLATLPPTIIEKLFQTIGAYKADNKDLILTRFLLHYLKIATQTKMVNCRNSNEYAALAETAAYGVISVGKETFSCRGLFWVLRIVSKFGLSRDCRTELEKLIGGMLEQATLDDLLVSGHDMGVYYDVNLVIRLVRLFVDINGSDGLSLQKVKRVGRLIDKYLREISPDQNLKISKFLGVAECLPDSARDCYDGVYKAIDIYLEVNNTYPSSIAFHMNHLPKEKEMEKSK

SEQ ID NO: 53708 - protein, 369 aa, Glycine max
  peptide (1)..(369): Ceres Seq. ID no. 14311058
  misc_feature (137)..(355): Pfam Name: NPH3 family Pfam Description: NPH3 family
  misc_feature (205)..(287): Homolog of NCBI NO: 6224712 NR Description: non-phototropic hypocotyl 3 [Arabidopsis thaliana]
  misc_feature (1)..(176): Homolog of NCBI NO: 18424815 NR Description: non-phototropic hypocotyl 3 (NPH3)/phototropic
  misc_feature (1)..(176): Homolog of NCBI NO: 6224712 NR Description: non-phototropic hypocotyl 3 [Arabidopsis thaliana]
  misc_feature (36)..(345): Homolog of NCBI NO: 33146528 NR Description: putative phototropic response protein family
  misc_feature (1)..(345): Homolog of NCBI NO: 34898504 NR Description: OJ1612_A04.8 [Oryza sativa (japonica
  misc_feature (1)..(343): Homolog of NCBI NO: 15230974 NR Description: hypothetical protein [Arabidopsis thaliana]
  misc_feature (1)..(355): Homolog of NCBI NO: 25405364 NR Description: hypothetical protein F14I3.11 [imported] -
  misc_feature (1)..(343): Homolog of NCBI NO: 11994196 NR Description: gb|AAD50054.1~gene_id:MPN9.9~strong similarity to
  misc_feature (1)..(369): Homolog of NCBI NO: 22330150 NR Description: expressed protein [Arabidopsis thaliana]
  misc_feature (1)..(347): Homolog of NCBI NO: 38344919 NR Description: OSJNBa0018M05.10 [Oryza sativa (japonica
MFCYNNGKIQITVANVSLLHCCAVYLGMTEEAFSNNLLQQTETFLERIYYWKWNDILASLKSCQLFYTYADGYGLLEKIISALAKFVQNSDSNLLTSSPSASSWSSSPESNFAKRFSFSSKKTTPEKIKSCLPRKAWWFDDLATLPPTIIEKLFQTIGAYKADNKDLILTRFLLHYLKIATQTKMVNCRNSNEYAALAETAAYGVISVGKETFSCRGLFWVLRIVSKFGLSRDCRTELEKLIGGMLEQATLDDLLVSGHDMGVYYDVNLVIRLVRLFVDINGSDGLSLQKVKRVGRLIDKYLREISPDQNLKISKFLGVAECLPDSARDCYDGVYKAIDIYLEVNNTYPSSIAFHMNHLPKEKEMEKSK

SEQ ID NO: 53709 - DNA, 2167 bp, Glycine max
  misc_feature (1)..(2167): Ceres Seq. ID no. 14303959
aaattgcatcgtcgagccgaaacattcattcttcttgggaaattgctgttgcaactactaaatatgatgctgggagttcattgatacaaagtgatttggcatgctcatcaagtaaagttgggattcaatcacaacgagtggtacctgttgaaacagaagaacaagcatctgcctcttctccctctctttataatacatttggaagcaaatcagaggtgcccaaaaatgcttcctcccctaaaaagttgggaaataaagcatatatgtcaaatactgggaagaaaggtaggttgcaaacagtatcgtcatctacttctgtaaatgacaacagagttaacaaaccgccatgccatgcccctcgcactgttaaatcggtcatcaagaacaagaatctgagtaagaagaaacaaaaggaggattcaggttctgctttgcatggtcctacacccaatgaagtcaataagccagttcctggtacacctcggctaatttgtgagagatgtaggtgtgctttggaaaatacttgcgaagaaaaaaaccaagatattgtggcattggactctatcagtcctggagatggagtaaacttgagtaatgtacactctggttcaaataaacctggtttggtgtcaagtagtgttaataaaagcaaaacaggtgcaaaagtgaagaacaccaagttgaaagagcaaattgatttttcacaaagttcaaagagtagtcaaggtgagtacagtagtagtacaagtaccagtgatgagagcaacgtaagtggttcaagtcgtagcactaggcctcacatgtcaaaggatgtcaggtgggcagccatacgacatgctcaaatgcagcatggagtcttgggcttgagacacttcaatcttttaaagaaacttggttgtggagacattgggactgtatatcttgcggaactaattggcactagctgcctgtttgctattaaggtcatggacaatgaatttttggaaagaagagagaagatgcctagggctcaaactgagagagaaatattaaggatcctggatcacccttttcttcccacaatgtatgcacaatttacatcagataatctatcgtgtctggtcatggagtattgtccaggtggagatcttcatgttctacggcagaagcagcttggtagatatttctcggagccagcagcaaggttttatgttgctgaagttctccttgctttggagtacttgcacatgcttggagttgtttaccgtgatttgaaacccgaaaacattcttgttcgggaagatggccacattatgctcacagattttgatctgtccctgaggtgtgctgttaacccaacgcttctgaaatcatcttctgatgttgaccctgcaaaaatttcaggtctaagtgcacaagcaagttgcattgagccattttgcattgaaccatcttgtcaagttccatgcttcagcccaagattgctacccgctgctgcaaaagcaaggaaactaaaagttgatcttgcagcccaggtcagatcattgccacagcttgtggctgagcccactgatgcaagatcaaactcatttgttggcacacatgaatacttggctcctgagatcatcaaagaagagggacatggagctgcagttgactggtggacatttggtgtttttctctatgaacttttgtacggtagaacaccctttaaaggttcaaacaatgaagaaacattggccaacgtagtgttgcagggtcttcgattccccaagcacccaaatgttagtttccaagcaaaggatctgattagagggttgttggttaaagagcccgaaaaccgtttgggttcagagaaaggagctgctgagattaaacagcaccccttcttcgagggccttaactgggccttaattcgttgcgctgtccctccagaacttccagacttttatgattttggagtttcagacatggtgaacccacagggcaagggtgctaagtacttggagtgtaaagtaggagagcatgtagaattcgagttgttttaaagacattgctgtctatcaagaatggcattcatgttatggactcccatatttatggctccatatcggtgtcgagatgtaacttatacagttatatgtaagcctaaagccgaatagtctatgttgcaaattagttttgtatc

SEQ ID NO: 53710 - protein, 674 aa, Glycine max
  peptide (1)..(674): Ceres Seq. ID no. 14303960
  misc_feature (291)..(623): Pfam Name: Protein kinase domain Pfam Description: Protein kinase domain
  misc_feature (210)..(640): Homolog of NCBI NO: 7446383 NR Description: probable protein kinase PK1 - potato
  misc_feature (193)..(640): Homolog of NCBI NO: 1346057 NR Description: Protein kinase G11A
  misc_feature (189)..(640): Homolog of NCBI NO: 125568 NR Description: Protein kinase PVPK-1
  misc_feature (216)..(674): Homolog of NCBI NO: 15236802 NR Description: protein kinase, putative [Arabidopsis thaliana]
  misc_feature (202)..(640): Homolog of NCBI NO: 17064850 NR Description: protein kinase 5 [Arabidopsis thaliana]
  misc_feature (202)..(640): Homolog of NCBI NO: 15238798 NR Description: protein kinase, putative [Arabidopsis thaliana]
  misc_feature (171)..(674): Homolog of NCBI NO: 15242814 NR Description: protein kinase family [Arabidopsis thaliana]
  misc_feature (209)..(674): Homolog of NCBI NO: 30693719 NR Description: protein kinase (KIPK) [Arabidopsis thaliana]
  misc_feature (209)..(674): Homolog of NCBI NO: 7716430 NR Description: protein kinase KIPK [Arabidopsis thaliana]
  misc_feature (224)..(674): Homolog of NCBI NO: 15227639 NR Description: protein kinase, putative [Arabidopsis thaliana]
IASSSRNIHSSWEIAVATTKYDAGSSLIQSDLACSSSKVGIQSQRVVPVETEEQASASSPSLYNTFGSKSEVPKNASSPKKLGNKAYMSNTGKKGRLQTVSSSTSVNDNRVNKPPCHAPRTVKSVIKNKNLSKKKQKEDSGSALHGPTPNEVNKPVPGTPRLICERCRCALENTCEEKNQDIVALDSISPGDGVNLSNVHSGSNKPGLVSSSVNKSKTGAKVKNTKLKEQIDFSQSSKSSQGEYSSSTSTSDESNVSGSSRSTRPHMSKDVRWAAIRHAQMQHGVLGLRHFNLLKKLGCGDIGTVYLAELIGTSCLFAIKVMDNEFLERREKMPRAQTEREILRILDHPFLPTMYAQFTSDNLSCLVMEYCPGGDLHVLRQKQLGRYFSEPAARFYVAEVLLALEYLHMLGVVYRDLKPENILVREDGHIMLTDFDLSLRCAVNPTLLKSSSDVDPAKISGLSAQASCIEPFCIEPSCQVPCFSPRLLPAAAKARKLKVDLAAQVRSLPQLVAEPTDARSNSFVGTHEYLAPEIIKEEGHGAAVDWWTFGVFLYELLYGRTPFKGSNNEETLANVVLQGLRFPKHPNVSFQAKDLIRGLLVKEPENRLGSEKGAAEIKQHPFFEGLNWALIRCAVPPELPDFYDFGVSDMVNPQGKGAKYLECKVGEHVEFELF

SEQ ID NO: 53711 - protein, 587 aa, Glycine max
  peptide (1)..(587): Ceres Seq. ID no. 14303961
  misc_feature (204)..(536): Pfam Name: Protein kinase domain Pfam Description: Protein kinase domain
  misc_feature (123)..(553): Homolog of NCBI NO: 7446383 NR Description: probable protein kinase PK1 - potato
  misc_feature (106)..(553): Homolog of NCBI NO: 1346057 NR Description: Protein kinase G11A
  misc_feature (102)..(553): Homolog of NCBI NO: 125568 NR Description: Protein kinase PVPK-1
  misc_feature (129)..(587): Homolog of NCBI NO: 15236802 NR Description: protein kinase, putative [Arabidopsis thaliana]
  misc_feature (115)..(553): Homolog of NCBI NO: 17064850 NR Description: protein kinase 5 [Arabidopsis thaliana]
  misc_feature (115)..(553): Homolog of NCBI NO: 15238798 NR Description: protein kinase, putative [Arabidopsis thaliana]
  misc_feature (84)..(587): Homolog of NCBI NO: 15242814 NR Description: protein kinase family [Arabidopsis thaliana]
  misc_feature (122)..(587): Homolog of NCBI NO: 30693719 NR Description: protein kinase (KIPK) [Arabidopsis thaliana]
  misc_feature (122)..(587): Homolog of NCBI NO: 7716430 NR Description: protein kinase KIPK [Arabidopsis thaliana]
  misc_feature (137)..(587): Homolog of NCBI NO: 15227639 NR Description: protein kinase, putative [Arabidopsis thaliana]
MSNTGKKGRLQTVSSSTSVNDNRVNKPPCHAPRTVKSVIKNKNLSKKKQKEDSGSALHGPTPNEVNKPVPGTPRLICERCRCALENTCEEKNQDIVALDSISPGDGVNLSNVHSGSNKPGLVSSSVNKSKTGAKVKNTKLKEQIDFSQSSKSSQGEYSSSTSTSDESNVSGSSRSTRPHMSKDVRWAAIRHAQMQHGVLGLRHFNLLKKLGCGDIGTVYLAELIGTSCLFAIKVMDNEFLERREKMPRAQTEREILRILDHPFLPTMYAQFTSDNLSCLVMEYCPGGDLHVLRQKQLGRYFSEPAARFYVAEVLLALEYLHMLGVVYRDLKPENILVREDGHIMLTDFDLSLRCAVNPTLLKSSSDVDPAKISGLSAQASCIEPFCIEPSCQVPCFSPRLLPAAAKARKLKVDLAAQVRSLPQLVAEPTDARSNSFVGTHEYLAPEIIKEEGHGAAVDWWTFGVFLYELLYGRTPFKGSNNEETLANVVLQGLRFPKHPNVSFQAKDLIRGLLVKEPENRLGSEKGAAEIKQHPFFEGLNWALIRCAVPPELPDFYDFGVSDMVNPQGKGAKYLECKVGEHVEFELF

SEQ ID NO: 53712 - protein, 408 aa, Glycine max
  peptide (1)..(408): Ceres Seq. ID no. 14303962
  misc_feature (25)..(357): Pfam Name: Protein kinase domain Pfam Description: Protein kinase domain
  misc_feature (1)..(374): Homolog of NCBI NO: 7446383 NR Description: probable protein kinase PK1 - potato
  misc_feature (1)..(374): Homolog of NCBI NO: 1346057 NR Description: Protein kinase G11A
  misc_feature (1)..(374): Homolog of NCBI NO: 125568 NR Description: Protein kinase PVPK-1
  misc_feature (1)..(408): Homolog of NCBI NO: 15236802 NR Description: protein kinase, putative [Arabidopsis thaliana]
  misc_feature (1)..(374): Homolog of NCBI NO: 17064850 NR Description: protein kinase 5 [Arabidopsis thaliana]
  misc_feature (1)..(374): Homolog of NCBI NO: 15238798 NR Description: protein kinase, putative [Arabidopsis thaliana]
  misc_feature (1)..(408): Homolog of NCBI NO: 15242814 NR Description: protein kinase family [Arabidopsis thaliana]
  misc_feature (1)..(408): Homolog of NCBI NO: 30693719 NR Description: protein kinase (KIPK) [Arabidopsis thaliana]
  misc_feature (1)..(408): Homolog of NCBI NO: 7716430 NR Description: protein kinase KIPK [Arabidopsis thaliana]
  misc_feature (1)..(408): Homolog of NCBI NO: 15227639 NR Description: protein kinase, putative [Arabidopsis thaliana]
MSKDVRWAAIRHAQMQHGVLGLRHFNLLKKLGCGDIGTVYLAELIGTSCLFAIKVMDNEFLERREKMPRAQTEREILRILDHPFLPTMYAQFTSDNLSCLVMEYCPGGDLHVLRQKQLGRYFSEPAARFYVAEVLLALEYLHMLGVVYRDLKPENILVREDGHIMLTDFDLSLRCAVNPTLLKSSSDVDPAKISGLSAQASCIEPFCIEPSCQVPCFSPRLLPAAAKARKLKVDLAAQVRSLPQLVAEPTDARSNSFVGTHEYLAPEIIKEEGHGAAVDWWTFGVFLYELLYGRTPFKGSNNEETLANVVLQGLRFPKHPNVSFQAKDLIRGLLVKEPENRLGSEKGAAEIKQHPFFEGLNWALIRCAVPPELPDFYDFGVSDMVNPQGKGAKYLECKVGEHVEFELF

SEQ ID NO: 53713 - DNA, 777 bp, Glycine max
  misc_feature (1)..(777): Ceres Seq. ID no. 13493393
aattttcttttattgttgttgacatcttaatatctttgtctttcgttctcccttctattacctaatcaaggagcaatgatgaattcctcacctcctccagcaaaaagactttcgaagtatgctcctctgattcatgttatgaaggtacgaccagatagaataaatcttataattggttctggtgggaaaaaagtgaagagcattattgaggaatctggagtagacactattgatacagaagatgatggcactgtgaaaatatttgcaaaagacttgcctagtttagagaagtctaaagctattattaatagtttgacgatggttccaactattggtgatatatataggagctgtgaaatcaaatcaatagcctcatatggagtttttgtagagatagcacctggacgagagggactgtgtcatatcagtgaactgagttcaggttggctacccaaggcagaagatgttttcaaagtgggagatcgcattgatgtaaagcttatagagataaatgaaaagggacagctgcgccttagtcaccgagcactgcttcctgatacagaagcttcaccgaaggatggtttagtggaagaaaagactgaacagtctaaggataagtctagcactcccaatgtcacagcctcttctaaaaggagttcagaggatgattctgtgcttccttctaaaaagtttgtcaggagattggtcagctcttccctggataagcctttcactaacaaagacaagacaaagaagagtagcaacaaagcagttggt

SEQ ID NO: 53714 - protein, 234 aa, Glycine max
  peptide (1)..(234): Ceres Seq. ID no. 13493394
  misc_feature (83)..(156): Pfam Name: S1 RNA binding domain Pfam Description: S1 RNA binding domain
  misc_feature (1)..(159): Homolog of NCBI NO: 15618907 NR Description: Polyribonucleotide Nucleotidyltransferase
  misc_feature (8)..(161): Homolog of NCBI NO: 15605577 NR Description: Polyribonucleotide Nucleotidyltransferase
  misc_feature (1)..(113): Homolog of NCBI NO: 2129483 NR Description: exoribonuclease 100 RNP - spinach
  misc_feature (1)..(113): Homolog of NCBI NO: 1588265 NR Description: 100RNP protein
  misc_feature (1)..(153): Homolog of NCBI NO: 1924972 NR Description: polyribonucleotide phophorylase
  misc_feature (1)..(229): Homolog of NCBI NO: 7413616 NR Description: putative polynucleotide phosphorylase
  misc_feature (1)..(229): Homolog of NCBI NO: 6006870 NR Description: putative polynucleotide phosphorylase
  misc_feature (1)..(229): Homolog of NCBI NO: 30678905 NR Description: polyribonucleotide nucleotidyltransferase,
  misc_feature (1)..(205): Homolog of NCBI NO: 34395006 NR Description: putative polynucleotide phosphorylase
  misc_feature (1)..(185): Homolog of NCBI NO: 7488820 NR Description: polyribonucleotide nucleotidyltransferase (EC
MMNSSPPPAKRLSKYAPLIHVMKVRPDRINLIIGSGGKKVKSIIEESGVDTIDTEDDGTVKIFAKDLPSLEKSKAIINSLTMVPTIGDIYRSCEIKSIASYGVFVEIAPGREGLCHISELSSGWLPKAEDVFKVGDRIDVKLIEINEKGQLRLSHRALLPDTEASPKDGLVEEKTEQSKDKSSTPNVTASSKRSSEDDSVLPSKKFVRRLVSSSLDKPFTNKDKTKKSSNKAVG

SEQ ID NO: 53715 - protein, 233 aa, Glycine max
  peptide (1)..(233): Ceres Seq. ID no. 13493395
  misc_feature (82)..(155): Pfam Name: S1 RNA binding domain Pfam Description: S1 RNA binding domain
  misc_feature (1)..(158): Homolog of NCBI NO: 15618907 NR Description: Polyribonucleotide Nucleotidyltransferase
  misc_feature (7)..(160): Homolog of NCBI NO: 15605577 NR Description: Polyribonucleotide Nucleotidyltransferase
  misc_feature (1)..(112): Homolog of NCBI NO: 2129483 NR Description: exoribonuclease 100 RNP - spinach
  misc_feature (1)..(112): Homolog of NCBI NO: 1588265 NR Description: 100RNP protein
  misc_feature (1)..(152): Homolog of NCBI NO: 1924972 NR Description: polyribonucleotide phophorylase
  misc_feature (1)..(228): Homolog of NCBI NO: 7413616 NR Description: putative polynucleotide phosphorylase
  misc_feature (1)..(228): Homolog of NCBI NO: 6006870 NR Description: putative polynucleotide phosphorylase
  misc_feature (1)..(228): Homolog of NCBI NO: 30678905 NR Description: polyribonucleotide nucleotidyltransferase,
  misc_feature (1)..(204): Homolog of NCBI NO: 34395006 NR Description: putative polynucleotide phosphorylase
  misc_feature (1)..(184): Homolog of NCBI NO: 7488820 NR Description: polyribonucleotide nucleotidyltransferase (EC
MNSSPPPAKRLSKYAPLIHVMKVRPDRINLIIGSGGKKVKSIIEESGVDTIDTEDDGTVKIFAKDLPSLEKSKAIINSLTMVPTIGDIYRSCEIKSIASYGVFVEIAPGREGLCHISELSSGWLPKAEDVFKVGDRIDVKLIEINEKGQLRLSHRALLPDTEASPKDGLVEEKTEQSKDKSSTPNVTASSKRSSEDDSVLPSKKFVRRLVSSSLDKPFTNKDKTKKSSNKAVG

SEQ ID NO: 53716 - protein, 213 aa, Glycine max
  peptide (1)..(213): Ceres Seq. ID no. 13493396
  misc_feature (62)..(135): Pfam Name: S1 RNA binding domain Pfam Description: S1 RNA binding domain
  misc_feature (1)..(138): Homolog of NCBI NO: 15618907 NR Description: Polyribonucleotide Nucleotidyltransferase
  misc_feature (1)..(140): Homolog of NCBI NO: 15605577 NR Description: Polyribonucleotide Nucleotidyltransferase
  misc_feature (1)..(92): Homolog of NCBI NO: 2129483 NR Description: exoribonuclease 100 RNP - spinach
  misc_feature (1)..(92): Homolog of NCBI NO: 1588265 NR Description: 100RNP protein
  misc_feature (1)..(132): Homolog of NCBI NO: 1924972 NR Description: polyribonucleotide phophorylase
  misc_feature (1)..(208): Homolog of NCBI NO: 7413616 NR Description: putative polynucleotide phosphorylase
  misc_feature (1)..(208): Homolog of NCBI NO: 6006870 NR Description: putative polynucleotide phosphorylase
  misc_feature (1)..(208): Homolog of NCBI NO: 30678905 NR Description: polyribonucleotide nucleotidyltransferase,
  misc_feature (1)..(184): Homolog of NCBI NO: 34395006 NR Description: putative polynucleotide phosphorylase
  misc_feature (1)..(164): Homolog of NCBI NO: 7488820 NR Description: polyribonucleotide nucleotidyltransferase (EC
MKVRPDRINLIIGSGGKKVKSIIEESGVDTIDTEDDGTVKIFAKDLPSLEKSKAIINSLTMVPTIGDIYRSCEIKSIASYGVFVEIAPGREGLCHISELSSGWLPKAEDVFKVGDRIDVKLIEINEKGQLRLSHRALLPDTEASPKDGLVEEKTEQSKDKSSTPNVTASSKRSSEDDSVLPSKKFVRRLVSSSLDKPFTNKDKTKKSSNKAVG

SEQ ID NO: 53717 - DNA, 1352 bp, Glycine max
  misc_feature (1)..(1352): Ceres Seq. ID no. 14311001
ttttttttagtttttcgatggacccgaagttcatcggaaagccgctggcgatggtggacctggaccgggaccggatgtcggagcgtgggtcccaccaccggcgttcccactccgacacctccttccgcttccctgccaacttcgacgagcttctcctcttcgacccctccgacctcgacatctccggcctcccgtcgccgctccctctgccgtcgcagggcgccggcggcgtggttccgatgtccgtcgtctccgaggagtctggcggacggccgaggccgtccggggcttccgccggcgggcacctgcggagtctgtcggtggattctgacttcttcgatgggctcgggtccggcgtcggcggcgatgagagaggtgccgggaatggcggcggcgagcggcacagcaactcgatggaggggtcgtcgacgacgtcgtttgaggcggactcggcgacgatgatggatggcatgaagaaagctacggcccctgataaacttgctgagcttgctcttacggatcccaaaatagctaagaggatgcttgctaacaggcaatctgctgcaagatctaaggagaggaagattcgttacacaagtgagttggagaagaaggtgcagactcttcagactgaagcaactaacctttctgcacagcttaccatgcttcagagagacactacagatttgactgcacagaataaggagctcaaactgcgcttacaggcttttgagcaagaagcacagcttagagaagatctcaatgaggcattgaagaaagaactgcagcgccttagggtacaaagtgcttgctggggtgctatgactggtggtaacccttcttttggtgggatattcaaccagttggcttcccagttagccatgcaacagttgtctaattctgtgccccatcagcaccagacacaacaccagccacaggttggcatgcctcctcccccctctggacagaagcaccctaagttcatggacttcaatcagcagaagtagctaataatagttgtagcagtaaatgattgattacatgcaatattcatcacaagtaacatcctgtgcatatgaatgtataactaactggtgagacttgtgaaggatatattgtgcagttcagtgtctttagtcatgtgttgtttatctttagttctaggatatgtgtactttctgcagttctaggtgagaagcatagcctttgaaatgtaagcgtcatagctcttgggtgaatgagggtaacataaaggtgtagaaagactagttgataatagtatagatggtgaatgaagtttattaactagcttctggacttaaatagcatgctatatatgttaaaagttaaag

SEQ ID NO: 53718 - protein, 334 aa, Glycine max
  peptide (1)..(334): Ceres Seq. ID no. 14311002
  misc_feature (173)..(235): Pfam Name: bZIP transcription factor Pfam Description: bZIP transcription factor
  misc_feature (81)..(310): Homolog of NCBI NO: 19423874 NR Description: unknown protein [Arabidopsis thaliana]
  misc_feature (74)..(312): Homolog of NCBI NO: 15226487 NR Description: bZIP family transcription factor [Arabidopsis
  misc_feature (133)..(324): Homolog of NCBI NO: 39579226 NR Description: bZIP transcription factor RF2b
  misc_feature (138)..(330): Homolog of NCBI NO: 29367343 NR Description: bZIP-like protein [Oryza sativa (japonica
  misc_feature (112)..(333): Homolog of NCBI NO: 34394739 NR Description: putative transcription activator RF2a
  misc_feature (64)..(333): Homolog of NCBI NO: 2921823 NR Description: shoot-forming PKSF1 [Paulownia kawakamii]
  misc_feature (91)..(313): Homolog of NCBI NO: 7258340 NR Description: VirE2-interacting protein VIP1 [Arabidopsis
  misc_feature (65)..(313): Homolog of NCBI NO: 21553989 NR Description: VirE2-interacting protein VIP1 [Arabidopsis
  misc_feature (65)..(313): Homolog of NCBI NO: 18400998 NR Description: VirE2-interacting protein VIP1 [Arabidopsis
  misc_feature (71)..(333): Homolog of NCBI NO: 8777512 NR Description: bZIP transcriptional activator RSG [Nicotiana
FFSFSMDPKFIGKPLAMVDLDRDRMSERGSHHRRSHSDTSFRFPANFDELLLFDPSDLDISGLPSPLPLPSQGAGGVVPMSVVSEESGGRPRPSGASAGGHLRSLSVDSDFFDGLGSGVGGDERGAGNGGGERHSNSMEGSSTTSFEADSATMMDGMKKATAPDKLAELALTDPKIAKRMLANRQSAARSKERKIRYTSELEKKVQTLQTEATNLSAQLTMLQRDTTDLTAQNKELKLRLQAFEQEAQLREDLNEALKKELQRLRVQSACWGAMTGGNPSFGGIFNQLASQLAMQQLSNSVPHQHQTQHQPQVGMPPPPSGQKHPKFMDFNQQK

SEQ ID NO: 53719 - protein, 329 aa, Glycine max
  peptide (1)..(329): Ceres Seq. ID no. 14311003
  misc_feature (168)..(230): Pfam Name: bZIP transcription factor Pfam Description: bZIP transcription factor
  misc_feature (76)..(305): Homolog of NCBI NO: 19423874 NR Description: unknown protein [Arabidopsis thaliana]
  misc_feature (69)..(307): Homolog of NCBI NO: 15226487 NR Description: bZIP family transcription factor [Arabidopsis
  misc_feature (128)..(319): Homolog of NCBI NO: 39579226 NR Description: bZIP transcription factor RF2b
  misc_feature (133)..(325): Homolog of NCBI NO: 29367343 NR Description: bZIP-like protein [Oryza sativa (japonica
  misc_feature (107)..(328): Homolog of NCBI NO: 34394739 NR Description: putative transcription activator RF2a
  misc_feature (59)..(328): Homolog of NCBI NO: 2921823 NR Description: shoot-forming PKSF1 [Paulownia kawakamii]
  misc_feature (86)..(308): Homolog of NCBI NO: 7258340 NR Description: VirE2-interacting protein VIP1 [Arabidopsis
  misc_feature (60)..(308): Homolog of NCBI NO: 21553989 NR Description: VirE2-interacting protein VIP1 [Arabidopsis
  misc_feature (60)..(308): Homolog of NCBI NO: 18400998 NR Description: VirE2-interacting protein VIP1 [Arabidopsis
  misc_feature (66)..(328): Homolog of NCBI NO: 8777512 NR Description: bZIP transcriptional activator RSG [Nicotiana
MDPKFIGKPLAMVDLDRDRMSERGSHHRRSHSDTSFRFPANFDELLLFDPSDLDISGLPSPLPLPSQGAGGVVPMSVVSEESGGRPRPSGASAGGHLRSLSVDSDFFDGLGSGVGGDERGAGNGGGERHSNSMEGSSTTSFEADSATMMDGMKKATAPDKLAELALTDPKIAKRMLANRQSAARSKERKIRYTSELEKKVQTLQTEATNLSAQLTMLQRDTTDLTAQNKELKLRLQAFEQEAQLREDLNEALKKELQRLRVQSACWGAMTGGNPSFGGIFNQLASQLAMQQLSNSVPHQHQTQHQPQVGMPPPPSGQKHPKFMDFNQQK

SEQ ID NO: 53720 - protein, 318 aa, Glycine max
  peptide (1)..(318): Ceres Seq. ID no. 14311004
  misc_feature (157)..(219): Pfam Name: bZIP transcription factor Pfam Description: bZIP transcription factor
  misc_feature (65)..(294): Homolog of NCBI NO: 19423874 NR Description: unknown protein [Arabidopsis thaliana]
  misc_feature (58)..(296): Homolog of NCBI NO: 15226487 NR Description: bZIP family transcription factor [Arabidopsis
  misc_feature (117)..(308): Homolog of NCBI NO: 39579226 NR Description: bZIP transcription factor RF2b
  misc_feature (122)..(314): Homolog of NCBI NO: 29367343 NR Description: bZIP-like protein [Oryza sativa (japonica
  misc_feature (96)..(317): Homolog of NCBI NO: 34394739 NR Description: putative transcription activator RF2a
  misc_feature (48)..(317): Homolog of NCBI NO: 2921823 NR Description: shoot-forming PKSF1 [Paulownia kawakamii]
  misc_feature (75)..(297): Homolog of NCBI NO: 7258340 NR Description: VirE2-interacting protein VIP1 [Arabidopsis
  misc_feature (49)..(297): Homolog of NCBI NO: 21553989 NR Description: VirE2-interacting protein VIP1 [Arabidopsis
  misc_feature (49)..(297): Homolog of NCBI NO: 18400998 NR Description: VirE2-interacting protein VIP1 [Arabidopsis
  misc_feature (55)..(317): Homolog of NCBI NO: 8777512 NR Description: bZIP transcriptional activator RSG [Nicotiana
MVDLDRDRMSERGSHHRRSHSDTSFRFPANFDELLLFDPSDLDISGLPSPLPLPSQGAGGVVPMSVVSEESGGRPRPSGASAGGHLRSLSVDSDFFDGLGSGVGGDERGAGNGGGERHSNSMEGSSTTSFEADSATMMDGMKKATAPDKLAELALTDPKIAKRMLANRQSAARSKERKIRYTSELEKKVQTLQTEATNLSAQLTMLQRDTTDLTAQNKELKLRLQAFEQEAQLREDLNEALKKELQRLRVQSACWGAMTGGNPSFGGIFNQLASQLAMQQLSNSVPHQHQTQHQPQVGMPPPPSGQKHPKFMDFNQQK

SEQ ID NO: 53721 - DNA, 1326 bp, Glycine max
  misc_feature (1)..(1326): Ceres Seq. ID no. 15170406
gtgagtttttattttcattcattttcaggtttagagagaccctaacacacttagcgtgatcaagatcaacaatggcggaaaacccttccgaaacggtgttgtccagttcccaacctcctcctcctcctccttcttcttcttcttcttcttctcagaaatcgccccaagattcgccgcaggtccctgcattgtcgaattttatgccctttccgagtggatattattatcaaatgattcctggtatgtaccctgcgctagttccagggttgactttgccgcaacatgaggagcatgggaaccgcggagctggcatatatgctgttcccgttaacccgtatgacagacaagttactggacttccatacaacacactgattccgctgacttaccgcacacccaccagcaggccaagttctgaagctactgttgccagtgaaaatcagggacaagcaggacagcaacctcaacagcagcagcctgcacctcaaagacaagttgttgttaggagatttcaaattgcatttcaaattgatttgttgcttatgttgaagctggcagctgtgatctttttgtttaaccaagatggatcaaggcagaggcttattgtccttgtgttctttgctgctcttgtatatttgtaccaaactggagctttgacaccgattataagatggctttcacgaggtatgcagagagcagcagcacctcctcatccaccaagacctgcagccagggctgaaaatgttcctgctcccaggccggagggtgacaatgctgctccagcagagggtcaacctgaagccgagaatgggaaccagcccgctaatgatgcagaccaggcagtcgagaatgaaaatgttgcagaacatggcaatgtcaatggtggtaatcagtggtggggcattgtgaaggagatccagatgattgtctttggatttatcacttcccttctccccgggttccacaaccatatggattgaactatattttgtagcttacaaggtttgtggatctgatatatggtctatatgggaccatgcctgagacatgggacggggtgttctgaaataaaaatgtatagcatcagaagttccaagcgtcataactaatacatacatagttaggtgcaactataatccagcggaagatatggtgcaactatagggtgccggttttgtatcattacttggattgttgataaaacactttttttttggattccagagcccaggtttctacatagcaggggctttagattattttaaaaaaaaaaaaaaaaaaaaaaaaaaaaaaaaaaaaaaaaaaaaaaaaaaaaaaaaaaaaaag

SEQ ID NO: 53722 - protein, 302 aa, Glycine max
  peptide (1)..(302): Ceres Seq. ID no. 15170407
  misc_feature (54)..(299): Homolog of NCBI NO: 38346554 NR Description: OSJNBa0035M09.15 [Oryza sativa (japonica
  misc_feature (17)..(299): Homolog of NCBI NO: 18417501 NR Description: expressed protein [Arabidopsis thaliana]
MAENPSETVLSSSQPPPPPPSSSSSSSQKSPQDSPQVPALSNFMPFPSGYYYQMIPGMYPALVPGLTLPQHEEHGNRGAGIYAVPVNPYDRQVTGLPYNTLIPLTYRTPTSRPSSEATVASENQGQAGQQPQQQQPAPQRQVVVRRFQIAFQIDLLLMLKLAAVIFLFNQDGSRQRLIVLVFFAALVYLYQTGALTPIIRWLSRGMQRAAAPPHPPRPAARAENVPAPRPEGDNAAPAEGQPEAENGNQPANDADQAVENENVAEHGNVNGGNQWWGIVKEIQMIVFGFITSLLPGFHNHMD

SEQ ID NO: 53723 - protein, 259 aa, Glycine max
  peptide (1)..(259): Ceres Seq. ID no. 15170408
  misc_feature (11)..(256): Homolog of NCBI NO: 38346554 NR Description: OSJNBa0035M09.15 [Oryza sativa (japonica
  misc_feature (1)..(256): Homolog of NCBI NO: 18417501 NR Description: expressed protein [Arabidopsis thaliana]
MPFPSGYYYQMIPGMYPALVPGLTLPQHEEHGNRGAGIYAVPVNPYDRQVTGLPYNTLIPLTYRTPTSRPSSEATVASENQGQAGQQPQQQQPAPQRQVVVRRFQIAFQIDLLLMLKLAAVIFLFNQDGSRQRLIVLVFFAALVYLYQTGALTPIIRWLSRGMQRAAAPPHPPRPAARAENVPAPRPEGDNAAPAEGQPEAENGNQPANDADQAVENENVAEHGNVNGGNQWWGIVKEIQMIVFGFITSLLPGFHNHMD

SEQ ID NO: 53724 - protein, 249 aa, Glycine max
  peptide (1)..(249): Ceres Seq. ID no. 15170409
  misc_feature (1)..(246): Homolog of NCBI NO: 38346554 NR Description: OSJNBa0035M09.15 [Oryza sativa (japonica
  misc_feature (1)..(246): Homolog of NCBI NO: 18417501 NR Description: expressed protein [Arabidopsis thaliana]
MIPGMYPALVPGLTLPQHEEHGNRGAGIYAVPVNPYDRQVTGLPYNTLIPLTYRTPTSRPSSEATVASENQGQAGQQPQQQQPAPQRQVVVRRFQIAFQIDLLLMLKLAAVIFLFNQDGSRQRLIVLVFFAALVYLYQTGALTPIIRWLSRGMQRAAAPPHPPRPAARAENVPAPRPEGDNAAPAEGQPEAENGNQPANDADQAVENENVAEHGNVNGGNQWWGIVKEIQMIVFGFITSLLPGFHNHMD

SEQ ID NO: 53725 - DNA, 768 bp, Glycine max
  misc_feature (1)..(768): Ceres Seq. ID no. 14304183
gaattccatggcgacgagtgggtcagagacaaagcaagtgatggtgattggaatcgacgacagtgatttcagcacgtacgctctccaatggactctggatcacttgctatcccctgcaaatgttcctaagttcaagatttttcttgtttatgccaagccttctgttgcctctgctgtcggttttgttggccctggagccgctgaggtgttacctgttgttgaggccgatttgagaaaaacagctgccaaaatcactgaacgtgctacagaactatgcaagaagaaatccgtaaatgacgtagcagtggaagtgctagaaggtgatcctagaaatgttctttgcgaggcagtggaaaagcaccaagcttcaatgttggttgtgggtagtcatggttatgggactttaaaaagagcggttttaggtagtgtaagtgactattgtgctcatcatgctcactgcactgtcatgatcgtgaagaaaccaaagcacaaacactgatctcaatcgttggctccgattaaatagcagtgcacataaatcttttcagcaacagggaaaataaatgttcttaagaattcataatattgttttctgcatgcctagctgactttgtggtttaaggttcatttacttttttattttcaaagttacaacccacaaataatgtatgtaagcacaatactttttccttcacggccactggtggtgcttggtttattttgttcaagagcaatttatttaaataaatgtcactgttgtgtgtgtat

SEQ ID NO: 53726 - protein, 165 aa, Glycine max
  peptide (1)..(165): Ceres Seq. ID no. 14304184
  misc_feature (14)..(159): Pfam Name: Universal stress protein family Pfam Description: Universal stress protein family
  misc_feature (3)..(162): Homolog of NCBI NO: 25402571 NR Description: hypothetical protein [imported] - Arabidopsis
  misc_feature (3)..(162): Homolog of NCBI NO: 30681321 NR Description: ER6 protein -related [Arabidopsis thaliana]
  misc_feature (4)..(162): Homolog of NCBI NO: 21594903 NR Description: ethylene-responsive protein, putative
  misc_feature (4)..(162): Homolog of NCBI NO: 30681955 NR Description: ethylene-responsive protein -related [Arabidopsis
  misc_feature (4)..(162): Homolog of NCBI NO: 18399413 NR Description: ethylene-responsive protein -related [Arabidopsis
  misc_feature (4)..(164): Homolog of NCBI NO: 22831145 NR Description: universal stress protein USP1-like protein
  misc_feature (4)..(164): Homolog of NCBI NO: 20067187 NR Description: putative universal stress protein USP1
  misc_feature (3)..(164): Homolog of NCBI NO: 21555580 NR Description: unknown [Arabidopsis thaliana]
  misc_feature (3)..(164): Homolog of NCBI NO: 18407428 NR Description: expressed protein [Arabidopsis thaliana]
  misc_feature (16)..(165): Homolog of NCBI NO: 38016525 NR Description: fiber protein Fb19 [Gossypium barbadense]
NSMATSGSETKQVMVIGIDDSDFSTYALQWTLDHLLSPANVPKFKIFLVYAKPSVASAVGFVGPGAAEVLPVVEADLRKTAAKITERATELCKKKSVNDVAVEVLEGDPRNVLCEAVEKHQASMLVVGSHGYGTLKRAVLGSVSDYCAHHAHCTVMIVKKPKHKH

SEQ ID NO: 53727 - protein, 163 aa, Glycine max
  peptide (1)..(163): Ceres Seq. ID no. 14304185
  misc_feature (12)..(157): Pfam Name: Universal stress protein family Pfam Description: Universal stress protein family
  misc_feature (1)..(160): Homolog of NCBI NO: 25402571 NR Description: hypothetical protein [imported] - Arabidopsis
  misc_feature (1)..(160): Homolog of NCBI NO: 30681321 NR Description: ER6 protein -related [Arabidopsis thaliana]
  misc_feature (2)..(160): Homolog of NCBI NO: 21594903 NR Description: ethylene-responsive protein, putative
  misc_feature (2)..(160): Homolog of NCBI NO: 30681955 NR Description: ethylene-responsive protein -related [Arabidopsis
  misc_feature (2)..(160): Homolog of NCBI NO: 18399413 NR Description: ethylene-responsive protein -related [Arabidopsis
  misc_feature (2)..(162): Homolog of NCBI NO: 22831145 NR Description: universal stress protein USP1-like protein
  misc_feature (2)..(162): Homolog of NCBI NO: 20067187 NR Description: putative universal stress protein USP1
  misc_feature (1)..(162): Homolog of NCBI NO: 21555580 NR Description: unknown [Arabidopsis thaliana]
  misc_feature (1)..(162): Homolog of NCBI NO: 18407428 NR Description: expressed protein [Arabidopsis thaliana]
  misc_feature (14)..(163): Homolog of NCBI NO: 38016525 NR Description: fiber protein Fb19 [Gossypium barbadense]
MATSGSETKQVMVIGIDDSDFSTYALQWTLDHLLSPANVPKFKIFLVYAKPSVASAVGFVGPGAAEVLPVVEADLRKTAAKITERATELCKKKSVNDVAVEVLEGDPRNVLCEAVEKHQASMLVVGSHGYGTLKRAVLGSVSDYCAHHAHCTVMIVKKPKHKH

SEQ ID NO: 53728 - protein, 152 aa, Glycine max
  peptide (1)..(152): Ceres Seq. ID no. 14304186
  misc_feature (1)..(146): Pfam Name: Universal stress protein family Pfam Description: Universal stress protein family
  misc_feature (1)..(149): Homolog of NCBI NO: 25402571 NR Description: hypothetical protein [imported] - Arabidopsis
  misc_feature (1)..(149): Homolog of NCBI NO: 30681321 NR Description: ER6 protein -related [Arabidopsis thaliana]
  misc_feature (1)..(149): Homolog of NCBI NO: 21594903 NR Description: ethylene-responsive protein, putative
  misc_feature (1)..(149): Homolog of NCBI NO: 30681955 NR Description: ethylene-responsive protein -related [Arabidopsis
  misc_feature (1)..(149): Homolog of NCBI NO: 18399413 NR Description: ethylene-responsive protein -related [Arabidopsis
  misc_feature (1)..(151): Homolog of NCBI NO: 22831145 NR Description: universal stress protein USP1-like protein
  misc_feature (1)..(151): Homolog of NCBI NO: 20067187 NR Description: putative universal stress protein USP1
  misc_feature (1)..(151): Homolog of NCBI NO: 21555580 NR Description: unknown [Arabidopsis thaliana]
  misc_feature (1)..(151): Homolog of NCBI NO: 18407428 NR Description: expressed protein [Arabidopsis thaliana]
  misc_feature (3)..(152): Homolog of NCBI NO: 38016525 NR Description: fiber protein Fb19 [Gossypium barbadense]
MVIGIDDSDFSTYALQWTLDHLLSPANVPKFKIFLVYAKPSVASAVGFVGPGAAEVLPVVEADLRKTAAKITERATELCKKKSVNDVAVEVLEGDPRNVLCEAVEKHQASMLVVGSHGYGTLKRAVLGSVSDYCAHHAHCTVMIVKKPKHKH

SEQ ID NO: 53729 - DNA, 1710 bp, Glycine max
  misc_feature (1)..(1710): Ceres Seq. ID no. 14311131
tgtttttgggtcggccctacttttcagaaccttaggcccactttggcaactacttattctatgctatgctctattattttttttttaatttacgctatatttggctcacttattactctataaaaaatattcgggtactaaaatgttaaatgatacatgacacatagtgagagataaaagaaaaacaatataaatattattagagtatgatgtgattaaaattgaaaaaaaattatcaatgttaattaagataactttcacctaacaactcttgttaaaaataattttatattatttctcagattttcttatgatgtcacatcaagattactgagacgaaaagaatgagagtgagtgtttcgtggttttttttttttacttcacaattgatgcatgaatgatgctcaccaatgatattttttttttcaccttttgttgagtttcatgaataattgagaatcgaccgggtttggttcgaacaaaaccaagtcatgtcaattcagattgaaatttggaaggaagaaaagaaaaatgagccgacttgaccgagctctccttcatccaatttggtttaggttcatgcttgaatctaacccaaataggtccatttctttgtcatatcactattgatgttgtgttctctaaaaattaccgtcaaaagtaccaactgaagagaaaccttcattgttgaaaaaaaaaggcaacttccaatgaagaatggaagttgcccttaggtatttgtaaaaataggttattagaaaaccgttgctattaattaaattatatacatcaccgaaacttaatcttattgtacgttatgcatgctttcagctgtggttggagacggattcatagcaaagggtataacctttgaaaattctgctgggccaagcaaacaccaagccgtggccctaaggagtggttctgatttctcagccttctataaatgcagcttcgttgcctaccaagatactctctatgtccactccctgcgccaattctaccgcgattgtgacgtttatggcacagtcgacttcatcttcggcaatgcagcaacagtgctccagaactgcaacttgtacgcacgcaagcccaatgaaaaccaaaggaacttgttcactgcacaaggaagagaagaccctaaccaaaacaccggcatttccatcttgaactgcaaggttgcagcagctgctgatttaatcccggtcaaatctcagttcaagaactacttgggtcgtccttggaagaagtattcgagaactgtttatcttaattcttacatggaggatctgatagaccccaaagggtggttggagtggaatggcacgtttgcattggatacgttgtattatggagagtacaacaataggggtcccggttcaaacacaagtgcaagagttacgtggcctggttatagggttatcaagaacgccactgaggcaaaccagttcacagttcgcaatttcattcaagggaatgaatggttgagttccaccgacattccattcttctctgatttcagttgaatacgttatggttattagtggcttcatgctcttttggtatccccatttaataaagtattagatgtttgttgtggaaatagaattcaaggaatgttattgttccttgcgacaaaagcactaactaaaataaaaaagtattttatattaattttttatcgataaatattaatttattaattttatt

SEQ ID NO: 53730 - protein, 234 aa, Glycine max
  peptide (1)..(234): Ceres Seq. ID no. 14311132
  misc_feature (4)..(219): Pfam Name: Pectinesterase Pfam Description: Pectinesterase
  misc_feature (4)..(229): Homolog of NCBI NO: 24250746 NR Description: putative thermostable pectinesterase [Citrus
  misc_feature (4)..(231): Homolog of NCBI NO: 25313433 NR Description: probable pectinesterase [imported] - Arabidopsis
  misc_feature (4)..(231): Homolog of NCBI NO: 18406733 NR Description: pectinesterase family [Arabidopsis thaliana]
  misc_feature (4)..(234): Homolog of NCBI NO: 38566730 NR Description: pectin methylesterase [Cicer arietinum]
  misc_feature (4)..(231): Homolog of NCBI NO: 7447381 NR Description: pectinesterase (EC 3.1.1.11) PECS-c2 - sweet
  misc_feature (4)..(231): Homolog of NCBI NO: 6174914 NR Description: Pectinesterase 2.1 precursor (Pectin
  misc_feature (11)..(229): Homolog of NCBI NO: 26892110 NR Description: methyl pectinesterase [Lolium perenne]
  misc_feature (4)..(229): Homolog of NCBI NO: 34894536 NR Description: putative pectinesterase 2.1 precursor
  misc_feature (4)..(234): Homolog of NCBI NO: 34393863 NR Description: putative pectinesterase [Oryza sativa (japonica
  misc_feature (4)..(231): Homolog of NCBI NO: 7025485 NR Description: pectin methylesterase isoform alpha [Vigna
MLSAVVGDGFIAKGITFENSAGPSKHQAVALRSGSDFSAFYKCSFVAYQDTLYVHSLRQFYRDCDVYGTVDFIFGNAATVLQNCNLYARKPNENQRNLFTAQGREDPNQNTGISILNCKVAAAADLIPVKSQFKNYLGRPWKKYSRTVYLNSYMEDLIDPKGWLEWNGTFALDTLYYGEYNNRGPGSNTSARVTWPGYRVIKNATEANQFTVRNFIQGNEWLSSTDIPFFSDFS

SEQ ID NO: 53731 - DNA, 1867 bp, Glycine max
  misc_feature (1)..(1867): Ceres Seq. ID no. 14311305
aactgttttgagtttccaaccttaaaagactctcttttctctctctgaactctgaagcaaaacaacattaccagagtggttcttgtaattcagtgctgctagaagatggaaactagtgaatggcatatcgagcgaagatctagcttcggctctgaatcccccttagcaagagaggcaggaaatgtgcctgaaactgggtcactctctattgtggtgcttggtgcttctggtgatcttgctaagaagaagacatttcctgcacttttccacctatacctgcagggattcttaccaccagatgaagttcatatttttggctatgcaaggacaaaaatctctgatgatgaattgagaaaccggttgcgcggctatcttgttccaaagaaaggtgcttccccccaacagttggaggatgtagagaagtttttacagctgatcaaatatgtaagcggctcttatgattctgaggatggcttccgcctgttggataaagagatttcagagcatgaatatttgaaaaacagtgttgagggtttatctcggaggcttttctatcttgctcttccaccttcagtatatccatcagtttgcaagatgatcaagacttgttgcatgaataaatctgatcttggtggatggacacgtgttgttgttgagaaaccttttggtaaggatctagaatctgcagaggaactcagtactgagattggaaagttgtttgaggaaccacagatttatcgtattgatcactacttgggaaaggaactagtgcagaacttgttggtacttcgctttgcaaatcggtttttcttgccactttggaaccgcgacaacattgacaacgtacagatagttttcagagaggattttggaactgatggccgtggtggatattttgaccagtatggaattattcgagatattattcaaaaccatctgctgcaggttctttgcttggttgctatggaaaaaccagtttctctcaggcctgagcacattcgggatgagaaagtgaaggttcttgaatcagtgctccctattaatgatgatgaggttgttcttggacaatatgaaggctataaagatgacccaaccgtacctgatgagtctaacaccccaacatttgcaactgttgttctgcgaatacacaatgaaagatgggaaggtgttcctttcatactaaaagcagggaaggcactaaattctagaaaggcagagataagggttcaattcaaggatgtccctggtgatattttcaagtgtaaaaagcaggggagaaatgagtgtgttatccgcctacagccttcagaagctatttacatgaagcttacggtcaagcaacctggactggagatgtctacggttcaaagtgagcttgacttgtcatatggacaacggtatcaaggagtaaccattcctgaggcttatgaacgcctaattcttgacacaattagaggtgatcagcaacattttgttcgcagagatgagttgaaggcatcctggcagatcttcaccccacttctgcacagaattgatgaaggggaattcaagccactcccctacaaaccaggaagcagaggtcctgcagaagcagatcagttacttgaaaaagctggctatgttcaaacacacggctacatatggatccctcctaccttgtagagtgatctaatgtaataagatgaggaatttttagctgctaatgaatacacaataagcttgtgaggcttcttccctttgaagcactcccacggatgtgtatcaagcatttggaacaatataagagactaagagtgtttggcacggtttgtgtaactgatttgcctttaaatgcaaaataaatggaaaatgaagtccatttactagc

SEQ ID NO: 53732 - protein, 518 aa, Glycine max
  peptide (1)..(518): Ceres Seq. ID no. 14311306
  misc_feature (226)..(510): Pfam Name: Glucose-6-phosphate dehydrogenase, C-terminal domain Pfam Description: Glucose-6-phosphate dehydrogenase, C-terminal
  misc_feature (1)..(518): Homolog of NCBI NO: 18086470 NR Description: AT3g27300/K17E12_12 [Arabidopsis thaliana]
  misc_feature (1)..(518): Homolog of NCBI NO: 25283728 NR Description: glucose-6-phosphate 1-dehydrogenase (EC 1.1.1.49)
  misc_feature (1)..(518): Homolog of NCBI NO: 15232132 NR Description: glucose-6-phosphate 1-dehydrogenase -related
  misc_feature (4)..(518): Homolog of NCBI NO: 3021510 NR Description: glucose-6-phosphate dehydrogenase [Nicotiana
  misc_feature (1)..(518): Homolog of NCBI NO: 4206114 NR Description: cytoplasmic glucose-6-phosphate 1-dehydrogenase
  misc_feature (4)..(518): Homolog of NCBI NO: 3021508 NR Description: glucose-6-phosphate dehydrogenase [Nicotiana
  misc_feature (4)..(518): Homolog of NCBI NO: 585165 NR Description: Glucose-6-phosphate 1-dehydrogenase, cytoplasmic
  misc_feature (1)..(518): Homolog of NCBI NO: 25283727 NR Description: glucose-6-phosphate 1-dehydrogenase (EC 1.1.1.49)
  misc_feature (1)..(518): Homolog of NCBI NO: 15237485 NR Description: glucose-6-phosphate dehydrogenase [Arabidopsis
  misc_feature (1)..(518): Homolog of NCBI NO: 3023815 NR Description: Glucose-6-phosphate 1-dehydrogenase, cytoplasmic
METSEWHIERRSSFGSESPLAREAGNVPETGSLSIVVLGASGDLAKKKTFPALFHLYLQGFLPPDEVHIFGYARTKISDDELRNRLRGYLVPKKGASPQQLEDVEKFLQLIKYVSGSYDSEDGFRLLDKEISEHEYLKNSVEGLSRRLFYLALPPSVYPSVCKMIKTCCMNKSDLGGWTRVVVEKPFGKDLESAEELSTEIGKLFEEPQIYRIDHYLGKELVQNLLVLRFANRFFLPLWNRDNIDNVQIVFREDFGTDGRGGYFDQYGIIRDIIQNHLLQVLCLVAMEKPVSLRPEHIRDEKVKVLESVLPINDDEVVLGQYEGYKDDPTVPDESNTPTFATVVLRIHNERWEGVPFILKAGKALNSRKAEIRVQFKDVPGDIFKCKKQGRNECVIRLQPSEAIYMKLTVKQPGLEMSTVQSELDLSYGQRYQGVTIPEAYERLILDTIRGDQQHFVRRDELKASWQIFTPLLHRIDEGEFKPLPYKPGSRGPAEADQLLEKAGYVQTHGYIWIPPTL

SEQ ID NO: 53733 - protein, 355 aa, Glycine max
  peptide (1)..(355): Ceres Seq. ID no. 14311307
  misc_feature (63)..(347): Pfam Name: Glucose-6-phosphate dehydrogenase, C-terminal domain Pfam Description: Glucose-6-phosphate dehydrogenase, C-terminal
  misc_feature (1)..(355): Homolog of NCBI NO: 18086470 NR Description: AT3g27300/K17E12_12 [Arabidopsis thaliana]
  misc_feature (1)..(355): Homolog of NCBI NO: 25283728 NR Description: glucose-6-phosphate 1-dehydrogenase (EC 1.1.1.49)
  misc_feature (1)..(355): Homolog of NCBI NO: 15232132 NR Description: glucose-6-phosphate 1-dehydrogenase -related
  misc_feature (1)..(355): Homolog of NCBI NO: 3021510 NR Description: glucose-6-phosphate dehydrogenase [Nicotiana
  misc_feature (1)..(355): Homolog of NCBI NO: 4206114 NR Description: cytoplasmic glucose-6-phosphate 1-dehydrogenase
  misc_feature (1)..(355): Homolog of NCBI NO: 3021508 NR Description: glucose-6-phosphate dehydrogenase [Nicotiana
  misc_feature (1)..(355): Homolog of NCBI NO: 585165 NR Description: Glucose-6-phosphate 1-dehydrogenase, cytoplasmic
  misc_feature (1)..(355): Homolog of NCBI NO: 25283727 NR Description: glucose-6-phosphate 1-dehydrogenase (EC 1.1.1.49)
  misc_feature (1)..(355): Homolog of NCBI NO: 15237485 NR Description: glucose-6-phosphate dehydrogenase [Arabidopsis
  misc_feature (1)..(355): Homolog of NCBI NO: 3023815 NR Description: Glucose-6-phosphate 1-dehydrogenase, cytoplasmic
MIKTCCMNKSDLGGWTRVVVEKPFGKDLESAEELSTEIGKLFEEPQIYRIDHYLGKELVQNLLVLRFANRFFLPLWNRDNIDNVQIVFREDFGTDGRGGYFDQYGIIRDIIQNHLLQVLCLVAMEKPVSLRPEHIRDEKVKVLESVLPINDDEVVLGQYEGYKDDPTVPDESNTPTFATVVLRIHNERWEGVPFILKAGKALNSRKAEIRVQFKDVPGDIFKCKKQGRNECVIRLQPSEAIYMKLTVKQPGLEMSTVQSELDLSYGQRYQGVTIPEAYERLILDTIRGDQQHFVRRDELKASWQIFTPLLHRIDEGEFKPLPYKPGSRGPAEADQLLEKAGYVQTHGYIWIPPTL

SEQ ID NO: 53734 - protein, 349 aa, Glycine max
  peptide (1)..(349): Ceres Seq. ID no. 14311308
  misc_feature (57)..(341): Pfam Name: Glucose-6-phosphate dehydrogenase, C-terminal domain Pfam Description: Glucose-6-phosphate dehydrogenase, C-terminal
  misc_feature (1)..(349): Homolog of NCBI NO: 18086470 NR Description: AT3g27300/K17E12_12 [Arabidopsis thaliana]
  misc_feature (1)..(349): Homolog of NCBI NO: 25283728 NR Description: glucose-6-phosphate 1-dehydrogenase (EC 1.1.1.49)
  misc_feature (1)..(349): Homolog of NCBI NO: 15232132 NR Description: glucose-6-phosphate 1-dehydrogenase -related
  misc_feature (1)..(349): Homolog of NCBI NO: 3021510 NR Description: glucose-6-phosphate dehydrogenase [Nicotiana
  misc_feature (1)..(349): Homolog of NCBI NO: 4206114 NR Description: cytoplasmic glucose-6-phosphate 1-dehydrogenase
  misc_feature (1)..(349): Homolog of NCBI NO: 3021508 NR Description: glucose-6-phosphate dehydrogenase [Nicotiana
  misc_feature (1)..(349): Homolog of NCBI NO: 585165 NR Description: Glucose-6-phosphate 1-dehydrogenase, cytoplasmic
  misc_feature (1)..(349): Homolog of NCBI NO: 25283727 NR Description: glucose-6-phosphate 1-dehydrogenase (EC 1.1.1.49)
  misc_feature (1)..(349): Homolog of NCBI NO: 15237485 NR Description: glucose-6-phosphate dehydrogenase [Arabidopsis
  misc_feature (1)..(349): Homolog of NCBI NO: 3023815 NR Description: Glucose-6-phosphate 1-dehydrogenase, cytoplasmic
MNKSDLGGWTRVVVEKPFGKDLESAEELSTEIGKLFEEPQIYRIDHYLGKELVQNLLVLRFANRFFLPLWNRDNIDNVQIVFREDFGTDGRGGYFDQYGIIRDIIQNHLLQVLCLVAMEKPVSLRPEHIRDEKVKVLESVLPINDDEVVLGQYEGYKDDPTVPDESNTPTFATVVLRIHNERWEGVPFILKAGKALNSRKAEIRVQFKDVPGDIFKCKKQGRNECVIRLQPSEAIYMKLTVKQPGLEMSTVQSELDLSYGQRYQGVTIPEAYERLILDTIRGDQQHFVRRDELKASWQIFTPLLHRIDEGEFKPLPYKPGSRGPAEADQLLEKAGYVQTHGYIWIPPTL

SEQ ID NO: 53735 - DNA, 1536 bp, Glycine max
  misc_feature (1)..(1536): Ceres Seq. ID no. 15175476
aaattaaggcagagaatgcttcattgccaattactgcagagacatcctctggaacttcagggattcctgcccacgaatgtaaatcaggaccttgttctaagcggcataacaggaaagaaatagcagcacttagacagagattccttcatatggagaaaacttacaggtcttgtggaaaaggaagttttaaatcaggaggtaagtctggaacattacctgcaaaggatacaatatctacttctcggatggtgaatgcaaacacttcaacacctggcaatatgtccaaaccaaaatctgagctaagcttttctgtcaagattcttgattactgtgctgatattccttttgatgaggctttgggtaagtatgtcccacgggatgagaaggataggctaattttgaagttaataactcgagtgcaagaattgcagaatgagctacatggctggaacaactggacaaatcagaaggttatgcaggttaccaataggcttggcaaactacaggctgagtttaaaactctgaggaaggagaagcaagatgctgaactgttgaaaaaagataagaaaattgtggaggagaatgctgtgaagaggatatctgaaatggagaatgccatggaaaatactaaaaagcaaattgagagtgctgcttctgctactcttgtgttagaggcagaaaattccttgttaaagaaggagttggatgctgctaagttgtgggttgtaaagtcaatgacaagccatcaacaagcactggagagagagcagatggctcttaaacaggcccagatattggaaagccagaacagtttgcttcgagatgagcttgagagagagaagcacaaattatttaatctgcaacaggagctacacaaagagacaaatcttcaagccaaggttgagggtagattggctaaagagagagctgcaaaagaaaagctccttgcacaggctgcatccattaaaaaggagagagagcaacttgaacagcacatgaaatctgaggaggatatggctagaaagaaggcagctactgatctgcagaaatatgtggaagatattggaaagctagagaaggagttggttgacttgaaactaaaatctgattctgaaaaaatagcagcacttcgtaggtgtgttgatgtaaggaatgatagtttctcaagaaccaagagtgctccaaacatgaagggaaacaagaaatctgatacgtcacaaacattggtgagctaccaagacaaattggctgctggaagtttgaggcgtgagcaggagtgtgtcatgtgcctatcagaggagatgtcagtagtttttctgccatgtgcacatcaggttgtgtgtcctgaatgcaatgagctccatgagaaacaagggatgaaggaatgcccttcatgtagggccccaatccaacgtaggattcatgctagatttgctcggcattagagagtatagactttcctgaatgaatgggaatcgtgaagaaatacattatgtccccccccccctccccccccaaaaaaaaacaataggaaac

SEQ ID NO: 53736 - protein, 480 aa, Glycine max
  peptide (1)..(480): Ceres Seq. ID no. 15175477
  misc_feature (172)..(386): Pfam Name: Synaptonemal complex protein 1 (SCP-1) Pfam Description: Synaptonemal complex protein 1 (SCP-1)
  misc_feature (174)..(479): Homolog of NCBI NO: 25343843 NR Description: protein F15K9.3 [imported] - Arabidopsis thaliana
  misc_feature (94)..(301): Homolog of NCBI NO: 15236231 NR Description: conserved hypothetical protein [Arabidopsis
  misc_feature (62)..(466): Homolog of NCBI NO: 25518154 NR Description: F5D14.31 protein - Arabidopsis thaliana
  misc_feature (62)..(473): Homolog of NCBI NO: 15223228 NR Description: zinc finger (C3HC4-type RING finger) protein
  misc_feature (125)..(479): Homolog of NCBI NO: 15236231 NR Description: conserved hypothetical protein [Arabidopsis
  misc_feature (75)..(473): Homolog of NCBI NO: 25408371 NR Description: hypothetical protein At2g35330 [imported] -
  misc_feature (75)..(473): Homolog of NCBI NO: 30686389 NR Description: expressed protein [Arabidopsis thaliana]
  misc_feature (75)..(473): Homolog of NCBI NO: 22531056 NR Description: unknown protein [Arabidopsis thaliana]
  misc_feature (5)..(378): Homolog of NCBI NO: 15218791 NR Description: unknown protein; protein id: At1g03370.1
  misc_feature (5)..(378): Homolog of NCBI NO: 25343843 NR Description: protein F15K9.3 [imported] - Arabidopsis thaliana
IKAENASLPITAETSSGTSGIPAHECKSGPCSKRHNRKEIAALRQRFLHMEKTYRSCGKGSFKSGGKSGTLPAKDTISTSRMVNANTSTPGNMSKPKSELSFSVKILDYCADIPFDEALGKYVPRDEKDRLILKLITRVQELQNELHGWNNWTNQKVMQVTNRLGKLQAEFKTLRKEKQDAELLKKDKKIVEENAVKRISEMENAMENTKKQIESAASATLVLEAENSLLKKELDAAKLWVVKSMTSHQQALEREQMALKQAQILESQNSLLRDELEREKHKLFNLQQELHKETNLQAKVEGRLAKERAAKEKLLAQAASIKKEREQLEQHMKSEEDMARKKAATDLQKYVEDIGKLEKELVDLKLKSDSEKIAALRRCVDVRNDSFSRTKSAPNMKGNKKSDTSQTLVSYQDKLAAGSLRREQECVMCLSEEMSVVFLPCAHQVVCPECNELHEKQGMKECPSCRAPIQRRIHARFARH

SEQ ID NO: 53737 - protein, 431 aa, Glycine max
  peptide (1)..(431): Ceres Seq. ID no. 15175478
  misc_feature (123)..(337): Pfam Name: Synaptonemal complex protein 1 (SCP-1) Pfam Description: Synaptonemal complex protein 1 (SCP-1)
  misc_feature (125)..(430): Homolog of NCBI NO: 25343843 NR Description: protein F15K9.3 [imported] - Arabidopsis thaliana
  misc_feature (45)..(252): Homolog of NCBI NO: 15236231 NR Description: conserved hypothetical protein [Arabidopsis
  misc_feature (13)..(417): Homolog of NCBI NO: 25518154 NR Description: F5D14.31 protein - Arabidopsis thaliana
  misc_feature (13)..(424): Homolog of NCBI NO: 15223228 NR Description: zinc finger (C3HC4-type RING finger) protein
  misc_feature (76)..(430): Homolog of NCBI NO: 15236231 NR Description: conserved hypothetical protein [Arabidopsis
  misc_feature (26)..(424): Homolog of NCBI NO: 30686389 NR Description: expressed protein [Arabidopsis thaliana]
  misc_feature (26)..(424): Homolog of NCBI NO: 25408371 NR Description: hypothetical protein At2g35330 [imported] -
  misc_feature (26)..(424): Homolog of NCBI NO: 22531056 NR Description: unknown protein [Arabidopsis thaliana]
  misc_feature (1)..(329): Homolog of NCBI NO: 15218791 NR Description: unknown protein; protein id: At1g03370.1
  misc_feature (1)..(329): Homolog of NCBI NO: 25343843 NR Description: protein F15K9.3 [imported] - Arabidopsis thaliana
MEKTYRSCGKGSFKSGGKSGTLPAKDTISTSRMVNANTSTPGNMSKPKSELSFSVKILDYCADIPFDEALGKYVPRDEKDRLILKLITRVQELQNELHGWNNWTNQKVMQVTNRLGKLQAEFKTLRKEKQDAELLKKDKKIVEENAVKRISEMENAMENTKKQIESAASATLVLEAENSLLKKELDAAKLWVVKSMTSHQQALEREQMALKQAQILESQNSLLRDELEREKHKLFNLQQELHKETNLQAKVEGRLAKERAAKEKLLAQAASIKKEREQLEQHMKSEEDMARKKAATDLQKYVEDIGKLEKELVDLKLKSDSEKIAALRRCVDVRNDSFSRTKSAPNMKGNKKSDTSQTLVSYQDKLAAGSLRREQECVMCLSEEMSVVFLPCAHQVVCPECNELHEKQGMKECPSCRAPIQRRIHARFARH

SEQ ID NO: 53738 - protein, 399 aa, Glycine max
  peptide (1)..(399): Ceres Seq. ID no. 15175479
  misc_feature (91)..(305): Pfam Name: Synaptonemal complex protein 1 (SCP-1) Pfam Description: Synaptonemal complex protein 1 (SCP-1)
  misc_feature (93)..(398): Homolog of NCBI NO: 25343843 NR Description: protein F15K9.3 [imported] - Arabidopsis thaliana
  misc_feature (13)..(220): Homolog of NCBI NO: 15236231 NR Description: conserved hypothetical protein [Arabidopsis
  misc_feature (1)..(385): Homolog of NCBI NO: 25518154 NR Description: F5D14.31 protein - Arabidopsis thaliana
  misc_feature (1)..(392): Homolog of NCBI NO: 15223228 NR Description: zinc finger (C3HC4-type RING finger) protein
  misc_feature (44)..(398): Homolog of NCBI NO: 15236231 NR Description: conserved hypothetical protein [Arabidopsis
  misc_feature (1)..(392): Homolog of NCBI NO: 30686389 NR Description: expressed protein [Arabidopsis thaliana]
  misc_feature (1)..(392): Homolog of NCBI NO: 25408371 NR Description: hypothetical protein At2g35330 [imported] -
  misc_feature (1)..(392): Homolog of NCBI NO: 22531056 NR Description: unknown protein [Arabidopsis thaliana]
  misc_feature (1)..(297): Homolog of NCBI NO: 15218791 NR Description: unknown protein; protein id: At1g03370.1
  misc_feature (1)..(297): Homolog of NCBI NO: 25343843 NR Description: protein F15K9.3 [imported] - Arabidopsis thaliana
MVNANTSTPGNMSKPKSELSFSVKILDYCADIPFDEALGKYVPRDEKDRLILKLITRVQELQNELHGWNNWTNQKVMQVTNRLGKLQAEFKTLRKEKQDAELLKKDKKIVEENAVKRISEMENAMENTKKQIESAASATLVLEAENSLLKKELDAAKLWVVKSMTSHQQALEREQMALKQAQILESQNSLLRDELEREKHKLFNLQQELHKETNLQAKVEGRLAKERAAKEKLLAQAASIKKEREQLEQHMKSEEDMARKKAATDLQKYVEDIGKLEKELVDLKLKSDSEKIAALRRCVDVRNDSFSRTKSAPNMKGNKKSDTSQTLVSYQDKLAAGSLRREQECVMCLSEEMSVVFLPCAHQVVCPECNELHEKQGMKECPSCRAPIQRRIHARFARH

SEQ ID NO: 53739 - DNA, 1393 bp, Glycine max
  misc_feature (1)..(1393): Ceres Seq. ID no. 15169358
aaatataaactaggaatagctattttgttggaaggaggtaaaggaagttcgtgacaaaagcggcaatggaaggagaagagggttcccagcagccacagttggtgctcggggacaagctattccttcttcgacaacccgatgttcaagacattgacaaggttcgctacaaggaggatgttttcactcacatcaaccaaaacgatatggtccccttgtatgaaaccctagtggccgattccgtgttggacttggatcgtgccctcttggactctatgcgcgctaaaattcacgatgagctcgccaacctcgacgaaaagattgctgatgctgaggaaaacttaggagagagtgaagttcgtgaggctcacttggcaaaatccttgtttttcatccggattatggacaaggagaaagccttggaacatctcaaggtaacagaaaccaagacagttgctgttggccagaaaatggacttggtgttttatacattgcagcttggtttctttgacatggattttgatctcatttccaagagcattgacaaagccaaaaacttgtttgaagaaggtggtgattgggaaaggaagaataggctgaaagtgtacgaaggactgtactgcatgtccactcgaaatttcgagaaggctgccaagttgtttttggattccatttcaacctttaccacctatgaactttttccctatgacacctttatattttatacagttttgaccagcattatatcattggatagagtttccctaaagcaaaaggtagtggatgctccagagatcttgacagtgattggcaaaatcccttatctttcagagtttttgaactccttatatgattgtcaatacaagtcttttttctcagcatttgctggcctgacggagcaaattaagttggaccgctatctgcatccacacttccgatattacatgagggaggtcagaaccgttgtttattcccaatttttggaatcttacaagagtgtgacaattgaagccatggcaaaagcctttggagtgacagaggatttcattgatgtggagctatcacgctttattgcagcagggaagcttcattgtaagattgataaagttgaaggtgttcttgaaactaatcgccctgatgctaagaatgctctttaccaagcaactattaagcaaggggacttcctattgaatcggatccagaaattgtcacgtgtgatagatctttaggtcattttttgcattttagactaaaagtttattggaaaggcagagataacgacaatttcacggtattttactacgagggtgaggcacggcatttctgtagtccatttgatgtgcaaatatgattaattaaatttgtcaaatccaaatatgtcaatcagttttcaatt

SEQ ID NO: 53740 - protein, 386 aa, Glycine max
  peptide (1)..(386): Ceres Seq. ID no. 15169359
  misc_feature (251)..(355): Pfam Name: PCI domain Pfam Description: PCI domain
  misc_feature (4)..(386): Homolog of NCBI NO: 29436940 NR Description: Unknown (protein for MGC:56471) [Danio rerio]
  misc_feature (4)..(386): Homolog of NCBI NO: 20978552 NR Description: 26S proteasome non-ATPase regulatory subunit 6
  misc_feature (4)..(386): Homolog of NCBI NO: 38454206 NR Description: Unknown (protein for MGC:72968) [Rattus
  misc_feature (4)..(386): Homolog of NCBI NO: 7661914 NR Description: KIAA0107 gene product [Homo sapiens]
  misc_feature (4)..(386): Homolog of NCBI NO: 21313464 NR Description: RIKEN cDNA 2400006A19 [Mus musculus]
  misc_feature (155)..(386): Homolog of NCBI NO: 2982297 NR Description: KIAA0107-like protein [Picea mariana]
  misc_feature (3)..(386): Homolog of NCBI NO: 20978545 NR Description: 26S proteasome non-ATPase regulatory subunit 6
  misc_feature (272)..(386): Homolog of NCBI NO: 7484780 NR Description: 26S proteasome regulatory particle chain RPN7
  misc_feature (3)..(272): Homolog of NCBI NO: 7484780 NR Description: 26S proteasome regulatory particle chain RPN7
  misc_feature (3)..(386): Homolog of NCBI NO: 18416433 NR Description: 26S proteasome regulatory subunit (RPN7),
MEGEEGSQQPQLVLGDKLFLLRQPDVQDIDKVRYKEDVFTHINQNDMVPLYETLVADSVLDLDRALLDSMRAKIHDELANLDEKIADAEENLGESEVREAHLAKSLFFIRIMDKEKALEHLKVTETKTVAVGQKMDLVFYTLQLGFFDMDFDLISKSIDKAKNLFEEGGDWERKNRLKVYEGLYCMSTRNFEKAAKLFLDSISTFTTYELFPYDTFIFYTVLTSIISLDRVSLKQKVVDAPEILTVIGKIPYLSEFLNSLYDCQYKSFFSAFAGLTEQIKLDRYLHPHFRYYMREVRTVVYSQFLESYKSVTIEAMAKAFGVTEDFIDVELSRFIAAGKLHCKIDKVEGVLETNRPDAKNALYQATIKQGDFLLNRIQKLSRVIDL

SEQ ID NO: 53741 - protein, 340 aa, Glycine max
  peptide (1)..(340): Ceres Seq. ID no. 15169360
  misc_feature (205)..(309): Pfam Name: PCI domain Pfam Description: PCI domain
  misc_feature (1)..(340): Homolog of NCBI NO: 29436940 NR Description: Unknown (protein for MGC:56471) [Danio rerio]
  misc_feature (1)..(340): Homolog of NCBI NO: 20978552 NR Description: 26S proteasome non-ATPase regulatory subunit 6
  misc_feature (1)..(340): Homolog of NCBI NO: 38454206 NR Description: Unknown (protein for MGC:72968) [Rattus
  misc_feature (1)..(340): Homolog of NCBI NO: 7661914 NR Description: KIAA0107 gene product [Homo sapiens]
  misc_feature (1)..(340): Homolog of NCBI NO: 21313464 NR Description: RIKEN cDNA 2400006A19 [Mus musculus]
  misc_feature (109)..(340): Homolog of NCBI NO: 2982297 NR Description: KIAA0107-like protein [Picea mariana]
  misc_feature (1)..(340): Homolog of NCBI NO: 20978545 NR Description: 26S proteasome non-ATPase regulatory subunit 6
  misc_feature (226)..(340): Homolog of NCBI NO: 7484780 NR Description: 26S proteasome regulatory particle chain RPN7
  misc_feature (1)..(226): Homolog of NCBI NO: 7484780 NR Description: 26S proteasome regulatory particle chain RPN7
  misc_feature (1)..(340): Homolog of NCBI NO: 18416433 NR Description: 26S proteasome regulatory subunit (RPN7),
MVPLYETLVADSVLDLDRALLDSMRAKIHDELANLDEKIADAEENLGESEVREAHLAKSLFFIRIMDKEKALEHLKVTETKTVAVGQKMDLVFYTLQLGFFDMDFDLISKSIDKAKNLFEEGGDWERKNRLKVYEGLYCMSTRNFEKAAKLFLDSISTFTTYELFPYDTFIFYTVLTSIISLDRVSLKQKVVDAPEILTVIGKIPYLSEFLNSLYDCQYKSFFSAFAGLTEQIKLDRYLHPHFRYYMREVRTVVYSQFLESYKSVTIEAMAKAFGVTEDFIDVELSRFIAAGKLHCKIDKVEGVLETNRPDAKNALYQATIKQGDFLLNRIQKLSRVIDL

SEQ ID NO: 53742 - protein, 317 aa, Glycine max
  peptide (1)..(317): Ceres Seq. ID no. 15169361
  misc_feature (182)..(286): Pfam Name: PCI domain Pfam Description: PCI domain
  misc_feature (1)..(317): Homolog of NCBI NO: 29436940 NR Description: Unknown (protein for MGC:56471) [Danio rerio]
  misc_feature (1)..(317): Homolog of NCBI NO: 20978552 NR Description: 26S proteasome non-ATPase regulatory subunit 6
  misc_feature (1)..(317): Homolog of NCBI NO: 38454206 NR Description: Unknown (protein for MGC:72968) [Rattus
  misc_feature (1)..(317): Homolog of NCBI NO: 7661914 NR Description: KIAA0107 gene product [Homo sapiens]
  misc_feature (1)..(317): Homolog of NCBI NO: 21313464 NR Description: RIKEN cDNA 2400006A19 [Mus musculus]
  misc_feature (86)..(317): Homolog of NCBI NO: 2982297 NR Description: KIAA0107-like protein [Picea mariana]
  misc_feature (1)..(317): Homolog of NCBI NO: 20978545 NR Description: 26S proteasome non-ATPase regulatory subunit 6
  misc_feature (203)..(317): Homolog of NCBI NO: 7484780 NR Description: 26S proteasome regulatory particle chain RPN7
  misc_feature (1)..(203): Homolog of NCBI NO: 7484780 NR Description: 26S proteasome regulatory particle chain RPN7
  misc_feature (1)..(317): Homolog of NCBI NO: 18416433 NR Description: 26S proteasome regulatory subunit (RPN7),
MRAKIHDELANLDEKIADAEENLGESEVREAHLAKSLFFIRIMDKEKALEHLKVTETKTVAVGQKMDLVFYTLQLGFFDMDFDLISKSIDKAKNLFEEGGDWERKNRLKVYEGLYCMSTRNFEKAAKLFLDSISTFTTYELFPYDTFIFYTVLTSIISLDRVSLKQKVVDAPEILTVIGKIPYLSEFLNSLYDCQYKSFFSAFAGLTEQIKLDRYLHPHFRYYMREVRTVVYSQFLESYKSVTIEAMAKAFGVTEDFIDVELSRFIAAGKLHCKIDKVEGVLETNRPDAKNALYQATIKQGDFLLNRIQKLSRVIDL

SEQ ID NO: 53743 - DNA, 1640 bp, Glycine max
  misc_feature (1)..(1640): Ceres Seq. ID no. 13579556
caactgccaccaacccttcgccgcacggtgggcgtggtgctttgccttctgaaggtggtagcccttcagacttgctcttcttagctggtggtggttctgctgtcttctagcttcttcttaactcttttttctttttactacttttaagctaccttgttttcaaaataacaaaaacaaacactttcttacttcataagatcaccttttcttcatcttctacttctccttcactaaaatgatgctcaaaatcaagagggttcccactgtcgtttccaacttccaaaaagacgacgctgcagactctcctcgtcccgtcggaggttgtggtcggaattgcctcaaagcttgttgcattccagatgcaaagctgcctttgtatggtttcaagaaggctaatattgggaaggatttggccctgcatgcatgcgccggggagcctcccctcgcattcctcgactctcttcttcttggagagtgggaagatcgcatgcagagaggactttttcgctatgatgttaccgcctgtgaaaccaaggtgattcctggtgaatatggtttcgttgcccagcttaacgagggtcgtcacctcaagaagaggccaactgagttccgagttgataaggtccttcaaccctttgatgaaaacaaattcaactttaccaaagtcgggcaagaagaggtcctcttccaatttgaagctagcgaggatggacaagtccagttctttccaaatgctccagttgatgttgacaattctcccagctttgttgccatcaatgtcagtcctattgagtatgggcatgttttgctgattccgcgcatatttgagtgtttgcctcaaaggattgaccgtgagagcttcctccttgcacttcagatggcagtggaagccgataatccttattttcgattgggttacaacagcttgggtgcttttgcaactatcaaccattcttcacttccaggcttattatttggctctgcccttcccaattgagaaggcccccactaagagaattgcaagtgtaaatggtggggtgaagatatctgaactgttgaagtatccggttagaggctttgtctttgagggcggcgaaatgctggaagatctatcmaacgttgtttcagatgcatgtatatgtcttcagaacaacaacatacctttcaatgttythatctctghctgtggaaascaagtgtatrcactgttaccacagtgttatgcagagaaacaagctcttggagaagtgaatgctgagcttcttgacacccaagtgaatcctgctgtgtgggaaattagtggrcacatggttttaaagaggaggaaggattatgatgaggcgtctgaaggcaatgcttggaggcttcttgctgaggtgtccctttctcaagagaggtttcaagaagtcaatgatcttgtttttgaagccattggctgtggtgaattggaggatgtcaatgttcaaagtgtcaaaaaagaagttgatgcagtcagcacaagcgaacaccctactgtggtggtggtggctggttcacaagaatgtgtggttctacagtaacaaggctcttgtattttgaacaaattcagaaaatctgcagtgttttaagaataattgctgaaatgtgtcaccgtttaagtc

SEQ ID NO: 53744 - protein, 253 aa, Glycine max
  peptide (1)..(253): Ceres Seq. ID no. 15222687
  misc_feature (69)..(253): Homolog of NCBI NO: 34527348 NR Description: unnamed protein product [Homo sapiens]
  misc_feature (69)..(252): Homolog of NCBI NO: 26351153 NR Description: unnamed protein product [Mus musculus]
  misc_feature (69)..(252): Homolog of NCBI NO: 22766878 NR Description: D330012F22Rik protein [Mus musculus]
  misc_feature (69)..(252): Homolog of NCBI NO: 27677438 NR Description: similar to CG3552-PC [Drosophila melanogaster]
  misc_feature (100)..(239): Homolog of NCBI NO: 34907712 NR Description: P0035F12.16 [Oryza sativa (japonica
  misc_feature (1)..(239): Homolog of NCBI NO: 15240467 NR Description: expressed protein [Arabidopsis thaliana]
  misc_feature (2)..(239): Homolog of NCBI NO: 21070346 NR Description: VTC2 [Arabidopsis thaliana]
  misc_feature (2)..(239): Homolog of NCBI NO: 7452423 NR Description: hypothetical protein F10M23.190 - Arabidopsis
  misc_feature (2)..(239): Homolog of NCBI NO: 15810139 NR Description: unknown protein [Arabidopsis thaliana]
  misc_feature (2)..(239): Homolog of NCBI NO: 18416877 NR Description: expressed protein [Arabidopsis thaliana]
MMLKIKRVPTVVSNFQKDDAADSPRPVGGCGRNCLKACCIPDAKLPLYGFKKANIGKDLALHACAGEPPLAFLDSLLLGEWEDRMQRGLFRYDVTACETKVIPGEYGFVAQLNEGRHLKKRPTEFRVDKVLQPFDENKFNFTKVGQEEVLFQFEASEDGQVQFFPNAPVDVDNSPSFVAINVSPIEYGHVLLIPRIFECLPQRIDRESFLLALQMAVEADNPYFRLGYNSLGAFATINHSSLPGLLFGSALPN

SEQ ID NO: 53745 - protein, 252 aa, Glycine max
  peptide (1)..(252): Ceres Seq. ID no. 15222688
  misc_feature (68)..(252): Homolog of NCBI NO: 34527348 NR Description: unnamed protein product [Homo sapiens]
  misc_feature (68)..(251): Homolog of NCBI NO: 26351153 NR Description: unnamed protein product [Mus musculus]
  misc_feature (68)..(251): Homolog of NCBI NO: 22766878 NR Description: D330012F22Rik protein [Mus musculus]
  misc_feature (68)..(251): Homolog of NCBI NO: 27677438 NR Description: similar to CG3552-PC [Drosophila melanogaster]
  misc_feature (99)..(238): Homolog of NCBI NO: 34907712 NR Description: P0035F12.16 [Oryza sativa (japonica
  misc_feature (1)..(238): Homolog of NCBI NO: 15240467 NR Description: expressed protein [Arabidopsis thaliana]
  misc_feature (1)..(238): Homolog of NCBI NO: 21070346 NR Description: VTC2 [Arabidopsis thaliana]
  misc_feature (1)..(238): Homolog of NCBI NO: 7452423 NR Description: hypothetical protein F10M23.190 - Arabidopsis
  misc_feature (1)..(238): Homolog of NCBI NO: 15810139 NR Description: unknown protein [Arabidopsis thaliana]
  misc_feature (1)..(238): Homolog of NCBI NO: 18416877 NR Description: expressed protein [Arabidopsis thaliana]
MLKIKRVPTVVSNFQKDDAADSPRPVGGCGRNCLKACCIPDAKLPLYGFKKANIGKDLALHACAGEPPLAFLDSLLLGEWEDRMQRGLFRYDVTACETKVIPGEYGFVAQLNEGRHLKKRPTEFRVDKVLQPFDENKFNFTKVGQEEVLFQFEASEDGQVQFFPNAPVDVDNSPSFVAINVSPIEYGHVLLIPRIFECLPQRIDRESFLLALQMAVEADNPYFRLGYNSLGAFATINHSSLPGLLFGSALPN

SEQ ID NO: 53746 - protein, 169 aa, Glycine max
  peptide (1)..(169): Ceres Seq. ID no. 15222689
  misc_feature (1)..(169): Homolog of NCBI NO: 34527348 NR Description: unnamed protein product [Homo sapiens]
  misc_feature (1)..(168): Homolog of NCBI NO: 26351153 NR Description: unnamed protein product [Mus musculus]
  misc_feature (1)..(168): Homolog of NCBI NO: 22766878 NR Description: D330012F22Rik protein [Mus musculus]
  misc_feature (1)..(168): Homolog of NCBI NO: 27677438 NR Description: similar to CG3552-PC [Drosophila melanogaster]
  misc_feature (16)..(155): Homolog of NCBI NO: 34907712 NR Description: P0035F12.16 [Oryza sativa (japonica
  misc_feature (1)..(155): Homolog of NCBI NO: 15240467 NR Description: expressed protein [Arabidopsis thaliana]
  misc_feature (1)..(155): Homolog of NCBI NO: 21070346 NR Description: VTC2 [Arabidopsis thaliana]
  misc_feature (1)..(155): Homolog of NCBI NO: 7452423 NR Description: hypothetical protein F10M23.190 - Arabidopsis
  misc_feature (1)..(155): Homolog of NCBI NO: 15810139 NR Description: unknown protein [Arabidopsis thaliana]
  misc_feature (1)..(155): Homolog of NCBI NO: 18416877 NR Description: expressed protein [Arabidopsis thaliana]
MQRGLFRYDVTACETKVIPGEYGFVAQLNEGRHLKKRPTEFRVDKVLQPFDENKFNFTKVGQEEVLFQFEASEDGQVQFFPNAPVDVDNSPSFVAINVSPIEYGHVLLIPRIFECLPQRIDRESFLLALQMAVEADNPYFRLGYNSLGAFATINHSSLPGLLFGSALPN

SEQ ID NO: 53747 - DNA, 1849 bp, Glycine max
  misc_feature (1)..(1849): Ceres Seq. ID no. 14304678
gttgttacttagtgcaggtaagttaagaaaatggtatccatttcccaagcacaccattgacttggtacagtttcgagggcgcatcatcatcaccgattcaccgatgggtgacgcgaacttcgccttctttgttctctttcttcttcccgtgtttcttctggcggtgctctacttcctggtccgtccgcgtcccgtgaagatcccgattaagaaccggcacgttttcatcacgggcggatccagcggtatcgggctggcgctggcgcaccgcgcggcggcggagggtgcgcgcgtctcgatcctcgcccggtcaccggacaagctagaggaggcgcgcaacgcgatccgcctcgccacagggatggaggtggcggcattcgcggcagacgtgcgggacttcgaggcggtgaagcgcgcggtcgacgatgcgggccccatcgacgtgctgctgctgaaccacggcgtcttcgtggcgctggagctggataagatggaactgagtgaggtcaagttcaccatggacgtaaatctcatgggaacgttgaatctcatcaaggccgcgctgcctgcaatgaagaaccgcaacgatccgctgcccgcttccattgctcttgtttcctcacaggccggtcaggtgggaatttatggttatgtagcttattcggcaagtaaatttggtcttcgtggtttagcagaatcattgcaacaagaggttatagaagataacattcatgtttctatgatattccctccagatacggatactcctgggttagcagaagaaaacaagagaagaccggagctcaccaaaatcattacagcctcctctggttctatgaaagctgatgaagttgctcagaaagctttggatggtataaaatgtggcgattttattgtttcttgcaatttcgagggaattgcactatccctagcaactgcaggtttatcccctcagaggtctttcttaatggcgtttcttgaggttgttgctgctggaatcctacggattgttgcactaggtatgcagtggacttggtatagaagtatagagaaatatcacagccaaaggaagggtaagtgttgcacaaaattatatatctatgaagggatgaggaaatcatctcttattttgtcttaatttaattctcatttggccaataacttgttaagattaacaaaaaagtgttacttattctatctatctattggttcctatagtttacccagtttccaaattagtctctagaatttaaaagtttcacattagacccatagaattaccaaatgtttctgattggctcccaattgtgaccaaatgtacggcatctgttaattagagccgacatgggaaatggtgaggttgtggcaaccacttttgcttgcttggactagagaggtggccaaattaatccatttctctcccgggatagtgaaaatcaaatcacatgacagtgtagggcacatgaaatgggttgatttggttaccttatgatacacacaagcaaaatcattgccacatcaattcaccatatgcttatcatagcactaactaacagatgcccagcagttggtaaaggtattggttttggaccaaattagaaacatttagcaattccaaggatccatttagaaacttttaagcaacaggaactaatttaaacttgggttaaactatggaccaataaaatatttaaagtataaaaccattaacaagcttcaaagtggttactaagagtttgcattggatattagtcattaacaatttgtttagcaatttgcatgaaccatgcccatttatgttcctgggctgtagaagtcataatgtaatactaaggcagtctttctaatc

SEQ ID NO: 53748 - protein, 378 aa, Glycine max
  peptide (1)..(378): Ceres Seq. ID no. 14304679
  misc_feature (39)..(357): Homolog of NCBI NO: 39583655 NR Description: Hypothetical protein CBG08294 [Caenorhabditis
  misc_feature (73)..(292): Homolog of NCBI NO: 15964328 NR Description: RIBITOL TYPE DEHYDROGENASE PROTEIN [Sinorhizobium
  misc_feature (55)..(357): Homolog of NCBI NO: 31230830 NR Description: ENSANGP00000014198 [Anopheles gambiae]
  misc_feature (50)..(339): Homolog of NCBI NO: 34878781 NR Description: similar to 6330410P18Rik protein [Rattus
  misc_feature (41)..(339): Homolog of NCBI NO: 30585239 NR Description: Homo sapiens follicular lymphoma variant
  misc_feature (41)..(339): Homolog of NCBI NO: 4503817 NR Description: follicular lymphoma variant translocation 1 [Homo
  misc_feature (41)..(339): Homolog of NCBI NO: 27882572 NR Description: Similar to follicular lymphoma variant
  misc_feature (40)..(364): Homolog of NCBI NO: 15239681 NR Description: short-chain dehydrogenase/reductase family
  misc_feature (43)..(359): Homolog of NCBI NO: 30679701 NR Description: short-chain dehydrogenase/reductase family
  misc_feature (43)..(359): Homolog of NCBI NO: 7658344 NR Description: unknown protein; 15741-13972 [Arabidopsis
LLLSAGKLRKWYPFPKHTIDLVQFRGRIIITDSPMGDANFAFFVLFLLPVFLLAVLYFLVRPRPVKIPIKNRHVFITGGSSGIGLALAHRAAAEGARVSILARSPDKLEEARNAIRLATGMEVAAFAADVRDFEAVKRAVDDAGPIDVLLLNHGVFVALELDKMELSEVKFTMDVNLMGTLNLIKAALPAMKNRNDPLPASIALVSSQAGQVGIYGYVAYSASKFGLRGLAESLQQEVIEDNIHVSMIFPPDTDTPGLAEENKRRPELTKIITASSGSMKADEVAQKALDGIKCGDFIVSCNFEGIALSLATAGLSPQRSFLMAFLEVVAAGILRIVALGMQWTWYRSIEKYHSQRKGKCCTKLYIYEGMRKSSLILS

SEQ ID NO: 53749 - protein, 344 aa, Glycine max
  peptide (1)..(344): Ceres Seq. ID no. 14304680
  misc_feature (5)..(323): Homolog of NCBI NO: 39583655 NR Description: Hypothetical protein CBG08294 [Caenorhabditis
  misc_feature (39)..(258): Homolog of NCBI NO: 15964328 NR Description: RIBITOL TYPE DEHYDROGENASE PROTEIN [Sinorhizobium
  misc_feature (21)..(323): Homolog of NCBI NO: 31230830 NR Description: ENSANGP00000014198 [Anopheles gambiae]
  misc_feature (16)..(305): Homolog of NCBI NO: 34878781 NR Description: similar to 6330410P18Rik protein [Rattus
  misc_feature (7)..(305): Homolog of NCBI NO: 30585239 NR Description: Homo sapiens follicular lymphoma variant
  misc_feature (7)..(305): Homolog of NCBI NO: 4503817 NR Description: follicular lymphoma variant translocation 1 [Homo
  misc_feature (7)..(305): Homolog of NCBI NO: 27882572 NR Description: Similar to follicular lymphoma variant
  misc_feature (6)..(330): Homolog of NCBI NO: 15239681 NR Description: short-chain dehydrogenase/reductase family
  misc_feature (9)..(325): Homolog of NCBI NO: 30679701 NR Description: short-chain dehydrogenase/reductase family
  misc_feature (9)..(325): Homolog of NCBI NO: 7658344 NR Description: unknown protein; 15741-13972 [Arabidopsis
MGDANFAFFVLFLLPVFLLAVLYFLVRPRPVKIPIKNRHVFITGGSSGIGLALAHRAAAEGARVSILARSPDKLEEARNAIRLATGMEVAAFAADVRDFEAVKRAVDDAGPIDVLLLNHGVFVALELDKMELSEVKFTMDVNLMGTLNLIKAALPAMKNRNDPLPASIALVSSQAGQVGIYGYVAYSASKFGLRGLAESLQQEVIEDNIHVSMIFPPDTDTPGLAEENKRRPELTKIITASSGSMKADEVAQKALDGIKCGDFIVSCNFEGIALSLATAGLSPQRSFLMAFLEVVAAGILRIVALGMQWTWYRSIEKYHSQRKGKCCTKLYIYEGMRKSSLILS

SEQ ID NO: 53750 - protein, 258 aa, Glycine max
  peptide (1)..(258): Ceres Seq. ID no. 14304681
  misc_feature (1)..(237): Homolog of NCBI NO: 39583655 NR Description: Hypothetical protein CBG08294 [Caenorhabditis
  misc_feature (1)..(172): Homolog of NCBI NO: 15964328 NR Description: RIBITOL TYPE DEHYDROGENASE PROTEIN [Sinorhizobium
  misc_feature (1)..(237): Homolog of NCBI NO: 31230830 NR Description: ENSANGP00000014198 [Anopheles gambiae]
  misc_feature (1)..(219): Homolog of NCBI NO: 34878781 NR Description: similar to 6330410P18Rik protein [Rattus
  misc_feature (1)..(219): Homolog of NCBI NO: 30585239 NR Description: Homo sapiens follicular lymphoma variant
  misc_feature (1)..(219): Homolog of NCBI NO: 4503817 NR Description: follicular lymphoma variant translocation 1 [Homo
  misc_feature (1)..(219): Homolog of NCBI NO: 27882572 NR Description: Similar to follicular lymphoma variant
  misc_feature (1)..(244): Homolog of NCBI NO: 15239681 NR Description: short-chain dehydrogenase/reductase family
  misc_feature (1)..(239): Homolog of NCBI NO: 30679701 NR Description: short-chain dehydrogenase/reductase family
  misc_feature (1)..(239): Homolog of NCBI NO: 7658344 NR Description: unknown protein; 15741-13972 [Arabidopsis
MEVAAFAADVRDFEAVKRAVDDAGPIDVLLLNHGVFVALELDKMELSEVKFTMDVNLMGTLNLIKAALPAMKNRNDPLPASIALVSSQAGQVGIYGYVAYSASKFGLRGLAESLQQEVIEDNIHVSMIFPPDTDTPGLAEENKRRPELTKIITASSGSMKADEVAQKALDGIKCGDFIVSCNFEGIALSLATAGLSPQRSFLMAFLEVVAAGILRIVALGMQWTWYRSIEKYHSQRKGKCCTKLYIYEGMRKSSLILS

SEQ ID NO: 53751 - DNA, 1370 bp, Glycine max
  misc_feature (1)..(1370): Ceres Seq. ID no. 15175900
gaaggtaagatcgatagcagaaaaggaaaaaatgacgatggacgatgatagctccatatatgtagggggtcttccctacgacgccaccgaagaaaccattcgcaccgtcttcaatttgtatggcgctatccttgatgttaagataatcaacgacccacgcaccaggggcaagtgctattgttttgttactttcacaaatcctaggtctgcaattgatgccatcaacgacatgaatggcagaaccattgacggccgtgtggttaaagttaacggggtgaggactcgtgggggcaggtcaaattttggcagagaacgttattactatcataatgatgagaggaatggagattgggatcgcagtagggatcgagaccgagattatgatcatgatagtaatgatagggatggatataggaatcggagcagtgattggggtcgagaccgtgacaggtctcgagatcgtgatcaggacagggatagaaggtttgagcatatgcatgattatgatcaagccagagaagctatgctagaaaatgactggatccgagaggatgatagagttgaaaatgaacaagaacatagcaggggacatggtggagatgttgatagagatcacaacatagatttgaatgtagacaggaaaatggataggaccagtgatcctgatagaagttttggtgaggatagaaaagatcagtcaaggagaaacaatgacttgaatgttacaaatcaacatatcatggatctttcatcagattcagctggtactcacaatgagcagttagaagctcaattagagaggtcaactcaacagcttgatcaactaaaaaaggaggtttctcagatggaagagggattggaagagaaaagactccatgttaaggaattacaaaagcaatctaagaaactggaggatgcagtgatcaatgcaaagaaaaactcttcatatcgtcagatgcagttgatgaagctgcataaaggttttctgcaagtgaaagattgcacagaaaaactaaaaactagtgaaaaagaacttcaggctctaattgatacagcaatgtcagagattgactgtgatggattaaaggatggacaactaacaaatggaagtcttgatggtagattgtaatatatctttcggaggttcagattgtgtcattgatgcttaaaatgtgtttagcacagaataccctaatgttatatggagaagaaaaaaaggctggataattattctcttttattattccgctccagtctctactaaataacattaatagagttttgtttatacttttaagttgttggtaaacttggtcattgtaacttcctttgttataaattttcactagagaaaaccagctgacttcttg

SEQ ID NO: 53752 - protein, 375 aa, Glycine max
  peptide (1)..(375): Ceres Seq. ID no. 15175901
  misc_feature (19)..(89): Pfam Name: RNA recognition motif. (a.k.a. RRM, RBD, or RNP domain) Pfam Description: RNA recognition motif. (a.k.a. RRM, RBD, or RNP
  misc_feature (103)..(313): Homolog of NCBI NO: 23508822 NR Description: eukaryotic translation initiation factor 3
  misc_feature (15)..(156): Homolog of NCBI NO: 6680946 NR Description: cold inducible RNA binding protein
  misc_feature (15)..(169): Homolog of NCBI NO: 30585341 NR Description: Homo sapiens cold inducible RNA binding protein
  misc_feature (15)..(169): Homolog of NCBI NO: 4502847 NR Description: cold inducible RNA binding protein
  misc_feature (11)..(155): Homolog of NCBI NO: 20975276 NR Description: cold inducible RNA-binding protein alpha [Hyla
  misc_feature (13)..(148): Homolog of NCBI NO: 28856196 NR Description: Similar to cold inducible RNA binding protein
  misc_feature (122)..(355): Homolog of NCBI NO: 21553602 NR Description: glycine-rich RNA-binding protein-like
  misc_feature (122)..(355): Homolog of NCBI NO: 18420085 NR Description: RNA recognition motif (RRM)-containing protein
  misc_feature (11)..(339): Homolog of NCBI NO: 18420085 NR Description: RNA recognition motif (RRM)-containing protein
  misc_feature (11)..(339): Homolog of NCBI NO: 21553602 NR Description: glycine-rich RNA-binding protein-like
KVRSIAEKEKMTMDDDSSIYVGGLPYDATEETIRTVFNLYGAILDVKIINDPRTRGKCYCFVTFTNPRSAIDAINDMNGRTIDGRVVKVNGVRTRGGRSNFGRERYYYHNDERNGDWDRSRDRDRDYDHDSNDRDGYRNRSSDWGRDRDRSRDRDQDRDRRFEHMHDYDQAREAMLENDWIREDDRVENEQEHSRGHGGDVDRDHNIDLNVDRKMDRTSDPDRSFGEDRKDQSRRNNDLNVTNQHIMDLSSDSAGTHNEQLEAQLERSTQQLDQLKKEVSQMEEGLEEKRLHVKELQKQSKKLEDAVINAKKNSSYRQMQLMKLHKGFLQVKDCTEKLKTSEKELQALIDTAMSEIDCDGLKDGQLTNGSLDGRL

SEQ ID NO: 53753 - protein, 365 aa, Glycine max
  peptide (1)..(365): Ceres Seq. ID no. 15175902
  misc_feature (9)..(79): Pfam Name: RNA recognition motif. (a.k.a. RRM, RBD, or RNP domain) Pfam Description: RNA recognition motif. (a.k.a. RRM, RBD, or RNP
  misc_feature (93)..(303): Homolog of NCBI NO: 23508822 NR Description: eukaryotic translation initiation factor 3
  misc_feature (5)..(146): Homolog of NCBI NO: 6680946 NR Description: cold inducible RNA binding protein
  misc_feature (5)..(159): Homolog of NCBI NO: 30585341 NR Description: Homo sapiens cold inducible RNA binding protein
  misc_feature (5)..(159): Homolog of NCBI NO: 4502847 NR Description: cold inducible RNA binding protein
  misc_feature (1)..(145): Homolog of NCBI NO: 20975276 NR Description: cold inducible RNA-binding protein alpha [Hyla
  misc_feature (3)..(138): Homolog of NCBI NO: 28856196 NR Description: Similar to cold inducible RNA binding protein
  misc_feature (112)..(345): Homolog of NCBI NO: 21553602 NR Description: glycine-rich RNA-binding protein-like
  misc_feature (112)..(345): Homolog of NCBI NO: 18420085 NR Description: RNA recognition motif (RRM)-containing protein
  misc_feature (1)..(329): Homolog of NCBI NO: 18420085 NR Description: RNA recognition motif (RRM)-containing protein
  misc_feature (1)..(329): Homolog of NCBI NO: 21553602 NR Description: glycine-rich RNA-binding protein-like
MTMDDDSSIYVGGLPYDATEETIRTVFNLYGAILDVKIINDPRTRGKCYCFVTFTNPRSAIDAINDMNGRTIDGRVVKVNGVRTRGGRSNFGRERYYYHNDERNGDWDRSRDRDRDYDHDSNDRDGYRNRSSDWGRDRDRSRDRDQDRDRRFEHMHDYDQAREAMLENDWIREDDRVENEQEHSRGHGGDVDRDHNIDLNVDRKMDRTSDPDRSFGEDRKDQSRRNNDLNVTNQHIMDLSSDSAGTHNEQLEAQLERSTQQLDQLKKEVSQMEEGLEEKRLHVKELQKQSKKLEDAVINAKKNSSYRQMQLMKLHKGFLQVKDCTEKLKTSEKELQALIDTAMSEIDCDGLKDGQLTNGSLDGRL

SEQ ID NO: 53754 - protein, 363 aa, Glycine max
  peptide (1)..(363): Ceres Seq. ID no. 15175903
  misc_feature (7)..(77): Pfam Name: RNA recognition motif. (a.k.a. RRM, RBD, or RNP domain) Pfam Description: RNA recognition motif. (a.k.a. RRM, RBD, or RNP
  misc_feature (91)..(301): Homolog of NCBI NO: 23508822 NR Description: eukaryotic translation initiation factor 3
  misc_feature (3)..(144): Homolog of NCBI NO: 6680946 NR Description: cold inducible RNA binding protein
  misc_feature (3)..(157): Homolog of NCBI NO: 30585341 NR Description: Homo sapiens cold inducible RNA binding protein
  misc_feature (3)..(157): Homolog of NCBI NO: 4502847 NR Description: cold inducible RNA binding protein
  misc_feature (1)..(143): Homolog of NCBI NO: 20975276 NR Description: cold inducible RNA-binding protein alpha [Hyla
  misc_feature (1)..(136): Homolog of NCBI NO: 28856196 NR Description: Similar to cold inducible RNA binding protein
  misc_feature (110)..(343): Homolog of NCBI NO: 21553602 NR Description: glycine-rich RNA-binding protein-like
  misc_feature (110)..(343): Homolog of NCBI NO: 18420085 NR Description: RNA recognition motif (RRM)-containing protein
  misc_feature (1)..(327): Homolog of NCBI NO: 18420085 NR Description: RNA recognition motif (RRM)-containing protein
  misc_feature (1)..(327): Homolog of NCBI NO: 21553602 NR Description: glycine-rich RNA-binding protein-like
MDDDSSIYVGGLPYDATEETIRTVFNLYGAILDVKIINDPRTRGKCYCFVTFTNPRSAIDAINDMNGRTIDGRVVKVNGVRTRGGRSNFGRERYYYHNDERNGDWDRSRDRDRDYDHDSNDRDGYRNRSSDWGRDRDRSRDRDQDRDRRFEHMHDYDQAREAMLENDWIREDDRVENEQEHSRGHGGDVDRDHNIDLNVDRKMDRTSDPDRSFGEDRKDQSRRNNDLNVTNQHIMDLSSDSAGTHNEQLEAQLERSTQQLDQLKKEVSQMEEGLEEKRLHVKELQKQSKKLEDAVINAKKNSSYRQMQLMKLHKGFLQVKDCTEKLKTSEKELQALIDTAMSEIDCDGLKDGQLTNGSLDGRL

SEQ ID NO: 53755 - DNA, 1438 bp, Glycine max
  misc_feature (1)..(1438): Ceres Seq. ID no. 14310740
aagaacaaaaaataaaaataatattcttcgttattatttcatttcaatttcgttttcgttttcgttttctgttttgatttgatcttccaatggcgtccgatggctttaccgacaagaacaccgtgttcagaaagctcaaggcgaagtctgaaaataagatgtgtttcgattgcaatgcgaagaaccctacctgggcgtccgtcacgtatgggatctttctctgcatcgattgctccgccgtacaccgcagtctcggcgtgcacatcagcttcgtgaggtctacaaatttagactcatggagtcctgagcaactaaaaacaatgagctttggaggaaacaatcgtgcacaggttttctttaagcaacatggttggaatgatggtggtaaaatagaggctaagtacacatctagagctgcagacttgtataggcaaattctttcaaaggaagttgcaaaaagtatggctgaggatggaggcttgccttcatcacctgttgcttctcagtcttcccagggggttaatgggctaccagaagtcaagaccaatgaagtgccaaaagaaaacattctggagaagccagaaaagcctgagagcacttcttcccctagagcttcacatacagtaatttcaagtaccgttaagaaacctattggtgctaagaaagcagtgaagagtggggggctcggcgctcgtaaactcactaaaaagccaagtgagtctctctatgagcagaagcctgaggaaccccctgctccagtttcatcttcaacaaacaatatgcctgctgggccatctccaacgtctcggtttgagtatgcagaaaatgtccaatcatctgagttgaacactggaggttcacatttgcttagtcatgtgtctccaccaaagtcatcaagcttctttgcagactttggaatggatagtggctttccaaagaaatctgggccaagctcctccaaagtgcaaattcaggaaactgatgaagcaagaaggaagttctcaaatgctaaatctatttcttcatcccaatattttggagatcagaacaaggctgcagatgtggattctcaagctacattgtctaagttttcgggttcaagtgccatctccagtgctgatctttttggtgactcaagagacaacaacattgatcttactgctggtgacctcatcaatcgattatctttccaggcacaacaggatctctcttcccttaagaacattgcaggagagactggaaagaagctgagctcattggcctccacattgatgacagatcttcaggaccgaatcctctaaaatgtgtatgctctgtatttaagagaatctttggagttttttacatatgccagccaattatgtttcaaatgtaatagaagagttttcaatatacaattctttgagaaaataagatgctatattttcaggcttgtcac

SEQ ID NO: 53756 - protein, 403 aa, Glycine max
  peptide (1)..(403): Ceres Seq. ID no. 14310741
  misc_feature (10)..(126): Pfam Name: Putative GTPase activating protein for Arf Pfam Description: Putative GTPase activating protein for Arf
  misc_feature (1)..(129): Homolog of NCBI NO: 27695479 NR Description: Similar to ADP-ribosylation factor GTPase
  misc_feature (1)..(114): Homolog of NCBI NO: 37362182 NR Description: ADP-ribosylation factor GTPase activating protein
  misc_feature (130)..(401): Homolog of NCBI NO: 37362182 NR Description: ADP-ribosylation factor GTPase activating protein
  misc_feature (1)..(394): Homolog of NCBI NO: 18403775 NR Description: ARF GTPase-activating domain-containing protein
  misc_feature (1)..(403): Homolog of NCBI NO: 29126345 NR Description: putative zinc finger protein
  misc_feature (2)..(403): Homolog of NCBI NO: 37537094 NR Description: unknown protein [Oryza sativa (japonica
  misc_feature (1)..(403): Homolog of NCBI NO: 15237500 NR Description: ARF GTPase-activating domain-containing protein
  misc_feature (2)..(403): Homolog of NCBI NO: 13430530 NR Description: unknown protein [Arabidopsis thaliana]
  misc_feature (2)..(403): Homolog of NCBI NO: 18414983 NR Description: ARF GTPase-activating domain-containing protein
  misc_feature (2)..(403): Homolog of NCBI NO: 7487780 NR Description: hypothetical protein T6K21.70 - Arabidopsis
MASDGFTDKNTVFRKLKAKSENKMCFDCNAKNPTWASVTYGIFLCIDCSAVHRSLGVHISFVRSTNLDSWSPEQLKTMSFGGNNRAQVFFKQHGWNDGGKIEAKYTSRAADLYRQILSKEVAKSMAEDGGLPSSPVASQSSQGVNGLPEVKTNEVPKENILEKPEKPESTSSPRASHTVISSTVKKPIGAKKAVKSGGLGARKLTKKPSESLYEQKPEEPPAPVSSSTNNMPAGPSPTSRFEYAENVQSSELNTGGSHLLSHVSPPKSSSFFADFGMDSGFPKKSGPSSSKVQIQETDEARRKFSNAKSISSSQYFGDQNKAADVDSQATLSKFSGSSAISSADLFGDSRDNNIDLTAGDLINRLSFQAQQDLSSLKNIAGETGKKLSSLASTLMTDLQDRIL

SEQ ID NO: 53757 - protein, 380 aa, Glycine max
  peptide (1)..(380): Ceres Seq. ID no. 14310742
  misc_feature (1)..(103): Pfam Name: Putative GTPase activating protein for Arf Pfam Description: Putative GTPase activating protein for Arf
  misc_feature (1)..(106): Homolog of NCBI NO: 27695479 NR Description: Similar to ADP-ribosylation factor GTPase
  misc_feature (1)..(91): Homolog of NCBI NO: 37362182 NR Description: ADP-ribosylation factor GTPase activating protein
  misc_feature (107)..(378): Homolog of NCBI NO: 37362182 NR Description: ADP-ribosylation factor GTPase activating protein
  misc_feature (1)..(371): Homolog of NCBI NO: 18403775 NR Description: ARF GTPase-activating domain-containing protein
  misc_feature (1)..(380): Homolog of NCBI NO: 29126345 NR Description: putative zinc finger protein
  misc_feature (1)..(380): Homolog of NCBI NO: 37537094 NR Description: unknown protein [Oryza sativa (japonica
  misc_feature (1)..(380): Homolog of NCBI NO: 15237500 NR Description: ARF GTPase-activating domain-containing protein
  misc_feature (1)..(380): Homolog of NCBI NO: 13430530 NR Description: unknown protein [Arabidopsis thaliana]
  misc_feature (1)..(380): Homolog of NCBI NO: 18414983 NR Description: ARF GTPase-activating domain-containing protein
  misc_feature (1)..(380): Homolog of NCBI NO: 7487780 NR Description: hypothetical protein T6K21.70 - Arabidopsis
MCFDCNAKNPTWASVTYGIFLCIDCSAVHRSLGVHISFVRSTNLDSWSPEQLKTMSFGGNNRAQVFFKQHGWNDGGKIEAKYTSRAADLYRQILSKEVAKSMAEDGGLPSSPVASQSSQGVNGLPEVKTNEVPKENILEKPEKPESTSSPRASHTVISSTVKKPIGAKKAVKSGGLGARKLTKKPSESLYEQKPEEPPAPVSSSTNNMPAGPSPTSRFEYAENVQSSELNTGGSHLLSHVSPPKSSSFFADFGMDSGFPKKSGPSSSKVQIQETDEARRKFSNAKSISSSQYFGDQNKAADVDSQATLSKFSGSSAISSADLFGDSRDNNIDLTAGDLINRLSFQAQQDLSSLKNIAGETGKKLSSLASTLMTDLQDRIL

SEQ ID NO: 53758 - protein, 326 aa, Glycine max
  peptide (1)..(326): Ceres Seq. ID no. 14310743
  misc_feature (1)..(52): Homolog of NCBI NO: 27695479 NR Description: Similar to ADP-ribosylation factor GTPase
  misc_feature (1)..(37): Homolog of NCBI NO: 37362182 NR Description: ADP-ribosylation factor GTPase activating protein
  misc_feature (53)..(324): Homolog of NCBI NO: 37362182 NR Description: ADP-ribosylation factor GTPase activating protein
  misc_feature (1)..(317): Homolog of NCBI NO: 18403775 NR Description: ARF GTPase-activating domain-containing protein
  misc_feature (1)..(326): Homolog of NCBI NO: 29126345 NR Description: putative zinc finger protein
  misc_feature (1)..(326): Homolog of NCBI NO: 37537094 NR Description: unknown protein [Oryza sativa (japonica
  misc_feature (1)..(326): Homolog of NCBI NO: 15237500 NR Description: ARF GTPase-activating domain-containing protein
  misc_feature (1)..(326): Homolog of NCBI NO: 13430530 NR Description: unknown protein [Arabidopsis thaliana]
  misc_feature (1)..(326): Homolog of NCBI NO: 18414983 NR Description: ARF GTPase-activating domain-containing protein
  misc_feature (1)..(326): Homolog of NCBI NO: 7487780 NR Description: hypothetical protein T6K21.70 - Arabidopsis
MSFGGNNRAQVFFKQHGWNDGGKIEAKYTSRAADLYRQILSKEVAKSMAEDGGLPSSPVASQSSQGVNGLPEVKTNEVPKENILEKPEKPESTSSPRASHTVISSTVKKPIGAKKAVKSGGLGARKLTKKPSESLYEQKPEEPPAPVSSSTNNMPAGPSPTSRFEYAENVQSSELNTGGSHLLSHVSPPKSSSFFADFGMDSGFPKKSGPSSSKVQIQETDEARRKFSNAKSISSSQYFGDQNKAADVDSQATLSKFSGSSAISSADLFGDSRDNNIDLTAGDLINRLSFQAQQDLSSLKNIAGETGKKLSSLASTLMTDLQDRIL

SEQ ID NO: 53759 - DNA, 1055 bp, Glycine max
  misc_feature (1)..(1055): Ceres Seq. ID no. 15225222
ccgggccccccctckagtcagctacgtaggcccccccccatgaagcttatattgaacagcagaaacgagaaaagatggaagctgagcgcgcctcacgaatcacggtcaggaaaaagttacccaaagttaatcgggcccttgcagctcgcctcctagaaactgaagaagctgaaaatgagaagagggatgaagatgctgatgatggtgaaactaaaaaggcatccaagaaaaagaaagggctcagcatgcaagatcttcaggacgatcgatttaaagcaatatttacaaatgaggaatttgagattaaggattcctcacaagaatatctggctttacatcccatgggttctaagaagcaaacatccttgttaaaggaacattttgaacctgtcatgtcagatgatggtcaaagtctaagtgattctgatgcatcaacatcatcacaagatgaacctgcgaatggaatgaaagacaaatctcgggttccaagaatgtatgaaatcaagaatgagcagcatgcggaggcattctggagccaaaaatcacttgcaggggaggactcacttcctatgggagacagagtagcagctctaagagatgaccaacaatcttctcgtgttccaaaaggtattaagcagggtccaggaggatcacgagaaatcactttcgccacaagaagctcagctaagtacaaggaagacgaggaggataaagaagtgccaaacaggaaaaagaggggagttcaatccttggggcttaagcccaatagaccagtgtttcgtggtcaagggagagggaaacgagggaatggcagaagaggacgtcgataatgacctttacataatgtaaatggcatttgattcttcttagatcttgcttgcttgcttgatccttatggctcagttttccatccatggatagtcctgtgactgaagtcgcacaggatacgtgatctatgatgcatcatcatatgtagcttaacatctttttttacatttttgttctttccccctatttttggacactatcaagataaactattttgtgtggaacct

SEQ ID NO: 53760 - protein, 251 aa, Glycine max
  peptide (1)..(251): Ceres Seq. ID no. 15225223
  misc_feature (1)..(147): Homolog of NCBI NO: 13430872 NR Description: hypothetical protein FLJ14075 [Homo sapiens]
  misc_feature (1)..(128): Homolog of NCBI NO: 13477303 NR Description: FLJ14075 protein [Homo sapiens]
  misc_feature (1)..(126): Homolog of NCBI NO: 34863207 NR Description: similar to hypothetical protein FLJ14075 [Rattus
  misc_feature (1)..(142): Homolog of NCBI NO: 37362218 NR Description: hypothetical protein FLJ14075-like protein [Danio
  misc_feature (1)..(142): Homolog of NCBI NO: 28502998 NR Description: Similar to hypothetical protein FLJ14075 [Danio
  misc_feature (1)..(126): Homolog of NCBI NO: 38049298 NR Description: similar to FLJ14075 protein [Mus musculus]
  misc_feature (1)..(126): Homolog of NCBI NO: 33416707 NR Description: Unknown (protein for MGC:69094) [Xenopus laevis]
  misc_feature (38)..(250): Homolog of NCBI NO: 34898048 NR Description: Similar to Hypothetical 81.7 KD protein in
  misc_feature (1)..(250): Homolog of NCBI NO: 15230179 NR Description: glycine-rich protein [Arabidopsis thaliana]
  misc_feature (1)..(250): Homolog of NCBI NO: 11357620 NR Description: hypothetical protein F24I3.70 - Arabidopsis
MEAERASRITVRKKLPKVNRALAARLLETEEAENEKRDEDADDGETKKASKKKKGLSMQDLQDDRFKAIFTNEEFEIKDSSQEYLALHPMGSKKQTSLLKEHFEPVMSDDGQSLSDSDASTSSQDEPANGMKDKSRVPRMYEIKNEQHAEAFWSQKSLAGEDSLPMGDRVAALRDDQQSSRVPKGIKQGPGGSREITFATRSSAKYKEDEEDKEVPNRKKRGVQSLGLKPNRPVFRGQGRGKRGNGRRGRR

SEQ ID NO: 53761 - protein, 194 aa, Glycine max
  peptide (1)..(194): Ceres Seq. ID no. 15225224
  misc_feature (1)..(90): Homolog of NCBI NO: 13430872 NR Description: hypothetical protein FLJ14075 [Homo sapiens]
  misc_feature (1)..(71): Homolog of NCBI NO: 13477303 NR Description: FLJ14075 protein [Homo sapiens]
  misc_feature (1)..(69): Homolog of NCBI NO: 34863207 NR Description: similar to hypothetical protein FLJ14075 [Rattus
  misc_feature (1)..(85): Homolog of NCBI NO: 37362218 NR Description: hypothetical protein FLJ14075-like protein [Danio
  misc_feature (1)..(85): Homolog of NCBI NO: 28502998 NR Description: Similar to hypothetical protein FLJ14075 [Danio
  misc_feature (1)..(69): Homolog of NCBI NO: 38049298 NR Description: similar to FLJ14075 protein [Mus musculus]
  misc_feature (1)..(69): Homolog of NCBI NO: 33416707 NR Description: Unknown (protein for MGC:69094) [Xenopus laevis]
  misc_feature (1)..(193): Homolog of NCBI NO: 34898048 NR Description: Similar to Hypothetical 81.7 KD protein in
  misc_feature (1)..(193): Homolog of NCBI NO: 15230179 NR Description: glycine-rich protein [Arabidopsis thaliana]
  misc_feature (1)..(193): Homolog of NCBI NO: 11357620 NR Description: hypothetical protein F24I3.70 - Arabidopsis
MQDLQDDRFKAIFTNEEFEIKDSSQEYLALHPMGSKKQTSLLKEHFEPVMSDDGQSLSDSDASTSSQDEPANGMKDKSRVPRMYEIKNEQHAEAFWSQKSLAGEDSLPMGDRVAALRDDQQSSRVPKGIKQGPGGSREITFATRSSAKYKEDEEDKEVPNRKKRGVQSLGLKPNRPVFRGQGRGKRGNGRRGRR

SEQ ID NO: 53762 - protein, 162 aa, Glycine max
  peptide (1)..(162): Ceres Seq. ID no. 15225225
  misc_feature (1)..(58): Homolog of NCBI NO: 13430872 NR Description: hypothetical protein FLJ14075 [Homo sapiens]
  misc_feature (1)..(39): Homolog of NCBI NO: 13477303 NR Description: FLJ14075 protein [Homo sapiens]
  misc_feature (1)..(37): Homolog of NCBI NO: 34863207 NR Description: similar to hypothetical protein FLJ14075 [Rattus
  misc_feature (1)..(53): Homolog of NCBI NO: 37362218 NR Description: hypothetical protein FLJ14075-like protein [Danio
  misc_feature (1)..(53): Homolog of NCBI NO: 28502998 NR Description: Similar to hypothetical protein FLJ14075 [Danio
  misc_feature (1)..(37): Homolog of NCBI NO: 38049298 NR Description: similar to FLJ14075 protein [Mus musculus]
  misc_feature (1)..(37): Homolog of NCBI NO: 33416707 NR Description: Unknown (protein for MGC:69094) [Xenopus laevis]
  misc_feature (1)..(161): Homolog of NCBI NO: 34898048 NR Description: Similar to Hypothetical 81.7 KD protein in
  misc_feature (1)..(161): Homolog of NCBI NO: 15230179 NR Description: glycine-rich protein [Arabidopsis thaliana]
  misc_feature (1)..(161): Homolog of NCBI NO: 11357620 NR Description: hypothetical protein F24I3.70 - Arabidopsis
MGSKKQTSLLKEHFEPVMSDDGQSLSDSDASTSSQDEPANGMKDKSRVPRMYEIKNEQHAEAFWSQKSLAGEDSLPMGDRVAALRDDQQSSRVPKGIKQGPGGSREITFATRSSAKYKEDEEDKEVPNRKKRGVQSLGLKPNRPVFRGQGRGKRGNGRRGRR

SEQ ID NO: 53763 - DNA, 836 bp, Glycine max
  misc_feature (1)..(836): Ceres Seq. ID no. 12563476
gaaaacaaaggcagagcagagttgttgcgattaagaagatgaagagagtggagtttatggggctggggctgttagtggtggtgatgatgggatgttgtgggtctgcgactgctgcggatgacttggcaaccaagtgttcggcggtgattcagaaggtaataccgtgtctgaacttcgcgacggggaaggaagaaatgcccaaaaaggaatgttgcgacgccgccacggccataaaggagagcaacccagagtgcttgtgctacatcattcaagagacccacaagggtagcccacaggtcaaaagcttgggcattcaagaggccaagctgcttcagctcccttctgtttgcaacgtcaaaaacgccagcatcaccaactgtcctaagcttttgggtctatctccaagttcccccgatgctgctatcttcacatcaaattcttcgaagacaacaccttcagcacctacaacaacaaactcgcaaaccacgaccccgcagagccaaaacgcttctcatggaagcatggttcaacctagtagttaccgttacctatgtgatggtgatggctttggccattgttctggttgcagttccaaccgaaactgtgagcatttatacatgatgcggcattatgcactgttgaagacagttggggttgtcgttttgtttcctgcttttgttatgccataggacttcgcagctttgaattaatgaattagtttgcatttgtggcctgtgatggtttctcgaattttgagacctcgctgtaatgtttgcctttattgtggacttgtttcttttctgcttcccacaattaatgttaacggatagttggtg

SEQ ID NO: 53764 - protein, 228 aa, Glycine max
  peptide (1)..(228): Ceres Seq. ID no. 12563477
  misc_feature (45)..(126): Pfam Name: Protease inhibitor/seed storage/LTP family Pfam Description: Protease inhibitor/seed storage/LTP family
  misc_feature (19)..(170): Homolog of NCBI NO: 21554014 NR Description: unknown [Arabidopsis thaliana]
  misc_feature (19)..(170): Homolog of NCBI NO: 24417478 NR Description: unknown [Arabidopsis thaliana]
  misc_feature (19)..(170): Homolog of NCBI NO: 18403453 NR Description: expressed protein
  misc_feature (24)..(178): Homolog of NCBI NO: 25553596 NR Description: OJ1656_E11.27 [Oryza sativa (japonica
  misc_feature (29)..(162): Homolog of NCBI NO: 28269454 NR Description: putative protease inhibitor
  misc_feature (15)..(154): Homolog of NCBI NO: 25553602 NR Description: OJ1656_E11.34 [Oryza sativa (japonica
  misc_feature (14)..(155): Homolog of NCBI NO: 15224863 NR Description: unknown protein; protein id: At2g44300.1
  misc_feature (11)..(220): Homolog of NCBI NO: 15224862 NR Description: unknown protein; protein id: At2g44290.1
  misc_feature (23)..(173): Homolog of NCBI NO: 21553541 NR Description: lipid transfer protein, putative [Arabidopsis
  misc_feature (23)..(173): Homolog of NCBI NO: 15217777 NR Description: lipid transfer protein, putative
KQRQSRVVAIKKMKRVEFMGLGLLVVVMMGCCGSATAADDLATKCSAVIQKVIPCLNFATGKEEMPKKECCDAATAIKESNPECLCYIIQETHKGSPQVKSLGIQEAKLLQLPSVCNVKNASITNCPKLLGLSPSSPDAAIFTSNSSKTTPSAPTTTNSQTTTPQSQNASHGSMVQPSSYRYLCDGDGFGHCSGCSSNRNCEHLYMMRHYALLKTVGVVVLFPAFVMP

SEQ ID NO: 53765 - protein, 216 aa, Glycine max
  peptide (1)..(216): Ceres Seq. ID no. 12563478
  misc_feature (33)..(114): Pfam Name: Protease inhibitor/seed storage/LTP family Pfam Description: Protease inhibitor/seed storage/LTP family
  misc_feature (7)..(158): Homolog of NCBI NO: 24417478 NR Description: unknown [Arabidopsis thaliana]
  misc_feature (7)..(158): Homolog of NCBI NO: 21554014 NR Description: unknown [Arabidopsis thaliana]
  misc_feature (7)..(158): Homolog of NCBI NO: 18403453 NR Description: expressed protein
  misc_feature (12)..(166): Homolog of NCBI NO: 25553596 NR Description: OJ1656_E11.27 [Oryza sativa (japonica
  misc_feature (17)..(150): Homolog of NCBI NO: 28269454 NR Description: putative protease inhibitor
  misc_feature (3)..(142): Homolog of NCBI NO: 25553602 NR Description: OJ1656_E11.34 [Oryza sativa (japonica
  misc_feature (2)..(143): Homolog of NCBI NO: 15224863 NR Description: unknown protein; protein id: At2g44300.1
  misc_feature (1)..(208): Homolog of NCBI NO: 15224862 NR Description: unknown protein; protein id: At2g44290.1
  misc_feature (11)..(161): Homolog of NCBI NO: 21553541 NR Description: lipid transfer protein, putative [Arabidopsis
  misc_feature (11)..(161): Homolog of NCBI NO: 15217777 NR Description: lipid transfer protein, putative
MKRVEFMGLGLLVVVMMGCCGSATAADDLATKCSAVIQKVIPCLNFATGKEEMPKKECCDAATAIKESNPECLCYIIQETHKGSPQVKSLGIQEAKLLQLPSVCNVKNASITNCPKLLGLSPSSPDAAIFTSNSSKTTPSAPTTTNSQTTTPQSQNASHGSMVQPSSYRYLCDGDGFGHCSGCSSNRNCEHLYMMRHYALLKTVGVVVLFPAFVMP

SEQ ID NO: 53766 - protein, 210 aa, Glycine max
  peptide (1)..(210): Ceres Seq. ID no. 12563479
  misc_feature (27)..(108): Pfam Name: Protease inhibitor/seed storage/LTP family Pfam Description: Protease inhibitor/seed storage/LTP family
  misc_feature (1)..(152): Homolog of NCBI NO: 21554014 NR Description: unknown [Arabidopsis thaliana]
  misc_feature (1)..(152): Homolog of NCBI NO: 24417478 NR Description: unknown [Arabidopsis thaliana]
  misc_feature (1)..(152): Homolog of NCBI NO: 18403453 NR Description: expressed protein
  misc_feature (6)..(160): Homolog of NCBI NO: 25553596 NR Description: OJ1656_E11.27 [Oryza sativa (japonica
  misc_feature (11)..(144): Homolog of NCBI NO: 28269454 NR Description: putative protease inhibitor
  misc_feature (1)..(136): Homolog of NCBI NO: 25553602 NR Description: OJ1656_E11.34 [Oryza sativa (japonica
  misc_feature (1)..(137): Homolog of NCBI NO: 15224863 NR Description: unknown protein; protein id: At2g44300.1
  misc_feature (1)..(202): Homolog of NCBI NO: 15224862 NR Description: unknown protein; protein id: At2g44290.1
  misc_feature (5)..(155): Homolog of NCBI NO: 21553541 NR Description: lipid transfer protein, putative [Arabidopsis
  misc_feature (5)..(155): Homolog of NCBI NO: 15217777 NR Description: lipid transfer protein, putative
MGLGLLVVVMMGCCGSATAADDLATKCSAVIQKVIPCLNFATGKEEMPKKECCDAATAIKESNPECLCYIIQETHKGSPQVKSLGIQEAKLLQLPSVCNVKNASITNCPKLLGLSPSSPDAAIFTSNSSKTTPSAPTTTNSQTTTPQSQNASHGSMVQPSSYRYLCDGDGFGHCSGCSSNRNCEHLYMMRHYALLKTVGVVVLFPAFVMP

SEQ ID NO: 53767 - DNA, 846 bp, Glycine max
  misc_feature (1)..(846): Ceres Seq. ID no. 14304879
aaaaatctaaaccgaaattcccaattacccttcccaattttcaccaaaacctaatactcccacaccaatcttcgatcatggacgccgattcacaacctcaacaactcgaagagagaacagaggagcaagaactgaagtacctggaattcgtgcaattcgcgaccatacaggctctgatgcgctgcgccatcctctactcatacgccaaggagcgcgcgggtcctctgaagcccggtgtcgacaccgtggaggaggccgtgaagaccgtcgtggctccggtctacgataggttccaccttgtccccggcgaggtcctcaaatacgcggatcggaaggttgccgagttagacagccacgttccctccaacgtgaagaaggtctcctcccaggcctgctccgtcgtctctgaagtccgccgcgatggcgtctccgcctacgccaagaccgtttactccaagtacgagcctacggcggagcagtgcgcagtgtctgcatggcggaagctcaaccagcttccgctcttccctcaggtggccaatgttgtgttgcccaaggctgcctattgcaccgagaagtacaacgaggcggttgtttcctctgctgagaaaggttacagggtttctgcttatcttcctttggtgcctactgagaagatcgccaaagtcttcggtggaaactgatctcgatctattgcggttttgaatttcttattgtttttactttctttacaaagtgttgttgctagttgctactgttagtgtgtgagttggattggatatatgatgatgtgaatgttctgttttgttaattactatataataatatagaataatgttactcaatgct

SEQ ID NO: 53768 - protein, 225 aa, Glycine max
  peptide (1)..(225): Ceres Seq. ID no. 14304880
  misc_feature (59)..(225): Pfam Name: Rubber elongation factor protein (REF) Pfam Description: Rubber elongation factor protein (REF)
  misc_feature (28)..(158): Homolog of NCBI NO: 29367349 NR Description: stress-related protein-like protein
  misc_feature (30)..(188): Homolog of NCBI NO: 15230002 NR Description: stress related protein -related [Arabidopsis
  misc_feature (36)..(222): Homolog of NCBI NO: 15220426 NR Description: stress related protein -related [Arabidopsis
  misc_feature (130)..(222): Homolog of NCBI NO: 15230002 NR Description: stress related protein -related [Arabidopsis
  misc_feature (79)..(225): Homolog of NCBI NO: 37622210 NR Description: small rubber particle protein [Hevea brasiliensis]
  misc_feature (28)..(221): Homolog of NCBI NO: 15227131 NR Description: expressed protein [Arabidopsis thaliana]
  misc_feature (35)..(223): Homolog of NCBI NO: 14423933 NR Description: Small rubber particle protein (SRPP) (22 kDa particle protein) (22 kDa RPP) (Latex allergen Hev b 3) (27 kDa
  misc_feature (146)..(223): Homolog of NCBI NO: 22831130 NR Description: putative stress-related protein
  misc_feature (28)..(158): Homolog of NCBI NO: 22831130 NR Description: putative stress-related protein
  misc_feature (59)..(225): Homolog of NCBI NO: 15214302 NR Description: Stress-related protein (PvSRP)
KSKPKFPITLPNFHQNLILPHQSSIMDADSQPQQLEERTEEQELKYLEFVQFATIQALMRCAILYSYAKERAGPLKPGVDTVEEAVKTVVAPVYDRFHLVPGEVLKYADRKVAELDSHVPSNVKKVSSQACSVVSEVRRDGVSAYAKTVYSKYEPTAEQCAVSAWRKLNQLPLFPQVANVVLPKAAYCTEKYNEAVVSSAEKGYRVSAYLPLVPTEKIAKVFGGN

SEQ ID NO: 53769 - protein, 200 aa, Glycine max
  peptide (1)..(200): Ceres Seq. ID no. 14304881
  misc_feature (34)..(200): Pfam Name: Rubber elongation factor protein (REF) Pfam Description: Rubber elongation factor protein (REF)
  misc_feature (3)..(133): Homolog of NCBI NO: 29367349 NR Description: stress-related protein-like protein
  misc_feature (5)..(163): Homolog of NCBI NO: 15230002 NR Description: stress related protein -related [Arabidopsis
  misc_feature (11)..(197): Homolog of NCBI NO: 15220426 NR Description: stress related protein -related [Arabidopsis
  misc_feature (105)..(197): Homolog of NCBI NO: 15230002 NR Description: stress related protein -related [Arabidopsis
  misc_feature (54)..(200): Homolog of NCBI NO: 37622210 NR Description: small rubber particle protein [Hevea brasiliensis]
  misc_feature (3)..(196): Homolog of NCBI NO: 15227131 NR Description: expressed protein [Arabidopsis thaliana]
  misc_feature (10)..(198): Homolog of NCBI NO: 14423933 NR Description: Small rubber particle protein (SRPP) (22 kDa particle protein) (22 kDa RPP) (Latex allergen Hev b 3) (27 kDa
  misc_feature (121)..(198): Homolog of NCBI NO: 22831130 NR Description: putative stress-related protein
  misc_feature (3)..(133): Homolog of NCBI NO: 22831130 NR Description: putative stress-related protein
  misc_feature (34)..(200): Homolog of NCBI NO: 15214302 NR Description: Stress-related protein (PvSRP)
MDADSQPQQLEERTEEQELKYLEFVQFATIQALMRCAILYSYAKERAGPLKPGVDTVEEAVKTVVAPVYDRFHLVPGEVLKYADRKVAELDSHVPSNVKKVSSQACSVVSEVRRDGVSAYAKTVYSKYEPTAEQCAVSAWRKLNQLPLFPQVANVVLPKAAYCTEKYNEAVVSSAEKGYRVSAYLPLVPTEKIAKVFGGN

SEQ ID NO: 53770 - protein, 167 aa, Glycine max
  peptide (1)..(167): Ceres Seq. ID no. 14304882
  misc_feature (1)..(167): Pfam Name: Rubber elongation factor protein (REF) Pfam Description: Rubber elongation factor protein (REF)
  misc_feature (1)..(100): Homolog of NCBI NO: 29367349 NR Description: stress-related protein-like protein
  misc_feature (1)..(130): Homolog of NCBI NO: 15230002 NR Description: stress related protein -related [Arabidopsis
  misc_feature (1)..(164): Homolog of NCBI NO: 15220426 NR Description: stress related protein -related [Arabidopsis
  misc_feature (72)..(164): Homolog of NCBI NO: 15230002 NR Description: stress related protein -related [Arabidopsis
  misc_feature (21)..(167): Homolog of NCBI NO: 37622210 NR Description: small rubber particle protein [Hevea brasiliensis]
  misc_feature (1)..(163): Homolog of NCBI NO: 15227131 NR Description: expressed protein [Arabidopsis thaliana]
  misc_feature (1)..(165): Homolog of NCBI NO: 14423933 NR Description: Small rubber particle protein (SRPP) (22 kDa particle protein) (22 kDa RPP) (Latex allergen Hev b 3) (27 kDa
  misc_feature (88)..(165): Homolog of NCBI NO: 22831130 NR Description: putative stress-related protein
  misc_feature (1)..(100): Homolog of NCBI NO: 22831130 NR Description: putative stress-related protein
  misc_feature (1)..(167): Homolog of NCBI NO: 15214302 NR Description: Stress-related protein (PvSRP)
MRCAILYSYAKERAGPLKPGVDTVEEAVKTVVAPVYDRFHLVPGEVLKYADRKVAELDSHVPSNVKKVSSQACSVVSEVRRDGVSAYAKTVYSKYEPTAEQCAVSAWRKLNQLPLFPQVANVVLPKAAYCTEKYNEAVVSSAEKGYRVSAYLPLVPTEKIAKVFGGN

SEQ ID NO: 53771 - DNA, 1708 bp, Glycine max
  misc_feature (1)..(1708): Ceres Seq. ID no. 14303888
gtatcgctttttggcggttttagcctttttcggtttcgaacattcggacgaatttctctctctctctcttcaattcaacacttggaggacatgagatggatcgggaagaatatttggggaagtgttccaatatgaaatgccaaagagtggatgaatcatatgtacatgctcttcaagatgaagtaatggaagttgagcatttgcttgcagaacctagaaatgatcatgcttccctggatggtagtttggattctcatacaactttgaatggaaaggatgatttggaactggaggcccttgatggattgctggatgatgttgaaatcaatgatcttgaaggaactgttggtttccctggtggtacatgtgaagaatattttttggattttggatttgctgacaaatttgaggaggtactaggctctggtccttttgtaggttcactcttgcaaaactcaagttctgaaagtcattcttccggattaagcggaagtagcattgttgatggggtattagaatcaacagaagtacctattgcacaatctgaatgcaaaaatgattctctagatgagacaataacctatgaatcacatggtgccttcaggaacaatccaagtcaaccatcaaaagtaaattgcagatacaacatttcacttgatatacaacatctgcaagatttggataacaaccgtcatttagctggtggtatattgacttgtaagaaggaaaagggtcctgttgaaaaaggccaacctgctgcacttagagagaagagattccgaaagcctactcagaggtacattgaagaattttcaaattcaaggtcaaaggaaaaggcaccaactgctggtacaaaaactaaatatttaagtgactcatcatgtgatgatgtacttcatataagaattaaagcattcaaaaagagtccaagtgaaaagtctagtattgaaaatagagatgtgatgcttcctgagttgcaagttcacaaagggcgtccgaagaaagagaaacttgagtatgacaacgagtcatttcccttggaatctgaggatgaatggttgacatcaaaaagatctagaaggaaagatcgaagaaagcatcagaagatgtggactctccctgaagtgttgaagttggttgaaggcatatctgaatatggagttggtcgatggactgacataaagaggtttctgttttcttctacaagctaccgaactcccatagatctcagagacaagtggcgaaaccttttgagagccagttctgcacagaaaagcacgagagaggctgaacaaaatgacgagcttgccctgcgtcccttgccatttaatgtggtacatcgtgtgcaagaattggctaaaattcacccatacccaagggaacgtggatcaaagaagttgcgtgttagccaagctggctcttctgtcattgctaaagattctcctccccttagtcttagcaaaagaaatgtacgtaggaagtttacttagaagtccatatggaaaacagtccatggaaatctatagtcaaaagaatcttgttgaaatttaggtaatcacattcgcacaattttatactgtgaagtaattttatgtttacaaaggcacagaaattttgaattgtaattatgaggaatcattagttgtcctacaatagtttgccatgcttaatgcctaatacttttatagtatgattttattagtgcact

SEQ ID NO: 53772 - protein, 464 aa, Glycine max
  peptide (1)..(464): Ceres Seq. ID no. 14303889
  misc_feature (337)..(386): Pfam Name: Myb-like DNA-binding domain Pfam Description: Myb-like DNA-binding domain
  misc_feature (326)..(427): Homolog of NCBI NO: 9716453 NR Description: telomere binding protein-1; TBP1 [Oryza sativa]
  misc_feature (282)..(399): Homolog of NCBI NO: 15240725 NR Description: H-protein promoter binding factor-1
  misc_feature (223)..(430): Homolog of NCBI NO: 25402832 NR Description: protein F1L3.16 [imported] - Arabidopsis thaliana
  misc_feature (212)..(430): Homolog of NCBI NO: 9665123 NR Description: Hypothetical protein [Arabidopsis thaliana]
  misc_feature (332)..(392): Homolog of NCBI NO: 25406198 NR Description: hypothetical protein F28P22.16 [imported] -
  misc_feature (223)..(443): Homolog of NCBI NO: 22329629 NR Description: expressed protein [Arabidopsis thaliana]
  misc_feature (235)..(422): Homolog of NCBI NO: 21536766 NR Description: unknown [Arabidopsis thaliana]
  misc_feature (235)..(422): Homolog of NCBI NO: 18410146 NR Description: expressed protein [Arabidopsis thaliana]
  misc_feature (11)..(51): Homolog of NCBI NO: 30687001 NR Description: expressed protein [Arabidopsis thaliana]
  misc_feature (282)..(427): Homolog of NCBI NO: 30687001 NR Description: expressed protein [Arabidopsis thaliana]
MDREEYLGKCSNMKCQRVDESYVHALQDEVMEVEHLLAEPRNDHASLDGSLDSHTTLNGKDDLELEALDGLLDDVEINDLEGTVGFPGGTCEEYFLDFGFADKFEEVLGSGPFVGSLLQNSSSESHSSGLSGSSIVDGVLESTEVPIAQSECKNDSLDETITYESHGAFRNNPSQPSKVNCRYNISLDIQHLQDLDNNRHLAGGILTCKKEKGPVEKGQPAALREKRFRKPTQRYIEEFSNSRSKEKAPTAGTKTKYLSDSSCDDVLHIRIKAFKKSPSEKSSIENRDVMLPELQVHKGRPKKEKLEYDNESFPLESEDEWLTSKRSRRKDRRKHQKMWTLPEVLKLVEGISEYGVGRWTDIKRFLFSSTSYRTPIDLRDKWRNLLRASSAQKSTREAEQNDELALRPLPFNVVHRVQELAKIHPYPRERGSKKLRVSQAGSSVIAKDSPPLSLSKRNVRRKFT

SEQ ID NO: 53773 - protein, 452 aa, Glycine max
  peptide (1)..(452): Ceres Seq. ID no. 14303890
  misc_feature (325)..(374): Pfam Name: Myb-like DNA-binding domain Pfam Description: Myb-like DNA-binding domain
  misc_feature (314)..(415): Homolog of NCBI NO: 9716453 NR Description: telomere binding protein-1; TBP1 [Oryza sativa]
  misc_feature (270)..(387): Homolog of NCBI NO: 15240725 NR Description: H-protein promoter binding factor-1
  misc_feature (211)..(418): Homolog of NCBI NO: 25402832 NR Description: protein F1L3.16 [imported] - Arabidopsis thaliana
  misc_feature (200)..(418): Homolog of NCBI NO: 9665123 NR Description: Hypothetical protein [Arabidopsis thaliana]
  misc_feature (320)..(380): Homolog of NCBI NO: 25406198 NR Description: hypothetical protein F28P22.16 [imported] -
  misc_feature (211)..(431): Homolog of NCBI NO: 22329629 NR Description: expressed protein [Arabidopsis thaliana]
  misc_feature (223)..(410): Homolog of NCBI NO: 21536766 NR Description: unknown [Arabidopsis thaliana]
  misc_feature (223)..(410): Homolog of NCBI NO: 18410146 NR Description: expressed protein [Arabidopsis thaliana]
  misc_feature (1)..(39): Homolog of NCBI NO: 30687001 NR Description: expressed protein [Arabidopsis thaliana]
  misc_feature (270)..(415): Homolog of NCBI NO: 30687001 NR Description: expressed protein [Arabidopsis thaliana]
MKCQRVDESYVHALQDEVMEVEHLLAEPRNDHASLDGSLDSHTTLNGKDDLELEALDGLLDDVEINDLEGTVGFPGGTCEEYFLDFGFADKFEEVLGSGPFVGSLLQNSSSESHSSGLSGSSIVDGVLESTEVPIAQSECKNDSLDETITYESHGAFRNNPSQPSKVNCRYNISLDIQHLQDLDNNRHLAGGILTCKKEKGPVEKGQPAALREKRFRKPTQRYIEEFSNSRSKEKAPTAGTKTKYLSDSSCDDVLHIRIKAFKKSPSEKSSIENRDVMLPELQVHKGRPKKEKLEYDNESFPLESEDEWLTSKRSRRKDRRKHQKMWTLPEVLKLVEGISEYGVGRWTDIKRFLFSSTSYRTPIDLRDKWRNLLRASSAQKSTREAEQNDELALRPLPFNVVHRVQELAKIHPYPRERGSKKLRVSQAGSSVIAKDSPPLSLSKRNVRRKFT

SEQ ID NO: 53774 - protein, 434 aa, Glycine max
  peptide (1)..(434): Ceres Seq. ID no. 14303891
  misc_feature (307)..(356): Pfam Name: Myb-like DNA-binding domain Pfam Description: Myb-like DNA-binding domain
  misc_feature (296)..(397): Homolog of NCBI NO: 9716453 NR Description: telomere binding protein-1; TBP1 [Oryza sativa]
  misc_feature (252)..(369): Homolog of NCBI NO: 15240725 NR Description: H-protein promoter binding factor-1
  misc_feature (193)..(400): Homolog of NCBI NO: 25402832 NR Description: protein F1L3.16 [imported] - Arabidopsis thaliana
  misc_feature (182)..(400): Homolog of NCBI NO: 9665123 NR Description: Hypothetical protein [Arabidopsis thaliana]
  misc_feature (302)..(362): Homolog of NCBI NO: 25406198 NR Description: hypothetical protein F28P22.16 [imported] -
  misc_feature (193)..(413): Homolog of NCBI NO: 22329629 NR Description: expressed protein [Arabidopsis thaliana]
  misc_feature (205)..(392): Homolog of NCBI NO: 21536766 NR Description: unknown [Arabidopsis thaliana]
  misc_feature (205)..(392): Homolog of NCBI NO: 18410146 NR Description: expressed protein [Arabidopsis thaliana]
  misc_feature (1)..(21): Homolog of NCBI NO: 30687001 NR Description: expressed protein [Arabidopsis thaliana]
  misc_feature (252)..(397): Homolog of NCBI NO: 30687001 NR Description: expressed protein [Arabidopsis thaliana]
MEVEHLLAEPRNDHASLDGSLDSHTTLNGKDDLELEALDGLLDDVEINDLEGTVGFPGGTCEEYFLDFGFADKFEEVLGSGPFVGSLLQNSSSESHSSGLSGSSIVDGVLESTEVPIAQSECKNDSLDETITYESHGAFRNNPSQPSKVNCRYNISLDIQHLQDLDNNRHLAGGILTCKKEKGPVEKGQPAALREKRFRKPTQRYIEEFSNSRSKEKAPTAGTKTKYLSDSSCDDVLHIRIKAFKKSPSEKSSIENRDVMLPELQVHKGRPKKEKLEYDNESFPLESEDEWLTSKRSRRKDRRKHQKMWTLPEVLKLVEGISEYGVGRWTDIKRFLFSSTSYRTPIDLRDKWRNLLRASSAQKSTREAEQNDELALRPLPFNVVHRVQELAKIHPYPRERGSKKLRVSQAGSSVIAKDSPPLSLSKRNVRRKFT

SEQ ID NO: 53775 - DNA, 1562 bp, Glycine max
  misc_feature (1)..(1562): Ceres Seq. ID no. 14303843
gagaagccatgatggatatgcttctatcttcttcttcttcttcccttaatctcatcaaacccttttttttctcttctccctcgatttgattccgccagattctcgtcaacgcgctgttccttcacctcaatttcttccagcatgaaaccccaccccctccattatcctattctcctcccaaaaccctaccatcccttatcccctctccgtctccgctcactccgaatcatttccaaaaaccaccaaaggcaataacagcccgaacatttgcaatactctctgctcttgttttgctcttaatccaaccagcttttgctcctgcagcttttgcaacgtttcaaaatgctgccaagaccagtggccctgctgctgcagcagttggtggaaaactaatccgcactgagcttctaagtagtgcttggactggtttctttgccggttgcttgcacacactatcagggcctgaccaccttgcagctttggctccattgtcaattggccgaacccaaatggagagtgctgctgttggagccctttggggttgtggccatgatgccggtcaagttatctttggcttaatatttttgctcttaaaagatcgacttcacattgaaattatccaaacttggggcacccgtgtggttggccttaccctgctagtaattggtgctatgggaattaaggaagcttcagaagtgcctatcctgtgtgttgccttagaaaatggtgaatgtgatgttagcgtctatgaatcacgcgatagtaatcctgttgtaggaaagaagaagattggttttgctacttttgccactggaatagttcatggactggaaccagatgcattgatgatggtgttgcctgcccttgctctaccttcacgcttggctggtgctgcatttctcatcatgttcttactgggaactgttgttgcaatggggagctatacggtatttattggttcatgtagcgaggcactaaaagatagagtacctagaataactgagaaactcacttgggcttcttctcttgttgcaatagccctcggatttgccatcatcactagccagttttttgggtttagcctgtattagtacccacgttattcagccaccaacccatggcccattaattggttaattatacccaaatcatacaagacaaggtcagcaagggcataaatgaagaaaaatccattgaaaagttgtgcttttgccatccttcctttgggatgaaaaaaaaaaaaaacctaccattccctcttaattgtgaatggctaactattacagaaatgtttctcatttcctagaagttctatcaattatcatagatgctgaaataatatatatatatcaaaaagcattagaaacttagagatggtgacaggaaaacttgtaggtcgaactattcaagagagatggtgaagagatatcatatgccagcaaaaaaagggttttgcatgaagttctactagggatgatttcaaatttagtcgggctaatgagttatttcttggaaatgttgcaaaacacaaaaaacccaacataggccttatttatgaacct

SEQ ID NO: 53776 - protein, 193 aa, Glycine max
  peptide (1)..(193): Ceres Seq. ID no. 14303844
  misc_feature (1)..(142): Homolog of NCBI NO: 33866162 NR Description: cyanobacterial conserved hypothetical protein
  misc_feature (1)..(193): Homolog of NCBI NO: 21397272 NR Description: Hypothetical protein [Oryza sativa (japonica
  misc_feature (1)..(193): Homolog of NCBI NO: 7486794 NR Description: hypothetical protein M4E13.135 - Arabidopsis
  misc_feature (1)..(193): Homolog of NCBI NO: 18418571 NR Description: expressed protein [Arabidopsis thaliana]
  misc_feature (1)..(193): Homolog of NCBI NO: 34897966 NR Description: hypothetical protein~similar to Arabidopsis
  misc_feature (1)..(193): Homolog of NCBI NO: 15724154 NR Description: At2g16800/T24I21.21 [Arabidopsis thaliana]
  misc_feature (1)..(193): Homolog of NCBI NO: 18398217 NR Description: expressed protein [Arabidopsis thaliana]
  misc_feature (1)..(193): Homolog of NCBI NO: 21592431 NR Description: unknown [Arabidopsis thaliana]
MESAAVGALWGCGHDAGQVIFGLIFLLLKDRLHIEIIQTWGTRVVGLTLLVIGAMGIKEASEVPILCVALENGECDVSVYESRDSNPVVGKKKIGFATFATGIVHGLEPDALMMVLPALALPSRLAGAAFLIMFLLGTVVAMGSYTVFIGSCSEALKDRVPRITEKLTWASSLVAIALGFAIITSQFFGFSLY

SEQ ID NO: 53777 - protein, 139 aa, Glycine max
  peptide (1)..(139): Ceres Seq. ID no. 14303845
  misc_feature (1)..(88): Homolog of NCBI NO: 33866162 NR Description: cyanobacterial conserved hypothetical protein
  misc_feature (1)..(139): Homolog of NCBI NO: 21397272 NR Description: Hypothetical protein [Oryza sativa (japonica
  misc_feature (1)..(139): Homolog of NCBI NO: 7486794 NR Description: hypothetical protein M4E13.135 - Arabidopsis
  misc_feature (1)..(139): Homolog of NCBI NO: 18418571 NR Description: expressed protein [Arabidopsis thaliana]
  misc_feature (1)..(139): Homolog of NCBI NO: 34897966 NR Description: hypothetical protein~similar to Arabidopsis
  misc_feature (1)..(139): Homolog of NCBI NO: 15724154 NR Description: At2g16800/T24I21.21 [Arabidopsis thaliana]
  misc_feature (1)..(139): Homolog of NCBI NO: 18398217 NR Description: expressed protein [Arabidopsis thaliana]
  misc_feature (1)..(139): Homolog of NCBI NO: 21592431 NR Description: unknown [Arabidopsis thaliana]
MGIKEASEVPILCVALENGECDVSVYESRDSNPVVGKKKIGFATFATGIVHGLEPDALMMVLPALALPSRLAGAAFLIMFLLGTVVAMGSYTVFIGSCSEALKDRVPRITEKLTWASSLVAIALGFAIITSQFFGFSLY

SEQ ID NO: 53778 - DNA, 1184 bp, Glycine max
  misc_feature (1)..(1184): Ceres Seq. ID no. 14311249
agagtaattttgcatcgtcgtcacacatggagatctccggcaccgttctccgtcaggtcagctacgtctccggctatgggacccacacgcggtcccgcggcctggctcctcgttttggggtgaggatggggatgggttctggtttctgtgacgaggggcatttgcggtattaccaggacaccaaaaaggttctcaccccaaagaagaagttgaagctgctcaagggtttctccaaattagggcttgcatcggatcccgagaaactcgccatgttctatgatcttcaacaaaacctcacctcggatgctggagatgtattactgagagagttagaagcagcaagagcaaaggagaaggaagtgaagaagaaaaggaaacaagagaagaaggccaaactcaaagctgccaagatgaattgtgaatcttcttcatcttcatcgtccgaatcaagtgacagcgattgtggttgtgatcaagtggttgacatgaacaccttcagagctggtgttggtgttggtgttggtgttggtgttggtgttgttgcccctgcacctgtcgaggaatccccactgcccaagaccgcccccattgttgaggatgcgaatgcgcattgcgttgccatggaactgtgttctaagaatgatatatatgttagcagtgctagtaatggttttaagaacgagagtgctgtagttacctctgctcctcagaagaggattgaggtatgcatggggaacaagtgcaaaagatcaggggctgctgcattgatgcaagagtttgagaaagtggtgggtgttgaaggtgtagctgttgttgcatgcaagtgcatgggcaagtgcaaaactgctcctaatgttaaagttcagaattctgttgatcataatagcctggctcagggacttgatgattctgttaagattcctgctaaccctctatgcattggggttggcttggaggatgtggatgccatcgtggctagatatttttgggagagtcacacagatataggcatggcaggtgcaggtgcagctacagctacttgatgttgtgggaatggctagtgtgttatttgtaattatatatatacgtagccaggatgccgaggaaacattattgacaatggttttttttagttgttcatattgtataatataaattagttatgaagtttcttttccttgttt

SEQ ID NO: 53779 - protein, 346 aa, Glycine max
  peptide (1)..(346): Ceres Seq. ID no. 14311250
  misc_feature (140)..(337): Homolog of NCBI NO: 30102610 NR Description: At1g48300 [Arabidopsis thaliana]
  misc_feature (61)..(337): Homolog of NCBI NO: 22330104 NR Description: expressed protein [Arabidopsis thaliana]
  misc_feature (54)..(337): Homolog of NCBI NO: 25405260 NR Description: hypothetical protein F11A17.15 [imported] -
SNFASSSHMEISGTVLRQVSYVSGYGTHTRSRGLAPRFGVRMGMGSGFCDEGHLRYYQDTKKVLTPKKKLKLLKGFSKLGLASDPEKLAMFYDLQQNLTSDAGDVLLRELEAARAKEKEVKKKRKQEKKAKLKAAKMNCESSSSSSSESSDSDCGCDQVVDMNTFRAGVGVGVGVGVGVVAPAPVEESPLPKTAPIVEDANAHCVAMELCSKNDIYVSSASNGFKNESAVVTSAPQKRIEVCMGNKCKRSGAAALMQEFEKVVGVEGVAVVACKCMGKCKTAPNVKVQNSVDHNSLAQGLDDSVKIPANPLCIGVGLEDVDAIVARYFWESHTDIGMAGAGAATAT

SEQ ID NO: 53780 - protein, 338 aa, Glycine max
  peptide (1)..(338): Ceres Seq. ID no. 14311251
  misc_feature (132)..(329): Homolog of NCBI NO: 30102610 NR Description: At1g48300 [Arabidopsis thaliana]
  misc_feature (53)..(329): Homolog of NCBI NO: 22330104 NR Description: expressed protein [Arabidopsis thaliana]
  misc_feature (46)..(329): Homolog of NCBI NO: 25405260 NR Description: hypothetical protein F11A17.15 [imported] -
MEISGTVLRQVSYVSGYGTHTRSRGLAPRFGVRMGMGSGFCDEGHLRYYQDTKKVLTPKKKLKLLKGFSKLGLASDPEKLAMFYDLQQNLTSDAGDVLLRELEAARAKEKEVKKKRKQEKKAKLKAAKMNCESSSSSSSESSDSDCGCDQVVDMNTFRAGVGVGVGVGVGVVAPAPVEESPLPKTAPIVEDANAHCVAMELCSKNDIYVSSASNGFKNESAVVTSAPQKRIEVCMGNKCKRSGAAALMQEFEKVVGVEGVAVVACKCMGKCKTAPNVKVQNSVDHNSLAQGLDDSVKIPANPLCIGVGLEDVDAIVARYFWESHTDIGMAGAGAATAT

SEQ ID NO: 53781 - protein, 305 aa, Glycine max
  peptide (1)..(305): Ceres Seq. ID no. 14311252
  misc_feature (99)..(296): Homolog of NCBI NO: 30102610 NR Description: At1g48300 [Arabidopsis thaliana]
  misc_feature (20)..(296): Homolog of NCBI NO: 22330104 NR Description: expressed protein [Arabidopsis thaliana]
  misc_feature (13)..(296): Homolog of NCBI NO: 25405260 NR Description: hypothetical protein F11A17.15 [imported] -
MGMGSGFCDEGHLRYYQDTKKVLTPKKKLKLLKGFSKLGLASDPEKLAMFYDLQQNLTSDAGDVLLRELEAARAKEKEVKKKRKQEKKAKLKAAKMNCESSSSSSSESSDSDCGCDQVVDMNTFRAGVGVGVGVGVGVVAPAPVEESPLPKTAPIVEDANAHCVAMELCSKNDIYVSSASNGFKNESAVVTSAPQKRIEVCMGNKCKRSGAAALMQEFEKVVGVEGVAVVACKCMGKCKTAPNVKVQNSVDHNSLAQGLDDSVKIPANPLCIGVGLEDVDAIVARYFWESHTDIGMAGAGAATAT

SEQ ID NO: 53782 - DNA, 1247 bp, Glycine max
  misc_feature (1)..(1247): Ceres Seq. ID no. 14304057
gacagtgagtggaacgcaatggttggtggtggcgtctctcgcatttcccaccattttcgagactgcgacttccatttccatttccacttcacttttacttactctgcttttcaaactttccacctttcgtctcccccactccctctcaaacctcgctggggaggcatttctcaaaccacagttccctcaaattaccgctgttttggcaccccacctaagtcccccggcgaaattcctctccttttcgattgtttcagccaacaagaagaggatcgtgaaattctctctgatggaacatctgccgtggcaggtggaattgtagcattgggaaagtttgatgctctacacataggtcatagagaacttgcaattcaagcatcaagggctggacctccatttcttttgtcatttgttggcatggcaaaagtacttggttgggaacctagggctcctatagttgctaaatgtgaccgaaagcgaattctttcatcttgggttccttattgctgtaacatggtcccagaagagtttgaggttgaattttcaagcgttcgacatctcaatccccgacaatttgttgaaaagttatcaaaagagcttagggtgcggggagttgttgcaggtgagaactaccgattcgggtataaagcagcaggtgatgccttggagttagttaagctttgtgaagagtacgggatggaagcttacataataaaatctgttatggacaagaatcgtttttctgctgatatgaattctgttaccaactccaaagagaggggacaggtctcatctacacgtgttcgtgaagcccttgccgtaggggacctgaagtatgtctcagagcttttggggaggcctcatcgtctcatattaatggccactgatcaagaaagattcagtactgggcagtataaagtgtctgctcctagatcctgcttattgaatctagcaccaaaggaaggattatatgagaagtgctcacttttacttgatcaggaaaatgttgtgcagtgtagtgtagttattgacagcaagtttgtccatatagaaacagattatggaggtctgagtgacattttttgttctcaaaatttgaagttcttgtttattgagtttggtgattcctgcacttgattcagtttagataattatttctatttaaatttttagtctactgaattgtagatgatttttatccatctcccaaagtagagtgatacaggtatatatgtacctttcttcct

SEQ ID NO: 53783 - protein, 378 aa, Glycine max
  peptide (1)..(378): Ceres Seq. ID no. 14304058
  misc_feature (106)..(324): Homolog of NCBI NO: 15827378 NR Description: putative riboflavin kinase [Mycobacterium leprae]
  misc_feature (107)..(288): Homolog of NCBI NO: 33240796 NR Description: FAD synthase
  misc_feature (106)..(290): Homolog of NCBI NO: 29829088 NR Description: putative riboflavin kinase [Streptomyces
  misc_feature (104)..(290): Homolog of NCBI NO: 29653738 NR Description: riboflavin biosynthesis protein RibF [Coxiella
  misc_feature (107)..(286): Homolog of NCBI NO: 18310664 NR Description: riboflavin biosynthesis protein [Clostridium
  misc_feature (90)..(374): Homolog of NCBI NO: 29150370 NR Description: unknow protein [Oryza sativa (japonica
  misc_feature (68)..(353): Homolog of NCBI NO: 10178276 NR Description: putative protein [Arabidopsis thaliana]
  misc_feature (49)..(374): Homolog of NCBI NO: 21553715 NR Description: unknown [Arabidopsis thaliana]
  misc_feature (49)..(374): Homolog of NCBI NO: 18420664 NR Description: expressed protein [Arabidopsis thaliana]
  misc_feature (7)..(374): Homolog of NCBI NO: 22326656 NR Description: expressed protein [Arabidopsis thaliana]
DSEWNAMVGGGVSRISHHFRDCDFHFHFHFTFTYSAFQTFHLSSPPLPLKPRWGGISQTTVPSNYRCFGTPPKSPGEIPLLFDCFSQQEEDREILSDGTSAVAGGIVALGKFDALHIGHRELAIQASRAGPPFLLSFVGMAKVLGWEPRAPIVAKCDRKRILSSWVPYCCNMVPEEFEVEFSSVRHLNPRQFVEKLSKELRVRGVVAGENYRFGYKAAGDALELVKLCEEYGMEAYIIKSVMDKNRFSADMNSVTNSKERGQVSSTRVREALAVGDLKYVSELLGRPHRLILMATDQERFSTGQYKVSAPRSCLLNLAPKEGLYEKCSLLLDQENVVQCSVVIDSKFVHIETDYGGLSDIFCSQNLKFLFIEFGDSCT

SEQ ID NO: 53784 - protein, 372 aa, Glycine max
  peptide (1)..(372): Ceres Seq. ID no. 14304059
  misc_feature (100)..(318): Homolog of NCBI NO: 15827378 NR Description: putative riboflavin kinase [Mycobacterium leprae]
  misc_feature (101)..(282): Homolog of NCBI NO: 33240796 NR Description: FAD synthase
  misc_feature (100)..(284): Homolog of NCBI NO: 29829088 NR Description: putative riboflavin kinase [Streptomyces
  misc_feature (98)..(284): Homolog of NCBI NO: 29653738 NR Description: riboflavin biosynthesis protein RibF [Coxiella
  misc_feature (101)..(280): Homolog of NCBI NO: 18310664 NR Description: riboflavin biosynthesis protein [Clostridium
  misc_feature (84)..(368): Homolog of NCBI NO: 29150370 NR Description: unknow protein [Oryza sativa (japonica
  misc_feature (62)..(347): Homolog of NCBI NO: 10178276 NR Description: putative protein [Arabidopsis thaliana]
  misc_feature (43)..(368): Homolog of NCBI NO: 21553715 NR Description: unknown [Arabidopsis thaliana]
  misc_feature (43)..(368): Homolog of NCBI NO: 18420664 NR Description: expressed protein [Arabidopsis thaliana]
  misc_feature (1)..(368): Homolog of NCBI NO: 22326656 NR Description: expressed protein [Arabidopsis thaliana]
MVGGGVSRISHHFRDCDFHFHFHFTFTYSAFQTFHLSSPPLPLKPRWGGISQTTVPSNYRCFGTPPKSPGEIPLLFDCFSQQEEDREILSDGTSAVAGGIVALGKFDALHIGHRELAIQASRAGPPFLLSFVGMAKVLGWEPRAPIVAKCDRKRILSSWVPYCCNMVPEEFEVEFSSVRHLNPRQFVEKLSKELRVRGVVAGENYRFGYKAAGDALELVKLCEEYGMEAYIIKSVMDKNRFSADMNSVTNSKERGQVSSTRVREALAVGDLKYVSELLGRPHRLILMATDQERFSTGQYKVSAPRSCLLNLAPKEGLYEKCSLLLDQENVVQCSVVIDSKFVHIETDYGGLSDIFCSQNLKFLFIEFGDSCT

SEQ ID NO: 53785 - protein, 239 aa, Glycine max
  peptide (1)..(239): Ceres Seq. ID no. 14304060
  misc_feature (1)..(185): Homolog of NCBI NO: 15827378 NR Description: putative riboflavin kinase [Mycobacterium leprae]
  misc_feature (1)..(149): Homolog of NCBI NO: 33240796 NR Description: FAD synthase
  misc_feature (1)..(151): Homolog of NCBI NO: 29829088 NR Description: putative riboflavin kinase [Streptomyces
  misc_feature (1)..(151): Homolog of NCBI NO: 29653738 NR Description: riboflavin biosynthesis protein RibF [Coxiella
  misc_feature (1)..(147): Homolog of NCBI NO: 18310664 NR Description: riboflavin biosynthesis protein [Clostridium
  misc_feature (1)..(235): Homolog of NCBI NO: 29150370 NR Description: unknow protein [Oryza sativa (japonica
  misc_feature (1)..(214): Homolog of NCBI NO: 10178276 NR Description: putative protein [Arabidopsis thaliana]
  misc_feature (1)..(235): Homolog of NCBI NO: 21553715 NR Description: unknown [Arabidopsis thaliana]
  misc_feature (1)..(235): Homolog of NCBI NO: 18420664 NR Description: expressed protein [Arabidopsis thaliana]
  misc_feature (1)..(235): Homolog of NCBI NO: 22326656 NR Description: expressed protein [Arabidopsis thaliana]
MAKVLGWEPRAPIVAKCDRKRILSSWVPYCCNMVPEEFEVEFSSVRHLNPRQFVEKLSKELRVRGVVAGENYRFGYKAAGDALELVKLCEEYGMEAYIIKSVMDKNRFSADMNSVTNSKERGQVSSTRVREALAVGDLKYVSELLGRPHRLILMATDQERFSTGQYKVSAPRSCLLNLAPKEGLYEKCSLLLDQENVVQCSVVIDSKFVHIETDYGGLSDIFCSQNLKFLFIEFGDSCT

SEQ ID NO: 53786 - DNA, 2376 bp, Glycine max
  misc_feature (1)..(2376): Ceres Seq. ID no. 15174879
gaccaaaacactcttcactataagaaaaaaaaaaagaataaaaaaggatgatactgcagcagattattaagctcctgaccttaactttgatatggtggagcagtattaatgttgaatgtgcagttgcggggacacgcgacacacgtgtgataaactctggatgcagcacaatcaacgcttccaacccgggtagtttctttgggaatgtcaatgagacaatctcagagctgagaggagaaattaggaaccaaagcttgcactttggcacatcattgaaatccaaaggagatgtcaatacatatactatgtttcaatgcagaaactatctctccagaaatgactgtcttgcttgcatcaacactgcctccacccaaatccgggatatatgcaaaaaagccaacggcgcaagactcatctacaatgactgcttcctcaggtatgagagtgagaggttctaccaacagaccaacgaaatcggtggtggggtaacatgtgggaacaagagcacaaatgccacaggttttagagaagttggacaacaagcactactggacctacaaaaagcaacacctaaaattaaaggtttctatgcagctactaagacacaggtggctggtggtagtgcaaatatttatgccattgcacagtgtgttgaaactgcttccccacagaaatgcctggattgcatgcaagttggatacaacaacttacaaagttgccttcccagcacagatggttcagcatatgatgctggctgtttcatgagattctccaccacaccgttctttgctgataatcaaaccattaatatcagaccctatttaaaagaaggaggttcaagcaagaagtgggccattataggtggcgtcgtaggaggtgttgttctcctccttgtgttgtttgcctggagattgtttacaaaaccaaagagagctcccaaagctgacatattgggagcaactgagttgaaaggtccagttagcttcaagtataaagatttgaaagctgcaacaaaaaatttcagtgctgataataaacttggagaaggaggttttggtgctgtatacaagggtactctgaaaaatggaaaagttgttgctgtgaagaaactaatgttggggaaatcaagcaagatggaggatgattttgaaagtgaagtgaagcttataagtaatgttcatcatcggaatctcgttagacttcttggttgttgcagcagaggccccgagagaatcctagtttatgaatatatggcaaatagcagccttgacaaattcttatttggttccaaaaaaggttccctcaattggaaacaacgttatgatataattttgggcacagcaaggggactagcatatctacatgaggagttccatgtgtccatcattcatagagatataaagaccggtaatatccttctagatgattatctccagcccaaaattgcagattttgggttggcaaggcttttgccaagggatcgttcacatctcagcacaaaatttgctggaacactgggatacacagcacctgaatatgcaatgcaaggtcaattatcagagaaagccgatacctacagttatggtattgtggtcctagaaatcttaagtggtcaaaagagtaccaatgtaaaggttgatgacgagggtcgcgagtaccttcttcaacgagcatggaaactgtatgagagaggcatgcagttggagcttgtggacaaggacatagaccccaatgaatatgatgcagaagaagcgaagaaaatcattgaaattgctttattatgcactcaagcatcagctgcagccaggccaacaatgtctgaattaatagttctactcaaaagcaagagcttagtggagcaccttcgaccaactatgccggtgtttgttgaaacgaatatgatgaatcaggaaggtggcagctctcctggtacatctaatgctactatctccatttccgttctatcggccagatgattattggatcaatgtggtaaagggtcttgatgaactgaatcaataagcaacagaataaaatggataaagattgcttttgattccagttgtttaattgtcaactgtttaagaatagctatgttgcaaagtagagactactgtgtggtgttgttgatttattagtagagtataaaattaaggatgttttgtcaatgtgtgatgctacatattttctactttgatagtttcctgttcaaaatcacgcaagtataagtgcatgcaatttcaaattccgtgttgtatatatgttaagctactatatgtatgtgatctgttggcacgacttgtgccttttaataaaatagttctttgaattccaaaaaaaaaaaaaaaaaaaaaaaaaaaaaaaaaaaaaaaaaat

SEQ ID NO: 53787 - protein, 642 aa, Glycine max
  peptide (1)..(642): Ceres Seq. ID no. 15174880
  misc_feature (187)..(603): Homolog of NCBI NO: 25404093 NR Description: hypothetical protein T6H22.9 [imported] -
  misc_feature (187)..(603): Homolog of NCBI NO: 15223459 NR Description: wall-associated kinase 2 -related [Arabidopsis
  misc_feature (31)..(247): Homolog of NCBI NO: 22328852 NR Description: serine threonine kinase - like protein
  misc_feature (278)..(635): Homolog of NCBI NO: 22328852 NR Description: serine threonine kinase - like protein
  misc_feature (72)..(642): Homolog of NCBI NO: 10178148 NR Description: receptor-like serine/threonine kinase
  misc_feature (72)..(247): Homolog of NCBI NO: 15242677 NR Description: receptor-related protein kinase [Arabidopsis
  misc_feature (301)..(642): Homolog of NCBI NO: 15242677 NR Description: receptor-related protein kinase [Arabidopsis
  misc_feature (72)..(614): Homolog of NCBI NO: 15223170 NR Description: protein kinase -related [Arabidopsis thaliana]
  misc_feature (26)..(640): Homolog of NCBI NO: 15223169 NR Description: protein kinase -related [Arabidopsis thaliana]
  misc_feature (300)..(642): Homolog of NCBI NO: 37535472 NR Description: putative receptor-like protein kinase
MILQQIIKLLTLTLIWWSSINVECAVAGTRDTRVINSGCSTINASNPGSFFGNVNETISELRGEIRNQSLHFGTSLKSKGDVNTYTMFQCRNYLSRNDCLACINTASTQIRDICKKANGARLIYNDCFLRYESERFYQQTNEIGGGVTCGNKSTNATGFREVGQQALLDLQKATPKIKGFYAATKTQVAGGSANIYAIAQCVETASPQKCLDCMQVGYNNLQSCLPSTDGSAYDAGCFMRFSTTPFFADNQTINIRPYLKEGGSSKKWAIIGGVVGGVVLLLVLFAWRLFTKPKRAPKADILGATELKGPVSFKYKDLKAATKNFSADNKLGEGGFGAVYKGTLKNGKVVAVKKLMLGKSSKMEDDFESEVKLISNVHHRNLVRLLGCCSRGPERILVYEYMANSSLDKFLFGSKKGSLNWKQRYDIILGTARGLAYLHEEFHVSIIHRDIKTGNILLDDYLQPKIADFGLARLLPRDRSHLSTKFAGTLGYTAPEYAMQGQLSEKADTYSYGIVVLEILSGQKSTNVKVDDEGREYLLQRAWKLYERGMQLELVDKDIDPNEYDAEEAKKIIEIALLCTQASAAARPTMSELIVLLKSKSLVEHLRPTMPVFVETNMMNQEGGSSPGTSNATISISVLSAR

SEQ ID NO: 53788 - protein, 556 aa, Glycine max
  peptide (1)..(556): Ceres Seq. ID no. 15174881
  misc_feature (101)..(517): Homolog of NCBI NO: 25404093 NR Description: hypothetical protein T6H22.9 [imported] -
  misc_feature (101)..(517): Homolog of NCBI NO: 15223459 NR Description: wall-associated kinase 2 -related [Arabidopsis
  misc_feature (1)..(161): Homolog of NCBI NO: 22328852 NR Description: serine threonine kinase - like protein
  misc_feature (192)..(549): Homolog of NCBI NO: 22328852 NR Description: serine threonine kinase - like protein
  misc_feature (1)..(556): Homolog of NCBI NO: 10178148 NR Description: receptor-like serine/threonine kinase
  misc_feature (1)..(161): Homolog of NCBI NO: 15242677 NR Description: receptor-related protein kinase [Arabidopsis
  misc_feature (215)..(556): Homolog of NCBI NO: 15242677 NR Description: receptor-related protein kinase [Arabidopsis
  misc_feature (1)..(528): Homolog of NCBI NO: 15223170 NR Description: protein kinase -related [Arabidopsis thaliana]
  misc_feature (1)..(554): Homolog of NCBI NO: 15223169 NR Description: protein kinase -related [Arabidopsis thaliana]
  misc_feature (214)..(556): Homolog of NCBI NO: 37535472 NR Description: putative receptor-like protein kinase
MFQCRNYLSRNDCLACINTASTQIRDICKKANGARLIYNDCFLRYESERFYQQTNEIGGGVTCGNKSTNATGFREVGQQALLDLQKATPKIKGFYAATKTQVAGGSANIYAIAQCVETASPQKCLDCMQVGYNNLQSCLPSTDGSAYDAGCFMRFSTTPFFADNQTINIRPYLKEGGSSKKWAIIGGVVGGVVLLLVLFAWRLFTKPKRAPKADILGATELKGPVSFKYKDLKAATKNFSADNKLGEGGFGAVYKGTLKNGKVVAVKKLMLGKSSKMEDDFESEVKLISNVHHRNLVRLLGCCSRGPERILVYEYMANSSLDKFLFGSKKGSLNWKQRYDIILGTARGLAYLHEEFHVSIIHRDIKTGNILLDDYLQPKIADFGLARLLPRDRSHLSTKFAGTLGYTAPEYAMQGQLSEKADTYSYGIVVLEILSGQKSTNVKVDDEGREYLLQRAWKLYERGMQLELVDKDIDPNEYDAEEAKKIIEIALLCTQASAAARPTMSELIVLLKSKSLVEHLRPTMPVFVETNMMNQEGGSSPGTSNATISISVLSAR

SEQ ID NO: 53789 - protein, 429 aa, Glycine max
  peptide (1)..(429): Ceres Seq. ID no. 15174882
  misc_feature (1)..(390): Homolog of NCBI NO: 25404093 NR Description: hypothetical protein T6H22.9 [imported] -
  misc_feature (1)..(390): Homolog of NCBI NO: 15223459 NR Description: wall-associated kinase 2 -related [Arabidopsis
  misc_feature (1)..(34): Homolog of NCBI NO: 22328852 NR Description: serine threonine kinase - like protein
  misc_feature (65)..(422): Homolog of NCBI NO: 22328852 NR Description: serine threonine kinase - like protein
  misc_feature (1)..(429): Homolog of NCBI NO: 10178148 NR Description: receptor-like serine/threonine kinase
  misc_feature (1)..(34): Homolog of NCBI NO: 15242677 NR Description: receptor-related protein kinase [Arabidopsis
  misc_feature (88)..(429): Homolog of NCBI NO: 15242677 NR Description: receptor-related protein kinase [Arabidopsis
  misc_feature (1)..(401): Homolog of NCBI NO: 15223170 NR Description: protein kinase -related [Arabidopsis thaliana]
  misc_feature (1)..(427): Homolog of NCBI NO: 15223169 NR Description: protein kinase -related [Arabidopsis thaliana]
  misc_feature (87)..(429): Homolog of NCBI NO: 37535472 NR Description: putative receptor-like protein kinase
MQVGYNNLQSCLPSTDGSAYDAGCFMRFSTTPFFADNQTINIRPYLKEGGSSKKWAIIGGVVGGVVLLLVLFAWRLFTKPKRAPKADILGATELKGPVSFKYKDLKAATKNFSADNKLGEGGFGAVYKGTLKNGKVVAVKKLMLGKSSKMEDDFESEVKLISNVHHRNLVRLLGCCSRGPERILVYEYMANSSLDKFLFGSKKGSLNWKQRYDIILGTARGLAYLHEEFHVSIIHRDIKTGNILLDDYLQPKIADFGLARLLPRDRSHLSTKFAGTLGYTAPEYAMQGQLSEKADTYSYGIVVLEILSGQKSTNVKVDDEGREYLLQRAWKLYERGMQLELVDKDIDPNEYDAEEAKKIIEIALLCTQASAAARPTMSELIVLLKSKSLVEHLRPTMPVFVETNMMNQEGGSSPGTSNATISISVLSAR

SEQ ID NO: 53790 - DNA, 1754 bp, Glycine max
  misc_feature (1)..(1754): Ceres Seq. ID no. 14310663
aagcaaggagatgcaactgaaaaagtgtctgttagaaagaagaggaaaggcagtgaggatacaatggcatctaaatctgtgcagaagagaaaagggttgttcctaaatactgatagaaatgcggcaggtgctgaaaatgatggtggtagttggggcaaagaggatggtgacaatggaacattggcgcagttgaaaaagaagaaaaaatcttttggtattggaaacactagtagtgggagcaaaaaggaaactgatcatgaaggaaaggccaaagtaaaaaatgggaagggttctttgtcaagagaaaggaagaaaagcaagtacctgtcccctccttttgctattccagccagagagcagaggaaaggagagagggaaacagaatcccctaaagtttctggcaaagatcagcaatcagagccactgaccagagcttctgatcaacttctgaagtcccctgtacctttgaagttgaatgatgagccatttcaggagaatgtttcgaaggaacttgtcatagaccaggaccttcctgatagctcaaattaccgaacaccagaatatgatgagaacaagactattgatacaacaaaaatccaggttccatcaggggaagttctgtctgaagtctgttatgcagctattaatccacaaactccaatgaatatcaattctcttgaaagaattgtggactttatttttatctacagaagctcgttatatcgccaaggatcctactacaaaatatacaagaagcataaacctagcaagaagggaaagaagccagaatctgatctggggattttgaggaaagatcaaatacaatctgataaaaaatcagctaataatgattcggagccaaagaagagaagaaagaatgagacaacttcaagtttgcctaaagagaagcaatctgctgcagctaagactggcaagaaggggattgataaaaaagcttcaggtgcttcccttttcatctcatttgggccaggatcctctctgccttcaaattcggatcttaccacactgtatggtaagtttggagctctgaatgaatcagaaacatctatgctctctagtgattgcactgctcgtgtgttcttcctgaaagcctctgatgctgaaaaggccttgagccattcacagaacatgaacccctttggctcttccgaagcctctttcagacttgagtatctttctgctggttccaagtctgaaaaatccaagtttaaagcttcttcaacaaagaagaaagacaagactccagccaagccatctgcttcattgtcaccaggtggtgaagcatccaaattgaactacataaaggaaaaacttcagggtctgacatcaatgctagaagcatcggatgctaaattacctgatatcaagacaaaattagagagtgagatgaaacagcttttggaggatgtgaacagaatggttgaatcttcttcctaaataacgcatggaatacatactagcaattatttagctagtaatcagggtaggtttatgatatgtcatttccatttagcggactgtctttatctgagaatcaatttatttgtctcatttctgagcctagctttagttaagaggtaaaattactcatatcggtttgttgtgtaggatatgtgacctgttgtatgcataggctgtatagacaccaacatccttttttagatcttctgtcctttttatagtggtgaacaaacagctttaaggatcaaaggtataatgttttcatttctgtc

SEQ ID NO: 53791 - protein, 485 aa, Glycine max
  peptide (1)..(485): Ceres Seq. ID no. 14310664
  misc_feature (294)..(485): Homolog of NCBI NO: 11357182 NR Description: ataxia-telangiectasia mutated protein (Atm)
  misc_feature (294)..(485): Homolog of NCBI NO: 7960715 NR Description: AtATM [Arabidopsis thaliana]
  misc_feature (294)..(485): Homolog of NCBI NO: 22331666 NR Description: ataxia-telangiectasia mutated protein (Atm)
  misc_feature (17)..(420): Homolog of NCBI NO: 30690738 NR Description: PWWP domain protein [Arabidopsis thaliana]
  misc_feature (257)..(417): Homolog of NCBI NO: 15232277 NR Description: PWWP domain protein [Arabidopsis thaliana]
  misc_feature (46)..(314): Homolog of NCBI NO: 15242667 NR Description: PWWP domain protein [Arabidopsis thaliana]
  misc_feature (251)..(453): Homolog of NCBI NO: 15242667 NR Description: PWWP domain protein [Arabidopsis thaliana]
KQGDATEKVSVRKKRKGSEDTMASKSVQKRKGLFLNTDRNAAGAENDGGSWGKEDGDNGTLAQLKKKKKSFGIGNTSSGSKKETDHEGKAKVKNGKGSLSRERKKSKYLSPPFAIPAREQRKGERETESPKVSGKDQQSEPLTRASDQLLKSPVPLKLNDEPFQENVSKELVIDQDLPDSSNYRTPEYDENKTIDTTKIQVPSGEVLSEVCYAAINPQTPMNINSLERIVDFIFIYRSSLYRQGSYYKIYKKHKPSKKGKKPESDLGILRKDQIQSDKKSANNDSEPKKRRKNETTSSLPKEKQSAAAKTGKKGIDKKASGASLFISFGPGSSLPSNSDLTTLYGKFGALNESETSMLSSDCTARVFFLKASDAEKALSHSQNMNPFGSSEASFRLEYLSAGSKSEKSKFKASSTKKKDKTPAKPSASLSPGGEASKLNYIKEKLQGLTSMLEASDAKLPDIKTKLESEMKQLLEDVNRMVESSS

SEQ ID NO: 53792 - protein, 464 aa, Glycine max
  peptide (1)..(464): Ceres Seq. ID no. 14310665
  misc_feature (273)..(464): Homolog of NCBI NO: 11357182 NR Description: ataxia-telangiectasia mutated protein (Atm)
  misc_feature (273)..(464): Homolog of NCBI NO: 7960715 NR Description: AtATM [Arabidopsis thaliana]
  misc_feature (273)..(464): Homolog of NCBI NO: 22331666 NR Description: ataxia-telangiectasia mutated protein (Atm)
  misc_feature (1)..(399): Homolog of NCBI NO: 30690738 NR Description: PWWP domain protein [Arabidopsis thaliana]
  misc_feature (236)..(396): Homolog of NCBI NO: 15232277 NR Description: PWWP domain protein [Arabidopsis thaliana]
  misc_feature (25)..(293): Homolog of NCBI NO: 15242667 NR Description: PWWP domain protein [Arabidopsis thaliana]
  misc_feature (230)..(432): Homolog of NCBI NO: 15242667 NR Description: PWWP domain protein [Arabidopsis thaliana]
MASKSVQKRKGLFLNTDRNAAGAENDGGSWGKEDGDNGTLAQLKKKKKSFGIGNTSSGSKKETDHEGKAKVKNGKGSLSRERKKSKYLSPPFAIPAREQRKGERETESPKVSGKDQQSEPLTRASDQLLKSPVPLKLNDEPFQENVSKELVIDQDLPDSSNYRTPEYDENKTIDTTKIQVPSGEVLSEVCYAAINPQTPMNINSLERIVDFIFIYRSSLYRQGSYYKIYKKHKPSKKGKKPESDLGILRKDQIQSDKKSANNDSEPKKRRKNETTSSLPKEKQSAAAKTGKKGIDKKASGASLFISFGPGSSLPSNSDLTTLYGKFGALNESETSMLSSDCTARVFFLKASDAEKALSHSQNMNPFGSSEASFRLEYLSAGSKSEKSKFKASSTKKKDKTPAKPSASLSPGGEASKLNYIKEKLQGLTSMLEASDAKLPDIKTKLESEMKQLLEDVNRMVESSS

SEQ ID NO: 53793 - protein, 265 aa, Glycine max
  peptide (1)..(265): Ceres Seq. ID no. 14310666
  misc_feature (74)..(265): Homolog of NCBI NO: 11357182 NR Description: ataxia-telangiectasia mutated protein (Atm)
  misc_feature (74)..(265): Homolog of NCBI NO: 7960715 NR Description: AtATM [Arabidopsis thaliana]
  misc_feature (74)..(265): Homolog of NCBI NO: 22331666 NR Description: ataxia-telangiectasia mutated protein (Atm)
  misc_feature (1)..(200): Homolog of NCBI NO: 30690738 NR Description: PWWP domain protein [Arabidopsis thaliana]
  misc_feature (37)..(197): Homolog of NCBI NO: 15232277 NR Description: PWWP domain protein [Arabidopsis thaliana]
  misc_feature (1)..(94): Homolog of NCBI NO: 15242667 NR Description: PWWP domain protein [Arabidopsis thaliana]
  misc_feature (31)..(233): Homolog of NCBI NO: 15242667 NR Description: PWWP domain protein [Arabidopsis thaliana]
MNINSLERIVDFIFIYRSSLYRQGSYYKIYKKHKPSKKGKKPESDLGILRKDQIQSDKKSANNDSEPKKRRKNETTSSLPKEKQSAAAKTGKKGIDKKASGASLFISFGPGSSLPSNSDLTTLYGKFGALNESETSMLSSDCTARVFFLKASDAEKALSHSQNMNPFGSSEASFRLEYLSAGSKSEKSKFKASSTKKKDKTPAKPSASLSPGGEASKLNYIKEKLQGLTSMLEASDAKLPDIKTKLESEMKQLLEDVNRMVESSS

SEQ ID NO: 53794 - DNA, 1191 bp, Glycine max
  misc_feature (1)..(1191): Ceres Seq. ID no. 14310819
gaactcattcttcttcaactcaacagagcaagggttcgcactcgcagattcttgagcaagaataatggggaagaaaagaaaacacagtgagactactcaagctgtagcacaacccaaaaaggaagaggctgctccagagagaccggctaggacccttttggggtggaaggataagaatcaagttgaggatgattcaccaatatttaggaacaaagagaagctattggtcacttgctctaggcgcatcaattacaggtaccggcatttgatgttgaatttggtcacacttttgcctcattgtaagaaggataacaaagttgaatcaaaggaaactaaaggagccaccctcaacgagcttgttgagctaaaaaattgttcctcttgtttattttttgagtgcaggaagcataaagatctttatctctggatggcaaaatgccccaatggcccatctgtaaagtttctagttagtgccgttcacacaatggaggaattgaagctaacgggaaatcacctacaaggttcgcgtccaattttgacattttcagcaaattttgaaaaagatgcacattggaaactattaaaggagatgttgttacagatatttgaaacaccaaaggaccacagaaaggccaagcctttccatgatcacgtttttgttttctcaatagttgatgaccatatatggttccggaattatcagatctctgctcatcataatgagtcggacaaattacctagaggtggccttgataaaatgacattgattgaggttggtccgcgattctgcttgaacccaattaaaatatttggtggcagttttggaggcccaactttatatgagaatccgctctatgtgtcaccaaatcagattggagctttggagaaaaagaagaagtctggaaagtttgcaaagaaggtcaaagcaaagacaaggaggaaaatgcacgagatgtccaatcctctggagcctgatgagtttgcagatatgtggaaagattgattttaaatacaaccgcagctaccacataaaagaaaaacccatatttctcctatattatcctcgcattatattccataacattaaagggagacttttgtgattctataatgttattttcagtaatttcaggtggggtcgggttattctcttttatcagacattggccctagtggaaattaaattttgac

SEQ ID NO: 53795 - protein, 312 aa, Glycine max
  peptide (1)..(312): Ceres Seq. ID no. 14310820
  misc_feature (36)..(214): Homolog of NCBI NO: 32414967 NR Description: hypothetical protein [Neurospora crassa]
  misc_feature (1)..(304): Homolog of NCBI NO: 33604118 NR Description: Unknown (protein for IMAGE:6789379) [Danio rerio]
  misc_feature (47)..(303): Homolog of NCBI NO: 30580353 NR Description: Ribosome biogenesis protein Brix (Bx24)
  misc_feature (47)..(303): Homolog of NCBI NO: 27370947 NR Description: Similar to BRIX [Xenopus laevis]
  misc_feature (3)..(310): Homolog of NCBI NO: 19311012 NR Description: BRIX [Homo sapiens]
  misc_feature (47)..(308): Homolog of NCBI NO: 6324496 NR Description: Essential nucleolar protein required for
  misc_feature (3)..(310): Homolog of NCBI NO: 30580352 NR Description: Ribosome biogenesis protein Brix
  misc_feature (1)..(312): Homolog of NCBI NO: 16648689 NR Description: AT3g15460/MJK13_12 [Arabidopsis thaliana]
  misc_feature (1)..(312): Homolog of NCBI NO: 18400776 NR Description: expressed protein [Arabidopsis thaliana]
  misc_feature (1)..(312): Homolog of NCBI NO: 18404250 NR Description: expressed protein [Arabidopsis thaliana]
MGKKRKHSETTQAVAQPKKEEAAPERPARTLLGWKDKNQVEDDSPIFRNKEKLLVTCSRRINYRYRHLMLNLVTLLPHCKKDNKVESKETKGATLNELVELKNCSSCLFFECRKHKDLYLWMAKCPNGPSVKFLVSAVHTMEELKLTGNHLQGSRPILTFSANFEKDAHWKLLKEMLLQIFETPKDHRKAKPFHDHVFVFSIVDDHIWFRNYQISAHHNESDKLPRGGLDKMTLIEVGPRFCLNPIKIFGGSFGGPTLYENPLYVSPNQIGALEKKKKSGKFAKKVKAKTRRKMHEMSNPLEPDEFADMWKD

SEQ ID NO: 53796 - protein, 244 aa, Glycine max
  peptide (1)..(244): Ceres Seq. ID no. 14310821
  misc_feature (1)..(146): Homolog of NCBI NO: 32414967 NR Description: hypothetical protein [Neurospora crassa]
  misc_feature (1)..(236): Homolog of NCBI NO: 33604118 NR Description: Unknown (protein for IMAGE:6789379) [Danio rerio]
  misc_feature (1)..(235): Homolog of NCBI NO: 30580353 NR Description: Ribosome biogenesis protein Brix (Bx24)
  misc_feature (1)..(235): Homolog of NCBI NO: 27370947 NR Description: Similar to BRIX [Xenopus laevis]
  misc_feature (1)..(242): Homolog of NCBI NO: 19311012 NR Description: BRIX [Homo sapiens]
  misc_feature (1)..(240): Homolog of NCBI NO: 6324496 NR Description: Essential nucleolar protein required for
  misc_feature (1)..(242): Homolog of NCBI NO: 30580352 NR Description: Ribosome biogenesis protein Brix
  misc_feature (1)..(244): Homolog of NCBI NO: 16648689 NR Description: AT3g15460/MJK13_12 [Arabidopsis thaliana]
  misc_feature (1)..(244): Homolog of NCBI NO: 18400776 NR Description: expressed protein [Arabidopsis thaliana]
  misc_feature (1)..(244): Homolog of NCBI NO: 18404250 NR Description: expressed protein [Arabidopsis thaliana]
MLNLVTLLPHCKKDNKVESKETKGATLNELVELKNCSSCLFFECRKHKDLYLWMAKCPNGPSVKFLVSAVHTMEELKLTGNHLQGSRPILTFSANFEKDAHWKLLKEMLLQIFETPKDHRKAKPFHDHVFVFSIVDDHIWFRNYQISAHHNESDKLPRGGLDKMTLIEVGPRFCLNPIKIFGGSFGGPTLYENPLYVSPNQIGALEKKKKSGKFAKKVKAKTRRKMHEMSNPLEPDEFADMWKD

SEQ ID NO: 53797 - protein, 191 aa, Glycine max
  peptide (1)..(191): Ceres Seq. ID no. 14310822
  misc_feature (1)..(93): Homolog of NCBI NO: 32414967 NR Description: hypothetical protein [Neurospora crassa]
  misc_feature (1)..(183): Homolog of NCBI NO: 33604118 NR Description: Unknown (protein for IMAGE:6789379) [Danio rerio]
  misc_feature (1)..(182): Homolog of NCBI NO: 30580353 NR Description: Ribosome biogenesis protein Brix (Bx24)
  misc_feature (1)..(182): Homolog of NCBI NO: 27370947 NR Description: Similar to BRIX [Xenopus laevis]
  misc_feature (1)..(189): Homolog of NCBI NO: 19311012 NR Description: BRIX [Homo sapiens]
  misc_feature (1)..(187): Homolog of NCBI NO: 6324496 NR Description: Essential nucleolar protein required for
  misc_feature (1)..(189): Homolog of NCBI NO: 30580352 NR Description: Ribosome biogenesis protein Brix
  misc_feature (1)..(191): Homolog of NCBI NO: 16648689 NR Description: AT3g15460/MJK13_12 [Arabidopsis thaliana]
  misc_feature (1)..(191): Homolog of NCBI NO: 18400776 NR Description: expressed protein [Arabidopsis thaliana]
  misc_feature (1)..(191): Homolog of NCBI NO: 18404250 NR Description: expressed protein [Arabidopsis thaliana]
MAKCPNGPSVKFLVSAVHTMEELKLTGNHLQGSRPILTFSANFEKDAHWKLLKEMLLQIFETPKDHRKAKPFHDHVFVFSIVDDHIWFRNYQISAHHNESDKLPRGGLDKMTLIEVGPRFCLNPIKIFGGSFGGPTLYENPLYVSPNQIGALEKKKKSGKFAKKVKAKTRRKMHEMSNPLEPDEFADMWKD

SEQ ID NO: 53798 - DNA, 1715 bp, Glycine max
  misc_feature (1)..(1715): Ceres Seq. ID no. 14304000
ggttaaggaccgactcttcacttgggaggaagtgacgatcgaaatctggtaagaggctgtaatcaatcaaccaaagcaacgatgtcgtggtttacaaggacaatcgcaaactcactcaaactcgacgacgacgacaatggcggtgacctaaaatcccctccgaagaaacccgattcggaacccgttcaacccgattccgcatccacccccaatcccaccacgcgcggcgtcaaagaggatttttccgagctcaccaaatccttttcccgccagctctggggagtcgcctccttcctcgccccgccgcccgatccccaatccgaaaagcccgtcgccgattccaatcccaatcccactgacgacgacgaagaggaagatatcatcgcaggaatccgaaacgatttcgcggagattagtggcaagttcaagagcgggatctccaaaatttctggtaataagacggtatccgaattcactaagatagcttcgagtttccttcagcttggatccgaggaggaatacgatctcgaaggtgtcctcggagttaccgaggatgtggttgccttcgccagaagcgtagctttgcatccagaaacttggctcgattttccccttcccgatgatgaggattctgatgattttgatttgtccgatgcacaacaagaacatgctctagctgttgaacacctggcaccaagcttagctgctcttagaatggagctgtgccccggatacatgagtgatggtaacttttggaagatatactttgttctcgtgcaccctagacttagcaaaactgatgctgctattttatccactccacaaataatggaagctagagcaatgttaactctggctttagacaaaagaagtaaggaaaagaaagaatctgacttatctgcaggagggaatgttccctcaaaagaggaggaacagcatctctttgtgccaagcactgttcaacttgaatcagcacctctccagacatctgctgctgaagctgccccatctgtggttgtttctaatgttgagatggagaaacatgccactcaaagtattgttccagaggttattgacaagtctgtggttaaagaagcaacggtaaatccatctgcagaacaatcatcatctggttcaaccaatagatttttggatgaatcctatgaggatgatgctgatgattggttgaaagaagaggatacttctgaaatggttggtcccagtggaactcctgttcacactggtaatgacgaggatgtatcattcagtgatcttgaggaggatgatggtgatgtacatgaaagttataaaaaaactagatcaggctctgattcttcaacaaaagactctcgagattgggttcagttaggtagaagttcacctaactctgataaggatttaaactgtgtagaaggcaaacatgttggctctgagcattcaagtgctcgtaattctatgaccaaggattccaatgattggcttaatgttgatgacattgatgtaatatgactatgccttggaatatgtcccagaggtaagtttttttttatttttaaatatgattctcttatattttgtgaatatctgcatatagttgtgtactctacgattgacattctgaagaatgcgtttctgtaaataaaaccagtctccactgggcattgtgctatgtatggttatttattgcaccgtacataaactaaatcttctatttg

SEQ ID NO: 53799 - protein, 475 aa, Glycine max
  peptide (1)..(475): Ceres Seq. ID no. 14304001
  misc_feature (186)..(232): Pfam Name: BSD domain Pfam Description: BSD domain
  misc_feature (186)..(429): Homolog of NCBI NO: 7486518 NR Description: hypothetical protein F6H11.10 - Arabidopsis
  misc_feature (15)..(185): Homolog of NCBI NO: 6573740 NR Description: F20B24.15 [Arabidopsis thaliana]
  misc_feature (186)..(417): Homolog of NCBI NO: 6573740 NR Description: F20B24.15 [Arabidopsis thaliana]
  misc_feature (15)..(417): Homolog of NCBI NO: 21555533 NR Description: unknown [Arabidopsis thaliana]
  misc_feature (15)..(417): Homolog of NCBI NO: 18391195 NR Description: expressed protein [Arabidopsis thaliana]
  misc_feature (1)..(404): Homolog of NCBI NO: 34909848 NR Description: OSJNBb0053G03.5 [Oryza sativa (japonica
  misc_feature (1)..(154): Homolog of NCBI NO: 28273391 NR Description: putative BSD domain containing protein
  misc_feature (144)..(403): Homolog of NCBI NO: 28273391 NR Description: putative BSD domain containing protein
  misc_feature (1)..(411): Homolog of NCBI NO: 15229611 NR Description: expressed protein [Arabidopsis thaliana]
  misc_feature (1)..(429): Homolog of NCBI NO: 18425006 NR Description: expressed protein [Arabidopsis thaliana]
MSWFTRTIANSLKLDDDDNGGDLKSPPKKPDSEPVQPDSASTPNPTTRGVKEDFSELTKSFSRQLWGVASFLAPPPDPQSEKPVADSNPNPTDDDEEEDIIAGIRNDFAEISGKFKSGISKISGNKTVSEFTKIASSFLQLGSEEEYDLEGVLGVTEDVVAFARSVALHPETWLDFPLPDDEDSDDFDLSDAQQEHALAVEHLAPSLAALRMELCPGYMSDGNFWKIYFVLVHPRLSKTDAAILSTPQIMEARAMLTLALDKRSKEKKESDLSAGGNVPSKEEEQHLFVPSTVQLESAPLQTSAAEAAPSVVVSNVEMEKHATQSIVPEVIDKSVVKEATVNPSAEQSSSGSTNRFLDESYEDDADDWLKEEDTSEMVGPSGTPVHTGNDEDVSFSDLEEDDGDVHESYKKTRSGSDSSTKDSRDWVQLGRSSPNSDKDLNCVEGKHVGSEHSSARNSMTKDSNDWLNVDDIDVI

SEQ ID NO: 53800 - protein, 264 aa, Glycine max
  peptide (1)..(264): Ceres Seq. ID no. 14304002
  misc_feature (1)..(163): Homolog of NCBI NO: 21592796 NR Description: unknown [Arabidopsis thaliana]
  misc_feature (1)..(163): Homolog of NCBI NO: 18396945 NR Description: expressed protein [Arabidopsis thaliana]
  misc_feature (1)..(218): Homolog of NCBI NO: 7486518 NR Description: hypothetical protein F6H11.10 - Arabidopsis
  misc_feature (1)..(206): Homolog of NCBI NO: 6573740 NR Description: F20B24.15 [Arabidopsis thaliana]
  misc_feature (1)..(206): Homolog of NCBI NO: 21555533 NR Description: unknown [Arabidopsis thaliana]
  misc_feature (1)..(206): Homolog of NCBI NO: 18391195 NR Description: expressed protein [Arabidopsis thaliana]
  misc_feature (1)..(193): Homolog of NCBI NO: 34909848 NR Description: OSJNBb0053G03.5 [Oryza sativa (japonica
  misc_feature (1)..(192): Homolog of NCBI NO: 28273391 NR Description: putative BSD domain containing protein
  misc_feature (1)..(200): Homolog of NCBI NO: 15229611 NR Description: expressed protein [Arabidopsis thaliana]
  misc_feature (1)..(218): Homolog of NCBI NO: 18425006 NR Description: expressed protein [Arabidopsis thaliana]
MELCPGYMSDGNFWKIYFVLVHPRLSKTDAAILSTPQIMEARAMLTLALDKRSKEKKESDLSAGGNVPSKEEEQHLFVPSTVQLESAPLQTSAAEAAPSVVVSNVEMEKHATQSIVPEVIDKSVVKEATVNPSAEQSSSGSTNRFLDESYEDDADDWLKEEDTSEMVGPSGTPVHTGNDEDVSFSDLEEDDGDVHESYKKTRSGSDSSTKDSRDWVQLGRSSPNSDKDLNCVEGKHVGSEHSSARNSMTKDSNDWLNVDDIDVI

SEQ ID NO: 53801 - protein, 257 aa, Glycine max
  peptide (1)..(257): Ceres Seq. ID no. 14304003
  misc_feature (1)..(156): Homolog of NCBI NO: 21592796 NR Description: unknown [Arabidopsis thaliana]
  misc_feature (1)..(156): Homolog of NCBI NO: 18396945 NR Description: expressed protein [Arabidopsis thaliana]
  misc_feature (1)..(211): Homolog of NCBI NO: 7486518 NR Description: hypothetical protein F6H11.10 - Arabidopsis
  misc_feature (1)..(199): Homolog of NCBI NO: 6573740 NR Description: F20B24.15 [Arabidopsis thaliana]
  misc_feature (1)..(199): Homolog of NCBI NO: 21555533 NR Description: unknown [Arabidopsis thaliana]
  misc_feature (1)..(199): Homolog of NCBI NO: 18391195 NR Description: expressed protein [Arabidopsis thaliana]
  misc_feature (1)..(186): Homolog of NCBI NO: 34909848 NR Description: OSJNBb0053G03.5 [Oryza sativa (japonica
  misc_feature (1)..(185): Homolog of NCBI NO: 28273391 NR Description: putative BSD domain containing protein
  misc_feature (1)..(193): Homolog of NCBI NO: 15229611 NR Description: expressed protein [Arabidopsis thaliana]
  misc_feature (1)..(211): Homolog of NCBI NO: 18425006 NR Description: expressed protein [Arabidopsis thaliana]
MSDGNFWKIYFVLVHPRLSKTDAAILSTPQIMEARAMLTLALDKRSKEKKESDLSAGGNVPSKEEEQHLFVPSTVQLESAPLQTSAAEAAPSVVVSNVEMEKHATQSIVPEVIDKSVVKEATVNPSAEQSSSGSTNRFLDESYEDDADDWLKEEDTSEMVGPSGTPVHTGNDEDVSFSDLEEDDGDVHESYKKTRSGSDSSTKDSRDWVQLGRSSPNSDKDLNCVEGKHVGSEHSSARNSMTKDSNDWLNVDDIDVI

SEQ ID NO: 53802 - DNA, 1612 bp, Glycine max
  misc_feature (1)..(1612): Ceres Seq. ID no. 14303943
gcgctcacatcgtgttctctgcggcgcgagctagctagggtttagaacctcgcagttacagaaaacatggcgactgtggtgccaacctccgaagaagacgctgcactctccgtcgttcgattcgcctctgaacttgcctgggccgatgccggtcccgaggttgctgagccccaagttagcagactctgcgtggaggctgaagaattcattgttatgggaaagtggttggagctagcatcattgatgattacctctgctgaattgattttctcgaaggtttctgaaaaagatatagagtccatcttcactatcatctgcaatcttgttacaaagaccgaaaatccagatgaagtgatggagattgtaaaagttataactacaaaaatactccagcagccaaatgaaaagcctgctgtgcgattgaagattatgatcagcctgtacaaccttttggagactccatactgccagttttatgtctacatgaagttactgaatttagctgttgatgggaaagtcacagaacacattataccttcattcaataagattgataacttcttgaaagactggaaaattgggataccagaacagagagagctctttcttgctgtctctaatattttgaaggaaaataaaagcatgtcaaaggatgcttttaagttcctgaccagttatctggcaactttttcgggagatgactcacatgttttgagtgaagccaaggaggaggctgcacgtgcaattgtggaatttgtgagggcacctgacgtatttcagtgtgatttactagacttgcctgctgttacacaactggagaaggatgccaaatatgctctgttatatcagcttcttaagatttttcttacccagaggctggatgcatacttagactatcatgctgccaattccaccttgttgaaaagttatggccttgtgcatgaagaatgcattgccaaaatgaggcttttgtcattggtggatcttagctctgatggatctggccaaattccatatgaacttattagggacacacttcagatcagtgatgatgaggtggaactatgggtagttagaggattaactgctaacttaattgactgtaagatggaccaaatgaatcaagttgtagttgtcagtcatcctactgagcgtgtgtttggtcagcaccaatggcaagcactgagaacaaagctagtgacatggaggggaaacattgcaaatgtgatcagtaccattcaggccaacaaaataacggaggatgggtcccaggcagcccaaggcttggtagttcggtgaggacgattgagtgaagcaattatctgagtatctagattttatccaggtggaatttttttatcttaaacagaggataagagtgtaatttgctttgttgcaatttatttttccatttattttagttggctggtgactctaatttgtactaaactttggcagagccattttgattgaagtttttccatttttaatttagaccagcctcatttctaaatatctttctgtcgtctaagttaaccagtgcgattgttgttgccctgattgcatagtcaattcaactatcaaattcatattagtatattttcactcttac

SEQ ID NO: 53803 - protein, 410 aa, Glycine max
  peptide (1)..(410): Ceres Seq. ID no. 14303944
  misc_feature (257)..(357): Pfam Name: PCI domain Pfam Description: PCI domain
  misc_feature (14)..(391): Homolog of NCBI NO: 23397429 NR Description: dendritic cell protein [Homo sapiens]
  misc_feature (14)..(391): Homolog of NCBI NO: 34856621 NR Description: similar to Ga17 protein [Rattus norvegicus]
  misc_feature (14)..(391): Homolog of NCBI NO: 21703762 NR Description: dendritic cell protein GA17 [Mus musculus]
  misc_feature (55)..(410): Homolog of NCBI NO: 32489165 NR Description: OSJNBa0094O15.2 [Oryza sativa (japonica
  misc_feature (1)..(352): Homolog of NCBI NO: 6041797 NR Description: unknown protein [Arabidopsis thaliana]
  misc_feature (1)..(363): Homolog of NCBI NO: 30678503 NR Description: expressed protein [Arabidopsis thaliana]
  misc_feature (1)..(410): Homolog of NCBI NO: 22330807 NR Description: expressed protein [Arabidopsis thaliana]
  misc_feature (357)..(410): Homolog of NCBI NO: 15242346 NR Description: expressed protein [Arabidopsis thaliana]
  misc_feature (1)..(357): Homolog of NCBI NO: 15242346 NR Description: expressed protein [Arabidopsis thaliana]
  misc_feature (1)..(410): Homolog of NCBI NO: 30685439 NR Description: expressed protein [Arabidopsis thaliana]
MATVVPTSEEDAALSVVRFASELAWADAGPEVAEPQVSRLCVEAEEFIVMGKWLELASLMITSAELIFSKVSEKDIESIFTIICNLVTKTENPDEVMEIVKVITTKILQQPNEKPAVRLKIMISLYNLLETPYCQFYVYMKLLNLAVDGKVTEHIIPSFNKIDNFLKDWKIGIPEQRELFLAVSNILKENKSMSKDAFKFLTSYLATFSGDDSHVLSEAKEEAARAIVEFVRAPDVFQCDLLDLPAVTQLEKDAKYALLYQLLKIFLTQRLDAYLDYHAANSTLLKSYGLVHEECIAKMRLLSLVDLSSDGSGQIPYELIRDTLQISDDEVELWVVRGLTANLIDCKMDQMNQVVVVSHPTERVFGQHQWQALRTKLVTWRGNIANVISTIQANKITEDGSQAAQGLVVR

SEQ ID NO: 53804 - protein, 361 aa, Glycine max
  peptide (1)..(361): Ceres Seq. ID no. 14303945
  misc_feature (208)..(308): Pfam Name: PCI domain Pfam Description: PCI domain
  misc_feature (1)..(342): Homolog of NCBI NO: 23397429 NR Description: dendritic cell protein [Homo sapiens]
  misc_feature (1)..(342): Homolog of NCBI NO: 34856621 NR Description: similar to Ga17 protein [Rattus norvegicus]
  misc_feature (1)..(342): Homolog of NCBI NO: 21703762 NR Description: dendritic cell protein GA17 [Mus musculus]
  misc_feature (6)..(361): Homolog of NCBI NO: 32489165 NR Description: OSJNBa0094O15.2 [Oryza sativa (japonica
  misc_feature (1)..(303): Homolog of NCBI NO: 6041797 NR Description: unknown protein [Arabidopsis thaliana]
  misc_feature (1)..(314): Homolog of NCBI NO: 30678503 NR Description: expressed protein [Arabidopsis thaliana]
  misc_feature (1)..(361): Homolog of NCBI NO: 22330807 NR Description: expressed protein [Arabidopsis thaliana]
  misc_feature (308)..(361): Homolog of NCBI NO: 15242346 NR Description: expressed protein [Arabidopsis thaliana]
  misc_feature (1)..(308): Homolog of NCBI NO: 15242346 NR Description: expressed protein [Arabidopsis thaliana]
  misc_feature (1)..(361): Homolog of NCBI NO: 30685439 NR Description: expressed protein [Arabidopsis thaliana]
MGKWLELASLMITSAELIFSKVSEKDIESIFTIICNLVTKTENPDEVMEIVKVITTKILQQPNEKPAVRLKIMISLYNLLETPYCQFYVYMKLLNLAVDGKVTEHIIPSFNKIDNFLKDWKIGIPEQRELFLAVSNILKENKSMSKDAFKFLTSYLATFSGDDSHVLSEAKEEAARAIVEFVRAPDVFQCDLLDLPAVTQLEKDAKYALLYQLLKIFLTQRLDAYLDYHAANSTLLKSYGLVHEECIAKMRLLSLVDLSSDGSGQIPYELIRDTLQISDDEVELWVVRGLTANLIDCKMDQMNQVVVVSHPTERVFGQHQWQALRTKLVTWRGNIANVISTIQANKITEDGSQAAQGLVVR

SEQ ID NO: 53805 - protein, 351 aa, Glycine max
  peptide (1)..(351): Ceres Seq. ID no. 14303946
  misc_feature (198)..(298): Pfam Name: PCI domain Pfam Description: PCI domain
  misc_feature (1)..(332): Homolog of NCBI NO: 23397429 NR Description: dendritic cell protein [Homo sapiens]
  misc_feature (1)..(332): Homolog of NCBI NO: 34856621 NR Description: similar to Ga17 protein [Rattus norvegicus]
  misc_feature (1)..(332): Homolog of NCBI NO: 21703762 NR Description: dendritic cell protein GA17 [Mus musculus]
  misc_feature (1)..(351): Homolog of NCBI NO: 32489165 NR Description: OSJNBa0094O15.2 [Oryza sativa (japonica
  misc_feature (1)..(293): Homolog of NCBI NO: 6041797 NR Description: unknown protein [Arabidopsis thaliana]
  misc_feature (1)..(304): Homolog of NCBI NO: 30678503 NR Description: expressed protein [Arabidopsis thaliana]
  misc_feature (1)..(351): Homolog of NCBI NO: 22330807 NR Description: expressed protein [Arabidopsis thaliana]
  misc_feature (298)..(351): Homolog of NCBI NO: 15242346 NR Description: expressed protein [Arabidopsis thaliana]
  misc_feature (1)..(298): Homolog of NCBI NO: 15242346 NR Description: expressed protein [Arabidopsis thaliana]
  misc_feature (1)..(351): Homolog of NCBI NO: 30685439 NR Description: expressed protein [Arabidopsis thaliana]
MITSAELIFSKVSEKDIESIFTIICNLVTKTENPDEVMEIVKVITTKILQQPNEKPAVRLKIMISLYNLLETPYCQFYVYMKLLNLAVDGKVTEHIIPSFNKIDNFLKDWKIGIPEQRELFLAVSNILKENKSMSKDAFKFLTSYLATFSGDDSHVLSEAKEEAARAIVEFVRAPDVFQCDLLDLPAVTQLEKDAKYALLYQLLKIFLTQRLDAYLDYHAANSTLLKSYGLVHEECIAKMRLLSLVDLSSDGSGQIPYELIRDTLQISDDEVELWVVRGLTANLIDCKMDQMNQVVVVSHPTERVFGQHQWQALRTKLVTWRGNIANVISTIQANKITEDGSQAAQGLVVR

SEQ ID NO: 53806 - DNA, 1143 bp, Glycine max
  misc_feature (1)..(1143): Ceres Seq. ID no. 14306654
tttgcattcagcctcccagtggaaagggccccaagcataagcagacatgcacatgtaatgtatgcttaacagtgaagcgacgattccgtacccttatgttacggcgtgagaagaaacaatcagaaaaagaagcagagacaactcgtaaaaagcaacagcaacaacatcctctaccattaccttcatctgaaattttgcttgatgaagattccttgccctgtagtaacacaggtgatagtagcccaaaccagaacaaagagggtaatgatggttctgatgatgatcctagccgaataaaatcatctgcttcgccgttcaaaggcaaaattgacctcaatatccaaccagagcgagaagaagaattatcacctggttcggattctggcggcatgatgaagttgctccatgatgctactgagcgatatctcaaacagcagactgtgaactctggtactggagattcatcaggcagtcagtcacagctggtaggagatgcaatgagggaagataaacttagcaatggtgttgcccatggcagtagtagtcataatactgataaggaacatgcccaatctttgcctatgaatgtgtgaaaatcatattggcgctagccataattgatacgttcttgcaaagctatattgaagtggggaaagattttgctgtacattttatccacttcggcttcttgctttttcttgtttgtacataaagaggagtaggaaaaaatggtgagaaaccaatatattccggtaatataagtgggcatcatagtggtttgtgtaggaaaactatgaaatgcagctgaatgggtagtaggttgaagctgtttagtttctttgagagctcaccgtgccacctgatttcaacaacgttgaaaatgtaactatgcctaatttgttctcccaatttattcttagcctgtaagatgtttatactttctagtaactgctagttctgttcgctgtttctctttattggaaatttggaggcacactttcacccgttttcagcaagcaacctatgctgtatacaatcaatgatggcagagaaatattggctgttttaaggggggaagtgcactcgtccattgttattgcactcggtacaaatctacccgtgtaattatttatagcctctgtt

SEQ ID NO: 53807 - protein, 196 aa, Glycine max
  peptide (1)..(196): Ceres Seq. ID no. 14306655
  misc_feature (1)..(69): Homolog of NCBI NO: 15236645 NR Description: transcriptional factor B3 family [Arabidopsis
  misc_feature (1)..(53): Homolog of NCBI NO: 7485714 NR Description: hypothetical protein F18E5.170 - Arabidopsis
  misc_feature (1)..(53): Homolog of NCBI NO: 15234504 NR Description: transcriptional factor B3 family [Arabidopsis
  misc_feature (1)..(86): Homolog of NCBI NO: 30684597 NR Description: transcriptional factor B3 family [Arabidopsis
  misc_feature (1)..(86): Homolog of NCBI NO: 25408077 NR Description: probable VP1/ABI3 family regulatory protein
  misc_feature (1)..(165): Homolog of NCBI NO: 34394741 NR Description: VP1/ABI3 family regulatory protein-like
  misc_feature (1)..(132): Homolog of NCBI NO: 34898718 NR Description: similar to VP1/ABI3 family regulatory protein
CIQPPSGKGPKHKQTCTCNVCLTVKRRFRTLMLRREKKQSEKEAETTRKKQQQQHPLPLPSSEILLDEDSLPCSNTGDSSPNQNKEGNDGSDDDPSRIKSSASPFKGKIDLNIQPEREEELSPGSDSGGMMKLLHDATERYLKQQTVNSGTGDSSGSQSQLVGDAMREDKLSNGVAHGSSSHNTDKEHAQSLPMNV

SEQ ID NO: 53808 - protein, 165 aa, Glycine max
  peptide (1)..(165): Ceres Seq. ID no. 14306656
  misc_feature (1)..(38): Homolog of NCBI NO: 15236645 NR Description: transcriptional factor B3 family [Arabidopsis
  misc_feature (1)..(22): Homolog of NCBI NO: 7485714 NR Description: hypothetical protein F18E5.170 - Arabidopsis
  misc_feature (1)..(22): Homolog of NCBI NO: 15234504 NR Description: transcriptional factor B3 family [Arabidopsis
  misc_feature (1)..(55): Homolog of NCBI NO: 30684597 NR Description: transcriptional factor B3 family [Arabidopsis
  misc_feature (1)..(55): Homolog of NCBI NO: 25408077 NR Description: probable VP1/ABI3 family regulatory protein
  misc_feature (1)..(134): Homolog of NCBI NO: 34394741 NR Description: VP1/ABI3 family regulatory protein-like
  misc_feature (1)..(101): Homolog of NCBI NO: 34898718 NR Description: similar to VP1/ABI3 family regulatory protein
MLRREKKQSEKEAETTRKKQQQQHPLPLPSSEILLDEDSLPCSNTGDSSPNQNKEGNDGSDDDPSRIKSSASPFKGKIDLNIQPEREEELSPGSDSGGMMKLLHDATERYLKQQTVNSGTGDSSGSQSQLVGDAMREDKLSNGVAHGSSSHNTDKEHAQSLPMNV

SEQ ID NO: 53809 - DNA, 1405 bp, Glycine max
  misc_feature (1)..(1405): Ceres Seq. ID no. 14306671
ggcttgtgagttctgacccaacagaggccaccacgcccatactatcccaatattctcttctttttggtggcagaagagaagagaaacaagaccacatccgcattcatcatacccaccttaatttcccctttccctttggcatagactatagactaaagtgtgtcaaactcactatgatactgacactactgcctcctccaaaatcaccattcttgaatacccttttgctcctctgcactactctcctcctcccaccttgctacctggctctccctgaccctgatgctgatgcggttcagccaatcatcccaaacccctcatcttcaacaggaacaatccctgcattcccagaacaagctgatgctgcagggtgccctctcagcctctcagatgagcactacgaaggcataaagagtgcatgtggctccaacaaacatgctgcagatgatgatgatgacctccaccgtagcagatgctgtcctgtgctggcagcgtggctctattctgcatactcagccactgcccttagtggtggaatgcaacatgaacgtgcctcaaagggccataccacatcctatgacatgcccttgttgcctgatgattcagaaacatgtgtgagtgacttggggaaggccttgaaaattagaggaatccagctttttcagcccaatgagacttgtgatctggtctattgctactgtggcattaggcttcaccctttgacctgtcctgagtcattctcagttactccaagtggaactcttgttgtcaatcaaagtgtgaaaagattggagagggattgcttcagtagcagcaccaatgtcaataagtttcccggcctgggaggatgctccaagtgcttgcatagtctctattcgcttaggaagaattcttcaaattcaagcaagtcagaagataggaccaccaagatccataacaaagattgtgaactaatgggcctgacatggcttctggctaagaatagaacagcttacattcacacagtttctggggttcttcgagctttgatgttgagcactgaaggctctgacccacaatcatgcactctaaacagtgatggaatgcctcttgccgttgattcctctgaaatgtcagatgaatcttcatcaaccaacctacaagcaccaattttcctctctttgttactatttctacattatttcactctattatggcacctaactgaaaacgagtgcaaagagattgatccccattccccaacatggcatttgtaaatttgaatctgtgctttggtgcttaggagtgtatttttattttctttcttgggtgttaatttgtttgaaagaaaattcataatggttttgttttggtggtcctggattgccatgtgctaatagcgaccggtgtttcgtttcggagggac

SEQ ID NO: 53810 - protein, 417 aa, Glycine max
  peptide (1)..(417): Ceres Seq. ID no. 14306672
  misc_feature (76)..(381): Homolog of NCBI NO: 34394002 NR Description: unknown protein [Oryza sativa (japonica
  misc_feature (111)..(396): Homolog of NCBI NO: 21593735 NR Description: unknown [Arabidopsis thaliana]
  misc_feature (111)..(396): Homolog of NCBI NO: 18417127 NR Description: expressed protein [Arabidopsis thaliana]
  misc_feature (71)..(397): Homolog of NCBI NO: 18401752 NR Description: expressed protein [Arabidopsis thaliana]
LVSSDPTEATTPILSQYSLLFGGRREEKQDHIRIHHTHLNFPFPFGIDYRLKCVKLTMILTLLPPPKSPFLNTLLLLCTTLLLPPCYLALPDPDADAVQPIIPNPSSSTGTIPAFPEQADAAGCPLSLSDEHYEGIKSACGSNKHAADDDDDLHRSRCCPVLAAWLYSAYSATALSGGMQHERASKGHTTSYDMPLLPDDSETCVSDLGKALKIRGIQLFQPNETCDLVYCYCGIRLHPLTCPESFSVTPSGTLVVNQSVKRLERDCFSSSTNVNKFPGLGGCSKCLHSLYSLRKNSSNSSKSEDRTTKIHNKDCELMGLTWLLAKNRTAYIHTVSGVLRALMLSTEGSDPQSCTLNSDGMPLAVDSSEMSDESSSTNLQAPIFLSLLLFLHYFTLLWHLTENECKEIDPHSPTWHL

SEQ ID NO: 53811 - protein, 360 aa, Glycine max
  peptide (1)..(360): Ceres Seq. ID no. 14306673
  misc_feature (19)..(324): Homolog of NCBI NO: 34394002 NR Description: unknown protein [Oryza sativa (japonica
  misc_feature (54)..(339): Homolog of NCBI NO: 21593735 NR Description: unknown [Arabidopsis thaliana]
  misc_feature (54)..(339): Homolog of NCBI NO: 18417127 NR Description: expressed protein [Arabidopsis thaliana]
  misc_feature (14)..(340): Homolog of NCBI NO: 18401752 NR Description: expressed protein [Arabidopsis thaliana]
MILTLLPPPKSPFLNTLLLLCTTLLLPPCYLALPDPDADAVQPIIPNPSSSTGTIPAFPEQADAAGCPLSLSDEHYEGIKSACGSNKHAADDDDDLHRSRCCPVLAAWLYSAYSATALSGGMQHERASKGHTTSYDMPLLPDDSETCVSDLGKALKIRGIQLFQPNETCDLVYCYCGIRLHPLTCPESFSVTPSGTLVVNQSVKRLERDCFSSSTNVNKFPGLGGCSKCLHSLYSLRKNSSNSSKSEDRTTKIHNKDCELMGLTWLLAKNRTAYIHTVSGVLRALMLSTEGSDPQSCTLNSDGMPLAVDSSEMSDESSSTNLQAPIFLSLLLFLHYFTLLWHLTENECKEIDPHSPTWHL

SEQ ID NO: 53812 - protein, 239 aa, Glycine max
  peptide (1)..(239): Ceres Seq. ID no. 14306674
  misc_feature (1)..(203): Homolog of NCBI NO: 34394002 NR Description: unknown protein [Oryza sativa (japonica
  misc_feature (1)..(218): Homolog of NCBI NO: 21593735 NR Description: unknown [Arabidopsis thaliana]
  misc_feature (1)..(218): Homolog of NCBI NO: 18417127 NR Description: expressed protein [Arabidopsis thaliana]
  misc_feature (1)..(219): Homolog of NCBI NO: 18401752 NR Description: expressed protein [Arabidopsis thaliana]
MQHERASKGHTTSYDMPLLPDDSETCVSDLGKALKIRGIQLFQPNETCDLVYCYCGIRLHPLTCPESFSVTPSGTLVVNQSVKRLERDCFSSSTNVNKFPGLGGCSKCLHSLYSLRKNSSNSSKSEDRTTKIHNKDCELMGLTWLLAKNRTAYIHTVSGVLRALMLSTEGSDPQSCTLNSDGMPLAVDSSEMSDESSSTNLQAPIFLSLLLFLHYFTLLWHLTENECKEIDPHSPTWHL

SEQ ID NO: 53813 - DNA, 835 bp, Glycine max
  misc_feature (1)..(835): Ceres Seq. ID no. 14303973
gaaaaaagcaaaaatgcaatctatgtccctgacgctgagcaagaggctctccaattcaaagcctctcttcagaatctcttccaacctcgtcgctcacgcatcctccgccacaacctctccgccgccaccttcgccgccagtcccctctccatccgccctcaacagcctcctcaccgctccgtggtccgccactcagtcacgcggaatcacgctctctggatctgatgttcgagtcgggaatctcattggaaaccgaggacgcgctcacgaggttctcaaactgtatcgccctcttgaaggaacgggcaaagccactcttgaggttccgcctcaaagtgtagctggttatgccacagttgctactacagaggatggcgccgaaaggaaggaacgaaacagtggattgagtaaggcaacgaagacaaagagagagcagctcctaaaagctactgcagttgcctctcttcttctaatatacccgaacacttattcattgctcttcgcaaatttctttgtgttctggcacttatatgcagggatcggagagattttggcagactatgttcaccatgaaatgaccagagaatttgtcatgatttctctcaggttgttcttgataatggcattgaaggatgtatgcttaaattttgtatttgtataatcagatagtgcatgggttgtgctgacattactttccaataagaggccatttagggtcaaacttggcaaaaccttaatttgtagtttctagtcgttttctcaaacttaagaggcgaggcaacgtgataacttgatgatttatcatggtaatggatgaattttagcgtgtcttgcg

SEQ ID NO: 53814 - protein, 219 aa, Glycine max
  peptide (1)..(219): Ceres Seq. ID no. 14303974
  misc_feature (33)..(216): Homolog of NCBI NO: 15420575 NR Description: succinate dehydrogenase subunit 4 [Oryza sativa]
  misc_feature (151)..(217): Homolog of NCBI NO: 22550364 NR Description: succinate:cytochrome c oxidoreductase subunit 4
  misc_feature (140)..(218): Homolog of NCBI NO: 38638303 NR Description: succinate:cytochrome c oxidoreductase subunit 4
  misc_feature (140)..(218): Homolog of NCBI NO: 11467130 NR Description: ORF86a [Marchantia polymorpha]
  misc_feature (129)..(218): Homolog of NCBI NO: 15021584 NR Description: succinate dehydrogenase subunit 4 [Euphorbia
  misc_feature (129)..(218): Homolog of NCBI NO: 15021578 NR Description: succinate dehydrogenase subunit 4 [Lycopersicon
  misc_feature (129)..(217): Homolog of NCBI NO: 15004519 NR Description: succinate dehydrogenase subunit 4 [Gossypium
  misc_feature (129)..(217): Homolog of NCBI NO: 15021580 NR Description: succinate dehydrogenase subunit 4 [Podophyllum
  misc_feature (129)..(217): Homolog of NCBI NO: 15021582 NR Description: succinate dehydrogenase subunit 4 [Gymnocladus
  misc_feature (5)..(219): Homolog of NCBI NO: 19032302 NR Description: succinate dehydrogenase subunit 4 [Pisum sativum]
KKAKMQSMSLTLSKRLSNSKPLFRISSNLVAHASSATTSPPPPSPPVPSPSALNSLLTAPWSATQSRGITLSGSDVRVGNLIGNRGRAHEVLKLYRPLEGTGKATLEVPPQSVAGYATVATTEDGAERKERNSGLSKATKTKREQLLKATAVASLLLIYPNTYSLLFANFFVFWHLYAGIGEILADYVHHEMTREFVMISLRLFLIMALKDVCLNFVFV

SEQ ID NO: 53815 - protein, 215 aa, Glycine max
  peptide (1)..(215): Ceres Seq. ID no. 14303975
  misc_feature (29)..(212): Homolog of NCBI NO: 15420575 NR Description: succinate dehydrogenase subunit 4 [Oryza sativa]
  misc_feature (147)..(213): Homolog of NCBI NO: 22550364 NR Description: succinate:cytochrome c oxidoreductase subunit 4
  misc_feature (136)..(214): Homolog of NCBI NO: 38638303 NR Description: succinate:cytochrome c oxidoreductase subunit 4
  misc_feature (136)..(214): Homolog of NCBI NO: 11467130 NR Description: ORF86a [Marchantia polymorpha]
  misc_feature (125)..(214): Homolog of NCBI NO: 15021584 NR Description: succinate dehydrogenase subunit 4 [Euphorbia
  misc_feature (125)..(214): Homolog of NCBI NO: 15021578 NR Description: succinate dehydrogenase subunit 4 [Lycopersicon
  misc_feature (125)..(213): Homolog of NCBI NO: 15004519 NR Description: succinate dehydrogenase subunit 4 [Gossypium
  misc_feature (125)..(213): Homolog of NCBI NO: 15021580 NR Description: succinate dehydrogenase subunit 4 [Podophyllum
  misc_feature (125)..(213): Homolog of NCBI NO: 15021582 NR Description: succinate dehydrogenase subunit 4 [Gymnocladus
  misc_feature (1)..(215): Homolog of NCBI NO: 19032302 NR Description: succinate dehydrogenase subunit 4 [Pisum sativum]
MQSMSLTLSKRLSNSKPLFRISSNLVAHASSATTSPPPPSPPVPSPSALNSLLTAPWSATQSRGITLSGSDVRVGNLIGNRGRAHEVLKLYRPLEGTGKATLEVPPQSVAGYATVATTEDGAERKERNSGLSKATKTKREQLLKATAVASLLLIYPNTYSLLFANFFVFWHLYAGIGEILADYVHHEMTREFVMISLRLFLIMALKDVCLNFVFV

SEQ ID NO: 53816 - protein, 212 aa, Glycine max
  peptide (1)..(212): Ceres Seq. ID no. 14303976
  misc_feature (26)..(209): Homolog of NCBI NO: 15420575 NR Description: succinate dehydrogenase subunit 4 [Oryza sativa]
  misc_feature (144)..(210): Homolog of NCBI NO: 22550364 NR Description: succinate:cytochrome c oxidoreductase subunit 4
  misc_feature (133)..(211): Homolog of NCBI NO: 38638303 NR Description: succinate:cytochrome c oxidoreductase subunit 4
  misc_feature (133)..(211): Homolog of NCBI NO: 11467130 NR Description: ORF86a [Marchantia polymorpha]
  misc_feature (122)..(211): Homolog of NCBI NO: 15021584 NR Description: succinate dehydrogenase subunit 4 [Euphorbia
  misc_feature (122)..(211): Homolog of NCBI NO: 15021578 NR Description: succinate dehydrogenase subunit 4 [Lycopersicon
  misc_feature (122)..(210): Homolog of NCBI NO: 15004519 NR Description: succinate dehydrogenase subunit 4 [Gossypium
  misc_feature (122)..(210): Homolog of NCBI NO: 15021580 NR Description: succinate dehydrogenase subunit 4 [Podophyllum
  misc_feature (122)..(210): Homolog of NCBI NO: 15021582 NR Description: succinate dehydrogenase subunit 4 [Gymnocladus
  misc_feature (1)..(212): Homolog of NCBI NO: 19032302 NR Description: succinate dehydrogenase subunit 4 [Pisum sativum]
MSLTLSKRLSNSKPLFRISSNLVAHASSATTSPPPPSPPVPSPSALNSLLTAPWSATQSRGITLSGSDVRVGNLIGNRGRAHEVLKLYRPLEGTGKATLEVPPQSVAGYATVATTEDGAERKERNSGLSKATKTKREQLLKATAVASLLLIYPNTYSLLFANFFVFWHLYAGIGEILADYVHHEMTREFVMISLRLFLIMALKDVCLNFVFV

SEQ ID NO: 53817 - DNA, 1240 bp, Glycine max
  misc_feature (1)..(1240): Ceres Seq. ID no. 14304650
aaaggtggaacccccatggctgttacagcctctagctttggaactacatggtgtcttagaagagcagctcaggcttttgctatctctcattctcatattctccgcaacaatgttaaactctctttgcagaggaacttttgctctcatcttctctccgtttctacttctttagcttcaggtgtaagccagacagtacaagctctaaagggagaagttgacttgttactcaaaggagtaggagaaagaagtgtaacgaaagaagtaaaacatattcttgagatggctagacgagcatcattaaagcgagagattctccatacagattttctaacccctccagtgttaaaggaatctatgcaagttttggaaaaactagcagacgtgaaagcaattgctcaaggaggttaccctcaggctgaacgttgtcggatttctgttggacatccagaagaactgaccagtgatccagatattatttcagcattaagcattacaggaaacttccagtttgaaccttgctcgcatggtgacttccttggctcaattcttggtacaggaattgtcagggagaaacttggagacattatattgcagggggaacagggtgctcagataattgttgtacctgaactcgttgaatttctcatgtcaacactggttaaggttcgtaatgttcctgtatcttgcactaagattccattaatttctcttgattatgaaccaccaagaacaaaatcattcaaaactatagaagcatcactaagagttgatgcactagctagtgctggatttaaagtttcacgttcaaagctagttgacatgatcagcaatggtgatgtgcgtatcaactggatccctgttactaccaaaggaaccacactcaagagtggagatattgtatcaattagtggcaagggaagattaaagataggagaaataaactccacaaagaaaggaaagtttgcagtggagctcattcggtatttgtagaagtttagagagttcagaagtactttcactctcaaagtaacaactttttctttcttcatttgtgtattggatttcacaaacatacttttcaaactttaaaccaacacagccgtagcctgtctaaaacgacatgcttttattttttgtggaaagatttgcttagcctcgcataacagttatgaagatagaaaaaaattgtacagacagaaccttgatgatgaaaccttaatatgaatcaaatttcagcatc

SEQ ID NO: 53818 - protein, 329 aa, Glycine max
  peptide (1)..(329): Ceres Seq. ID no. 14304651
  misc_feature (254)..(300): Pfam Name: S4 domain Pfam Description: S4 domain
  misc_feature (213)..(329): Homolog of NCBI NO: 25405622 NR Description: hypothetical protein F8L10.3 [imported] -
  misc_feature (92)..(327): Homolog of NCBI NO: 22299704 NR Description: ORF_ID:tlr2161~hypothetical protein
  misc_feature (198)..(329): Homolog of NCBI NO: 34909484 NR Description: P0481E12.12 [Oryza sativa (japonica
  misc_feature (75)..(328): Homolog of NCBI NO: 37519960 NR Description: hypothetical protein gll0391 [Gloeobacter
  misc_feature (6)..(290): Homolog of NCBI NO: 25405622 NR Description: hypothetical protein F8L10.3 [imported] -
  misc_feature (75)..(329): Homolog of NCBI NO: 23042582 NR Description: hypothetical protein [Trichodesmium erythraeum
  misc_feature (73)..(329): Homolog of NCBI NO: 16330752 NR Description: hypothetical protein [Synechocystis sp. PCC 6803]
  misc_feature (75)..(329): Homolog of NCBI NO: 23125059 NR Description: hypothetical protein [Nostoc punctiforme]
  misc_feature (75)..(329): Homolog of NCBI NO: 17230382 NR Description: hypothetical protein [Nostoc sp. PCC 7120]
  misc_feature (6)..(329): Homolog of NCBI NO: 18404337 NR Description: expressed protein [Arabidopsis thaliana]
KGGTPMAVTASSFGTTWCLRRAAQAFAISHSHILRNNVKLSLQRNFCSHLLSVSTSLASGVSQTVQALKGEVDLLLKGVGERSVTKEVKHILEMARRASLKREILHTDFLTPPVLKESMQVLEKLADVKAIAQGGYPQAERCRISVGHPEELTSDPDIISALSITGNFQFEPCSHGDFLGSILGTGIVREKLGDIILQGEQGAQIIVVPELVEFLMSTLVKVRNVPVSCTKIPLISLDYEPPRTKSFKTIEASLRVDALASAGFKVSRSKLVDMISNGDVRINWIPVTTKGTTLKSGDIVSISGKGRLKIGEINSTKKGKFAVELIRYL

SEQ ID NO: 53819 - protein, 324 aa, Glycine max
  peptide (1)..(324): Ceres Seq. ID no. 14304652
  misc_feature (249)..(295): Pfam Name: S4 domain Pfam Description: S4 domain
  misc_feature (208)..(324): Homolog of NCBI NO: 25405622 NR Description: hypothetical protein F8L10.3 [imported] -
  misc_feature (87)..(322): Homolog of NCBI NO: 22299704 NR Description: ORF_ID:tlr2161~hypothetical protein
  misc_feature (193)..(324): Homolog of NCBI NO: 34909484 NR Description: P0481E12.12 [Oryza sativa (japonica
  misc_feature (70)..(323): Homolog of NCBI NO: 37519960 NR Description: hypothetical protein gll0391 [Gloeobacter
  misc_feature (1)..(285): Homolog of NCBI NO: 25405622 NR Description: hypothetical protein F8L10.3 [imported] -
  misc_feature (70)..(324): Homolog of NCBI NO: 23042582 NR Description: hypothetical protein [Trichodesmium erythraeum
  misc_feature (68)..(324): Homolog of NCBI NO: 16330752 NR Description: hypothetical protein [Synechocystis sp. PCC 6803]
  misc_feature (70)..(324): Homolog of NCBI NO: 23125059 NR Description: hypothetical protein [Nostoc punctiforme]
  misc_feature (70)..(324): Homolog of NCBI NO: 17230382 NR Description: hypothetical protein [Nostoc sp. PCC 7120]
  misc_feature (1)..(324): Homolog of NCBI NO: 18404337 NR Description: expressed protein [Arabidopsis thaliana]
MAVTASSFGTTWCLRRAAQAFAISHSHILRNNVKLSLQRNFCSHLLSVSTSLASGVSQTVQALKGEVDLLLKGVGERSVTKEVKHILEMARRASLKREILHTDFLTPPVLKESMQVLEKLADVKAIAQGGYPQAERCRISVGHPEELTSDPDIISALSITGNFQFEPCSHGDFLGSILGTGIVREKLGDIILQGEQGAQIIVVPELVEFLMSTLVKVRNVPVSCTKIPLISLDYEPPRTKSFKTIEASLRVDALASAGFKVSRSKLVDMISNGDVRINWIPVTTKGTTLKSGDIVSISGKGRLKIGEINSTKKGKFAVELIRYL

SEQ ID NO: 53820 - protein, 236 aa, Glycine max
  peptide (1)..(236): Ceres Seq. ID no. 14304653
  misc_feature (161)..(207): Pfam Name: S4 domain Pfam Description: S4 domain
  misc_feature (120)..(236): Homolog of NCBI NO: 25405622 NR Description: hypothetical protein F8L10.3 [imported] -
  misc_feature (1)..(234): Homolog of NCBI NO: 22299704 NR Description: ORF_ID:tlr2161~hypothetical protein
  misc_feature (105)..(236): Homolog of NCBI NO: 34909484 NR Description: P0481E12.12 [Oryza sativa (japonica
  misc_feature (1)..(235): Homolog of NCBI NO: 37519960 NR Description: hypothetical protein gll0391 [Gloeobacter
  misc_feature (1)..(197): Homolog of NCBI NO: 25405622 NR Description: hypothetical protein F8L10.3 [imported] -
  misc_feature (1)..(236): Homolog of NCBI NO: 23042582 NR Description: hypothetical protein [Trichodesmium erythraeum
  misc_feature (1)..(236): Homolog of NCBI NO: 16330752 NR Description: hypothetical protein [Synechocystis sp. PCC 6803]
  misc_feature (1)..(236): Homolog of NCBI NO: 23125059 NR Description: hypothetical protein [Nostoc punctiforme]
  misc_feature (1)..(236): Homolog of NCBI NO: 17230382 NR Description: hypothetical protein [Nostoc sp. PCC 7120]
  misc_feature (1)..(236): Homolog of NCBI NO: 18404337 NR Description: expressed protein [Arabidopsis thaliana]
MARRASLKREILHTDFLTPPVLKESMQVLEKLADVKAIAQGGYPQAERCRISVGHPEELTSDPDIISALSITGNFQFEPCSHGDFLGSILGTGIVREKLGDIILQGEQGAQIIVVPELVEFLMSTLVKVRNVPVSCTKIPLISLDYEPPRTKSFKTIEASLRVDALASAGFKVSRSKLVDMISNGDVRINWIPVTTKGTTLKSGDIVSISGKGRLKIGEINSTKKGKFAVELIRYL

SEQ ID NO: 53821 - DNA, 1359 bp, Glycine max
  misc_feature (1)..(1359): Ceres Seq. ID no. 14310635
aacacagaagcaaaccgaacggtttcacatcagacgcagcagcaaaaagtttcaaatttggtactttggcaccctccacgtagtagttctcaccatgtccgacactggaagaagtgccaacaacaatggttccaagcggagcctgccatcatgcacgagtgcaagggaaaatgagagcgaaaacagtgcaaagaaaccaaatttggatggcaaaggtgagaaattcggtgaagccgagacacccaacaagagcaaagtccaaaatcaaaatggtggaaaatcttccgcctcatgtttggaatctaaaagcttcaacaagcttctggaaggggtggtttttgtgctttcagggtttgtgaatccggagaggggcatgttgaggtcacgagcgatggaaatgggagcagaatataagcctgattggaactctgattgcactctcttggtttgtgcttttccaaatacccctaagtttagacaagttgaagctgattgtggaaccattgtgtcaaaggtttggataatagagtgttacacccaaaggaagctgattgaaattgacagttaccttttgcatgctgggaaaccatggtgcaaaggaaatggatcaattgaagtaaatgaagataagaaaccatctgtacccaaaaaatcaccgaagcacattgaaagagaacagctttcaacatcaactgcctccctaaaatcaaagggaaaagaccctgatgttgctaggaaatgctttgagcctttggaagtgaaaaagtgggtcattgatgatttgaataaaacaattcagtggctggaaaatcaagaagaaaagccagaccctagtgagttgacaaaaatagctgcagaggggattctaacttgtttgcaagatgcaatatgttctctagaggaaaaacaggacatccggaaaggaactgaggactggatgttcttacctcgggttgttgaggagcttgcaaagtttgatgtagaaggcaacaagggctcattgttaaaggaagaacttcaaagacgggctttggattgtaagcgtatttatgaggaggaactaaatggtttagatcatgaaaggaaaacgaatacaaaggtaaataaagaacagacgagcaaaactagaagaacaaatgccatgtcttctggtgcagttgagtatgatagtgatgagacaattgagatgactgaacaagaaatagaccttgcatataagactttgtcctctaacatttgccacttgtgagtgatgattgaactttgtttctttaaggggttttggttcacctatatttttctttggatattctacggtgtatattacaaaaaaagaaaaggcccaagtgtgttagactg

SEQ ID NO: 53822 - protein, 415 aa, Glycine max
  peptide (1)..(415): Ceres Seq. ID no. 14310636
  misc_feature (45)..(254): Homolog of NCBI NO: 2906008 NR Description: DNA repair protein XRCC1 [Cricetulus griseus]
  misc_feature (37)..(254): Homolog of NCBI NO: 40226177 NR Description: X-ray repair cross complementing protein 1 [Homo
  misc_feature (37)..(254): Homolog of NCBI NO: 9954649 NR Description: XRCC1 DNA repair protein [Homo sapiens]
  misc_feature (45)..(220): Homolog of NCBI NO: 33416536 NR Description: X-ray repair complementing defective repair in
  misc_feature (45)..(220): Homolog of NCBI NO: 6678613 NR Description: X-ray repair complementing defective repair in
  misc_feature (78)..(220): Homolog of NCBI NO: 16758176 NR Description: x-ray repair cross-complementing group 1 protein
  misc_feature (50)..(262): Homolog of NCBI NO: 27924221 NR Description: Similar to x-ray repair cross-complementing group
  misc_feature (45)..(237): Homolog of NCBI NO: 25406663 NR Description: probable DNA repair protein, 81467-82519
  misc_feature (45)..(409): Homolog of NCBI NO: 22330772 NR Description: DNA repair protein -related [Arabidopsis
  misc_feature (45)..(409): Homolog of NCBI NO: 11181954 NR Description: putative DNA repair protein XRCC1 [Arabidopsis
TQKQTERFHIRRSSKKFQIWYFGTLHVVVLTMSDTGRSANNNGSKRSLPSCTSARENESENSAKKPNLDGKGEKFGEAETPNKSKVQNQNGGKSSASCLESKSFNKLLEGVVFVLSGFVNPERGMLRSRAMEMGAEYKPDWNSDCTLLVCAFPNTPKFRQVEADCGTIVSKVWIIECYTQRKLIEIDSYLLHAGKPWCKGNGSIEVNEDKKPSVPKKSPKHIEREQLSTSTASLKSKGKDPDVARKCFEPLEVKKWVIDDLNKTIQWLENQEEKPDPSELTKIAAEGILTCLQDAICSLEEKQDIRKGTEDWMFLPRVVEELAKFDVEGNKGSLLKEELQRRALDCKRIYEEELNGLDHERKTNTKVNKEQTSKTRRTNAMSSGAVEYDSDETIEMTEQEIDLAYKTLSSNICHL

SEQ ID NO: 53823 - protein, 384 aa, Glycine max
  peptide (1)..(384): Ceres Seq. ID no. 14310637
  misc_feature (14)..(223): Homolog of NCBI NO: 2906008 NR Description: DNA repair protein XRCC1 [Cricetulus griseus]
  misc_feature (6)..(223): Homolog of NCBI NO: 40226177 NR Description: X-ray repair cross complementing protein 1 [Homo
  misc_feature (6)..(223): Homolog of NCBI NO: 9954649 NR Description: XRCC1 DNA repair protein [Homo sapiens]
  misc_feature (14)..(189): Homolog of NCBI NO: 33416536 NR Description: X-ray repair complementing defective repair in
  misc_feature (14)..(189): Homolog of NCBI NO: 6678613 NR Description: X-ray repair complementing defective repair in
  misc_feature (47)..(189): Homolog of NCBI NO: 16758176 NR Description: x-ray repair cross-complementing group 1 protein
  misc_feature (19)..(231): Homolog of NCBI NO: 27924221 NR Description: Similar to x-ray repair cross-complementing group
  misc_feature (14)..(206): Homolog of NCBI NO: 25406663 NR Description: probable DNA repair protein, 81467-82519
  misc_feature (14)..(378): Homolog of NCBI NO: 22330772 NR Description: DNA repair protein -related [Arabidopsis
  misc_feature (14)..(378): Homolog of NCBI NO: 11181954 NR Description: putative DNA repair protein XRCC1 [Arabidopsis
MSDTGRSANNNGSKRSLPSCTSARENESENSAKKPNLDGKGEKFGEAETPNKSKVQNQNGGKSSASCLESKSFNKLLEGVVFVLSGFVNPERGMLRSRAMEMGAEYKPDWNSDCTLLVCAFPNTPKFRQVEADCGTIVSKVWIIECYTQRKLIEIDSYLLHAGKPWCKGNGSIEVNEDKKPSVPKKSPKHIEREQLSTSTASLKSKGKDPDVARKCFEPLEVKKWVIDDLNKTIQWLENQEEKPDPSELTKIAAEGILTCLQDAICSLEEKQDIRKGTEDWMFLPRVVEELAKFDVEGNKGSLLKEELQRRALDCKRIYEEELNGLDHERKTNTKVNKEQTSKTRRTNAMSSGAVEYDSDETIEMTEQEIDLAYKTLSSNICHL

SEQ ID NO: 53824 - protein, 291 aa, Glycine max
  peptide (1)..(291): Ceres Seq. ID no. 14310638
  misc_feature (1)..(130): Homolog of NCBI NO: 2906008 NR Description: DNA repair protein XRCC1 [Cricetulus griseus]
  misc_feature (1)..(130): Homolog of NCBI NO: 40226177 NR Description: X-ray repair cross complementing protein 1 [Homo
  misc_feature (1)..(130): Homolog of NCBI NO: 9954649 NR Description: XRCC1 DNA repair protein [Homo sapiens]
  misc_feature (1)..(96): Homolog of NCBI NO: 33416536 NR Description: X-ray repair complementing defective repair in
  misc_feature (1)..(96): Homolog of NCBI NO: 6678613 NR Description: X-ray repair complementing defective repair in
  misc_feature (1)..(96): Homolog of NCBI NO: 16758176 NR Description: x-ray repair cross-complementing group 1 protein
  misc_feature (1)..(138): Homolog of NCBI NO: 27924221 NR Description: Similar to x-ray repair cross-complementing group
  misc_feature (1)..(113): Homolog of NCBI NO: 25406663 NR Description: probable DNA repair protein, 81467-82519
  misc_feature (1)..(285): Homolog of NCBI NO: 22330772 NR Description: DNA repair protein -related [Arabidopsis
  misc_feature (1)..(285): Homolog of NCBI NO: 11181954 NR Description: putative DNA repair protein XRCC1 [Arabidopsis
MLRSRAMEMGAEYKPDWNSDCTLLVCAFPNTPKFRQVEADCGTIVSKVWIIECYTQRKLIEIDSYLLHAGKPWCKGNGSIEVNEDKKPSVPKKSPKHIEREQLSTSTASLKSKGKDPDVARKCFEPLEVKKWVIDDLNKTIQWLENQEEKPDPSELTKIAAEGILTCLQDAICSLEEKQDIRKGTEDWMFLPRVVEELAKFDVEGNKGSLLKEELQRRALDCKRIYEEELNGLDHERKTNTKVNKEQTSKTRRTNAMSSGAVEYDSDETIEMTEQEIDLAYKTLSSNICHL

SEQ ID NO: 53825 - DNA, 1439 bp, Glycine max
  misc_feature (1)..(1439): Ceres Seq. ID no. 15177237
aaaattattattttaatgaattccatacataataattgattactaaatcaaattaaattcgtattttagtgattctgaacataggtaaattttccttcaagaacatacgttaagctttaggagaagtaatttgtcttaaaaacatatttttgtctgatcgtattgtccttatataaagaagaaataatggacactaatttgcttacatatttacccaagatcattcagaaagtgaaaataagtcatctatgtaaaattcaaaactgatctttacttttgttttggcccctgcaacctcccctaaaaaaaatacacaggcacttatatctgcatggaaaaccggtgagacgatgccattcatatatgacacggtgtgggacttgattaaattggcagattatctaacacagagaagagatatagacctttctaggataggaatcactggaatatcacttggaggaatgcatgcatggtttgctgcagttgctgatactcgctatgctgtggttgttcctcttattggcgttcagggttttcgatgggccatagacaacgataaatggcagggtcgagtcgatagtataaagcctctttttgaggtggcacgtgctgatttaggtaaaggtgctattgacaaagaagtggtggagaaggtgtggagccgaattgctcctggtttagcttcccaatttgattcaccctattcagttccaactatcgcaccacgtgctttgcttattgttaatggtaagacccttctatgtgtaatgtattgtacattaaacattttcaaaccgaatctggctacgtacgttattcatatacaacttcatgtaatgacaattcaagtcaaggtaaccacattgctgctacataaggtttctgcttctctaggatatatcaataacattgtaaattaacctctgcatccatccgtattgatcaattcaattatttcattcatttagaatttgtggatttcttttagctaacttggaactgaagcatttgcttgagtgttgggaactctaggtgcggaagatcctcggtgtcctcttggaggcttggaaattccaagagcaaaggcaaccgaggcatacagaaagtttcattgtttagataatttcaagtttattgcagaacctggaattggacaccaagtaacgagatttatgatgaaagaattagctgattggtttgacaggttcttaaacccttagctctttccctcatctgggtttttcaagctctgaggttataaaattataaaccaacttgctcagagctcaggctcattgcctctttccaatcgcctttgtatgattgtatgtccgtcgtgataatatgcaatacaaaatgctttacccgttgaaacccactagctactatggctgatttagtggagggattggataatggatatatagttaagactt

SEQ ID NO: 53826 - protein, 190 aa, Glycine max
  peptide (1)..(190): Ceres Seq. ID no. 15177238
  misc_feature (1)..(134): Homolog of NCBI NO: 34898368 NR Description: ESTs C19441(E10423),C99201(E10423) correspond to
  misc_feature (1)..(134): Homolog of NCBI NO: 30689997 NR Description: expressed protein [Arabidopsis thaliana]
MPFIYDTVWDLIKLADYLTQRRDIDLSRIGITGISLGGMHAWFAAVADTRYAVVVPLIGVQGFRWAIDNDKWQGRVDSIKPLFEVARADLGKGAIDKEVVEKVWSRIAPGLASQFDSPYSVPTIAPRALLIVNGKTLLCVMYCTLNIFKPNLATYVIHIQLHVMTIQVKVTTLLLHKVSASLGYINNIVN

SEQ ID NO: 53827 - protein, 152 aa, Glycine max
  peptide (1)..(152): Ceres Seq. ID no. 15177239
  misc_feature (1)..(96): Homolog of NCBI NO: 34898368 NR Description: ESTs C19441(E10423),C99201(E10423) correspond to
  misc_feature (1)..(96): Homolog of NCBI NO: 30689997 NR Description: expressed protein [Arabidopsis thaliana]
MHAWFAAVADTRYAVVVPLIGVQGFRWAIDNDKWQGRVDSIKPLFEVARADLGKGAIDKEVVEKVWSRIAPGLASQFDSPYSVPTIAPRALLIVNGKTLLCVMYCTLNIFKPNLATYVIHIQLHVMTIQVKVTTLLLHKVSASLGYINNIVN

SEQ ID NO: 53828 - DNA, 644 bp, Glycine max
  misc_feature (1)..(644): Ceres Seq. ID no. 13593831
ggtgatttcattgcataatccattgactagaaatcccatattttccccccacattaactcacccaacccctctttctaaaaggcctcaaggatacactccggacttaattacgttattttgttagggtcaccgtttcgagatattctaaacttgtactgaaaaatatggagggaaaagaagaggacgtaagagttggagccaacaggtacggagagaggcagccaatagggaccgctgctcaggctaaagactacagagagccaccgtcggcgcctctcttcgaaccgggagagttgtcatcgtggtctttctatagggctggcatagcagagtttgtggccactttcttgttcctctacatcacagtgctgactgtgatgggtgtgttcaaatctaagagcaagtgttccactgtgggtatccaaggcattgcttgggcttttgggggaatgatctttgctcttgtttattccactgctggaatctcagggggtcatattaacccagcagtgacgtttgggctgttcttggcacgcaagctctctctgacaagggcaattttttacataatcatgcagtgcttgggagctatatgtggtgctggtgtagttaaggggttcgagccacacctctatgagaggct

SEQ ID NO: 53829 - protein, 159 aa, Glycine max
  peptide (1)..(159): Ceres Seq. ID no. 13593832
  misc_feature (43)..(157): Pfam Name: Major intrinsic protein Pfam Description: Major intrinsic protein
  misc_feature (1)..(157): Homolog of NCBI NO: 8071622 NR Description: putative aquaporin PIP1-1 [Vitis berlandieri x
  misc_feature (1)..(158): Homolog of NCBI NO: 7441282 NR Description: probable plasma membrane intrinsic protein B -
  misc_feature (1)..(157): Homolog of NCBI NO: 7649312 NR Description: aquaporin 2 [Allium cepa]
  misc_feature (1)..(157): Homolog of NCBI NO: 13447793 NR Description: plasma membrane integral protein ZmPIP1-3 [Zea
  misc_feature (1)..(157): Homolog of NCBI NO: 2696804 NR Description: water channel protein [Oryza sativa (japonica
  misc_feature (1)..(157): Homolog of NCBI NO: 29650725 NR Description: plasma membrane intrinsic protein [Zea mays]
  misc_feature (1)..(157): Homolog of NCBI NO: 4768911 NR Description: plasma membrane MIP protein [Zea mays]
  misc_feature (1)..(158): Homolog of NCBI NO: 8071624 NR Description: putative aquaporin PIP1-2 [Vitis berlandieri x
  misc_feature (1)..(157): Homolog of NCBI NO: 6692753 NR Description: bpw3 [Hordeum vulgare subsp. vulgare]
  misc_feature (1)..(157): Homolog of NCBI NO: 2894534 NR Description: aquaporin [Oryza sativa]
MEGKEEDVRVGANRYGERQPIGTAAQAKDYREPPSAPLFEPGELSSWSFYRAGIAEFVATFLFLYITVLTVMGVFKSKSKCSTVGIQGIAWAFGGMIFALVYSTAGISGGHINPAVTFGLFLARKLSLTRAIFYIIMQCLGAICGAGVVKGFEPHLYER

SEQ ID NO: 53830 - protein, 88 aa, Glycine max
  peptide (1)..(88): Ceres Seq. ID no. 13593833
  misc_feature (1)..(86): Pfam Name: Major intrinsic protein Pfam Description: Major intrinsic protein
  misc_feature (1)..(86): Homolog of NCBI NO: 8071622 NR Description: putative aquaporin PIP1-1 [Vitis berlandieri x
  misc_feature (1)..(87): Homolog of NCBI NO: 7441282 NR Description: probable plasma membrane intrinsic protein B -
  misc_feature (1)..(86): Homolog of NCBI NO: 7649312 NR Description: aquaporin 2 [Allium cepa]
  misc_feature (1)..(86): Homolog of NCBI NO: 13447793 NR Description: plasma membrane integral protein ZmPIP1-3 [Zea
  misc_feature (1)..(86): Homolog of NCBI NO: 2696804 NR Description: water channel protein [Oryza sativa (japonica
  misc_feature (1)..(86): Homolog of NCBI NO: 29650725 NR Description: plasma membrane intrinsic protein [Zea mays]
  misc_feature (1)..(86): Homolog of NCBI NO: 4768911 NR Description: plasma membrane MIP protein [Zea mays]
  misc_feature (1)..(87): Homolog of NCBI NO: 8071624 NR Description: putative aquaporin PIP1-2 [Vitis berlandieri x
  misc_feature (1)..(86): Homolog of NCBI NO: 6692753 NR Description: bpw3 [Hordeum vulgare subsp. vulgare]
  misc_feature (1)..(86): Homolog of NCBI NO: 2894534 NR Description: aquaporin [Oryza sativa]
MGVFKSKSKCSTVGIQGIAWAFGGMIFALVYSTAGISGGHINPAVTFGLFLARKLSLTRAIFYIIMQCLGAICGAGVVKGFEPHLYER

SEQ ID NO: 53831 - DNA, 1305 bp, Glycine max
  misc_feature (1)..(1305): Ceres Seq. ID no. 14310904
tttttctgtgtagttccatcgcatcaaaccctggcaatggcagctacggccatacagaggttcccccaacacaaatacgtagacgcagttcgctggcttcccctacaatccgcattcgaccgattcgcagttttggcactcttcgacttcgattccgatgcttcctccatcgaaatccactctctcaacccaaaccccctctcattggaaccacactcttcgtggtcctctccttcccgcgtttcctccctcaaggcctcgcacttcctccagaagcccctcattgtcgcttccacttcctccggttctctccacttcctcttctccgattcctccgtcgcaacgctcgagtccgaggtctccattcccgagggcgcgctgcattccgttcccgcttcttgcgttgacctattggacggtggcgtcgagtgcgtgaccgttggggaagatgggaaggtcaacttggttggtattggggattccaatttgaactaccggaggttgtttgatagcgccggcctggtctcctacacggcggtgagctgggcgtctccgatggagttcgccaccggtggctacggcttcggtcttcattggtgggaccaacggaaaccgggaggtccggtttctcaatttaagggtaactgggataaaaaattgacatctgggattgtgcactctattgatattcatccgtcgcgaaagcatacttgcctggctggtggttccttaggtactgtttttgcctgggatcttaggtggcagcaacaaccgattatactttcaggcgcaggggctggtgctggtggcaacactgctgtccagtcaatatctgaaagtgaggtttgggaggttcagtatgatcgttgtataaaaccaaatacttcatctacccggatcttaccttccatgatctgctctgaggatggaattctcggtgtgattgagcaaggcgaggaacctattgagctgctggctgaaccttgtgccatcaatagctttgatattgatcgacataatccatcggatgtgatatgtagtttagaatgggaagcagtagccatattgacaagacaataacattcggggtttctactttttggtggcttgaatttcagaaagtttgtaactgatagaaggagtggagctcttaacggacaatttgtgttttttatgtattccggaatgttctattccttttctaaagccatttgcatgcaaatggattttgggattgtacaatatgtagcatgtgtataattgactttacacattggatcaatgctactaccatccgctttgcct

SEQ ID NO: 53832 - protein, 359 aa, Glycine max
  peptide (1)..(359): Ceres Seq. ID no. 14310905
  misc_feature (20)..(287): Homolog of NCBI NO: 27923818 NR Description: Nucleoporin Nup43
  misc_feature (89)..(287): Homolog of NCBI NO: 30851621 NR Description: 2610529I12Rik protein [Mus musculus]
  misc_feature (212)..(341): Homolog of NCBI NO: 25372649 NR Description: hypothetical protein AT4g30840 [imported] -
  misc_feature (18)..(239): Homolog of NCBI NO: 25372649 NR Description: hypothetical protein AT4g30840 [imported] -
  misc_feature (18)..(358): Homolog of NCBI NO: 18417678 NR Description: WD-40 repeat protein family [Arabidopsis thaliana]
  misc_feature (18)..(358): Homolog of NCBI NO: 21554881 NR Description: unknown [Arabidopsis thaliana]
FFCVVPSHQTLAMAATAIQRFPQHKYVDAVRWLPLQSAFDRFAVLALFDFDSDASSIEIHSLNPNPLSLEPHSSWSSPSRVSSLKASHFLQKPLIVASTSSGSLHFLFSDSSVATLESEVSIPEGALHSVPASCVDLLDGGVECVTVGEDGKVNLVGIGDSNLNYRRLFDSAGLVSYTAVSWASPMEFATGGYGFGLHWWDQRKPGGPVSQFKGNWDKKLTSGIVHSIDIHPSRKHTCLAGGSLGTVFAWDLRWQQQPIILSGAGAGAGGNTAVQSISESEVWEVQYDRCIKPNTSSTRILPSMICSEDGILGVIEQGEEPIELLAEPCAINSFDIDRHNPSDVICSLEWEAVAILTRQ

SEQ ID NO: 53833 - protein, 347 aa, Glycine max
  peptide (1)..(347): Ceres Seq. ID no. 14310906
  misc_feature (8)..(275): Homolog of NCBI NO: 27923818 NR Description: Nucleoporin Nup43
  misc_feature (77)..(275): Homolog of NCBI NO: 30851621 NR Description: 2610529I12Rik protein [Mus musculus]
  misc_feature (200)..(329): Homolog of NCBI NO: 25372649 NR Description: hypothetical protein AT4g30840 [imported] -
  misc_feature (6)..(227): Homolog of NCBI NO: 25372649 NR Description: hypothetical protein AT4g30840 [imported] -
  misc_feature (6)..(346): Homolog of NCBI NO: 18417678 NR Description: WD-40 repeat protein family [Arabidopsis thaliana]
  misc_feature (6)..(346): Homolog of NCBI NO: 21554881 NR Description: unknown [Arabidopsis thaliana]
MAATAIQRFPQHKYVDAVRWLPLQSAFDRFAVLALFDFDSDASSIEIHSLNPNPLSLEPHSSWSSPSRVSSLKASHFLQKPLIVASTSSGSLHFLFSDSSVATLESEVSIPEGALHSVPASCVDLLDGGVECVTVGEDGKVNLVGIGDSNLNYRRLFDSAGLVSYTAVSWASPMEFATGGYGFGLHWWDQRKPGGPVSQFKGNWDKKLTSGIVHSIDIHPSRKHTCLAGGSLGTVFAWDLRWQQQPIILSGAGAGAGGNTAVQSISESEVWEVQYDRCIKPNTSSTRILPSMICSEDGILGVIEQGEEPIELLAEPCAINSFDIDRHNPSDVICSLEWEAVAILTRQ

SEQ ID NO: 53834 - DNA, 1757 bp, Glycine max
  misc_feature (1)..(1757): Ceres Seq. ID no. 14311367
tattttcatcattcattcaaattctgcttccaatcatatttaaatagaaacacacactcctcatcccaaaccctacattttcttcaagcgctgcggtggatcagattccccattaaggatggaggatggtgagaaacccagccatggcattgctgatatggatgttgttgatgccactttgcaaagccatcgtgtggcttctgatcaagtaatggtcctacagggtcatgatatcaaaaacggcgattctgatcctgctcacgtgccagcaaccagtgcaattagcaataatcagtttgaacttgaagatgctaagactgtttcgcatcaggaactgatcactccaaagcctaaagaaaagaatgtcagagaaatgaagaatgtgctaaatgataccgagatgactgattatgatgagtatggcacgcctctggatcgagaaacatttatgaaagagcttgagactttctacagagagcggtccttggaatttaagcctcctaagttttatggagagccactcaattgtcttaagttgtggagagctgttatcagactaggcggctatgatgtggtaactggatccaagttgtggcggcaagtaggagagtctttccaccccccaaagacctgcactacagtctcatggacatttagaattttttatgagaaggcacttttagagtatgaaaagcacaagagagagattggggagctacagctccctgttggaccattccatcaatcttcaaatgtggaaaaagagcctgctgtttaccagactccaggctcaggtagagcaagaagggatgcagcagcacgtgcaatgcaaggttggcatgctcagcgccttcttggatacggtgaggttgctgagccagttattaaggacaagaacttcagttccacgccaaagcgtgaaaagaacctaaaaagtattggtatgaataataaacagaggacactgtctggtctggagcatgctgaaaaatctgcaaatattgaaggagatcggcaattggtcacagcagtagtggatgttggacccccagctgactgggtgaagatcaatgtgcgtgaaagtaaggattgttttgaggtatatgccctagttcctgggctccttcgtgaggaggtgcgagtccaatcagatccagttggacgtcttgttataactggtgtgccagaacatatagacaatccatggggaattacccccttcaaaaaggttgtgaacttacctgcaagaattgattcgcttcagacatctgctgttgttagtttgcatggtcgactatttgtacgcgttccttttgagcaaggagctgtgtgagatgtgaatgttcctcccttgaatcattgatttatgaaatctccccttcatattattagtcgaaactaccaccaactttaacatttttttagggaaaaatacccaatttaactaatacaatatgcttgaattttcccatcaaacgcctttttatccatatgcgaaagaaatggacttggtgttctggtgcatcattaacaagcaagagtccgagaagtggagtggtggaggactcgttcaaaagctcgttgctttcgaaaatgctaaatgaagatgttagtctggcaaaaaaaaaaaaacactattgtacatcgtcttccaattaagtgtggatgtgaacagaaaatattttaatcattactccaatccaaatgtgaacagaaaatattttaatcgtatatatgattttggttccctttccagt

SEQ ID NO: 53835 - protein, 404 aa, Glycine max
  peptide (1)..(404): Ceres Seq. ID no. 14311368
  misc_feature (102)..(204): Pfam Name: ARID/BRIGHT DNA binding domain Pfam Description: ARID/BRIGHT DNA binding domain
  misc_feature (296)..(401): Homolog of NCBI NO: 28393488 NR Description: unknown protein [Arabidopsis thaliana]
  misc_feature (178)..(401): Homolog of NCBI NO: 25411792 NR Description: hypothetical protein At2g17410 [imported] -
  misc_feature (72)..(139): Homolog of NCBI NO: 25518704 NR Description: hypothetical protein F9H16.11 - Arabidopsis
  misc_feature (319)..(401): Homolog of NCBI NO: 25518704 NR Description: hypothetical protein F9H16.11 - Arabidopsis
  misc_feature (186)..(326): Homolog of NCBI NO: 25518704 NR Description: hypothetical protein F9H16.11 - Arabidopsis
  misc_feature (18)..(401): Homolog of NCBI NO: 30679972 NR Description: expressed protein [Arabidopsis thaliana]
  misc_feature (72)..(401): Homolog of NCBI NO: 30687082 NR Description: expressed protein [Arabidopsis thaliana]
  misc_feature (305)..(401): Homolog of NCBI NO: 25406449 NR Description: probable DNA-binding protein, 48797-45229
  misc_feature (5)..(283): Homolog of NCBI NO: 25406449 NR Description: probable DNA-binding protein, 48797-45229
  misc_feature (5)..(401): Homolog of NCBI NO: 30699177 NR Description: DNA-binding protein -related [Arabidopsis
MEDGEKPSHGIADMDVVDATLQSHRVASDQVMVLQGHDIKNGDSDPAHVPATSAISNNQFELEDAKTVSHQELITPKPKEKNVREMKNVLNDTEMTDYDEYGTPLDRETFMKELETFYRERSLEFKPPKFYGEPLNCLKLWRAVIRLGGYDVVTGSKLWRQVGESFHPPKTCTTVSWTFRIFYEKALLEYEKHKREIGELQLPVGPFHQSSNVEKEPAVYQTPGSGRARRDAAARAMQGWHAQRLLGYGEVAEPVIKDKNFSSTPKREKNLKSIGMNNKQRTLSGLEHAEKSANIEGDRQLVTAVVDVGPPADWVKINVRESKDCFEVYALVPGLLREEVRVQSDPVGRLVITGVPEHIDNPWGITPFKKVVNLPARIDSLQTSAVVSLHGRLFVRVPFEQGAV

SEQ ID NO: 53836 - protein, 391 aa, Glycine max
  peptide (1)..(391): Ceres Seq. ID no. 14311369
  misc_feature (89)..(191): Pfam Name: ARID/BRIGHT DNA binding domain Pfam Description: ARID/BRIGHT DNA binding domain
  misc_feature (283)..(388): Homolog of NCBI NO: 28393488 NR Description: unknown protein [Arabidopsis thaliana]
  misc_feature (165)..(388): Homolog of NCBI NO: 25411792 NR Description: hypothetical protein At2g17410 [imported] -
  misc_feature (59)..(126): Homolog of NCBI NO: 25518704 NR Description: hypothetical protein F9H16.11 - Arabidopsis
  misc_feature (306)..(388): Homolog of NCBI NO: 25518704 NR Description: hypothetical protein F9H16.11 - Arabidopsis
  misc_feature (173)..(313): Homolog of NCBI NO: 25518704 NR Description: hypothetical protein F9H16.11 - Arabidopsis
  misc_feature (5)..(388): Homolog of NCBI NO: 30679972 NR Description: expressed protein [Arabidopsis thaliana]
  misc_feature (59)..(388): Homolog of NCBI NO: 30687082 NR Description: expressed protein [Arabidopsis thaliana]
  misc_feature (292)..(388): Homolog of NCBI NO: 25406449 NR Description: probable DNA-binding protein, 48797-45229
  misc_feature (1)..(270): Homolog of NCBI NO: 25406449 NR Description: probable DNA-binding protein, 48797-45229
  misc_feature (1)..(388): Homolog of NCBI NO: 30699177 NR Description: DNA-binding protein -related [Arabidopsis
MDVVDATLQSHRVASDQVMVLQGHDIKNGDSDPAHVPATSAISNNQFELEDAKTVSHQELITPKPKEKNVREMKNVLNDTEMTDYDEYGTPLDRETFMKELETFYRERSLEFKPPKFYGEPLNCLKLWRAVIRLGGYDVVTGSKLWRQVGESFHPPKTCTTVSWTFRIFYEKALLEYEKHKREIGELQLPVGPFHQSSNVEKEPAVYQTPGSGRARRDAAARAMQGWHAQRLLGYGEVAEPVIKDKNFSSTPKREKNLKSIGMNNKQRTLSGLEHAEKSANIEGDRQLVTAVVDVGPPADWVKINVRESKDCFEVYALVPGLLREEVRVQSDPVGRLVITGVPEHIDNPWGITPFKKVVNLPARIDSLQTSAVVSLHGRLFVRVPFEQGAV

SEQ ID NO: 53837 - protein, 373 aa, Glycine max
  peptide (1)..(373): Ceres Seq. ID no. 14311370
  misc_feature (71)..(173): Pfam Name: ARID/BRIGHT DNA binding domain Pfam Description: ARID/BRIGHT DNA binding domain
  misc_feature (265)..(370): Homolog of NCBI NO: 28393488 NR Description: unknown protein [Arabidopsis thaliana]
  misc_feature (147)..(370): Homolog of NCBI NO: 25411792 NR Description: hypothetical protein At2g17410 [imported] -
  misc_feature (41)..(108): Homolog of NCBI NO: 25518704 NR Description: hypothetical protein F9H16.11 - Arabidopsis
  misc_feature (288)..(370): Homolog of NCBI NO: 25518704 NR Description: hypothetical protein F9H16.11 - Arabidopsis
  misc_feature (155)..(295): Homolog of NCBI NO: 25518704 NR Description: hypothetical protein F9H16.11 - Arabidopsis
  misc_feature (1)..(370): Homolog of NCBI NO: 30679972 NR Description: expressed protein [Arabidopsis thaliana]
  misc_feature (41)..(370): Homolog of NCBI NO: 30687082 NR Description: expressed protein [Arabidopsis thaliana]
  misc_feature (274)..(370): Homolog of NCBI NO: 25406449 NR Description: probable DNA-binding protein, 48797-45229
  misc_feature (1)..(252): Homolog of NCBI NO: 25406449 NR Description: probable DNA-binding protein, 48797-45229
  misc_feature (1)..(370): Homolog of NCBI NO: 30699177 NR Description: DNA-binding protein -related [Arabidopsis
MVLQGHDIKNGDSDPAHVPATSAISNNQFELEDAKTVSHQELITPKPKEKNVREMKNVLNDTEMTDYDEYGTPLDRETFMKELETFYRERSLEFKPPKFYGEPLNCLKLWRAVIRLGGYDVVTGSKLWRQVGESFHPPKTCTTVSWTFRIFYEKALLEYEKHKREIGELQLPVGPFHQSSNVEKEPAVYQTPGSGRARRDAAARAMQGWHAQRLLGYGEVAEPVIKDKNFSSTPKREKNLKSIGMNNKQRTLSGLEHAEKSANIEGDRQLVTAVVDVGPPADWVKINVRESKDCFEVYALVPGLLREEVRVQSDPVGRLVITGVPEHIDNPWGITPFKKVVNLPARIDSLQTSAVVSLHGRLFVRVPFEQGAV

SEQ ID NO: 53838 - DNA, 1242 bp, Glycine max
  misc_feature (1)..(1242): Ceres Seq. ID no. 13593855
atgagaatagacccaccccttcacattcgagacccctctctgactcttcctcatcataacaataaactcaaaaggtgcatgtgtacctaaaaagaggagaaacaaaattgaaacagtttgtgtgaatttgtgtgacaaattagagatatggaaggaattaatgtgtgcaagaagagttcaaagttaggaaagaaagatgacctctatcatgttattcataaggtgccttatggagatagcccttatgtcaaagccaagcatgctcagttggttgataaggaccctgaagcagctatagtattgttttggaaggcaataaatgctggggataaagtggacagtgccctgaaggacatggctgttgtgatgaagcagttagatagatctgaagaagcaattgaagccatcaaatcttttagaggcctttgttccaaacactcacaagagtcacttgataatgttcttcttgacctttacaagaagtgtggaaaaatagaggagcaaattnaattgttaaagagaaagctaagattaatttaccaaggagaggcctttaatggaaggaccacgaggactgctcgctctcatggcaagaagttccaagtctccatcaagcaagaaactgcaagattattgggaaacttgggttgggcctacatgcaaaaggaaaactacatgatggctgaggttgtgttcaagaaagcacagatggtagatgctgatgccaacaaggcttgcaacttgggcttatgcctcatgagacaatgtcgttatgaggaagcctattacattctagaagaagtgttacagggaaaacatcaagggtctgatgaaatcaaatcaagaaaaagagctgaggaattgcttgaagagttgaatgcaaatctcccccaacctgagtttatggctgatttggaccttgacgatgattttgtgaaagggatagatgacatgctagatgcatggaacacaaatagatcaagaaggcttccaatctttgaggaaatctcttcctttagagatcaattggcatgttaataacttgtccttatcttgtagtattgtgtattgctcttaggtttaggctcctgcaaatagccccttaatttcttctctagttgcctgttcttcctctaccctttttcttcctaaaatggtgagggggaaaaaaggataaggtttgcttgtatcttgtaatttaaataataaatagcaatcaataaataaaaatataatcagtcg

SEQ ID NO: 53839 - protein, 296 aa, Glycine max
  peptide (1)..(296): Ceres Seq. ID no. 13593856
  misc_feature (160)..(193): Pfam Name: TPR Domain Pfam Description: TPR Domain
  misc_feature (30)..(245): Homolog of NCBI NO: 29467532 NR Description: P0582D05.25 [Oryza sativa (japonica
  misc_feature (7)..(265): Homolog of NCBI NO: 15233432 NR Description: male sterility MS5/pollenless 3 [Arabidopsis
  misc_feature (7)..(278): Homolog of NCBI NO: 4028970 NR Description: pollenless3 [Arabidopsis thaliana]
  misc_feature (7)..(278): Homolog of NCBI NO: 3859112 NR Description: male sterility MS5 [Arabidopsis thaliana]
  misc_feature (7)..(247): Homolog of NCBI NO: 15230439 NR Description: male sterility MS5, putative [Arabidopsis
  misc_feature (20)..(296): Homolog of NCBI NO: 30678993 NR Description: male sterility MS5 family [Arabidopsis thaliana]
  misc_feature (20)..(296): Homolog of NCBI NO: 25406811 NR Description: hypothetical protein [imported] - Arabidopsis
  misc_feature (15)..(296): Homolog of NCBI NO: 3859116 NR Description: unknown [Oryza sativa]
  misc_feature (11)..(296): Homolog of NCBI NO: 30695554 NR Description: male sterility MS5 family [Arabidopsis thaliana]
  misc_feature (11)..(296): Homolog of NCBI NO: 9758884 NR Description: gb|AAC72543.1~gene_id:K24G6.19~similar to unknown
  misc_feature (121)..(121): Xaa is any aa, unknown or other
MEGINVCKKSSKLGKKDDLYHVIHKVPYGDSPYVKAKHAQLVDKDPEAAIVLFWKAINAGDKVDSALKDMAVVMKQLDRSEEAIEAIKSFRGLCSKHSQESLDNVLLDLYKKCGKIEEQIXLLKRKLRLIYQGEAFNGRTTRTARSHGKKFQVSIKQETARLLGNLGWAYMQKENYMMAEVVFKKAQMVDADANKACNLGLCLMRQCRYEEAYYILEEVLQGKHQGSDEIKSRKRAEELLEELNANLPQPEFMADLDLDDDFVKGIDDMLDAWNTNRSRRLPIFEEISSFRDQLAC

SEQ ID NO: 53840 - protein, 227 aa, Glycine max
  peptide (1)..(227): Ceres Seq. ID no. 13593857
  misc_feature (91)..(124): Pfam Name: TPR Domain Pfam Description: TPR Domain
  misc_feature (1)..(176): Homolog of NCBI NO: 29467532 NR Description: P0582D05.25 [Oryza sativa (japonica
  misc_feature (1)..(196): Homolog of NCBI NO: 15233432 NR Description: male sterility MS5/pollenless 3 [Arabidopsis
  misc_feature (1)..(209): Homolog of NCBI NO: 4028970 NR Description: pollenless3 [Arabidopsis thaliana]
  misc_feature (1)..(209): Homolog of NCBI NO: 3859112 NR Description: male sterility MS5 [Arabidopsis thaliana]
  misc_feature (1)..(178): Homolog of NCBI NO: 15230439 NR Description: male sterility MS5, putative [Arabidopsis
  misc_feature (1)..(227): Homolog of NCBI NO: 30678993 NR Description: male sterility MS5 family [Arabidopsis thaliana]
  misc_feature (1)..(227): Homolog of NCBI NO: 25406811 NR Description: hypothetical protein [imported] - Arabidopsis
  misc_feature (1)..(227): Homolog of NCBI NO: 3859116 NR Description: unknown [Oryza sativa]
  misc_feature (1)..(227): Homolog of NCBI NO: 30695554 NR Description: male sterility MS5 family [Arabidopsis thaliana]
  misc_feature (1)..(227): Homolog of NCBI NO: 9758884 NR Description: gb|AAC72543.1~gene_id:K24G6.19~similar to unknown
  misc_feature (52)..(52): Xaa is any aa, unknown or other
MAVVMKQLDRSEEAIEAIKSFRGLCSKHSQESLDNVLLDLYKKCGKIEEQIXLLKRKLRLIYQGEAFNGRTTRTARSHGKKFQVSIKQETARLLGNLGWAYMQKENYMMAEVVFKKAQMVDADANKACNLGLCLMRQCRYEEAYYILEEVLQGKHQGSDEIKSRKRAEELLEELNANLPQPEFMADLDLDDDFVKGIDDMLDAWNTNRSRRLPIFEEISSFRDQLAC

SEQ ID NO: 53841 - protein, 223 aa, Glycine max
  peptide (1)..(223): Ceres Seq. ID no. 13593858
  misc_feature (87)..(120): Pfam Name: TPR Domain Pfam Description: TPR Domain
  misc_feature (1)..(172): Homolog of NCBI NO: 29467532 NR Description: P0582D05.25 [Oryza sativa (japonica
  misc_feature (1)..(192): Homolog of NCBI NO: 15233432 NR Description: male sterility MS5/pollenless 3 [Arabidopsis
  misc_feature (1)..(205): Homolog of NCBI NO: 4028970 NR Description: pollenless3 [Arabidopsis thaliana]
  misc_feature (1)..(205): Homolog of NCBI NO: 3859112 NR Description: male sterility MS5 [Arabidopsis thaliana]
  misc_feature (1)..(174): Homolog of NCBI NO: 15230439 NR Description: male sterility MS5, putative [Arabidopsis
  misc_feature (1)..(223): Homolog of NCBI NO: 30678993 NR Description: male sterility MS5 family [Arabidopsis thaliana]
  misc_feature (1)..(223): Homolog of NCBI NO: 25406811 NR Description: hypothetical protein [imported] - Arabidopsis
  misc_feature (1)..(223): Homolog of NCBI NO: 3859116 NR Description: unknown [Oryza sativa]
  misc_feature (1)..(223): Homolog of NCBI NO: 30695554 NR Description: male sterility MS5 family [Arabidopsis thaliana]
  misc_feature (1)..(223): Homolog of NCBI NO: 9758884 NR Description: gb|AAC72543.1~gene_id:K24G6.19~similar to unknown
  misc_feature (48)..(48): Xaa is any aa, unknown or other
MKQLDRSEEAIEAIKSFRGLCSKHSQESLDNVLLDLYKKCGKIEEQIXLLKRKLRLIYQGEAFNGRTTRTARSHGKKFQVSIKQETARLLGNLGWAYMQKENYMMAEVVFKKAQMVDADANKACNLGLCLMRQCRYEEAYYILEEVLQGKHQGSDEIKSRKRAEELLEELNANLPQPEFMADLDLDDDFVKGIDDMLDAWNTNRSRRLPIFEEISSFRDQLAC

SEQ ID NO: 53842 - DNA, 1299 bp, Glycine max
  misc_feature (1)..(1299): Ceres Seq. ID no. 14310823
gagcgtgtgttgaagcaagtagtagaagaagaagagggtggaaaatcaaaaatgggagaagagagagaagatccacagaagctaaagcgattagcggcagattcatacgactacgacaacgactctcgatggcccgattactggaacaacgttctcatccctccccacatggcctctcgtgacgacgtcgtttcccacttcaagcgcaagttctaccagcgctacgttgatcctgattttgtggtggagccaatgtctgttggtggcagttcatcccagccagtgcgttcatcaactacctcctcatcgtcgcccctgacaaataatcaacctcgtgcaagaagttctggatcaactaatagaacttcagggacatccacaactgcaggtccaggtcctagtccaacacctttgcgttgggatcggcagacagttctattttctgtcaatgcttgggtttttgttgtggcttttcttgcagccattccactggtaccaaagcatctttctcatagggcttatcgcctttgttttctgggcactctttgctcttctttgtactcattgtactcacaatatgggaaaccaagagcatggaattggcaggccttgcaagtttactttcagtcaataattgcttcgaaggattttttatacttcatctactgccttacatttgttacatctcatctttgccttaaatttgctttgatccctatcttatgttggtcctttgaacatgttgccaagttccttagacgtaatttcagtcgctctaccttgtacaggaagtacttggaagagccttgtgtttgggtggagtcaaacagttctaccctcaatatagtgacatcacatgccgagattggacttggattcctgctgataatctcattgttctcgtggcagcggaacataatacaagcattcatgtactggcagcttctgaagctcatgtatcatattcctgttaccgccccttaccatcagagtgtttgggcccaaattgggaggtcggttaatccgctcatccaacgccatgcgccattcttgaagactcctatatctacaattcaaagatggtggctaaggtagaaggttggctaaaatgttttcatatggaacaccaagtatacattttctgttcctttttcttaaattacgagattggtttgacatcatgtggccagttggtcatgttacaaagaaccgaagtagattttgggatgaataatcttataacaccatgaatcttagttagtttgattgaatagtgtgtttatttacacttcagcattc

SEQ ID NO: 53843 - protein, 364 aa, Glycine max
  peptide (1)..(364): Ceres Seq. ID no. 14310824
  misc_feature (86)..(193): Homolog of NCBI NO: 34911634 NR Description: P0039G05.19 [Oryza sativa (japonica
  misc_feature (24)..(234): Homolog of NCBI NO: 34912430 NR Description: P0681B11.19 [Oryza sativa (japonica
  misc_feature (18)..(364): Homolog of NCBI NO: 18396183 NR Description: expressed protein [Arabidopsis thaliana]
ERVLKQVVEEEEGGKSKMGEEREDPQKLKRLAADSYDYDNDSRWPDYWNNVLIPPHMASRDDVVSHFKRKFYQRYVDPDFVVEPMSVGGSSSQPVRSSTTSSSSPLTNNQPRARSSGSTNRTSGTSTTAGPGPSPTPLRWDRQTVLFSVNAWVFVVAFLAAIPLVPKHLSHRAYRLCFLGTLCSSLYSLYSQYGKPRAWNWQALQVYFQSIIASKDFLYFIYCLTFVTSHLCLKFALIPILCWSFEHVAKFLRRNFSRSTLYRKYLEEPCVWVESNSSTLNIVTSHAEIGLGFLLIISLFSWQRNIIQAFMYWQLLKLMYHIPVTAPYHQSVWAQIGRSVNPLIQRHAPFLKTPISTIQRWWLR

SEQ ID NO: 53844 - protein, 347 aa, Glycine max
  peptide (1)..(347): Ceres Seq. ID no. 14310825
  misc_feature (69)..(176): Homolog of NCBI NO: 34911634 NR Description: P0039G05.19 [Oryza sativa (japonica
  misc_feature (7)..(217): Homolog of NCBI NO: 34912430 NR Description: P0681B11.19 [Oryza sativa (japonica
  misc_feature (1)..(347): Homolog of NCBI NO: 18396183 NR Description: expressed protein [Arabidopsis thaliana]
MGEEREDPQKLKRLAADSYDYDNDSRWPDYWNNVLIPPHMASRDDVVSHFKRKFYQRYVDPDFVVEPMSVGGSSSQPVRSSTTSSSSPLTNNQPRARSSGSTNRTSGTSTTAGPGPSPTPLRWDRQTVLFSVNAWVFVVAFLAAIPLVPKHLSHRAYRLCFLGTLCSSLYSLYSQYGKPRAWNWQALQVYFQSIIASKDFLYFIYCLTFVTSHLCLKFALIPILCWSFEHVAKFLRRNFSRSTLYRKYLEEPCVWVESNSSTLNIVTSHAEIGLGFLLIISLFSWQRNIIQAFMYWQLLKLMYHIPVTAPYHQSVWAQIGRSVNPLIQRHAPFLKTPISTIQRWWLR

SEQ ID NO: 53845 - protein, 308 aa, Glycine max
  peptide (1)..(308): Ceres Seq. ID no. 14310826
  misc_feature (30)..(137): Homolog of NCBI NO: 34911634 NR Description: P0039G05.19 [Oryza sativa (japonica
  misc_feature (1)..(178): Homolog of NCBI NO: 34912430 NR Description: P0681B11.19 [Oryza sativa (japonica
  misc_feature (1)..(308): Homolog of NCBI NO: 18396183 NR Description: expressed protein [Arabidopsis thaliana]
MASRDDVVSHFKRKFYQRYVDPDFVVEPMSVGGSSSQPVRSSTTSSSSPLTNNQPRARSSGSTNRTSGTSTTAGPGPSPTPLRWDRQTVLFSVNAWVFVVAFLAAIPLVPKHLSHRAYRLCFLGTLCSSLYSLYSQYGKPRAWNWQALQVYFQSIIASKDFLYFIYCLTFVTSHLCLKFALIPILCWSFEHVAKFLRRNFSRSTLYRKYLEEPCVWVESNSSTLNIVTSHAEIGLGFLLIISLFSWQRNIIQAFMYWQLLKLMYHIPVTAPYHQSVWAQIGRSVNPLIQRHAPFLKTPISTIQRWWLR

SEQ ID NO: 53846 - DNA, 1383 bp, Glycine max
  misc_feature (1)..(1383): Ceres Seq. ID no. 14315580
ttttcacgctttggaactgtatcaatggctgaaatcatccgtgatcaaaagaccggtgacagtttatgctatgctttcatagagtttgaggacaaacggtcatgtgagcaggcatattttaagatggataatgctttgattgatgatcgaaggatacacgtggattttagtcaaagtgtggcaaaactgtggtcacaatacaggcagaaagatcaaaagggtaaaggtggtggttgcttcaaatgtggttctacagatcatattgctaaggattgtacgggagaggctacaatgaaacaaccacaagcaaaatacatcttaaaggatgataatgtccaacgtggtggagatagtgcgagatatgaaatggtgtttgatgaagataattcacaacatccaaggcaagatgtaaaacaccaaaggcatgacagggatgacccagtcgaaagaaaagatcatagaagccgcagagatcaggatatgatagactcaaacaacagagataggtatggtgatagaagcagagggcatgggggaaatggtgagaacaaagcacggtctgaaagaggtgtaatagatttggattccaatgctgataagaaagacagagataggcacatgggaagacatggagatgatgattacaagcggaaggatgagcatgattccagaaaaagagacgaagattatgtctacaagtggaaagacaagcgagactcaagaaaaagagatgaagatgatgagtatagagaaatacaaactagtcgatatgataggagaaacacagattctagccatttggagagaaggaatagcagagattataggaagaaacctgaagacagtggaacgcaagatatgaagattgactctggacaaagaaaaggaagtccaggtgatgaggattacaaaaatggaagggatcatgaggattacgaacgtaaaatgaaggatgaggattacagaaatagaaaggaagaacgtgtgcataaaagccaagatattgaagcggatgatggctacaaacgtagaagggaggatgcagattacaaacgcagaagggatgatggagattacagacatagaagggaagagcgtggacacgacaggagatgattattggtgtcactatatcctaatgctaagcacagaacctttgaacggctatcttgtatgtcccttttgcttcaatttttctggtggagcaagatattgatatgttttagaacaaggtttttgaagtattctacatttactacttagaacatatttaattatttttacatagcttcagaaaacttgttttcatattccgtgcacaacagcacagttaagttttcatgttcagctaattgttaaaatggtgtttgacttaactaacgc

SEQ ID NO: 53847 - protein, 371 aa, Glycine max
  peptide (1)..(371): Ceres Seq. ID no. 14315581
  misc_feature (1)..(54): Pfam Name: RNA recognition motif. (a.k.a. RRM, RBD, or RNP domain) Pfam Description: RNA recognition motif. (a.k.a. RRM, RBD, or RNP
  misc_feature (1)..(243): Homolog of NCBI NO: 20911035 NR Description: peptidylprolyl isomerase-like 4
  misc_feature (1)..(353): Homolog of NCBI NO: 31223576 NR Description: ENSANGP00000006861 [Anopheles gambiae]
  misc_feature (1)..(189): Homolog of NCBI NO: 34784008 NR Description: Unknown (protein for MGC:63746) [Danio rerio]
  misc_feature (1)..(366): Homolog of NCBI NO: 13539605 NR Description: cyclophilin-RNA interacting protein [Paramecium
  misc_feature (1)..(230): Homolog of NCBI NO: 32413971 NR Description: hypothetical protein [Neurospora crassa]
  misc_feature (1)..(371): Homolog of NCBI NO: 21355677 NR Description: CG5808-PA [Drosophila melanogaster]
  misc_feature (1)..(230): Homolog of NCBI NO: 28950237 NR Description: conserved hypothetical protein [Neurospora crassa]
  misc_feature (1)..(177): Homolog of NCBI NO: 16648909 NR Description: Unknown protein [Arabidopsis thaliana]
  misc_feature (1)..(259): Homolog of NCBI NO: 25405664 NR Description: hypothetical protein F22G10.24 [imported] -
  misc_feature (1)..(259): Homolog of NCBI NO: 22330231 NR Description: cyclophilin-RNA interacting protein, putative
FSRFGTVSMAEIIRDQKTGDSLCYAFIEFEDKRSCEQAYFKMDNALIDDRRIHVDFSQSVAKLWSQYRQKDQKGKGGGCFKCGSTDHIAKDCTGEATMKQPQAKYILKDDNVQRGGDSARYEMVFDEDNSQHPRQDVKHQRHDRDDPVERKDHRSRRDQDMIDSNNRDRYGDRSRGHGGNGENKARSERGVIDLDSNADKKDRDRHMGRHGDDDYKRKDEHDSRKRDEDYVYKWKDKRDSRKRDEDDEYREIQTSRYDRRNTDSSHLERRNSRDYRKKPEDSGTQDMKIDSGQRKGSPGDEDYKNGRDHEDYERKMKDEDYRNRKEERVHKSQDIEADDGYKRRREDADYKRRRDDGDYRHRREERGHDRR

SEQ ID NO: 53848 - protein, 363 aa, Glycine max
  peptide (1)..(363): Ceres Seq. ID no. 14315582
  misc_feature (204)..(348): Pfam Name: Chromadorea ALT protein Pfam Description: Chromadorea ALT protein
  misc_feature (1)..(235): Homolog of NCBI NO: 20911035 NR Description: peptidylprolyl isomerase-like 4
  misc_feature (1)..(345): Homolog of NCBI NO: 31223576 NR Description: ENSANGP00000006861 [Anopheles gambiae]
  misc_feature (1)..(181): Homolog of NCBI NO: 34784008 NR Description: Unknown (protein for MGC:63746) [Danio rerio]
  misc_feature (1)..(358): Homolog of NCBI NO: 13539605 NR Description: cyclophilin-RNA interacting protein [Paramecium
  misc_feature (1)..(222): Homolog of NCBI NO: 32413971 NR Description: hypothetical protein [Neurospora crassa]
  misc_feature (1)..(363): Homolog of NCBI NO: 21355677 NR Description: CG5808-PA [Drosophila melanogaster]
  misc_feature (1)..(222): Homolog of NCBI NO: 28950237 NR Description: conserved hypothetical protein [Neurospora crassa]
  misc_feature (1)..(169): Homolog of NCBI NO: 16648909 NR Description: Unknown protein [Arabidopsis thaliana]
  misc_feature (1)..(251): Homolog of NCBI NO: 25405664 NR Description: hypothetical protein F22G10.24 [imported] -
  misc_feature (1)..(251): Homolog of NCBI NO: 22330231 NR Description: cyclophilin-RNA interacting protein, putative
MAEIIRDQKTGDSLCYAFIEFEDKRSCEQAYFKMDNALIDDRRIHVDFSQSVAKLWSQYRQKDQKGKGGGCFKCGSTDHIAKDCTGEATMKQPQAKYILKDDNVQRGGDSARYEMVFDEDNSQHPRQDVKHQRHDRDDPVERKDHRSRRDQDMIDSNNRDRYGDRSRGHGGNGENKARSERGVIDLDSNADKKDRDRHMGRHGDDDYKRKDEHDSRKRDEDYVYKWKDKRDSRKRDEDDEYREIQTSRYDRRNTDSSHLERRNSRDYRKKPEDSGTQDMKIDSGQRKGSPGDEDYKNGRDHEDYERKMKDEDYRNRKEERVHKSQDIEADDGYKRRREDADYKRRRDDGDYRHRREERGHDRR

SEQ ID NO: 53849 - protein, 330 aa, Glycine max
  peptide (1)..(330): Ceres Seq. ID no. 14315583
  misc_feature (171)..(315): Pfam Name: Chromadorea ALT protein Pfam Description: Chromadorea ALT protein
  misc_feature (1)..(202): Homolog of NCBI NO: 20911035 NR Description: peptidylprolyl isomerase-like 4
  misc_feature (1)..(312): Homolog of NCBI NO: 31223576 NR Description: ENSANGP00000006861 [Anopheles gambiae]
  misc_feature (1)..(148): Homolog of NCBI NO: 34784008 NR Description: Unknown (protein for MGC:63746) [Danio rerio]
  misc_feature (1)..(325): Homolog of NCBI NO: 13539605 NR Description: cyclophilin-RNA interacting protein [Paramecium
  misc_feature (1)..(189): Homolog of NCBI NO: 32413971 NR Description: hypothetical protein [Neurospora crassa]
  misc_feature (1)..(330): Homolog of NCBI NO: 21355677 NR Description: CG5808-PA [Drosophila melanogaster]
  misc_feature (1)..(189): Homolog of NCBI NO: 28950237 NR Description: conserved hypothetical protein [Neurospora crassa]
  misc_feature (1)..(136): Homolog of NCBI NO: 16648909 NR Description: Unknown protein [Arabidopsis thaliana]
  misc_feature (1)..(218): Homolog of NCBI NO: 25405664 NR Description: hypothetical protein F22G10.24 [imported] -
  misc_feature (1)..(218): Homolog of NCBI NO: 22330231 NR Description: cyclophilin-RNA interacting protein, putative
MDNALIDDRRIHVDFSQSVAKLWSQYRQKDQKGKGGGCFKCGSTDHIAKDCTGEATMKQPQAKYILKDDNVQRGGDSARYEMVFDEDNSQHPRQDVKHQRHDRDDPVERKDHRSRRDQDMIDSNNRDRYGDRSRGHGGNGENKARSERGVIDLDSNADKKDRDRHMGRHGDDDYKRKDEHDSRKRDEDYVYKWKDKRDSRKRDEDDEYREIQTSRYDRRNTDSSHLERRNSRDYRKKPEDSGTQDMKIDSGQRKGSPGDEDYKNGRDHEDYERKMKDEDYRNRKEERVHKSQDIEADDGYKRRREDADYKRRRDDGDYRHRREERGHDRR

SEQ ID NO: 53850 - DNA, 1300 bp, Glycine max
  misc_feature (1)..(1300): Ceres Seq. ID no. 15169320
agaatttgttacaagcattatatttggaaatgaattttcatcacgcctttcaattggatccattatgcggctaagggcagctgcaatcacatcactatcgcaagatcctaaagcagatagtgccatgattttcaaacttgcccataggtttctagatgtaagcaaatatcagagaaataagtccaaggcagaggatgaatctgagtatcattcaggggccatccaggaagatctaaaccatcagatccgcagaagccagtgtgagactgataataaagcaggtagcatcgaacaagaggttcaggctattagaaaggatcttgttactgctgactatggtgaatatatgaatccttttggaagtgaagattgcctcaataatgagcatgaacaatgttcactttggtctgacactagggcaagggatcatatcattgaaattgacaatgccgaatttacaaatccatttgctatagatgcacattcaaatcatgatccagtgtctcagtttatagatactgttccgaattctgaaaatccatccgcagatgatcccccagagctgtatctgcctggttttgtaattcatgttgtactggagaagaaaagacctcaaactgatcttaagacatcgtggagaatgctagagaggggaaaatgttatagagcttacatagcaaatagagaaagcttcaaagatattattgtttcaccatccatgttccttgaccatcttccttggagatgtcacgatgccttgcaaaagatattgaaagctcaaactgctaaagatcaagtaacggaacctcacatcatctgatatatatatttaatatcaatgaacttctatgaaatgatttcaccggttcagccaattgtttggatcgtgagaaatcattaaaaaatagggatctacttatcaaaagatttccctgaacaatagaacttactctggcattattgaacgcgatatgatcttgattaattttttgctcccggttctccgtacgatgatgcttgtgagtgaaatcagcatctatgtcattttagaaatattaaatgtgcttattttcatatatatagggagcgtaaataatgagatgtggtggaaataatgttcgaatgttgactgtgactataattatttagatgattaatatttactcttttcctatgtataatatagggtagaatcaaatgacactagtgtaacatgtattaattaatattacattatttaataattttcaattaaaaaaaaaaaaaaaaaaaaaaaaaaaaaaaaataaaaaaaaaaaac

SEQ ID NO: 53851 - protein, 272 aa, Glycine max
  peptide (1)..(272): Ceres Seq. ID no. 15169321
  misc_feature (1)..(123): Homolog of NCBI NO: 25406862 NR Description: hypothetical protein [imported] - Arabidopsis
  misc_feature (1)..(123): Homolog of NCBI NO: 30679448 NR Description: lipase (class 3) family [Arabidopsis thaliana]
  misc_feature (1)..(105): Homolog of NCBI NO: 34907688 NR Description: P0035F12.4 [Oryza sativa (japonica
  misc_feature (161)..(260): Homolog of NCBI NO: 34907688 NR Description: P0035F12.4 [Oryza sativa (japonica
  misc_feature (127)..(260): Homolog of NCBI NO: 25406862 NR Description: hypothetical protein [imported] - Arabidopsis
  misc_feature (127)..(272): Homolog of NCBI NO: 30679448 NR Description: lipase (class 3) family [Arabidopsis thaliana]
  misc_feature (1)..(59): Homolog of NCBI NO: 38344247 NR Description: OJ991113_30.24 [Oryza sativa (japonica
  misc_feature (184)..(262): Homolog of NCBI NO: 38344247 NR Description: OJ991113_30.24 [Oryza sativa (japonica
EFVTSIIFGNEFSSRLSIGSIMRLRAAAITSLSQDPKADSAMIFKLAHRFLDVSKYQRNKSKAEDESEYHSGAIQEDLNHQIRRSQCETDNKAGSIEQEVQAIRKDLVTADYGEYMNPFGSEDCLNNEHEQCSLWSDTRARDHIIEIDNAEFTNPFAIDAHSNHDPVSQFIDTVPNSENPSADDPPELYLPGFVIHVVLEKKRPQTDLKTSWRMLERGKCYRAYIANRESFKDIIVSPSMFLDHLPWRCHDALQKILKAQTAKDQVTEPHII

SEQ ID NO: 53852 - protein, 251 aa, Glycine max
  peptide (1)..(251): Ceres Seq. ID no. 15169322
  misc_feature (1)..(102): Homolog of NCBI NO: 25406862 NR Description: hypothetical protein [imported] - Arabidopsis
  misc_feature (1)..(102): Homolog of NCBI NO: 30679448 NR Description: lipase (class 3) family [Arabidopsis thaliana]
  misc_feature (1)..(84): Homolog of NCBI NO: 34907688 NR Description: P0035F12.4 [Oryza sativa (japonica
  misc_feature (140)..(239): Homolog of NCBI NO: 34907688 NR Description: P0035F12.4 [Oryza sativa (japonica
  misc_feature (106)..(239): Homolog of NCBI NO: 25406862 NR Description: hypothetical protein [imported] - Arabidopsis
  misc_feature (106)..(251): Homolog of NCBI NO: 30679448 NR Description: lipase (class 3) family [Arabidopsis thaliana]
  misc_feature (1)..(38): Homolog of NCBI NO: 38344247 NR Description: OJ991113_30.24 [Oryza sativa (japonica
  misc_feature (163)..(241): Homolog of NCBI NO: 38344247 NR Description: OJ991113_30.24 [Oryza sativa (japonica
MRLRAAAITSLSQDPKADSAMIFKLAHRFLDVSKYQRNKSKAEDESEYHSGAIQEDLNHQIRRSQCETDNKAGSIEQEVQAIRKDLVTADYGEYMNPFGSEDCLNNEHEQCSLWSDTRARDHIIEIDNAEFTNPFAIDAHSNHDPVSQFIDTVPNSENPSADDPPELYLPGFVIHVVLEKKRPQTDLKTSWRMLERGKCYRAYIANRESFKDIIVSPSMFLDHLPWRCHDALQKILKAQTAKDQVTEPHII

SEQ ID NO: 53853 - protein, 231 aa, Glycine max
  peptide (1)..(231): Ceres Seq. ID no. 15169323
  misc_feature (1)..(82): Homolog of NCBI NO: 25406862 NR Description: hypothetical protein [imported] - Arabidopsis
  misc_feature (1)..(82): Homolog of NCBI NO: 30679448 NR Description: lipase (class 3) family [Arabidopsis thaliana]
  misc_feature (1)..(64): Homolog of NCBI NO: 34907688 NR Description: P0035F12.4 [Oryza sativa (japonica
  misc_feature (120)..(219): Homolog of NCBI NO: 34907688 NR Description: P0035F12.4 [Oryza sativa (japonica
  misc_feature (86)..(219): Homolog of NCBI NO: 25406862 NR Description: hypothetical protein [imported] - Arabidopsis
  misc_feature (86)..(231): Homolog of NCBI NO: 30679448 NR Description: lipase (class 3) family [Arabidopsis thaliana]
  misc_feature (1)..(18): Homolog of NCBI NO: 38344247 NR Description: OJ991113_30.24 [Oryza sativa (japonica
  misc_feature (143)..(221): Homolog of NCBI NO: 38344247 NR Description: OJ991113_30.24 [Oryza sativa (japonica
MIFKLAHRFLDVSKYQRNKSKAEDESEYHSGAIQEDLNHQIRRSQCETDNKAGSIEQEVQAIRKDLVTADYGEYMNPFGSEDCLNNEHEQCSLWSDTRARDHIIEIDNAEFTNPFAIDAHSNHDPVSQFIDTVPNSENPSADDPPELYLPGFVIHVVLEKKRPQTDLKTSWRMLERGKCYRAYIANRESFKDIIVSPSMFLDHLPWRCHDALQKILKAQTAKDQVTEPHII

SEQ ID NO: 53854 - DNA, 1179 bp, Glycine max
  misc_feature (1)..(1179): Ceres Seq. ID no. 14306420
agtgtgcagggaatgttgtgttttttatggttcaggaaaatttgagaataacaacgtgttccatgatagagatgtgtttctggaagactataaagaaatgaataggagcttaaagatatatgtttatcctcacagggaagacgatccttttgcaaatgtgcttttgcctgtggaatctgaacccggtggcaattatgccagtgaaagttacttcaaaaaggtacttatgaagagccatttcattacaaaagacccaccagaagcagatcttttctttcttcccttttccatggcaagattgtggcacgatcgaagagttggtgtgggaggtatacaagacttcattagagactacattcagaatatcagtcacaggtatccatattggaacaacacaggtggtgccgatcacttttatgttgcttgtcattcaattggaaggtctgccatggacaaagcacctgatgtgaaattcaatgccattcaagttgtattctcatctagttattttctaactgggtactttgctcataaggatgcatgtctaccacaaatttggccaagaaaaggaaatccccctaaccttgtttcatcaaagaggaaaaggctagctttctttgctggaggagtaaattccccagtacgtgtaaaacttcttgagacatggaaaaatgattcagaaatctttgtgcaccatggaagacttaaaacaccatatgcagatgaattgctaggtagcaagttctgccttcatgttaagggctttgaagtgaacacagctcgcattggagattctctatattatggttgcgttccagtgatcattgccaactactatgaccttccatttgctgatgtgctaaactggaagagcttttcagttgttgtcactaccttagatattcccttgctgaaaaagatcctcaaggatatcatcagttccaataaatatttgatgttacaaagcaatgttttgaaggtgaggaaacacttccaatggcattcacccccgcaagacttcgatgcattttatatggttatgtatgaattatggcttagacgaagttctataaaaaattcgtgggtagattctttcagagtttaatttatatgtatgccactgtaaaatattttcacacaagcatttaataagaatttactttatcatggttatatctt

SEQ ID NO: 53855 - protein, 367 aa, Glycine max
  peptide (1)..(367): Ceres Seq. ID no. 14306421
  misc_feature (39)..(324): Pfam Name: Exostosin family Pfam Description: Exostosin family
  misc_feature (19)..(354): Homolog of NCBI NO: 15239502 NR Description: expressed protein [Arabidopsis thaliana]
  misc_feature (19)..(354): Homolog of NCBI NO: 15241150 NR Description: expressed protein [Arabidopsis thaliana]
  misc_feature (16)..(358): Homolog of NCBI NO: 15231488 NR Description: Exostosin family [Arabidopsis thaliana]
  misc_feature (19)..(354): Homolog of NCBI NO: 26450497 NR Description: unknown protein [Arabidopsis thaliana]
  misc_feature (19)..(354): Homolog of NCBI NO: 15239118 NR Description: expressed protein [Arabidopsis thaliana]
  misc_feature (19)..(354): Homolog of NCBI NO: 15233924 NR Description: expressed protein [Arabidopsis thaliana]
  misc_feature (19)..(351): Homolog of NCBI NO: 30683790 NR Description: expressed protein [Arabidopsis thaliana]
  misc_feature (19)..(358): Homolog of NCBI NO: 15237526 NR Description: expressed protein [Arabidopsis thaliana]
  misc_feature (19)..(358): Homolog of NCBI NO: 9758008 NR Description: contains similarity to limonene
  misc_feature (17)..(358): Homolog of NCBI NO: 15233650 NR Description: Exostosin family [Arabidopsis thaliana]
VCRECCVFYGSGKFENNNVFHDRDVFLEDYKEMNRSLKIYVYPHREDDPFANVLLPVESEPGGNYASESYFKKVLMKSHFITKDPPEADLFFLPFSMARLWHDRRVGVGGIQDFIRDYIQNISHRYPYWNNTGGADHFYVACHSIGRSAMDKAPDVKFNAIQVVFSSSYFLTGYFAHKDACLPQIWPRKGNPPNLVSSKRKRLAFFAGGVNSPVRVKLLETWKNDSEIFVHHGRLKTPYADELLGSKFCLHVKGFEVNTARIGDSLYYGCVPVIIANYYDLPFADVLNWKSFSVVVTTLDIPLLKKILKDIISSNKYLMLQSNVLKVRKHFQWHSPPQDFDAFYMVMYELWLRRSSIKNSWVDSFRV

SEQ ID NO: 53856 - protein, 335 aa, Glycine max
  peptide (1)..(335): Ceres Seq. ID no. 14306422
  misc_feature (7)..(292): Pfam Name: Exostosin family Pfam Description: Exostosin family
  misc_feature (1)..(322): Homolog of NCBI NO: 15239502 NR Description: expressed protein [Arabidopsis thaliana]
  misc_feature (1)..(322): Homolog of NCBI NO: 15241150 NR Description: expressed protein [Arabidopsis thaliana]
  misc_feature (1)..(326): Homolog of NCBI NO: 15231488 NR Description: Exostosin family [Arabidopsis thaliana]
  misc_feature (1)..(322): Homolog of NCBI NO: 26450497 NR Description: unknown protein [Arabidopsis thaliana]
  misc_feature (1)..(322): Homolog of NCBI NO: 15239118 NR Description: expressed protein [Arabidopsis thaliana]
  misc_feature (1)..(322): Homolog of NCBI NO: 15233924 NR Description: expressed protein [Arabidopsis thaliana]
  misc_feature (1)..(319): Homolog of NCBI NO: 30683790 NR Description: expressed protein [Arabidopsis thaliana]
  misc_feature (1)..(326): Homolog of NCBI NO: 15237526 NR Description: expressed protein [Arabidopsis thaliana]
  misc_feature (1)..(326): Homolog of NCBI NO: 9758008 NR Description: contains similarity to limonene
  misc_feature (1)..(326): Homolog of NCBI NO: 15233650 NR Description: Exostosin family [Arabidopsis thaliana]
MNRSLKIYVYPHREDDPFANVLLPVESEPGGNYASESYFKKVLMKSHFITKDPPEADLFFLPFSMARLWHDRRVGVGGIQDFIRDYIQNISHRYPYWNNTGGADHFYVACHSIGRSAMDKAPDVKFNAIQVVFSSSYFLTGYFAHKDACLPQIWPRKGNPPNLVSSKRKRLAFFAGGVNSPVRVKLLETWKNDSEIFVHHGRLKTPYADELLGSKFCLHVKGFEVNTARIGDSLYYGCVPVIIANYYDLPFADVLNWKSFSVVVTTLDIPLLKKILKDIISSNKYLMLQSNVLKVRKHFQWHSPPQDFDAFYMVMYELWLRRSSIKNSWVDSFRV

SEQ ID NO: 53857 - protein, 292 aa, Glycine max
  peptide (1)..(292): Ceres Seq. ID no. 14306423
  misc_feature (1)..(249): Pfam Name: Exostosin family Pfam Description: Exostosin family
  misc_feature (1)..(279): Homolog of NCBI NO: 15239502 NR Description: expressed protein [Arabidopsis thaliana]
  misc_feature (1)..(279): Homolog of NCBI NO: 15241150 NR Description: expressed protein [Arabidopsis thaliana]
  misc_feature (1)..(283): Homolog of NCBI NO: 15231488 NR Description: Exostosin family [Arabidopsis thaliana]
  misc_feature (1)..(279): Homolog of NCBI NO: 26450497 NR Description: unknown protein [Arabidopsis thaliana]
  misc_feature (1)..(279): Homolog of NCBI NO: 15239118 NR Description: expressed protein [Arabidopsis thaliana]
  misc_feature (1)..(279): Homolog of NCBI NO: 15233924 NR Description: expressed protein [Arabidopsis thaliana]
  misc_feature (1)..(276): Homolog of NCBI NO: 30683790 NR Description: expressed protein [Arabidopsis thaliana]
  misc_feature (1)..(283): Homolog of NCBI NO: 15237526 NR Description: expressed protein [Arabidopsis thaliana]
  misc_feature (1)..(283): Homolog of NCBI NO: 9758008 NR Description: contains similarity to limonene
  misc_feature (1)..(283): Homolog of NCBI NO: 15233650 NR Description: Exostosin family [Arabidopsis thaliana]
MKSHFITKDPPEADLFFLPFSMARLWHDRRVGVGGIQDFIRDYIQNISHRYPYWNNTGGADHFYVACHSIGRSAMDKAPDVKFNAIQVVFSSSYFLTGYFAHKDACLPQIWPRKGNPPNLVSSKRKRLAFFAGGVNSPVRVKLLETWKNDSEIFVHHGRLKTPYADELLGSKFCLHVKGFEVNTARIGDSLYYGCVPVIIANYYDLPFADVLNWKSFSVVVTTLDIPLLKKILKDIISSNKYLMLQSNVLKVRKHFQWHSPPQDFDAFYMVMYELWLRRSSIKNSWVDSFRV

SEQ ID NO: 53858 - DNA, 1438 bp, Glycine max
  misc_feature (1)..(1438): Ceres Seq. ID no. 14310639
gatatacacataaactatagtatactcttcccactttcactttcacatatagactatatataaaatatattagtcttgctgttttcttcggctaattgctgcagagaatggctgctggagtgtataaccaaccaattgttgcttttcaatcccattctcacatcaacaattttaatcatcagcaaaagtttaataatttggtaagactggtgacaaaggactttatcggcagtaatttcctctcaagaagggattgtagagtaattcaatctttagcatctcaaacatctgtggttgacacagtttcatccccttcaaaaagcaaaactagtgatagagacactcacaagaaatcaaatgaagcttctttaatccttattcgacatggtgaatccttgtggaacgaaaagaacttgttcacaggctgtgttgatgtccctctaagcaagaggggtatagatgaggcaattgaagctggcaaaagaattagcagtattcctgtggatctcatatttacatctgctttgattcgagcgcagatgacagccatgcttgccatgacacagcaccgccgcaggaaggtgcctatcataatgcacaatgaaagtgaacaagcaaggggatggagtcaagtttttagtgaggatacagaaaagcaatccattccagtcatagcagcttggcaattgaatgaaagaatgtatggggaactacagggtctcaataagcaagaaacagcagacagatatgggaaagaacaagtacatgagtggcgtcgaagttatgacatacctcctccaaatggtgaaagtttggaaatgtgtgctgaaagggcagtttcctatttcagagaccaaattgaacctcaacttttatctggaaagaatgttatgatttcagctcatgggaattcactgagatccattattatgtatcttgacaaactaacttcccaagaggtgattagtttagaattgtcaactggaattccaatgctttacatttttaaagaaggaagattcgttaggagagggagtccgatagggcccactgaagcaggagtttatgcctacactaggcgtttggctctttacaggcagaggttggatgatatgttccaataattttttgaagggttagggaatacatcacacgttaatcagcagtaaagtattacataaggggtaaaaaagatgttatcagtgttacagttagattgcatgaaaatttgagaggagtttaacacagtttcgaactagtggattaggatccatgcttgactccagtgttgttctcatatggtgaaggagtaattgcttccatgtgcctatatatatacaaataaatcattgaatcttagaaatgttttcgtgtctattacaattaattgtaaatgagttgtcatgtgaatttaattggacattcggaatgtttttat

SEQ ID NO: 53859 - protein, 338 aa, Glycine max
  peptide (1)..(338): Ceres Seq. ID no. 14310640
  misc_feature (86)..(308): Pfam Name: Phosphoglycerate mutase family Pfam Description: Phosphoglycerate mutase family
  misc_feature (88)..(313): Homolog of NCBI NO: 15605455 NR Description: Phosphoglycerate Mutase [Chlamydia trachomatis]
  misc_feature (86)..(301): Homolog of NCBI NO: 15836396 NR Description: phosphoglycerate mutase [Chlamydophila pneumoniae
  misc_feature (86)..(301): Homolog of NCBI NO: 15618772 NR Description: Phosphoglycerate Mutase [Chlamydophila pneumoniae
  misc_feature (88)..(313): Homolog of NCBI NO: 15834720 NR Description: phosphoglycerate mutase [Chlamydia muridarum]
  misc_feature (86)..(313): Homolog of NCBI NO: 29840659 NR Description: phosphoglycerate mutase [Chlamydophila caviae
  misc_feature (145)..(334): Homolog of NCBI NO: 15218201 NR Description: phosphoglycerate mutase -related [Arabidopsis
  misc_feature (53)..(334): Homolog of NCBI NO: 25405021 NR Description: protein F28K19.26 [imported] - Arabidopsis
  misc_feature (43)..(335): Homolog of NCBI NO: 21539557 NR Description: unknown protein [Arabidopsis thaliana]
  misc_feature (43)..(335): Homolog of NCBI NO: 21618275 NR Description: unknown [Arabidopsis thaliana]
  misc_feature (43)..(335): Homolog of NCBI NO: 18395083 NR Description: expressed protein [Arabidopsis thaliana]
MAAGVYNQPIVAFQSHSHINNFNHQQKFNNLVRLVTKDFIGSNFLSRRDCRVIQSLASQTSVVDTVSSPSKSKTSDRDTHKKSNEASLILIRHGESLWNEKNLFTGCVDVPLSKRGIDEAIEAGKRISSIPVDLIFTSALIRAQMTAMLAMTQHRRRKVPIIMHNESEQARGWSQVFSEDTEKQSIPVIAAWQLNERMYGELQGLNKQETADRYGKEQVHEWRRSYDIPPPNGESLEMCAERAVSYFRDQIEPQLLSGKNVMISAHGNSLRSIIMYLDKLTSQEVISLELSTGIPMLYIFKEGRFVRRGSPIGPTEAGVYAYTRRLALYRQRLDDMFQ

SEQ ID NO: 53860 - protein, 194 aa, Glycine max
  peptide (1)..(194): Ceres Seq. ID no. 14310641
  misc_feature (1)..(164): Pfam Name: Phosphoglycerate mutase family Pfam Description: Phosphoglycerate mutase family
  misc_feature (1)..(169): Homolog of NCBI NO: 15605455 NR Description: Phosphoglycerate Mutase [Chlamydia trachomatis]
  misc_feature (1)..(157): Homolog of NCBI NO: 15836396 NR Description: phosphoglycerate mutase [Chlamydophila pneumoniae
  misc_feature (1)..(157): Homolog of NCBI NO: 15618772 NR Description: Phosphoglycerate Mutase [Chlamydophila pneumoniae
  misc_feature (1)..(169): Homolog of NCBI NO: 15834720 NR Description: phosphoglycerate mutase [Chlamydia muridarum]
  misc_feature (1)..(169): Homolog of NCBI NO: 29840659 NR Description: phosphoglycerate mutase [Chlamydophila caviae
  misc_feature (1)..(190): Homolog of NCBI NO: 15218201 NR Description: phosphoglycerate mutase -related [Arabidopsis
  misc_feature (1)..(190): Homolog of NCBI NO: 25405021 NR Description: protein F28K19.26 [imported] - Arabidopsis
  misc_feature (1)..(191): Homolog of NCBI NO: 21539557 NR Description: unknown protein [Arabidopsis thaliana]
  misc_feature (1)..(191): Homolog of NCBI NO: 21618275 NR Description: unknown [Arabidopsis thaliana]
  misc_feature (1)..(191): Homolog of NCBI NO: 18395083 NR Description: expressed protein [Arabidopsis thaliana]
MTAMLAMTQHRRRKVPIIMHNESEQARGWSQVFSEDTEKQSIPVIAAWQLNERMYGELQGLNKQETADRYGKEQVHEWRRSYDIPPPNGESLEMCAERAVSYFRDQIEPQLLSGKNVMISAHGNSLRSIIMYLDKLTSQEVISLELSTGIPMLYIFKEGRFVRRGSPIGPTEAGVYAYTRRLALYRQRLDDMFQ

SEQ ID NO: 53861 - protein, 191 aa, Glycine max
  peptide (1)..(191): Ceres Seq. ID no. 14310642
  misc_feature (1)..(161): Pfam Name: Phosphoglycerate mutase family Pfam Description: Phosphoglycerate mutase family
  misc_feature (1)..(166): Homolog of NCBI NO: 15605455 NR Description: Phosphoglycerate Mutase [Chlamydia trachomatis]
  misc_feature (1)..(154): Homolog of NCBI NO: 15836396 NR Description: phosphoglycerate mutase [Chlamydophila pneumoniae
  misc_feature (1)..(154): Homolog of NCBI NO: 15618772 NR Description: Phosphoglycerate Mutase [Chlamydophila pneumoniae
  misc_feature (1)..(166): Homolog of NCBI NO: 15834720 NR Description: phosphoglycerate mutase [Chlamydia muridarum]
  misc_feature (1)..(166): Homolog of NCBI NO: 29840659 NR Description: phosphoglycerate mutase [Chlamydophila caviae
  misc_feature (1)..(187): Homolog of NCBI NO: 15218201 NR Description: phosphoglycerate mutase -related [Arabidopsis
  misc_feature (1)..(187): Homolog of NCBI NO: 25405021 NR Description: protein F28K19.26 [imported] - Arabidopsis
  misc_feature (1)..(188): Homolog of NCBI NO: 21539557 NR Description: unknown protein [Arabidopsis thaliana]
  misc_feature (1)..(188): Homolog of NCBI NO: 21618275 NR Description: unknown [Arabidopsis thaliana]
  misc_feature (1)..(188): Homolog of NCBI NO: 18395083 NR Description: expressed protein [Arabidopsis thaliana]
MLAMTQHRRRKVPIIMHNESEQARGWSQVFSEDTEKQSIPVIAAWQLNERMYGELQGLNKQETADRYGKEQVHEWRRSYDIPPPNGESLEMCAERAVSYFRDQIEPQLLSGKNVMISAHGNSLRSIIMYLDKLTSQEVISLELSTGIPMLYIFKEGRFVRRGSPIGPTEAGVYAYTRRLALYRQRLDDMFQ

SEQ ID NO: 53862 - DNA, 1263 bp, Glycine max
  misc_feature (1)..(1263): Ceres Seq. ID no. 14304983
aaaagagaaagagagagaggctgaaacaaagaagtgaaaataacagcaaaaagtagcagctgctgcagctcccccgaagcttatctcagcagcagatactcaaccctgtttgagtagccgagaataacaccaatgggagaggaggaaaagaaaccagaggaacaacccaaggcagaggagaaaaaaccagaggaagagaagaagaaagaagaagcagcagcagcggaaaaaccaagcgaagagaaaaaaccggaacaagagtcgaaagaggaagttgctgctccgccaccgccaccgccaccggccgagattgtgctcaaagtgttcatgcattgcgagggttgcgctcgcaaggttcgtcgctccctcaaaggattcccaggtgtcgacgatgttgtcaccgattgcaaatctcacaaggtggtcgttaagggagagaaagcggatccgttgaaggttttggagagaatacagaggaagagtcacagacaggtcgagcttctttctccgatcccgaaaccgcaagaggagaagaaggtccaagaggaagaaaagcccaagcccacacccgaagagaagaaagaagaggctcagattgtgatgacggttctgaaagttggcatgcactgcgaagcttgctctcaggaaatcaagagacgcatacagagaatgaagggagtggaatcagcagaacccgatctgcagaactcacaagtgagcgtgaagggggtgtacgatccagcaaagttggttgagtacgtgtacaagagaaccggaaagcacgcagtgataatgaagcaagagccagaaaagaaagagaaagtggaggaagcaaaagaggaagagatgaagagtgatggcgaaggggaagaaaacaaagagaagaaggaaaaagaagaggcaaagggtgaagaagccaaagcagaggaaccaacaacaccaacaattactgaagacaccaacaaggttgttccagaggttaagattaatgaatacttctataacccaccaaggtatggcatggaggtgtatgcatatcctgcacaccctgcacacccagcgtatttccattcctaccctccccagattttcagcgatgagaacccaaatgcctgcactgtcatgtaaaaattgaaggtgtcaggggtgatatgggaattaggggaaattgtgaagtttggtgggggatatgaatatagataccctttcctgtgttacctgtactgtgaaagtacaatgtatgcataagctatagaattttgt

SEQ ID NO: 53863 - protein, 331 aa, Glycine max
  peptide (1)..(331): Ceres Seq. ID no. 14304984
  misc_feature (1)..(267): Pfam Name: Caldesmon Pfam Description: Caldesmon
  misc_feature (23)..(243): Homolog of NCBI NO: 15233023 NR Description: copper-binding protein - related [Arabidopsis
  misc_feature (1)..(330): Homolog of NCBI NO: 18420811 NR Description: copper-binding protein family [Arabidopsis
  misc_feature (21)..(183): Homolog of NCBI NO: 15241256 NR Description: copper chaperone (CCH)-related [Arabidopsis
  misc_feature (1)..(164): Homolog of NCBI NO: 24417342 NR Description: unknown [Arabidopsis thaliana]
  misc_feature (1)..(330): Homolog of NCBI NO: 21594005 NR Description: unknown [Arabidopsis thaliana]
  misc_feature (32)..(249): Homolog of NCBI NO: 37532382 NR Description: putative ATFP3 [Oryza sativa (japonica
  misc_feature (1)..(260): Homolog of NCBI NO: 38344582 NR Description: OSJNBa0053B21.14 [Oryza sativa (japonica
  misc_feature (50)..(331): Homolog of NCBI NO: 4097547 NR Description: ATFP3 [Arabidopsis thaliana]
  misc_feature (4)..(331): Homolog of NCBI NO: 9758294 NR Description: contains similarity to ATFP3~gene_id:MLE2.16
  misc_feature (1)..(331): Homolog of NCBI NO: 18424719 NR Description: copper chaperone (CCH)-related [Arabidopsis
MGEEEKKPEEQPKAEEKKPEEEKKKEEAAAAEKPSEEKKPEQESKEEVAAPPPPPPPAEIVLKVFMHCEGCARKVRRSLKGFPGVDDVVTDCKSHKVVVKGEKADPLKVLERIQRKSHRQVELLSPIPKPQEEKKVQEEEKPKPTPEEKKEEAQIVMTVLKVGMHCEACSQEIKRRIQRMKGVESAEPDLQNSQVSVKGVYDPAKLVEYVYKRTGKHAVIMKQEPEKKEKVEEAKEEEMKSDGEGEENKEKKEKEEAKGEEAKAEEPTTPTITEDTNKVVPEVKINEYFYNPPRYGMEVYAYPAHPAHPAYFHSYPPQIFSDENPNACTVM

SEQ ID NO: 53864 - protein, 266 aa, Glycine max
  peptide (1)..(266): Ceres Seq. ID no. 14304985
  misc_feature (1)..(202): Pfam Name: Caldesmon Pfam Description: Caldesmon
  misc_feature (1)..(178): Homolog of NCBI NO: 15233023 NR Description: copper-binding protein - related [Arabidopsis
  misc_feature (1)..(265): Homolog of NCBI NO: 18420811 NR Description: copper-binding protein family [Arabidopsis
  misc_feature (1)..(118): Homolog of NCBI NO: 15241256 NR Description: copper chaperone (CCH)-related [Arabidopsis
  misc_feature (1)..(99): Homolog of NCBI NO: 24417342 NR Description: unknown [Arabidopsis thaliana]
  misc_feature (1)..(265): Homolog of NCBI NO: 21594005 NR Description: unknown [Arabidopsis thaliana]
  misc_feature (1)..(184): Homolog of NCBI NO: 37532382 NR Description: putative ATFP3 [Oryza sativa (japonica
  misc_feature (1)..(195): Homolog of NCBI NO: 38344582 NR Description: OSJNBa0053B21.14 [Oryza sativa (japonica
  misc_feature (1)..(266): Homolog of NCBI NO: 4097547 NR Description: ATFP3 [Arabidopsis thaliana]
  misc_feature (1)..(266): Homolog of NCBI NO: 9758294 NR Description: contains similarity to ATFP3~gene_id:MLE2.16
  misc_feature (1)..(266): Homolog of NCBI NO: 18424719 NR Description: copper chaperone (CCH)-related [Arabidopsis
MHCEGCARKVRRSLKGFPGVDDVVTDCKSHKVVVKGEKADPLKVLERIQRKSHRQVELLSPIPKPQEEKKVQEEEKPKPTPEEKKEEAQIVMTVLKVGMHCEACSQEIKRRIQRMKGVESAEPDLQNSQVSVKGVYDPAKLVEYVYKRTGKHAVIMKQEPEKKEKVEEAKEEEMKSDGEGEENKEKKEKEEAKGEEAKAEEPTTPTITEDTNKVVPEVKINEYFYNPPRYGMEVYAYPAHPAHPAYFHSYPPQIFSDENPNACTVM

SEQ ID NO: 53865 - protein, 175 aa, Glycine max
  peptide (1)..(175): Ceres Seq. ID no. 14304986
  misc_feature (1)..(111): Pfam Name: Caldesmon Pfam Description: Caldesmon
  misc_feature (140)..(175): Homolog of NCBI NO: 15233023 NR Description: copper-binding protein - related [Arabidopsis
  misc_feature (1)..(87): Homolog of NCBI NO: 15233023 NR Description: copper-binding protein - related [Arabidopsis
  misc_feature (1)..(174): Homolog of NCBI NO: 18420811 NR Description: copper-binding protein family [Arabidopsis
  misc_feature (1)..(27): Homolog of NCBI NO: 15241256 NR Description: copper chaperone (CCH)-related [Arabidopsis
  misc_feature (1)..(174): Homolog of NCBI NO: 21594005 NR Description: unknown [Arabidopsis thaliana]
  misc_feature (1)..(93): Homolog of NCBI NO: 37532382 NR Description: putative ATFP3 [Oryza sativa (japonica
  misc_feature (1)..(104): Homolog of NCBI NO: 38344582 NR Description: OSJNBa0053B21.14 [Oryza sativa (japonica
  misc_feature (1)..(175): Homolog of NCBI NO: 4097547 NR Description: ATFP3 [Arabidopsis thaliana]
  misc_feature (1)..(175): Homolog of NCBI NO: 9758294 NR Description: contains similarity to ATFP3~gene_id:MLE2.16
  misc_feature (1)..(175): Homolog of NCBI NO: 18424719 NR Description: copper chaperone (CCH)-related [Arabidopsis
MTVLKVGMHCEACSQEIKRRIQRMKGVESAEPDLQNSQVSVKGVYDPAKLVEYVYKRTGKHAVIMKQEPEKKEKVEEAKEEEMKSDGEGEENKEKKEKEEAKGEEAKAEEPTTPTITEDTNKVVPEVKINEYFYNPPRYGMEVYAYPAHPAHPAYFHSYPPQIFSDENPNACTVM

SEQ ID NO: 53866 - DNA, 1371 bp, Glycine max
  misc_feature (1)..(1371): Ceres Seq. ID no. 14306733
ggagacccttcattcacctatcagagacaaagcgctctctctccaaaaaaaaaaaaaactcgctaaattacaaaaatctcttcaaatcctctcaaccgaaaccctaatcataaaaccctagattttactttatttgtttccctcaatcgaatcgattttccccttccgaaaaccctaattccttcctcgctatcgaagatggacatcgagcagaagcaatcggagctcatagaccacttcgtcaagcgtgcctccgcggcctccgacgccgctgcactatcctccgttctcgtcgaagccacttctcacccttcgctcttcgctttctccgagattctcgctctgcccaatcttcttcagcttgaagcaactgagaattctgcttatcttgatatgcttcggttgtttgcacatggaacatggaatgattacaagagtaatgctgaccgtcttccacaattgatacctgatcagatcctcaagcttaagcaacttacagttcttacactggctgagacatataaggtactaccctatgaccaactgatgcaggagttagatgtgacaaatgttcgtgagcttgaagattttctaattaatgaatgcatgtatgcgggaatagttcgaggaaagttggatcagttgcggcggtgctttgaggtccaatttgcagctggtagggacttgaggcctgatcaactagggaatatgatacagactctctctaactggttgtctacatcagaaaatatgcttgtttcaattcaagagaagataaaatgggctgatgcaatgagtgaaattgacaagaagcacaggaaggatgtggaagagaaggtagaagaagtaaagaagtccattttcaaggccgacatcgacttcagagggcatgaggagatctgctctgaatctggtggagtgatggattatgaagaagatcgaagccgaccaaagaggaggcggcatccaatttcttgaagatttagtagataagggagctcattggagatgggttctttagttgcttgcctgacttttattcatggcatgcgtcaacagaggatatcagcttttgcagacagacaagtatatctcatcgatattgcccttgtctgtcacaccacaaagcgagatagggacaaggaaaaaaaggagggaaaacctgttaatttaggaaattgatagtgtttcttgaaccattatttaatcgtctactgagttggcaataacaagctgagatggtggtgcggctatttatttgcggttgctgaatgctatatatactgttttgttttgtattatgctgatatatttgctgcctcaattgcgttgttatactttgtggtgaatatatatattccaaaattatac

SEQ ID NO: 53867 - protein, 259 aa, Glycine max
  peptide (1)..(259): Ceres Seq. ID no. 14306734
  misc_feature (61)..(157): Pfam Name: PCI domain Pfam Description: PCI domain
  misc_feature (1)..(259): Homolog of NCBI NO: 22024078 NR Description: CG2038-PA [Drosophila melanogaster]
  misc_feature (11)..(252): Homolog of NCBI NO: 31239493 NR Description: ENSANGP00000011626 [Anopheles gambiae]
  misc_feature (1)..(221): Homolog of NCBI NO: 37589772 NR Description: Unknown (protein for IMAGE:4786730) [Danio rerio]
  misc_feature (4)..(221): Homolog of NCBI NO: 34877558 NR Description: similar to Cops7b protein [Rattus norvegicus]
  misc_feature (4)..(221): Homolog of NCBI NO: 3309176 NR Description: COP9 complex subunit 7b [Mus musculus]
  misc_feature (4)..(221): Homolog of NCBI NO: 27764886 NR Description: COP9 (constitutive photomorphogenic) homolog,
  misc_feature (4)..(221): Homolog of NCBI NO: 15215085 NR Description: Cops7b protein [Mus musculus]
  misc_feature (4)..(221): Homolog of NCBI NO: 12232385 NR Description: COP9 constitutive photomorphogenic homolog
  misc_feature (1)..(221): Homolog of NCBI NO: 30678240 NR Description: COP9 complex subunit, FUS5 [Arabidopsis thaliana]
  misc_feature (1)..(259): Homolog of NCBI NO: 18378920 NR Description: COP9 complex subunit, FUS5 [Arabidopsis thaliana]
MDIEQKQSELIDHFVKRASAASDAAALSSVLVEATSHPSLFAFSEILALPNLLQLEATENSAYLDMLRLFAHGTWNDYKSNADRLPQLIPDQILKLKQLTVLTLAETYKVLPYDQLMQELDVTNVRELEDFLINECMYAGIVRGKLDQLRRCFEVQFAAGRDLRPDQLGNMIQTLSNWLSTSENMLVSIQEKIKWADAMSEIDKKHRKDVEEKVEEVKKSIFKADIDFRGHEEICSESGGVMDYEEDRSRPKRRRHPIS

SEQ ID NO: 53868 - protein, 194 aa, Glycine max
  peptide (1)..(194): Ceres Seq. ID no. 14306735
  misc_feature (1)..(92): Pfam Name: PCI domain Pfam Description: PCI domain
  misc_feature (1)..(194): Homolog of NCBI NO: 22024078 NR Description: CG2038-PA [Drosophila melanogaster]
  misc_feature (1)..(187): Homolog of NCBI NO: 31239493 NR Description: ENSANGP00000011626 [Anopheles gambiae]
  misc_feature (1)..(156): Homolog of NCBI NO: 37589772 NR Description: Unknown (protein for IMAGE:4786730) [Danio rerio]
  misc_feature (1)..(156): Homolog of NCBI NO: 34877558 NR Description: similar to Cops7b protein [Rattus norvegicus]
  misc_feature (1)..(156): Homolog of NCBI NO: 3309176 NR Description: COP9 complex subunit 7b [Mus musculus]
  misc_feature (1)..(156): Homolog of NCBI NO: 27764886 NR Description: COP9 (constitutive photomorphogenic) homolog,
  misc_feature (1)..(156): Homolog of NCBI NO: 15215085 NR Description: Cops7b protein [Mus musculus]
  misc_feature (1)..(156): Homolog of NCBI NO: 12232385 NR Description: COP9 constitutive photomorphogenic homolog
  misc_feature (1)..(156): Homolog of NCBI NO: 30678240 NR Description: COP9 complex subunit, FUS5 [Arabidopsis thaliana]
  misc_feature (1)..(194): Homolog of NCBI NO: 18378920 NR Description: COP9 complex subunit, FUS5 [Arabidopsis thaliana]
MLRLFAHGTWNDYKSNADRLPQLIPDQILKLKQLTVLTLAETYKVLPYDQLMQELDVTNVRELEDFLINECMYAGIVRGKLDQLRRCFEVQFAAGRDLRPDQLGNMIQTLSNWLSTSENMLVSIQEKIKWADAMSEIDKKHRKDVEEKVEEVKKSIFKADIDFRGHEEICSESGGVMDYEEDRSRPKRRRHPIS

SEQ ID NO: 53869 - protein, 143 aa, Glycine max
  peptide (1)..(143): Ceres Seq. ID no. 14306736
  misc_feature (1)..(143): Homolog of NCBI NO: 22024078 NR Description: CG2038-PA [Drosophila melanogaster]
  misc_feature (1)..(136): Homolog of NCBI NO: 31239493 NR Description: ENSANGP00000011626 [Anopheles gambiae]
  misc_feature (1)..(105): Homolog of NCBI NO: 37589772 NR Description: Unknown (protein for IMAGE:4786730) [Danio rerio]
  misc_feature (1)..(105): Homolog of NCBI NO: 34877558 NR Description: similar to Cops7b protein [Rattus norvegicus]
  misc_feature (1)..(105): Homolog of NCBI NO: 3309176 NR Description: COP9 complex subunit 7b [Mus musculus]
  misc_feature (1)..(105): Homolog of NCBI NO: 27764886 NR Description: COP9 (constitutive photomorphogenic) homolog,
  misc_feature (1)..(105): Homolog of NCBI NO: 15215085 NR Description: Cops7b protein [Mus musculus]
  misc_feature (1)..(105): Homolog of NCBI NO: 12232385 NR Description: COP9 constitutive photomorphogenic homolog
  misc_feature (1)..(105): Homolog of NCBI NO: 30678240 NR Description: COP9 complex subunit, FUS5 [Arabidopsis thaliana]
  misc_feature (1)..(143): Homolog of NCBI NO: 18378920 NR Description: COP9 complex subunit, FUS5 [Arabidopsis thaliana]
MQELDVTNVRELEDFLINECMYAGIVRGKLDQLRRCFEVQFAAGRDLRPDQLGNMIQTLSNWLSTSENMLVSIQEKIKWADAMSEIDKKHRKDVEEKVEEVKKSIFKADIDFRGHEEICSESGGVMDYEEDRSRPKRRRHPIS

SEQ ID NO: 53870 - DNA, 1360 bp, Glycine max
  misc_feature (1)..(1360): Ceres Seq. ID no. 14306410
aaaaactcagacaaccacacaaatattagaacctctctttctccctcaccacaaccaccaccaccaccatttgagcttctttccaacattaatcctgcaaacgacaattacatgtataatggcactgttcaaagtagtgtcattcagaaggacttgactagtttggagaaaattgaagaaggtttagcgcaagcacgggcctcaattcaggaatatatcctatcaaggaactatacttcacaaaggagagaaagttttgtccccaaaggatccatttaccgaaatccccatgcttttctccagagccacatagagatggtgaaaagattcaaggtgtgggtttaccaagaaggggaacaaccattagtacatgatggtccagtaaacaacatatatgcgattgaaggtcaatttatggacgaaatagacaataatgataagtggagccaattcagggcaagacatcctgaggaggcacatgtgtttttccttccattcagcattgccaatgtggttcactatgtctacaagcctatcctaaagcaatctgactacgaacctgtccgtttgcaactcttggttgaagactatattagtgttattgaagataaatatccttactggaatagaagcaaaggtgcagaccattttttgctttcgtgtcatgattgggctccaaaagtttccaatggcaatcctgaactttttcaaagtttcattagggcactttgcaatgctaacacttcagaagggtttcatccaaatagagatgtgtccatccctgaagtgtacttgcctgttggaaagctaggtccgccgagcctaggccagcacccaaacagccgcactatattggcttttttcgcaggaggggtccatggagaaattagaaaaatatttttaaaacattggaaggacaaagataatgaagtgcgagttcatgaatatcttccaaaaagtcaaaattacacaaaattaatgggacaaagcaagttttgcttgtgccctagtgggcatgaagttgcaagtcccagagtggttgaagcaattcatgctgggtgtgtgcccgtaataatttgtgataattattctctacctttcagtgatgtgctgcattggagtcaattttcagtgaaggtttcggtacaaaaaataccagaaatcaaaagtatattacaaagtatttcaaggaaaaagtacttgagattgcacatgaatgtgttaagagttcgaagacactttatgattaatcggccagcaaaaccatttgatatgatgcatatgattcttcactcaatttggctgagaaggctaaacataaagttgattgcttcataattaatcaccagccattttccat

SEQ ID NO: 53871 - protein, 445 aa, Glycine max
  peptide (1)..(445): Ceres Seq. ID no. 14306411
  misc_feature (112)..(407): Pfam Name: Exostosin family Pfam Description: Exostosin family
  misc_feature (2)..(443): Homolog of NCBI NO: 15231488 NR Description: Exostosin family [Arabidopsis thaliana]
  misc_feature (49)..(444): Homolog of NCBI NO: 34394611 NR Description: putative pectin-glucuronyltransferase
  misc_feature (29)..(442): Homolog of NCBI NO: 15237526 NR Description: expressed protein [Arabidopsis thaliana]
  misc_feature (29)..(442): Homolog of NCBI NO: 9758008 NR Description: contains similarity to limonene
  misc_feature (106)..(442): Homolog of NCBI NO: 15238967 NR Description: Exostosin family [Arabidopsis thaliana]
  misc_feature (106)..(442): Homolog of NCBI NO: 15241301 NR Description: Exostosin family [Arabidopsis thaliana]
  misc_feature (107)..(442): Homolog of NCBI NO: 11358246 NR Description: hypothetical protein T27B3.50 - Arabidopsis
  misc_feature (106)..(442): Homolog of NCBI NO: 30690502 NR Description: Exostosin family [Arabidopsis thaliana]
  misc_feature (106)..(442): Homolog of NCBI NO: 15146187 NR Description: AT5g33290/F19N2_10 [Arabidopsis thaliana]
  misc_feature (107)..(442): Homolog of NCBI NO: 15242798 NR Description: Exostosin family [Arabidopsis thaliana]
KNSDNHTNIRTSLSPSPQPPPPPFELLSNINPANDNYMYNGTVQSSVIQKDLTSLEKIEEGLAQARASIQEYILSRNYTSQRRESFVPKGSIYRNPHAFLQSHIEMVKRFKVWVYQEGEQPLVHDGPVNNIYAIEGQFMDEIDNNDKWSQFRARHPEEAHVFFLPFSIANVVHYVYKPILKQSDYEPVRLQLLVEDYISVIEDKYPYWNRSKGADHFLLSCHDWAPKVSNGNPELFQSFIRALCNANTSEGFHPNRDVSIPEVYLPVGKLGPPSLGQHPNSRTILAFFAGGVHGEIRKIFLKHWKDKDNEVRVHEYLPKSQNYTKLMGQSKFCLCPSGHEVASPRVVEAIHAGCVPVIICDNYSLPFSDVLHWSQFSVKVSVQKIPEIKSILQSISRKKYLRLHMNVLRVRRHFMINRPAKPFDMMHMILHSIWLRRLNIKLIAS

SEQ ID NO: 53872 - protein, 408 aa, Glycine max
  peptide (1)..(408): Ceres Seq. ID no. 14306412
  misc_feature (75)..(370): Pfam Name: Exostosin family Pfam Description: Exostosin family
  misc_feature (1)..(406): Homolog of NCBI NO: 15231488 NR Description: Exostosin family [Arabidopsis thaliana]
  misc_feature (12)..(407): Homolog of NCBI NO: 34394611 NR Description: putative pectin-glucuronyltransferase
  misc_feature (1)..(405): Homolog of NCBI NO: 15237526 NR Description: expressed protein [Arabidopsis thaliana]
  misc_feature (1)..(405): Homolog of NCBI NO: 9758008 NR Description: contains similarity to limonene
  misc_feature (69)..(405): Homolog of NCBI NO: 15238967 NR Description: Exostosin family [Arabidopsis thaliana]
  misc_feature (69)..(405): Homolog of NCBI NO: 15241301 NR Description: Exostosin family [Arabidopsis thaliana]
  misc_feature (70)..(405): Homolog of NCBI NO: 11358246 NR Description: hypothetical protein T27B3.50 - Arabidopsis
  misc_feature (69)..(405): Homolog of NCBI NO: 30690502 NR Description: Exostosin family [Arabidopsis thaliana]
  misc_feature (69)..(405): Homolog of NCBI NO: 15146187 NR Description: AT5g33290/F19N2_10 [Arabidopsis thaliana]
  misc_feature (70)..(405): Homolog of NCBI NO: 15242798 NR Description: Exostosin family [Arabidopsis thaliana]
MYNGTVQSSVIQKDLTSLEKIEEGLAQARASIQEYILSRNYTSQRRESFVPKGSIYRNPHAFLQSHIEMVKRFKVWVYQEGEQPLVHDGPVNNIYAIEGQFMDEIDNNDKWSQFRARHPEEAHVFFLPFSIANVVHYVYKPILKQSDYEPVRLQLLVEDYISVIEDKYPYWNRSKGADHFLLSCHDWAPKVSNGNPELFQSFIRALCNANTSEGFHPNRDVSIPEVYLPVGKLGPPSLGQHPNSRTILAFFAGGVHGEIRKIFLKHWKDKDNEVRVHEYLPKSQNYTKLMGQSKFCLCPSGHEVASPRVVEAIHAGCVPVIICDNYSLPFSDVLHWSQFSVKVSVQKIPEIKSILQSISRKKYLRLHMNVLRVRRHFMINRPAKPFDMMHMILHSIWLRRLNIKLIAS

SEQ ID NO: 53873 - protein, 340 aa, Glycine max
  peptide (1)..(340): Ceres Seq. ID no. 14306413
  misc_feature (7)..(302): Pfam Name: Exostosin family Pfam Description: Exostosin family
  misc_feature (1)..(338): Homolog of NCBI NO: 15231488 NR Description: Exostosin family [Arabidopsis thaliana]
  misc_feature (1)..(339): Homolog of NCBI NO: 34394611 NR Description: putative pectin-glucuronyltransferase
  misc_feature (1)..(337): Homolog of NCBI NO: 15237526 NR Description: expressed protein [Arabidopsis thaliana]
  misc_feature (1)..(337): Homolog of NCBI NO: 9758008 NR Description: contains similarity to limonene
  misc_feature (1)..(337): Homolog of NCBI NO: 15238967 NR Description: Exostosin family [Arabidopsis thaliana]
  misc_feature (1)..(337): Homolog of NCBI NO: 15241301 NR Description: Exostosin family [Arabidopsis thaliana]
  misc_feature (2)..(337): Homolog of NCBI NO: 11358246 NR Description: hypothetical protein T27B3.50 - Arabidopsis
  misc_feature (1)..(337): Homolog of NCBI NO: 30690502 NR Description: Exostosin family [Arabidopsis thaliana]
  misc_feature (1)..(337): Homolog of NCBI NO: 15146187 NR Description: AT5g33290/F19N2_10 [Arabidopsis thaliana]
  misc_feature (2)..(337): Homolog of NCBI NO: 15242798 NR Description: Exostosin family [Arabidopsis thaliana]
MVKRFKVWVYQEGEQPLVHDGPVNNIYAIEGQFMDEIDNNDKWSQFRARHPEEAHVFFLPFSIANVVHYVYKPILKQSDYEPVRLQLLVEDYISVIEDKYPYWNRSKGADHFLLSCHDWAPKVSNGNPELFQSFIRALCNANTSEGFHPNRDVSIPEVYLPVGKLGPPSLGQHPNSRTILAFFAGGVHGEIRKIFLKHWKDKDNEVRVHEYLPKSQNYTKLMGQSKFCLCPSGHEVASPRVVEAIHAGCVPVIICDNYSLPFSDVLHWSQFSVKVSVQKIPEIKSILQSISRKKYLRLHMNVLRVRRHFMINRPAKPFDMMHMILHSIWLRRLNIKLIAS

SEQ ID NO: 53874 - DNA, 1053 bp, Glycine max
  misc_feature (1)..(1053): Ceres Seq. ID no. 15177670
atactttccttttgacatatacacagacactcccattgatgttgcaatggagatggtgaaggaattggagatcacagatttgaagccttctgatattgcaaatatgattgaaggagagatatctgtgctgctgccaaataagaggaatagtaactgttcagttatcacgatgacgacgacaacgaatcatcatttccactctgcctcttctcgttcatcatcccaaggatcaatatcaggctcagacagtagagctgatgacttattgaatggagattattggctccatggtgatgtacttgatgatgccagttcaatatgctcctcacatgggacatattccaactcaaacttttgttcagtggatgagcaggaggaaaaccataaggcttctacaagaaaagataaacatctcatcataaagagtcacatgtgcacaagattttcccctaatgaagaccccatcactttgaaccagtgcaaagttttggcaggaccacaagcaccttctactagcaaaaacaagaggatgatggacaatcgtagactaacaaggaacaagtcattgattgatacaaggagccagctactacacagatcactggttgaggaggtgaacaaaagaaggctattcaacacagttggagccgtggaaaatattggatttgtgacaccttatgaggttaccaacaaaaagtcacatccagcatgcggtgcttttgatgtgaactcttctagaagtagcaagagagaaaactttaatagagagaaatttttttagaaatggttgtctcttgagctttggagtcaaagaggagaaaatggataacttctgtgtcatggactagagaaaatgataaggctgatgtgctatggagttattattacacttacaaagaataatggtactatttggaaaaaatcgttgggccatagatatacctaaattattgtattattagggtgttcgatttcaaatgggtgtaaatagaaatacatggaatcctatctcccttaaaatggatcttaataattcaaaaaagattaatcttt

SEQ ID NO: 53875 - protein, 259 aa, Glycine max
  peptide (1)..(259): Ceres Seq. ID no. 15177671
  misc_feature (189)..(225): Homolog of NCBI NO: 34897414 NR Description: hypothetical protein [Oryza sativa (japonica
  misc_feature (168)..(209): Homolog of NCBI NO: 30693513 NR Description: MAP kinase [Arabidopsis thaliana]
  misc_feature (2)..(54): Homolog of NCBI NO: 30693513 NR Description: MAP kinase [Arabidopsis thaliana]
  misc_feature (168)..(209): Homolog of NCBI NO: 11358499 NR Description: MAP kinase - Arabidopsis thaliana
  misc_feature (2)..(54): Homolog of NCBI NO: 11358499 NR Description: MAP kinase - Arabidopsis thaliana
  misc_feature (168)..(209): Homolog of NCBI NO: 14194095 NR Description: AT3g51630/T18N14_10 [Arabidopsis thaliana]
  misc_feature (2)..(54): Homolog of NCBI NO: 14194095 NR Description: AT3g51630/T18N14_10 [Arabidopsis thaliana]
  misc_feature (1)..(259): Homolog of NCBI NO: 27542950 NR Description: mitogen-activated protein kinase [Triticum
  misc_feature (1)..(231): Homolog of NCBI NO: 15237174 NR Description: protein kinase family [Arabidopsis thaliana]
YFPFDIYTDTPIDVAMEMVKELEITDLKPSDIANMIEGEISVLLPNKRNSNCSVITMTTTTNHHFHSASSRSSSQGSISGSDSRADDLLNGDYWLHGDVLDDASSICSSHGTYSNSNFCSVDEQEENHKASTRKDKHLIIKSHMCTRFSPNEDPITLNQCKVLAGPQAPSTSKNKRMMDNRRLTRNKSLIDTRSQLLHRSLVEEVNKRRLFNTVGAVENIGFVTPYEVTNKKSHPACGAFDVNSSRSSKRENFNREKFF

SEQ ID NO: 53876 - protein, 244 aa, Glycine max
  peptide (1)..(244): Ceres Seq. ID no. 15177672
  misc_feature (174)..(210): Homolog of NCBI NO: 34897414 NR Description: hypothetical protein [Oryza sativa (japonica
  misc_feature (153)..(194): Homolog of NCBI NO: 30693513 NR Description: MAP kinase [Arabidopsis thaliana]
  misc_feature (1)..(39): Homolog of NCBI NO: 30693513 NR Description: MAP kinase [Arabidopsis thaliana]
  misc_feature (153)..(194): Homolog of NCBI NO: 11358499 NR Description: MAP kinase - Arabidopsis thaliana
  misc_feature (1)..(39): Homolog of NCBI NO: 11358499 NR Description: MAP kinase - Arabidopsis thaliana
  misc_feature (153)..(194): Homolog of NCBI NO: 14194095 NR Description: AT3g51630/T18N14_10 [Arabidopsis thaliana]
  misc_feature (1)..(39): Homolog of NCBI NO: 14194095 NR Description: AT3g51630/T18N14_10 [Arabidopsis thaliana]
  misc_feature (1)..(244): Homolog of NCBI NO: 27542950 NR Description: mitogen-activated protein kinase [Triticum
  misc_feature (1)..(216): Homolog of NCBI NO: 15237174 NR Description: protein kinase family [Arabidopsis thaliana]
MEMVKELEITDLKPSDIANMIEGEISVLLPNKRNSNCSVITMTTTTNHHFHSASSRSSSQGSISGSDSRADDLLNGDYWLHGDVLDDASSICSSHGTYSNSNFCSVDEQEENHKASTRKDKHLIIKSHMCTRFSPNEDPITLNQCKVLAGPQAPSTSKNKRMMDNRRLTRNKSLIDTRSQLLHRSLVEEVNKRRLFNTVGAVENIGFVTPYEVTNKKSHPACGAFDVNSSRSSKRENFNREKFF

SEQ ID NO: 53877 - protein, 242 aa, Glycine max
  peptide (1)..(242): Ceres Seq. ID no. 15177673
  misc_feature (172)..(208): Homolog of NCBI NO: 34897414 NR Description: hypothetical protein [Oryza sativa (japonica
  misc_feature (151)..(192): Homolog of NCBI NO: 30693513 NR Description: MAP kinase [Arabidopsis thaliana]
  misc_feature (1)..(37): Homolog of NCBI NO: 30693513 NR Description: MAP kinase [Arabidopsis thaliana]
  misc_feature (151)..(192): Homolog of NCBI NO: 11358499 NR Description: MAP kinase - Arabidopsis thaliana
  misc_feature (1)..(37): Homolog of NCBI NO: 11358499 NR Description: MAP kinase - Arabidopsis thaliana
  misc_feature (151)..(192): Homolog of NCBI NO: 14194095 NR Description: AT3g51630/T18N14_10 [Arabidopsis thaliana]
  misc_feature (1)..(37): Homolog of NCBI NO: 14194095 NR Description: AT3g51630/T18N14_10 [Arabidopsis thaliana]
  misc_feature (1)..(242): Homolog of NCBI NO: 27542950 NR Description: mitogen-activated protein kinase [Triticum
  misc_feature (1)..(214): Homolog of NCBI NO: 15237174 NR Description: protein kinase family [Arabidopsis thaliana]
MVKELEITDLKPSDIANMIEGEISVLLPNKRNSNCSVITMTTTTNHHFHSASSRSSSQGSISGSDSRADDLLNGDYWLHGDVLDDASSICSSHGTYSNSNFCSVDEQEENHKASTRKDKHLIIKSHMCTRFSPNEDPITLNQCKVLAGPQAPSTSKNKRMMDNRRLTRNKSLIDTRSQLLHRSLVEEVNKRRLFNTVGAVENIGFVTPYEVTNKKSHPACGAFDVNSSRSSKRENFNREKFF

SEQ ID NO: 53878 - DNA, 2014 bp, Glycine max
  misc_feature (1)..(2014): Ceres Seq. ID no. 14304034
ttttttttttttttttttttttgaagaacctgcaattaatggataaagagcattgtttttagtgacacagaattacaggtatatacgacagtgttacaaaattttcctgactattctcatgttagtagattgggatcagaacagtatttgctcttgatacatctccaatgcttggaaaactttctccatgaacaatttcctgtgcaatctatactttattgcagcttcaagtgtcctcgtagcatctgccattgaatctagcaatttctggtcttgcttagaggttgtagcaaattctgcaagcatcttttgacattcatcttgcaactccttcgcagcctttctttccatgctagggattggaggcacatccccatctgaccaagttggcaatgttcgtgctgcagctatgactgctccatcaacaaaactatctccggcttttgacagacaattattatggtaatactcttcaggaaggccagatatattgaagattgacaagaaggaatccaaatgaatacgcgcattgcctgagaatttgatcttgtcccaaggattcacgggtgatgaaaatccatatctttgcatgaacatgtcattcttctgagcactcatgtaattaactgtcatctcatctcccttcctaatctgctgtccagcatttataagaacctcaagcatcctgtccttaaaacgccaatggaaaaaacaatttggctcaaatgaatggttcagcatatcagcataaggaatcagcatatttgcttcttgatttagagcaccaattctcgtttgcatgttaatacatcgtgactgtgcaatacctactgcccaagcaaacctttgaggatcacgcgcaagacgctttattttaaggggtacatcactgtgccagttattctcccagaattctaaggatcgttgttgctgttttctaatgtttaatgaatccacatgggaaaaaagatagtgtatgtttgctcatagtggtctttcaagaagattagtatttaataatagtatgttataaagaaataggtattaaaatggcaaaaacacaagatatataaggttgattcactgttgacatccttttagtaattaattgttgtatgcatggttatccatacatcatcttcatggatttgactgttcttcctttctttgtgtaccttgaaatcagcatgctcaaaacacttgaaaggtaccagaaatgcagttatggtgctgtggaagttaccaaacctgccaaagagctcgagagcagctatcgtgaatacttgaagctgaaagcaagatttgaatcacttcaaaggactcaaagaaaccttctaggggaagacctgggcccactgaataccaaagaacttgagcatcttgaacggcaattggattcatctctaaagcaagtgaggtccacaaagacacaattcatgctggaccagttatctgatcttcaaactaaggagcagatgttggtagaagcaaacagatccttgacagtgaagctggaagaaatcaattcaagaaaccactacaggcaatcatgggaagctggtgatcaaagtatgccatacggtggtggtccacagaattctcactctcatcagggcttcttccagccattggaatgcaaccctacattgcagattggtcctgattacaggtacaatgatgtagcttcagatcagataactgccacaactcaacctcaacaagtgagtggctttattccagggtggatgctgtgaaattaggctcagtattcagttggagacataaaagcaaacaccttacaaaagggcaaagccaaaaatgcatcttggtgttggcaaggtgtaaatgtaaccctgcttctattattattttggtataagaaacagatgtgttgtgacttgttcaaacttgtgagaacctttttagccatagacatatggcaatttataacattcggaatcttttgaaggatccttttttattattaaaatatccgagcgaccggtttcaattt

SEQ ID NO: 53879 - protein, 212 aa, Glycine max; identical to SEQ ID NO: 53651
  peptide (1)..(212): Ceres Seq. ID no. 14304035
  misc_feature (37)..(135): Pfam Name: K-box region Pfam Description: K-box region
  misc_feature (24)..(212): Homolog of NCBI NO: 81610 NR Description: MADS box protein AGL2 - Arabidopsis thaliana
  misc_feature (24)..(212): Homolog of NCBI NO: 32478027 NR Description: SEPALLATA1-like MADS-box [Heuchera americana]
  misc_feature (24)..(212): Homolog of NCBI NO: 3646336 NR Description: MdMADS9 [Malus x domestica]
  misc_feature (24)..(212): Homolog of NCBI NO: 28372802 NR Description: transcription factor MAGL4 [Populus tremuloides]
  misc_feature (24)..(212): Homolog of NCBI NO: 28372976 NR Description: Apetala 1 protein [Populus tremuloides]
  misc_feature (24)..(212): Homolog of NCBI NO: 3646334 NR Description: MdMADS8 [Malus x domestica]
  misc_feature (24)..(212): Homolog of NCBI NO: 20385584 NR Description: MADS-box protein 2 [Vitis vinifera]
  misc_feature (24)..(212): Homolog of NCBI NO: 7488622 NR Description: MADS box protein 1 - apple tree
  misc_feature (24)..(212): Homolog of NCBI NO: 6683777 NR Description: CAGL2 [Cucumis sativus]
  misc_feature (24)..(212): Homolog of NCBI NO: 13810202 NR Description: MADS2 protein [Cucumis sativus]

SEQ ID NO: 53880 - protein, 203 aa, Glycine max; identical to SEQ ID NO: 53652
  peptide (1)..(203): Ceres Seq. ID no. 14304036
  misc_feature (28)..(126): Pfam Name: K-box region Pfam Description: K-box region
  misc_feature (15)..(203): Homolog of NCBI NO: 81610 NR Description: MADS box protein AGL2 - Arabidopsis thaliana
  misc_feature (15)..(203): Homolog of NCBI NO: 32478027 NR Description: SEPALLATA1-like MADS-box [Heuchera americana]
  misc_feature (15)..(203): Homolog of NCBI NO: 3646336 NR Description: MdMADS9 [Malus x domestica]
  misc_feature (15)..(203): Homolog of NCBI NO: 28372802 NR Description: transcription factor MAGL4 [Populus tremuloides]
  misc_feature (15)..(203): Homolog of NCBI NO: 28372976 NR Description: Apetala 1 protein [Populus tremuloides]
  misc_feature (15)..(203): Homolog of NCBI NO: 3646334 NR Description: MdMADS8 [Malus x domestica]
  misc_feature (15)..(203): Homolog of NCBI NO: 20385584 NR Description: MADS-box protein 2 [Vitis vinifera]
  misc_feature (15)..(203): Homolog of NCBI NO: 7488622 NR Description: MADS box protein 1 - apple tree
  misc_feature (15)..(203): Homolog of NCBI NO: 6683777 NR Description: CAGL2 [Cucumis sativus]
  misc_feature (15)..(203): Homolog of NCBI NO: 13810202 NR Description: MADS2 protein [Cucumis sativus]

SEQ ID NO: 53881 - protein, 188 aa, Glycine max; identical to SEQ ID NO: 53653
  peptide (1)..(188): Ceres Seq. ID no. 14304037
  misc_feature (13)..(111): Pfam Name: K-box region Pfam Description: K-box region
  misc_feature (1)..(188): Homolog of NCBI NO: 81610 NR Description: MADS box protein AGL2 - Arabidopsis thaliana
  misc_feature (1)..(188): Homolog of NCBI NO: 32478027 NR Description: SEPALLATA1-like MADS-box [Heuchera americana]
  misc_feature (1)..(188): Homolog of NCBI NO: 3646336 NR Description: MdMADS9 [Malus x domestica]
  misc_feature (1)..(188): Homolog of NCBI NO: 28372802 NR Description: transcription factor MAGL4 [Populus tremuloides]
  misc_feature (1)..(188): Homolog of NCBI NO: 28372976 NR Description: Apetala 1 protein [Populus tremuloides]
  misc_feature (1)..(188): Homolog of NCBI NO: 3646334 NR Description: MdMADS8 [Malus x domestica]
  misc_feature (1)..(188): Homolog of NCBI NO: 20385584 NR Description: MADS-box protein 2 [Vitis vinifera]
  misc_feature (1)..(188): Homolog of NCBI NO: 7488622 NR Description: MADS box protein 1 - apple tree
  misc_feature (1)..(188): Homolog of NCBI NO: 6683777 NR Description: CAGL2 [Cucumis sativus]
  misc_feature (1)..(188): Homolog of NCBI NO: 13810202 NR Description: MADS2 protein [Cucumis sativus]

SEQ ID NO: 53882 - DNA, 1313 bp, Glycine max
  misc_feature (1)..(1313): Ceres Seq. ID no. 14303811
ggtcaatccacaatctttagttgttgccaacctcctctagggttcctctgtttcttaactttcttcacatcaatggcaaagaagagaaccgcacctcagaagaagacccagatgatgaatcccatgccaaaacattctcaacagccaagaagctcacctcctaaacgccgcactgatttctctttcttcacgcgctctccctcctccttctccaaccctacttctggttcctcaccagattcatcttctggtgaagtgaggttgtccaatgttgcttcaagctgtttgcaggggaggagaatggcaatgaaacaattttctgaagatatgctggttcgatgcagcttttaccaagagggtagaccggtatgttcatctgagtcttttgatactccagttgtggaagttgattcagctgttcaagatgaaagtctcaaccttggtggacatagggatgcttgcaatgaaaaaattaatatttccaagatgtcagaatctacccctcttgaatcatctgtcagtgatagcagttctcttgctgtaactcctggaagtgttgtatgggcgaggacagattctcaagtgtggtggcctgctgagatcatggaagaaacatctgtgctatccaaccctggcaatgatggacatgttttagtgcagttttatggaaatcttcccagtgcctggattgatccaatgacagatatttcaacttttgaggattcttttgaagacaggagcaacaacccttcagaagattttcaaaaggctttaaagcaggccttacagaggaaggcacaacttagttcttgccaaaagttgactcctgataggtctgctcactatgatctgcaagaacgttcatctgataaatgcacttcaactagcacaagcaaaacaattgatgatgttcaagagagacggagagggaaaagggaacgtaaaccgaaagttcactttgatgaggtaacatatccaatgaaatcagaaacaaaggttcgtcggttgaagataatgcggtacctcggccttgcacctccagttggttctcccttttgagttttgaccatgatcacaagtaatgcatatttcaaatgtttgcagcctaacagctgtagttgaccctcccttttttaaccataataatcatgaaatatggatattttaaaaaaatgcttctatttcttgccattagctatgtaaaattttctaggattatatagtctcatagtattacattactatctgtaaaaaccatataagaatttcacggaatatcagattagttctctaataaaagttcaatttagcac

SEQ ID NO: 53883 - protein, 352 aa, Glycine max
  peptide (1)..(352): Ceres Seq. ID no. 14303812
  misc_feature (184)..(257): Pfam Name: PWWP domain Pfam Description: PWWP domain
GQSTIFSCCQPPLGFLCFLTFFTSMAKKRTAPQKKTQMMNPMPKHSQQPRSSPPKRRTDFSFFTRSPSSFSNPTSGSSPDSSSGEVRLSNVASSCLQGRRMAMKQFSEDMLVRCSFYQEGRPVCSSESFDTPVVEVDSAVQDESLNLGGHRDACNEKINISKMSESTPLESSVSDSSSLAVTPGSVVWARTDSQVWWPAEIMEETSVLSNPGNDGHVLVQFYGNLPSAWIDPMTDISTFEDSFEDRSNNPSEDFQKALKQALQRKAQLSSCQKLTPDRSAHYDLQERSSDKCTSTSTSKTIDDVQERRRGKRERKPKVHFDEVTYPMKSETKVRRLKIMRYLGLAPPVGSPF

SEQ ID NO: 53884 - protein, 328 aa, Glycine max
  peptide (1)..(328): Ceres Seq. ID no. 14303813
  misc_feature (160)..(233): Pfam Name: PWWP domain Pfam Description: PWWP domain
MAKKRTAPQKKTQMMNPMPKHSQQPRSSPPKRRTDFSFFTRSPSSFSNPTSGSSPDSSSGEVRLSNVASSCLQGRRMAMKQFSEDMLVRCSFYQEGRPVCSSESFDTPVVEVDSAVQDESLNLGGHRDACNEKINISKMSESTPLESSVSDSSSLAVTPGSVVWARTDSQVWWPAEIMEETSVLSNPGNDGHVLVQFYGNLPSAWIDPMTDISTFEDSFEDRSNNPSEDFQKALKQALQRKAQLSSCQKLTPDRSAHYDLQERSSDKCTSTSTSKTIDDVQERRRGKRERKPKVHFDEVTYPMKSETKVRRLKIMRYLGLAPPVGSPF

SEQ ID NO: 53885 - protein, 315 aa, Glycine max
  peptide (1)..(315): Ceres Seq. ID no. 14303814
  misc_feature (147)..(220): Pfam Name: PWWP domain Pfam Description: PWWP domain
MMNPMPKHSQQPRSSPPKRRTDFSFFTRSPSSFSNPTSGSSPDSSSGEVRLSNVASSCLQGRRMAMKQFSEDMLVRCSFYQEGRPVCSSESFDTPVVEVDSAVQDESLNLGGHRDACNEKINISKMSESTPLESSVSDSSSLAVTPGSVVWARTDSQVWWPAEIMEETSVLSNPGNDGHVLVQFYGNLPSAWIDPMTDISTFEDSFEDRSNNPSEDFQKALKQALQRKAQLSSCQKLTPDRSAHYDLQERSSDKCTSTSTSKTIDDVQERRRGKRERKPKVHFDEVTYPMKSETKVRRLKIMRYLGLAPPVGSPF

SEQ ID NO: 53886 - DNA, 1082 bp, Glycine max
  misc_feature (1)..(1082): Ceres Seq. ID no. 14304561
gatggtatcataaaaatctcacccttttctgcaactttctctctgacacacaccgaacactcaaacacacacagtgtgcagcagcagcagcaacaacaagagaagaagatggctctgcaactatgggagacattgaaggaggccatagttgcctacacggggctctccccgcccaccttcttcacccttctggccctgatcctagccctatactacgtcgtttctgggctcttcccctcttccgaccaccgccacaacaccgcctcgcgcgacttggagccccagatggagcctctgcgaccccccgttcagatcggcgaggtcaccgaggacgacctcaaggcctacgacggcaccgatcccgagaagcctctcctcatggccatcaagggccagatctatgatgtttcccagagcagaatgttttatggacctggtggaccctatgctctatttgctggcaaggatgctagcagagctttagcaaaaatgtcttttgaagagaaagatctaactggagatatctctggtcttggaccgtttgagcttgaggccttgcaagactgggaatacaaatttatgggcaagtatgtaaaagttggaaccgtaacaaagacagttccagtaactgaaccagaatccactgctgaaccatcagaatctactccccatgatgaatcttcaaagcctactgaagatgatggcccatcagaatcagcagctgctaaaaatgatgaaaccccttcaaaggttgatgcagataaagagtaataatcgttggataaagagtaattgtcttgcaaattctcttgcaaacagtggaaacggttacttagaagcttctgagaaatactgagccttgctgaatgtattcagcaaatgtgggacaaagtttgcctaagtattctgtttgataaataaggaaatcttggtatttaatttcagttttcctgggtttatagcttcttcttgtattccataagatctatattacttagaggcaacaaatcaatgaacatttgagaccatgtactgagccaagtattgaatgaatgcatttggtcttatatatggtatggtat

SEQ ID NO: 53887 - protein, 256 aa, Glycine max
  peptide (1)..(256): Ceres Seq. ID no. 14304562
  misc_feature (107)..(203): Pfam Name: Cytochrome b5-like Heme/Steroid binding domain Pfam Description: Cytochrome b5-like Heme/Steroid binding domain
  misc_feature (107)..(203): Homolog of NCBI NO: 40889041 NR Description: Chain A, Solution Structure Of A Putative
  misc_feature (107)..(203): Homolog of NCBI NO: 15224648 NR Description: cytochrome b5 domain-containing protein
  misc_feature (55)..(246): Homolog of NCBI NO: 18859969 NR Description: CG9066-PA [Drosophila melanogaster]
  misc_feature (28)..(253): Homolog of NCBI NO: 31204709 NR Description: ENSANGP00000017486 [Anopheles gambiae]
  misc_feature (35)..(225): Homolog of NCBI NO: 37535794 NR Description: putative steroid membrane binding protein
  misc_feature (37)..(221): Homolog of NCBI NO: 4960154 NR Description: putative progesterone-binding protein homolog
  misc_feature (37)..(256): Homolog of NCBI NO: 15242943 NR Description: cytochrome b5 domain-containing protein
  misc_feature (37)..(256): Homolog of NCBI NO: 4960156 NR Description: putative progesterone-binding protein homolog
  misc_feature (37)..(255): Homolog of NCBI NO: 15229044 NR Description: cytochrome b5 domain-containing protein
  misc_feature (40)..(253): Homolog of NCBI NO: 37535798 NR Description: putative steroid membrane binding protein
DGIIKISPFSATFSLTHTEHSNTHSVQQQQQQQEKKMALQLWETLKEAIVAYTGLSPPTFFTLLALILALYYVVSGLFPSSDHRHNTASRDLEPQMEPLRPPVQIGEVTEDDLKAYDGTDPEKPLLMAIKGQIYDVSQSRMFYGPGGPYALFAGKDASRALAKMSFEEKDLTGDISGLGPFELEALQDWEYKFMGKYVKVGTVTKTVPVTEPESTAEPSESTPHDESSKPTEDDGPSESAAAKNDETPSKVDADKE

SEQ ID NO: 53888 - protein, 220 aa, Glycine max
  peptide (1)..(220): Ceres Seq. ID no. 14304563
  misc_feature (71)..(167): Pfam Name: Cytochrome b5-like Heme/Steroid binding domain Pfam Description: Cytochrome b5-like Heme/Steroid binding domain
  misc_feature (71)..(167): Homolog of NCBI NO: 40889041 NR Description: Chain A, Solution Structure Of A Putative
  misc_feature (71)..(167): Homolog of NCBI NO: 15224648 NR Description: cytochrome b5 domain-containing protein
  misc_feature (19)..(210): Homolog of NCBI NO: 18859969 NR Description: CG9066-PA [Drosophila melanogaster]
  misc_feature (1)..(217): Homolog of NCBI NO: 31204709 NR Description: ENSANGP00000017486 [Anopheles gambiae]
  misc_feature (1)..(189): Homolog of NCBI NO: 37535794 NR Description: putative steroid membrane binding protein
  misc_feature (1)..(185): Homolog of NCBI NO: 4960154 NR Description: putative progesterone-binding protein homolog
  misc_feature (1)..(220): Homolog of NCBI NO: 15242943 NR Description: cytochrome b5 domain-containing protein
  misc_feature (1)..(220): Homolog of NCBI NO: 4960156 NR Description: putative progesterone-binding protein homolog
  misc_feature (1)..(219): Homolog of NCBI NO: 15229044 NR Description: cytochrome b5 domain-containing protein
  misc_feature (4)..(217): Homolog of NCBI NO: 37535798 NR Description: putative steroid membrane binding protein
MALQLWETLKEAIVAYTGLSPPTFFTLLALILALYYVVSGLFPSSDHRHNTASRDLEPQMEPLRPPVQIGEVTEDDLKAYDGTDPEKPLLMAIKGQIYDVSQSRMFYGPGGPYALFAGKDASRALAKMSFEEKDLTGDISGLGPFELEALQDWEYKFMGKYVKVGTVTKTVPVTEPESTAEPSESTPHDESSKPTEDDGPSESAAAKNDETPSKVDADKE

SEQ ID NO: 53889 - protein, 161 aa, Glycine max
  peptide (1)..(161): Ceres Seq. ID no. 14304564
  misc_feature (12)..(108): Pfam Name: Cytochrome b5-like Heme/Steroid binding domain Pfam Description: Cytochrome b5-like Heme/Steroid binding domain
  misc_feature (12)..(108): Homolog of NCBI NO: 40889041 NR Description: Chain A, Solution Structure Of A Putative
  misc_feature (12)..(108): Homolog of NCBI NO: 15224648 NR Description: cytochrome b5 domain-containing protein
  misc_feature (1)..(151): Homolog of NCBI NO: 18859969 NR Description: CG9066-PA [Drosophila melanogaster]
  misc_feature (1)..(158): Homolog of NCBI NO: 31204709 NR Description: ENSANGP00000017486 [Anopheles gambiae]
  misc_feature (1)..(130): Homolog of NCBI NO: 37535794 NR Description: putative steroid membrane binding protein
  misc_feature (1)..(126): Homolog of NCBI NO: 4960154 NR Description: putative progesterone-binding protein homolog
  misc_feature (1)..(161): Homolog of NCBI NO: 15242943 NR Description: cytochrome b5 domain-containing protein
  misc_feature (1)..(161): Homolog of NCBI NO: 4960156 NR Description: putative progesterone-binding protein homolog
  misc_feature (1)..(160): Homolog of NCBI NO: 15229044 NR Description: cytochrome b5 domain-containing protein
  misc_feature (1)..(158): Homolog of NCBI NO: 37535798 NR Description: putative steroid membrane binding protein
MEPLRPPVQIGEVTEDDLKAYDGTDPEKPLLMAIKGQIYDVSQSRMFYGPGGPYALFAGKDASRALAKMSFEEKDLTGDISGLGPFELEALQDWEYKFMGKYVKVGTVTKTVPVTEPESTAEPSESTPHDESSKPTEDDGPSESAAAKNDETPSKVDADKE

SEQ ID NO: 53890 - DNA, 1588 bp, Glycine max
  misc_feature (1)..(1588): Ceres Seq. ID no. 14303770
tcagctacgtaccccccccgcctgaacctgatcgatctctttaccagttgccacactacaccgagattccccctaaacccgtttgcgttgttgtttgcgaagaaatggcgactaagaggagcgtgggaacgttgaaggagggtgatttgaaagggaagagggtgttcgtgagggtcgatctgaacgtgcctttggatgacaaccttaacatcaccgatgacactagagtccgtgctgctgttcccaccatcaagtacttaactggtcatggagccaaagtgatcctttctagccacttgggacgtcctaaaggtgtaacacctaaatacagtttgaagcctcttgtgccaaggctgtctcaacttctcggaattgaggttacgatggcaaatgactctattggggaggaagttgagaagttggttgcacaacttccagaaggtggtgttttgcttctagagaatgtgaggttctataaggaggaagagaagaatgaccctgagtttgcaaagaagttggcttctcttgctgatctctacgtgaatgatgctttcggcactgcccacagagctcatgcttctacagaaggagtggccaaatacttgaagccctctgttgcaggattccttatgcagaaggaacttgactatctagttggagctgtgtcaaaccccaagagaccatttgctgctatcgttggtgggtcaaaggtgtcttccaagattggagttattgagtccttgttggagaaagttaacgttctcttgcttggtggaggaatgatctttaccttttacaaggctcagggttattcagttggttcatctcttgtggaggaagacaagcttagccttgcaactacacttctcgaaaaggccaaggctaaaggggtttctttgttgcttccaactgatgtggtcatagcagacaagtttgctgctgatgctaacagcaagactgtgccagcatcaagcatcccagacgggtggatgggattagatattggtcccgattccatcaagacatttggtgaagcattggataagacccagaccgtcatttggaatggaccaatgggtgtttttgagtttgataagtttgccacaggaacagaggccatagccaagaaactggcagagctgagtgggaagggagtaacgaccatcattggaggaggtgactctgttgccgctgtggagaaggttggtcttgcagacaagatgagccacatctccactggtggtggtgccagcttagagcttcttgaggggaagcaactccctggtgtccttgcccttgatgatgcttgagtaaacatcactagttcctctgtaatttgtgctttatattattattatggttggatttcagccaacagtggattgaggtacaatgagagagctcttgttgctcctgtagaggcttaatataggttaggtttcgaaataagagggttttgtggcatccttggtgttgcattgagctttgatctaattgttcttgaacaatgttcatttcaaaaggagttttactttgttagttatgttcctttagttttatcagtgaccaattttcaacttttcgtgtt

SEQ ID NO: 53891 - protein, 435 aa, Glycine max
  peptide (1)..(435): Ceres Seq. ID no. 14303771
  misc_feature (37)..(435): Pfam Name: Phosphoglycerate kinase Pfam Description: Phosphoglycerate kinase
  misc_feature (26)..(435): Homolog of NCBI NO: 7434544 NR Description: phosphoglycerate kinase (EC 2.7.2.3) precursor,
  misc_feature (25)..(435): Homolog of NCBI NO: 2499497 NR Description: Phosphoglycerate kinase, chloroplast precursor
  misc_feature (38)..(434): Homolog of NCBI NO: 3738261 NR Description: chloroplast phosphoglycerate kinase [Populus
  misc_feature (35)..(435): Homolog of NCBI NO: 3738259 NR Description: cytosolic phosphoglycerate kinase 1 [Populus
  misc_feature (35)..(435): Homolog of NCBI NO: 29124969 NR Description: 3-phosphoglycerate kinase [Populus tremuloides]
  misc_feature (35)..(435): Homolog of NCBI NO: 15219412 NR Description: phosphoglycerate kinase -related [Arabidopsis
  misc_feature (35)..(435): Homolog of NCBI NO: 3738257 NR Description: cytosolic phosphoglycerate kinase 1 [Populus
  misc_feature (35)..(435): Homolog of NCBI NO: 21536853 NR Description: phosphoglycerate kinase, putative [Arabidopsis
  misc_feature (35)..(435): Homolog of NCBI NO: 2499498 NR Description: Phosphoglycerate kinase, cytosolic
  misc_feature (35)..(435): Homolog of NCBI NO: 9230771 NR Description: cytosolic phosphoglycerate kinase [Pisum sativum]
SYVPPPPEPDRSLYQLPHYTEIPPKPVCVVVCEEMATKRSVGTLKEGDLKGKRVFVRVDLNVPLDDNLNITDDTRVRAAVPTIKYLTGHGAKVILSSHLGRPKGVTPKYSLKPLVPRLSQLLGIEVTMANDSIGEEVEKLVAQLPEGGVLLLENVRFYKEEEKNDPEFAKKLASLADLYVNDAFGTAHRAHASTEGVAKYLKPSVAGFLMQKELDYLVGAVSNPKRPFAAIVGGSKVSSKIGVIESLLEKVNVLLLGGGMIFTFYKAQGYSVGSSLVEEDKLSLATTLLEKAKAKGVSLLLPTDVVIADKFAADANSKTVPASSIPDGWMGLDIGPDSIKTFGEALDKTQTVIWNGPMGVFEFDKFATGTEAIAKKLAELSGKGVTTIIGGGDSVAAVEKVGLADKMSHISTGGGASLELLEGKQLPGVLALDDA

SEQ ID NO: 53892 - protein, 401 aa, Glycine max
  peptide (1)..(401): Ceres Seq. ID no. 14303772
  misc_feature (3)..(401): Pfam Name: Phosphoglycerate kinase Pfam Description: Phosphoglycerate kinase
  misc_feature (1)..(401): Homolog of NCBI NO: 7434544 NR Description: phosphoglycerate kinase (EC 2.7.2.3) precursor,
  misc_feature (1)..(401): Homolog of NCBI NO: 2499497 NR Description: Phosphoglycerate kinase, chloroplast precursor
  misc_feature (4)..(400): Homolog of NCBI NO: 3738261 NR Description: chloroplast phosphoglycerate kinase [Populus
  misc_feature (1)..(401): Homolog of NCBI NO: 3738259 NR Description: cytosolic phosphoglycerate kinase 1 [Populus
  misc_feature (1)..(401): Homolog of NCBI NO: 29124969 NR Description: 3-phosphoglycerate kinase [Populus tremuloides]
  misc_feature (1)..(401): Homolog of NCBI NO: 15219412 NR Description: phosphoglycerate kinase -related [Arabidopsis
  misc_feature (1)..(401): Homolog of NCBI NO: 3738257 NR Description: cytosolic phosphoglycerate kinase 1 [Populus
  misc_feature (1)..(401): Homolog of NCBI NO: 21536853 NR Description: phosphoglycerate kinase, putative [Arabidopsis
  misc_feature (1)..(401): Homolog of NCBI NO: 2499498 NR Description: Phosphoglycerate kinase, cytosolic
  misc_feature (1)..(401): Homolog of NCBI NO: 9230771 NR Description: cytosolic phosphoglycerate kinase [Pisum sativum]
MATKRSVGTLKEGDLKGKRVFVRVDLNVPLDDNLNITDDTRVRAAVPTIKYLTGHGAKVILSSHLGRPKGVTPKYSLKPLVPRLSQLLGIEVTMANDSIGEEVEKLVAQLPEGGVLLLENVRFYKEEEKNDPEFAKKLASLADLYVNDAFGTAHRAHASTEGVAKYLKPSVAGFLMQKELDYLVGAVSNPKRPFAAIVGGSKVSSKIGVIESLLEKVNVLLLGGGMIFTFYKAQGYSVGSSLVEEDKLSLATTLLEKAKAKGVSLLLPTDVVIADKFAADANSKTVPASSIPDGWMGLDIGPDSIKTFGEALDKTQTVIWNGPMGVFEFDKFATGTEAIAKKLAELSGKGVTTIIGGGDSVAAVEKVGLADKMSHISTGGGASLELLEGKQLPGVLALDDA

SEQ ID NO: 53893 - protein, 308 aa, Glycine max
  peptide (1)..(308): Ceres Seq. ID no. 14303773
  misc_feature (1)..(308): Pfam Name: Phosphoglycerate kinase Pfam Description: Phosphoglycerate kinase
  misc_feature (1)..(308): Homolog of NCBI NO: 7434544 NR Description: phosphoglycerate kinase (EC 2.7.2.3) precursor,
  misc_feature (1)..(308): Homolog of NCBI NO: 2499497 NR Description: Phosphoglycerate kinase, chloroplast precursor
  misc_feature (1)..(307): Homolog of NCBI NO: 3738261 NR Description: chloroplast phosphoglycerate kinase [Populus
  misc_feature (1)..(308): Homolog of NCBI NO: 3738259 NR Description: cytosolic phosphoglycerate kinase 1 [Populus
  misc_feature (1)..(308): Homolog of NCBI NO: 29124969 NR Description: 3-phosphoglycerate kinase [Populus tremuloides]
  misc_feature (1)..(308): Homolog of NCBI NO: 15219412 NR Description: phosphoglycerate kinase -related [Arabidopsis
  misc_feature (1)..(308): Homolog of NCBI NO: 3738257 NR Description: cytosolic phosphoglycerate kinase 1 [Populus
  misc_feature (1)..(308): Homolog of NCBI NO: 21536853 NR Description: phosphoglycerate kinase, putative [Arabidopsis
  misc_feature (1)..(308): Homolog of NCBI NO: 2499498 NR Description: Phosphoglycerate kinase, cytosolic
  misc_feature (1)..(308): Homolog of NCBI NO: 9230771 NR Description: cytosolic phosphoglycerate kinase [Pisum sativum]
MANDSIGEEVEKLVAQLPEGGVLLLENVRFYKEEEKNDPEFAKKLASLADLYVNDAFGTAHRAHASTEGVAKYLKPSVAGFLMQKELDYLVGAVSNPKRPFAAIVGGSKVSSKIGVIESLLEKVNVLLLGGGMIFTFYKAQGYSVGSSLVEEDKLSLATTLLEKAKAKGVSLLLPTDVVIADKFAADANSKTVPASSIPDGWMGLDIGPDSIKTFGEALDKTQTVIWNGPMGVFEFDKFATGTEAIAKKLAELSGKGVTTIIGGGDSVAAVEKVGLADKMSHISTGGGASLELLEGKQLPGVLALDDA

SEQ ID NO: 53894 - DNA, 1202 bp, Glycine max
  misc_feature (1)..(1202): Ceres Seq. ID no. 15174883
attttactaccagtgagtggagtttgtagacagtagtagaaagggaaagagggttgatagaagagaagggtttaggattttgcacaactcactcatggaggaggaagaagccccagacgttatatgcgagctggaaaacgttcaaggcttagtggacgccctcaccgccgttcggtggaagcgccagcaggacgccgtgttggagttgtccgaacacggcattgttttgatcgtcgaagaaagcggttgcctccaagccaaggtttatctcaaacgagagttattcattcgttacgattacaacgcacgaggaggacgacctcgttttggagtgagtttggggcatttcgtagattgcttgaacgccttctcggttcctgctggtcaatcaatatcaagccttgttcagattcaatatccgggtcctgacatgcagcttcttctcaaatctgtagattcgctggatgccagtatttgtgcagagatcaggacaaggattccagatacaattgcatgggactacaattttgaacctgcaggggcaaaccctttaacctttactgttaaatctgcagctctgaaggaagctattgaggatcttgaatggcctggatcaagcatcaagattactctagagccagatcctccttctgtttcattaagagctgaaggacatggagacttgcagatagacttcatgtattatgtgaattccgaactcctggtggcatttcagtgtgatcatcaagcttctttcaagtacaaatataagttcctcagagcaacaacttctaatatgcctagcagtgttattaaagaaaatagaggaagtaagttaagcattgggagaggtggaatgttaaaagtccagcatctggtttcaattgccaaaccatctgtgtcacacccatatgctgattcggttggctatcagcaaccaagtagaatagctcatattgaattctttgtgaaaccagaggaaagtgaggactgagtgaatgattattagttactataaagactccgtcaagttttgctatgcaaaccattaacttcgcaaaagaattacaaaatggtttgtattcagaatgttgatcaaagaggtattttgcagaaaaatcctcgtttaatctgagttttagacggaacaagcttggtaaggccactgaaacttaaaacagaatcgtagcaatgttgctcag

SEQ ID NO: 53895 - protein, 299 aa, Glycine max
  peptide (1)..(299): Ceres Seq. ID no. 15174884
  misc_feature (108)..(245): Pfam Name: Repair protein Rad1/Rec1/Rad17 Pfam Description: Repair protein Rad1/Rec1/Rad17
  misc_feature (46)..(299): Homolog of NCBI NO: 7452416 NR Description: hypothetical protein dl4915w - Arabidopsis
  misc_feature (3)..(299): Homolog of NCBI NO: 30684177 NR Description: expressed protein [Arabidopsis thaliana]
  misc_feature (3)..(299): Homolog of NCBI NO: 11875164 NR Description: hypothetical protein [Oryza sativa (japonica
MEEEEAPDVICELENVQGLVDALTAVRWKRQQDAVLELSEHGIVLIVEESGCLQAKVYLKRELFIRYDYNARGGRPRFGVSLGHFVDCLNAFSVPAGQSISSLVQIQYPGPDMQLLLKSVDSLDASICAEIRTRIPDTIAWDYNFEPAGANPLTFTVKSAALKEAIEDLEWPGSSIKITLEPDPPSVSLRAEGHGDLQIDFMYYVNSELLVAFQCDHQASFKYKYKFLRATTSNMPSSVIKENRGSKLSIGRGGMLKVQHLVSIAKPSVSHPYADSVGYQQPSRIAHIEFFVKPEESED

SEQ ID NO: 53896 - protein, 187 aa, Glycine max
  peptide (1)..(187): Ceres Seq. ID no. 15174885
  misc_feature (1)..(133): Pfam Name: Repair protein Rad1/Rec1/Rad17 Pfam Description: Repair protein Rad1/Rec1/Rad17
  misc_feature (1)..(187): Homolog of NCBI NO: 7452416 NR Description: hypothetical protein dl4915w - Arabidopsis
  misc_feature (1)..(187): Homolog of NCBI NO: 30684177 NR Description: expressed protein [Arabidopsis thaliana]
  misc_feature (1)..(187): Homolog of NCBI NO: 11875164 NR Description: hypothetical protein [Oryza sativa (japonica
MQLLLKSVDSLDASICAEIRTRIPDTIAWDYNFEPAGANPLTFTVKSAALKEAIEDLEWPGSSIKITLEPDPPSVSLRAEGHGDLQIDFMYYVNSELLVAFQCDHQASFKYKYKFLRATTSNMPSSVIKENRGSKLSIGRGGMLKVQHLVSIAKPSVSHPYADSVGYQQPSRIAHIEFFVKPEESED

SEQ ID NO: 53897 - DNA, 1478 bp, Glycine max
  misc_feature (1)..(1478): Ceres Seq. ID no. 14305019
atattttttatgttaaattttattgttggctaaggctagagtatctgtatctatcaaaaacaaatcagcaattgagaagatgtcactgtattttctatattacctatagttgttttctttctttaaaataatatccctggtaaggggaactagtcaacaactggttaattggcctcaaatacatcagtttttctgcaactattgctggtggtgatgcatctctcgatgggagctttgtgatttaaaggttcgattagttgctgacaaagatataaataagcccaggggttatgctttcattgagtatctgcatacaagagacatgaaagctgcttataaacaagctgatggtaggaaaattgatggtagaagggtgcttgtggatgttgagcgtgggaggactgttccaaattggagaccccgtcgcttaggtggtggacttggtaccactagagttggaggtgaagaagttaatcagcgacattctgggagggagcaacaacagtctcgttctgaagaaccgagagtgcgagaggaccgacacgctgatagagacagggaaatatcacgtgaaagaggtagggacaaagacagagaacgggagcgatcacgtgaacattctcatgaaagggtcagggatcgtgatcatagggaggataggcaccacagagaccgggataggaacagggacagagaccgagacagggaaagagatagagatcgtgggcgtgatcgagatagaacacgggaccgtgatcgtgagcgagggagggaccgtgatcgggatcgagaatatgatcgacatcgtgagagggatagagattatgaagttggtgaccctgatcgaggacgctcacgtgatagggagtctgattatgatcgtgttgaatctaaacatggggaaaggaatcatgactatgaacctgaggatgatcgtggtaggcataaccagtatgaacatggacgtaggcatgcagaccctgatcatgaccctgagcggtatgaccactacaatcatggagatgaccatggtgaccattacaatcagtatcgtgaccatgatgggatggaagatgactaccatgctggacgtgcaacatctgaatcgcatgaaaaggagagaagtcatgatgtggaccgtgaatatcaacgctcagagagatcacattcccgggagtatgattattaggacttgggcatagttcttctcaactttgttggtaagattttataatttggtatgtttacttttgaatcttgctcacctgccggtattggtagttgttgaatggattaaggcacagtgtgatcattaaaaagaaaactgtagctgctgctatccatatggcccatatttgaaagctgccttttgtcaacgtggacttggacatctaatattggtatttgtttggcatttgtgttgttttcttctgacattttatgaaattaaacatctaatattggtatttgattttggc

SEQ ID NO: 53898 - protein, 288 aa, Glycine max
  peptide (1)..(288): Ceres Seq. ID no. 14305020
  misc_feature (73)..(265): Pfam Name: SART-1 family Pfam Description: SART-1 family
  misc_feature (1)..(257): Homolog of NCBI NO: 13633918 NR Description: U1 small nuclear ribonucleoprotein 70 kDa (U1
  misc_feature (1)..(255): Homolog of NCBI NO: 337445 NR Description: ribonucleoprotein antigen
  misc_feature (1)..(255): Homolog of NCBI NO: 29568103 NR Description: U1 small nuclear ribonucleoprotein 70 kDa
  misc_feature (1)..(255): Homolog of NCBI NO: 88959 NR Description: U1 snRNP 70K protein - human
  misc_feature (1)..(206): Homolog of NCBI NO: 34856077 NR Description: similar to U1 small nuclear ribonucleoprotein 70
  misc_feature (1)..(239): Homolog of NCBI NO: 31200081 NR Description: ENSANGP00000020311 [Anopheles gambiae]
  misc_feature (1)..(213): Homolog of NCBI NO: 322618 NR Description: U1 snRNP 70K protein - Arabidopsis thaliana
  misc_feature (1)..(280): Homolog of NCBI NO: 134091 NR Description: U1 small nuclear ribonucleoprotein 70 kDa (U1
  misc_feature (1)..(228): Homolog of NCBI NO: 15229825 NR Description: U1 small nuclear ribonucleoprotein 70 (U1-70k)
  misc_feature (1)..(242): Homolog of NCBI NO: 37530562 NR Description: putative U1 small nuclear ribonucleoprotein
MKAAYKQADGRKIDGRRVLVDVERGRTVPNWRPRRLGGGLGTTRVGGEEVNQRHSGREQQQSRSEEPRVREDRHADRDREISRERGRDKDRERERSREHSHERVRDRDHREDRHHRDRDRNRDRDRDRERDRDRGRDRDRTRDRDRERGRDRDRDREYDRHRERDRDYEVGDPDRGRSRDRESDYDRVESKHGERNHDYEPEDDRGRHNQYEHGRRHADPDHDPERYDHYNHGDDHGDHYNQYRDHDGMEDDYHAGRATSESHEKERSHDVDREYQRSERSHSREYDY

SEQ ID NO: 53899 - protein, 192 aa, Glycine max
  peptide (1)..(192): Ceres Seq. ID no. 14305021
MKGSGIVIIGRIGTTETGIGTGTETETGKEIEIVGVIEIEHGTVIVSEGGTVIGIENMIDIVRGIEIMKLVTLIEDAHVIGSLIMIVLNLNMGKGIMTMNLRMIVVGITSMNMDVGMQTLIMTLSGMTTTIMEMTMVTITISIVTMMGWKMTTMLDVQHLNRMKRREVMMWTVNINAQRDHIPGSMIIRTWA

SEQ ID NO: 53900 - DNA, 1201 bp, Glycine max
  misc_feature (1)..(1201): Ceres Seq. ID no. 15176415
tgttaacctaattaagcttgctttaagttttatttgattggctttatgtgacttcaataaaagctcaattactcaagtgctgtttgtttgtttttttattttttttgccagctggttgatttgatgcatgcaaattcacaatgcgtttgtaacccctattttggttttattaaaggagattttgggttttcaagttattaggagcttgaacacaagagtataatatcatcatatatctcaatatctcatgctctcttcaaagttctgatctacgatttcatttgttcactttggtgctttctttaatagcaattgttggggacataactccattggatggaggttctaaagcagaaaagaatcaacgagaacaggcaacactagatcatatgtgtaaagtacttggaggaggatgtacaagtactttcttttcactatacatgagtttgttaatgagataataatgaaaattcacaactcttggtctttaaaaggtgagttacatattgatgcaaaggcatttcctctttaatttggaaattttcatatacaacatgtcattcttggtcattgtagtagtgtctgaaattggttgacaagctagctagttgttaaaacttaattaaaactattctgtattagtttcattatattttgccattgttgtagtctctcttagtcaggagttcgacttgtagtttgaatgatgtgataagaagagaaagaaacataagccatttgtacttgggcacacttgcaccaattatattaattatttttgtcttcctccgttaacagcgatagtcagttttacttgtgccttgaggaggaggaggagtaattttataccaagttgttcagtatcttatctaaagtttgttgagtttgctttggatgaaaccaaacgtcacactcacttgatcccttcgcctttacaggaaaagttcagtttcatgaattccaaggatgttaaagggagtcttagtatgctatcatttgaagctacaaaaattaggcttctacgaagattgatcattgagacagaaacaatgcaagtggtttttttaatgcccatcaattatcaaattgatatatggttggtatctactagtgtcttaacaaaatatgcctttgtgtagtaccttgtaatctattacaacaataacaatttcaaaatttgactttgtatttatttgtgccg

SEQ ID NO: 53901 - protein, 61 aa, Glycine max
  peptide (1)..(61): Ceres Seq. ID no. 15176416
  misc_feature (1)..(35): Homolog of NCBI NO: 21618130 NR Description: unknown [Arabidopsis thaliana]
  misc_feature (1)..(35): Homolog of NCBI NO: 30680787 NR Description: auxin-regulated protein [Arabidopsis thaliana]
  misc_feature (1)..(35): Homolog of NCBI NO: 22330928 NR Description: auxin-regulated protein [Arabidopsis thaliana]
MNSKDVKGSLSMLSFEATKIRLLRRLIIETETMQVVFLMPINYQIDIWLVSTSVLTKYAFV

SEQ ID NO: 53902 - protein, 50 aa, Glycine max
  peptide (1)..(50): Ceres Seq. ID no. 15176417
  misc_feature (1)..(24): Homolog of NCBI NO: 21618130 NR Description: unknown [Arabidopsis thaliana]
  misc_feature (1)..(24): Homolog of NCBI NO: 30680787 NR Description: auxin-regulated protein [Arabidopsis thaliana]
  misc_feature (1)..(24): Homolog of NCBI NO: 22330928 NR Description: auxin-regulated protein [Arabidopsis thaliana]
MLSFEATKIRLLRRLIIETETMQVVFLMPINYQIDIWLVSTSVLTKYAFV

SEQ ID NO: 53903 - protein, 39 aa, Glycine max
  peptide (1)..(39): Ceres Seq. ID no. 15176418
MYKYFLFTIHEFVNEIIMKIHNSWSLKGELHIDAKAFPL

SEQ ID NO: 53904 - DNA, 1368 bp, Glycine max
  misc_feature (1)..(1368): Ceres Seq. ID no. 14306970
ggtggatctccccaagcatagagcatgttagtcacgttagcagcgggcaagttggtccggcggcaccttccccttttctttcggctgttccatcttcaaaaccgtgggctcggatcttcaaaatcaaaacgaatttccattcgttatcatataaatacctcatcttcatccccaaaaccactttcagtttcagaacacaaagcaatggtggcgctcctagtggcaactacatccgaccctgcttccatcaacccggccaacgcgcttttgggcatgcccgggtggaaacccggtccccatttccaggatgatatgaagagctatgtgaatgaaggggtgagggtgttggtacatgggaagagcatagttgcggaagatgagttggacaagaggtgggaagaagttactggggaggttattgatgaagtgatcttcttcagcaagcacactgctgcctccaacaagcctgccctgactgttcaccctattggagttcctcatttgcgccaaggcgatgttcccccccaaggcggcagacctggatgggcagctcttccaaatcctaggatggggccttggcttcgccttttgaaaaaccttgcccaagctcataatcttgtccctgaatttgagattactttagaggccactcaccatggaccgttgaccaataagccaaccatgtttttggagattggtagtactgaagactattggaagagacaggatgctgctcaagttatggcacagttagtatgggaaggacttggacttggaggtgtgtcagatgtaggaaactggagcagggagaatgataacaagaaaatccttcttgggataggtggtggacattatgcacctcggcatgtggatgtagtattgaaagataatgtatgggtgggtcacctactttctggatattcgctgccaatggaagatccaaaccagtcaaaaggagaaaaaaatgtggagattggtggaacatggagacagtctataaaagctgcatatgaagccacttattctgcatttcctggtggtgaaattcttgcacatctagaccacaagagtttcaagggctggcagaagaatgccataacaggattccttgcggagcaaaacattaaaattggaaaacccaataacttctattgagtggatgctatgtgaacaacatagcttctgcagagtgcggaatgagtcaggctgaagattttggtagatcatactagcaatttaattcagttttcttgagatcacagtgatagttaatgaataactgaagtttgagataaactgatatatacataaatccaattctgatgaaaaacaatatttgcaattacatcaattaaaaccatatatagc

SEQ ID NO: 53905 - protein, 376 aa, Glycine max
  peptide (1)..(376): Ceres Seq. ID no. 14306971
  misc_feature (110)..(372): Pfam Name: Protein of unknown function (DUF516) Pfam Description: Protein of unknown function (DUF516)
  misc_feature (186)..(303): Homolog of NCBI NO: 14520224 NR Description: hypothetical protein [Pyrococcus abyssi]
  misc_feature (64)..(288): Homolog of NCBI NO: 18978354 NR Description: hypothetical protein PF1982 [Pyrococcus furiosus
  misc_feature (92)..(297): Homolog of NCBI NO: 13540908 NR Description: Uncharacterized conserved protein [Thermoplasma
  misc_feature (107)..(306): Homolog of NCBI NO: 16081204 NR Description: hypothetical protein [Thermoplasma acidophilum]
  misc_feature (119)..(316): Homolog of NCBI NO: 15668338 NR Description: conserved hypothetical protein [Methanococcus
  misc_feature (64)..(300): Homolog of NCBI NO: 11498233 NR Description: conserved hypothetical protein [Archaeoglobus
  misc_feature (64)..(324): Homolog of NCBI NO: 14589968 NR Description: hypothetical protein PH0006 [Pyrococcus
  misc_feature (130)..(299): Homolog of NCBI NO: 22406443 NR Description: hypothetical protein [Ferroplasma acidarmanus]
  misc_feature (61)..(376): Homolog of NCBI NO: 38636945 NR Description: putative GEKO1 [Oryza sativa (japonica
  misc_feature (42)..(375): Homolog of NCBI NO: 15227708 NR Description: expressed protein [Arabidopsis thaliana]
MLVTLAAGKLVRRHLPLFFRLFHLQNRGLGSSKSKRISIRYHINTSSSSPKPLSVSEHKAMVALLVATTSDPASINPANALLGMPGWKPGPHFQDDMKSYVNEGVRVLVHGKSIVAEDELDKRWEEVTGEVIDEVIFFSKHTAASNKPALTVHPIGVPHLRQGDVPPQGGRPGWAALPNPRMGPWLRLLKNLAQAHNLVPEFEITLEATHHGPLTNKPTMFLEIGSTEDYWKRQDAAQVMAQLVWEGLGLGGVSDVGNWSRENDNKKILLGIGGGHYAPRHVDVVLKDNVWVGHLLSGYSLPMEDPNQSKGEKNVEIGGTWRQSIKAAYEATYSAFPGGEILAHLDHKSFKGWQKNAITGFLAEQNIKIGKPNNFY

SEQ ID NO: 53906 - protein, 316 aa, Glycine max
  peptide (1)..(316): Ceres Seq. ID no. 14306972
  misc_feature (50)..(312): Pfam Name: Protein of unknown function (DUF516) Pfam Description: Protein of unknown function (DUF516)
  misc_feature (126)..(243): Homolog of NCBI NO: 14520224 NR Description: hypothetical protein [Pyrococcus abyssi]
  misc_feature (4)..(228): Homolog of NCBI NO: 18978354 NR Description: hypothetical protein PF1982 [Pyrococcus furiosus
  misc_feature (32)..(237): Homolog of NCBI NO: 13540908 NR Description: Uncharacterized conserved protein [Thermoplasma
  misc_feature (47)..(246): Homolog of NCBI NO: 16081204 NR Description: hypothetical protein [Thermoplasma acidophilum]
  misc_feature (59)..(256): Homolog of NCBI NO: 15668338 NR Description: conserved hypothetical protein [Methanococcus
  misc_feature (4)..(240): Homolog of NCBI NO: 11498233 NR Description: conserved hypothetical protein [Archaeoglobus
  misc_feature (4)..(264): Homolog of NCBI NO: 14589968 NR Description: hypothetical protein PH0006 [Pyrococcus
  misc_feature (70)..(239): Homolog of NCBI NO: 22406443 NR Description: hypothetical protein [Ferroplasma acidarmanus]
  misc_feature (1)..(316): Homolog of NCBI NO: 38636945 NR Description: putative GEKO1 [Oryza sativa (japonica
  misc_feature (1)..(315): Homolog of NCBI NO: 15227708 NR Description: expressed protein [Arabidopsis thaliana]
MVALLVATTSDPASINPANALLGMPGWKPGPHFQDDMKSYVNEGVRVLVHGKSIVAEDELDKRWEEVTGEVIDEVIFFSKHTAASNKPALTVHPIGVPHLRQGDVPPQGGRPGWAALPNPRMGPWLRLLKNLAQAHNLVPEFEITLEATHHGPLTNKPTMFLEIGSTEDYWKRQDAAQVMAQLVWEGLGLGGVSDVGNWSRENDNKKILLGIGGGHYAPRHVDVVLKDNVWVGHLLSGYSLPMEDPNQSKGEKNVEIGGTWRQSIKAAYEATYSAFPGGEILAHLDHKSFKGWQKNAITGFLAEQNIKIGKPNNFY

SEQ ID NO: 53907 - protein, 293 aa, Glycine max
  peptide (1)..(293): Ceres Seq. ID no. 14306973
  misc_feature (27)..(289): Pfam Name: Protein of unknown function (DUF516) Pfam Description: Protein of unknown function (DUF516)
  misc_feature (103)..(220): Homolog of NCBI NO: 14520224 NR Description: hypothetical protein [Pyrococcus abyssi]
  misc_feature (1)..(205): Homolog of NCBI NO: 18978354 NR Description: hypothetical protein PF1982 [Pyrococcus furiosus
  misc_feature (9)..(214): Homolog of NCBI NO: 13540908 NR Description: Uncharacterized conserved protein [Thermoplasma
  misc_feature (24)..(223): Homolog of NCBI NO: 16081204 NR Description: hypothetical protein [Thermoplasma acidophilum]
  misc_feature (36)..(233): Homolog of NCBI NO: 15668338 NR Description: conserved hypothetical protein [Methanococcus
  misc_feature (1)..(217): Homolog of NCBI NO: 11498233 NR Description: conserved hypothetical protein [Archaeoglobus
  misc_feature (1)..(241): Homolog of NCBI NO: 14589968 NR Description: hypothetical protein PH0006 [Pyrococcus
  misc_feature (47)..(216): Homolog of NCBI NO: 22406443 NR Description: hypothetical protein [Ferroplasma acidarmanus]
  misc_feature (1)..(293): Homolog of NCBI NO: 38636945 NR Description: putative GEKO1 [Oryza sativa (japonica
  misc_feature (1)..(292): Homolog of NCBI NO: 15227708 NR Description: expressed protein [Arabidopsis thaliana]
MPGWKPGPHFQDDMKSYVNEGVRVLVHGKSIVAEDELDKRWEEVTGEVIDEVIFFSKHTAASNKPALTVHPIGVPHLRQGDVPPQGGRPGWAALPNPRMGPWLRLLKNLAQAHNLVPEFEITLEATHHGPLTNKPTMFLEIGSTEDYWKRQDAAQVMAQLVWEGLGLGGVSDVGNWSRENDNKKILLGIGGGHYAPRHVDVVLKDNVWVGHLLSGYSLPMEDPNQSKGEKNVEIGGTWRQSIKAAYEATYSAFPGGEILAHLDHKSFKGWQKNAITGFLAEQNIKIGKPNNFY

SEQ ID NO: 53908 - DNA, 1091 bp, Glycine max
  misc_feature (1)..(1091): Ceres Seq. ID no. 15172672
aatactgctacaaaccataacacaaagtcccttcatttattgattccacaaaatcaaatctcccactaccaacaacactgccaccactaaagcactgacaactctccttcactccaccactcctcactcttctcattcagatctacccaacacacacacaccaaaaaataaaataaaaatgcaactccaacccactctctccactctctacctctcccttttgttaacaataacgttaacatctccaaccttggcagcacaaagcaagccgcaggatctggtccggtcctcgtgcgtgcacgcgcggtacccgcgtctgtgcctgcgcaccctctcgaactacccgggtcccgccaacacgccgttagacgtggccagggcagctttgagggtaagcctggcccacacgcgccgggcctccaaattcctccatgcactttctcatggaggcgctgccgccatgagcaagcgccagcgctccgcgctgcgcgactgtaatgaacagatttcggactccgtcgaccagctgcggcggagcctcgacgagctgcagcacctgcgctccgagacgttcaagtggcagatgagcaacgccctgacttgggtcagcgccgccctcaccaacggcgacacctgcctcgacggcttcggagggaatgccaggcccgacgtcaaacgcagagtcacggatgtggcgagggttactagcaatgctttgtatatgattaatcggctcgggcaaagtagaaccgggaagcccaagcccaaacccaaacccaggtccaggcctcagcctcgctctgcctcaagtactgaaaaattgaattagatggtctctgctgggttggaaggaagaacgtgggaactgggaagtgaagctacttggtcaagaatagtacgatagtacgtctaagaggtgaaattgtgttgactagtcaattaatcaattaattaggtaacaaccaccgtctattgtcagtgcactgtgaccacatttgctttttttttttttcccttgtgtttttcttgctacaaataagatgtatattactatatatatatattagtataataataataataataataac

SEQ ID NO: 53909 - protein, 216 aa, Glycine max
  peptide (1)..(216): Ceres Seq. ID no. 15172673
  misc_feature (1)..(186): Homolog of NCBI NO: 8096279 NR Description: DC1.2 homologue [Nicotiana tabacum]
  misc_feature (10)..(189): Homolog of NCBI NO: 21618088 NR Description: ripening-related protein-like [Arabidopsis
  misc_feature (1)..(184): Homolog of NCBI NO: 30696750 NR Description: hypothetical protein [Arabidopsis thaliana]
  misc_feature (7)..(185): Homolog of NCBI NO: 7488727 NR Description: 21K protein precursor - alfalfa
  misc_feature (8)..(184): Homolog of NCBI NO: 112717 NR Description: 21 KD PROTEIN PRECURSOR (1.2 PROTEIN)
  misc_feature (12)..(185): Homolog of NCBI NO: 7406663 NR Description: putative ripening-related protein [Vitis vinifera]
  misc_feature (8)..(193): Homolog of NCBI NO: 21618013 NR Description: putative ripening-related protein [Arabidopsis
  misc_feature (8)..(193): Homolog of NCBI NO: 18407657 NR Description: pectinesterase family [Arabidopsis thaliana]
  misc_feature (3)..(194): Homolog of NCBI NO: 21553812 NR Description: ripening-related protein-like [Arabidopsis
  misc_feature (3)..(194): Homolog of NCBI NO: 15242049 NR Description: pectinesterase - related [Arabidopsis thaliana]
MQLQPTLSTLYLSLLLTITLTSPTLAAQSKPQDLVRSSCVHARYPRLCLRTLSNYPGPANTPLDVARAALRVSLAHTRRASKFLHALSHGGAAAMSKRQRSALRDCNEQISDSVDQLRRSLDELQHLRSETFKWQMSNALTWVSAALTNGDTCLDGFGGNARPDVKRRVTDVARVTSNALYMINRLGQSRTGKPKPKPKPRSRPQPRSASSTEKLN

SEQ ID NO: 53910 - protein, 122 aa, Glycine max
  peptide (1)..(122): Ceres Seq. ID no. 15172674
  misc_feature (1)..(92): Homolog of NCBI NO: 8096279 NR Description: DC1.2 homologue [Nicotiana tabacum]
  misc_feature (1)..(95): Homolog of NCBI NO: 21618088 NR Description: ripening-related protein-like [Arabidopsis
  misc_feature (1)..(90): Homolog of NCBI NO: 30696750 NR Description: hypothetical protein [Arabidopsis thaliana]
  misc_feature (1)..(91): Homolog of NCBI NO: 7488727 NR Description: 21K protein precursor - alfalfa
  misc_feature (1)..(90): Homolog of NCBI NO: 112717 NR Description: 21 KD PROTEIN PRECURSOR (1.2 PROTEIN)
  misc_feature (1)..(91): Homolog of NCBI NO: 7406663 NR Description: putative ripening-related protein [Vitis vinifera]
  misc_feature (1)..(99): Homolog of NCBI NO: 21618013 NR Description: putative ripening-related protein [Arabidopsis
  misc_feature (1)..(99): Homolog of NCBI NO: 18407657 NR Description: pectinesterase family [Arabidopsis thaliana]
  misc_feature (1)..(100): Homolog of NCBI NO: 21553812 NR Description: ripening-related protein-like [Arabidopsis
  misc_feature (1)..(100): Homolog of NCBI NO: 15242049 NR Description: pectinesterase - related [Arabidopsis thaliana]
MSKRQRSALRDCNEQISDSVDQLRRSLDELQHLRSETFKWQMSNALTWVSAALTNGDTCLDGFGGNARPDVKRRVTDVARVTSNALYMINRLGQSRTGKPKPKPKPRSRPQPRSASSTEKLN

SEQ ID NO: 53911 - DNA, 1426 bp, Glycine max
  misc_feature (1)..(1426): Ceres Seq. ID no. 14311423
aatatgacaatggttcttcaattctatcttttcctcaccttttcccccctggatacagaatctgtgctggatgcaagactgagattggccaaggaagatttttaagttgcatggggggtgtctggcatccagaatgcttctgctgccatgcatgccatcttccaatcactgattatgagttttccatgtctagcaatcgcccttaccataaatcatgctatagggagaagcatcacccaagatgtgatgtttgcaagaactttatcccaactaattcatctggcctcattgagtatagagctcatcctttctggctacaaaaatactgcccatcacatgagcttgatggcacttctcgttgttgtagttgcgaaagaatggagccaagggatacaaaatatcttttgcttgatgatggtcgaaagctatgtttagagtgtctagactcatcaattatggatactcatgaatgccaacctctttaccttgaaatacaagaattttatgaaggtttaaatatgaaattggagcaacaaattcctatgctcttggttgagagacaagcgctgaatgaggctatggagggagaaaagaatggtcatcaccacttacccgaaactagaggactatgcttgtcagaagagcaaactgtcaccactatttcaaggaggccaaggattgcagcaggctaccgagccatagacatgataactgaaccttataggctgatccgttgttgtgaagtgacagccattcttgttttgtatggccttcctaggttgttaacaggatcaatcctagctcatgagatgatgcatgcatggcttaggcttaaaggttatcctaacctcagtccagaagttgaagaaggaatctgccaagttttggctcatatgtggttagaatcagagctctattctggatttgggaatgatggtgcatcatcctcaacatcatctttgtcttcgtcatcaccttcctcctcttctgtctcaacaaagaagggtaaacggtccgactttgagaagaaacttggtgatttttttaaacaccagattgagtcagatacctcctcagcttatggagatggattcagattgggtaaccaagcaatggtcaagtatgggcttaaaaggacccttgaccatatccatatgacaggaagttttccatattaaaaattgaaaatttgaaagatatgattctctgacctatacaatggccattaccacagcttggttaataaattatatagttcaaagtttccaagatcatatagtttaacattagagaaaataaggaataaaattgctcctcttacgttgcggtcccttaatttcgtgtcaaatgtggcaccgcatgccttatatgtataattaaatactactcaggaactgaagcaatgaaagtatagaattaattttgt

SEQ ID NO: 53912 - protein, 391 aa, Glycine max
  peptide (1)..(391): Ceres Seq. ID no. 14311424
  misc_feature (21)..(78): Pfam Name: LIM domain Pfam Description: LIM domain
  misc_feature (11)..(383): Homolog of NCBI NO: 27808630 NR Description: At5g66630 [Arabidopsis thaliana]
  misc_feature (11)..(383): Homolog of NCBI NO: 30698240 NR Description: expressed protein [Arabidopsis thaliana]
  misc_feature (15)..(391): Homolog of NCBI NO: 22326876 NR Description: disease resistance protein (TIR-NBS-LRR class),
  misc_feature (15)..(383): Homolog of NCBI NO: 15240018 NR Description: hypothetical protein [Arabidopsis thaliana]
  misc_feature (88)..(390): Homolog of NCBI NO: 25407769 NR Description: hypothetical protein AT4g36860 [imported] -
  misc_feature (17)..(390): Homolog of NCBI NO: 29893641 NR Description: hypothetical protein [Oryza sativa (japonica
  misc_feature (18)..(388): Homolog of NCBI NO: 25518496 NR Description: hypothetical protein T29M8.14 - Arabidopsis
  misc_feature (1)..(390): Homolog of NCBI NO: 15221983 NR Description: expressed protein [Arabidopsis thaliana]
  misc_feature (37)..(390): Homolog of NCBI NO: 22329212 NR Description: expressed protein [Arabidopsis thaliana]
  misc_feature (1)..(390): Homolog of NCBI NO: 17065046 NR Description: Unknown protein [Arabidopsis thaliana]
YDNGSSILSFPHLFPPGYRICAGCKTEIGQGRFLSCMGGVWHPECFCCHACHLPITDYEFSMSSNRPYHKSCYREKHHPRCDVCKNFIPTNSSGLIEYRAHPFWLQKYCPSHELDGTSRCCSCERMEPRDTKYLLLDDGRKLCLECLDSSIMDTHECQPLYLEIQEFYEGLNMKLEQQIPMLLVERQALNEAMEGEKNGHHHLPETRGLCLSEEQTVTTISRRPRIAAGYRAIDMITEPYRLIRCCEVTAILVLYGLPRLLTGSILAHEMMHAWLRLKGYPNLSPEVEEGICQVLAHMWLESELYSGFGNDGASSSTSSLSSSSPSSSSVSTKKGKRSDFEKKLGDFFKHQIESDTSSAYGDGFRLGNQAMVKYGLKRTLDHIHMTGSFPY

SEQ ID NO: 53913 - protein, 355 aa, Glycine max
  peptide (1)..(355): Ceres Seq. ID no. 14311425
  misc_feature (1)..(42): Pfam Name: LIM domain Pfam Description: LIM domain
  misc_feature (1)..(347): Homolog of NCBI NO: 27808630 NR Description: At5g66630 [Arabidopsis thaliana]
  misc_feature (1)..(347): Homolog of NCBI NO: 30698240 NR Description: expressed protein [Arabidopsis thaliana]
  misc_feature (1)..(355): Homolog of NCBI NO: 22326876 NR Description: disease resistance protein (TIR-NBS-LRR class),
  misc_feature (1)..(347): Homolog of NCBI NO: 15240018 NR Description: hypothetical protein [Arabidopsis thaliana]
  misc_feature (52)..(354): Homolog of NCBI NO: 25407769 NR Description: hypothetical protein AT4g36860 [imported] -
  misc_feature (1)..(354): Homolog of NCBI NO: 29893641 NR Description: hypothetical protein [Oryza sativa (japonica
  misc_feature (1)..(352): Homolog of NCBI NO: 25518496 NR Description: hypothetical protein T29M8.14 - Arabidopsis
  misc_feature (1)..(354): Homolog of NCBI NO: 15221983 NR Description: expressed protein [Arabidopsis thaliana]
  misc_feature (1)..(354): Homolog of NCBI NO: 22329212 NR Description: expressed protein [Arabidopsis thaliana]
  misc_feature (1)..(354): Homolog of NCBI NO: 17065046 NR Description: Unknown protein [Arabidopsis thaliana]
MGGVWHPECFCCHACHLPITDYEFSMSSNRPYHKSCYREKHHPRCDVCKNFIPTNSSGLIEYRAHPFWLQKYCPSHELDGTSRCCSCERMEPRDTKYLLLDDGRKLCLECLDSSIMDTHECQPLYLEIQEFYEGLNMKLEQQIPMLLVERQALNEAMEGEKNGHHHLPETRGLCLSEEQTVTTISRRPRIAAGYRAIDMITEPYRLIRCCEVTAILVLYGLPRLLTGSILAHEMMHAWLRLKGYPNLSPEVEEGICQVLAHMWLESELYSGFGNDGASSSTSSLSSSSPSSSSVSTKKGKRSDFEKKLGDFFKHQIESDTSSAYGDGFRLGNQAMVKYGLKRTLDHIHMTGSFPY

SEQ ID NO: 53914 - protein, 330 aa, Glycine max
  peptide (1)..(330): Ceres Seq. ID no. 14311426
  misc_feature (1)..(322): Homolog of NCBI NO: 27808630 NR Description: At5g66630 [Arabidopsis thaliana]
  misc_feature (1)..(322): Homolog of NCBI NO: 30698240 NR Description: expressed protein [Arabidopsis thaliana]
  misc_feature (1)..(330): Homolog of NCBI NO: 22326876 NR Description: disease resistance protein (TIR-NBS-LRR class),
  misc_feature (1)..(322): Homolog of NCBI NO: 15240018 NR Description: hypothetical protein [Arabidopsis thaliana]
  misc_feature (27)..(329): Homolog of NCBI NO: 25407769 NR Description: hypothetical protein AT4g36860 [imported] -
  misc_feature (1)..(329): Homolog of NCBI NO: 29893641 NR Description: hypothetical protein [Oryza sativa (japonica
  misc_feature (1)..(327): Homolog of NCBI NO: 25518496 NR Description: hypothetical protein T29M8.14 - Arabidopsis
  misc_feature (1)..(329): Homolog of NCBI NO: 15221983 NR Description: expressed protein [Arabidopsis thaliana]
  misc_feature (1)..(329): Homolog of NCBI NO: 22329212 NR Description: expressed protein [Arabidopsis thaliana]
  misc_feature (1)..(329): Homolog of NCBI NO: 17065046 NR Description: Unknown protein [Arabidopsis thaliana]
MSSNRPYHKSCYREKHHPRCDVCKNFIPTNSSGLIEYRAHPFWLQKYCPSHELDGTSRCCSCERMEPRDTKYLLLDDGRKLCLECLDSSIMDTHECQPLYLEIQEFYEGLNMKLEQQIPMLLVERQALNEAMEGEKNGHHHLPETRGLCLSEEQTVTTISRRPRIAAGYRAIDMITEPYRLIRCCEVTAILVLYGLPRLLTGSILAHEMMHAWLRLKGYPNLSPEVEEGICQVLAHMWLESELYSGFGNDGASSSTSSLSSSSPSSSSVSTKKGKRSDFEKKLGDFFKHQIESDTSSAYGDGFRLGNQAMVKYGLKRTLDHIHMTGSFPY

SEQ ID NO: 53915 - DNA, 1212 bp, Glycine max
  misc_feature (1)..(1212): Ceres Seq. ID no. 15177991
tttaacaaacacgtcttttctctctattcatgtgaaatcctaatacctatatttttctcacttattatctctgaaattggcagggtggtaatcttacgcttgcggcttgcgcgcattcattgtcgaaggcaaagtggtacgcatttcgttgtgtgagaaagaagatgtgttgtcgcttgagcaacagcctggtagggttgctgaacctgctctccttcctcctgtcgatacccattctggtaaccggcgtgtggctgcacaagcaagcggaaacggaatgcgagagatggctggagaagcccctcatcgtgttgggcgttttcctcttggtggtgtccctggcaggtcttctcggggcgtgttgccgcctctcgtgcctcctctggctctacctcttcgtcatgttcatcctcatcatcgttgtctccgccttcaccgtcttcgcattcgttgtcaccaacaagggcgctggcgaggtagtttctaaccgcggttacagggagtaccggcttggcgactactcaaactggttgcagaacagagtgaccaacccccacacgtggaaccggatcaagagctgcctccagtcggccaaactctgcgacaaattcgaaactcaatttgccaacgactccgcgcagcagttctacgcggagaacttgtccgcgctccagtccgggtgttgtaagccatcaaacgactgtaattttgcgtatcagggtccatctgtctggaacaagactgatggtgtaaatcattccaaccctgactgtaatgcttgggacaatgattccaatgttctgtgcttcaattgcgaatcttgcaaggctgggttcctgcagaaccttaagactgactggaagaaggtgacgattgtcaatgtgatattccttgtcttcctcattattgtgtactctgttggttgctgcgcgttccggaataacatgagaggcaattggaagtactagatgcagccttgtatgttacaagcatgtaaatgagttaagtaatttggtttcttttctggattctttgcagttgcatagttaatttacaattttatatcatctacagttagtttttaggctatgttcctgcactcgtcttctattggtgaatactcgtcatctatttgttaatttgtgtttaatgtgttaggcatggccatatgaattaagtattggagtggagctgtgcttcatttttcccatt

SEQ ID NO: 53916 - protein, 267 aa, Glycine max
  peptide (1)..(267): Ceres Seq. ID no. 15177992
  misc_feature (6)..(246): Pfam Name: Tetraspanin family Pfam Description: Tetraspanin family
  misc_feature (4)..(267): Homolog of NCBI NO: 9294106 NR Description: senescence-associated protein-like [Arabidopsis
  misc_feature (80)..(262): Homolog of NCBI NO: 30682205 NR Description: senescence-associated protein family [Arabidopsis
  misc_feature (4)..(262): Homolog of NCBI NO: 15238641 NR Description: senescence-associated protein family [Arabidopsis
  misc_feature (4)..(262): Homolog of NCBI NO: 15231187 NR Description: senescence-associated protein family [Arabidopsis
  misc_feature (4)..(260): Homolog of NCBI NO: 21537169 NR Description: senescence-associated protein-like protein
  misc_feature (4)..(260): Homolog of NCBI NO: 15234743 NR Description: senescence-associated protein family [Arabidopsis
  misc_feature (1)..(264): Homolog of NCBI NO: 29367553 NR Description: senescence-associated protein-like protein
  misc_feature (4)..(266): Homolog of NCBI NO: 3551954 NR Description: senescence-associated protein 5 [Hemerocallis
  misc_feature (4)..(262): Homolog of NCBI NO: 20197174 NR Description: hypothetical protein [Arabidopsis thaliana]
  misc_feature (6)..(265): Homolog of NCBI NO: 15234374 NR Description: senescence-associated protein, putative
MCCRLSNSLVGLLNLLSFLLSIPILVTGVWLHKQAETECERWLEKPLIVLGVFLLVVSLAGLLGACCRLSCLLWLYLFVMFILIIVVSAFTVFAFVVTNKGAGEVVSNRGYREYRLGDYSNWLQNRVTNPHTWNRIKSCLQSAKLCDKFETQFANDSAQQFYAENLSALQSGCCKPSNDCNFAYQGPSVWNKTDGVNHSNPDCNAWDNDSNVLCFNCESCKAGFLQNLKTDWKKVTIVNVIFLVFLIIVYSVGCCAFRNNMRGNWKY

SEQ ID NO: 53917 - protein, 188 aa, Glycine max
  peptide (1)..(188): Ceres Seq. ID no. 15177993
  misc_feature (1)..(167): Pfam Name: Tetraspanin family Pfam Description: Tetraspanin family
  misc_feature (1)..(188): Homolog of NCBI NO: 9294106 NR Description: senescence-associated protein-like [Arabidopsis
  misc_feature (1)..(183): Homolog of NCBI NO: 30682205 NR Description: senescence-associated protein family [Arabidopsis
  misc_feature (1)..(183): Homolog of NCBI NO: 15238641 NR Description: senescence-associated protein family [Arabidopsis
  misc_feature (1)..(183): Homolog of NCBI NO: 15231187 NR Description: senescence-associated protein family [Arabidopsis
  misc_feature (1)..(181): Homolog of NCBI NO: 21537169 NR Description: senescence-associated protein-like protein
  misc_feature (1)..(181): Homolog of NCBI NO: 15234743 NR Description: senescence-associated protein family [Arabidopsis
  misc_feature (1)..(185): Homolog of NCBI NO: 29367553 NR Description: senescence-associated protein-like protein
  misc_feature (1)..(187): Homolog of NCBI NO: 3551954 NR Description: senescence-associated protein 5 [Hemerocallis
  misc_feature (1)..(183): Homolog of NCBI NO: 20197174 NR Description: hypothetical protein [Arabidopsis thaliana]
  misc_feature (1)..(186): Homolog of NCBI NO: 15234374 NR Description: senescence-associated protein, putative
MFILIIVVSAFTVFAFVVTNKGAGEVVSNRGYREYRLGDYSNWLQNRVTNPHTWNRIKSCLQSAKLCDKFETQFANDSAQQFYAENLSALQSGCCKPSNDCNFAYQGPSVWNKTDGVNHSNPDCNAWDNDSNVLCFNCESCKAGFLQNLKTDWKKVTIVNVIFLVFLIIVYSVGCCAFRNNMRGNWKY

SEQ ID NO: 53918 - DNA, 1126 bp, Glycine max
  misc_feature (1)..(1126): Ceres Seq. ID no. 14307065
aattcccccttttggaagatggttccacagtcagtgataacgcaagtctccgattcaagtggcgtgaatgcgatatcaaacgtttcttctggccacggattctacgattggttgttcgaatgtcacgggttctggcacaatgccactctcaacatcccctcgttcctcttcgtcttctacttggcacttcaagccaggcacagcttactcaaactctcccttgcgcgctcctatataatcatttcatataacctttgcctctggctcattactctgctcaatctcgcttggtgctttctccaggcatgggagtgcacgtctgggagaaagttgacatggaacctgttatccttgttcactacttccggaatgctgtttttggaagtgagcttgctggcttttttatttcaaggaaataatgcaggcggcttagatgcaatgaaacgaacttttggtatctcaacgctcgttgttggcttggatatactgttgaaggcaatatatctatttgtatttgggattccattattcgtcgacagcaatgaacatactcatgggaagtggaacttgtgggttgtccacaagctgttgctcactgctgtttatggcttcataatgtttatataccattccggatggaaagaaacgttgcctgcaaaaattgccttttacaagtatgttgcaattatgttcatttttaatgcgattgcgacacttgcttgtggccttgctggaactggtgctgcgtttgctttctggctgtatcgtgtcacggttgtcttctaccatgcattttatcttccttttttgtatacaacattcctagcagacttttttcaggaggaaaatttccatttggaaaatgtgtattattccgagatgaaagatgcaggtttctttgacacggactgggagtgatgatgtatcagctataaattgacattgcctcagtatagtcatcgcagggaaccccgatcaggacatatgtaaataaaataaccatgttagcagatcggaatattattaaaaagatgtttatttttaagcacctcaagtgttataggcatgacgtagtataattcttaattattcagctagatacgagactgaataaaattaacatacg

SEQ ID NO: 53919 - protein, 305 aa, Glycine max
  peptide (1)..(305): Ceres Seq. ID no. 14307066
  misc_feature (26)..(282): Homolog of NCBI NO: 26354422 NR Description: unnamed protein product [Mus musculus]
  misc_feature (26)..(282): Homolog of NCBI NO: 6755859 NR Description: transmembrane domain protein regulated in
  misc_feature (37)..(188): Homolog of NCBI NO: 21326119 NR Description: putative expressed protein [Sorghum bicolor]
  misc_feature (118)..(255): Homolog of NCBI NO: 7485300 NR Description: hypothetical protein A_TM021B04.15 - Arabidopsis
  misc_feature (153)..(305): Homolog of NCBI NO: 21326119 NR Description: putative expressed protein [Sorghum bicolor]
  misc_feature (12)..(305): Homolog of NCBI NO: 14532472 NR Description: AT5g27210/T21B4_120 [Arabidopsis thaliana]
  misc_feature (12)..(305): Homolog of NCBI NO: 21618098 NR Description: unknown [Arabidopsis thaliana]
  misc_feature (12)..(305): Homolog of NCBI NO: 15240462 NR Description: expressed protein [Arabidopsis thaliana]
  misc_feature (12)..(305): Homolog of NCBI NO: 12322847 NR Description: unknown protein; 15342-13483 [Arabidopsis
  misc_feature (12)..(305): Homolog of NCBI NO: 18397089 NR Description: expressed protein [Arabidopsis thaliana]
NSPFWKMVPQSVITQVSDSSGVNAISNVSSGHGFYDWLFECHGFWHNATLNIPSFLFVFYLALQARHSLLKLSLARSYIIISYNLCLWLITLLNLAWCFLQAWECTSGRKLTWNLLSLFTTSGMLFLEVSLLAFLFQGNNAGGLDAMKRTFGISTLVVGLDILLKAIYLFVFGIPLFVDSNEHTHGKWNLWVVHKLLLTAVYGFIMFIYHSGWKETLPAKIAFYKYVAIMFIFNAIATLACGLAGTGAAFAFWLYRVTVVFYHAFYLPFLYTTFLADFFQEENFHLENVYYSEMKDAGFFDTDWE

SEQ ID NO: 53920 - protein, 299 aa, Glycine max
  peptide (1)..(299): Ceres Seq. ID no. 14307067
  misc_feature (20)..(276): Homolog of NCBI NO: 26354422 NR Description: unnamed protein product [Mus musculus]
  misc_feature (20)..(276): Homolog of NCBI NO: 6755859 NR Description: transmembrane domain protein regulated in
  misc_feature (31)..(182): Homolog of NCBI NO: 21326119 NR Description: putative expressed protein [Sorghum bicolor]
  misc_feature (112)..(249): Homolog of NCBI NO: 7485300 NR Description: hypothetical protein A_TM021B04.15 - Arabidopsis
  misc_feature (147)..(299): Homolog of NCBI NO: 21326119 NR Description: putative expressed protein [Sorghum bicolor]
  misc_feature (6)..(299): Homolog of NCBI NO: 14532472 NR Description: AT5g27210/T21B4_120 [Arabidopsis thaliana]
  misc_feature (6)..(299): Homolog of NCBI NO: 21618098 NR Description: unknown [Arabidopsis thaliana]
  misc_feature (6)..(299): Homolog of NCBI NO: 15240462 NR Description: expressed protein [Arabidopsis thaliana]
  misc_feature (6)..(299): Homolog of NCBI NO: 12322847 NR Description: unknown protein; 15342-13483 [Arabidopsis
  misc_feature (6)..(299): Homolog of NCBI NO: 18397089 NR Description: expressed protein [Arabidopsis thaliana]
MVPQSVITQVSDSSGVNAISNVSSGHGFYDWLFECHGFWHNATLNIPSFLFVFYLALQARHSLLKLSLARSYIIISYNLCLWLITLLNLAWCFLQAWECTSGRKLTWNLLSLFTTSGMLFLEVSLLAFLFQGNNAGGLDAMKRTFGISTLVVGLDILLKAIYLFVFGIPLFVDSNEHTHGKWNLWVVHKLLLTAVYGFIMFIYHSGWKETLPAKIAFYKYVAIMFIFNAIATLACGLAGTGAAFAFWLYRVTVVFYHAFYLPFLYTTFLADFFQEENFHLENVYYSEMKDAGFFDTDWE

SEQ ID NO: 53921 - protein, 182 aa, Glycine max
  peptide (1)..(182): Ceres Seq. ID no. 14307068
  misc_feature (1)..(159): Homolog of NCBI NO: 26354422 NR Description: unnamed protein product [Mus musculus]
  misc_feature (1)..(159): Homolog of NCBI NO: 6755859 NR Description: transmembrane domain protein regulated in
  misc_feature (1)..(65): Homolog of NCBI NO: 21326119 NR Description: putative expressed protein [Sorghum bicolor]
  misc_feature (1)..(132): Homolog of NCBI NO: 7485300 NR Description: hypothetical protein A_TM021B04.15 - Arabidopsis
  misc_feature (30)..(182): Homolog of NCBI NO: 21326119 NR Description: putative expressed protein [Sorghum bicolor]
  misc_feature (1)..(182): Homolog of NCBI NO: 14532472 NR Description: AT5g27210/T21B4_120 [Arabidopsis thaliana]
  misc_feature (1)..(182): Homolog of NCBI NO: 21618098 NR Description: unknown [Arabidopsis thaliana]
  misc_feature (1)..(182): Homolog of NCBI NO: 15240462 NR Description: expressed protein [Arabidopsis thaliana]
  misc_feature (1)..(182): Homolog of NCBI NO: 12322847 NR Description: unknown protein; 15342-13483 [Arabidopsis
  misc_feature (1)..(182): Homolog of NCBI NO: 18397089 NR Description: expressed protein [Arabidopsis thaliana]
MLFLEVSLLAFLFQGNNAGGLDAMKRTFGISTLVVGLDILLKAIYLFVFGIPLFVDSNEHTHGKWNLWVVHKLLLTAVYGFIMFIYHSGWKETLPAKIAFYKYVAIMFIFNAIATLACGLAGTGAAFAFWLYRVTVVFYHAFYLPFLYTTFLADFFQEENFHLENVYYSEMKDAGFFDTDWE

SEQ ID NO: 53922 - DNA, 1291 bp, Glycine max
  misc_feature (1)..(1291): Ceres Seq. ID no. 15178596
aatttattttgtaacgccaaacgtccatccaaaattgcgttcctaaatcgccgctaccgaacacagccgtagacttttaattcattccgctgcgtttctttctctgcacttcaaagttcaaaccctagcgaagcatccactgtcgccgtcgcacactcgcacgccgctcacaggtttatgggctacgctgatgtcctgaatttgttgttggccgtggtggtttggtgcactgcttacgttactgttgtagttctcgcttcctttcgagccgtttgcactttctgaaaccttgcaatttcattgataacatgggttatgcacagcttgtcataggtcctgctggtagtggcaagtccacgtattgctcaagtttgtatgaacactgtgttgctgcacggcgatcgatacatgttgtgaatcttgaccctgctgctgaaaattttgactatcctgttgcgatggatataagggaactcatttccctagatgatgttatggaggaacttggattgggtcctaatggtggtcttgtctactgcatggaacaccttgaagataacctagatgattggctcactgaggaactggacaattatttagatgatgattacttggttttcgactgccctggtcagatagaactatattcacatgtcccagtgcttaagaattttgtggaacatttgaaacggaaaaattttagtgtttgtgctgtttacttacttgattcacagttcatgacagacgtgaccaagtttataagtggatgcatggcatgtctttctgcgatggttcaacttgaactacctcatgttaatatcctctcaaagatggaccttgtgactaaaaagaaggatcttgaagattttttggatccagagcccacctttttattgtctgaattgaatcaacggatgggtcctcagtatgcaaagctgaataaggctttgattgaattggtaaataactatagcatggtgagttttataccattagacttaaggaaggaaaaaagtatacaatatgtactggcccaaattgacaactgcattcaatatggagaagatgcagatgtgaaggttaaggattttgaccctgaggatgatgagtagccaatccccttctgcaacactgcttggtataattgaaagttctgcttaacttcgacattatggtgtaccaagctgaagttgttaatatgtagtatctcattagattgttttaatgtgaattgaggaagttgaacatttatacagtttatcctctaaatgggatgaaaaattggctaaaa

SEQ ID NO: 53923 - protein, 267 aa, Glycine max
  peptide (1)..(267): Ceres Seq. ID no. 15178597
  misc_feature (7)..(250): Pfam Name: Conserved hypothetical ATP binding protein Pfam Description: Conserved hypothetical ATP binding protein
  misc_feature (3)..(266): Homolog of NCBI NO: 21361523 NR Description: protein x 0004 [Homo sapiens]
  misc_feature (3)..(266): Homolog of NCBI NO: 37183274 NR Description: PRYA1876 [Homo sapiens]
  misc_feature (3)..(266): Homolog of NCBI NO: 21410245 NR Description: protein x 0004 [Homo sapiens]
  misc_feature (3)..(257): Homolog of NCBI NO: 21312642 NR Description: RIKEN cDNA A930018B01 [Mus musculus]
  misc_feature (3)..(264): Homolog of NCBI NO: 34872358 NR Description: similar to RIKEN cDNA A930018B01 [Rattus
  misc_feature (3)..(264): Homolog of NCBI NO: 37606123 NR Description: SI:zK83D9.3 (novel protein similar to human x
  misc_feature (1)..(95): Homolog of NCBI NO: 7487264 NR Description: hypothetical protein T20K18.140 - Arabidopsis
  misc_feature (80)..(267): Homolog of NCBI NO: 7487264 NR Description: hypothetical protein T20K18.140 - Arabidopsis
  misc_feature (1)..(267): Homolog of NCBI NO: 18413871 NR Description: expressed protein [Arabidopsis thaliana]
  misc_feature (1)..(266): Homolog of NCBI NO: 18071342 NR Description: putative ATP(GTP)-binding protein
MGYAQLVIGPAGSGKSTYCSSLYEHCVAARRSIHVVNLDPAAENFDYPVAMDIRELISLDDVMEELGLGPNGGLVYCMEHLEDNLDDWLTEELDNYLDDDYLVFDCPGQIELYSHVPVLKNFVEHLKRKNFSVCAVYLLDSQFMTDVTKFISGCMACLSAMVQLELPHVNILSKMDLVTKKKDLEDFLDPEPTFLLSELNQRMGPQYAKLNKALIELVNNYSMVSFIPLDLRKEKSIQYVLAQIDNCIQYGEDADVKVKDFDPEDDE

SEQ ID NO: 53924 - protein, 217 aa, Glycine max
  peptide (1)..(217): Ceres Seq. ID no. 15178598
  misc_feature (1)..(200): Pfam Name: Conserved hypothetical ATP binding protein Pfam Description: Conserved hypothetical ATP binding protein
  misc_feature (1)..(216): Homolog of NCBI NO: 21361523 NR Description: protein x 0004 [Homo sapiens]
  misc_feature (1)..(216): Homolog of NCBI NO: 37183274 NR Description: PRYA1876 [Homo sapiens]
  misc_feature (1)..(216): Homolog of NCBI NO: 21410245 NR Description: protein x 0004 [Homo sapiens]
  misc_feature (1)..(207): Homolog of NCBI NO: 21312642 NR Description: RIKEN cDNA A930018B01 [Mus musculus]
  misc_feature (1)..(214): Homolog of NCBI NO: 34872358 NR Description: similar to RIKEN cDNA A930018B01 [Rattus
  misc_feature (1)..(214): Homolog of NCBI NO: 37606123 NR Description: SI:zK83D9.3 (novel protein similar to human x
  misc_feature (1)..(45): Homolog of NCBI NO: 7487264 NR Description: hypothetical protein T20K18.140 - Arabidopsis
  misc_feature (30)..(217): Homolog of NCBI NO: 7487264 NR Description: hypothetical protein T20K18.140 - Arabidopsis
  misc_feature (1)..(217): Homolog of NCBI NO: 18413871 NR Description: expressed protein [Arabidopsis thaliana]
  misc_feature (1)..(216): Homolog of NCBI NO: 18071342 NR Description: putative ATP(GTP)-binding protein
MDIRELISLDDVMEELGLGPNGGLVYCMEHLEDNLDDWLTEELDNYLDDDYLVFDCPGQIELYSHVPVLKNFVEHLKRKNFSVCAVYLLDSQFMTDVTKFISGCMACLSAMVQLELPHVNILSKMDLVTKKKDLEDFLDPEPTFLLSELNQRMGPQYAKLNKALIELVNNYSMVSFIPLDLRKEKSIQYVLAQIDNCIQYGEDADVKVKDFDPEDDE

SEQ ID NO: 53925 - protein, 205 aa, Glycine max
  peptide (1)..(205): Ceres Seq. ID no. 15178599
  misc_feature (1)..(188): Pfam Name: Conserved hypothetical ATP binding protein Pfam Description: Conserved hypothetical ATP binding protein
  misc_feature (1)..(204): Homolog of NCBI NO: 21361523 NR Description: protein x 0004 [Homo sapiens]
  misc_feature (1)..(204): Homolog of NCBI NO: 37183274 NR Description: PRYA1876 [Homo sapiens]
  misc_feature (1)..(204): Homolog of NCBI NO: 21410245 NR Description: protein x 0004 [Homo sapiens]
  misc_feature (1)..(195): Homolog of NCBI NO: 21312642 NR Description: RIKEN cDNA A930018B01 [Mus musculus]
  misc_feature (1)..(202): Homolog of NCBI NO: 34872358 NR Description: similar to RIKEN cDNA A930018B01 [Rattus
  misc_feature (1)..(202): Homolog of NCBI NO: 37606123 NR Description: SI:zK83D9.3 (novel protein similar to human x
  misc_feature (1)..(33): Homolog of NCBI NO: 7487264 NR Description: hypothetical protein T20K18.140 - Arabidopsis
  misc_feature (18)..(205): Homolog of NCBI NO: 7487264 NR Description: hypothetical protein T20K18.140 - Arabidopsis
  misc_feature (1)..(205): Homolog of NCBI NO: 18413871 NR Description: expressed protein [Arabidopsis thaliana]
  misc_feature (1)..(204): Homolog of NCBI NO: 18071342 NR Description: putative ATP(GTP)-binding protein
MEELGLGPNGGLVYCMEHLEDNLDDWLTEELDNYLDDDYLVFDCPGQIELYSHVPVLKNFVEHLKRKNFSVCAVYLLDSQFMTDVTKFISGCMACLSAMVQLELPHVNILSKMDLVTKKKDLEDFLDPEPTFLLSELNQRMGPQYAKLNKALIELVNNYSMVSFIPLDLRKEKSIQYVLAQIDNCIQYGEDADVKVKDFDPEDDE

SEQ ID NO: 53926 - DNA, 1362 bp, Glycine max
  misc_feature (1)..(1362): Ceres Seq. ID no. 15169053
gggttttcttttcatccttccagcttggaaggattgaagtttctgtctttttctgatctccgtgtgcgtggtttggttttgttgttgaagatgttggtagctaatagctttgatctatggcgaaaggacgcttttttctctgcggcggaagaggtgcaggaatcagctgatataatggaatctgcatacagggcatggttgagagagaagagagaaaggtcaactcctgaggaattaaatgaactatgtagagagctgcaaactgctttaggtaccgcaaaatggcagttggaagaatttgataaagccgtcaggctaagctaccgacctcacagtgatgacaatacatccactaggcataggcagtttatttctgccattgaaagccaaattacccaggttgaagcagcactgagggaatcttacattgaggaaggtaagcaaccacttcggtgggtaaatcttgatgaagaagagcgagatgatctggctgcctttctatctggaacttgtcagaccacacaaagcactaacgatgaatacatggaggtgaaacaagccaagaaagaagataagattgtagatataaacactttccgcaaccgggatatatctgctagtgaaaagtcttctaaggatgtcatttctgttaacaaggatacagattatctgatagaaataaaagcagatgctgtttctagaagtaatgatgatttagtttctcaaacagatagaacaactagtacaaggaagacatggagtccgcctaattatggtgctttaaaaattgtaattgctgatgaaggtgagcagagagataaacccacacggactgttgatgccacccctaaagaaaaagggttcagaaatctattttggaaacaaaagtttgaagattatcctcaggccacgcgagtagttcgtatgttcaatcagcgttttgggggcattggtatatgccagagccagaggcagtttcaaagtcccttgcacttgcgacatggctgttctgttcaagttacacttgctctaatgttgaccatttttctcattgttccctttgtactttattcaacttgagttaaacagctgcttcgatcaatctgttcgagagggctttaattggtcatatgagatctcagccactgccttcaagtattggtgggacaagttagctaaagggacaatgagtgccaacttctattttgtcgttgttgagttacctatgtgagtgtggatactgataggataaccaacctcttgtcctacaggaacacctgtctattttagtttcatagggctgttaaatgtatatacattcatccaatatttaatgcaagttccgctttatttggttgcaac

SEQ ID NO: 53927 - protein, 359 aa, Glycine max
  peptide (1)..(359): Ceres Seq. ID no. 15169054
  misc_feature (33)..(284): Homolog of NCBI NO: 37533116 NR Description: unknown protein [Oryza sativa (japonica
  misc_feature (33)..(170): Homolog of NCBI NO: 26006490 NR Description: Hypothetical protein [Oryza sativa (japonica
  misc_feature (33)..(187): Homolog of NCBI NO: 25403328 NR Description: protein T22C5.15 [imported] - Arabidopsis
  misc_feature (33)..(187): Homolog of NCBI NO: 18396454 NR Description: clathrin-coat assembly protein -related
  misc_feature (31)..(317): Homolog of NCBI NO: 40253501 NR Description: clathrin-coat assembly protein-like
  misc_feature (31)..(302): Homolog of NCBI NO: 30680486 NR Description: expressed protein [Arabidopsis thaliana]
  misc_feature (31)..(307): Homolog of NCBI NO: 7485788 NR Description: hypothetical protein At2g18860 [imported] -
  misc_feature (31)..(314): Homolog of NCBI NO: 18417554 NR Description: expressed protein [Arabidopsis thaliana]
  misc_feature (31)..(314): Homolog of NCBI NO: 7486766 NR Description: hypothetical protein F9N11.90 - Arabidopsis
GFSFHPSSLEGLKFLSFSDLRVRGLVLLLKMLVANSFDLWRKDAFFSAAEEVQESADIMESAYRAWLREKRERSTPEELNELCRELQTALGTAKWQLEEFDKAVRLSYRPHSDDNTSTRHRQFISAIESQITQVEAALRESYIEEGKQPLRWVNLDEEERDDLAAFLSGTCQTTQSTNDEYMEVKQAKKEDKIVDINTFRNRDISASEKSSKDVISVNKDTDYLIEIKADAVSRSNDDLVSQTDRTTSTRKTWSPPNYGALKIVIADEGEQRDKPTRTVDATPKEKGFRNLFWKQKFEDYPQATRVVRMFNQRFGGIGICQSQRQFQSPLHLRHGCSVQVTLALMLTIFLIVPFVLYST

SEQ ID NO: 53928 - protein, 329 aa, Glycine max
  peptide (1)..(329): Ceres Seq. ID no. 15169055
  misc_feature (3)..(254): Homolog of NCBI NO: 37533116 NR Description: unknown protein [Oryza sativa (japonica
  misc_feature (3)..(140): Homolog of NCBI NO: 26006490 NR Description: Hypothetical protein [Oryza sativa (japonica
  misc_feature (3)..(157): Homolog of NCBI NO: 25403328 NR Description: protein T22C5.15 [imported] - Arabidopsis
  misc_feature (3)..(157): Homolog of NCBI NO: 18396454 NR Description: clathrin-coat assembly protein -related
  misc_feature (1)..(287): Homolog of NCBI NO: 40253501 NR Description: clathrin-coat assembly protein-like
  misc_feature (1)..(272): Homolog of NCBI NO: 30680486 NR Description: expressed protein [Arabidopsis thaliana]
  misc_feature (1)..(277): Homolog of NCBI NO: 7485788 NR Description: hypothetical protein At2g18860 [imported] -
  misc_feature (1)..(284): Homolog of NCBI NO: 18417554 NR Description: expressed protein [Arabidopsis thaliana]
  misc_feature (1)..(284): Homolog of NCBI NO: 7486766 NR Description: hypothetical protein F9N11.90 - Arabidopsis
MLVANSFDLWRKDAFFSAAEEVQESADIMESAYRAWLREKRERSTPEELNELCRELQTALGTAKWQLEEFDKAVRLSYRPHSDDNTSTRHRQFISAIESQITQVEAALRESYIEEGKQPLRWVNLDEEERDDLAAFLSGTCQTTQSTNDEYMEVKQAKKEDKIVDINTFRNRDISASEKSSKDVISVNKDTDYLIEIKADAVSRSNDDLVSQTDRTTSTRKTWSPPNYGALKIVIADEGEQRDKPTRTVDATPKEKGFRNLFWKQKFEDYPQATRVVRMFNQRFGGIGICQSQRQFQSPLHLRHGCSVQVTLALMLTIFLIVPFVLYST

SEQ ID NO: 53929 - protein, 301 aa, Glycine max
  peptide (1)..(301): Ceres Seq. ID no. 15169056
  misc_feature (1)..(226): Homolog of NCBI NO: 37533116 NR Description: unknown protein [Oryza sativa (japonica
  misc_feature (1)..(112): Homolog of NCBI NO: 26006490 NR Description: Hypothetical protein [Oryza sativa (japonica
  misc_feature (1)..(129): Homolog of NCBI NO: 25403328 NR Description: protein T22C5.15 [imported] - Arabidopsis
  misc_feature (1)..(129): Homolog of NCBI NO: 18396454 NR Description: clathrin-coat assembly protein -related
  misc_feature (1)..(259): Homolog of NCBI NO: 40253501 NR Description: clathrin-coat assembly protein-like
  misc_feature (1)..(244): Homolog of NCBI NO: 30680486 NR Description: expressed protein [Arabidopsis thaliana]
  misc_feature (1)..(249): Homolog of NCBI NO: 7485788 NR Description: hypothetical protein At2g18860 [imported] -
  misc_feature (1)..(256): Homolog of NCBI NO: 18417554 NR Description: expressed protein [Arabidopsis thaliana]
  misc_feature (1)..(256): Homolog of NCBI NO: 7486766 NR Description: hypothetical protein F9N11.90 - Arabidopsis
MESAYRAWLREKRERSTPEELNELCRELQTALGTAKWQLEEFDKAVRLSYRPHSDDNTSTRHRQFISAIESQITQVEAALRESYIEEGKQPLRWVNLDEEERDDLAAFLSGTCQTTQSTNDEYMEVKQAKKEDKIVDINTFRNRDISASEKSSKDVISVNKDTDYLIEIKADAVSRSNDDLVSQTDRTTSTRKTWSPPNYGALKIVIADEGEQRDKPTRTVDATPKEKGFRNLFWKQKFEDYPQATRVVRMFNQRFGGIGICQSQRQFQSPLHLRHGCSVQVTLALMLTIFLIVPFVLYST

SEQ ID NO: 53930 - DNA, 1416 bp, Glycine max
  misc_feature (1)..(1416): Ceres Seq. ID no. 14312216
gaagagataaataataactagttgtagctgctggggagagtggaacataataaacatgacaatgaagctgctgcttttggtagccgttgttgaagttgcatgcttagtttctgggatcttgtcctttggatctgagacactctctgagctttctttcttagaaaacgatgtcgtctcaacagcaagaccttcctcttcatctcaacctcttatggtcgacctcactctcattcaaggagctgattctaaaggagctgtctgtttggatggaacggtgcctggataccatttggatcgtggatttggatctggtgcagatagttggctaattcatttggagggaggaggatggtgtaataccatcagaaactgtgtctatagaaaaaatactcgtcgtggatcctcgaaatacatggaaaatcaaataccattcacgggaatattgatcaacaaacctgaagaaaaccctgatttctttaactggaatagagttaaattacggtactgtgatggggcgtctttcagtggagatagtgaagatgagtctgcacagcttcaatttcgaggacaaaaaatatggctagctgcaatggaggaattaatgtccaaaggaatgcagaaagccgatcaggcacttctctctggatgctctgcgggtggtctggcatcgataatacactgtgatgagttccggagcttgtttccaaaatcttccaaagtcaaatgtttgagtgatggaggtttttttcttgacgtaatggatgtatctgggggacgcacactgaggactctttttggaggtgtggttcagttgcaggagttacaaaaaaatctgccaaaaagttgtcttgaccaactagacccaacttcgtgcttctttcctcagaatatgatcgaacatgttgagaccccattgtttctactcaacgctgcttatgatgtgtggcaggtccaagctagtttagccccaccttcagctgaccgccttggctcttggaatgaatgcaaatcgaaccatgcaaattgtagctcatctcaaatgcagttcctccaagacttcagaaatcaaatgcttagtgacattaaagacttctcgagctcatctcaaactgggctattcataaattcttgttttgctcattgtcagtctgagagacaggagacatggtttgctgatgactctccccttatcgaggacaagccaattgcagttgctattggagactggtattttgatcgagaagttgtcaaagctattgactgtgcttacccgtgtgacaacagctgccataatctggtgtttaactttaagtgaacaaaatttgttgtctcctcgttccactttaatccttgtaactgcaatgagtattccacaattaccattcattgattattatggaaagaccattcttagtc

SEQ ID NO: 53931 - protein, 419 aa, Glycine max
  peptide (1)..(419): Ceres Seq. ID no. 14312217
  misc_feature (46)..(401): Pfam Name: Pectinacetylesterase Pfam Description: Pectinacetylesterase
  misc_feature (3)..(266): Homolog of NCBI NO: 6714404 NR Description: putative pectinacetylesterase [Arabidopsis
  misc_feature (14)..(416): Homolog of NCBI NO: 34913332 NR Description: putative pectin acetylesterase precursor
  misc_feature (5)..(416): Homolog of NCBI NO: 15228677 NR Description: pectinacetylesterase family [Arabidopsis
  misc_feature (3)..(416): Homolog of NCBI NO: 7487997 NR Description: pectin acetylesterase homolog F21E10.11 -
  misc_feature (36)..(416): Homolog of NCBI NO: 21703105 NR Description: At1g57590/T8L23_6 [Arabidopsis thaliana]
  misc_feature (36)..(416): Homolog of NCBI NO: 30696158 NR Description: pectinacetylesterase, putative [Arabidopsis
  misc_feature (36)..(416): Homolog of NCBI NO: 25347293 NR Description: probable pectinacetylesterase precursor T8L23.6
  misc_feature (17)..(416): Homolog of NCBI NO: 15226462 NR Description: pectinacetylesterase, putative [Arabidopsis
  misc_feature (3)..(416): Homolog of NCBI NO: 18397406 NR Description: pectinacetylesterase, putative [Arabidopsis
  misc_feature (5)..(416): Homolog of NCBI NO: 28392968 NR Description: putative pectinacetylesterase [Arabidopsis
MTMKLLLLVAVVEVACLVSGILSFGSETLSELSFLENDVVSTARPSSSSQPLMVDLTLIQGADSKGAVCLDGTVPGYHLDRGFGSGADSWLIHLEGGGWCNTIRNCVYRKNTRRGSSKYMENQIPFTGILINKPEENPDFFNWNRVKLRYCDGASFSGDSEDESAQLQFRGQKIWLAAMEELMSKGMQKADQALLSGCSAGGLASIIHCDEFRSLFPKSSKVKCLSDGGFFLDVMDVSGGRTLRTLFGGVVQLQELQKNLPKSCLDQLDPTSCFFPQNMIEHVETPLFLLNAAYDVWQVQASLAPPSADRLGSWNECKSNHANCSSSQMQFLQDFRNQMLSDIKDFSSSSQTGLFINSCFAHCQSERQETWFADDSPLIEDKPIAVAIGDWYFDREVVKAIDCAYPCDNSCHNLVFNFK

SEQ ID NO: 53932 - protein, 417 aa, Glycine max
  peptide (1)..(417): Ceres Seq. ID no. 14312218
  misc_feature (44)..(399): Pfam Name: Pectinacetylesterase Pfam Description: Pectinacetylesterase
  misc_feature (1)..(264): Homolog of NCBI NO: 6714404 NR Description: putative pectinacetylesterase [Arabidopsis
  misc_feature (12)..(414): Homolog of NCBI NO: 34913332 NR Description: putative pectin acetylesterase precursor
  misc_feature (3)..(414): Homolog of NCBI NO: 15228677 NR Description: pectinacetylesterase family [Arabidopsis
  misc_feature (1)..(414): Homolog of NCBI NO: 7487997 NR Description: pectin acetylesterase homolog F21E10.11 -
  misc_feature (34)..(414): Homolog of NCBI NO: 21703105 NR Description: At1g57590/T8L23_6 [Arabidopsis thaliana]
  misc_feature (34)..(414): Homolog of NCBI NO: 30696158 NR Description: pectinacetylesterase, putative [Arabidopsis
  misc_feature (34)..(414): Homolog of NCBI NO: 25347293 NR Description: probable pectinacetylesterase precursor T8L23.6
  misc_feature (15)..(414): Homolog of NCBI NO: 15226462 NR Description: pectinacetylesterase, putative [Arabidopsis
  misc_feature (1)..(414): Homolog of NCBI NO: 18397406 NR Description: pectinacetylesterase, putative [Arabidopsis
  misc_feature (3)..(414): Homolog of NCBI NO: 28392968 NR Description: putative pectinacetylesterase [Arabidopsis
MKLLLLVAVVEVACLVSGILSFGSETLSELSFLENDVVSTARPSSSSQPLMVDLTLIQGADSKGAVCLDGTVPGYHLDRGFGSGADSWLIHLEGGGWCNTIRNCVYRKNTRRGSSKYMENQIPFTGILINKPEENPDFFNWNRVKLRYCDGASFSGDSEDESAQLQFRGQKIWLAAMEELMSKGMQKADQALLSGCSAGGLASIIHCDEFRSLFPKSSKVKCLSDGGFFLDVMDVSGGRTLRTLFGGVVQLQELQKNLPKSCLDQLDPTSCFFPQNMIEHVETPLFLLNAAYDVWQVQASLAPPSADRLGSWNECKSNHANCSSSQMQFLQDFRNQMLSDIKDFSSSSQTGLFINSCFAHCQSERQETWFADDSPLIEDKPIAVAIGDWYFDREVVKAIDCAYPCDNSCHNLVFNFK

SEQ ID NO: 53933 - protein, 367 aa, Glycine max
  peptide (1)..(367): Ceres Seq. ID no. 14312219
  misc_feature (1)..(349): Pfam Name: Pectinacetylesterase Pfam Description: Pectinacetylesterase
  misc_feature (1)..(214): Homolog of NCBI NO: 6714404 NR Description: putative pectinacetylesterase [Arabidopsis
  misc_feature (1)..(364): Homolog of NCBI NO: 34913332 NR Description: putative pectin acetylesterase precursor
  misc_feature (1)..(364): Homolog of NCBI NO: 15228677 NR Description: pectinacetylesterase family [Arabidopsis
  misc_feature (1)..(364): Homolog of NCBI NO: 7487997 NR Description: pectin acetylesterase homolog F21E10.11 -
  misc_feature (1)..(364): Homolog of NCBI NO: 21703105 NR Description: At1g57590/T8L23_6 [Arabidopsis thaliana]
  misc_feature (1)..(364): Homolog of NCBI NO: 30696158 NR Description: pectinacetylesterase, putative [Arabidopsis
  misc_feature (1)..(364): Homolog of NCBI NO: 25347293 NR Description: probable pectinacetylesterase precursor T8L23.6
  misc_feature (1)..(364): Homolog of NCBI NO: 15226462 NR Description: pectinacetylesterase, putative [Arabidopsis
  misc_feature (1)..(364): Homolog of NCBI NO: 18397406 NR Description: pectinacetylesterase, putative [Arabidopsis
  misc_feature (1)..(364): Homolog of NCBI NO: 28392968 NR Description: putative pectinacetylesterase [Arabidopsis
MVDLTLIQGADSKGAVCLDGTVPGYHLDRGFGSGADSWLIHLEGGGWCNTIRNCVYRKNTRRGSSKYMENQIPFTGILINKPEENPDFFNWNRVKLRYCDGASFSGDSEDESAQLQFRGQKIWLAAMEELMSKGMQKADQALLSGCSAGGLASIIHCDEFRSLFPKSSKVKCLSDGGFFLDVMDVSGGRTLRTLFGGVVQLQELQKNLPKSCLDQLDPTSCFFPQNMIEHVETPLFLLNAAYDVWQVQASLAPPSADRLGSWNECKSNHANCSSSQMQFLQDFRNQMLSDIKDFSSSSQTGLFINSCFAHCQSERQETWFADDSPLIEDKPIAVAIGDWYFDREVVKAIDCAYPCDNSCHNLVFNFK

SEQ ID NO: 53934 - DNA, 1538 bp, Glycine max
  misc_feature (1)..(1538): Ceres Seq. ID no. 14307732
gaaaaaagaataaatacatattatcctcccatgtattgtatttgtggggagagagagcgagtggatgtggtgttccggagaagttggaatggcagcggttagtgttagtgttactgtgagagtgaggtggtgcactcgaaaaccacccactccaactccaaccagattcagcgttaatgctctgtttggtgattggggatttgggaatagaacaaggaactcccttcagcagcaattcacgttcactcttgctgatagtaaagtgataagcgtgtcggttgtttcttcgatctcagatgttgcatcgagcgaatgggacgcttgtgctttggatgcgactggccctgacaacttcaatccattcctttcgcatgcctttttgtcgaccttagagcactctgcttccgctgtcagggaaactggttggatcccacaccacatcgttgccaaagccaacaacaacagcaacaacaacgttgtagccgttgtcccactctatcttaaaacccactcctacggcgaatttgtttttgatcattcttgggctaatgcttaccattcttatggctacaattattaccccaagttacaatcttgtgtccccttcacacctgtaactggtccaaggatcttacttcgtaacacctccttcaaacatcaagttttcgacattattgtctccgcaatgaaggaactcgctctcacctcccagctttcatcattacatgttacttttccctctgaaaatgagtggcacaagctcactgagaaaggcttcctccccaggattggaatgcagtaccactggaaaaaccgtaactacaaaaattttgatgacttcttgatggacatgaagcaaagtaaaagaaaaaatatacgtcaagagcgcaaaaagatctcagcccagaacttgattatgaaacgcctccggggttatgaaataaaggctaggcactgggattccttctactctttttacaggaacacaactgataacaaatggggcactcctcacctgacaagggaattttttcatgagctgggagcaaaaatgggagataatgtgctacttgtggtggctgaagaaggggatgaactagttgctggagccctaaatcttatcggaggagataccttgtttgggcgcctatggggatgtcagccacgaagttactacccaagtttgcattttgaagcgtgttattaccaggcaattgaagcagctattgaactcaatcttaaaactgtagaggcaggagctcagggtgaacacaagattcagcggggatatcttcctgtgacaacttatagctgccattaccttattgatgaagaatttagagaagctatacaagattttttaatacgtgaagctgctcaggtgaagctagttataaaactcttgcatgattctggtccttttaaggaaggtatcctttagaaagtaaatttatgggtatagtatttgcaaatatgtatatgattgtaataatttatttataatttagcagaaatgtatatacagctgaagtaatgag

SEQ ID NO: 53935 - protein, 458 aa, Glycine max
  peptide (1)..(458): Ceres Seq. ID no. 14307733
  misc_feature (68)..(455): Pfam Name: Protein of unknown function, DUF482 Pfam Description: Protein of unknown function, DUF482
  misc_feature (69)..(455): Homolog of NCBI NO: 16126395 NR Description: conserved hypothetical protein [Caulobacter
  misc_feature (64)..(455): Homolog of NCBI NO: 17987101 NR Description: Hypothetical Cytosolic Protein [Brucella
  misc_feature (97)..(456): Homolog of NCBI NO: 27380245 NR Description: blr5134 [Bradyrhizobium japonicum]
  misc_feature (64)..(455): Homolog of NCBI NO: 23502045 NR Description: conserved hypothetical protein [Brucella suis
  misc_feature (68)..(455): Homolog of NCBI NO: 23013014 NR Description: hypothetical protein [Magnetospirillum
  misc_feature (68)..(456): Homolog of NCBI NO: 22968368 NR Description: hypothetical protein [Rhodospirillum rubrum]
  misc_feature (51)..(456): Homolog of NCBI NO: 39936202 NR Description: DUF482 [Rhodopseudomonas palustris]
  misc_feature (51)..(456): Homolog of NCBI NO: 22965051 NR Description: hypothetical protein [Rhodopseudomonas palustris]
  misc_feature (34)..(441): Homolog of NCBI NO: 32479677 NR Description: P0076O17.10 [Oryza sativa (japonica
  misc_feature (1)..(457): Homolog of NCBI NO: 15227826 NR Description: expressed protein [Arabidopsis thaliana]
MWCSGEVGMAAVSVSVTVRVRWCTRKPPTPTPTRFSVNALFGDWGFGNRTRNSLQQQFTFTLADSKVISVSVVSSISDVASSEWDACALDATGPDNFNPFLSHAFLSTLEHSASAVRETGWIPHHIVAKANNNSNNNVVAVVPLYLKTHSYGEFVFDHSWANAYHSYGYNYYPKLQSCVPFTPVTGPRILLRNTSFKHQVFDIIVSAMKELALTSQLSSLHVTFPSENEWHKLTEKGFLPRIGMQYHWKNRNYKNFDDFLMDMKQSKRKNIRQERKKISAQNLIMKRLRGYEIKARHWDSFYSFYRNTTDNKWGTPHLTREFFHELGAKMGDNVLLVVAEEGDELVAGALNLIGGDTLFGRLWGCQPRSYYPSLHFEACYYQAIEAAIELNLKTVEAGAQGEHKIQRGYLPVTTYSCHYLIDEEFREAIQDFLIREAAQVKLVIKLLHDSGPFKEGIL

SEQ ID NO: 53936 - protein, 450 aa, Glycine max
  peptide (1)..(450): Ceres Seq. ID no. 14307734
  misc_feature (60)..(447): Pfam Name: Protein of unknown function, DUF482 Pfam Description: Protein of unknown function, DUF482
  misc_feature (61)..(447): Homolog of NCBI NO: 16126395 NR Description: conserved hypothetical protein [Caulobacter
  misc_feature (56)..(447): Homolog of NCBI NO: 17987101 NR Description: Hypothetical Cytosolic Protein [Brucella
  misc_feature (89)..(448): Homolog of NCBI NO: 27380245 NR Description: blr5134 [Bradyrhizobium japonicum]
  misc_feature (56)..(447): Homolog of NCBI NO: 23502045 NR Description: conserved hypothetical protein [Brucella suis
  misc_feature (60)..(447): Homolog of NCBI NO: 23013014 NR Description: hypothetical protein [Magnetospirillum
  misc_feature (60)..(448): Homolog of NCBI NO: 22968368 NR Description: hypothetical protein [Rhodospirillum rubrum]
  misc_feature (43)..(448): Homolog of NCBI NO: 39936202 NR Description: DUF482 [Rhodopseudomonas palustris]
  misc_feature (43)..(448): Homolog of NCBI NO: 22965051 NR Description: hypothetical protein [Rhodopseudomonas palustris]
  misc_feature (26)..(433): Homolog of NCBI NO: 32479677 NR Description: P0076O17.10 [Oryza sativa (japonica
  misc_feature (1)..(449): Homolog of NCBI NO: 15227826 NR Description: expressed protein [Arabidopsis thaliana]
MAAVSVSVTVRVRWCTRKPPTPTPTRFSVNALFGDWGFGNRTRNSLQQQFTFTLADSKVISVSVVSSISDVASSEWDACALDATGPDNFNPFLSHAFLSTLEHSASAVRETGWIPHHIVAKANNNSNNNVVAVVPLYLKTHSYGEFVFDHSWANAYHSYGYNYYPKLQSCVPFTPVTGPRILLRNTSFKHQVFDIIVSAMKELALTSQLSSLHVTFPSENEWHKLTEKGFLPRIGMQYHWKNRNYKNFDDFLMDMKQSKRKNIRQERKKISAQNLIMKRLRGYEIKARHWDSFYSFYRNTTDNKWGTPHLTREFFHELGAKMGDNVLLVVAEEGDELVAGALNLIGGDTLFGRLWGCQPRSYYPSLHFEACYYQAIEAAIELNLKTVEAGAQGEHKIQRGYLPVTTYSCHYLIDEEFREAIQDFLIREAAQVKLVIKLLHDSGPFKEGIL

SEQ ID NO: 53937 - protein, 251 aa, Glycine max
  peptide (1)..(251): Ceres Seq. ID no. 14307735
  misc_feature (1)..(248): Pfam Name: Protein of unknown function, DUF482 Pfam Description: Protein of unknown function, DUF482
  misc_feature (1)..(248): Homolog of NCBI NO: 16126395 NR Description: conserved hypothetical protein [Caulobacter
  misc_feature (1)..(248): Homolog of NCBI NO: 17987101 NR Description: Hypothetical Cytosolic Protein [Brucella
  misc_feature (1)..(249): Homolog of NCBI NO: 27380245 NR Description: blr5134 [Bradyrhizobium japonicum]
  misc_feature (1)..(248): Homolog of NCBI NO: 23502045 NR Description: conserved hypothetical protein [Brucella suis
  misc_feature (1)..(248): Homolog of NCBI NO: 23013014 NR Description: hypothetical protein [Magnetospirillum
  misc_feature (1)..(249): Homolog of NCBI NO: 22968368 NR Description: hypothetical protein [Rhodospirillum rubrum]
  misc_feature (1)..(249): Homolog of NCBI NO: 39936202 NR Description: DUF482 [Rhodopseudomonas palustris]
  misc_feature (1)..(249): Homolog of NCBI NO: 22965051 NR Description: hypothetical protein [Rhodopseudomonas palustris]
  misc_feature (1)..(234): Homolog of NCBI NO: 32479677 NR Description: P0076O17.10 [Oryza sativa (japonica
  misc_feature (1)..(250): Homolog of NCBI NO: 15227826 NR Description: expressed protein [Arabidopsis thaliana]
MKELALTSQLSSLHVTFPSENEWHKLTEKGFLPRIGMQYHWKNRNYKNFDDFLMDMKQSKRKNIRQERKKISAQNLIMKRLRGYEIKARHWDSFYSFYRNTTDNKWGTPHLTREFFHELGAKMGDNVLLVVAEEGDELVAGALNLIGGDTLFGRLWGCQPRSYYPSLHFEACYYQAIEAAIELNLKTVEAGAQGEHKIQRGYLPVTTYSCHYLIDEEFREAIQDFLIREAAQVKLVIKLLHDSGPFKEGIL

SEQ ID NO: 53938 - DNA, 1233 bp, Glycine max
  misc_feature (1)..(1233): Ceres Seq. ID no. 14307820
gatgcgaaaatatctcgttcatgttaatgttatgataacgaggaatggactatgatgctgttctgttggtgacggtgtgattgattgtgacgaaatctgacaatgaagcgtggagcattgttgtcagtgcttgcctgcgccttcgcggcggtgatctgggcagcgaacggcgacgacaacctcgtcccgcctcgccgggaagtgtacggcaatgggcgaatattcgacatcagtcatcggtaccaacccgagatgccggaatgggaatcgaatgacggcatagggcagttcctgtggcttcccaagagcatgaagaacggttccctcgccaacaactccgaaatgaagtttcccacccacaccggcacgcacgtcgatgcccccggtcacgtgttcgaccactacttccacgccggcttcgatgtcgacacgctcgacttggacatcctcaacggacctgctatgttggttgatgttccaagagatagtaatattaccgctcaagttatgaagtcgttgaatattccaaggggtgtaatacgtgttctcttccgaactttaaataccgaccggcggctgatgtttcagaaggaatgggactcaagctatgtgggattcacagccgatggagccaaatggctagtggagaacacagatatcaaacttgtaggaattgattacctatctgttgcttcttatgattacttgattccatctcaccttgtttttctaaaagacagggagatcattctcgtggaaggcttgaagcttgatgatgttccagcagggttatattcagtccattgcttacctcttaggttggctggtgctgagggatcaccaatacggtgcattctgattaaaaattagggtgtccacatgtctgtgttcggtgtccgcgtcggtgtcggtgcttcataggctggaactgataaattggcatgggggtgtggtgtccttatggagcaagatagtttcaatgttgtgcaacaacttttgtagcttatgtttacacttactaaaaacatgcataagcacttcaaaaaatcattttgaaaaggaaaataatgtatatatagataatttgcacatttcattagcacttcaagagagatgcaacgatattggcattgcgctgaatttggttttcttttgtctgctaggttggaaaggaataagttggcacaatggtgtctttatggagcaagatagtatcaataatgtttgttaaag

SEQ ID NO: 53939 - protein, 255 aa, Glycine max
  peptide (1)..(255): Ceres Seq. ID no. 14307821
  misc_feature (40)..(240): Pfam Name: Putative cyclase Pfam Description: Putative cyclase
  misc_feature (40)..(252): Homolog of NCBI NO: 23056289 NR Description: hypothetical protein [Geobacter metallireducens]
  misc_feature (39)..(252): Homolog of NCBI NO: 39998438 NR Description: cyclase, putative [Geobacter sulfurreducens PCA]
  misc_feature (39)..(255): Homolog of NCBI NO: 23016903 NR Description: hypothetical protein [Magnetospirillum
  misc_feature (40)..(252): Homolog of NCBI NO: 16330650 NR Description: hypothetical protein [Synechocystis sp. PCC 6803]
  misc_feature (25)..(132): Homolog of NCBI NO: 7486023 NR Description: hypothetical protein F23E12.220 - Arabidopsis
  misc_feature (14)..(217): Homolog of NCBI NO: 7486287 NR Description: hypothetical protein F28A23.60 - Arabidopsis
  misc_feature (29)..(254): Homolog of NCBI NO: 15219416 NR Description: hypothetical protein [Arabidopsis thaliana]
  misc_feature (14)..(254): Homolog of NCBI NO: 18418393 NR Description: expressed protein [Arabidopsis thaliana]
  misc_feature (28)..(254): Homolog of NCBI NO: 35215089 NR Description: hypothetical protein [Oryza sativa (japonica
  misc_feature (25)..(253): Homolog of NCBI NO: 18418598 NR Description: expressed protein [Arabidopsis thaliana]
MKRGALLSVLACAFAAVIWAANGDDNLVPPRREVYGNGRIFDISHRYQPEMPEWESNDGIGQFLWLPKSMKNGSLANNSEMKFPTHTGTHVDAPGHVFDHYFHAGFDVDTLDLDILNGPAMLVDVPRDSNITAQVMKSLNIPRGVIRVLFRTLNTDRRLMFQKEWDSSYVGFTADGAKWLVENTDIKLVGIDYLSVASYDYLIPSHLVFLKDREIILVEGLKLDDVPAGLYSVHCLPLRLAGAEGSPIRCILIKN

SEQ ID NO: 53940 - protein, 205 aa, Glycine max
  peptide (1)..(205): Ceres Seq. ID no. 14307822
  misc_feature (1)..(190): Pfam Name: Putative cyclase Pfam Description: Putative cyclase
  misc_feature (1)..(202): Homolog of NCBI NO: 23056289 NR Description: hypothetical protein [Geobacter metallireducens]
  misc_feature (1)..(202): Homolog of NCBI NO: 39998438 NR Description: cyclase, putative [Geobacter sulfurreducens PCA]
  misc_feature (1)..(205): Homolog of NCBI NO: 23016903 NR Description: hypothetical protein [Magnetospirillum
  misc_feature (1)..(202): Homolog of NCBI NO: 16330650 NR Description: hypothetical protein [Synechocystis sp. PCC 6803]
  misc_feature (1)..(82): Homolog of NCBI NO: 7486023 NR Description: hypothetical protein F23E12.220 - Arabidopsis
  misc_feature (1)..(167): Homolog of NCBI NO: 7486287 NR Description: hypothetical protein F28A23.60 - Arabidopsis
  misc_feature (1)..(204): Homolog of NCBI NO: 15219416 NR Description: hypothetical protein [Arabidopsis thaliana]
  misc_feature (1)..(204): Homolog of NCBI NO: 18418393 NR Description: expressed protein [Arabidopsis thaliana]
  misc_feature (1)..(204): Homolog of NCBI NO: 35215089 NR Description: hypothetical protein [Oryza sativa (japonica
  misc_feature (1)..(203): Homolog of NCBI NO: 18418598 NR Description: expressed protein [Arabidopsis thaliana]
MPEWESNDGIGQFLWLPKSMKNGSLANNSEMKFPTHTGTHVDAPGHVFDHYFHAGFDVDTLDLDILNGPAMLVDVPRDSNITAQVMKSLNIPRGVIRVLFRTLNTDRRLMFQKEWDSSYVGFTADGAKWLVENTDIKLVGIDYLSVASYDYLIPSHLVFLKDREIILVEGLKLDDVPAGLYSVHCLPLRLAGAEGSPIRCILIKN

SEQ ID NO: 53941 - protein, 186 aa, Glycine max
  peptide (1)..(186): Ceres Seq. ID no. 14307823
  misc_feature (1)..(171): Pfam Name: Putative cyclase Pfam Description: Putative cyclase
  misc_feature (1)..(183): Homolog of NCBI NO: 23056289 NR Description: hypothetical protein [Geobacter metallireducens]
  misc_feature (1)..(183): Homolog of NCBI NO: 39998438 NR Description: cyclase, putative [Geobacter sulfurreducens PCA]
  misc_feature (1)..(186): Homolog of NCBI NO: 23016903 NR Description: hypothetical protein [Magnetospirillum
  misc_feature (1)..(183): Homolog of NCBI NO: 16330650 NR Description: hypothetical protein [Synechocystis sp. PCC 6803]
  misc_feature (1)..(63): Homolog of NCBI NO: 7486023 NR Description: hypothetical protein F23E12.220 - Arabidopsis
  misc_feature (1)..(148): Homolog of NCBI NO: 7486287 NR Description: hypothetical protein F28A23.60 - Arabidopsis
  misc_feature (1)..(185): Homolog of NCBI NO: 15219416 NR Description: hypothetical protein [Arabidopsis thaliana]
  misc_feature (1)..(185): Homolog of NCBI NO: 18418393 NR Description: expressed protein [Arabidopsis thaliana]
  misc_feature (1)..(185): Homolog of NCBI NO: 35215089 NR Description: hypothetical protein [Oryza sativa (japonica
  misc_feature (1)..(184): Homolog of NCBI NO: 18418598 NR Description: expressed protein [Arabidopsis thaliana]
MKNGSLANNSEMKFPTHTGTHVDAPGHVFDHYFHAGFDVDTLDLDILNGPAMLVDVPRDSNITAQVMKSLNIPRGVIRVLFRTLNTDRRLMFQKEWDSSYVGFTADGAKWLVENTDIKLVGIDYLSVASYDYLIPSHLVFLKDREIILVEGLKLDDVPAGLYSVHCLPLRLAGAEGSPIRCILIKN

SEQ ID NO: 53942 - DNA, 1175 bp, Glycine max
  misc_feature (1)..(1175): Ceres Seq. ID no. 15224302
aaacttatgttatggcattctaactctgaacgatgaaatgaaatggagttccaagataagcgtttatctctgagatcgagcttgacgttcagcgagacgctgtgcgcagtgttcattccgttcataggaatagtcgaagctttggttttcacattcactagttgcttcgatttccaatctcccaggaataagaagaaacattcttctaccttcgacgacattctcaccctcgccgaggattctccatttagtattaatgaaatcgaggccttgcgtgagttgttcaagaagttgagtagttctatcattgatgatggcctcatccacaaggaagaactcacattggcactgttgaagaccaccaccggggagaatcttttccttgacagggtgtttgatgtctttgatgaaaaaagaaacggcgttatagaatttgaggagtttgtgcatgctctcagtatctttcatccttgtactcctctggaaaagaaaattgattttgcttttagattgtatgacttgagacagactggatatattgagagagaagaagttaggcaaatggttgttgccattctgtcagaatgtggcatggatctggatgatgaaatccttgataccattattgataagacatttcaagatgctgatgctgacaaagatgataaaataagcaaagaagaatggaaggcatttgtcattcgacacccgacactcttgaagcacatgactctacctcatctaaaggacatcactacactgtttaccagtttcatcttcaacaccgaagttgatgattctcactggcatattaatggcaatcattaacattgaggagttgaagcttgttgttctgttgcactctcccaatgttgactgcatcacaccaacgagagaattcatggaagtgaatcaaaccaccaaagagtgttaaaaatttgatccgaaccagtaaaaagggcttaaattgaatccaattactgtttggtttgatcagcttactgtgcatagtacagctcattttggccggtgtacaaaatttattggtatgatcataaaaggtttaactatttagcctccatgtctacacaattttaggccccgatcggggatggttgtaacttatcagttttcaattttgaaatgttatttttaaatccaagacctgtttggat

SEQ ID NO: 53943 - protein, 261 aa, Glycine max
  peptide (1)..(261): Ceres Seq. ID no. 15224303
  misc_feature (113)..(141): Pfam Name: EF hand Pfam Description: EF hand
  misc_feature (58)..(253): Homolog of NCBI NO: 22137326 NR Description: calcineurin B [Pisum sativum]
  misc_feature (37)..(253): Homolog of NCBI NO: 30687272 NR Description: calcineurin B-like protein 3 (CBL3) [Arabidopsis
  misc_feature (31)..(253): Homolog of NCBI NO: 15241101 NR Description: calcineurin B-like protein 2 (gb|AAC26009.1)
  misc_feature (52)..(253): Homolog of NCBI NO: 16924116 NR Description: putative calcineurin B-like protein [Oryza
  misc_feature (37)..(253): Homolog of NCBI NO: 15236778 NR Description: calcineurin B-like protein 3 (CBL3) [Arabidopsis
  misc_feature (12)..(250): Homolog of NCBI NO: 7486208 NR Description: hypothetical protein F26P21.120 - Arabidopsis
  misc_feature (3)..(47): Homolog of NCBI NO: 34913062 NR Description: putative calcium sensor protein
  misc_feature (54)..(235): Homolog of NCBI NO: 34913062 NR Description: putative calcium sensor protein
  misc_feature (9)..(252): Homolog of NCBI NO: 30689575 NR Description: calcineurin B-like protein (fragment)
  misc_feature (7)..(252): Homolog of NCBI NO: 15234011 NR Description: calcineurin B-like protein (fragment)
MEFQDKRLSLRSSLTFSETLCAVFIPFIGIVEALVFTFTSCFDFQSPRNKKKHSSTFDDILTLAEDSPFSINEIEALRELFKKLSSSIIDDGLIHKEELTLALLKTTTGENLFLDRVFDVFDEKRNGVIEFEEFVHALSIFHPCTPLEKKIDFAFRLYDLRQTGYIEREEVRQMVVAILSECGMDLDDEILDTIIDKTFQDADADKDDKISKEEWKAFVIRHPTLLKHMTLPHLKDITTLFTSFIFNTEVDDSHWHINGNH

SEQ ID NO: 53944 - DNA, 2182 bp, Glycine max
  misc_feature (1)..(2182): Ceres Seq. ID no. 15176426
gggaactaaccaaacagatcacagcttctagggttttaggttccgtccaattagcggtttctctctctctctcttcagaaatggataacagtagctcagaacagaccgtgcaagatggcaaactctacagaaacctcaattctctcatcgtcgctcatcttcgcgacaacagtctcactcaggctgcaagtgctgttgcttcagcaaccatgactccactgaatgtagaagcccctcctaacaggcttctcgacctggtcgctaaggttctcactttcgctttggccttgttgggataaatttctccttaagcacttataggacaagaaaataagaaggtgaaatacattgagcatccccataagctaaaatcaactcagggcctgttcggataaacccttcccataagagaagaaaataaaaaggaaaaatgaaacaaatttctccacaagctaaaattagcttacaacgcataagttaaaaatcagcttttggagaaactaatatcagagagtttctataaattagcttatgcataagctaattttagcttttggataagcttattctatttttccttcttattttcttctcatataagtgtttatggaaaaggaaaagtttatccaaacatgctcttatataccttagcttttgaagaagttgaatgaaaagagcttttataaaagtgcgtaagttgattttagtttacgtgagaatatcatcttctcatgtaagtacttatagagaagcttatccagagaggaccttatatgcttttcttatgtgaagtataatcctttcttttattctaagaaaataataacagggtcttgcagtggaaaagggcgacatcacaagaggcactggtttcactgctacactgcctctgcctcacacaacagctattgatttcagctctgtgcctgatgtgaaaggttcatcaaagagcttcccaaagcatgaaacgcgacacctttcagaacacaagatgtgctaggtttagtgctgatggaagatttgttgccactggaagtgcagatacatcaataaagttatttgaggtttcgaagatcaagcagatgttgctgccagaggcaaaggatggtcctgtgcggcctgtcatacgaacatattatgatcatatacaaccaataaatgatctggattttcatccacaaggtactatcctgatatctggagctaaagatcaaacaataaagttttttgatatttcaaaaacaaatgcaaagagagcatacagggttatccaggacacacacaatgttcgatctgtatcttttcatccatctggagactttctgctggcaggaactgatcatgcaattccacatttgtatgatataaatacctttcagtgctatctgtcggcaaatatcccagagactagccccagtggagccataaaccagatcagatattcttgtacaggttccatgtatgttacagcatctaaagatggtgctattcggttgtgggatggcatcactgccaattgtgtgcgctcaataactgcagcacatggaacagctgaggctaccagtgcaatttttacaaaagatcaaaggtttgttctctcttgcgggaaggattctaccttaaagctttgggaagttggctctggaagattagtcaaacaatatctgggtgctatacatacccagctaaggtgccaggctatttttaatgagacagaagaatttattctatccatagatgaactgagcaatgagatcgttatctgggatgcgatgacaacagaaaaagtagcaaagtggccttctaatcatgttggtgcaccccgctggcttgaacactcaccaatagagtctgcttttatttcctgtggaactgataggtcagttcggttctggaaggaaactgtataattaatgggaaggaggctgaatgcatttacagactaattaaagttatcacttattgaaagttaactctgggaatttccatttatttttctttaatttctagtagtagcctaaggctttttgcctgcagaagtagttaatgcattcagctctcggaattggaagattatctatttctgatgatttgttttgctccatctttcaaacaattcttaacagctactactgtttcatattccatattttcacgaaagtagcttaaagttggattggac

SEQ ID NO: 53945 - protein, 315 aa, Glycine max
  peptide (1)..(315): Ceres Seq. ID no. 15176427
  misc_feature (275)..(312): Pfam Name: WD domain, G-beta repeat Pfam Description: WD domain, G-beta repeat
  misc_feature (10)..(311): Homolog of NCBI NO: 27696890 NR Description: Similar to RIKEN cDNA 1700057K18 gene [Xenopus
  misc_feature (10)..(311): Homolog of NCBI NO: 13195628 NR Description: cleavage stimulation factor, 3' pre-RNA, subunit
  misc_feature (10)..(311): Homolog of NCBI NO: 30585197 NR Description: Homo sapiens cleavage stimulation factor, 3'
  misc_feature (10)..(311): Homolog of NCBI NO: 4557491 NR Description: cleavage stimulation factor subunit 1
  misc_feature (10)..(315): Homolog of NCBI NO: 12061242 NR Description: 36I5.2 [Oryza sativa (japonica cultivar-group)]
  misc_feature (10)..(315): Homolog of NCBI NO: 21326112 NR Description: putative cleavage stimulation factor subunit 1
  misc_feature (10)..(312): Homolog of NCBI NO: 12278523 NR Description: putative cleavage stimulation factor subunit 1
  misc_feature (10)..(312): Homolog of NCBI NO: 18496652 NR Description: putative cleavage stimulation factor subunit 1
  misc_feature (10)..(315): Homolog of NCBI NO: 10177317 NR Description: cleavage stimulation factor subunit 1-like
  misc_feature (10)..(315): Homolog of NCBI NO: 15239477 NR Description: transducin / WD-40 repeat protein family
MKRDTFQNTRCARFSADGRFVATGSADTSIKLFEVSKIKQMLLPEAKDGPVRPVIRTYYDHIQPINDLDFHPQGTILISGAKDQTIKFFDISKTNAKRAYRVIQDTHNVRSVSFHPSGDFLLAGTDHAIPHLYDINTFQCYLSANIPETSPSGAINQIRYSCTGSMYVTASKDGAIRLWDGITANCVRSITAAHGTAEATSAIFTKDQRFVLSCGKDSTLKLWEVGSGRLVKQYLGAIHTQLRCQAIFNETEEFILSIDELSNEIVIWDAMTTEKVAKWPSNHVGAPRWLEHSPIESAFISCGTDRSVRFWKETV

SEQ ID NO: 53946 - protein, 275 aa, Glycine max
  peptide (1)..(275): Ceres Seq. ID no. 15176428
  misc_feature (235)..(272): Pfam Name: WD domain, G-beta repeat Pfam Description: WD domain, G-beta repeat
  misc_feature (1)..(271): Homolog of NCBI NO: 27696890 NR Description: Similar to RIKEN cDNA 1700057K18 gene [Xenopus
  misc_feature (1)..(271): Homolog of NCBI NO: 13195628 NR Description: cleavage stimulation factor, 3' pre-RNA, subunit
  misc_feature (1)..(271): Homolog of NCBI NO: 30585197 NR Description: Homo sapiens cleavage stimulation factor, 3'
  misc_feature (1)..(271): Homolog of NCBI NO: 4557491 NR Description: cleavage stimulation factor subunit 1
  misc_feature (1)..(275): Homolog of NCBI NO: 12061242 NR Description: 36I5.2 [Oryza sativa (japonica cultivar-group)]
  misc_feature (1)..(275): Homolog of NCBI NO: 21326112 NR Description: putative cleavage stimulation factor subunit 1
  misc_feature (1)..(272): Homolog of NCBI NO: 12278523 NR Description: putative cleavage stimulation factor subunit 1
  misc_feature (1)..(272): Homolog of NCBI NO: 18496652 NR Description: putative cleavage stimulation factor subunit 1
  misc_feature (1)..(275): Homolog of NCBI NO: 10177317 NR Description: cleavage stimulation factor subunit 1-like
  misc_feature (1)..(275): Homolog of NCBI NO: 15239477 NR Description: transducin / WD-40 repeat protein family
MLLPEAKDGPVRPVIRTYYDHIQPINDLDFHPQGTILISGAKDQTIKFFDISKTNAKRAYRVIQDTHNVRSVSFHPSGDFLLAGTDHAIPHLYDINTFQCYLSANIPETSPSGAINQIRYSCTGSMYVTASKDGAIRLWDGITANCVRSITAAHGTAEATSAIFTKDQRFVLSCGKDSTLKLWEVGSGRLVKQYLGAIHTQLRCQAIFNETEEFILSIDELSNEIVIWDAMTTEKVAKWPSNHVGAPRWLEHSPIESAFISCGTDRSVRFWKETV

SEQ ID NO: 53947 - DNA, 764 bp, Glycine max
  misc_feature (1)..(764): Ceres Seq. ID no. 14307103
attcattccaaccattctccaccattcacaatctaagcatcccaaaactaactattgtgctagctacttagttgtgtaagatggcttccaagggaaatgttgcatccacttatgttgcactactcatgtgtctctatttgctttcattcaccatggtgagctctcaaatctcaaccccaccaccaatgccttctcaaaacggtacatgtcctataaatgtacttcgattgggtgtgtgtgccaatgtgttgaacctggtcaatgttacactaggatcaccaccaaccctcccctgttgcaccctcattcagggtttggctgatgttgatgttggtgtttgcctttgcactgccctcagagctaaccttcttggcatcaacttaaacttgccaatttccttgacattgcttctcaatacctgcagagggaacatccctaatatccagtgttcttaaatttatcttctctagtggaatatacatgtggtctatgaaaaaataaactcatcgcctccatccacaattccacatgttgtctctctcatatttcgtatctttttatggtgtttttttttctttcagttcttgttgtactccatgtatttcccctttttagcgctttccatcctaataataatttctcactccttcgacattgttctactatcggacgaaggattactcattagcctctttcattgcattgcatgtgtaagttgttatacaaataaagttatatgattcctaaaaaaaaaaaaaaaaaag

SEQ ID NO: 53948 - protein, 124 aa, Glycine max
  peptide (1)..(124): Ceres Seq. ID no. 14307104
  misc_feature (43)..(123): Pfam Name: Protease inhibitor/seed storage/LTP family Pfam Description: Protease inhibitor/seed storage/LTP family
  misc_feature (1)..(124): Homolog of NCBI NO: 9211012 NR Description: DC2.15 like protein [Daucus carota]
  misc_feature (34)..(124): Homolog of NCBI NO: 7488729 NR Description: CIC protein, cold-inducible - alfalfa
  misc_feature (33)..(124): Homolog of NCBI NO: 15235388 NR Description: protease inhibitor/seed storage/lipid transfer
  misc_feature (32)..(124): Homolog of NCBI NO: 15235390 NR Description: protease inhibitor/seed storage/lipid transfer
  misc_feature (32)..(124): Homolog of NCBI NO: 15235386 NR Description: protease inhibitor/seed storage/lipid transfer
  misc_feature (5)..(119): Homolog of NCBI NO: 21360370 NR Description: extensin-like protein [Citrus junos]
  misc_feature (31)..(124): Homolog of NCBI NO: 4103618 NR Description: HyPRP [Fragaria x ananassa]
  misc_feature (1)..(123): Homolog of NCBI NO: 10798758 NR Description: P-rich protein Nt-SubC29 [Nicotiana tabacum]
  misc_feature (1)..(124): Homolog of NCBI NO: 18406723 NR Description: protease inhibitor/seed storage/lipid transfer
  misc_feature (1)..(123): Homolog of NCBI NO: 9187460 NR Description: putative 14-kDa proline-rich protein [Cicer
MASKGNVASTYVALLMCLYLLSFTMVSSQISTPPPMPSQNGTCPINVLRLGVCANVLNLVNVTLGSPPTLPCCTLIQGLADVDVGVCLCTALRANLLGINLNLPISLTLLLNTCRGNIPNIQCS

SEQ ID NO: 53949 - protein, 109 aa, Glycine max
  peptide (1)..(109): Ceres Seq. ID no. 14307105
  misc_feature (28)..(108): Pfam Name: Protease inhibitor/seed storage/LTP family Pfam Description: Protease inhibitor/seed storage/LTP family
  misc_feature (1)..(109): Homolog of NCBI NO: 9211012 NR Description: DC2.15 like protein [Daucus carota]
  misc_feature (19)..(109): Homolog of NCBI NO: 7488729 NR Description: CIC protein, cold-inducible - alfalfa
  misc_feature (18)..(109): Homolog of NCBI NO: 15235388 NR Description: protease inhibitor/seed storage/lipid transfer
  misc_feature (17)..(109): Homolog of NCBI NO: 15235390 NR Description: protease inhibitor/seed storage/lipid transfer
  misc_feature (17)..(109): Homolog of NCBI NO: 15235386 NR Description: protease inhibitor/seed storage/lipid transfer
  misc_feature (1)..(104): Homolog of NCBI NO: 21360370 NR Description: extensin-like protein [Citrus junos]
  misc_feature (16)..(109): Homolog of NCBI NO: 4103618 NR Description: HyPRP [Fragaria x ananassa]
  misc_feature (1)..(108): Homolog of NCBI NO: 10798758 NR Description: P-rich protein Nt-SubC29 [Nicotiana tabacum]
  misc_feature (1)..(109): Homolog of NCBI NO: 18406723 NR Description: protease inhibitor/seed storage/lipid transfer
  misc_feature (1)..(108): Homolog of NCBI NO: 9187460 NR Description: putative 14-kDa proline-rich protein [Cicer
MCLYLLSFTMVSSQISTPPPMPSQNGTCPINVLRLGVCANVLNLVNVTLGSPPTLPCCTLIQGLADVDVGVCLCTALRANLLGINLNLPISLTLLLNTCRGNIPNIQCS

SEQ ID NO: 53950 - protein, 100 aa, Glycine max
  peptide (1)..(100): Ceres Seq. ID no. 14307106
  misc_feature (19)..(99): Pfam Name: Protease inhibitor/seed storage/LTP family Pfam Description: Protease inhibitor/seed storage/LTP family
  misc_feature (1)..(100): Homolog of NCBI NO: 9211012 NR Description: DC2.15 like protein [Daucus carota]
  misc_feature (10)..(100): Homolog of NCBI NO: 7488729 NR Description: CIC protein, cold-inducible - alfalfa
  misc_feature (9)..(100): Homolog of NCBI NO: 15235388 NR Description: protease inhibitor/seed storage/lipid transfer
  misc_feature (8)..(100): Homolog of NCBI NO: 15235390 NR Description: protease inhibitor/seed storage/lipid transfer
  misc_feature (8)..(100): Homolog of NCBI NO: 15235386 NR Description: protease inhibitor/seed storage/lipid transfer
  misc_feature (1)..(95): Homolog of NCBI NO: 21360370 NR Description: extensin-like protein [Citrus junos]
  misc_feature (7)..(100): Homolog of NCBI NO: 4103618 NR Description: HyPRP [Fragaria x ananassa]
  misc_feature (1)..(99): Homolog of NCBI NO: 10798758 NR Description: P-rich protein Nt-SubC29 [Nicotiana tabacum]
  misc_feature (1)..(100): Homolog of NCBI NO: 18406723 NR Description: protease inhibitor/seed storage/lipid transfer
  misc_feature (1)..(99): Homolog of NCBI NO: 9187460 NR Description: putative 14-kDa proline-rich protein [Cicer
MVSSQISTPPPMPSQNGTCPINVLRLGVCANVLNLVNVTLGSPPTLPCCTLIQGLADVDVGVCLCTALRANLLGINLNLPISLTLLLNTCRGNIPNIQCS

SEQ ID NO: 53951 - DNA, 1032 bp, Glycine max
  misc_feature (1)..(1032): Ceres Seq. ID no. 14307724
gagtcaagcaatcaacaaagaaaagatggaaaccatttccaaatttccctgttcacatcaacctgtaagatccattagtttccctcctagggtacaccccgtttctcaaagagttgaagcacttctaaaccacctaaaacctcatcattctcagcctatctcaatcactacttgtttagaagctgagacaattcagagcgacttagttgtgcttgctgagttgtacaactgcatggaagaacttttccattctccacaaaccaaacaaactcttctacgctaccaagatggaaaactagtagaagaagcattacgtggctcagtcacattgctagacgcatgtgagtctgcaagggatttgttattggttcttaaggaacacatgcaaacccttcattcagccgtgcgtagaagaaagggagattcaaacattgaaagcatcatttctgcttatgaaagcttcaagaagaaggcaaagaagacaattgctaaacaacttggacaattaaagagaatgaagaataaggctaattccttttctttattggatcaagatcaacagctagtgtttttggctagagttataaaagaagcaagcaccatcaccatctctatattacattctctattagtatttatgtccatgccaacatttggaacaaaagggtcttccctgatctcaaagttgaagccaacggttttgttttcttccctgaaagaacagaagaacacaaatggggttgcagatctcaacaatgttctgtgctctctccttagaagagagaaaaacggtgattccagtggtgaatttcaaagggcactaacagtgttagagacattgaatgttaatattggtggtcttgagggtggattagattgcatatttagatgtttagtcaaaaatagagtgtcgtttttgaatatgctggctcattaaatgaatggagcaaaaatacatatcctctgtaaatgtaaaatctccataaatcagtacatgtttgaacaacagcatcaagattaaaaaaaaaaaag

SEQ ID NO: 53952 - protein, 311 aa, Glycine max
  peptide (1)..(311): Ceres Seq. ID no. 14307725
  misc_feature (71)..(308): Pfam Name: Arabidopsis protein of unknown function Pfam Description: Arabidopsis protein of unknown function
  misc_feature (18)..(309): Homolog of NCBI NO: 15237097 NR Description: expressed protein [Arabidopsis thaliana]
SQAINKEKMETISKFPCSHQPVRSISFPPRVHPVSQRVEALLNHLKPHHSQPISITTCLEAETIQSDLVVLAELYNCMEELFHSPQTKQTLLRYQDGKLVEEALRGSVTLLDACESARDLLLVLKEHMQTLHSAVRRRKGDSNIESIISAYESFKKKAKKTIAKQLGQLKRMKNKANSFSLLDQDQQLVFLARVIKEASTITISILHSLLVFMSMPTFGTKGSSLISKLKPTVLFSSLKEQKNTNGVADLNNVLCSLLRREKNGDSSGEFQRALTVLETLNVNIGGLEGGLDCIFRCLVKNRVSFLNMLAH

SEQ ID NO: 53953 - protein, 303 aa, Glycine max
  peptide (1)..(303): Ceres Seq. ID no. 14307726
  misc_feature (63)..(300): Pfam Name: Arabidopsis protein of unknown function Pfam Description: Arabidopsis protein of unknown function
  misc_feature (10)..(301): Homolog of NCBI NO: 15237097 NR Description: expressed protein [Arabidopsis thaliana]
METISKFPCSHQPVRSISFPPRVHPVSQRVEALLNHLKPHHSQPISITTCLEAETIQSDLVVLAELYNCMEELFHSPQTKQTLLRYQDGKLVEEALRGSVTLLDACESARDLLLVLKEHMQTLHSAVRRRKGDSNIESIISAYESFKKKAKKTIAKQLGQLKRMKNKANSFSLLDQDQQLVFLARVIKEASTITISILHSLLVFMSMPTFGTKGSSLISKLKPTVLFSSLKEQKNTNGVADLNNVLCSLLRREKNGDSSGEFQRALTVLETLNVNIGGLEGGLDCIFRCLVKNRVSFLNMLAH

SEQ ID NO: 53954 - protein, 234 aa, Glycine max
  peptide (1)..(234): Ceres Seq. ID no. 14307727
  misc_feature (1)..(231): Pfam Name: Arabidopsis protein of unknown function Pfam Description: Arabidopsis protein of unknown function
  misc_feature (1)..(232): Homolog of NCBI NO: 15237097 NR Description: expressed protein [Arabidopsis thaliana]
MEELFHSPQTKQTLLRYQDGKLVEEALRGSVTLLDACESARDLLLVLKEHMQTLHSAVRRRKGDSNIESIISAYESFKKKAKKTIAKQLGQLKRMKNKANSFSLLDQDQQLVFLARVIKEASTITISILHSLLVFMSMPTFGTKGSSLISKLKPTVLFSSLKEQKNTNGVADLNNVLCSLLRREKNGDSSGEFQRALTVLETLNVNIGGLEGGLDCIFRCLVKNRVSFLNMLAH

SEQ ID NO: 53955 - DNA, 2108 bp, Glycine max
  misc_feature (1)..(2108): Ceres Seq. ID no. 15169072
agcaacccataaagacggtgactatgagtaatctgcaaaattttaatgctatactctgtgtctctgaatgaccatcaagtgatccggtgcggttggaaagaaccttccgaattacaaagattgactacttgttattctcattggtggagttaatagttattttgtagatgcaaacgtctcagaaacacccaagttcagctggtgtccatttctatcaccagcctgtgcaaggcatttaccaaatgttgcaaagcaatctatgccatgatagcagcagccagggaacaagtgtttcttttgaaacctgcaaggagcaatactttactctagaatcatgcccagcacccactacttgtttcgtggattgtgatgattctccttcctatgccagtgtatcatctaaaaggactccattttctccacagggttctcagtcatgctattcagatcaccagcagtcctctgacaacacctacggttcgccaataagcggcttgtccagtgttgatgacgggcatgaactgaagcacaagcttagagaactggagatttcattgttggggcctgaacaatcagacagttgcggctgctgcgtcgtcaagggtggcctccagggatcatctcagttggctaaacataactgggatcagattgcagagaacgttgcacaatttgacttgaaaggagtcctcagggtatgtgcacaggctgtgtctgatgatgatgttccaacagcaagaggctggatggataatgtattggggaaaatggtatcagtctctggtgatccaatccagaggctgggtgcttacttattggaggggcttagagcaaggttggaatcatcagggaatctcatctacaaatccttgaattgtgaacaaccaacaagcaaagaactaatgagttacatgcacattttgtaccagatttgcccgtactggaagtttgcatacatatctgcaaatgctgtcattgaagaagcaatggcaaatgagtccaggattcacataattgatttccaaattgcgcagggcacgcagtggcatttacttatccaggctcttgcacataggcctgggggacccccctcccttcgtgtgacaggtgttgatgattcgcagtcgattcatgcacgtggtggaggacttcagattgtaggagaaaggctttcagattttgccaggtcttgtggagttccatttgaattccgcagtgctgcaatatctggctgtgaggttgtacgaggaaatattgaagttctacccggagaagctctggctgtaagttttccctatgttttgcaccacatgcctgatgagagtgtgagcactgagaatcacagagatagattgctgaggttggttaagaggttgtctcccaaggttgttaccattgttgagcaagaatccaacaccaacacgtccccattctttcacaggtttgttgagaccctggattattatactgcaatgtttgaatctatagatgtggcttgccccagagatgacaagaagcggattagcgcagagcagcattgcgtggcacgagacatcgtcaacatgatagcttgtgagggggttgagagggtggagaggcatgaacttttgggaaagtggaggtcaagactttccatggctggatttaaacagtgtcaattgagttcttcagtgatggttgctatacaaaatctcctaaaggagttcagtcaaaattataggcttgaacatagagatggtgctctttatcttggttggatgaacagacatatggccacctcttctgcttggaggtgaaactcactgattcgagagtttgcctcctttttgacctttaattgagcataattcaccatatatccgtagtagtctctccataggacttgagatttacctctgttctaaaatgctttctgtagaatctcaaagctcgttgtaaatgctaatactgaaacgaaagaaaagaaacgtctgttatgactctagcattattttcctgccctcttccgctggctgtagtgttattttaactaatgtgatatgagttggatactcgtttagttccttgtactgactcaaatgagaaaccttacactacagatttacatt

SEQ ID NO: 53956 - protein, 542 aa, Glycine max
  peptide (1)..(542): Ceres Seq. ID no. 15169073
  misc_feature (158)..(452): Pfam Name: GRAS family transcription factor Pfam Description: GRAS family transcription factor
  misc_feature (102)..(542): Homolog of NCBI NO: 15218990 NR Description: scarecrow-like transcription factor 1 (SCL1)
  misc_feature (69)..(541): Homolog of NCBI NO: 25989334 NR Description: chitin-inducible gibberellin-responsive protein
  misc_feature (130)..(542): Homolog of NCBI NO: 26450054 NR Description: putative SCARECROW gene regulator [Arabidopsis
  misc_feature (1)..(542): Homolog of NCBI NO: 25405382 NR Description: scarecrow-like protein [imported] - Arabidopsis
  misc_feature (16)..(542): Homolog of NCBI NO: 30694805 NR Description: scarecrow-like transcription factor 5 (SCL5)
  misc_feature (16)..(542): Homolog of NCBI NO: 23397333 NR Description: putative scarecrow protein [Arabidopsis thaliana]
  misc_feature (1)..(542): Homolog of NCBI NO: 14517552 NR Description: F17J6.12/F17J6.12 [Arabidopsis thaliana]
  misc_feature (100)..(542): Homolog of NCBI NO: 15238903 NR Description: phytochrome A signal transduction 1 (PAT1)
  misc_feature (34)..(541): Homolog of NCBI NO: 37533564 NR Description: putative SCARECROW gene regulator-like
  misc_feature (17)..(542): Homolog of NCBI NO: 16930433 NR Description: AT4g17230/dl4650c [Arabidopsis thaliana]
MQTSQKHPSSAGVHFYHQPVQGIYQMLQSNLCHDSSSQGTSVSFETCKEQYFTLESCPAPTTCFVDCDDSPSYASVSSKRTPFSPQGSQSCYSDHQQSSDNTYGSPISGLSSVDDGHELKHKLRELEISLLGPEQSDSCGCCVVKGGLQGSSQLAKHNWDQIAENVAQFDLKGVLRVCAQAVSDDDVPTARGWMDNVLGKMVSVSGDPIQRLGAYLLEGLRARLESSGNLIYKSLNCEQPTSKELMSYMHILYQICPYWKFAYISANAVIEEAMANESRIHIIDFQIAQGTQWHLLIQALAHRPGGPPSLRVTGVDDSQSIHARGGGLQIVGERLSDFARSCGVPFEFRSAAISGCEVVRGNIEVLPGEALAVSFPYVLHHMPDESVSTENHRDRLLRLVKRLSPKVVTIVEQESNTNTSPFFHRFVETLDYYTAMFESIDVACPRDDKKRISAEQHCVARDIVNMIACEGVERVERHELLGKWRSRLSMAGFKQCQLSSSVMVAIQNLLKEFSQNYRLEHRDGALYLGWMNRHMATSSAWR

SEQ ID NO: 53957 - protein, 517 aa, Glycine max
  peptide (1)..(517): Ceres Seq. ID no. 15169074
  misc_feature (133)..(427): Pfam Name: GRAS family transcription factor Pfam Description: GRAS family transcription factor
  misc_feature (77)..(517): Homolog of NCBI NO: 15218990 NR Description: scarecrow-like transcription factor 1 (SCL1)
  misc_feature (44)..(516): Homolog of NCBI NO: 25989334 NR Description: chitin-inducible gibberellin-responsive protein
  misc_feature (105)..(517): Homolog of NCBI NO: 26450054 NR Description: putative SCARECROW gene regulator [Arabidopsis
  misc_feature (1)..(517): Homolog of NCBI NO: 25405382 NR Description: scarecrow-like protein [imported] - Arabidopsis
  misc_feature (1)..(517): Homolog of NCBI NO: 30694805 NR Description: scarecrow-like transcription factor 5 (SCL5)
  misc_feature (1)..(517): Homolog of NCBI NO: 23397333 NR Description: putative scarecrow protein [Arabidopsis thaliana]
  misc_feature (1)..(517): Homolog of NCBI NO: 14517552 NR Description: F17J6.12/F17J6.12 [Arabidopsis thaliana]
  misc_feature (75)..(517): Homolog of NCBI NO: 15238903 NR Description: phytochrome A signal transduction 1 (PAT1)
  misc_feature (9)..(516): Homolog of NCBI NO: 37533564 NR Description: putative SCARECROW gene regulator-like
  misc_feature (1)..(517): Homolog of NCBI NO: 16930433 NR Description: AT4g17230/dl4650c [Arabidopsis thaliana]
MLQSNLCHDSSSQGTSVSFETCKEQYFTLESCPAPTTCFVDCDDSPSYASVSSKRTPFSPQGSQSCYSDHQQSSDNTYGSPISGLSSVDDGHELKHKLRELEISLLGPEQSDSCGCCVVKGGLQGSSQLAKHNWDQIAENVAQFDLKGVLRVCAQAVSDDDVPTARGWMDNVLGKMVSVSGDPIQRLGAYLLEGLRARLESSGNLIYKSLNCEQPTSKELMSYMHILYQICPYWKFAYISANAVIEEAMANESRIHIIDFQIAQGTQWHLLIQALAHRPGGPPSLRVTGVDDSQSIHARGGGLQIVGERLSDFARSCGVPFEFRSAAISGCEVVRGNIEVLPGEALAVSFPYVLHHMPDESVSTENHRDRLLRLVKRLSPKVVTIVEQESNTNTSPFFHRFVETLDYYTAMFESIDVACPRDDKKRISAEQHCVARDIVNMIACEGVERVERHELLGKWRSRLSMAGFKQCQLSSSVMVAIQNLLKEFSQNYRLEHRDGALYLGWMNRHMATSSAWR

SEQ ID NO: 53958 - protein, 349 aa, Glycine max
  peptide (1)..(349): Ceres Seq. ID no. 15169075
  misc_feature (1)..(259): Pfam Name: GRAS family transcription factor Pfam Description: GRAS family transcription factor
  misc_feature (1)..(349): Homolog of NCBI NO: 15218990 NR Description: scarecrow-like transcription factor 1 (SCL1)
  misc_feature (1)..(348): Homolog of NCBI NO: 25989334 NR Description: chitin-inducible gibberellin-responsive protein
  misc_feature (1)..(349): Homolog of NCBI NO: 26450054 NR Description: putative SCARECROW gene regulator [Arabidopsis
  misc_feature (1)..(349): Homolog of NCBI NO: 25405382 NR Description: scarecrow-like protein [imported] - Arabidopsis
  misc_feature (1)..(349): Homolog of NCBI NO: 30694805 NR Description: scarecrow-like transcription factor 5 (SCL5)
  misc_feature (1)..(349): Homolog of NCBI NO: 23397333 NR Description: putative scarecrow protein [Arabidopsis thaliana]
  misc_feature (1)..(349): Homolog of NCBI NO: 14517552 NR Description: F17J6.12/F17J6.12 [Arabidopsis thaliana]
  misc_feature (1)..(349): Homolog of NCBI NO: 15238903 NR Description: phytochrome A signal transduction 1 (PAT1)
  misc_feature (1)..(348): Homolog of NCBI NO: 37533564 NR Description: putative SCARECROW gene regulator-like
  misc_feature (1)..(349): Homolog of NCBI NO: 16930433 NR Description: AT4g17230/dl4650c [Arabidopsis thaliana]
MDNVLGKMVSVSGDPIQRLGAYLLEGLRARLESSGNLIYKSLNCEQPTSKELMSYMHILYQICPYWKFAYISANAVIEEAMANESRIHIIDFQIAQGTQWHLLIQALAHRPGGPPSLRVTGVDDSQSIHARGGGLQIVGERLSDFARSCGVPFEFRSAAISGCEVVRGNIEVLPGEALAVSFPYVLHHMPDESVSTENHRDRLLRLVKRLSPKVVTIVEQESNTNTSPFFHRFVETLDYYTAMFESIDVACPRDDKKRISAEQHCVARDIVNMIACEGVERVERHELLGKWRSRLSMAGFKQCQLSSSVMVAIQNLLKEFSQNYRLEHRDGALYLGWMNRHMATSSAWR

SEQ ID NO: 53959 - DNA, 1171 bp, Glycine max
  misc_feature (1)..(1171): Ceres Seq. ID no. 14303381
accacacactcaggaccctttctctattctcttctgcatcaccattcaccgctgagagaacatcacaacacaacaaacaaaggagcctctcggtttccaatgtgaagagagcgaacatggctctaatcgctgccaggattctcggttccaattcgaggccggcggtcgcgctccaccgctggcagtggctggcgtactcctccgcctccgcggcggtggcggagccggagaccacggaggtgaaggactacgccgattaccggcgctccctgtacggacagatcacgcacaaggcgctcctcgtcgacgccgttggcacgctcgtcctcccttcgcagcccatggctcagatatatagaaagattggggagaagtatggagtggagtattcggaggatgagatactgttcagatacagaagagcgtatggtcagccttggggaaaatctcgtcttagatatgttaatgatggtaggcctttttggcaatacatagttagttattccactggctgttcagatcctcaatattttgaagaactttataactattatacaacggacaaggcatggcacctcaatgatactggtgcagaagaagtattcagagctcttagaaaatcaggtgtgaaattagctgttgtgtcaaactttgacactagattaagacctctcttgcgggcattaaattgtgacaattggtttgatgcagtagcagtgtcagctgaggttgcagcagagaaaccaaatccaactatatttctcaaagcatgtgaattattggatgtaaaacccgaggatgctgttcatgttggggatgaccgcagaaatgatatatggggtgccagggatgctggctgtgatgcttggctttggggaagcgatgttcactcctttaaggaggtagcacagaggattggggttcaggtctgaaagatgatctctttacaataagtttgatgttatgtatagagtcctttaggctttagctgtaaggctgtacatgttctgctcccttttacaatgtatgtatatatgtatgaaaaagatgtgaacctataaaaaccattaataggtgtaggtaggagcttttgtttttccattgatccgtgttttctacgaagtttattttaaaattataaataaaacaaatgaaaaaaaaagaaattaat

SEQ ID NO: 53960 - protein, 309 aa, Glycine max
  peptide (1)..(309): Ceres Seq. ID no. 14303382
  misc_feature (96)..(294): Pfam Name: haloacid dehalogenase-like hydrolase Pfam Description: haloacid dehalogenase-like hydrolase
  misc_feature (97)..(294): Homolog of NCBI NO: 15643933 NR Description: conserved hypothetical protein [Thermotoga
  misc_feature (97)..(290): Homolog of NCBI NO: 23041810 NR Description: hypothetical protein [Trichodesmium erythraeum
  misc_feature (97)..(304): Homolog of NCBI NO: 7505080 NR Description: hypothetical protein K01G5.1 - Caenorhabditis
  misc_feature (97)..(290): Homolog of NCBI NO: 27714603 NR Description: similar to RIKEN cDNA 2810435D12
  misc_feature (97)..(293): Homolog of NCBI NO: 17553988 NR Description: predicted CDS, haloacid dehalogenase-like
  misc_feature (97)..(285): Homolog of NCBI NO: 37520921 NR Description: hypothetical protein gll1352 [Gloeobacter
  misc_feature (96)..(305): Homolog of NCBI NO: 30683719 NR Description: haloacid dehalogenase-like hydrolase family
  misc_feature (96)..(305): Homolog of NCBI NO: 28393346 NR Description: unknown protein [Arabidopsis thaliana]
  misc_feature (59)..(300): Homolog of NCBI NO: 34899086 NR Description: contains ESTs
  misc_feature (51)..(309): Homolog of NCBI NO: 15227309 NR Description: haloacid dehalogenase-like hydrolase family
HTLRTLSLFSSASPFTAERTSQHNKQRSLSVSNVKRANMALIAARILGSNSRPAVALHRWQWLAYSSASAAVAEPETTEVKDYADYRRSLYGQITHKALLVDAVGTLVLPSQPMAQIYRKIGEKYGVEYSEDEILFRYRRAYGQPWGKSRLRYVNDGRPFWQYIVSYSTGCSDPQYFEELYNYYTTDKAWHLNDTGAEEVFRALRKSGVKLAVVSNFDTRLRPLLRALNCDNWFDAVAVSAEVAAEKPNPTIFLKACELLDVKPEDAVHVGDDRRNDIWGARDAGCDAWLWGSDVHSFKEVAQRIGVQV

SEQ ID NO: 53961 - protein, 271 aa, Glycine max
  peptide (1)..(271): Ceres Seq. ID no. 14303383
  misc_feature (58)..(256): Pfam Name: haloacid dehalogenase-like hydrolase Pfam Description: haloacid dehalogenase-like hydrolase
  misc_feature (59)..(256): Homolog of NCBI NO: 15643933 NR Description: conserved hypothetical protein [Thermotoga
  misc_feature (59)..(252): Homolog of NCBI NO: 23041810 NR Description: hypothetical protein [Trichodesmium erythraeum
  misc_feature (59)..(266): Homolog of NCBI NO: 7505080 NR Description: hypothetical protein K01G5.1 - Caenorhabditis
  misc_feature (59)..(252): Homolog of NCBI NO: 27714603 NR Description: similar to RIKEN cDNA 2810435D12
  misc_feature (59)..(255): Homolog of NCBI NO: 17553988 NR Description: predicted CDS, haloacid dehalogenase-like
  misc_feature (59)..(247): Homolog of NCBI NO: 37520921 NR Description: hypothetical protein gll1352 [Gloeobacter
  misc_feature (58)..(267): Homolog of NCBI NO: 30683719 NR Description: haloacid dehalogenase-like hydrolase family
  misc_feature (58)..(267): Homolog of NCBI NO: 28393346 NR Description: unknown protein [Arabidopsis thaliana]
  misc_feature (21)..(262): Homolog of NCBI NO: 34899086 NR Description: contains ESTs
  misc_feature (13)..(271): Homolog of NCBI NO: 15227309 NR Description: haloacid dehalogenase-like hydrolase family
MALIAARILGSNSRPAVALHRWQWLAYSSASAAVAEPETTEVKDYADYRRSLYGQITHKALLVDAVGTLVLPSQPMAQIYRKIGEKYGVEYSEDEILFRYRRAYGQPWGKSRLRYVNDGRPFWQYIVSYSTGCSDPQYFEELYNYYTTDKAWHLNDTGAEEVFRALRKSGVKLAVVSNFDTRLRPLLRALNCDNWFDAVAVSAEVAAEKPNPTIFLKACELLDVKPEDAVHVGDDRRNDIWGARDAGCDAWLWGSDVHSFKEVAQRIGVQV

SEQ ID NO: 53962 - protein, 196 aa, Glycine max
  peptide (1)..(196): Ceres Seq. ID no. 14303384
  misc_feature (1)..(181): Pfam Name: haloacid dehalogenase-like hydrolase Pfam Description: haloacid dehalogenase-like hydrolase
  misc_feature (1)..(181): Homolog of NCBI NO: 15643933 NR Description: conserved hypothetical protein [Thermotoga
  misc_feature (1)..(177): Homolog of NCBI NO: 23041810 NR Description: hypothetical protein [Trichodesmium erythraeum
  misc_feature (1)..(191): Homolog of NCBI NO: 7505080 NR Description: hypothetical protein K01G5.1 - Caenorhabditis
  misc_feature (1)..(177): Homolog of NCBI NO: 27714603 NR Description: similar to RIKEN cDNA 2810435D12
  misc_feature (1)..(180): Homolog of NCBI NO: 17553988 NR Description: predicted CDS, haloacid dehalogenase-like
  misc_feature (1)..(172): Homolog of NCBI NO: 37520921 NR Description: hypothetical protein gll1352 [Gloeobacter
  misc_feature (1)..(192): Homolog of NCBI NO: 30683719 NR Description: haloacid dehalogenase-like hydrolase family
  misc_feature (1)..(192): Homolog of NCBI NO: 28393346 NR Description: unknown protein [Arabidopsis thaliana]
  misc_feature (1)..(187): Homolog of NCBI NO: 34899086 NR Description: contains ESTs
  misc_feature (1)..(196): Homolog of NCBI NO: 15227309 NR Description: haloacid dehalogenase-like hydrolase family
MAQIYRKIGEKYGVEYSEDEILFRYRRAYGQPWGKSRLRYVNDGRPFWQYIVSYSTGCSDPQYFEELYNYYTTDKAWHLNDTGAEEVFRALRKSGVKLAVVSNFDTRLRPLLRALNCDNWFDAVAVSAEVAAEKPNPTIFLKACELLDVKPEDAVHVGDDRRNDIWGARDAGCDAWLWGSDVHSFKEVAQRIGVQV

SEQ ID NO: 53963 - DNA, 1303 bp, Glycine max
  misc_feature (1)..(1303): Ceres Seq. ID no. 14303434
aggagtcagccagacaagcaagccaccctctgctaccgcttctcatccatcatgtcgaatgaactaaaaaactatgatgtttttctcaattttcatggcaaagattccggttacaccttcactggtactctctataatgctttgcgcagcaagagaatcaagacctttttcacaaaacatgaatatggtcgtaaactacacactgatgacagccacattccaccctttactcttaaagcaattaaggaatcaaggatttcggtggttgttttgtcggaaaactatgcatcctcctcaagatgtcttgatgaacttgtggccatccttgagtgtaaaaggacgataaaccaactggtgtggcccatcttttacaaagtggatccgtcgcaagtaaggcaccagaaaggtagctatggagaacacatttgtaattttaaaaaaatttttagagattacaacgattccaatgagagggtgaagcaatggagagcagctttatctgaagtcagcaaattgagtggatggctttacaatgatcggaggtcccagtacgaatatgaattcatcgaaaggatcgtggaatcaaccgtgcaagccttgcccggatatgatgtttttctgagttttaccggagaggatacccgctacactttcacaggttttctctataatgcctttcgccgagagggattcaaaatcttcatggatgatgaggaattggagagtgggaaccaaatttcacagaagcttatgagagcaattgagagttcaaagatttcaattgttgtgctctctgaaaactatgcatattccacctggtgtcttgatgaacttgccaagatcattgagtgtatgaagaccaacaatcaaatggtttggccaatattttacaatgtgcaaaagtcggatgtatgcaatcaaacaaaaagttatggtgaagccatgactgaacatgaaaaaagatttggaaaggactctgagaaggtgcagaaatggaggtctgctttgtctgaaatcaaaaacttggaaggagaccatgtcaaacaaaatgagtaccaacatgaattaatcgaaaggattgtggaaaaggtcattaaaattgaaggtagcaagcatacagcaaatcctttccttttatccaatgacagctacgaggaagaatgagtgaaagagggtcaaatatatgctgtggagctgtgaaactaactgattgtaacctctataactgcccttgaattcatttgttcctatcaatgttgtttttacatccagttcaattcctaaggtttattgtattccttct

SEQ ID NO: 53964 - protein, 387 aa, Glycine max
  peptide (1)..(387): Ceres Seq. ID no. 14303435
  misc_feature (205)..(338): Pfam Name: TIR domain Pfam Description: TIR domain
  misc_feature (78)..(383): Homolog of NCBI NO: 22329811 NR Description: disease resistance protein (TIR-NBS-LRR class),
  misc_feature (25)..(177): Homolog of NCBI NO: 10121908 NR Description: T7N9.23 [Arabidopsis thaliana]
  misc_feature (203)..(383): Homolog of NCBI NO: 10121908 NR Description: T7N9.23 [Arabidopsis thaliana]
RSQPDKQATLCYRFSSIMSNELKNYDVFLNFHGKDSGYTFTGTLYNALRSKRIKTFFTKHEYGRKLHTDDSHIPPFTLKAIKESRISVVVLSENYASSSRCLDELVAILECKRTINQLVWPIFYKVDPSQVRHQKGSYGEHICNFKKIFRDYNDSNERVKQWRAALSEVSKLSGWLYNDRRSQYEYEFIERIVESTVQALPGYDVFLSFTGEDTRYTFTGFLYNAFRREGFKIFMDDEELESGNQISQKLMRAIESSKISIVVLSENYAYSTWCLDELAKIIECMKTNNQMVWPIFYNVQKSDVCNQTKSYGEAMTEHEKRFGKDSEKVQKWRSALSEIKNLEGDHVKQNEYQHELIERIVEKVIKIEGSKHTANPFLLSNDSYEEE

SEQ ID NO: 53965 - protein, 370 aa, Glycine max
  peptide (1)..(370): Ceres Seq. ID no. 14303436
  misc_feature (188)..(321): Pfam Name: TIR domain Pfam Description: TIR domain
  misc_feature (61)..(366): Homolog of NCBI NO: 22329811 NR Description: disease resistance protein (TIR-NBS-LRR class),
  misc_feature (8)..(160): Homolog of NCBI NO: 10121908 NR Description: T7N9.23 [Arabidopsis thaliana]
  misc_feature (186)..(366): Homolog of NCBI NO: 10121908 NR Description: T7N9.23 [Arabidopsis thaliana]
MSNELKNYDVFLNFHGKDSGYTFTGTLYNALRSKRIKTFFTKHEYGRKLHTDDSHIPPFTLKAIKESRISVVVLSENYASSSRCLDELVAILECKRTINQLVWPIFYKVDPSQVRHQKGSYGEHICNFKKIFRDYNDSNERVKQWRAALSEVSKLSGWLYNDRRSQYEYEFIERIVESTVQALPGYDVFLSFTGEDTRYTFTGFLYNAFRREGFKIFMDDEELESGNQISQKLMRAIESSKISIVVLSENYAYSTWCLDELAKIIECMKTNNQMVWPIFYNVQKSDVCNQTKSYGEAMTEHEKRFGKDSEKVQKWRSALSEIKNLEGDHVKQNEYQHELIERIVEKVIKIEGSKHTANPFLLSNDSYEEE

SEQ ID NO: 53966 - DNA, 1359 bp, Glycine max
  misc_feature (1)..(1359): Ceres Seq. ID no. 14307296
aacacaaatttcattttatttatttatttgtttattcatttatttttagaaaaagtggagagccatatggaatttgacgagcacgaggaccaagagcaagaagaggaggaggaggaggaggaaatgggattctcagtggcggcggcggcgagttacgactcgctgggaaacgccgcggtgaggtctaaaattagcggcggcgatggtgttgcggccaccgtgaattccggtcgcaaagggacggtgagatacagagaatgtcagaagaaccatgccgtcagcatcggcggccacgccgtcgacggatgctgcgagttcttggctgccggagaggaaggcacgctggaagccgtaatttgcgccgcctgtaactgccaccgcaacttccaccgcaaggagatcgacggcgaaaccagcccttaccagcaccgttcgcagccacagcctcagcctctgcaccctcagtaccaccaccaattctccccttactaccaccgcgcgcccccaccttccgccgccggatatctccaccaccaccttgtaacacctccggtgtcgcagcaccggcccttggctctgccaccgttagcttctggaggagtgttcagtagggaggaagaggacatgtcaaaccccagctccagcggcggcggcggtggtggcggttttagtggcggtggtggtagcgggagtggaacgaagaagaggtttagaacaaaattcacgcaggagcagaaggataagatgctggcatttgcggagaagctagggtggagaattcagaagcatgacgaagctgctgttgaacaattctgcgctgaaacttgcatcaagagacatgtactcaaggtttggatgcacaataacaaacacactcttgctaattctgagcaacattcggctgggaatggatcgaatcacttgaacagcaccacaataattgagaattctcaattctcctgagggatattaacgaaataaagagaaagaactgaagttggcagaagttcatggaagggtttgcaagtgttcatcttatcagtagcatcaggtgatggtgatcgaggagggggagtacgcaatggaagtatgcggatgagcacagagaataaattccaacataaagttgtatttaacgtgagtggaatgcaagtgcaaagctgtttatgttactactttgctgtgttccttcgcattatttgtcgtctttctttcctgtttttcctccctaacaccgccctagtttagttttattatcgtttgtctctctcatattaatgtctcctcttctatttctttgcttctggacacattagacctgaaagatttaatgagtcaaatagattcatcatgatccgt

SEQ ID NO: 53967 - protein, 320 aa, Glycine max
  peptide (1)..(320): Ceres Seq. ID no. 14307297
  misc_feature (80)..(136): Pfam Name: ZF-HD protein dimerisation region Pfam Description: ZF-HD protein dimerisation region
  misc_feature (234)..(299): Homolog of NCBI NO: 21554149 NR Description: unknown [Arabidopsis thaliana]
  misc_feature (83)..(171): Homolog of NCBI NO: 21554149 NR Description: unknown [Arabidopsis thaliana]
  misc_feature (234)..(290): Homolog of NCBI NO: 18398714 NR Description: expressed protein [Arabidopsis thaliana]
  misc_feature (80)..(136): Homolog of NCBI NO: 18398714 NR Description: expressed protein [Arabidopsis thaliana]
  misc_feature (77)..(309): Homolog of NCBI NO: 32480091 NR Description: OSJNBb0086G13.8 [Oryza sativa (japonica
  misc_feature (234)..(317): Homolog of NCBI NO: 15223757 NR Description: expressed protein [Arabidopsis thaliana]
  misc_feature (78)..(179): Homolog of NCBI NO: 15223757 NR Description: expressed protein [Arabidopsis thaliana]
  misc_feature (82)..(316): Homolog of NCBI NO: 20148768 NR Description: hypothetical protein At2g02540/T822.16
  misc_feature (82)..(316): Homolog of NCBI NO: 15226993 NR Description: expressed protein [Arabidopsis thaliana]
  misc_feature (73)..(291): Homolog of NCBI NO: 18410804 NR Description: expressed protein [Arabidopsis thaliana]
NTNFILFIYLFIHLFLEKVESHMEFDEHEDQEQEEEEEEEEMGFSVAAAASYDSLGNAAVRSKISGGDGVAATVNSGRKGTVRYRECQKNHAVSIGGHAVDGCCEFLAAGEEGTLEAVICAACNCHRNFHRKEIDGETSPYQHRSQPQPQPLHPQYHHQFSPYYHRAPPPSAAGYLHHHLVTPPVSQHRPLALPPLASGGVFSREEEDMSNPSSSGGGGGGGFSGGGGSGSGTKKRFRTKFTQEQKDKMLAFAEKLGWRIQKHDEAAVEQFCAETCIKRHVLKVWMHNNKHTLANSEQHSAGNGSNHLNSTTIIENSQFS

SEQ ID NO: 53968 - protein, 298 aa, Glycine max
  peptide (1)..(298): Ceres Seq. ID no. 14307298
  misc_feature (58)..(114): Pfam Name: ZF-HD protein dimerisation region Pfam Description: ZF-HD protein dimerisation region
  misc_feature (212)..(277): Homolog of NCBI NO: 21554149 NR Description: unknown [Arabidopsis thaliana]
  misc_feature (61)..(149): Homolog of NCBI NO: 21554149 NR Description: unknown [Arabidopsis thaliana]
  misc_feature (212)..(268): Homolog of NCBI NO: 18398714 NR Description: expressed protein [Arabidopsis thaliana]
  misc_feature (58)..(114): Homolog of NCBI NO: 18398714 NR Description: expressed protein [Arabidopsis thaliana]
  misc_feature (55)..(287): Homolog of NCBI NO: 32480091 NR Description: OSJNBb0086G13.8 [Oryza sativa (japonica
  misc_feature (212)..(295): Homolog of NCBI NO: 15223757 NR Description: expressed protein [Arabidopsis thaliana]
  misc_feature (56)..(157): Homolog of NCBI NO: 15223757 NR Description: expressed protein [Arabidopsis thaliana]
  misc_feature (60)..(294): Homolog of NCBI NO: 20148768 NR Description: hypothetical protein At2g02540/T822.16
  misc_feature (60)..(294): Homolog of NCBI NO: 15226993 NR Description: expressed protein [Arabidopsis thaliana]
  misc_feature (51)..(269): Homolog of NCBI NO: 18410804 NR Description: expressed protein [Arabidopsis thaliana]
MEFDEHEDQEQEEEEEEEEMGFSVAAAASYDSLGNAAVRSKISGGDGVAATVNSGRKGTVRYRECQKNHAVSIGGHAVDGCCEFLAAGEEGTLEAVICAACNCHRNFHRKEIDGETSPYQHRSQPQPQPLHPQYHHQFSPYYHRAPPPSAAGYLHHHLVTPPVSQHRPLALPPLASGGVFSREEEDMSNPSSSGGGGGGGFSGGGGSGSGTKKRFRTKFTQEQKDKMLAFAEKLGWRIQKHDEAAVEQFCAETCIKRHVLKVWMHNNKHTLANSEQHSAGNGSNHLNSTTIIENSQFS

SEQ ID NO: 53969 - protein, 279 aa, Glycine max
  peptide (1)..(279): Ceres Seq. ID no. 14307299
  misc_feature (39)..(95): Pfam Name: ZF-HD protein dimerisation region Pfam Description: ZF-HD protein dimerisation region
  misc_feature (193)..(258): Homolog of NCBI NO: 21554149 NR Description: unknown [Arabidopsis thaliana]
  misc_feature (42)..(130): Homolog of NCBI NO: 21554149 NR Description: unknown [Arabidopsis thaliana]
  misc_feature (193)..(249): Homolog of NCBI NO: 18398714 NR Description: expressed protein [Arabidopsis thaliana]
  misc_feature (39)..(95): Homolog of NCBI NO: 18398714 NR Description: expressed protein [Arabidopsis thaliana]
  misc_feature (36)..(268): Homolog of NCBI NO: 32480091 NR Description: OSJNBb0086G13.8 [Oryza sativa (japonica
  misc_feature (193)..(276): Homolog of NCBI NO: 15223757 NR Description: expressed protein [Arabidopsis thaliana]
  misc_feature (37)..(138): Homolog of NCBI NO: 15223757 NR Description: expressed protein [Arabidopsis thaliana]
  misc_feature (41)..(275): Homolog of NCBI NO: 20148768 NR Description: hypothetical protein At2g02540/T822.16
  misc_feature (41)..(275): Homolog of NCBI NO: 15226993 NR Description: expressed protein [Arabidopsis thaliana]
  misc_feature (32)..(250): Homolog of NCBI NO: 18410804 NR Description: expressed protein [Arabidopsis thaliana]
MGFSVAAAASYDSLGNAAVRSKISGGDGVAATVNSGRKGTVRYRECQKNHAVSIGGHAVDGCCEFLAAGEEGTLEAVICAACNCHRNFHRKEIDGETSPYQHRSQPQPQPLHPQYHHQFSPYYHRAPPPSAAGYLHHHLVTPPVSQHRPLALPPLASGGVFSREEEDMSNPSSSGGGGGGGFSGGGGSGSGTKKRFRTKFTQEQKDKMLAFAEKLGWRIQKHDEAAVEQFCAETCIKRHVLKVWMHNNKHTLANSEQHSAGNGSNHLNSTTIIENSQFS

SEQ ID NO: 53970 - DNA, 1342 bp, Glycine max
  misc_feature (1)..(1342): Ceres Seq. ID no. 14315346
gattcactactattatttccccttctctgttcgcgccactttgcctccactaccgcgcagaatccttccacattgaatgctcttcaggatcattatcaggccattgattttcctggaggagcagtacaattcatccctgaaatgaggtttatatccgaatcacctaaagagagaataccttgctaccgtgtccttgatgataatgggcaaccaattttgggccataattttgtgcaggtcagcaaggaagttgctgttaagatgtatactgacatggtcactctccgatctatggacactatcttctatgaagcacaaaggcaaggtagaatatcattttatgtgacagcaattggggaggaggctatcaatgttgcttcagctgcagctcttgccatggacgatgttgttttccctcagtatagggaagcgggagtcttgttatggcgtggtttcactttgcaagaatttgcaaaccagttattttccaatatatatgattatgggaaaggaaggcagatgccagctcattatgggtccaaaaagcacaattactttacagtagcatcaactattgctacacaaatttcccatgctgttggagccgcttattccttaaagatggataaaaaggatgcatgtgccgtcacttacttcggtgatggtggctcaagtgagggtgatttccacgctgccttaaattttgcagcagttttggaggccccagttatttttatatgccggaacaatggatgggctatcagcacacccatttcagatcagtttcgaagtgatggtgttgttgtgaaagggcaggcatatggagttcgtagcattcgtgtagatggcaatgatgccctggctatctatagtgctattcaagctgctcgtcaaatggcaattactgaagagagaccaattctaatagaagctcttacatatagagttggacaccacaccacatcagatgactctaccaagtatcgtccagcgaatgagattgaatggtggagagtggcacgtgatcctgtggttagatttagaaagtggatagaaaagcatggctggtggaatgatatggctgagtcagagcttataaacaatttgagacagcagcttctacatacaattcaagaagcagagggtgtagaaaaacctccacttgcagatagttttagtgatgtttatgatgtcgctccttttaatctccgtgaacaggagcaatggctgaaggagattgtaagaaaacaaccacaagagtatccaacaaatatttctgtgtagacttcaatatgctaatacacattacattgcttctaataaaaaattctcttcaaacttg

SEQ ID NO: 53971 - protein, 427 aa, Glycine max
  peptide (1)..(427): Ceres Seq. ID no. 14315347
  misc_feature (89)..(388): Pfam Name: Dehydrogenase E1 component Pfam Description: Dehydrogenase E1 component
  misc_feature (29)..(422): Homolog of NCBI NO: 8176547 NR Description: branched-chain alpha-keto acid dehydrogenase E1
  misc_feature (29)..(422): Homolog of NCBI NO: 11386135 NR Description: branched chain keto acid dehydrogenase E1, alpha
  misc_feature (29)..(422): Homolog of NCBI NO: 386841 NR Description: branched-chain alpha-keto acid dehydrogenase
  misc_feature (29)..(422): Homolog of NCBI NO: 27806229 NR Description: branched chain keto acid dehydrogenase E1, alpha
  misc_feature (19)..(422): Homolog of NCBI NO: 31207713 NR Description: ENSANGP00000024601 [Anopheles gambiae]
  misc_feature (30)..(424): Homolog of NCBI NO: 7431561 NR Description: 3-methyl-2-oxobutanoate dehydrogenase (lipoamide)
  misc_feature (33)..(427): Homolog of NCBI NO: 11357201 NR Description: branched-chain alpha keto-acid dehydrogenase E1
  misc_feature (33)..(427): Homolog of NCBI NO: 15218984 NR Description: branched-chain alpha keto-acid dehydrogenase
  misc_feature (22)..(425): Homolog of NCBI NO: 9955517 NR Description: branched-chain alpha keto-acid dehydrogenase E1
  misc_feature (18)..(425): Homolog of NCBI NO: 18415939 NR Description: branched-chain alpha keto-acid dehydrogenase E1
DSLLLFPLLCSRHFASTTAQNPSTLNALQDHYQAIDFPGGAVQFIPEMRFISESPKERIPCYRVLDDNGQPILGHNFVQVSKEVAVKMYTDMVTLRSMDTIFYEAQRQGRISFYVTAIGEEAINVASAAALAMDDVVFPQYREAGVLLWRGFTLQEFANQLFSNIYDYGKGRQMPAHYGSKKHNYFTVASTIATQISHAVGAAYSLKMDKKDACAVTYFGDGGSSEGDFHAALNFAAVLEAPVIFICRNNGWAISTPISDQFRSDGVVVKGQAYGVRSIRVDGNDALAIYSAIQAARQMAITEERPILIEALTYRVGHHTTSDDSTKYRPANEIEWWRVARDPVVRFRKWIEKHGWWNDMAESELINNLRQQLLHTIQEAEGVEKPPLADSFSDVYDVAPFNLREQEQWLKEIVRKQPQEYPTNISV

SEQ ID NO: 53972 - protein, 380 aa, Glycine max
  peptide (1)..(380): Ceres Seq. ID no. 14315348
  misc_feature (42)..(341): Pfam Name: Dehydrogenase E1 component Pfam Description: Dehydrogenase E1 component
  misc_feature (1)..(375): Homolog of NCBI NO: 11386135 NR Description: branched chain keto acid dehydrogenase E1, alpha
  misc_feature (1)..(375): Homolog of NCBI NO: 8176547 NR Description: branched-chain alpha-keto acid dehydrogenase E1
  misc_feature (1)..(375): Homolog of NCBI NO: 386841 NR Description: branched-chain alpha-keto acid dehydrogenase
  misc_feature (1)..(375): Homolog of NCBI NO: 27806229 NR Description: branched chain keto acid dehydrogenase E1, alpha
  misc_feature (1)..(375): Homolog of NCBI NO: 31207713 NR Description: ENSANGP00000024601 [Anopheles gambiae]
  misc_feature (1)..(377): Homolog of NCBI NO: 7431561 NR Description: 3-methyl-2-oxobutanoate dehydrogenase (lipoamide)
  misc_feature (1)..(380): Homolog of NCBI NO: 11357201 NR Description: branched-chain alpha keto-acid dehydrogenase E1
  misc_feature (1)..(380): Homolog of NCBI NO: 15218984 NR Description: branched-chain alpha keto-acid dehydrogenase
  misc_feature (1)..(378): Homolog of NCBI NO: 9955517 NR Description: branched-chain alpha keto-acid dehydrogenase E1
  misc_feature (1)..(378): Homolog of NCBI NO: 18415939 NR Description: branched-chain alpha keto-acid dehydrogenase E1
MRFISESPKERIPCYRVLDDNGQPILGHNFVQVSKEVAVKMYTDMVTLRSMDTIFYEAQRQGRISFYVTAIGEEAINVASAAALAMDDVVFPQYREAGVLLWRGFTLQEFANQLFSNIYDYGKGRQMPAHYGSKKHNYFTVASTIATQISHAVGAAYSLKMDKKDACAVTYFGDGGSSEGDFHAALNFAAVLEAPVIFICRNNGWAISTPISDQFRSDGVVVKGQAYGVRSIRVDGNDALAIYSAIQAARQMAITEERPILIEALTYRVGHHTTSDDSTKYRPANEIEWWRVARDPVVRFRKWIEKHGWWNDMAESELINNLRQQLLHTIQEAEGVEKPPLADSFSDVYDVAPFNLREQEQWLKEIVRKQPQEYPTNISV

SEQ ID NO: 53973 - protein, 340 aa, Glycine max
  peptide (1)..(340): Ceres Seq. ID no. 14315349
  misc_feature (2)..(301): Pfam Name: Dehydrogenase E1 component Pfam Description: Dehydrogenase E1 component
  misc_feature (1)..(335): Homolog of NCBI NO: 11386135 NR Description: branched chain keto acid dehydrogenase E1, alpha
  misc_feature (1)..(335): Homolog of NCBI NO: 8176547 NR Description: branched-chain alpha-keto acid dehydrogenase E1
  misc_feature (1)..(335): Homolog of NCBI NO: 386841 NR Description: branched-chain alpha-keto acid dehydrogenase
  misc_feature (1)..(335): Homolog of NCBI NO: 27806229 NR Description: branched chain keto acid dehydrogenase E1, alpha
  misc_feature (1)..(335): Homolog of NCBI NO: 31207713 NR Description: ENSANGP00000024601 [Anopheles gambiae]
  misc_feature (1)..(337): Homolog of NCBI NO: 7431561 NR Description: 3-methyl-2-oxobutanoate dehydrogenase (lipoamide)
  misc_feature (1)..(340): Homolog of NCBI NO: 11357201 NR Description: branched-chain alpha keto-acid dehydrogenase E1
  misc_feature (1)..(340): Homolog of NCBI NO: 15218984 NR Description: branched-chain alpha keto-acid dehydrogenase
  misc_feature (1)..(338): Homolog of NCBI NO: 9955517 NR Description: branched-chain alpha keto-acid dehydrogenase E1
  misc_feature (1)..(338): Homolog of NCBI NO: 18415939 NR Description: branched-chain alpha keto-acid dehydrogenase E1
MYTDMVTLRSMDTIFYEAQRQGRISFYVTAIGEEAINVASAAALAMDDVVFPQYREAGVLLWRGFTLQEFANQLFSNIYDYGKGRQMPAHYGSKKHNYFTVASTIATQISHAVGAAYSLKMDKKDACAVTYFGDGGSSEGDFHAALNFAAVLEAPVIFICRNNGWAISTPISDQFRSDGVVVKGQAYGVRSIRVDGNDALAIYSAIQAARQMAITEERPILIEALTYRVGHHTTSDDSTKYRPANEIEWWRVARDPVVRFRKWIEKHGWWNDMAESELINNLRQQLLHTIQEAEGVEKPPLADSFSDVYDVAPFNLREQEQWLKEIVRKQPQEYPTNISV

SEQ ID NO: 53974 - DNA, 1794 bp, Glycine max
  misc_feature (1)..(1794): Ceres Seq. ID no. 14304855
tctctctctttcacacagagagatactttctctctctacaccgcaatggacgccggcgaagccctctccgacgatccgaatcggcccaattccgccgccgacgcagctccggcccccgcgggagcaaggtacaagctcctgtcgccggctaagctcccgatctcccgctccccgtgcgtcacgatttcgccggggctcagtccgacgtcgtttctcgagtcgccggtgctgctctccaacatgaaggtggaaccttcaccgactacagggtcgctttctttgcttcatcaaacagcatatggttccatgacttctgctgcatctgctacatttcctgtaaccactgtgtgcttcaatagcaataccgttgatgagagaaaacctagcttctttgagtttaaaccacacagtggatcaaatatggttcccgcagactttgacaaccatgcaagtgaaaaatctactcaaatagacagtcaaggaaaagctcaagcttttgattcatcagccttagtaaaaaatgagtcagcatccccttcaaatgaattaagtctatcatcgcctgttcaaatggattgctcaggagctagtgcccgtgttgaaggtgatttggatgaattgaaccctaggagcaacataacaactgggcttcaagcatcacaagttgacaatagaggtagtggacttaccgttgcagctgagcgagtatctgatgatggatacaactggagaaaatatgggcaaaaacatgttaaaggaagtgaatttccacgcagttattacaaatgtacacatcctaactgtgaagttaagaaactatttgaacgctcccatgatggacaaatcactgagataatttacaagggaacacatgatcatcctaaacctcaaccaaaccgccgttactctgcaggaactataatgtctgtgcaagaagacagatctgataaagcttctttgactagccgagatgacaaaggatccaatatgtgtggccaggggtctcacctggctgagcccgacggtaaaccagagttattgcctgtagcaacaaatgatggtgatctagatggtttgggggttttgtcaaaccggaataatgatgaggttgatgatgatgatcccttctcaaagcgaagaaaaatggacgttggaattgctgacatcactcctgtagttaagcctatccgggagccacgtgttgttgtacaaactctgagtgaggttgatatcttggatgatggctatcgctggcgcaagtatgggcagaaggtggtgagaggcaatcctaaccctaggagttattacaaatgcacgaacaccggttgccccgttagaaaacacgtggagagggcatctcatgatccaaaagctgtgattaccacgtatgaggggaaacacaatcatgatgtaccaactgcaaggaatagttgccatgacatggcaggaccagcaagtgcaagtggacagacaagagttaggcccgaagaaagtgataccatcagccttgaccttgggatgggaattagcccagctgccgaaaacacatcaaacagtcaagggagaatgatgctttctgaatttggggatagtcaaattcacaccagcaattccaatttcaagttcgttcataccacgaccgcgccggggtactttggtgttctaaataacaactctaacccatatggttctaaagaaaatccaagtgatggtccatctttaaaccattctgcttatccttgccctcagaacatagggagaatactaatgggtccttgaaattgtttgtaaaac

SEQ ID NO: 53975 - protein, 592 aa, Glycine max
  peptide (1)..(592): Ceres Seq. ID no. 14304856
  misc_feature (412)..(471): Pfam Name: WRKY DNA -binding domain Pfam Description: WRKY DNA -binding domain
SLSFTQRDTFSLYTAMDAGEALSDDPNRPNSAADAAPAPAGARYKLLSPAKLPISRSPCVTISPGLSPTSFLESPVLLSNMKVEPSPTTGSLSLLHQTAYGSMTSAASATFPVTTVCFNSNTVDERKPSFFEFKPHSGSNMVPADFDNHASEKSTQIDSQGKAQAFDSSALVKNESASPSNELSLSSPVQMDCSGASARVEGDLDELNPRSNITTGLQASQVDNRGSGLTVAAERVSDDGYNWRKYGQKHVKGSEFPRSYYKCTHPNCEVKKLFERSHDGQITEIIYKGTHDHPKPQPNRRYSAGTIMSVQEDRSDKASLTSRDDKGSNMCGQGSHLAEPDGKPELLPVATNDGDLDGLGVLSNRNNDEVDDDDPFSKRRKMDVGIADITPVVKPIREPRVVVQTLSEVDILDDGYRWRKYGQKVVRGNPNPRSYYKCTNTGCPVRKHVERASHDPKAVITTYEGKHNHDVPTARNSCHDMAGPASASGQTRVRPEESDTISLDLGMGISPAAENTSNSQGRMMLSEFGDSQIHTSNSNFKFVHTTTAPGYFGVLNNNSNPYGSKENPSDGPSLNHSAYPCPQNIGRILMGP

SEQ ID NO: 53976 - protein, 577 aa, Glycine max
  peptide (1)..(577): Ceres Seq. ID no. 14304857
  misc_feature (397)..(456): Pfam Name: WRKY DNA -binding domain Pfam Description: WRKY DNA -binding domain
MDAGEALSDDPNRPNSAADAAPAPAGARYKLLSPAKLPISRSPCVTISPGLSPTSFLESPVLLSNMKVEPSPTTGSLSLLHQTAYGSMTSAASATFPVTTVCFNSNTVDERKPSFFEFKPHSGSNMVPADFDNHASEKSTQIDSQGKAQAFDSSALVKNESASPSNELSLSSPVQMDCSGASARVEGDLDELNPRSNITTGLQASQVDNRGSGLTVAAERVSDDGYNWRKYGQKHVKGSEFPRSYYKCTHPNCEVKKLFERSHDGQITEIIYKGTHDHPKPQPNRRYSAGTIMSVQEDRSDKASLTSRDDKGSNMCGQGSHLAEPDGKPELLPVATNDGDLDGLGVLSNRNNDEVDDDDPFSKRRKMDVGIADITPVVKPIREPRVVVQTLSEVDILDDGYRWRKYGQKVVRGNPNPRSYYKCTNTGCPVRKHVERASHDPKAVITTYEGKHNHDVPTARNSCHDMAGPASASGQTRVRPEESDTISLDLGMGISPAAENTSNSQGRMMLSEFGDSQIHTSNSNFKFVHTTTAPGYFGVLNNNSNPYGSKENPSDGPSLNHSAYPCPQNIGRILMGP

SEQ ID NO: 53977 - protein, 512 aa, Glycine max
  peptide (1)..(512): Ceres Seq. ID no. 14304858
  misc_feature (332)..(391): Pfam Name: WRKY DNA -binding domain Pfam Description: WRKY DNA -binding domain
MKVEPSPTTGSLSLLHQTAYGSMTSAASATFPVTTVCFNSNTVDERKPSFFEFKPHSGSNMVPADFDNHASEKSTQIDSQGKAQAFDSSALVKNESASPSNELSLSSPVQMDCSGASARVEGDLDELNPRSNITTGLQASQVDNRGSGLTVAAERVSDDGYNWRKYGQKHVKGSEFPRSYYKCTHPNCEVKKLFERSHDGQITEIIYKGTHDHPKPQPNRRYSAGTIMSVQEDRSDKASLTSRDDKGSNMCGQGSHLAEPDGKPELLPVATNDGDLDGLGVLSNRNNDEVDDDDPFSKRRKMDVGIADITPVVKPIREPRVVVQTLSEVDILDDGYRWRKYGQKVVRGNPNPRSYYKCTNTGCPVRKHVERASHDPKAVITTYEGKHNHDVPTARNSCHDMAGPASASGQTRVRPEESDTISLDLGMGISPAAENTSNSQGRMMLSEFGDSQIHTSNSNFKFVHTTTAPGYFGVLNNNSNPYGSKENPSDGPSLNHSAYPCPQNIGRILMGP

SEQ ID NO: 53978 - DNA, 1155 bp, Glycine max
  misc_feature (1)..(1155): Ceres Seq. ID no. 13637685
accgggccccccctcgagtcctacgtaggcccccccccttttataatgagaagcatagcatcttgttacaacgaacatgcaattagagtgtccgattcatattgttcaagaccttcgaaccaggcgtatctctgtccagaactcaacccttccaccagagattccgttacctgcatgtacaaactctccctcatcaaaacgcaaaaacaactcttcatcacaataacttgggccaagaaactcttgggccaaggcttcaccataaccatctccaattctgaacattttctttctccctctaataataaatccaacgcaaggcaattgagaaagaacaaaggcaacgaaacattccaatcccaaaattttcaagtccaagtcttgtgggatctctccgatgcaaagtacgaggaaggaccagaaccggttggtggcttttacgtcgacgttttggtggactccgaactgggcctacgcctcggcgacaaaaattcctcaatggaagaattgttaccaaactttgacgcaaaggaagcgactttctcgatggtttcacggagcgagacgttttccggcacagcggcttacgcgacgaaggcgaaattctcgcagacgggaagttctcacgatatattgattaggtgcggcgcggaggcggagcgaggagagccgaagggtcacgtgttgtccgtgtgcgtggacaagaagacaatgttccaggttaagaggctgaggtggaactttcgtgggaaccaaacaatttttgtcgatggtttggtcgttgatatgatgtgggacgtgcacgattggctttttaattcgaattctgcttcatctgcagtgttcatgttcaggacaaggagtggcctcgatagtaggctatggttggagaagagtttgcacgcgcacaaggaacaggacaaaattgggttctctttgttgatttgtgcctgtaagaacaatgactgattcaatcttatatagatttttttttcgttttaattcatctggattttataagattgaaaacactgacacctatttagatgatttttttcttcttcttaatcttaatctctgtcgatgatatttggtcagtggttatgtaatcctgtccgtttgaaccagaatagatgaaagtttatagattatatt

SEQ ID NO: 53979 - protein, 322 aa, Glycine max
  peptide (1)..(322): Ceres Seq. ID no. 15219379
  misc_feature (50)..(319): Pfam Name: Plant protein of unknown function (DUF868) Pfam Description: Plant protein of unknown function (DUF868)
  misc_feature (51)..(320): Homolog of NCBI NO: 21593854 NR Description: unknown [Arabidopsis thaliana]
  misc_feature (51)..(320): Homolog of NCBI NO: 15241702 NR Description: expressed protein [Arabidopsis thaliana]
  misc_feature (16)..(320): Homolog of NCBI NO: 18397034 NR Description: expressed protein [Arabidopsis thaliana]
  misc_feature (16)..(319): Homolog of NCBI NO: 30102999 NR Description: hypothetical protein [Oryza sativa (japonica
  misc_feature (273)..(319): Homolog of NCBI NO: 21536715 NR Description: unknown [Arabidopsis thaliana]
  misc_feature (273)..(319): Homolog of NCBI NO: 18404143 NR Description: expressed protein [Arabidopsis thaliana]
  misc_feature (16)..(278): Homolog of NCBI NO: 21536715 NR Description: unknown [Arabidopsis thaliana]
  misc_feature (16)..(278): Homolog of NCBI NO: 18404143 NR Description: expressed protein [Arabidopsis thaliana]
  misc_feature (16)..(319): Homolog of NCBI NO: 21805715 NR Description: hypothetical protein [Arabidopsis thaliana]
  misc_feature (16)..(319): Homolog of NCBI NO: 15226242 NR Description: expressed protein [Arabidopsis thaliana]
TGPPLESYVGPPPFIMRSIASCYNEHAIRVSDSYCSRPSNQAYLCPELNPSTRDSVTCMYKLSLIKTQKQLFITITWAKKLLGQGFTITISNSEHFLSPSNNKSNARQLRKNKGNETFQSQNFQVQVLWDLSDAKYEEGPEPVGGFYVDVLVDSELGLRLGDKNSSMEELLPNFDAKEATFSMVSRSETFSGTAAYATKAKFSQTGSSHDILIRCGAEAERGEPKGHVLSVCVDKKTMFQVKRLRWNFRGNQTIFVDGLVVDMMWDVHDWLFNSNSASSAVFMFRTRSGLDSRLWLEKSLHAHKEQDKIGFSLLICACKNND

SEQ ID NO: 53980 - protein, 307 aa, Glycine max
  peptide (1)..(307): Ceres Seq. ID no. 15219380
  misc_feature (35)..(304): Pfam Name: Plant protein of unknown function (DUF868) Pfam Description: Plant protein of unknown function (DUF868)
  misc_feature (36)..(305): Homolog of NCBI NO: 21593854 NR Description: unknown [Arabidopsis thaliana]
  misc_feature (36)..(305): Homolog of NCBI NO: 15241702 NR Description: expressed protein [Arabidopsis thaliana]
  misc_feature (1)..(305): Homolog of NCBI NO: 18397034 NR Description: expressed protein [Arabidopsis thaliana]
  misc_feature (1)..(304): Homolog of NCBI NO: 30102999 NR Description: hypothetical protein [Oryza sativa (japonica
  misc_feature (258)..(304): Homolog of NCBI NO: 21536715 NR Description: unknown [Arabidopsis thaliana]
  misc_feature (258)..(304): Homolog of NCBI NO: 18404143 NR Description: expressed protein [Arabidopsis thaliana]
  misc_feature (1)..(263): Homolog of NCBI NO: 21536715 NR Description: unknown [Arabidopsis thaliana]
  misc_feature (1)..(263): Homolog of NCBI NO: 18404143 NR Description: expressed protein [Arabidopsis thaliana]
  misc_feature (1)..(304): Homolog of NCBI NO: 21805715 NR Description: hypothetical protein [Arabidopsis thaliana]
  misc_feature (1)..(304): Homolog of NCBI NO: 15226242 NR Description: expressed protein [Arabidopsis thaliana]
MRSIASCYNEHAIRVSDSYCSRPSNQAYLCPELNPSTRDSVTCMYKLSLIKTQKQLFITITWAKKLLGQGFTITISNSEHFLSPSNNKSNARQLRKNKGNETFQSQNFQVQVLWDLSDAKYEEGPEPVGGFYVDVLVDSELGLRLGDKNSSMEELLPNFDAKEATFSMVSRSETFSGTAAYATKAKFSQTGSSHDILIRCGAEAERGEPKGHVLSVCVDKKTMFQVKRLRWNFRGNQTIFVDGLVVDMMWDVHDWLFNSNSASSAVFMFRTRSGLDSRLWLEKSLHAHKEQDKIGFSLLICACKNND

SEQ ID NO: 53981 - protein, 264 aa, Glycine max
  peptide (1)..(264): Ceres Seq. ID no. 15219381
  misc_feature (1)..(261): Pfam Name: Plant protein of unknown function (DUF868) Pfam Description: Plant protein of unknown function (DUF868)
  misc_feature (1)..(262): Homolog of NCBI NO: 21593854 NR Description: unknown [Arabidopsis thaliana]
  misc_feature (1)..(262): Homolog of NCBI NO: 15241702 NR Description: expressed protein [Arabidopsis thaliana]
  misc_feature (1)..(262): Homolog of NCBI NO: 18397034 NR Description: expressed protein [Arabidopsis thaliana]
  misc_feature (1)..(261): Homolog of NCBI NO: 30102999 NR Description: hypothetical protein [Oryza sativa (japonica
  misc_feature (215)..(261): Homolog of NCBI NO: 21536715 NR Description: unknown [Arabidopsis thaliana]
  misc_feature (215)..(261): Homolog of NCBI NO: 18404143 NR Description: expressed protein [Arabidopsis thaliana]
  misc_feature (1)..(220): Homolog of NCBI NO: 21536715 NR Description: unknown [Arabidopsis thaliana]
  misc_feature (1)..(220): Homolog of NCBI NO: 18404143 NR Description: expressed protein [Arabidopsis thaliana]
  misc_feature (1)..(261): Homolog of NCBI NO: 21805715 NR Description: hypothetical protein [Arabidopsis thaliana]
  misc_feature (1)..(261): Homolog of NCBI NO: 15226242 NR Description: expressed protein [Arabidopsis thaliana]
MYKLSLIKTQKQLFITITWAKKLLGQGFTITISNSEHFLSPSNNKSNARQLRKNKGNETFQSQNFQVQVLWDLSDAKYEEGPEPVGGFYVDVLVDSELGLRLGDKNSSMEELLPNFDAKEATFSMVSRSETFSGTAAYATKAKFSQTGSSHDILIRCGAEAERGEPKGHVLSVCVDKKTMFQVKRLRWNFRGNQTIFVDGLVVDMMWDVHDWLFNSNSASSAVFMFRTRSGLDSRLWLEKSLHAHKEQDKIGFSLLICACKNND

SEQ ID NO: 53982 - DNA, 1597 bp, Glycine max
  misc_feature (1)..(1597): Ceres Seq. ID no. 14307261
gaagaaacaagcttcacttccaccccttaatggcccgaggcaaggcgaagaagaaggaagaaggtgaagacaccgatgtcgcaaacccagaaacgttagagcggaagaggctgaaatccttggccatttccaacaagattctctcggagacccctgcacggagctccgttcacctcaacccttcctccgtcgtggccaagcaccacggcaaagatatcatcaagaagtctcagaggaagagctgcaggtacctcttctcgttccccgggctaattgctcccatcgccggtggcaagatcggtgacctcaaggacttgggcaccaaaaaccccgttctctacctcgatttcccacagggtcaaatgaagttattcgggaccattgtatatccaaagaacagatacttgactctacagttccctaaaggtggaaagagtgtaatgtgtgaggattattttgataacatgattgtattttcggatgcatggtggatcgggaggaaagatgaaaacccagaagaatccaagctggaatttcctaatgaattgtatgagggacaccaagctgagtatgactttaaagggggtgcgggtgcaggtgcagcttctgtagttaatcaaggtgttcccagaaccaacattcaacgtgtagagcaagagtcaccaaagacacccaccgaagatgatttgtcagacaatgaaatcaatttaaaagatacaaaggaattggttccggtccgacattcaacaagaactgcaaaaaaatcatacaaatttgctgaaatttcttccggtgatgattctggtgaaaacagccctgagctttctgatgatgaagagaaagtgatacagaaaaaaactgtagtttttgacctcgatgatgaggatgatgcaccagtagatcaacctgccaagataaatactgagtctgcttctcgatcaaaaagtaaagaagtgtctcaatctgcttcagccagtgcatctactgaagttaagtccagtaatcgtggatcacttgttcaggctactatatccacattattcaagaaagtggaagaaaagacaactccaagaagttcaaggaaatccccatcatcaaaagcttatggccagaagtcacagcctgctggttcaaaaagaaagattgatctggatgaaggatccaagaaaagggcaagaaagaccacggacaaagatcctggtaaaaaaatcaaggcaaaaagcaaggaagacgatgttgaagatggtgatgatgatggtgatgacattgaagaattttcaaatgcttcagaggatgctaatgaaagtgatgaagactggactgcttgagtgtgtaatctaagttgtggctgctagtcacaagaaatgacaaggcagggtcatgcaagtgatgtgattataccctttatctctctctacactaagatagaacgtaacgacttggttttgcataccatgtggttatgatgggaatatgagaatagagataataccatgtggttatgatggagaaagaatgaggaagttgtccaatgtttaccaatccaatcttcatctccaagttgggagtcattaaatgtatacttttaatttcgatt

SEQ ID NO: 53983 - protein, 441 aa, Glycine max
  peptide (1)..(441): Ceres Seq. ID no. 14307262
  misc_feature (184)..(437): Homolog of NCBI NO: 7440063 NR Description: nucleolin homolog nuM1 - alfalfa
  misc_feature (219)..(438): Homolog of NCBI NO: 39597992 NR Description: Hypothetical protein CBG14595 [Caenorhabditis
  misc_feature (16)..(372): Homolog of NCBI NO: 34394443 NR Description: putative root hairless 1 [Oryza sativa (japonica
  misc_feature (10)..(367): Homolog of NCBI NO: 3811320 NR Description: ROOT HAIRLESS 1 [Arabidopsis thaliana]
  misc_feature (10)..(367): Homolog of NCBI NO: 18402164 NR Description: root hairless 1 (RHL1) [Arabidopsis thaliana]
RNKLHFHPLMARGKAKKKEEGEDTDVANPETLERKRLKSLAISNKILSETPARSSVHLNPSSVVAKHHGKDIIKKSQRKSCRYLFSFPGLIAPIAGGKIGDLKDLGTKNPVLYLDFPQGQMKLFGTIVYPKNRYLTLQFPKGGKSVMCEDYFDNMIVFSDAWWIGRKDENPEESKLEFPNELYEGHQAEYDFKGGAGAGAASVVNQGVPRTNIQRVEQESPKTPTEDDLSDNEINLKDTKELVPVRHSTRTAKKSYKFAEISSGDDSGENSPELSDDEEKVIQKKTVVFDLDDEDDAPVDQPAKINTESASRSKSKEVSQSASASASTEVKSSNRGSLVQATISTLFKKVEEKTTPRSSRKSPSSKAYGQKSQPAGSKRKIDLDEGSKKRARKTTDKDPGKKIKAKSKEDDVEDGDDDGDDIEEFSNASEDANESDEDWTA

SEQ ID NO: 53984 - protein, 432 aa, Glycine max
  peptide (1)..(432): Ceres Seq. ID no. 14307263
  misc_feature (175)..(428): Homolog of NCBI NO: 7440063 NR Description: nucleolin homolog nuM1 - alfalfa
  misc_feature (210)..(429): Homolog of NCBI NO: 39597992 NR Description: Hypothetical protein CBG14595 [Caenorhabditis
  misc_feature (7)..(363): Homolog of NCBI NO: 34394443 NR Description: putative root hairless 1 [Oryza sativa (japonica
  misc_feature (1)..(358): Homolog of NCBI NO: 3811320 NR Description: ROOT HAIRLESS 1 [Arabidopsis thaliana]
  misc_feature (1)..(358): Homolog of NCBI NO: 18402164 NR Description: root hairless 1 (RHL1) [Arabidopsis thaliana]
MARGKAKKKEEGEDTDVANPETLERKRLKSLAISNKILSETPARSSVHLNPSSVVAKHHGKDIIKKSQRKSCRYLFSFPGLIAPIAGGKIGDLKDLGTKNPVLYLDFPQGQMKLFGTIVYPKNRYLTLQFPKGGKSVMCEDYFDNMIVFSDAWWIGRKDENPEESKLEFPNELYEGHQAEYDFKGGAGAGAASVVNQGVPRTNIQRVEQESPKTPTEDDLSDNEINLKDTKELVPVRHSTRTAKKSYKFAEISSGDDSGENSPELSDDEEKVIQKKTVVFDLDDEDDAPVDQPAKINTESASRSKSKEVSQSASASASTEVKSSNRGSLVQATISTLFKKVEEKTTPRSSRKSPSSKAYGQKSQPAGSKRKIDLDEGSKKRARKTTDKDPGKKIKAKSKEDDVEDGDDDGDDIEEFSNASEDANESDEDWTA

SEQ ID NO: 53985 - protein, 321 aa, Glycine max
  peptide (1)..(321): Ceres Seq. ID no. 14307264
  misc_feature (64)..(317): Homolog of NCBI NO: 7440063 NR Description: nucleolin homolog nuM1 - alfalfa
  misc_feature (99)..(318): Homolog of NCBI NO: 39597992 NR Description: Hypothetical protein CBG14595 [Caenorhabditis
  misc_feature (1)..(252): Homolog of NCBI NO: 34394443 NR Description: putative root hairless 1 [Oryza sativa (japonica
  misc_feature (1)..(247): Homolog of NCBI NO: 3811320 NR Description: ROOT HAIRLESS 1 [Arabidopsis thaliana]
  misc_feature (1)..(247): Homolog of NCBI NO: 18402164 NR Description: root hairless 1 (RHL1) [Arabidopsis thaliana]
MKLFGTIVYPKNRYLTLQFPKGGKSVMCEDYFDNMIVFSDAWWIGRKDENPEESKLEFPNELYEGHQAEYDFKGGAGAGAASVVNQGVPRTNIQRVEQESPKTPTEDDLSDNEINLKDTKELVPVRHSTRTAKKSYKFAEISSGDDSGENSPELSDDEEKVIQKKTVVFDLDDEDDAPVDQPAKINTESASRSKSKEVSQSASASASTEVKSSNRGSLVQATISTLFKKVEEKTTPRSSRKSPSSKAYGQKSQPAGSKRKIDLDEGSKKRARKTTDKDPGKKIKAKSKEDDVEDGDDDGDDIEEFSNASEDANESDEDWTA

SEQ ID NO: 53986 - DNA, 917 bp, Glycine max
  misc_feature (1)..(917): Ceres Seq. ID no. 14307320
aatgaagcttctgataataaaacaagtccctggtgtttcaatcaggcacctggacatcaatggttaattcctgtcatgtctccttctgaagggcttgtctacaagccatatcctgggcctggatttatgggaacaatgaatggaggatgcggcgggccattcgggcaagcacctctcggtgctactttcatgaatcctgcctatcaattcccagcttctcatccagtagttggggtttcaccgtttgtccctccagccagtcatgcctacttcccttcctttggcatgccagtagtgaatcaagcaacatcaggatcaactgttgaacaggtgaaccagtttgctgcacaaggttctcatggtcaaaatggtcattcatatatagagggaaccgattttaacactcatcataaccaaagctcatctaacctgccagttctgaagaatggagctacgctacatgttaaaaaatctcaggcgtctaaggagagagggttacaagggagcacaataagcagtcctagtgaaatggcacagggaatcagagcagggaaaatagctgaaggaaatgatgcacattctctttctcttcaagctgttgaaactagacagcaaacacaagtcatcaaagttgtaccacataaccggaaatcagcgacggaatcagcagctagaatttttcaatccattcaagaagagagaaaacaacatgatttagtctagtgctgtttatggaggtggagttatttgagttgattttgtacagtgcgtcaagtcctgtactttgttgttgtttggtaatatgtatcttgctgttttattctactcttcctttatgtcctttttcttacaacatattcgaatgtagatattgttataactacaatggaatgttaaaattgatcaaatttaatatt

SEQ ID NO: 53987 - protein, 240 aa, Glycine max
  peptide (1)..(240): Ceres Seq. ID no. 14307321
  misc_feature (11)..(238): Homolog of NCBI NO: 15225220 NR Description: expressed protein [Arabidopsis thaliana]
  misc_feature (3)..(238): Homolog of NCBI NO: 34914216 NR Description: P0697C12.15 [Oryza sativa (japonica
  misc_feature (3)..(238): Homolog of NCBI NO: 5803261 NR Description: Similar to Arabidopsis thaliana chromosome II BAC
  misc_feature (4)..(238): Homolog of NCBI NO: 34499887 NR Description: early flowering 3 [Mesembryanthemum crystallinum]
NEASDNKTSPWCFNQAPGHQWLIPVMSPSEGLVYKPYPGPGFMGTMNGGCGGPFGQAPLGATFMNPAYQFPASHPVVGVSPFVPPASHAYFPSFGMPVVNQATSGSTVEQVNQFAAQGSHGQNGHSYIEGTDFNTHHNQSSSNLPVLKNGATLHVKKSQASKERGLQGSTISSPSEMAQGIRAGKIAEGNDAHSLSLQAVETRQQTQVIKVVPHNRKSATESAARIFQSIQEERKQHDLV

SEQ ID NO: 53988 - protein, 215 aa, Glycine max
  peptide (1)..(215): Ceres Seq. ID no. 14307322
  misc_feature (1)..(213): Homolog of NCBI NO: 15225220 NR Description: expressed protein [Arabidopsis thaliana]
  misc_feature (1)..(213): Homolog of NCBI NO: 34914216 NR Description: P0697C12.15 [Oryza sativa (japonica
  misc_feature (1)..(213): Homolog of NCBI NO: 5803261 NR Description: Similar to Arabidopsis thaliana chromosome II BAC
  misc_feature (1)..(213): Homolog of NCBI NO: 34499887 NR Description: early flowering 3 [Mesembryanthemum crystallinum]
MSPSEGLVYKPYPGPGFMGTMNGGCGGPFGQAPLGATFMNPAYQFPASHPVVGVSPFVPPASHAYFPSFGMPVVNQATSGSTVEQVNQFAAQGSHGQNGHSYIEGTDFNTHHNQSSSNLPVLKNGATLHVKKSQASKERGLQGSTISSPSEMAQGIRAGKIAEGNDAHSLSLQAVETRQQTQVIKVVPHNRKSATESAARIFQSIQEERKQHDLV

SEQ ID NO: 53989 - protein, 198 aa, Glycine max
  peptide (1)..(198): Ceres Seq. ID no. 14307323
  misc_feature (1)..(196): Homolog of NCBI NO: 15225220 NR Description: expressed protein [Arabidopsis thaliana]
  misc_feature (1)..(196): Homolog of NCBI NO: 34914216 NR Description: P0697C12.15 [Oryza sativa (japonica
  misc_feature (1)..(196): Homolog of NCBI NO: 5803261 NR Description: Similar to Arabidopsis thaliana chromosome II BAC
  misc_feature (1)..(196): Homolog of NCBI NO: 34499887 NR Description: early flowering 3 [Mesembryanthemum crystallinum]
MGTMNGGCGGPFGQAPLGATFMNPAYQFPASHPVVGVSPFVPPASHAYFPSFGMPVVNQATSGSTVEQVNQFAAQGSHGQNGHSYIEGTDFNTHHNQSSSNLPVLKNGATLHVKKSQASKERGLQGSTISSPSEMAQGIRAGKIAEGNDAHSLSLQAVETRQQTQVIKVVPHNRKSATESAARIFQSIQEERKQHDLV

SEQ ID NO: 53990 - DNA, 1760 bp, Glycine max
  misc_feature (1)..(1760): Ceres Seq. ID no. 14303377
ggaaaaaccctttcgtttcgtcttctccaaatccggttgaatattcaattcatactctgcttctcaactttcttcccctttccttcacttgcttactcccattcgcaaaccctaacggccaacgcagcaagttgaattttcagaatcgattcgtccaagtttgattcgaagcaaaaagaagcgaaattggagttttagggaaagaagaagggaaaaaaaaatggcgtacggtggtgcaggtcccgtaggtggttcgggttcggcatcgacaataaagcaagtcaaattggagagagaaagcgaactgagaatagaagttggtaacgacgcacctcttcgccttcgactccttaacggcactgctgagatttttggcaccgagcttccacccgaaatctggctcaattttcctcccaggctcaagtttgctgtgtttacttggtatggtgcaaccattgaaatggatggtgctactgaaactgattatactgcagatgagactccaatggttagttatgtaaatgtccatgctgtgctagatggaagaagaagtcgtgctaaagcctcatcaccagatgattctggttcttctcagggccctagggtcattgttgtaggacctactgattctggaaagagtaccttgtcgaggatgcttcttagttgggcagctaaacaaggttggaagcctacctttgttgatctggatattggccaagggtctataacaattcctggatgcattgctgccactccaattgaaatgcccattgatcctgtggaaggcattccacttgaaatgcctcttgtttactattatgggcacgcgactcctagtaacaatgtagaattgtataaagtgcttgttaaggagcttgcagggatgattgagaggcaatttactggaaatgctgaatctagagcttcaggcatggtgataaatactatgggatggatagagggtgtaggctatgatttgctcttgcatgcaattcgtacattcaaggccaatgttgtcttggttttgggtcaggaaaaactgtgcagcatgctcaaagatgtgctcaagagtgagcccaaagtagacgtagttaaacttcagaggtcaggtggagttgtatctaggaatgcaaaagtccgtcagaaggccagaagttataggataagggaatacttctatggcctttcaaatgatctttctccacattctaatattgcaaattttagtgatttgtttgtttatcgagttggtggtgggccacaggccccacgctcagccttgcccattggagcagaacctgctgcagatccaacaagagttgtacctgtaaatataaatcgtgatttgctccatttagtccttgctgtttcatttgccaaggaacctgatgagatcatttccagcaatgttgctgggtttatttatgtaacagacgttgacattcagagaaagaagataacatatcttgctccatctgctggagaacttccaagcaagtatttgataatgggatccttgacatggcttgaaacatgagctaatgaacagttttgtactggaaaatctcgctaaattcgttgctctggtttgtgtcgtgatcaaatgtaaatactaaatgtagtttacaacactgttgtgatggggattgtttgtcgtagtgagagaggctgacctttgtaacggaatatctaatattctgatttaaaatcttattatactcgttgagtagcaagttacttatgattcttgaagttgaaag

SEQ ID NO: 53991 - protein, 438 aa, Glycine max
  peptide (1)..(438): Ceres Seq. ID no. 14303378
  misc_feature (18)..(437): Homolog of NCBI NO: 39580303 NR Description: Hypothetical protein CBG23604 [Caenorhabditis
  misc_feature (19)..(432): Homolog of NCBI NO: 19922174 NR Description: CG5970-PA [Drosophila melanogaster]
  misc_feature (18)..(437): Homolog of NCBI NO: 39590654 NR Description: Hypothetical protein CBG09862 [Caenorhabditis
  misc_feature (14)..(437): Homolog of NCBI NO: 17553760 NR Description: ATP GTP-binding protein like (47.6 kD) (3E489)
  misc_feature (22)..(437): Homolog of NCBI NO: 19527056 NR Description: ATP/GTP-binding protein [Mus musculus]
  misc_feature (22)..(437): Homolog of NCBI NO: 5803029 NR Description: ATP/GTP-binding protein [Homo sapiens]
  misc_feature (22)..(438): Homolog of NCBI NO: 31198453 NR Description: ENSANGP00000020766 [Anopheles gambiae]
  misc_feature (18)..(435): Homolog of NCBI NO: 10176985 NR Description: ATP/GTP-binding protein-like [Arabidopsis
  misc_feature (18)..(435): Homolog of NCBI NO: 15242523 NR Description: ATP/GTP-binding protein -related [Arabidopsis
  misc_feature (1)..(438): Homolog of NCBI NO: 15229328 NR Description: expressed protein [Arabidopsis thaliana]
MAYGGAGPVGGSGSASTIKQVKLERESELRIEVGNDAPLRLRLLNGTAEIFGTELPPEIWLNFPPRLKFAVFTWYGATIEMDGATETDYTADETPMVSYVNVHAVLDGRRSRAKASSPDDSGSSQGPRVIVVGPTDSGKSTLSRMLLSWAAKQGWKPTFVDLDIGQGSITIPGCIAATPIEMPIDPVEGIPLEMPLVYYYGHATPSNNVELYKVLVKELAGMIERQFTGNAESRASGMVINTMGWIEGVGYDLLLHAIRTFKANVVLVLGQEKLCSMLKDVLKSEPKVDVVKLQRSGGVVSRNAKVRQKARSYRIREYFYGLSNDLSPHSNIANFSDLFVYRVGGGPQAPRSALPIGAEPAADPTRVVPVNINRDLLHLVLAVSFAKEPDEIISSNVAGFIYVTDVDIQRKKITYLAPSAGELPSKYLIMGSLTWLET

SEQ ID NO: 53992 - protein, 358 aa, Glycine max
  peptide (1)..(358): Ceres Seq. ID no. 14303379
  misc_feature (1)..(357): Homolog of NCBI NO: 39580303 NR Description: Hypothetical protein CBG23604 [Caenorhabditis
  misc_feature (1)..(352): Homolog of NCBI NO: 19922174 NR Description: CG5970-PA [Drosophila melanogaster]
  misc_feature (1)..(357): Homolog of NCBI NO: 39590654 NR Description: Hypothetical protein CBG09862 [Caenorhabditis
  misc_feature (1)..(357): Homolog of NCBI NO: 17553760 NR Description: ATP GTP-binding protein like (47.6 kD) (3E489)
  misc_feature (1)..(357): Homolog of NCBI NO: 19527056 NR Description: ATP/GTP-binding protein [Mus musculus]
  misc_feature (1)..(357): Homolog of NCBI NO: 5803029 NR Description: ATP/GTP-binding protein [Homo sapiens]
  misc_feature (1)..(358): Homolog of NCBI NO: 31198453 NR Description: ENSANGP00000020766 [Anopheles gambiae]
  misc_feature (1)..(355): Homolog of NCBI NO: 10176985 NR Description: ATP/GTP-binding protein-like [Arabidopsis
  misc_feature (1)..(355): Homolog of NCBI NO: 15242523 NR Description: ATP/GTP-binding protein -related [Arabidopsis
  misc_feature (1)..(358): Homolog of NCBI NO: 15229328 NR Description: expressed protein [Arabidopsis thaliana]
MDGATETDYTADETPMVSYVNVHAVLDGRRSRAKASSPDDSGSSQGPRVIVVGPTDSGKSTLSRMLLSWAAKQGWKPTFVDLDIGQGSITIPGCIAATPIEMPIDPVEGIPLEMPLVYYYGHATPSNNVELYKVLVKELAGMIERQFTGNAESRASGMVINTMGWIEGVGYDLLLHAIRTFKANVVLVLGQEKLCSMLKDVLKSEPKVDVVKLQRSGGVVSRNAKVRQKARSYRIREYFYGLSNDLSPHSNIANFSDLFVYRVGGGPQAPRSALPIGAEPAADPTRVVPVNINRDLLHLVLAVSFAKEPDEIISSNVAGFIYVTDVDIQRKKITYLAPSAGELPSKYLIMGSLTWLET

SEQ ID NO: 53993 - protein, 343 aa, Glycine max
  peptide (1)..(343): Ceres Seq. ID no. 14303380
  misc_feature (1)..(342): Homolog of NCBI NO: 39580303 NR Description: Hypothetical protein CBG23604 [Caenorhabditis
  misc_feature (1)..(337): Homolog of NCBI NO: 19922174 NR Description: CG5970-PA [Drosophila melanogaster]
  misc_feature (1)..(342): Homolog of NCBI NO: 39590654 NR Description: Hypothetical protein CBG09862 [Caenorhabditis
  misc_feature (1)..(342): Homolog of NCBI NO: 17553760 NR Description: ATP GTP-binding protein like (47.6 kD) (3E489)
  misc_feature (1)..(342): Homolog of NCBI NO: 19527056 NR Description: ATP/GTP-binding protein [Mus musculus]
  misc_feature (1)..(342): Homolog of NCBI NO: 5803029 NR Description: ATP/GTP-binding protein [Homo sapiens]
  misc_feature (1)..(343): Homolog of NCBI NO: 31198453 NR Description: ENSANGP00000020766 [Anopheles gambiae]
  misc_feature (1)..(340): Homolog of NCBI NO: 10176985 NR Description: ATP/GTP-binding protein-like [Arabidopsis
  misc_feature (1)..(340): Homolog of NCBI NO: 15242523 NR Description: ATP/GTP-binding protein -related [Arabidopsis
  misc_feature (1)..(343): Homolog of NCBI NO: 15229328 NR Description: expressed protein [Arabidopsis thaliana]
MVSYVNVHAVLDGRRSRAKASSPDDSGSSQGPRVIVVGPTDSGKSTLSRMLLSWAAKQGWKPTFVDLDIGQGSITIPGCIAATPIEMPIDPVEGIPLEMPLVYYYGHATPSNNVELYKVLVKELAGMIERQFTGNAESRASGMVINTMGWIEGVGYDLLLHAIRTFKANVVLVLGQEKLCSMLKDVLKSEPKVDVVKLQRSGGVVSRNAKVRQKARSYRIREYFYGLSNDLSPHSNIANFSDLFVYRVGGGPQAPRSALPIGAEPAADPTRVVPVNINRDLLHLVLAVSFAKEPDEIISSNVAGFIYVTDVDIQRKKITYLAPSAGELPSKYLIMGSLTWLET

SEQ ID NO: 53994 - DNA, 2271 bp, Glycine max
  misc_feature (1)..(2271): Ceres Seq. ID no. 15169346
ggaagtcgaagtcttcgcttgccaattgcatttcttctcagcttcttgctgcttccgcgaatggcccgaaacctaggaggattactggcgctacttttcgctgtttcgatctgcggagccgtcacgattcccggccccgtctccgatgctcaccgttccgccgcgttagagctcttcgatggatcgttttcaagtttagaagaggcctatgaggcactaagagtttttgagattcttacgattgggaataagcctgatgtgagcacaacgacttgcaagaaagtagtggaaaaccttgggtcgtcatcgcctgtgaaggatttgttctatgcgttaaaggttaatgacatattaaaatgcaaggttaatggggatgttttcaaggatattgctttgagacttaaagccactgtcaatgatgcgagtactttggttgagatgtactattcaataggaagtttggttcttataaaggaccaggcttctgatgttgatgtgcttcttactgatgccgatggatccttccattcaatcaaggctctgagccaaagtgatggaaggtggcgttatagttctaataatccagagtctagtacctatgctgctggattagcacttgaagcacttgctggagtgatctcattagcatcttctgaaattgatcagtctagggtgaatacagtgaaaaatgatatattgaagcttttcgacagcattgagaaatatgatgatggaacattctattttgatgagaaatttgttggtggacgtgagcatcagggttctctttccacaacttcttctgttgttcgaggggttacagcatttgctgctgtaacttctggaaaaataaatcttccaggggataaaatattgggtttagcaaattttttcctgggaattggaatcccaggagatgccaaggacttcttcaatcaagttgaatcattagctcttctagagaacaacaaggtttcgatcccattggtactgtcacttcctgcaacggtttattcattatccaaaaaagatcagctcaaggttagggtgaacactgtacttggttcagctgcaccacctttaacagttaagcttgtgcaagctttccgctctaacgctaaagattcagctattgagagcaaggagctccaatatgatcaaaataatggaattcatttcttggaagctttcccagacaatgtagatgtgggaacttatgtgtttgtttttgagattgcacttcacgattctgctggtgaaaaagtttatgctactggaggccaaattcatgtaccaatatatgtcactggcattattaaagtcagcaatgctgaaattgctgttcttgacagtgatcttggaagtgttgaaacccagaaaacgctagatttggctggaaatgatgatgtttcactctcagctaaccacttgcaaaagttgcgcttttctttccagttgacaacacctcacggtcatgcttttaagcctcatcaggcatttttcaagttgaagcatgagacaaagcatgaacacatctttgtggttggaaatactggcaggaagtttgagattattcttgattttcttggtttggtggagaaattttattacctctctggcagatatgacattgagctgactgttggggatactgtcatggagaactctttcttacggctgcttggtgaagttgatttagatcttcccgaagcacctgagaaggcagcccgtcttcctccactccctgtcgatccttactcaagatatgggcccaaagccgagatagcccacttattcagggctccagaaaagcgaccaccccaggaactctctcttactttcttgggtttgatccttctgccatttattggctttttagttgggctgttacgcctgggagtgaacttgaagaattttccttcttcagctgtacctgctacatatgccttcttattccatcttggcattgctgcagttctattgctttatgtacttttctggttgaagctggacttgttcactacactcaaaactgtaggatttttgggagcttttctgttgtttgtgggacacagaattctttcccatctcgcttcaacatcatctaagttgaagtctgcatgagtaaaaggaagattatctatttataaagacatgacatgataatgtgtttttccttgaaaaaatgatactaatccaattttgtaggactttgttgtactagttcgtaacgaatttagagctcaattatatcaagagaaaagttttatc

SEQ ID NO: 53995 - protein, 707 aa, Glycine max
  peptide (1)..(707): Ceres Seq. ID no. 15169347
  misc_feature (239)..(698): Homolog of NCBI NO: 88567 NR Description: ribophorin II precursor - human
  misc_feature (431)..(703): Homolog of NCBI NO: 39598219 NR Description: Hypothetical protein CBG14887 [Caenorhabditis
  misc_feature (234)..(698): Homolog of NCBI NO: 28279254 NR Description: Similar to ribophorin II [Danio rerio]
  misc_feature (241)..(707): Homolog of NCBI NO: 19922486 NR Description: CG6370-PA [Drosophila melanogaster]
  misc_feature (239)..(698): Homolog of NCBI NO: 28436786 NR Description: Similar to ribophorin II [Xenopus laevis]
  misc_feature (240)..(705): Homolog of NCBI NO: 31198567 NR Description: ENSANGP00000020783 [Anopheles gambiae]
  misc_feature (28)..(219): Homolog of NCBI NO: 7486600 NR Description: hypothetical protein F7J7.90 - Arabidopsis
  misc_feature (227)..(676): Homolog of NCBI NO: 7486600 NR Description: hypothetical protein F7J7.90 - Arabidopsis
  misc_feature (28)..(707): Homolog of NCBI NO: 34906860 NR Description: P0470A12.7 [Oryza sativa (japonica
  misc_feature (29)..(707): Homolog of NCBI NO: 22328844 NR Description: expressed protein [Arabidopsis thaliana]
GSRSLRLPIAFLLSFLLLPRMARNLGGLLALLFAVSICGAVTIPGPVSDAHRSAALELFDGSFSSLEEAYEALRVFEILTIGNKPDVSTTTCKKVVENLGSSSPVKDLFYALKVNDILKCKVNGDVFKDIALRLKATVNDASTLVEMYYSIGSLVLIKDQASDVDVLLTDADGSFHSIKALSQSDGRWRYSSNNPESSTYAAGLALEALAGVISLASSEIDQSRVNTVKNDILKLFDSIEKYDDGTFYFDEKFVGGREHQGSLSTTSSVVRGVTAFAAVTSGKINLPGDKILGLANFFLGIGIPGDAKDFFNQVESLALLENNKVSIPLVLSLPATVYSLSKKDQLKVRVNTVLGSAAPPLTVKLVQAFRSNAKDSAIESKELQYDQNNGIHFLEAFPDNVDVGTYVFVFEIALHDSAGEKVYATGGQIHVPIYVTGIIKVSNAEIAVLDSDLGSVETQKTLDLAGNDDVSLSANHLQKLRFSFQLTTPHGHAFKPHQAFFKLKHETKHEHIFVVGNTGRKFEIILDFLGLVEKFYYLSGRYDIELTVGDTVMENSFLRLLGEVDLDLPEAPEKAARLPPLPVDPYSRYGPKAEIAHLFRAPEKRPPQELSLTFLGLILLPFIGFLVGLLRLGVNLKNFPSSAVPATYAFLFHLGIAAVLLLYVLFWLKLDLFTTLKTVGFLGAFLLFVGHRILSHLASTSSKLKSA

SEQ ID NO: 53996 - protein, 687 aa, Glycine max
  peptide (1)..(687): Ceres Seq. ID no. 15169348
  misc_feature (219)..(678): Homolog of NCBI NO: 88567 NR Description: ribophorin II precursor - human
  misc_feature (411)..(683): Homolog of NCBI NO: 39598219 NR Description: Hypothetical protein CBG14887 [Caenorhabditis
  misc_feature (214)..(678): Homolog of NCBI NO: 28279254 NR Description: Similar to ribophorin II [Danio rerio]
  misc_feature (221)..(687): Homolog of NCBI NO: 19922486 NR Description: CG6370-PA [Drosophila melanogaster]
  misc_feature (219)..(678): Homolog of NCBI NO: 28436786 NR Description: Similar to ribophorin II [Xenopus laevis]
  misc_feature (220)..(685): Homolog of NCBI NO: 31198567 NR Description: ENSANGP00000020783 [Anopheles gambiae]
  misc_feature (8)..(199): Homolog of NCBI NO: 7486600 NR Description: hypothetical protein F7J7.90 - Arabidopsis
  misc_feature (207)..(656): Homolog of NCBI NO: 7486600 NR Description: hypothetical protein F7J7.90 - Arabidopsis
  misc_feature (8)..(687): Homolog of NCBI NO: 34906860 NR Description: P0470A12.7 [Oryza sativa (japonica
  misc_feature (9)..(687): Homolog of NCBI NO: 22328844 NR Description: expressed protein [Arabidopsis thaliana]
MARNLGGLLALLFAVSICGAVTIPGPVSDAHRSAALELFDGSFSSLEEAYEALRVFEILTIGNKPDVSTTTCKKVVENLGSSSPVKDLFYALKVNDILKCKVNGDVFKDIALRLKATVNDASTLVEMYYSIGSLVLIKDQASDVDVLLTDADGSFHSIKALSQSDGRWRYSSNNPESSTYAAGLALEALAGVISLASSEIDQSRVNTVKNDILKLFDSIEKYDDGTFYFDEKFVGGREHQGSLSTTSSVVRGVTAFAAVTSGKINLPGDKILGLANFFLGIGIPGDAKDFFNQVESLALLENNKVSIPLVLSLPATVYSLSKKDQLKVRVNTVLGSAAPPLTVKLVQAFRSNAKDSAIESKELQYDQNNGIHFLEAFPDNVDVGTYVFVFEIALHDSAGEKVYATGGQIHVPIYVTGIIKVSNAEIAVLDSDLGSVETQKTLDLAGNDDVSLSANHLQKLRFSFQLTTPHGHAFKPHQAFFKLKHETKHEHIFVVGNTGRKFEIILDFLGLVEKFYYLSGRYDIELTVGDTVMENSFLRLLGEVDLDLPEAPEKAARLPPLPVDPYSRYGPKAEIAHLFRAPEKRPPQELSLTFLGLILLPFIGFLVGLLRLGVNLKNFPSSAVPATYAFLFHLGIAAVLLLYVLFWLKLDLFTTLKTVGFLGAFLLFVGHRILSHLASTSSKLKSA

SEQ ID NO: 53997 - protein, 561 aa, Glycine max
  peptide (1)..(561): Ceres Seq. ID no. 15169349
  misc_feature (93)..(552): Homolog of NCBI NO: 88567 NR Description: ribophorin II precursor - human
  misc_feature (285)..(557): Homolog of NCBI NO: 39598219 NR Description: Hypothetical protein CBG14887 [Caenorhabditis
  misc_feature (88)..(552): Homolog of NCBI NO: 28279254 NR Description: Similar to ribophorin II [Danio rerio]
  misc_feature (95)..(561): Homolog of NCBI NO: 19922486 NR Description: CG6370-PA [Drosophila melanogaster]
  misc_feature (93)..(552): Homolog of NCBI NO: 28436786 NR Description: Similar to ribophorin II [Xenopus laevis]
  misc_feature (94)..(559): Homolog of NCBI NO: 31198567 NR Description: ENSANGP00000020783 [Anopheles gambiae]
  misc_feature (1)..(73): Homolog of NCBI NO: 7486600 NR Description: hypothetical protein F7J7.90 - Arabidopsis
  misc_feature (81)..(530): Homolog of NCBI NO: 7486600 NR Description: hypothetical protein F7J7.90 - Arabidopsis
  misc_feature (1)..(561): Homolog of NCBI NO: 34906860 NR Description: P0470A12.7 [Oryza sativa (japonica
  misc_feature (1)..(561): Homolog of NCBI NO: 22328844 NR Description: expressed protein [Arabidopsis thaliana]
MYYSIGSLVLIKDQASDVDVLLTDADGSFHSIKALSQSDGRWRYSSNNPESSTYAAGLALEALAGVISLASSEIDQSRVNTVKNDILKLFDSIEKYDDGTFYFDEKFVGGREHQGSLSTTSSVVRGVTAFAAVTSGKINLPGDKILGLANFFLGIGIPGDAKDFFNQVESLALLENNKVSIPLVLSLPATVYSLSKKDQLKVRVNTVLGSAAPPLTVKLVQAFRSNAKDSAIESKELQYDQNNGIHFLEAFPDNVDVGTYVFVFEIALHDSAGEKVYATGGQIHVPIYVTGIIKVSNAEIAVLDSDLGSVETQKTLDLAGNDDVSLSANHLQKLRFSFQLTTPHGHAFKPHQAFFKLKHETKHEHIFVVGNTGRKFEIILDFLGLVEKFYYLSGRYDIELTVGDTVMENSFLRLLGEVDLDLPEAPEKAARLPPLPVDPYSRYGPKAEIAHLFRAPEKRPPQELSLTFLGLILLPFIGFLVGLLRLGVNLKNFPSSAVPATYAFLFHLGIAAVLLLYVLFWLKLDLFTTLKTVGFLGAFLLFVGHRILSHLASTSSKLKSA

SEQ ID NO: 53998 - DNA, 1418 bp, Glycine max
  misc_feature (1)..(1418): Ceres Seq. ID no. 14315309
acttgccttgctttgcttaggtgcgagagagagagatggatactggtatgctatgaagatgggatctcagactcagcgtcatcaccactctctttgattctcttcaatcttgagtctccaggaatcacattagctgagtatttcagagatatgggttataatgtcagtatgatggcagattctacatctagatgggcagaagcattgcgtgaaatctctggacgactggcagaaatgcctgcagatagtggatatcctgcataccttgctgcacgtttagcctcgttctatgaacgtgctgggaaggtaaaatgtcttggaggccctgaacgtacaggtagcgtaactattgttggtgctgtttcgccacctggaggagatttctcagatcctgtgacatctgcaaccctgagcatagttcaggttttctggggtttggacaaaaagcttgctcagaggaagcactttccttctgtaaactggcttatttcttattcaaaatactcaacggcacttgaaaccttttatgagcaatttgatccagattttatcaacattaggacaaaggctcgtgaagttctgcaaagggaagatgacctgaatgaaattgttcagcttgtgggcaaggatgctttagctgaaggagataagatcaccttagaaactgcaaagcttttgagagaggattatcttgctcaaaatgcctttacaccatatgacaaattctgccccttctacaagtctgtttggatgatgcgcaacattatccatttctacaatttggcaaatcaggcagtagagaggggagctggttcagatggtcagaagatatcttacacccttatcaagcatcgtatgggagatctgttctaccgattagtgtctcagaaatttgaggatccagcagaaggggaagctgctttggttgcgaaatttcagaagttacatgaggacctgactaatggtttccgcaaccttgaggacgaaacccgatgattgatgattgaagatttggtagtttgctcaaatattgtgttatttccaattgtaagacgcagtctagcatcgcagggttgcaacgtcccgagtgttctcatatttgactgctcgattcattcatatcacatttatttcctttcttggtgctggtttggcttttgatctagtctcatgtgtagctataatcatgtgtttcagtcatcctcagtttgtttattgagaataagaaacgagacttgctctttcaatatgtatttaggagaataaaattatcttaggacatgaagtgcctacagcaagcggattctggattcatataggtggaatttttggtggaagtggattatcttgaatcctgtatttcatagatggacttcttgtagcaatgagtatttaattatttattcgaaatatgttgc

SEQ ID NO: 53999 - protein, 331 aa, Glycine max
  peptide (1)..(331): Ceres Seq. ID no. 14315310
  misc_feature (41)..(172): Pfam Name: ATP synthase alpha/beta family, Pfam Description: ATP synthase alpha/beta family,
  misc_feature (41)..(331): Homolog of NCBI NO: 13235340 NR Description: putative vacuolar ATP Synthase subunit A
  misc_feature (41)..(331): Homolog of NCBI NO: 15982954 NR Description: V-ATPase catalytic subunit A [Prunus persica]
  misc_feature (41)..(331): Homolog of NCBI NO: 15219234 NR Description: ATPase 70 kDa subunit -related [Arabidopsis
  misc_feature (41)..(331): Homolog of NCBI NO: 27884018 NR Description: vacuolar H+-ATPase A2 subunit isoform
  misc_feature (41)..(331): Homolog of NCBI NO: 27883932 NR Description: vacuolar H+-ATPase A1 subunit isoform
  misc_feature (41)..(331): Homolog of NCBI NO: 137460 NR Description: Vacuolar ATP synthase catalytic subunit A A subunit) (Vacuolar proton pump alpha subunit) (V-ATPase 69 kDa
  misc_feature (41)..(331): Homolog of NCBI NO: 2493122 NR Description: Vacuolar ATP synthase catalytic subunit A A subunit) (Vacuolar proton pump alpha subunit) (V-ATPase 69 kDa
  misc_feature (41)..(331): Homolog of NCBI NO: 12585490 NR Description: Vacuolar ATP synthase catalytic subunit A A subunit) (Vacuolar proton pump alpha subunit) (V-ATPase 69 kDa
  misc_feature (41)..(331): Homolog of NCBI NO: 6721571 NR Description: vacuolar H+-ATPase A subunit [Citrus unshiu]
  misc_feature (41)..(331): Homolog of NCBI NO: 2506211 NR Description: Vacuolar ATP synthase catalytic subunit A A subunit) (Vacuolar proton pump alpha subunit) (V-ATPase 69 kDa
TCLALLRCERERWILVCYEDGISDSASSPLSLILFNLESPGITLAEYFRDMGYNVSMMADSTSRWAEALREISGRLAEMPADSGYPAYLAARLASFYERAGKVKCLGGPERTGSVTIVGAVSPPGGDFSDPVTSATLSIVQVFWGLDKKLAQRKHFPSVNWLISYSKYSTALETFYEQFDPDFINIRTKAREVLQREDDLNEIVQLVGKDALAEGDKITLETAKLLREDYLAQNAFTPYDKFCPFYKSVWMMRNIIHFYNLANQAVERGAGSDGQKISYTLIKHRMGDLFYRLVSQKFEDPAEGEAALVAKFQKLHEDLTNGFRNLEDETR

SEQ ID NO: 54000 - protein, 281 aa, Glycine max
  peptide (1)..(281): Ceres Seq. ID no. 14315311
  misc_feature (1)..(122): Pfam Name: ATP synthase alpha/beta family, Pfam Description: ATP synthase alpha/beta family,
  misc_feature (1)..(281): Homolog of NCBI NO: 13235340 NR Description: putative vacuolar ATP Synthase subunit A
  misc_feature (1)..(281): Homolog of NCBI NO: 15982954 NR Description: V-ATPase catalytic subunit A [Prunus persica]
  misc_feature (1)..(281): Homolog of NCBI NO: 15219234 NR Description: ATPase 70 kDa subunit -related [Arabidopsis
  misc_feature (1)..(281): Homolog of NCBI NO: 27884018 NR Description: vacuolar H+-ATPase A2 subunit isoform
  misc_feature (1)..(281): Homolog of NCBI NO: 27883932 NR Description: vacuolar H+-ATPase A1 subunit isoform
  misc_feature (1)..(281): Homolog of NCBI NO: 137460 NR Description: Vacuolar ATP synthase catalytic subunit A A subunit) (Vacuolar proton pump alpha subunit) (V-ATPase 69 kDa
  misc_feature (1)..(281): Homolog of NCBI NO: 2493122 NR Description: Vacuolar ATP synthase catalytic subunit A A subunit) (Vacuolar proton pump alpha subunit) (V-ATPase 69 kDa
  misc_feature (1)..(281): Homolog of NCBI NO: 12585490 NR Description: Vacuolar ATP synthase catalytic subunit A A subunit) (Vacuolar proton pump alpha subunit) (V-ATPase 69 kDa
  misc_feature (1)..(281): Homolog of NCBI NO: 6721571 NR Description: vacuolar H+-ATPase A subunit [Citrus unshiu]
  misc_feature (1)..(281): Homolog of NCBI NO: 2506211 NR Description: Vacuolar ATP synthase catalytic subunit A A subunit) (Vacuolar proton pump alpha subunit) (V-ATPase 69 kDa
MGYNVSMMADSTSRWAEALREISGRLAEMPADSGYPAYLAARLASFYERAGKVKCLGGPERTGSVTIVGAVSPPGGDFSDPVTSATLSIVQVFWGLDKKLAQRKHFPSVNWLISYSKYSTALETFYEQFDPDFINIRTKAREVLQREDDLNEIVQLVGKDALAEGDKITLETAKLLREDYLAQNAFTPYDKFCPFYKSVWMMRNIIHFYNLANQAVERGAGSDGQKISYTLIKHRMGDLFYRLVSQKFEDPAEGEAALVAKFQKLHEDLTNGFRNLEDETR

SEQ ID NO: 54001 - protein, 275 aa, Glycine max
  peptide (1)..(275): Ceres Seq. ID no. 14315312
  misc_feature (1)..(116): Pfam Name: ATP synthase alpha/beta family, Pfam Description: ATP synthase alpha/beta family,
  misc_feature (1)..(275): Homolog of NCBI NO: 13235340 NR Description: putative vacuolar ATP Synthase subunit A
  misc_feature (1)..(275): Homolog of NCBI NO: 15982954 NR Description: V-ATPase catalytic subunit A [Prunus persica]
  misc_feature (1)..(275): Homolog of NCBI NO: 15219234 NR Description: ATPase 70 kDa subunit -related [Arabidopsis
  misc_feature (1)..(275): Homolog of NCBI NO: 27884018 NR Description: vacuolar H+-ATPase A2 subunit isoform
  misc_feature (1)..(275): Homolog of NCBI NO: 27883932 NR Description: vacuolar H+-ATPase A1 subunit isoform
  misc_feature (1)..(275): Homolog of NCBI NO: 137460 NR Description: Vacuolar ATP synthase catalytic subunit A A subunit) (Vacuolar proton pump alpha subunit) (V-ATPase 69 kDa
  misc_feature (1)..(275): Homolog of NCBI NO: 2493122 NR Description: Vacuolar ATP synthase catalytic subunit A A subunit) (Vacuolar proton pump alpha subunit) (V-ATPase 69 kDa
  misc_feature (1)..(275): Homolog of NCBI NO: 12585490 NR Description: Vacuolar ATP synthase catalytic subunit A A subunit) (Vacuolar proton pump alpha subunit) (V-ATPase 69 kDa
  misc_feature (1)..(275): Homolog of NCBI NO: 6721571 NR Description: vacuolar H+-ATPase A subunit [Citrus unshiu]
  misc_feature (1)..(275): Homolog of NCBI NO: 2506211 NR Description: Vacuolar ATP synthase catalytic subunit A A subunit) (Vacuolar proton pump alpha subunit) (V-ATPase 69 kDa
MMADSTSRWAEALREISGRLAEMPADSGYPAYLAARLASFYERAGKVKCLGGPERTGSVTIVGAVSPPGGDFSDPVTSATLSIVQVFWGLDKKLAQRKHFPSVNWLISYSKYSTALETFYEQFDPDFINIRTKAREVLQREDDLNEIVQLVGKDALAEGDKITLETAKLLREDYLAQNAFTPYDKFCPFYKSVWMMRNIIHFYNLANQAVERGAGSDGQKISYTLIKHRMGDLFYRLVSQKFEDPAEGEAALVAKFQKLHEDLTNGFRNLEDETR

SEQ ID NO: 54002 - DNA, 1701 bp, Glycine max
  misc_feature (1)..(1701): Ceres Seq. ID no. 14311371
atgataagtggtatggaacagaccagttttctatttcagcaagcttctaaggttggtttttctcatacaaacatccttagaagcattattcaccatgcttgcttgcgatttccaaatcttgcatcagttagtggtatatcaggtcagcttccaagcaggtcaaaatccttacaacgtaacaagtctttttctcgccgtgaaggaactcgaaaagtgtttgtcatttttggaggtaacacatcagaacggcaagtatctcttatgagtggtacgaatgtctggctcaatttgctagccttccatgatcttgaggtaactccatgtttgctttcccctacaagtgagtgtgcatctagcattgatatgggaaaaaaggctgatgatgtaatgaatagaacagtttggtcattgccttattctcttgtgctaagacatactactgaggaggtactagatgcatgcatggaagcaattgagccggaacatgctgcaataacatctgaactccggaagaaagtaatgaatgatcttatggagggtttgaaggaccacaattggtttaccgggtttgatattgctgatgatctgcctgtgaaattttcattaaggcagtggatcaagctagccaaggaagtccaagcaacagtttttattgcagtgcatggaggcattggagaagatggtacacttcaatctttgctggatgctgaaggagtgccctacacaggtcctggtgcaatggcatcaaagatttgtatggacaaagttgcaacctctgtggctttaaaacatcttgcaaattcgggagttcttaccataaataaggatgtcaggcaaaaagatgatctctctaataagcccataaatgatacatggcatgacctcaccagaaagctacagtgccaaacattatgtgtcaaaccagcaaaagatggatgctcaactggggtagcaagactatgctgtcccgaggaccttgcaatatatgtcaaagctctggaggactgtctactaagaattcctccaaattgcttatcaaaggcacatggtatgattgagatgccaaaccctcctccagaacacttaatcttcgaacctttcatagagacggatgaaataattgtgacatccaaatttgaggatgcaactggtcatggcctcacttggaaaggacacagcagatgggtggaaataactgttggcgtcataggaaaacgtggatcaatgcactcgctaagtcctagtgtaactgtcaaggaatctggtgatattttgtcacttgaggagaagttccaaggtgggactggcatcaatctgactccgcctcccttgtcaattatgagtgagaatgctttgaagagatgtaaacagcatattgaactgattgcaaacactcttcaattggaaggattttcacgcattgatgcatttgtaaatgttgacagtggagaggttttgattatagaggtaaatactgtgcctggaatgacaccttccactgttctgattcatcaggcactagtagagcaaccaccgttgtatcctcatcaattcttccgtaagcttcttgatttggcatctgaaaggtccatgtaaatctatttaatagaatgtttacattgtctatcaaatgttgttaccacttgaagttattgtgaaactttaatttcctatctggaacttgcgtccctttataatgtg

SEQ ID NO: 54003 - protein, 531 aa, Glycine max
  peptide (1)..(531): Ceres Seq. ID no. 14311372
  misc_feature (396)..(506): Pfam Name: D-ala D-ala ligase Pfam Description: D-ala D-ala ligase
  misc_feature (2)..(103): Homolog of NCBI NO: 6403498 NR Description: unknown protein [Arabidopsis thaliana]
  misc_feature (207)..(529): Homolog of NCBI NO: 23136007 NR Description: hypothetical protein [Cytophaga hutchinsonii]
  misc_feature (1)..(103): Homolog of NCBI NO: 18398265 NR Description: expressed protein [Arabidopsis thaliana]
  misc_feature (1)..(103): Homolog of NCBI NO: 21536607 NR Description: unknown [Arabidopsis thaliana]
  misc_feature (208)..(317): Homolog of NCBI NO: 34898182 NR Description: P0034A04.1 [Oryza sativa (japonica
  misc_feature (174)..(433): Homolog of NCBI NO: 15231971 NR Description: expressed protein [Arabidopsis thaliana]
  misc_feature (1)..(432): Homolog of NCBI NO: 26452707 NR Description: unknown protein [Arabidopsis thaliana]
  misc_feature (293)..(530): Homolog of NCBI NO: 34898182 NR Description: P0034A04.1 [Oryza sativa (japonica
  misc_feature (1)..(303): Homolog of NCBI NO: 34898182 NR Description: P0034A04.1 [Oryza sativa (japonica
  misc_feature (1)..(530): Homolog of NCBI NO: 33146883 NR Description: unknown protein [Oryza sativa (japonica
MISGMEQTSFLFQQASKVGFSHTNILRSIIHHACLRFPNLASVSGISGQLPSRSKSLQRNKSFSRREGTRKVFVIFGGNTSERQVSLMSGTNVWLNLLAFHDLEVTPCLLSPTSECASSIDMGKKADDVMNRTVWSLPYSLVLRHTTEEVLDACMEAIEPEHAAITSELRKKVMNDLMEGLKDHNWFTGFDIADDLPVKFSLRQWIKLAKEVQATVFIAVHGGIGEDGTLQSLLDAEGVPYTGPGAMASKICMDKVATSVALKHLANSGVLTINKDVRQKDDLSNKPINDTWHDLTRKLQCQTLCVKPAKDGCSTGVARLCCPEDLAIYVKALEDCLLRIPPNCLSKAHGMIEMPNPPPEHLIFEPFIETDEIIVTSKFEDATGHGLTWKGHSRWVEITVGVIGKRGSMHSLSPSVTVKESGDILSLEEKFQGGTGINLTPPPLSIMSENALKRCKQHIELIANTLQLEGFSRIDAFVNVDSGEVLIIEVNTVPGMTPSTVLIHQALVEQPPLYPHQFFRKLLDLASERSM

SEQ ID NO: 54004 - protein, 527 aa, Glycine max
  peptide (1)..(527): Ceres Seq. ID no. 14311373
  misc_feature (392)..(502): Pfam Name: D-ala D-ala ligase Pfam Description: D-ala D-ala ligase
  misc_feature (1)..(99): Homolog of NCBI NO: 6403498 NR Description: unknown protein [Arabidopsis thaliana]
  misc_feature (203)..(525): Homolog of NCBI NO: 23136007 NR Description: hypothetical protein [Cytophaga hutchinsonii]
  misc_feature (1)..(99): Homolog of NCBI NO: 18398265 NR Description: expressed protein [Arabidopsis thaliana]
  misc_feature (1)..(99): Homolog of NCBI NO: 21536607 NR Description: unknown [Arabidopsis thaliana]
  misc_feature (204)..(313): Homolog of NCBI NO: 34898182 NR Description: P0034A04.1 [Oryza sativa (japonica
  misc_feature (170)..(429): Homolog of NCBI NO: 15231971 NR Description: expressed protein [Arabidopsis thaliana]
  misc_feature (1)..(428): Homolog of NCBI NO: 26452707 NR Description: unknown protein [Arabidopsis thaliana]
  misc_feature (289)..(526): Homolog of NCBI NO: 34898182 NR Description: P0034A04.1 [Oryza sativa (japonica
  misc_feature (1)..(299): Homolog of NCBI NO: 34898182 NR Description: P0034A04.1 [Oryza sativa (japonica
  misc_feature (1)..(526): Homolog of NCBI NO: 33146883 NR Description: unknown protein [Oryza sativa (japonica
MEQTSFLFQQASKVGFSHTNILRSIIHHACLRFPNLASVSGISGQLPSRSKSLQRNKSFSRREGTRKVFVIFGGNTSERQVSLMSGTNVWLNLLAFHDLEVTPCLLSPTSECASSIDMGKKADDVMNRTVWSLPYSLVLRHTTEEVLDACMEAIEPEHAAITSELRKKVMNDLMEGLKDHNWFTGFDIADDLPVKFSLRQWIKLAKEVQATVFIAVHGGIGEDGTLQSLLDAEGVPYTGPGAMASKICMDKVATSVALKHLANSGVLTINKDVRQKDDLSNKPINDTWHDLTRKLQCQTLCVKPAKDGCSTGVARLCCPEDLAIYVKALEDCLLRIPPNCLSKAHGMIEMPNPPPEHLIFEPFIETDEIIVTSKFEDATGHGLTWKGHSRWVEITVGVIGKRGSMHSLSPSVTVKESGDILSLEEKFQGGTGINLTPPPLSIMSENALKRCKQHIELIANTLQLEGFSRIDAFVNVDSGEVLIIEVNTVPGMTPSTVLIHQALVEQPPLYPHQFFRKLLDLASERSM

SEQ ID NO: 54005 - protein, 444 aa, Glycine max
  peptide (1)..(444): Ceres Seq. ID no. 14311374
  misc_feature (309)..(419): Pfam Name: D-ala D-ala ligase Pfam Description: D-ala D-ala ligase
  misc_feature (1)..(16): Homolog of NCBI NO: 6403498 NR Description: unknown protein [Arabidopsis thaliana]
  misc_feature (120)..(442): Homolog of NCBI NO: 23136007 NR Description: hypothetical protein [Cytophaga hutchinsonii]
  misc_feature (1)..(16): Homolog of NCBI NO: 18398265 NR Description: expressed protein [Arabidopsis thaliana]
  misc_feature (1)..(16): Homolog of NCBI NO: 21536607 NR Description: unknown [Arabidopsis thaliana]
  misc_feature (121)..(230): Homolog of NCBI NO: 34898182 NR Description: P0034A04.1 [Oryza sativa (japonica
  misc_feature (87)..(346): Homolog of NCBI NO: 15231971 NR Description: expressed protein [Arabidopsis thaliana]
  misc_feature (1)..(345): Homolog of NCBI NO: 26452707 NR Description: unknown protein [Arabidopsis thaliana]
  misc_feature (206)..(443): Homolog of NCBI NO: 34898182 NR Description: P0034A04.1 [Oryza sativa (japonica
  misc_feature (1)..(216): Homolog of NCBI NO: 34898182 NR Description: P0034A04.1 [Oryza sativa (japonica
  misc_feature (1)..(443): Homolog of NCBI NO: 33146883 NR Description: unknown protein [Oryza sativa (japonica
MSGTNVWLNLLAFHDLEVTPCLLSPTSECASSIDMGKKADDVMNRTVWSLPYSLVLRHTTEEVLDACMEAIEPEHAAITSELRKKVMNDLMEGLKDHNWFTGFDIADDLPVKFSLRQWIKLAKEVQATVFIAVHGGIGEDGTLQSLLDAEGVPYTGPGAMASKICMDKVATSVALKHLANSGVLTINKDVRQKDDLSNKPINDTWHDLTRKLQCQTLCVKPAKDGCSTGVARLCCPEDLAIYVKALEDCLLRIPPNCLSKAHGMIEMPNPPPEHLIFEPFIETDEIIVTSKFEDATGHGLTWKGHSRWVEITVGVIGKRGSMHSLSPSVTVKESGDILSLEEKFQGGTGINLTPPPLSIMSENALKRCKQHIELIANTLQLEGFSRIDAFVNVDSGEVLIIEVNTVPGMTPSTVLIHQALVEQPPLYPHQFFRKLLDLASERSM

SEQ ID NO: 54006 - DNA, 1174 bp, Glycine max
  misc_feature (1)..(1174): Ceres Seq. ID no. 14307559
agctaggtcgcagaaaatgccttccccactcacaaaacgaaacttttgatttccttaggcgcgtcattgtcatggagttagcagtgtgttaaacacaccagagggtgatagcagggagaaaaagacagagtgtgtaagaaagagaagagagagaaatgggaaggggaagagtggagttgaagagaattgagaacaagatcaacaggcaagtgacctttgcaaaacgaaggaacgggcttttgaagaaagcttacgagctttccgttctttgtgatgccgaggttgctctcatcatcttctccaatagaggaaaactgtacgagttctgcagcagttcaagcatgctcaaaacgctagagaggtaccagaaatgtaactatggtgcgcctgaggctaatgtgtctacacgggaagccttggagttaatcagtcaacaggagtacttgaagctgaaggcacgttatgaggccctacaacggtcccagaggaaccttatgggagaagatcttggtcctttaagcagcaaagagctcgagtctcttgaaaggcagctagattcgtccttgaagcaaataagatcaaccaggacccagttcatgttggatcagctctctgatcttcaacgtaaggaacacttgctaagtgaggctaacaggtctctcagacaaaggcagttggaagggtatcaaataaatccactccaactgaatcccggagttgaagagatgggatatggcaggcatccagctcaaactcatggtgaagccctctttcaacaaatggagtgtgagccaacgttacaaattgggtatcagcctgatccagtatcagtggtgacagcaggcccaagcatgagcaattacatggcaggatggttaccatagtttgcgtttcctgcataagatccactgcaccagcacatttgccgttccaattttatttgaaaacgaaaaaaaaaagaaggaagaaaatggctttggatgtaatgaagctgtaagtgtctgccgtgtatgaagtaggaacaaagttaagcagtgttgtttgtgtgtgctagctctttcataaaactgcacttctttgcttcggttactgtttcttcccttttaataagagtattgatgtcattaatgaactacatggttattttatatgctaccgtcagtgattttgaaag

SEQ ID NO: 54007 - protein, 242 aa, Glycine max
  peptide (1)..(242): Ceres Seq. ID no. 14307560
  misc_feature (75)..(175): Pfam Name: K-box region Pfam Description: K-box region
  misc_feature (1)..(242): Homolog of NCBI NO: 8745070 NR Description: MADS box protein [Betula pendula]
  misc_feature (1)..(242): Homolog of NCBI NO: 7446510 NR Description: MADS box protein DEFH72 - garden snapdragon
  misc_feature (1)..(242): Homolog of NCBI NO: 7446511 NR Description: MADS box protein DEFH200 - garden snapdragon
  misc_feature (1)..(231): Homolog of NCBI NO: 23194451 NR Description: MADS box protein GHMADS-1 [Gossypium hirsutum]
  misc_feature (1)..(241): Homolog of NCBI NO: 30314024 NR Description: SEP3-related MADS-box protein; PTM6 [Populus
  misc_feature (1)..(242): Homolog of NCBI NO: 1345965 NR Description: Agamous-like MADS box protein AGL9 homolog
  misc_feature (1)..(242): Homolog of NCBI NO: 31747210 NR Description: MADS-box protein 5 [Lycopersicon esculentum]
  misc_feature (1)..(242): Homolog of NCBI NO: 5070138 NR Description: MADS-box protein MADS3 [Nicotiana sylvestris]
  misc_feature (1)..(242): Homolog of NCBI NO: 7446516 NR Description: MADS box protein - garden pea
  misc_feature (1)..(242): Homolog of NCBI NO: 20385588 NR Description: MADS-box protein 4 [Vitis vinifera]
MGRGRVELKRIENKINRQVTFAKRRNGLLKKAYELSVLCDAEVALIIFSNRGKLYEFCSSSSMLKTLERYQKCNYGAPEANVSTREALELISQQEYLKLKARYEALQRSQRNLMGEDLGPLSSKELESLERQLDSSLKQIRSTRTQFMLDQLSDLQRKEHLLSEANRSLRQRQLEGYQINPLQLNPGVEEMGYGRHPAQTHGEALFQQMECEPTLQIGYQPDPVSVVTAGPSMSNYMAGWLP

SEQ ID NO: 54008 - protein, 180 aa, Glycine max
  peptide (1)..(180): Ceres Seq. ID no. 14307561
  misc_feature (13)..(113): Pfam Name: K-box region Pfam Description: K-box region
  misc_feature (1)..(180): Homolog of NCBI NO: 8745070 NR Description: MADS box protein [Betula pendula]
  misc_feature (1)..(180): Homolog of NCBI NO: 7446510 NR Description: MADS box protein DEFH72 - garden snapdragon
  misc_feature (1)..(180): Homolog of NCBI NO: 7446511 NR Description: MADS box protein DEFH200 - garden snapdragon
  misc_feature (1)..(169): Homolog of NCBI NO: 23194451 NR Description: MADS box protein GHMADS-1 [Gossypium hirsutum]
  misc_feature (1)..(179): Homolog of NCBI NO: 30314024 NR Description: SEP3-related MADS-box protein; PTM6 [Populus
  misc_feature (1)..(180): Homolog of NCBI NO: 1345965 NR Description: Agamous-like MADS box protein AGL9 homolog
  misc_feature (1)..(180): Homolog of NCBI NO: 31747210 NR Description: MADS-box protein 5 [Lycopersicon esculentum]
  misc_feature (1)..(180): Homolog of NCBI NO: 5070138 NR Description: MADS-box protein MADS3 [Nicotiana sylvestris]
  misc_feature (1)..(180): Homolog of NCBI NO: 7446516 NR Description: MADS box protein - garden pea
  misc_feature (1)..(180): Homolog of NCBI NO: 20385588 NR Description: MADS-box protein 4 [Vitis vinifera]
MLKTLERYQKCNYGAPEANVSTREALELISQQEYLKLKARYEALQRSQRNLMGEDLGPLSSKELESLERQLDSSLKQIRSTRTQFMLDQLSDLQRKEHLLSEANRSLRQRQLEGYQINPLQLNPGVEEMGYGRHPAQTHGEALFQQMECEPTLQIGYQPDPVSVVTAGPSMSNYMAGWLP

SEQ ID NO: 54009 - protein, 129 aa, Glycine max
  peptide (1)..(129): Ceres Seq. ID no. 14307562
  misc_feature (1)..(62): Pfam Name: K-box region Pfam Description: K-box region
  misc_feature (1)..(129): Homolog of NCBI NO: 8745070 NR Description: MADS box protein [Betula pendula]
  misc_feature (1)..(129): Homolog of NCBI NO: 7446510 NR Description: MADS box protein DEFH72 - garden snapdragon
  misc_feature (1)..(129): Homolog of NCBI NO: 7446511 NR Description: MADS box protein DEFH200 - garden snapdragon
  misc_feature (1)..(118): Homolog of NCBI NO: 23194451 NR Description: MADS box protein GHMADS-1 [Gossypium hirsutum]
  misc_feature (1)..(128): Homolog of NCBI NO: 30314024 NR Description: SEP3-related MADS-box protein; PTM6 [Populus
  misc_feature (1)..(129): Homolog of NCBI NO: 1345965 NR Description: Agamous-like MADS box protein AGL9 homolog
  misc_feature (1)..(129): Homolog of NCBI NO: 31747210 NR Description: MADS-box protein 5 [Lycopersicon esculentum]
  misc_feature (1)..(129): Homolog of NCBI NO: 5070138 NR Description: MADS-box protein MADS3 [Nicotiana sylvestris]
  misc_feature (1)..(129): Homolog of NCBI NO: 7446516 NR Description: MADS box protein - garden pea
  misc_feature (1)..(129): Homolog of NCBI NO: 20385588 NR Description: MADS-box protein 4 [Vitis vinifera]
MGEDLGPLSSKELESLERQLDSSLKQIRSTRTQFMLDQLSDLQRKEHLLSEANRSLRQRQLEGYQINPLQLNPGVEEMGYGRHPAQTHGEALFQQMECEPTLQIGYQPDPVSVVTAGPSMSNYMAGWLP

SEQ ID NO: 54010 - DNA, 1789 bp, Glycine max
  misc_feature (1)..(1789): Ceres Seq. ID no. 14314896
atcactctgtgctccctcgctctatttctcagtctctgtgtttgcggctgaggattccgaacgagtgaccttcttcgtttctcgcaaagtttaagtaatcatgggtaaggaaaaggttcacatcaacattgtcgtcattggacatgtcgactctgggaagtcaactaccactggtcacttgatctacaagcttggaggtattgacaagcgtgtgattgagaggttcgagaaggaggctgccgagatgaacaagaggtcattcaagtatgcctgggtgctcgacaagctcaaagctgagcgtgaaagaggaattaccattgatattgctttgtggaagtttgaaaccaccaagtactactgcacggtcattgatgctcctggacatcgtgactttatcaagaacatgattactggtacctcccaggccgactgtgctgtccttattattgactccaccactggtggttttgaagctggtatttctaaggatggacagacccgtgagcatgctcttcttgctttcaccctaggtgtgaagcagatgatctgttgctgtaacaagatggatgccactacccccaagtactctaaggctaggtatgatgaaatcgtgaaggaagtctcttcttacttgaagaaggttggttacaacccagacaagattccctttgttcccatctctggttttgagggtgacaacatgattgagaggtccaccaaccttgactggtacaagggaccaactctccttgaggctcttgaccaaatcaatgagcccaagaggccctctgacaagcctctaaggcttccattgcaggatgtctacaagattggtggtattggtactgtgccagtgggacgtgtagagactggggttgtgaagcctggtatggtggtgacttttggtcccactgggctgacaactgaggttaagtctgttgagatgcaccatgaggctctcacagaggctcttccaggtgacaatgttggatttaatgtgaagaatgttgcagtcaaggatctcaagcgtggttttgttgcatccaactccaaggacgaccctgccaaggaagctgccaacttcacatcccaagtcattatcatgaaccatcctggccagattggtaatggatacgcaccagtccttgactgccacacttctcacattgctgtgaagttttctgaaatcttgaccaagattgacaggcgatctggtaaggagcttgagaaggagcccaaatttttgaagaatggtgatgctggtatggttaagatggttccaaccaagcccatggtggttgaaactttctctgagtatcctccccttggtcgttttgctgtgagggacatgcgtcagaccgtagctgttggagtcatcaagagtgttgagaagaaagaccccaccggagccaaggtcacaaaggctgccgccaagaagaagtgattgcattttggcaattttgctagcacatgtgatcatcaacgtggtttcaaaaaaacttgttcctttacagtagtttatctttgcagagtcttaggtgtttgttttaccagttatattttgaagtgtccgccgatttcatgtagccgtagccttcaaaactgggttcttgatcggcggtaacattttcgttgctgtttgtttttgatgagtactgttttttgttttgatggtaaaagtctgagattttcaaattcacaagcagccatagggttttagtccatttcctttgctgctgaggagggatgtcttaaatttgcatttaatttataaggaagttttgttaag

SEQ ID NO: 54011 - protein, 447 aa, Glycine max
  peptide (1)..(447): Ceres Seq. ID no. 14314897
  misc_feature (5)..(227): Pfam Name: Elongation factor Tu GTP binding domain Pfam Description: Elongation factor Tu GTP binding domain
  misc_feature (1)..(447): Homolog of NCBI NO: 3122060 NR Description: ELONGATION FACTOR 1-ALPHA (EF-1-ALPHA)
  misc_feature (1)..(447): Homolog of NCBI NO: 2282584 NR Description: elongation factor 1-alpha [Zea mays]
  misc_feature (1)..(447): Homolog of NCBI NO: 5917745 NR Description: elongation factor-1 alpha 2 [Lilium longiflorum]
  misc_feature (1)..(447): Homolog of NCBI NO: 3869088 NR Description: elongation factor-1 alpha [Nicotiana paniculata]
  misc_feature (1)..(447): Homolog of NCBI NO: 1864017 NR Description: elongation factor-1 alpha [Nicotiana tabacum]
  misc_feature (1)..(447): Homolog of NCBI NO: 4680249 NR Description: elongation factor 1-alpha 1; EF-1-alpha1 [Lilium
  misc_feature (1)..(447): Homolog of NCBI NO: 6015059 NR Description: ELONGATION FACTOR 1-ALPHA (EF-1-ALPHA)
  misc_feature (1)..(447): Homolog of NCBI NO: 2662343 NR Description: EF-1 alpha [Oryza sativa]
  misc_feature (1)..(447): Homolog of NCBI NO: 2662341 NR Description: EF-1 alpha [Oryza sativa]
  misc_feature (1)..(447): Homolog of NCBI NO: 5917747 NR Description: elongation factor-1 alpha 3 [Lilium longiflorum]
MGKEKVHINIVVIGHVDSGKSTTTGHLIYKLGGIDKRVIERFEKEAAEMNKRSFKYAWVLDKLKAERERGITIDIALWKFETTKYYCTVIDAPGHRDFIKNMITGTSQADCAVLIIDSTTGGFEAGISKDGQTREHALLAFTLGVKQMICCCNKMDATTPKYSKARYDEIVKEVSSYLKKVGYNPDKIPFVPISGFEGDNMIERSTNLDWYKGPTLLEALDQINEPKRPSDKPLRLPLQDVYKIGGIGTVPVGRVETGVVKPGMVVTFGPTGLTTEVKSVEMHHEALTEALPGDNVGFNVKNVAVKDLKRGFVASNSKDDPAKEAANFTSQVIIMNHPGQIGNGYAPVLDCHTSHIAVKFSEILTKIDRRSGKELEKEPKFLKNGDAGMVKMVPTKPMVVETFSEYPPLGRFAVRDMRQTVAVGVIKSVEKKDPTGAKVTKAAAKKK

SEQ ID NO: 54012 - protein, 399 aa, Glycine max
  peptide (1)..(399): Ceres Seq. ID no. 14314898
  misc_feature (1)..(179): Pfam Name: Elongation factor Tu GTP binding domain Pfam Description: Elongation factor Tu GTP binding domain
  misc_feature (1)..(399): Homolog of NCBI NO: 3122060 NR Description: ELONGATION FACTOR 1-ALPHA (EF-1-ALPHA)
  misc_feature (1)..(399): Homolog of NCBI NO: 2282584 NR Description: elongation factor 1-alpha [Zea mays]
  misc_feature (1)..(399): Homolog of NCBI NO: 5917745 NR Description: elongation factor-1 alpha 2 [Lilium longiflorum]
  misc_feature (1)..(399): Homolog of NCBI NO: 3869088 NR Description: elongation factor-1 alpha [Nicotiana paniculata]
  misc_feature (1)..(399): Homolog of NCBI NO: 1864017 NR Description: elongation factor-1 alpha [Nicotiana tabacum]
  misc_feature (1)..(399): Homolog of NCBI NO: 6015059 NR Description: ELONGATION FACTOR 1-ALPHA (EF-1-ALPHA)
  misc_feature (1)..(399): Homolog of NCBI NO: 4680249 NR Description: elongation factor 1-alpha 1; EF-1-alpha1 [Lilium
  misc_feature (1)..(399): Homolog of NCBI NO: 2662343 NR Description: EF-1 alpha [Oryza sativa]
  misc_feature (1)..(399): Homolog of NCBI NO: 2662341 NR Description: EF-1 alpha [Oryza sativa]
  misc_feature (1)..(399): Homolog of NCBI NO: 5917747 NR Description: elongation factor-1 alpha 3 [Lilium longiflorum]
MNKRSFKYAWVLDKLKAERERGITIDIALWKFETTKYYCTVIDAPGHRDFIKNMITGTSQADCAVLIIDSTTGGFEAGISKDGQTREHALLAFTLGVKQMICCCNKMDATTPKYSKARYDEIVKEVSSYLKKVGYNPDKIPFVPISGFEGDNMIERSTNLDWYKGPTLLEALDQINEPKRPSDKPLRLPLQDVYKIGGIGTVPVGRVETGVVKPGMVVTFGPTGLTTEVKSVEMHHEALTEALPGDNVGFNVKNVAVKDLKRGFVASNSKDDPAKEAANFTSQVIIMNHPGQIGNGYAPVLDCHTSHIAVKFSEILTKIDRRSGKELEKEPKFLKNGDAGMVKMVPTKPMVVETFSEYPPLGRFAVRDMRQTVAVGVIKSVEKKDPTGAKVTKAAAKKK

SEQ ID NO: 54013 - protein, 346 aa, Glycine max
  peptide (1)..(346): Ceres Seq. ID no. 14314899
  misc_feature (1)..(126): Pfam Name: Elongation factor Tu GTP binding domain Pfam Description: Elongation factor Tu GTP binding domain
  misc_feature (1)..(346): Homolog of NCBI NO: 3122060 NR Description: ELONGATION FACTOR 1-ALPHA (EF-1-ALPHA)
  misc_feature (1)..(346): Homolog of NCBI NO: 2282584 NR Description: elongation factor 1-alpha [Zea mays]
  misc_feature (1)..(346): Homolog of NCBI NO: 5917745 NR Description: elongation factor-1 alpha 2 [Lilium longiflorum]
  misc_feature (1)..(346): Homolog of NCBI NO: 3869088 NR Description: elongation factor-1 alpha [Nicotiana paniculata]
  misc_feature (1)..(346): Homolog of NCBI NO: 1864017 NR Description: elongation factor-1 alpha [Nicotiana tabacum]
  misc_feature (1)..(346): Homolog of NCBI NO: 6015059 NR Description: ELONGATION FACTOR 1-ALPHA (EF-1-ALPHA)
  misc_feature (1)..(346): Homolog of NCBI NO: 4680249 NR Description: elongation factor 1-alpha 1; EF-1-alpha1 [Lilium
  misc_feature (1)..(346): Homolog of NCBI NO: 2662343 NR Description: EF-1 alpha [Oryza sativa]
  misc_feature (1)..(346): Homolog of NCBI NO: 2662341 NR Description: EF-1 alpha [Oryza sativa]
  misc_feature (1)..(346): Homolog of NCBI NO: 5917747 NR Description: elongation factor-1 alpha 3 [Lilium longiflorum]
MITGTSQADCAVLIIDSTTGGFEAGISKDGQTREHALLAFTLGVKQMICCCNKMDATTPKYSKARYDEIVKEVSSYLKKVGYNPDKIPFVPISGFEGDNMIERSTNLDWYKGPTLLEALDQINEPKRPSDKPLRLPLQDVYKIGGIGTVPVGRVETGVVKPGMVVTFGPTGLTTEVKSVEMHHEALTEALPGDNVGFNVKNVAVKDLKRGFVASNSKDDPAKEAANFTSQVIIMNHPGQIGNGYAPVLDCHTSHIAVKFSEILTKIDRRSGKELEKEPKFLKNGDAGMVKMVPTKPMVVETFSEYPPLGRFAVRDMRQTVAVGVIKSVEKKDPTGAKVTKAAAKKK

SEQ ID NO: 54014 - DNA, 1616 bp, Glycine max
  misc_feature (1)..(1616): Ceres Seq. ID no. 14314851
ggtttttctgtcttaaggcttcattcattgagcttttctcttcttatttctatttctctctccccaaaagcttttgtttctctctgcttatggaaggcccttaaactttcgctctctctgcttcactttctcgcttttgcattttcttgtgaaaaaaaaaaatcctcagaacaaaaataggtcttcttcttctctgatctaccaaagcttcaaattctccttagtttggtttgtctgtgagtttggagtgtaatgtcgccgccgacgctggtaacggaggaggaggggcggagcaccgtggcgtccgattcttcgcaatccttggactgtttctctcagaatggtgctggattgaaagaacggaattacttagggttgtctgattgctcatcagtggatagctgtgcctctactgtgccaagcttgtgtgatgagaaaaaggagaacatgaatttgaaggctacagagttgaggcttggtcttcccggattccaatcgcctgaaagggaaccggatcttttctctttaagctcaccaaagcttgatgagaagccactcttccctttgcttcctactaaagacgggatttgctcgtcggggcagaaagctgttgtttctggcaacaaaagaggttttgctgataccatggatgggttttctcaggggaagtttgctggtaatacagggatgaacgcggtgctatcacctagaccttctggagctcaaccttctgctatgaaagaaacaccaagcaaattgtcagaacgtccttgctcaactaataatggaaccggtcataaccatacaggtgcttctatcagtggcagcgcaccggcttctaaggcacaggttgttggttggcctcctattagatcatttaggaaaaactcaatggctaccaccactaacaagaacaatgatgaagtcgatggaaaaccaggtgttggcgcactctttgtgaaggtcagcatggatggtgctccgtatcttaggaaggtagatctaagaagttatacaacatatcaggaactatcttctgcccttgagaagatgttcctaagctgttttaccctaggtcagtgtggttcccatggagctccaggaagagaaatgttgagtgagagcaagctgagggatcttctgcatggttctgagtatgttctcacttatgaagataaagatggagattggatgcttgtaggggatgtgccatgggaaatgttcattgagacttgcaaaaggctgaaaattatgaagggttctgatgccattggtttagctcccagggccatggaaaagtctaaaagcaggatttagggtatcctggatttcctcttttgtctaatcaagtgtttattgttggatcctccggaatgggaaaagcaaaggatgatgactgaaatcctggcattggtggtttaacgcccttccacttatttgttttcaagtccctcaagagtttgtcatggtcctgtgttaatttgttaccactgtaatatcatatgaaagctacaatgaaatattagtatttgtggagtctgtaatcattataggaatccgtttgttttggaagaattgaacatctgttacagccgccaccatacggttctaacact

SEQ ID NO: 54015 - protein, 354 aa, Glycine max
  peptide (1)..(354): Ceres Seq. ID no. 14314852
  misc_feature (66)..(346): Pfam Name: AUX/IAA family Pfam Description: AUX/IAA family
MSPPTLVTEEEGRSTVASDSSQSLDCFSQNGAGLKERNYLGLSDCSSVDSCASTVPSLCDEKKENMNLKATELRLGLPGFQSPEREPDLFSLSSPKLDEKPLFPLLPTKDGICSSGQKAVVSGNKRGFADTMDGFSQGKFAGNTGMNAVLSPRPSGAQPSAMKETPSKLSERPCSTNNGTGHNHTGASISGSAPASKAQVVGWPPIRSFRKNSMATTTNKNNDEVDGKPGVGALFVKVSMDGAPYLRKVDLRSYTTYQELSSALEKMFLSCFTLGQCGSHGAPGREMLSESKLRDLLHGSEYVLTYEDKDGDWMLVGDVPWEMFIETCKRLKIMKGSDAIGLAPRAMEKSKSRI

SEQ ID NO: 54016 - protein, 289 aa, Glycine max
  peptide (1)..(289): Ceres Seq. ID no. 14314853
  misc_feature (1)..(281): Pfam Name: AUX/IAA family Pfam Description: AUX/IAA family
MNLKATELRLGLPGFQSPEREPDLFSLSSPKLDEKPLFPLLPTKDGICSSGQKAVVSGNKRGFADTMDGFSQGKFAGNTGMNAVLSPRPSGAQPSAMKETPSKLSERPCSTNNGTGHNHTGASISGSAPASKAQVVGWPPIRSFRKNSMATTTNKNNDEVDGKPGVGALFVKVSMDGAPYLRKVDLRSYTTYQELSSALEKMFLSCFTLGQCGSHGAPGREMLSESKLRDLLHGSEYVLTYEDKDGDWMLVGDVPWEMFIETCKRLKIMKGSDAIGLAPRAMEKSKSRI

SEQ ID NO: 54017 - protein, 223 aa, Glycine max
  peptide (1)..(223): Ceres Seq. ID no. 14314854
  misc_feature (1)..(215): Pfam Name: AUX/IAA family Pfam Description: AUX/IAA family
MDGFSQGKFAGNTGMNAVLSPRPSGAQPSAMKETPSKLSERPCSTNNGTGHNHTGASISGSAPASKAQVVGWPPIRSFRKNSMATTTNKNNDEVDGKPGVGALFVKVSMDGAPYLRKVDLRSYTTYQELSSALEKMFLSCFTLGQCGSHGAPGREMLSESKLRDLLHGSEYVLTYEDKDGDWMLVGDVPWEMFIETCKRLKIMKGSDAIGLAPRAMEKSKSRI

SEQ ID NO: 54018 - DNA, 2193 bp, Glycine max
  misc_feature (1)..(2193): Ceres Seq. ID no. 15177203
atagtcagaacagttagttacctcttcataacatcaagtttggaggaattccccattgcattggcatctactattgaagtgtttgatgaaatgatggagctagaagatataaaactaaagaccgtcttggagtcctatggacaaatggatttggccagaaagggtcctttccgagccttacaaatagtttccatactcatatttaccctaaagaatctgattgataaacatgagaaagatgaatcaaaagacaaaaatgattgtcagcaacttgtgctgattcaactggcattagctgctgcattcattttcatgggccgttttgttgaaagatgccagaagtctagtcctttgaattattgccccttattgccttctgtacttgttttcgtggagtggtgtgcaagcatgcttgatgaaattgaagtatatgcaactgatcaaaagagtgaaacagctatttcttattttttttatgtgcttcttgaacttctaaatgaactaaatgagaatagaaaggaaaccaagaagcttgtagctaatagtacccctctttgggaagactatgaattgaggggctttgtatctatagctttttcacatgtctcattagatttctcagatggatgggaacacattgacaactttgagagtgacactgaattgcgcactcagcgcatgagtgaagcagcaatgaggattgctaacagatctaataatttgcaaaagtggattatatctgatgaattaggaagaaaatttcattctgctagatctgatgataatcatgagaagaaagaaacaggtaacatagagtccactgacaaaaggacaagtggggatgaccctaatcagaaaactcacaaagacaatggagaagatgggaaatgtgatacaagggataatccaagtagttccagcactaatgaagaaccttttgttgtggaagaagaagaagttattctcttcaggcctctagcgaggtatcattcagcaccatcgtacgcacttttttcccctcatgagcagatatcatcaccaaaagacaaggatgataaagtcttaccttctgatgattgtctgcaccgtactacatctctgcctatggcacaaaatccatttcaaattgatccttggggattccaaggtgagattatgaattcaaggatcaacaaatcgttccaagtgcaagaaccttcaatgaaggaatcaaatgcaaacacattttctgaaggtccaatctctgctgggcatccttcactcaatgcatgggtccttgatagaggagggttgagcaccaacaggttgcaccccattgaggaactagcttcttcatacttggctgatctttccatcaatagaactcagaatccagtcatcggtttggtggatgagttttcaaacttcccttcctcttctgctacatatactgctccagttccttctgctccactgttgccagataatgctccttggtataccgatgtcattgtacaatctactatgtctgctccattattgcaagaaaacccatcaccaataaatggttattcagcttggccttctacttatggaccccttggatatgatactagttttctattttattccaatggatacgcgccgccacctggtagaataacttcttcagaatggctgcgttggtacagagagaatcccccacctgagagggtcaacaacaatatgcagcctactcatttgaatgttcctggaaatcatgaaaatttcctccatcatgacacctacaggttcaaccaatttgaccaatggggtaaccctttgtctcctaaccagtacacttatatgaaaccaccaggtccccaaccattgcagccaggttatccctgtgcttttggtgctggtgaacacataaccaatcacttccacaattttcaaagaccaagcccttatgggtgtggttctgtgacagaacagagaaatgagccactgccactgctagaataccttaaggaaagggaatggagactccagcaggatcctaccctcagaggacctacatacatgggaaattgaaattcctcatctgaaatttagtttcttcattacaaaattgtacgccttcctttcacttagattccatacaatacaaggtatcaaacagtgtatgcaactatgtatatatttatgtgtatagtgttttaaccattccat

SEQ ID NO: 54019 - protein, 684 aa, Glycine max
  peptide (1)..(684): Ceres Seq. ID no. 15177204
  misc_feature (2)..(168): Homolog of NCBI NO: 34015261 NR Description: putative cytokinin inducibl protein
  misc_feature (2)..(168): Homolog of NCBI NO: 35215104 NR Description: putative cig3 [Oryza sativa (japonica
  misc_feature (2)..(168): Homolog of NCBI NO: 18146966 NR Description: cig3 [Nicotiana tabacum]
  misc_feature (89)..(367): Homolog of NCBI NO: 28393285 NR Description: unknown protein [Arabidopsis thaliana]
  misc_feature (89)..(367): Homolog of NCBI NO: 15217876 NR Description: expressed protein [Arabidopsis thaliana]
  misc_feature (411)..(493): Homolog of NCBI NO: 28393285 NR Description: unknown protein [Arabidopsis thaliana]
  misc_feature (411)..(493): Homolog of NCBI NO: 15217876 NR Description: expressed protein [Arabidopsis thaliana]
  misc_feature (1)..(277): Homolog of NCBI NO: 28393285 NR Description: unknown protein [Arabidopsis thaliana]
  misc_feature (1)..(277): Homolog of NCBI NO: 15217876 NR Description: expressed protein [Arabidopsis thaliana]
IVRTVSYLFITSSLEEFPIALASTIEVFDEMMELEDIKLKTVLESYGQMDLARKGPFRALQIVSILIFTLKNLIDKHEKDESKDKNDCQQLVLIQLALAAAFIFMGRFVERCQKSSPLNYCPLLPSVLVFVEWCASMLDEIEVYATDQKSETAISYFFYVLLELLNELNENRKETKKLVANSTPLWEDYELRGFVSIAFSHVSLDFSDGWEHIDNFESDTELRTQRMSEAAMRIANRSNNLQKWIISDELGRKFHSARSDDNHEKKETGNIESTDKRTSGDDPNQKTHKDNGEDGKCDTRDNPSSSSTNEEPFVVEEEEVILFRPLARYHSAPSYALFSPHEQISSPKDKDDKVLPSDDCLHRTTSLPMAQNPFQIDPWGFQGEIMNSRINKSFQVQEPSMKESNANTFSEGPISAGHPSLNAWVLDRGGLSTNRLHPIEELASSYLADLSINRTQNPVIGLVDEFSNFPSSSATYTAPVPSAPLLPDNAPWYTDVIVQSTMSAPLLQENPSPINGYSAWPSTYGPLGYDTSFLFYSNGYAPPPGRITSSEWLRWYRENPPPERVNNNMQPTHLNVPGNHENFLHHDTYRFNQFDQWGNPLSPNQYTYMKPPGPQPLQPGYPCAFGAGEHITNHFHNFQRPSPYGCGSVTEQRNEPLPLLEYLKEREWRLQQDPTLRGPTYMGN

SEQ ID NO: 54020 - protein, 654 aa, Glycine max
  peptide (1)..(654): Ceres Seq. ID no. 15177205
  misc_feature (1)..(138): Homolog of NCBI NO: 34015261 NR Description: putative cytokinin inducibl protein
  misc_feature (1)..(138): Homolog of NCBI NO: 35215104 NR Description: putative cig3 [Oryza sativa (japonica
  misc_feature (1)..(138): Homolog of NCBI NO: 18146966 NR Description: cig3 [Nicotiana tabacum]
  misc_feature (59)..(337): Homolog of NCBI NO: 28393285 NR Description: unknown protein [Arabidopsis thaliana]
  misc_feature (59)..(337): Homolog of NCBI NO: 15217876 NR Description: expressed protein [Arabidopsis thaliana]
  misc_feature (381)..(463): Homolog of NCBI NO: 28393285 NR Description: unknown protein [Arabidopsis thaliana]
  misc_feature (381)..(463): Homolog of NCBI NO: 15217876 NR Description: expressed protein [Arabidopsis thaliana]
  misc_feature (1)..(247): Homolog of NCBI NO: 28393285 NR Description: unknown protein [Arabidopsis thaliana]
  misc_feature (1)..(247): Homolog of NCBI NO: 15217876 NR Description: expressed protein [Arabidopsis thaliana]
MMELEDIKLKTVLESYGQMDLARKGPFRALQIVSILIFTLKNLIDKHEKDESKDKNDCQQLVLIQLALAAAFIFMGRFVERCQKSSPLNYCPLLPSVLVFVEWCASMLDEIEVYATDQKSETAISYFFYVLLELLNELNENRKETKKLVANSTPLWEDYELRGFVSIAFSHVSLDFSDGWEHIDNFESDTELRTQRMSEAAMRIANRSNNLQKWIISDELGRKFHSARSDDNHEKKETGNIESTDKRTSGDDPNQKTHKDNGEDGKCDTRDNPSSSSTNEEPFVVEEEEVILFRPLARYHSAPSYALFSPHEQISSPKDKDDKVLPSDDCLHRTTSLPMAQNPFQIDPWGFQGEIMNSRINKSFQVQEPSMKESNANTFSEGPISAGHPSLNAWVLDRGGLSTNRLHPIEELASSYLADLSINRTQNPVIGLVDEFSNFPSSSATYTAPVPSAPLLPDNAPWYTDVIVQSTMSAPLLQENPSPINGYSAWPSTYGPLGYDTSFLFYSNGYAPPPGRITSSEWLRWYRENPPPERVNNNMQPTHLNVPGNHENFLHHDTYRFNQFDQWGNPLSPNQYTYMKPPGPQPLQPGYPCAFGAGEHITNHFHNFQRPSPYGCGSVTEQRNEPLPLLEYLKEREWRLQQDPTLRGPTYMGN

SEQ ID NO: 54021 - protein, 653 aa, Glycine max
  peptide (1)..(653): Ceres Seq. ID no. 15177206
  misc_feature (1)..(137): Homolog of NCBI NO: 34015261 NR Description: putative cytokinin inducibl protein
  misc_feature (1)..(137): Homolog of NCBI NO: 35215104 NR Description: putative cig3 [Oryza sativa (japonica
  misc_feature (1)..(137): Homolog of NCBI NO: 18146966 NR Description: cig3 [Nicotiana tabacum]
  misc_feature (58)..(336): Homolog of NCBI NO: 28393285 NR Description: unknown protein [Arabidopsis thaliana]
  misc_feature (58)..(336): Homolog of NCBI NO: 15217876 NR Description: expressed protein [Arabidopsis thaliana]
  misc_feature (380)..(462): Homolog of NCBI NO: 28393285 NR Description: unknown protein [Arabidopsis thaliana]
  misc_feature (380)..(462): Homolog of NCBI NO: 15217876 NR Description: expressed protein [Arabidopsis thaliana]
  misc_feature (1)..(246): Homolog of NCBI NO: 28393285 NR Description: unknown protein [Arabidopsis thaliana]
  misc_feature (1)..(246): Homolog of NCBI NO: 15217876 NR Description: expressed protein [Arabidopsis thaliana]
MELEDIKLKTVLESYGQMDLARKGPFRALQIVSILIFTLKNLIDKHEKDESKDKNDCQQLVLIQLALAAAFIFMGRFVERCQKSSPLNYCPLLPSVLVFVEWCASMLDEIEVYATDQKSETAISYFFYVLLELLNELNENRKETKKLVANSTPLWEDYELRGFVSIAFSHVSLDFSDGWEHIDNFESDTELRTQRMSEAAMRIANRSNNLQKWIISDELGRKFHSARSDDNHEKKETGNIESTDKRTSGDDPNQKTHKDNGEDGKCDTRDNPSSSSTNEEPFVVEEEEVILFRPLARYHSAPSYALFSPHEQISSPKDKDDKVLPSDDCLHRTTSLPMAQNPFQIDPWGFQGEIMNSRINKSFQVQEPSMKESNANTFSEGPISAGHPSLNAWVLDRGGLSTNRLHPIEELASSYLADLSINRTQNPVIGLVDEFSNFPSSSATYTAPVPSAPLLPDNAPWYTDVIVQSTMSAPLLQENPSPINGYSAWPSTYGPLGYDTSFLFYSNGYAPPPGRITSSEWLRWYRENPPPERVNNNMQPTHLNVPGNHENFLHHDTYRFNQFDQWGNPLSPNQYTYMKPPGPQPLQPGYPCAFGAGEHITNHFHNFQRPSPYGCGSVTEQRNEPLPLLEYLKEREWRLQQDPTLRGPTYMGN

SEQ ID NO: 54022 - DNA, 1480 bp, Glycine max; identical to SEQ ID NO: 53023
  misc_feature (1)..(1480): Ceres Seq. ID no. 14306627

SEQ ID NO: 54023 - protein, 253 aa, Glycine max; identical to SEQ ID NO: 53024
  peptide (1)..(253): Ceres Seq. ID no. 14306628
  misc_feature (75)..(172): Pfam Name: K-box region Pfam Description: K-box region
  misc_feature (75)..(172): Pfam Name: K-box region Pfam Description: K-box region
  misc_feature (1)..(253): Homolog of NCBI NO: 18417790 NR Description: MADS-box protein AGL2 [Arabidopsis thaliana]
  misc_feature (12)..(253): Homolog of NCBI NO: 28372976 NR Description: Apetala 1 protein [Populus tremuloides]
  misc_feature (1)..(253): Homolog of NCBI NO: 81610 NR Description: MADS box protein AGL2 - Arabidopsis thaliana
  misc_feature (1)..(253): Homolog of NCBI NO: 28628841 NR Description: MADS-RIN-like protein [Fragaria x ananassa]
  misc_feature (5)..(253): Homolog of NCBI NO: 3646336 NR Description: MdMADS9 [Malus x domestica]
  misc_feature (1)..(253): Homolog of NCBI NO: 18417790 NR Description: MADS-box protein AGL2 [Arabidopsis thaliana]
  misc_feature (1)..(253): Homolog of NCBI NO: 81610 NR Description: MADS box protein AGL2 - Arabidopsis thaliana
  misc_feature (5)..(253): Homolog of NCBI NO: 3646336 NR Description: MdMADS9 [Malus x domestica]
  misc_feature (1)..(253): Homolog of NCBI NO: 6683777 NR Description: CAGL2 [Cucumis sativus]
  misc_feature (1)..(253): Homolog of NCBI NO: 20385584 NR Description: MADS-box protein 2 [Vitis vinifera]
  misc_feature (1)..(253): Homolog of NCBI NO: 7488622 NR Description: MADS box protein 1 - apple tree
  misc_feature (1)..(253): Homolog of NCBI NO: 3646334 NR Description: MdMADS8 [Malus x domestica]
  misc_feature (1)..(253): Homolog of NCBI NO: 28372802 NR Description: transcription factor MAGL4 [Populus tremuloides]
  misc_feature (1)..(253): Homolog of NCBI NO: 28628841 NR Description: MADS-RIN-like protein [Fragaria x ananassa]
  misc_feature (12)..(253): Homolog of NCBI NO: 28372976 NR Description: Apetala 1 protein [Populus tremuloides]
  misc_feature (1)..(253): Homolog of NCBI NO: 28372802 NR Description: transcription factor MAGL4 [Populus tremuloides]
  misc_feature (1)..(253): Homolog of NCBI NO: 3646334 NR Description: MdMADS8 [Malus x domestica]
  misc_feature (1)..(253): Homolog of NCBI NO: 7488622 NR Description: MADS box protein 1 - apple tree
  misc_feature (1)..(253): Homolog of NCBI NO: 20385584 NR Description: MADS-box protein 2 [Vitis vinifera]
  misc_feature (1)..(253): Homolog of NCBI NO: 6683777 NR Description: CAGL2 [Cucumis sativus]

SEQ ID NO: 54024 - protein, 191 aa, Glycine max; identical to SEQ ID NO: 53025
  peptide (1)..(191): Ceres Seq. ID no. 14306629
  misc_feature (13)..(110): Pfam Name: K-box region Pfam Description: K-box region
  misc_feature (13)..(110): Pfam Name: K-box region Pfam Description: K-box region
  misc_feature (1)..(191): Homolog of NCBI NO: 18417790 NR Description: MADS-box protein AGL2 [Arabidopsis thaliana]
  misc_feature (1)..(191): Homolog of NCBI NO: 28372976 NR Description: Apetala 1 protein [Populus tremuloides]
  misc_feature (1)..(191): Homolog of NCBI NO: 81610 NR Description: MADS box protein AGL2 - Arabidopsis thaliana
  misc_feature (1)..(191): Homolog of NCBI NO: 28628841 NR Description: MADS-RIN-like protein [Fragaria x ananassa]
  misc_feature (1)..(191): Homolog of NCBI NO: 3646336 NR Description: MdMADS9 [Malus x domestica]
  misc_feature (1)..(191): Homolog of NCBI NO: 18417790 NR Description: MADS-box protein AGL2 [Arabidopsis thaliana]
  misc_feature (1)..(191): Homolog of NCBI NO: 81610 NR Description: MADS box protein AGL2 - Arabidopsis thaliana
  misc_feature (1)..(191): Homolog of NCBI NO: 3646336 NR Description: MdMADS9 [Malus x domestica]
  misc_feature (1)..(191): Homolog of NCBI NO: 6683777 NR Description: CAGL2 [Cucumis sativus]
  misc_feature (1)..(191): Homolog of NCBI NO: 20385584 NR Description: MADS-box protein 2 [Vitis vinifera]
  misc_feature (1)..(191): Homolog of NCBI NO: 7488622 NR Description: MADS box protein 1 - apple tree
  misc_feature (1)..(191): Homolog of NCBI NO: 3646334 NR Description: MdMADS8 [Malus x domestica]
  misc_feature (1)..(191): Homolog of NCBI NO: 28372802 NR Description: transcription factor MAGL4 [Populus tremuloides]
  misc_feature (1)..(191): Homolog of NCBI NO: 28628841 NR Description: MADS-RIN-like protein [Fragaria x ananassa]
  misc_feature (1)..(191): Homolog of NCBI NO: 28372976 NR Description: Apetala 1 protein [Populus tremuloides]
  misc_feature (1)..(191): Homolog of NCBI NO: 28372802 NR Description: transcription factor MAGL4 [Populus tremuloides]
  misc_feature (1)..(191): Homolog of NCBI NO: 3646334 NR Description: MdMADS8 [Malus x domestica]
  misc_feature (1)..(191): Homolog of NCBI NO: 7488622 NR Description: MADS box protein 1 - apple tree
  misc_feature (1)..(191): Homolog of NCBI NO: 20385584 NR Description: MADS-box protein 2 [Vitis vinifera]
  misc_feature (1)..(191): Homolog of NCBI NO: 6683777 NR Description: CAGL2 [Cucumis sativus]

SEQ ID NO: 54025 - DNA, 1155 bp, Glycine max
  misc_feature (1)..(1155): Ceres Seq. ID no. 14307245
aaaacaacacaccttcagccacggaatggggagacatgactttgacaaccgcgttttcttgttcgctcgccgctgcttctctctccaccgccgccagtttccgccggaataaatgcaccaccagcaagatttttcattcctcttccacgtgcatgccctctttcttgcatgatcatcactaccactctttcttattgcgagttgccaatgatgctgatagaagtgaagtgtcatctgatactgcaatcaagacatcgtattcagaagccgataagatggttgatggtatggactttggtgagctttgcaatgagtttgagtgcatcagcagtcccttggtagaatccactgcaagacaacttgcacgagatatacttgagctaagggagggaaatcgagcacttggaatctttgctgtttctgtcgcatacaaggatcctattaggagctttaccggtcgtgaaaagtataaaagacgactatgggcaaccggtgcactagacaacccatctgtgactgtgcaggaaatggtgatgctgtcaaccagtgttttaagtatcaagtggacaataagagggaaaccaaaatctgtgttaggaggagatctgataattagagttactttcaaatttactcttaaccaaattagtggccaagtcattgagcatgaagaattctgggacttatcagcttcatctgctagtgctcaggcatttttctggacatcacgtgctctctttgctgctgttgaatctgtcaaagatttgggtgacagtgctaagaatttgagtagtaaaatgtcaaccaaaaaagagaacttggagatgtatccagatccttcaggtgatccaaccaagttcttccagagggacgacagttttcaacaggatgcataccagattgcactactcctggcagttatttatttggtggtacaatttctaaggacaactttgtaaagctagcctgccattttatcaactgaacttgtatgtctttgttctccaagagttatcattataaagtgtgactatcagctcataatcatcaggtgtcatcaggttgttttgtcaaagtaaatatgttcacatttgtaagtgtacctataaactgtgacgtttccttcttttgatgccacaacctcaaaggaccact

SEQ ID NO: 54026 - protein, 318 aa, Glycine max
  peptide (1)..(318): Ceres Seq. ID no. 14307246
  misc_feature (69)..(285): Homolog of NCBI NO: 25404541 NR Description: hypothetical protein T23K8.14 [imported] -
  misc_feature (65)..(318): Homolog of NCBI NO: 34906888 NR Description: P0470A12.24 [Oryza sativa (japonica
  misc_feature (29)..(318): Homolog of NCBI NO: 22330431 NR Description: expressed protein [Arabidopsis thaliana]
NNTPSATEWGDMTLTTAFSCSLAAASLSTAASFRRNKCTTSKIFHSSSTCMPSFLHDHHYHSFLLRVANDADRSEVSSDTAIKTSYSEADKMVDGMDFGELCNEFECISSPLVESTARQLARDILELREGNRALGIFAVSVAYKDPIRSFTGREKYKRRLWATGALDNPSVTVQEMVMLSTSVLSIKWTIRGKPKSVLGGDLIIRVTFKFTLNQISGQVIEHEEFWDLSASSASAQAFFWTSRALFAAVESVKDLGDSAKNLSSKMSTKKENLEMYPDPSGDPTKFFQRDDSFQQDAYQIALLLAVIYLVVQFLRTTL

SEQ ID NO: 54027 - protein, 307 aa, Glycine max
  peptide (1)..(307): Ceres Seq. ID no. 14307247
  misc_feature (58)..(274): Homolog of NCBI NO: 25404541 NR Description: hypothetical protein T23K8.14 [imported] -
  misc_feature (54)..(307): Homolog of NCBI NO: 34906888 NR Description: P0470A12.24 [Oryza sativa (japonica
  misc_feature (18)..(307): Homolog of NCBI NO: 22330431 NR Description: expressed protein [Arabidopsis thaliana]
MTLTTAFSCSLAAASLSTAASFRRNKCTTSKIFHSSSTCMPSFLHDHHYHSFLLRVANDADRSEVSSDTAIKTSYSEADKMVDGMDFGELCNEFECISSPLVESTARQLARDILELREGNRALGIFAVSVAYKDPIRSFTGREKYKRRLWATGALDNPSVTVQEMVMLSTSVLSIKWTIRGKPKSVLGGDLIIRVTFKFTLNQISGQVIEHEEFWDLSASSASAQAFFWTSRALFAAVESVKDLGDSAKNLSSKMSTKKENLEMYPDPSGDPTKFFQRDDSFQQDAYQIALLLAVIYLVVQFLRTTL

SEQ ID NO: 54028 - protein, 268 aa, Glycine max
  peptide (1)..(268): Ceres Seq. ID no. 14307248
  misc_feature (19)..(235): Homolog of NCBI NO: 25404541 NR Description: hypothetical protein T23K8.14 [imported] -
  misc_feature (15)..(268): Homolog of NCBI NO: 34906888 NR Description: P0470A12.24 [Oryza sativa (japonica
  misc_feature (1)..(268): Homolog of NCBI NO: 22330431 NR Description: expressed protein [Arabidopsis thaliana]
MPSFLHDHHYHSFLLRVANDADRSEVSSDTAIKTSYSEADKMVDGMDFGELCNEFECISSPLVESTARQLARDILELREGNRALGIFAVSVAYKDPIRSFTGREKYKRRLWATGALDNPSVTVQEMVMLSTSVLSIKWTIRGKPKSVLGGDLIIRVTFKFTLNQISGQVIEHEEFWDLSASSASAQAFFWTSRALFAAVESVKDLGDSAKNLSSKMSTKKENLEMYPDPSGDPTKFFQRDDSFQQDAYQIALLLAVIYLVVQFLRTTL

SEQ ID NO: 54029 - DNA, 455 bp, Glycine max
  misc_feature (1)..(455): Ceres Seq. ID no. 15227241
gtcagctacgtaggcccccccccccgagcagtatcttgccaatgttgagaaggaattggagagatggcagaatgcaaggaacgcaaggaaagttaacaatgaccagaatttacaggagacaatggacaaagagttggatactcataggctggagcatggtcccaagaaaagaaagatccctgacgaaaacaataatgacgacgatgatgatgtggaagatataaatgtgggagaggatgacatgatggatgatgaattagacgatgattctagtaggaggattgatgaaacaaccaagacggaagcaggtagtgccagttcagatcctgcagctgatgctgataatgcgggagggaagtgatcacccgcaaggacacaattttcaatagttttgagttatttatgtttttgtagtttattccttggtattctaacttttacgtatttggatttag

SEQ ID NO: 54030 - protein, 79 aa, Glycine max
  peptide (1)..(79): Ceres Seq. ID no. 15227242
  misc_feature (8)..(72): Homolog of NCBI NO: 7488915 NR Description: embryogenic callus protein 66b - carrot
  misc_feature (1)..(67): Homolog of NCBI NO: 25511718 NR Description: F9L1.14 protein - Arabidopsis thaliana
  misc_feature (1)..(67): Homolog of NCBI NO: 18394209 NR Description: expressed protein [Arabidopsis thaliana]
MDKELDTHRLEHGPKKRKIPDENNNDDDDDVEDINVGEDDMMDDELDDDSSRRIDETTKTEAGSASSDPAADADNAGGK

SEQ ID NO: 54031 - protein, 73 aa, Glycine max
  peptide (1)..(73): Ceres Seq. ID no. 15227243
QLRRPPPPSSILPMLRRNWRDGRMQGTQGKLTMTRIYRRQWTKSWILIGWSMVPRKERSLTKTIMTTMMMWKI

SEQ ID NO: 54032 - protein, 60 aa, Glycine max
  peptide (1)..(60): Ceres Seq. ID no. 15227244
MLRRNWRDGRMQGTQGKLTMTRIYRRQWTKSWILIGWSMVPRKERSLTKTIMTTMMMWKI

SEQ ID NO: 54033 - DNA, 2168 bp, Glycine max
  misc_feature (1)..(2168): Ceres Seq. ID no. 14311361
gatcagttttcaaatcttggattcgattccatcactgatatttctcttctctctctctttctctgccgaatatggcgccgcctgcgccagcagttgaaggcggccaggcgccgcaagggcggcagcaacagccgcaaggagggtttggcctctccggaatcatacgcatggcagttttctggtacttcgcctccaaattcttttcccccaaaaaacctaccgaaccttccgctctcatctccaatctctatcagaaggcacagcctctggatatgtggctttatctttccgagtacgagaagttcaatgactttggtagtgaaagttctcttgtatggcatgaaaccaatattccgtatgccgtttggggacctgagagtaccaggactctaactttgaagtatcatccgtctgagtctttgaagcataatgggagtctatatgctcatgttttctttgcacactctggcttttcgcctgacccaagtgatccagaataccagcctcaagcagcatttggaaggacgcatcctgttgtgatgtacttgcccaagtcacaagcagataaaaagaaaagtctgttgggaggttcaccagattctagtgaggctcaagtgacatccaaggtggttgatgaatctgaagatgatgattctaatgatgatggtcctgtggagtgggcttcatattggaaaccaaatataacaataaacttggttgctgacttcactcagtacccaaaaacaggtgtagcaccaaacattgctccatacttgaacatcgatccttttactgggaactactatccaattgtttatttcaatgagttctggttactcagggataagctgatacctttaaacgagacagtgactgaattatcacttaacctggaagttggtcccattagtatgacaaagtggcagttattcctgcagattgaccagtccttccagattcaccgtagttattgaagcatgcttgaaggcgaggctgatgaactcaagagggtattcttggaagggaatccttacctcctggcaattaccatggttgtttctcttcttcattcagtctttgacttcttggctttcaagaatgacatccaattttggaacaaaaataaatctatggaaggactctctgcaaagaccgttgttgtgagctttgcttgtcagcttatcatcttcctttatctacttgacaatgacacctcttggatgattcttgcaagctctggaattggttgtgttattgagttttggaaaattggtaaagccatgcgcatagagattgataggacaggaaggatacctatgttgaagctccgcgatcgagaatcatacgtacggaataagacaaaggaatatgatgatattgctatgaagtatttgttctatgttttatttctccttgttgctggcttttctgtttactcactgatgtatgagcgtcacaagagctggtattcttggattttgtcttcgctcacaagttgtgtatacatgtttggttttattatgatgtgccctcaattgttcatcaactacaagctcaaatctgttgctcatctaccttggaggcaaatgacttacaagtttctcaacaccataattgatgacctttttgcctttgtcattaaaatgccaacactccatcggctttctgtcttccgtgatgatcttatctttgtcatatacttataccagaggtggatttataaagtggacaagaaacgtgttaacgaatttggttttggaggtgaggatgatcaggctgtggcagagacagacgctgcaaaggaagaagagaagaaaactaattgatttggttttctctcaacaatttgagaaaattttacagtagatacttaatactgtagaattcaacggggattgatttgtttttctccccttttgttacacatttgcaattagatttttgttgaaagaaagctctagtttggccctttctactggaatttttactagtaccgaaggatggagggaatttaactactgagaccttcatggttgactgtaagggtcataacagctttttagttgcccttctgtagtttttctttaatctcaaatgtcttttagtttgtgacagataacccttttatgtattattttcttccactcatgtatttttcactaatttat

SEQ ID NO: 54034 - protein, 300 aa, Glycine max
  peptide (1)..(300): Ceres Seq. ID no. 14311362
  misc_feature (24)..(300): Pfam Name: Cleft lip and palate transmembrane protein 1 (CLPTM1) Pfam Description: Cleft lip and palate transmembrane protein 1
  misc_feature (6)..(300): Homolog of NCBI NO: 18381157 NR Description: Similar to cleft lip and palate associated
  misc_feature (6)..(300): Homolog of NCBI NO: 27676422 NR Description: similar to cleft lip and palate associated
  misc_feature (6)..(300): Homolog of NCBI NO: 32880151 NR Description: cleft lip and palate associated transmembrane
  misc_feature (6)..(300): Homolog of NCBI NO: 13436080 NR Description: cleft lip and palate associated transmembrane
  misc_feature (6)..(300): Homolog of NCBI NO: 4502897 NR Description: cleft lip and palate associated transmembrane
  misc_feature (1)..(300): Homolog of NCBI NO: 8809702 NR Description: gb|AAC97420.1~gene_id:MQM1.16~strong similarity
  misc_feature (1)..(300): Homolog of NCBI NO: 32479676 NR Description: P0076O17.9 [Oryza sativa (japonica
  misc_feature (1)..(300): Homolog of NCBI NO: 22327014 NR Description: expressed protein [Arabidopsis thaliana]
  misc_feature (1)..(300): Homolog of NCBI NO: 38346578 NR Description: OSJNBa0064D20.9 [Oryza sativa (japonica
  misc_feature (5)..(300): Homolog of NCBI NO: 15241650 NR Description: cleft lip and palate associated transmembrane
MAPPAPAVEGGQAPQGRQQQPQGGFGLSGIIRMAVFWYFASKFFSPKKPTEPSALISNLYQKAQPLDMWLYLSEYEKFNDFGSESSLVWHETNIPYAVWGPESTRTLTLKYHPSESLKHNGSLYAHVFFAHSGFSPDPSDPEYQPQAAFGRTHPVVMYLPKSQADKKKSLLGGSPDSSEAQVTSKVVDESEDDDSNDDGPVEWASYWKPNITINLVADFTQYPKTGVAPNIAPYLNIDPFTGNYYPIVYFNEFWLLRDKLIPLNETVTELSLNLEVGPISMTKWQLFLQIDQSFQIHRSY

SEQ ID NO: 54035 - protein, 282 aa, Glycine max
  peptide (1)..(282): Ceres Seq. ID no. 14311363
  misc_feature (1)..(265): Pfam Name: Cleft lip and palate transmembrane protein 1 (CLPTM1) Pfam Description: Cleft lip and palate transmembrane protein 1
  misc_feature (1)..(269): Homolog of NCBI NO: 18381157 NR Description: Similar to cleft lip and palate associated
  misc_feature (1)..(269): Homolog of NCBI NO: 27676422 NR Description: similar to cleft lip and palate associated
  misc_feature (1)..(269): Homolog of NCBI NO: 32880151 NR Description: cleft lip and palate associated transmembrane
  misc_feature (1)..(269): Homolog of NCBI NO: 13436080 NR Description: cleft lip and palate associated transmembrane
  misc_feature (1)..(269): Homolog of NCBI NO: 4502897 NR Description: cleft lip and palate associated transmembrane
  misc_feature (1)..(282): Homolog of NCBI NO: 8809702 NR Description: gb|AAC97420.1~gene_id:MQM1.16~strong similarity
  misc_feature (1)..(271): Homolog of NCBI NO: 32479676 NR Description: P0076O17.9 [Oryza sativa (japonica
  misc_feature (1)..(282): Homolog of NCBI NO: 22327014 NR Description: expressed protein [Arabidopsis thaliana]
  misc_feature (1)..(271): Homolog of NCBI NO: 38346578 NR Description: OSJNBa0064D20.9 [Oryza sativa (japonica
  misc_feature (1)..(282): Homolog of NCBI NO: 15241650 NR Description: cleft lip and palate associated transmembrane
MLEGEADELKRVFLEGNPYLLAITMVVSLLHSVFDFLAFKNDIQFWNKNKSMEGLSAKTVVVSFACQLIIFLYLLDNDTSWMILASSGIGCVIEFWKIGKAMRIEIDRTGRIPMLKLRDRESYVRNKTKEYDDIAMKYLFYVLFLLVAGFSVYSLMYERHKSWYSWILSSLTSCVYMFGFIMMCPQLFINYKLKSVAHLPWRQMTYKFLNTIIDDLFAFVIKMPTLHRLSVFRDDLIFVIYLYQRWIYKVDKKRVNEFGFGGEDDQAVAETDAAKEEEKKTN

SEQ ID NO: 54036 - protein, 268 aa, Glycine max
  peptide (1)..(268): Ceres Seq. ID no. 14311364
  misc_feature (1)..(268): Pfam Name: Cleft lip and palate transmembrane protein 1 (CLPTM1) Pfam Description: Cleft lip and palate transmembrane protein 1
  misc_feature (1)..(268): Homolog of NCBI NO: 18381157 NR Description: Similar to cleft lip and palate associated
  misc_feature (1)..(268): Homolog of NCBI NO: 27676422 NR Description: similar to cleft lip and palate associated
  misc_feature (1)..(268): Homolog of NCBI NO: 32880151 NR Description: cleft lip and palate associated transmembrane
  misc_feature (1)..(268): Homolog of NCBI NO: 13436080 NR Description: cleft lip and palate associated transmembrane
  misc_feature (1)..(268): Homolog of NCBI NO: 4502897 NR Description: cleft lip and palate associated transmembrane
  misc_feature (1)..(268): Homolog of NCBI NO: 8809702 NR Description: gb|AAC97420.1~gene_id:MQM1.16~strong similarity
  misc_feature (1)..(268): Homolog of NCBI NO: 32479676 NR Description: P0076O17.9 [Oryza sativa (japonica
  misc_feature (1)..(268): Homolog of NCBI NO: 22327014 NR Description: expressed protein [Arabidopsis thaliana]
  misc_feature (1)..(268): Homolog of NCBI NO: 38346578 NR Description: OSJNBa0064D20.9 [Oryza sativa (japonica
  misc_feature (1)..(268): Homolog of NCBI NO: 15241650 NR Description: cleft lip and palate associated transmembrane
MAVFWYFASKFFSPKKPTEPSALISNLYQKAQPLDMWLYLSEYEKFNDFGSESSLVWHETNIPYAVWGPESTRTLTLKYHPSESLKHNGSLYAHVFFAHSGFSPDPSDPEYQPQAAFGRTHPVVMYLPKSQADKKKSLLGGSPDSSEAQVTSKVVDESEDDDSNDDGPVEWASYWKPNITINLVADFTQYPKTGVAPNIAPYLNIDPFTGNYYPIVYFNEFWLLRDKLIPLNETVTELSLNLEVGPISMTKWQLFLQIDQSFQIHRSY

SEQ ID NO: 54037 - DNA, 1979 bp, Glycine max
  misc_feature (1)..(1979): Ceres Seq. ID no. 15175923
ccggtgagtatcaacaagaatactcataataatatagtggctagcatagagctagtaataatattaatattgttaagctagctctaagccatggctaatgaacgtgatctgttctcggcggagattgtgaaccgtggaattgaatcgtcaggaccaaacgctgggtcgttgacgttttcggtgagggtgagaaggcgcttaccggattttcttcaatcggtgaaccttaagtacgtgaaattgggttaccattatctgataaaccatggcatatacttgttcaccataccggttcttctcgtggtgtttagtgctgaggttggaagcctcagcaaagaggacctatggaagaagctttgggaagacgcgcgttacgaccttgctacggttcttgcttcctttggggtcttcgttttcaccttgtctgtctacttcatgtcgaggccacgtcccatttacctcattgattttgcatgttataaacccgatgatgaactcaaggtgtcaagggagcagttgatggaggtagcaagaaaatcaggcaagttcgacgaagcgagtctggagttccagaagaggatgctgatgtcctccggaatcggcgacgagacctacatcccgaaggccgtcgtggcctccacggagaacacggcgacaatgaaagaggggcgcggcgaggcctccatggtgatgttcggagccctggacgagctgttcgagaaaagccgcgtccgaccaaaggacgtgggcgtcctagtagtgaactgcagcatcttcaacccgacaccatcactctcagcgatgatcataaaccactacaagatgagagggaacattctgagctacaacctcggcggaatggggtgcagcgcggggatcattggtgtggacttggccaaggatattctccaggcgaaccctaataactacgcggtggtggtgagcacggagatggtggggtacaactggtaccaggggaaggacaggtctatgcttatcccgaatagcttcttccgcatggggtgttctgctgttctgctttccaaccgtcgaagggactatagccgcgcaaagtaccgtcttgaacacattgttcgcacgcataagggtgccgatgaccgcagcttcaggtgtgtttaccaagaggaagatgagcaaaaactcaagggactaaagatcagcaaagacttgattgagattggtggtgatgctctaaaaaccaacatcaccacactaggacccttggtgctacccttttctgagcagcttctcttctttgccacttttgtgtggaggcacttatttggcagcaaaaatggtgggaattcaccctcaatgaagaagccttacattcctgactacaaactagcttttgagcacttttgtgtgcatgctgcaagcaagaccattcttgatgagcttcaaaggaacttggaactgagtgacaagaacatcgaagcgtctagaatgacgctgcatcgctttggcaacacctctagcagcagcatttggtatgagttggcttacatggaagcaaaggagagtgttagaagaggagaccgtgtttggcaactcgcatttggctctggcttcaagtgcaacagtgtggtttggcgcgccatgcgccgagtcaccaagccttctaggaacccttggcttgattgcatcaacagatatcctgcacctctcaacaactgaagcagaatttgacggcactagtgttatgaatcttattatcagtgagggtatgcttaggatcaataagggtagtactaatttggtcttcaaaaatgttacagctgttttctgtttctttctcatttaattattcctggcttgaaattctatacttttaattcctcattaggcatatggatgcctccttgtttaatttctctgtttcttcataggatgattgatatcaaagttcatggatggctattacctatggtcaatgctacttgtctcatgttttattc

SEQ ID NO: 54038 - protein, 535 aa, Glycine max
  peptide (1)..(535): Ceres Seq. ID no. 15175924
  misc_feature (333)..(512): Pfam Name: Chalcone and stilbene synthases, C-terminal domain Pfam Description: Chalcone and stilbene synthases, C-terminal
  misc_feature (2)..(402): Homolog of NCBI NO: 8177723 NR Description: fiddlehead protein [Arabidopsis thaliana]
  misc_feature (409)..(533): Homolog of NCBI NO: 8177711 NR Description: fiddlehead protein [Arabidopsis thaliana]
  misc_feature (2)..(402): Homolog of NCBI NO: 8177711 NR Description: fiddlehead protein [Arabidopsis thaliana]
  misc_feature (409)..(533): Homolog of NCBI NO: 8177727 NR Description: fiddlehead protein [Arabidopsis thaliana]
  misc_feature (2)..(402): Homolog of NCBI NO: 8177727 NR Description: fiddlehead protein [Arabidopsis thaliana]
  misc_feature (409)..(533): Homolog of NCBI NO: 15225270 NR Description: beta-ketoacyl-CoA synthase family (FIDDLEHEAD)
  misc_feature (2)..(402): Homolog of NCBI NO: 15225270 NR Description: beta-ketoacyl-CoA synthase family (FIDDLEHEAD)
  misc_feature (1)..(530): Homolog of NCBI NO: 19351907 NR Description: putative beta-ketoacyl-CoA synthase [Antirrhinum
  misc_feature (3)..(533): Homolog of NCBI NO: 28864534 NR Description: fiddlehead-like protein [Tropaeolum majus]
  misc_feature (3)..(530): Homolog of NCBI NO: 18447765 NR Description: fiddlehead-like protein [Gossypium hirsutum]
MANERDLFSAEIVNRGIESSGPNAGSLTFSVRVRRRLPDFLQSVNLKYVKLGYHYLINHGIYLFTIPVLLVVFSAEVGSLSKEDLWKKLWEDARYDLATVLASFGVFVFTLSVYFMSRPRPIYLIDFACYKPDDELKVSREQLMEVARKSGKFDEASLEFQKRMLMSSGIGDETYIPKAVVASTENTATMKEGRGEASMVMFGALDELFEKSRVRPKDVGVLVVNCSIFNPTPSLSAMIINHYKMRGNILSYNLGGMGCSAGIIGVDLAKDILQANPNNYAVVVSTEMVGYNWYQGKDRSMLIPNSFFRMGCSAVLLSNRRRDYSRAKYRLEHIVRTHKGADDRSFRCVYQEEDEQKLKGLKISKDLIEIGGDALKTNITTLGPLVLPFSEQLLFFATFVWRHLFGSKNGGNSPSMKKPYIPDYKLAFEHFCVHAASKTILDELQRNLELSDKNIEASRMTLHRFGNTSSSSIWYELAYMEAKESVRRGDRVWQLAFGSGFKCNSVVWRAMRRVTKPSRNPWLDCINRYPAPLNN

SEQ ID NO: 54039 - protein, 420 aa, Glycine max
  peptide (1)..(420): Ceres Seq. ID no. 15175925
  misc_feature (218)..(397): Pfam Name: Chalcone and stilbene synthases, C-terminal domain Pfam Description: Chalcone and stilbene synthases, C-terminal
  misc_feature (1)..(287): Homolog of NCBI NO: 8177723 NR Description: fiddlehead protein [Arabidopsis thaliana]
  misc_feature (294)..(418): Homolog of NCBI NO: 8177711 NR Description: fiddlehead protein [Arabidopsis thaliana]
  misc_feature (1)..(287): Homolog of NCBI NO: 8177711 NR Description: fiddlehead protein [Arabidopsis thaliana]
  misc_feature (294)..(418): Homolog of NCBI NO: 8177727 NR Description: fiddlehead protein [Arabidopsis thaliana]
  misc_feature (1)..(287): Homolog of NCBI NO: 8177727 NR Description: fiddlehead protein [Arabidopsis thaliana]
  misc_feature (294)..(418): Homolog of NCBI NO: 15225270 NR Description: beta-ketoacyl-CoA synthase family (FIDDLEHEAD)
  misc_feature (1)..(287): Homolog of NCBI NO: 15225270 NR Description: beta-ketoacyl-CoA synthase family (FIDDLEHEAD)
  misc_feature (1)..(415): Homolog of NCBI NO: 19351907 NR Description: putative beta-ketoacyl-CoA synthase [Antirrhinum
  misc_feature (1)..(418): Homolog of NCBI NO: 28864534 NR Description: fiddlehead-like protein [Tropaeolum majus]
  misc_feature (1)..(415): Homolog of NCBI NO: 18447765 NR Description: fiddlehead-like protein [Gossypium hirsutum]
MSRPRPIYLIDFACYKPDDELKVSREQLMEVARKSGKFDEASLEFQKRMLMSSGIGDETYIPKAVVASTENTATMKEGRGEASMVMFGALDELFEKSRVRPKDVGVLVVNCSIFNPTPSLSAMIINHYKMRGNILSYNLGGMGCSAGIIGVDLAKDILQANPNNYAVVVSTEMVGYNWYQGKDRSMLIPNSFFRMGCSAVLLSNRRRDYSRAKYRLEHIVRTHKGADDRSFRCVYQEEDEQKLKGLKISKDLIEIGGDALKTNITTLGPLVLPFSEQLLFFATFVWRHLFGSKNGGNSPSMKKPYIPDYKLAFEHFCVHAASKTILDELQRNLELSDKNIEASRMTLHRFGNTSSSSIWYELAYMEAKESVRRGDRVWQLAFGSGFKCNSVVWRAMRRVTKPSRNPWLDCINRYPAPLNN

SEQ ID NO: 54040 - protein, 392 aa, Glycine max
  peptide (1)..(392): Ceres Seq. ID no. 15175926
  misc_feature (190)..(369): Pfam Name: Chalcone and stilbene synthases, C-terminal domain Pfam Description: Chalcone and stilbene synthases, C-terminal
  misc_feature (1)..(259): Homolog of NCBI NO: 8177723 NR Description: fiddlehead protein [Arabidopsis thaliana]
  misc_feature (266)..(390): Homolog of NCBI NO: 8177711 NR Description: fiddlehead protein [Arabidopsis thaliana]
  misc_feature (1)..(259): Homolog of NCBI NO: 8177711 NR Description: fiddlehead protein [Arabidopsis thaliana]
  misc_feature (266)..(390): Homolog of NCBI NO: 8177727 NR Description: fiddlehead protein [Arabidopsis thaliana]
  misc_feature (1)..(259): Homolog of NCBI NO: 8177727 NR Description: fiddlehead protein [Arabidopsis thaliana]
  misc_feature (266)..(390): Homolog of NCBI NO: 15225270 NR Description: beta-ketoacyl-CoA synthase family (FIDDLEHEAD)
  misc_feature (1)..(259): Homolog of NCBI NO: 15225270 NR Description: beta-ketoacyl-CoA synthase family (FIDDLEHEAD)
  misc_feature (1)..(387): Homolog of NCBI NO: 19351907 NR Description: putative beta-ketoacyl-CoA synthase [Antirrhinum
  misc_feature (1)..(390): Homolog of NCBI NO: 28864534 NR Description: fiddlehead-like protein [Tropaeolum majus]
  misc_feature (1)..(387): Homolog of NCBI NO: 18447765 NR Description: fiddlehead-like protein [Gossypium hirsutum]
MEVARKSGKFDEASLEFQKRMLMSSGIGDETYIPKAVVASTENTATMKEGRGEASMVMFGALDELFEKSRVRPKDVGVLVVNCSIFNPTPSLSAMIINHYKMRGNILSYNLGGMGCSAGIIGVDLAKDILQANPNNYAVVVSTEMVGYNWYQGKDRSMLIPNSFFRMGCSAVLLSNRRRDYSRAKYRLEHIVRTHKGADDRSFRCVYQEEDEQKLKGLKISKDLIEIGGDALKTNITTLGPLVLPFSEQLLFFATFVWRHLFGSKNGGNSPSMKKPYIPDYKLAFEHFCVHAASKTILDELQRNLELSDKNIEASRMTLHRFGNTSSSSIWYELAYMEAKESVRRGDRVWQLAFGSGFKCNSVVWRAMRRVTKPSRNPWLDCINRYPAPLNN

SEQ ID NO: 54041 - DNA, 916 bp, Glycine max
  misc_feature (1)..(916): Ceres Seq. ID no. 14307030
gatttttgaaaatggtaccatcccagtttcagattcatttccaaaactatcagatttgaacattgactattgcaaggatatggtggaattacctactgggatctgtgatattaccccactaaagaagctcagtattactaattgccacaagcttagttctctgccccaaaacattggaaagttgttgaatttggaactcctgaacctaagttcctgcactgatttggaagagataccagattctattgtaaaactttctaagctaagacttcttgacctctcaaactgcataagcctttcaattttaccagaggacattggtgatctatgcaatctcaggaatctcaatatgacaagctgtgcaaggtgtgaattgccgtactcagtaaccaatcttgagaatttaaaagtggtggtatgtgatgaagagacagctgcttcatgggaagcatttgaagctatgcttccaaatctgaagttagaggttcctcgagttgaggttaacttaaactggcttcattcaattagctcttaagacatgtcctgcttcatggaaagcatttgaagctatgctttcccaatctcaagtttgaggttcctcaagttgatgttaactgaagctggtttcattcaatttgctcctatgacctctttctataaaaatgttagaccaatgatcgtaactgtttcatgtgaaataatcttgtttaaaatagggataataaatgtgtattcaagttgctgtagtagtatttgcatgtcgtgcaaacagtactatgctacttgaaagaagttggtgattttatgtgttgtgtgttgtcacgattggacatcttagcataatgatgccaacaaaataattgaactatgataacttcaaaagtttgtttttatgaagtaggttttcttatcttcg

SEQ ID NO: 54042 - protein, 177 aa, Glycine max
  peptide (1)..(177): Ceres Seq. ID no. 14307031
  misc_feature (2)..(172): Homolog of NCBI NO: 25403197 NR Description: probable disease resistance protein
  misc_feature (2)..(172): Homolog of NCBI NO: 30692890 NR Description: disease resistance protein (CC-NBS-LRR class),
  misc_feature (2)..(94): Homolog of NCBI NO: 34391519 NR Description: disease resistance protein-like protein MsR1
  misc_feature (7)..(172): Homolog of NCBI NO: 15238281 NR Description: disease resistance protein (CC-NBS-LRR class),
  misc_feature (9)..(172): Homolog of NCBI NO: 15240125 NR Description: disease resistance protein (NBS-LRR class),
  misc_feature (2)..(171): Homolog of NCBI NO: 15238054 NR Description: disease resistance protein (NBS-LRR class),
  misc_feature (2)..(172): Homolog of NCBI NO: 15240127 NR Description: disease resistance protein (CC-NBS-LRR class),
  misc_feature (2)..(172): Homolog of NCBI NO: 7485661 NR Description: hypothetical protein F17M5.60 - Arabidopsis
  misc_feature (2)..(172): Homolog of NCBI NO: 30689664 NR Description: disease resistance protein (CC-NBS-LRR class),
  misc_feature (2)..(172): Homolog of NCBI NO: 15240126 NR Description: disease resistance protein (CC-NBS-LRR class),
IFENGTIPVSDSFPKLSDLNIDYCKDMVELPTGICDITPLKKLSITNCHKLSSLPQNIGKLLNLELLNLSSCTDLEEIPDSIVKLSKLRLLDLSNCISLSILPEDIGDLCNLRNLNMTSCARCELPYSVTNLENLKVVVCDEETAASWEAFEAMLPNLKLEVPRVEVNLNWLHSISS

SEQ ID NO: 54043 - protein, 151 aa, Glycine max
  peptide (1)..(151): Ceres Seq. ID no. 14307032
  misc_feature (1)..(146): Homolog of NCBI NO: 25403197 NR Description: probable disease resistance protein
  misc_feature (1)..(146): Homolog of NCBI NO: 30692890 NR Description: disease resistance protein (CC-NBS-LRR class),
  misc_feature (1)..(68): Homolog of NCBI NO: 34391519 NR Description: disease resistance protein-like protein MsR1
  misc_feature (1)..(146): Homolog of NCBI NO: 15238281 NR Description: disease resistance protein (CC-NBS-LRR class),
  misc_feature (1)..(146): Homolog of NCBI NO: 15240125 NR Description: disease resistance protein (NBS-LRR class),
  misc_feature (1)..(145): Homolog of NCBI NO: 15238054 NR Description: disease resistance protein (NBS-LRR class),
  misc_feature (1)..(146): Homolog of NCBI NO: 15240127 NR Description: disease resistance protein (CC-NBS-LRR class),
  misc_feature (1)..(146): Homolog of NCBI NO: 7485661 NR Description: hypothetical protein F17M5.60 - Arabidopsis
  misc_feature (1)..(146): Homolog of NCBI NO: 30689664 NR Description: disease resistance protein (CC-NBS-LRR class),
  misc_feature (1)..(146): Homolog of NCBI NO: 15240126 NR Description: disease resistance protein (CC-NBS-LRR class),
MVELPTGICDITPLKKLSITNCHKLSSLPQNIGKLLNLELLNLSSCTDLEEIPDSIVKLSKLRLLDLSNCISLSILPEDIGDLCNLRNLNMTSCARCELPYSVTNLENLKVVVCDEETAASWEAFEAMLPNLKLEVPRVEVNLNWLHSISS

SEQ ID NO: 54044 - DNA, 1372 bp, Glycine max
  misc_feature (1)..(1372): Ceres Seq. ID no. 14310394
gggaagctcaatttcccataggcatctatctccatactctgacagacacacaaaatttgagagaaaaaaaaccatcatcacaagagagtcacatgagaattgaaatggccacaaaacaagttacttctatggttcatgtagatgatgactacattgacatggaactatgttcctccccaaacttcttctcttattcccttagctctccaccatccaacagagagtttgaattccaaatgagtgaaaaagagtcatcaacttctccagctgatgatctcttctacaagggaaaactccttcctcttcaccttccccctcgtttgcaaatggttcaaaagctcgtagaaaactccaccaatgccaactttgagtacatcaaatcagattcagctttggaacacagaacctttcccttcaccactgaccttagagtgccttcaacaaatgccaacaccccttttgaatccaacatctctccttcagaatcacgccgtgtgagcagtgatgtgagcccaaatgaataccaactggggtggttttctgacatgaacaagtacaaccttattggtgatcttcctaagaagtcttggcccaagaaactgaaacagatgaagcagttctggcttggtcagagactcaaggcctcaagggcttacctgaaaactttattcaacaaatctggttgctcagacaagttctgcgccagtgctgcagcaagcaacaacattggagcggagaagaagtcatcaaggtgcaaagagtgtcagaacaagtacatgaaggttgcaaggagaaacccttttgagagtttctatgatggcaagcaccaggtaacttgttctatcatgaagagcatcaaaagagagatgcttgaagttgaagatgatttctgtgaccacaggaggtctttctctggggttggtcagcgacattgttccacaaaggcttcatctttgtccacatcttcatccgggtcctcttcttcgtcttcatctttttctttcagctcagctgggtactatgatttgcaacttttcaagaggagcatcagcgcgaattatgagttggaaagttcaattgagggagccattgctcattgcaaacagtctctgcagcagtgtggttcaaagaatggttcggatgatagcaggatttgttcttaatttgctaccaaaatgcaattggtgggaattagtgaatggccacactagccaacaccatagtgtgtgtgggtgtgtagaggggtgatagtgttgactgttgaaaaaaccttgtaagagaagaaagaggcatttttagttgaaatgctgtagcattttgatggagtttactgtttaaattaatagcttgggttttccagcattaatttgtc

SEQ ID NO: 54045 - protein, 386 aa, Glycine max
  peptide (1)..(386): Ceres Seq. ID no. 14310395
  misc_feature (42)..(115): Homolog of NCBI NO: 8099142 NR Description: hypothetical protein [Oryza sativa]
  misc_feature (293)..(372): Homolog of NCBI NO: 8099142 NR Description: hypothetical protein [Oryza sativa]
  misc_feature (47)..(120): Homolog of NCBI NO: 15228126 NR Description: expressed protein [Arabidopsis thaliana]
  misc_feature (286)..(386): Homolog of NCBI NO: 15228126 NR Description: expressed protein [Arabidopsis thaliana]
  misc_feature (46)..(325): Homolog of NCBI NO: 15225080 NR Description: expressed protein [Arabidopsis thaliana]
  misc_feature (67)..(117): Homolog of NCBI NO: 34908072 NR Description: P0506B12.25 [Oryza sativa (japonica
  misc_feature (146)..(380): Homolog of NCBI NO: 34908072 NR Description: P0506B12.25 [Oryza sativa (japonica
EAQFPIGIYLHTLTDTQNLREKKPSSQESHMRIEMATKQVTSMVHVDDDYIDMELCSSPNFFSYSLSSPPSNREFEFQMSEKESSTSPADDLFYKGKLLPLHLPPRLQMVQKLVENSTNANFEYIKSDSALEHRTFPFTTDLRVPSTNANTPFESNISPSESRRVSSDVSPNEYQLGWFSDMNKYNLIGDLPKKSWPKKLKQMKQFWLGQRLKASRAYLKTLFNKSGCSDKFCASAAASNNIGAEKKSSRCKECQNKYMKVARRNPFESFYDGKHQVTCSIMKSIKREMLEVEDDFCDHRRSFSGVGQRHCSTKASSLSTSSSGSSSSSSSFSFSSAGYYDLQLFKRSISANYELESSIEGAIAHCKQSLQQCGSKNGSDDSRICS

SEQ ID NO: 54046 - protein, 356 aa, Glycine max
  peptide (1)..(356): Ceres Seq. ID no. 14310396
  misc_feature (12)..(85): Homolog of NCBI NO: 8099142 NR Description: hypothetical protein [Oryza sativa]
  misc_feature (263)..(342): Homolog of NCBI NO: 8099142 NR Description: hypothetical protein [Oryza sativa]
  misc_feature (17)..(90): Homolog of NCBI NO: 15228126 NR Description: expressed protein [Arabidopsis thaliana]
  misc_feature (256)..(356): Homolog of NCBI NO: 15228126 NR Description: expressed protein [Arabidopsis thaliana]
  misc_feature (16)..(295): Homolog of NCBI NO: 15225080 NR Description: expressed protein [Arabidopsis thaliana]
  misc_feature (37)..(87): Homolog of NCBI NO: 34908072 NR Description: P0506B12.25 [Oryza sativa (japonica
  misc_feature (116)..(350): Homolog of NCBI NO: 34908072 NR Description: P0506B12.25 [Oryza sativa (japonica
MRIEMATKQVTSMVHVDDDYIDMELCSSPNFFSYSLSSPPSNREFEFQMSEKESSTSPADDLFYKGKLLPLHLPPRLQMVQKLVENSTNANFEYIKSDSALEHRTFPFTTDLRVPSTNANTPFESNISPSESRRVSSDVSPNEYQLGWFSDMNKYNLIGDLPKKSWPKKLKQMKQFWLGQRLKASRAYLKTLFNKSGCSDKFCASAAASNNIGAEKKSSRCKECQNKYMKVARRNPFESFYDGKHQVTCSIMKSIKREMLEVEDDFCDHRRSFSGVGQRHCSTKASSLSTSSSGSSSSSSSFSFSSAGYYDLQLFKRSISANYELESSIEGAIAHCKQSLQQCGSKNGSDDSRICS

SEQ ID NO: 54047 - protein, 352 aa, Glycine max
  peptide (1)..(352): Ceres Seq. ID no. 14310397
  misc_feature (8)..(81): Homolog of NCBI NO: 8099142 NR Description: hypothetical protein [Oryza sativa]
  misc_feature (259)..(338): Homolog of NCBI NO: 8099142 NR Description: hypothetical protein [Oryza sativa]
  misc_feature (13)..(86): Homolog of NCBI NO: 15228126 NR Description: expressed protein [Arabidopsis thaliana]
  misc_feature (252)..(352): Homolog of NCBI NO: 15228126 NR Description: expressed protein [Arabidopsis thaliana]
  misc_feature (12)..(291): Homolog of NCBI NO: 15225080 NR Description: expressed protein [Arabidopsis thaliana]
  misc_feature (33)..(83): Homolog of NCBI NO: 34908072 NR Description: P0506B12.25 [Oryza sativa (japonica
  misc_feature (112)..(346): Homolog of NCBI NO: 34908072 NR Description: P0506B12.25 [Oryza sativa (japonica
MATKQVTSMVHVDDDYIDMELCSSPNFFSYSLSSPPSNREFEFQMSEKESSTSPADDLFYKGKLLPLHLPPRLQMVQKLVENSTNANFEYIKSDSALEHRTFPFTTDLRVPSTNANTPFESNISPSESRRVSSDVSPNEYQLGWFSDMNKYNLIGDLPKKSWPKKLKQMKQFWLGQRLKASRAYLKTLFNKSGCSDKFCASAAASNNIGAEKKSSRCKECQNKYMKVARRNPFESFYDGKHQVTCSIMKSIKREMLEVEDDFCDHRRSFSGVGQRHCSTKASSLSTSSSGSSSSSSSFSFSSAGYYDLQLFKRSISANYELESSIEGAIAHCKQSLQQCGSKNGSDDSRICS

SEQ ID NO: 54048 - DNA, 1221 bp, Glycine max
  misc_feature (1)..(1221): Ceres Seq. ID no. 14311419
agcagatggcactggcagagaaatatcggaataaaggaaatgattctaagggtcatccaatgaaacaatgtactacacgtccagtgccgatgacttcacaaattccaccatgcgcttcatcacatgctatatctcgtcccaccgatccatttgctaggacatctgatgtgagagatccaccttctatacagggagtgcactcaccatgtacttcacaaccaacaaatttagatgcaggacatacccttagatcatttgttgcattagagacacaaaacaacgatggcaagccaattatataccttagtggacaaggattcttaccttcacgccctgttgctaatgagattggggatatcctcaagagtcattatactgatccctggtcatcatggaagaagataccaattatcacaagagacttgtggctcggagagtttttgagaaagttttctatttgtccaccggattacaattgggcaaaaaagaattttgaaatacaaggtgcagcaatgatgaaaaatattctaaatgaggctcgaaccacaatgaataaaccaaattgggtcaaagacgatgtttgggagagattatgtgagcattggaaatctgaagaattaaaaaagaagagcacccaagctaatatgagtaaagagactggcacccttcctactccattggacttgtttcgtctcaagcatcaactttcagacaacacatgggtggatatacaggaggaatttgcacgaacattggaacaattgaccaaaagtgcatttgcgcaaggaaatcctccaccaagtgagtcagatgtctggcatgctatagttagaaagaaggggcttggaatggtaggaaggccttgctatcatggctcatcttcatcaatggagtgggtaaaaagacaagattttgatgaattaagaaaaaaaatgaaagaaattagaaatgaaagagataggcttcaaagtagagttgcaaacattgagaggcttgccgagcataacaatgcattgattcgagaattgatggaaagtatgaacaagccatctacaatagatgaaagtcaagatgaggatgggagtaactgagtgaaccataatgactcattgatgctgatttacctttaatgtgattatgtctaaaggcaaatgtcctgtactttggatattaatgtattcatagttaaaaaattgctaatttaaaaaaaaaaaaaaaaag

SEQ ID NO: 54049 - protein, 362 aa, Glycine max
  peptide (1)..(362): Ceres Seq. ID no. 14311420
  misc_feature (112)..(217): Homolog of NCBI NO: 15238485 NR Description: plant transposase (Ptta/En/Spm) family
  misc_feature (106)..(217): Homolog of NCBI NO: 15218224 NR Description: plant transposase (Ptta/En/Spm) family
QMALAEKYRNKGNDSKGHPMKQCTTRPVPMTSQIPPCASSHAISRPTDPFARTSDVRDPPSIQGVHSPCTSQPTNLDAGHTLRSFVALETQNNDGKPIIYLSGQGFLPSRPVANEIGDILKSHYTDPWSSWKKIPIITRDLWLGEFLRKFSICPPDYNWAKKNFEIQGAAMMKNILNEARTTMNKPNWVKDDVWERLCEHWKSEELKKKSTQANMSKETGTLPTPLDLFRLKHQLSDNTWVDIQEEFARTLEQLTKSAFAQGNPPPSESDVWHAIVRKKGLGMVGRPCYHGSSSSMEWVKRQDFDELRKKMKEIRNERDRLQSRVANIERLAEHNNALIRELMESMNKPSTIDESQDEDGSN

SEQ ID NO: 54050 - protein, 361 aa, Glycine max
  peptide (1)..(361): Ceres Seq. ID no. 14311421
  misc_feature (111)..(216): Homolog of NCBI NO: 15238485 NR Description: plant transposase (Ptta/En/Spm) family
  misc_feature (105)..(216): Homolog of NCBI NO: 15218224 NR Description: plant transposase (Ptta/En/Spm) family
MALAEKYRNKGNDSKGHPMKQCTTRPVPMTSQIPPCASSHAISRPTDPFARTSDVRDPPSIQGVHSPCTSQPTNLDAGHTLRSFVALETQNNDGKPIIYLSGQGFLPSRPVANEIGDILKSHYTDPWSSWKKIPIITRDLWLGEFLRKFSICPPDYNWAKKNFEIQGAAMMKNILNEARTTMNKPNWVKDDVWERLCEHWKSEELKKKSTQANMSKETGTLPTPLDLFRLKHQLSDNTWVDIQEEFARTLEQLTKSAFAQGNPPPSESDVWHAIVRKKGLGMVGRPCYHGSSSSMEWVKRQDFDELRKKMKEIRNERDRLQSRVANIERLAEHNNALIRELMESMNKPSTIDESQDEDGSN

SEQ ID NO: 54051 - protein, 343 aa, Glycine max
  peptide (1)..(343): Ceres Seq. ID no. 14311422
  misc_feature (93)..(198): Homolog of NCBI NO: 15238485 NR Description: plant transposase (Ptta/En/Spm) family
  misc_feature (87)..(198): Homolog of NCBI NO: 15218224 NR Description: plant transposase (Ptta/En/Spm) family
MKQCTTRPVPMTSQIPPCASSHAISRPTDPFARTSDVRDPPSIQGVHSPCTSQPTNLDAGHTLRSFVALETQNNDGKPIIYLSGQGFLPSRPVANEIGDILKSHYTDPWSSWKKIPIITRDLWLGEFLRKFSICPPDYNWAKKNFEIQGAAMMKNILNEARTTMNKPNWVKDDVWERLCEHWKSEELKKKSTQANMSKETGTLPTPLDLFRLKHQLSDNTWVDIQEEFARTLEQLTKSAFAQGNPPPSESDVWHAIVRKKGLGMVGRPCYHGSSSSMEWVKRQDFDELRKKMKEIRNERDRLQSRVANIERLAEHNNALIRELMESMNKPSTIDESQDEDGSN

SEQ ID NO: 54052 - DNA, 1174 bp, Glycine max
  misc_feature (1)..(1174): Ceres Seq. ID no. 12581709
cagctacgtaggccccccccctatatatatatatatatatattttaatcaacgatattatgtcagtagctcttaaagagtaaacttaaagtatcaagagtgttatggttctattcattatgtgtctgctttgtgctttgttgattcatcatgttaaattaagcaacacatacaatacaaactatgaatatggaatgttacgatgctacagtgattggaaaatgagctgcttcaaatgcttgaacttgtatagggtcattgagttgatgaaattgaatgatatattttgaattttcaatctatacattaatcgtaatacatataatgtgatatggccactttttagtgtatgcagctggagtaacctctactgctttaaactaacatgttgctgattcagaacctaattaataattgtcctctaaaatagttaaaatttaaaccctgacagttagggtttgaacagaggatgactgccgcatagttctctagtcaattgttggtaagtttttaaatgcaacaggctcagggagcatgacacatggatcacccctacgctgtctggagatactattaaaaagttaattgatcttgcacaaactgagcttgacattataattcctactctgccatctatatctaattatctatactaaatctgatatataacacgctatctctagtatagtaatctctaacgagacttaaaatggccatgcaggtgcttgggatgcagttgtaacttgtttctttatcgatactgctcataatattgttgagtacattgaaataatttcaaaaattttgaaagatgggggagtttggataaatttgggacctctactttatcactttgcagatatgtatggacaggatgatgaaatgtccattgaattgagtttggaagatgttaagagggttgcatttcattatggatttgaatttgagaatgaaagaactattgagacaacttacaccgcaaattctagatcaatgatgcaaaatcgttactttgctgcattttggacaatgagaaaaaaatctgctgcagtgcagcagcaagtgccctgagaatagctgattcaattattgtgatataaagtacaaattagctctcttttacttggtcatgccttgtacttttccttgttggagtgaggaactttccttaattc

SEQ ID NO: 54053 - protein, 69 aa, Glycine max
  peptide (1)..(69): Ceres Seq. ID no. 12581710
  misc_feature (1)..(59): Homolog of NCBI NO: 34861686 NR Description: similar to RIKEN cDNA 2410127L17 [Rattus
  misc_feature (1)..(59): Homolog of NCBI NO: 22748889 NR Description: hypothetical protein FLJ25795 [Homo sapiens]
  misc_feature (1)..(59): Homolog of NCBI NO: 21758737 NR Description: unnamed protein product [Homo sapiens]
  misc_feature (1)..(59): Homolog of NCBI NO: 12846470 NR Description: unnamed protein product [Mus musculus]
  misc_feature (1)..(59): Homolog of NCBI NO: 20886869 NR Description: RIKEN cDNA 2410127L17 [Mus musculus]
  misc_feature (1)..(32): Homolog of NCBI NO: 30685195 NR Description: expressed protein [Arabidopsis thaliana]
  misc_feature (1)..(62): Homolog of NCBI NO: 30685200 NR Description: expressed protein [Arabidopsis thaliana]
  misc_feature (1)..(62): Homolog of NCBI NO: 25349707 NR Description: hypothetical protein At2g32160 [imported] -
  misc_feature (1)..(62): Homolog of NCBI NO: 30685202 NR Description: expressed protein [Arabidopsis thaliana]
  misc_feature (1)..(62): Homolog of NCBI NO: 25408215 NR Description: hypothetical protein At2g32170 [imported] -
MYGQDDEMSIELSLEDVKRVAFHYGFEFENERTIETTYTANSRSMMQNRYFAAFWTMRKKSAAVQQQVP

SEQ ID NO: 54054 - protein, 62 aa, Glycine max
  peptide (1)..(62): Ceres Seq. ID no. 12581711
  misc_feature (1)..(52): Homolog of NCBI NO: 34861686 NR Description: similar to RIKEN cDNA 2410127L17 [Rattus
  misc_feature (1)..(52): Homolog of NCBI NO: 22748889 NR Description: hypothetical protein FLJ25795 [Homo sapiens]
  misc_feature (1)..(52): Homolog of NCBI NO: 21758737 NR Description: unnamed protein product [Homo sapiens]
  misc_feature (1)..(52): Homolog of NCBI NO: 12846470 NR Description: unnamed protein product [Mus musculus]
  misc_feature (1)..(52): Homolog of NCBI NO: 20886869 NR Description: RIKEN cDNA 2410127L17 [Mus musculus]
  misc_feature (1)..(25): Homolog of NCBI NO: 30685195 NR Description: expressed protein [Arabidopsis thaliana]
  misc_feature (1)..(55): Homolog of NCBI NO: 30685200 NR Description: expressed protein [Arabidopsis thaliana]
  misc_feature (1)..(55): Homolog of NCBI NO: 25349707 NR Description: hypothetical protein At2g32160 [imported] -
  misc_feature (1)..(55): Homolog of NCBI NO: 30685202 NR Description: expressed protein [Arabidopsis thaliana]
  misc_feature (1)..(55): Homolog of NCBI NO: 25408215 NR Description: hypothetical protein At2g32170 [imported] -
MSIELSLEDVKRVAFHYGFEFENERTIETTYTANSRSMMQNRYFAAFWTMRKKSAAVQQQVP

SEQ ID NO: 54055 - protein, 61 aa, Glycine max
  peptide (1)..(61): Ceres Seq. ID no. 12581712
MVLFIMCLLCALLIHHVKLSNTYNTNYEYGMLRCYSDWKMSCFKCLNLYRVIELMKLNDIF

SEQ ID NO: 54056 - DNA, 1545 bp, Glycine max
  misc_feature (1)..(1545): Ceres Seq. ID no. 14311334
acatagctttttcttttgcgcacctgagcttcgtttcgacggagaacaaataacgcaacccacccaaggttcgcatcgcatcgcatcgcatcatggcccaagacaaaaaggagcgtaaaaggagcatgaagaagaagcagaaccaatctctgacaactctgcctcaggaattgatcagagaaattcttctgagattaccggtgaaatctcttctgcgtttcaagtgcgtctgtaagtcgtttctgtctctgatttcggatccccaatttgtgatttcccattatgccctagctgcctcgcccacccatagattaattcttatatcacatgatttttatgctcaatccatcgccacggaatcagtgttcaaaacctgtagccgagacgtggtttatttccctctccctcttccatcaattccatgccttcgccttgacgattttggcattcgacccaagattttgggttcatgcagaggccttgtacttctatactatgacgacagcgcaaatctcattctgtggaatccgtcccttggccgtcacaaacgattgccaaactacagggatgacataacttcattcccatatggttttggctatgacgaatcaaaagatgagtacttgctgattctaattggattgcccaagtttggacctgaaactggagctgacatctactccttcaaaaccgagtcttggaaaacagacactattgtttatgatccattagttaggtataaggctgaggatagaatagccagagcagggtcgctcctcaatggggctcttcattggtttgttttctcggagagcaaagaggatcatgtgattatcgcctttgatctcgtggaaaggactctatcggagattcctcttcctctcgctgatcgttctactgtgcaaaaagatgcagtttatggtctgagaataatgggagggtgtctcagtgtgtgttgctccagctgtggaatgactgagatatgggtgatgaaggaatataaagtgcggtcatcttggactatgacctttcttatccatacttctaatcggatttccccaatatgcacaatcaaagatggtgagattttaggatcaaattgcgcgggaactggaagattagagaaacgcaatgacaaaggagagctgcttgagcatttcatggacaccaaaggtcaacggttcagctgtgccaatctacaggctgctatgtatacagagagtctactgccactcccaacgtcattttgggaaacaagtgaagaggactaactgtaatagacaacaaaaatcagggccatgaaatatgcaaaataatgtagacagtatcttgatgtcactttcctataaatggtgaagctgttggtagaaggcattgcacttgggagagaatggcatatatatgatattaaattatctattgttggggtagaactagtggagctaacttcacctagtggaataaggctttattgctgttgttgcagtgtagaactagtgtcagttttaatgctatttcaataaagttggagtttgaagaaacttt

SEQ ID NO: 54057 - protein, 392 aa, Glycine max
  peptide (1)..(392): Ceres Seq. ID no. 14311335
  misc_feature (23)..(63): Pfam Name: F-box domain Pfam Description: F-box domain
  misc_feature (24)..(379): Homolog of NCBI NO: 15235636 NR Description: F-box protein-related [Arabidopsis thaliana]
  misc_feature (25)..(343): Homolog of NCBI NO: 13161528 NR Description: S locus F-box (SLF)-S2-like protein [Antirrhinum
  misc_feature (25)..(343): Homolog of NCBI NO: 13161526 NR Description: S locus F-box (SLF)-S2 protein [Antirrhinum
  misc_feature (20)..(315): Homolog of NCBI NO: 30682162 NR Description: F-box protein family [Arabidopsis thaliana]
  misc_feature (20)..(315): Homolog of NCBI NO: 7487230 NR Description: hypothetical protein T1P17.150 - Arabidopsis
  misc_feature (1)..(83): Homolog of NCBI NO: 6862928 NR Description: hypothetical protein [Arabidopsis thaliana]
  misc_feature (122)..(333): Homolog of NCBI NO: 6862928 NR Description: hypothetical protein [Arabidopsis thaliana]
  misc_feature (1)..(83): Homolog of NCBI NO: 30679777 NR Description: F-box protein family [Arabidopsis thaliana]
  misc_feature (122)..(333): Homolog of NCBI NO: 30679777 NR Description: F-box protein family [Arabidopsis thaliana]
  misc_feature (23)..(333): Homolog of NCBI NO: 15229536 NR Description: F-box protein family [Arabidopsis thaliana]
MAQDKKERKRSMKKKQNQSLTTLPQELIREILLRLPVKSLLRFKCVCKSFLSLISDPQFVISHYALAASPTHRLILISHDFYAQSIATESVFKTCSRDVVYFPLPLPSIPCLRLDDFGIRPKILGSCRGLVLLYYDDSANLILWNPSLGRHKRLPNYRDDITSFPYGFGYDESKDEYLLILIGLPKFGPETGADIYSFKTESWKTDTIVYDPLVRYKAEDRIARAGSLLNGALHWFVFSESKEDHVIIAFDLVERTLSEIPLPLADRSTVQKDAVYGLRIMGGCLSVCCSSCGMTEIWVMKEYKVRSSWTMTFLIHTSNRISPICTIKDGEILGSNCAGTGRLEKRNDKGELLEHFMDTKGQRFSCANLQAAMYTESLLPLPTSFWETSEED

SEQ ID NO: 54058 - protein, 381 aa, Glycine max
  peptide (1)..(381): Ceres Seq. ID no. 14311336
  misc_feature (12)..(52): Pfam Name: F-box domain Pfam Description: F-box domain
  misc_feature (13)..(368): Homolog of NCBI NO: 15235636 NR Description: F-box protein-related [Arabidopsis thaliana]
  misc_feature (14)..(332): Homolog of NCBI NO: 13161528 NR Description: S locus F-box (SLF)-S2-like protein [Antirrhinum
  misc_feature (14)..(332): Homolog of NCBI NO: 13161526 NR Description: S locus F-box (SLF)-S2 protein [Antirrhinum
  misc_feature (9)..(304): Homolog of NCBI NO: 30682162 NR Description: F-box protein family [Arabidopsis thaliana]
  misc_feature (9)..(304): Homolog of NCBI NO: 7487230 NR Description: hypothetical protein T1P17.150 - Arabidopsis
  misc_feature (1)..(72): Homolog of NCBI NO: 6862928 NR Description: hypothetical protein [Arabidopsis thaliana]
  misc_feature (111)..(322): Homolog of NCBI NO: 6862928 NR Description: hypothetical protein [Arabidopsis thaliana]
  misc_feature (1)..(72): Homolog of NCBI NO: 30679777 NR Description: F-box protein family [Arabidopsis thaliana]
  misc_feature (111)..(322): Homolog of NCBI NO: 30679777 NR Description: F-box protein family [Arabidopsis thaliana]
  misc_feature (12)..(322): Homolog of NCBI NO: 15229536 NR Description: F-box protein family [Arabidopsis thaliana]
MKKKQNQSLTTLPQELIREILLRLPVKSLLRFKCVCKSFLSLISDPQFVISHYALAASPTHRLILISHDFYAQSIATESVFKTCSRDVVYFPLPLPSIPCLRLDDFGIRPKILGSCRGLVLLYYDDSANLILWNPSLGRHKRLPNYRDDITSFPYGFGYDESKDEYLLILIGLPKFGPETGADIYSFKTESWKTDTIVYDPLVRYKAEDRIARAGSLLNGALHWFVFSESKEDHVIIAFDLVERTLSEIPLPLADRSTVQKDAVYGLRIMGGCLSVCCSSCGMTEIWVMKEYKVRSSWTMTFLIHTSNRISPICTIKDGEILGSNCAGTGRLEKRNDKGELLEHFMDTKGQRFSCANLQAAMYTESLLPLPTSFWETSEED

SEQ ID NO: 54059 - DNA, 1829 bp, Glycine max
  misc_feature (1)..(1829): Ceres Seq. ID no. 14307363
gaggcatcgaactcaaacattatcggtggacagaaacaccactgaacgaggttgcttgctccgacgccgaaatgaaagccccttcctctcttttcctcaaaggccacgttctcccttcttccatttttctcctcagaaactccaaaggaacacccaatgtgaaaatgcaccccatctggtgcttatgtaaagccattcaaactaattcatatgaaatttccaatggaagctatcatcccactgtgcaacaaacaacagaaaagaagacaatggaaaagctatccaggaaagttgaatctattggggcatttcaaaagttgcccatagtgatgccatctattgacattattggctctgcactcagaaaggcgaggaaggtttctccaacgaaaggaattgccaacattgcgaaaagggagaaaaataagggtgcaaagcaacttgatgcgttgatgaaagaaattgctgttcccttgaggacgtatgtggagaattttcctaacaaaatgcatcttcatccttatgagagatctcttattgagctgacacttggagatggatactacgaaatggtgctacgaaaggtagacagtttaaggaagagggtagtatctgttggaaaggaacatgcttcactttgcgctaagtcttcatcaaagcgagaagcagaggaaaggctgaatgaggggcttaagaaaattgaagagatttttgctcaagaacgaaaagttgttgatgatttgttaggcatagccaagactctcagggcaatgcctgtaattaatttggaaacaccaactctctgccttgttggagctcctaatgtaggcaaatcttctttggtccatgtactctctactggcaagcctgagatttgtaactatcccttcacaacaagaggaattcttatgggtcatattattttaaactttcagaagtttcaggtaacagatactccgggcctgctaaggagacatgatgaggacaggaataatttggaaaagttgactctggctgtcctttcgcacctgccgacagcagttttgtatgtccatgacctttctggggagtgtggcacctcaccttctgatcagttttcaatatacaaagaactcagagaaaggttcaatggacatttatggcttgatgtcgtgtcaaaatctgatttgttgaagacgtctcctgtagtctatgcaacagacgagcctcatccctcccaactcgagcttgaaaagtaccggaaatcaggtcccaatggagctattaacgtatctgtcaaaacacaaggagggctacatgagctaaagcagagagtgcatgaactgcttaatttgcagatggccaagataaatgatataagcaacaaccaggagaagtgaaaggtgtcactccactaagggttgatatcaaacttgtgaagaaacttcctgatcaaatagggaagtctgaaaccttcatgagccagaagcttatctttgtaaaatatgttagcagctctgtggccagcctccaagcaggaaaagaagcaaaggcttcttaattaataccttcaagcaattaagcattggtaggttgagcatacgaaacttccagaaaatgttcagtcacttttagctttgttgaggagatcatgttccacccgtattgggccttcttgaagaaacaataaatgcttgtttatcaacttttcagttcattgattgtcattggcttcaatcatgtgtcttaacttcttaagtccattgtcagaagtcttcataaattggttaatgttaagatctgaattgatattgagatataatgtattgatatattagatatgttcatag

SEQ ID NO: 54060 - protein, 458 aa, Glycine max
  peptide (1)..(458): Ceres Seq. ID no. 14307364
  misc_feature (260)..(380): Pfam Name: GTP1/OBG family Pfam Description: GTP1/OBG family
  misc_feature (100)..(372): Homolog of NCBI NO: 15921784 NR Description: 334aa long hypothetical GTP-binding protein
  misc_feature (106)..(440): Homolog of NCBI NO: 15678878 NR Description: GTP-binding protein, GTP1/OBG family
  misc_feature (103)..(435): Homolog of NCBI NO: 12847799 NR Description: unnamed protein product [Mus musculus]
  misc_feature (105)..(389): Homolog of NCBI NO: 18314205 NR Description: conserved hypothetical protein [Pyrobaculum
  misc_feature (103)..(395): Homolog of NCBI NO: 18977867 NR Description: GTP-binding protein, gtp1/obg family
  misc_feature (103)..(449): Homolog of NCBI NO: 14591132 NR Description: hypothetical protein PH1320 [Pyrococcus
  misc_feature (103)..(395): Homolog of NCBI NO: 14521033 NR Description: GTP-BINDING PROTEIN, GTP1/OBG FAMILY [Pyrococcus
  misc_feature (54)..(449): Homolog of NCBI NO: 25406691 NR Description: hypothetical protein F23A5.12 [imported] -
  misc_feature (93)..(449): Homolog of NCBI NO: 34905188 NR Description: putative GTP-binding protein
  misc_feature (54)..(449): Homolog of NCBI NO: 15220827 NR Description: GTP-binding protein -related [Arabidopsis
GIELKHYRWTETPLNEVACSDAEMKAPSSLFLKGHVLPSSIFLLRNSKGTPNVKMHPIWCLCKAIQTNSYEISNGSYHPTVQQTTEKKTMEKLSRKVESIGAFQKLPIVMPSIDIIGSALRKARKVSPTKGIANIAKREKNKGAKQLDALMKEIAVPLRTYVENFPNKMHLHPYERSLIELTLGDGYYEMVLRKVDSLRKRVVSVGKEHASLCAKSSSKREAEERLNEGLKKIEEIFAQERKVVDDLLGIAKTLRAMPVINLETPTLCLVGAPNVGKSSLVHVLSTGKPEICNYPFTTRGILMGHIILNFQKFQVTDTPGLLRRHDEDRNNLEKLTLAVLSHLPTAVLYVHDLSGECGTSPSDQFSIYKELRERFNGHLWLDVVSKSDLLKTSPVVYATDEPHPSQLELEKYRKSGPNGAINVSVKTQGGLHELKQRVHELLNLQMAKINDISNNQEK

SEQ ID NO: 54061 - protein, 435 aa, Glycine max
  peptide (1)..(435): Ceres Seq. ID no. 14307365
  misc_feature (237)..(357): Pfam Name: GTP1/OBG family Pfam Description: GTP1/OBG family
  misc_feature (77)..(349): Homolog of NCBI NO: 15921784 NR Description: 334aa long hypothetical GTP-binding protein
  misc_feature (83)..(417): Homolog of NCBI NO: 15678878 NR Description: GTP-binding protein, GTP1/OBG family
  misc_feature (80)..(412): Homolog of NCBI NO: 12847799 NR Description: unnamed protein product [Mus musculus]
  misc_feature (82)..(366): Homolog of NCBI NO: 18314205 NR Description: conserved hypothetical protein [Pyrobaculum
  misc_feature (80)..(372): Homolog of NCBI NO: 18977867 NR Description: GTP-binding protein, gtp1/obg family
  misc_feature (80)..(426): Homolog of NCBI NO: 14591132 NR Description: hypothetical protein PH1320 [Pyrococcus
  misc_feature (80)..(372): Homolog of NCBI NO: 14521033 NR Description: GTP-BINDING PROTEIN, GTP1/OBG FAMILY [Pyrococcus
  misc_feature (31)..(426): Homolog of NCBI NO: 25406691 NR Description: hypothetical protein F23A5.12 [imported] -
  misc_feature (70)..(426): Homolog of NCBI NO: 34905188 NR Description: putative GTP-binding protein
  misc_feature (31)..(426): Homolog of NCBI NO: 15220827 NR Description: GTP-binding protein -related [Arabidopsis
MKAPSSLFLKGHVLPSSIFLLRNSKGTPNVKMHPIWCLCKAIQTNSYEISNGSYHPTVQQTTEKKTMEKLSRKVESIGAFQKLPIVMPSIDIIGSALRKARKVSPTKGIANIAKREKNKGAKQLDALMKEIAVPLRTYVENFPNKMHLHPYERSLIELTLGDGYYEMVLRKVDSLRKRVVSVGKEHASLCAKSSSKREAEERLNEGLKKIEEIFAQERKVVDDLLGIAKTLRAMPVINLETPTLCLVGAPNVGKSSLVHVLSTGKPEICNYPFTTRGILMGHIILNFQKFQVTDTPGLLRRHDEDRNNLEKLTLAVLSHLPTAVLYVHDLSGECGTSPSDQFSIYKELRERFNGHLWLDVVSKSDLLKTSPVVYATDEPHPSQLELEKYRKSGPNGAINVSVKTQGGLHELKQRVHELLNLQMAKINDISNNQEK

SEQ ID NO: 54062 - protein, 404 aa, Glycine max
  peptide (1)..(404): Ceres Seq. ID no. 14307366
  misc_feature (206)..(326): Pfam Name: GTP1/OBG family Pfam Description: GTP1/OBG family
  misc_feature (46)..(318): Homolog of NCBI NO: 15921784 NR Description: 334aa long hypothetical GTP-binding protein
  misc_feature (52)..(386): Homolog of NCBI NO: 15678878 NR Description: GTP-binding protein, GTP1/OBG family
  misc_feature (49)..(381): Homolog of NCBI NO: 12847799 NR Description: unnamed protein product [Mus musculus]
  misc_feature (51)..(335): Homolog of NCBI NO: 18314205 NR Description: conserved hypothetical protein [Pyrobaculum
  misc_feature (49)..(341): Homolog of NCBI NO: 18977867 NR Description: GTP-binding protein, gtp1/obg family
  misc_feature (49)..(395): Homolog of NCBI NO: 14591132 NR Description: hypothetical protein PH1320 [Pyrococcus
  misc_feature (49)..(341): Homolog of NCBI NO: 14521033 NR Description: GTP-BINDING PROTEIN, GTP1/OBG FAMILY [Pyrococcus
  misc_feature (1)..(395): Homolog of NCBI NO: 25406691 NR Description: hypothetical protein F23A5.12 [imported] -
  misc_feature (39)..(395): Homolog of NCBI NO: 34905188 NR Description: putative GTP-binding protein
  misc_feature (1)..(395): Homolog of NCBI NO: 15220827 NR Description: GTP-binding protein -related [Arabidopsis
MHPIWCLCKAIQTNSYEISNGSYHPTVQQTTEKKTMEKLSRKVESIGAFQKLPIVMPSIDIIGSALRKARKVSPTKGIANIAKREKNKGAKQLDALMKEIAVPLRTYVENFPNKMHLHPYERSLIELTLGDGYYEMVLRKVDSLRKRVVSVGKEHASLCAKSSSKREAEERLNEGLKKIEEIFAQERKVVDDLLGIAKTLRAMPVINLETPTLCLVGAPNVGKSSLVHVLSTGKPEICNYPFTTRGILMGHIILNFQKFQVTDTPGLLRRHDEDRNNLEKLTLAVLSHLPTAVLYVHDLSGECGTSPSDQFSIYKELRERFNGHLWLDVVSKSDLLKTSPVVYATDEPHPSQLELEKYRKSGPNGAINVSVKTQGGLHELKQRVHELLNLQMAKINDISNNQEK

SEQ ID NO: 54063 - DNA, 1272 bp, Glycine max
  misc_feature (1)..(1272): Ceres Seq. ID no. 12611994
aaatgttattcctgatcctctttggagaaatgaattgatcccaggggctctgtgatttgatcagcagatagagattgaacatttgcagcgaaaagggaaagaaagagaaaatcatgtcaacagcagaagctcctccttctttccaagaagcagcgcgatgcgttgtctgcaattgcagtttcaacactttcagaagaaggcaccactgtcgatcctgtgggagaacattgtgtaatgaacattcatcaaatcaaatggctttaccacaatttggcctttactcaaatgtccgagtatgtgctgattgtttcaacaacttgcggtctgggaaggatgaaccacagacttcttcagacggagtaaacagtgtgacagatacaatttctaaattagatatcaacgcaaatgttgattcaaaatccatactaactgcagagactaagcttttgtcaggcattaaagagtgtaaatgtggaatgccactttgcatttgtgaagctccaaccccttcctctgatgcattcccccagcagaaacccaatccagttattgcagctccatcaaatcctaaacctaagaagacagatactgttccgaaaattagaagctccatttcaactagtaaatttagttctatgtttaacgttggtcatgtaactaatggtacctcagacagaccccagattgattatgaagttactggagagggtttaagagaagcaataaaaaatagtgacgttgctgctgttaagaaacttcttaatgagggtgtggatgcaaattacagggacaagcaaggactgtctttattacatttggctgcagtcttcaatcaaactgatatagttttcattctcatggattcgggggcaagcctggaatacagaaatgcacaaggagaaacacctttagattgtgcaccagctaccttgcaatacaaaatgcgaaagaagatggaggaaggtggagcagtggaccaaagcatttgaacaatctattacttttatcagtgttctttttatgcagtcctcccaaagagagcttcaaatattaccactgtctaaagctcctctgttaccagaacaaaaaatttcgccttctgtataattgtgacagaggagttcaattcatcttggcagactaagtatgcagacctatataagacatatctttgtcagctgcgcaacttgggcagtattactattcagcttgtaaatttctttggtctgtgacataagagcatttttaaatatgtgcatctttgtattgttg

SEQ ID NO: 54064 - protein, 291 aa, Glycine max
  peptide (1)..(291): Ceres Seq. ID no. 12611995
  misc_feature (7)..(71): Pfam Name: FYVE zinc finger Pfam Description: FYVE zinc finger
  misc_feature (1)..(155): Homolog of NCBI NO: 7495620 NR Description: hypothetical protein C07G1.5 - Caenorhabditis
  misc_feature (1)..(155): Homolog of NCBI NO: 32565930 NR Description: prion-like Q/N-rich domain protein, Prion-like
  misc_feature (1)..(68): Homolog of NCBI NO: 6324332 NR Description: hydrophilic protein
  misc_feature (1)..(68): Homolog of NCBI NO: 1353233 NR Description: Vacuolar protein sorting-associated protein VPS27
  misc_feature (1)..(158): Homolog of NCBI NO: 39587494 NR Description: Hypothetical protein CBG01567 [Caenorhabditis
  misc_feature (4)..(68): Homolog of NCBI NO: 5107700 NR Description: Chain A, Phosphatidylinositol-3-Phosphate Binding
  misc_feature (125)..(283): Homolog of NCBI NO: 34906752 NR Description: contains EST AU056950(S21011)~similar to
  misc_feature (117)..(282): Homolog of NCBI NO: 30683047 NR Description: expressed protein [Arabidopsis thaliana]
  misc_feature (5)..(218): Homolog of NCBI NO: 34906752 NR Description: contains EST AU056950(S21011)~similar to
  misc_feature (48)..(283): Homolog of NCBI NO: 33146872 NR Description: unknown protein [Oryza sativa (japonica
MSTAEAPPSFQEAARCVVCNCSFNTFRRRHHCRSCGRTLCNEHSSNQMALPQFGLYSNVRVCADCFNNLRSGKDEPQTSSDGVNSVTDTISKLDINANVDSKSILTAETKLLSGIKECKCGMPLCICEAPTPSSDAFPQQKPNPVIAAPSNPKPKKTDTVPKIRSSISTSKFSSMFNVGHVTNGTSDRPQIDYEVTGEGLREAIKNSDVAAVKKLLNEGVDANYRDKQGLSLLHLAAVFNQTDIVFILMDSGASLEYRNAQGETPLDCAPATLQYKMRKKMEEGGAVDQSI

SEQ ID NO: 54065 - protein, 244 aa, Glycine max
  peptide (1)..(244): Ceres Seq. ID no. 12611996
  misc_feature (1)..(108): Homolog of NCBI NO: 7495620 NR Description: hypothetical protein C07G1.5 - Caenorhabditis
  misc_feature (1)..(108): Homolog of NCBI NO: 32565930 NR Description: prion-like Q/N-rich domain protein, Prion-like
  misc_feature (1)..(21): Homolog of NCBI NO: 6324332 NR Description: hydrophilic protein
  misc_feature (1)..(21): Homolog of NCBI NO: 1353233 NR Description: Vacuolar protein sorting-associated protein VPS27
  misc_feature (1)..(111): Homolog of NCBI NO: 39587494 NR Description: Hypothetical protein CBG01567 [Caenorhabditis
  misc_feature (1)..(21): Homolog of NCBI NO: 5107700 NR Description: Chain A, Phosphatidylinositol-3-Phosphate Binding
  misc_feature (78)..(236): Homolog of NCBI NO: 34906752 NR Description: contains EST AU056950(S21011)~similar to
  misc_feature (70)..(235): Homolog of NCBI NO: 30683047 NR Description: expressed protein [Arabidopsis thaliana]
  misc_feature (1)..(171): Homolog of NCBI NO: 34906752 NR Description: contains EST AU056950(S21011)~similar to
  misc_feature (1)..(236): Homolog of NCBI NO: 33146872 NR Description: unknown protein [Oryza sativa (japonica
MALPQFGLYSNVRVCADCFNNLRSGKDEPQTSSDGVNSVTDTISKLDINANVDSKSILTAETKLLSGIKECKCGMPLCICEAPTPSSDAFPQQKPNPVIAAPSNPKPKKTDTVPKIRSSISTSKFSSMFNVGHVTNGTSDRPQIDYEVTGEGLREAIKNSDVAAVKKLLNEGVDANYRDKQGLSLLHLAAVFNQTDIVFILMDSGASLEYRNAQGETPLDCAPATLQYKMRKKMEEGGAVDQSI

SEQ ID NO: 54066 - protein, 170 aa, Glycine max
  peptide (1)..(170): Ceres Seq. ID no. 12611997
  misc_feature (1)..(51): Homolog of NCBI NO: 25012483 NR Description: RE27138p [Drosophila melanogaster]
  misc_feature (1)..(51): Homolog of NCBI NO: 24581201 NR Description: Hepatocyte growth factor regulated tyrosine
  misc_feature (1)..(53): Homolog of NCBI NO: 34785069 NR Description: Unknown (protein for MGC:63492) [Danio rerio]
  misc_feature (1)..(34): Homolog of NCBI NO: 7495620 NR Description: hypothetical protein C07G1.5 - Caenorhabditis
  misc_feature (1)..(34): Homolog of NCBI NO: 32565930 NR Description: prion-like Q/N-rich domain protein, Prion-like
  misc_feature (1)..(37): Homolog of NCBI NO: 39587494 NR Description: Hypothetical protein CBG01567 [Caenorhabditis
  misc_feature (4)..(162): Homolog of NCBI NO: 34906752 NR Description: contains EST AU056950(S21011)~similar to
  misc_feature (1)..(161): Homolog of NCBI NO: 30683047 NR Description: expressed protein [Arabidopsis thaliana]
  misc_feature (1)..(97): Homolog of NCBI NO: 34906752 NR Description: contains EST AU056950(S21011)~similar to
  misc_feature (1)..(162): Homolog of NCBI NO: 33146872 NR Description: unknown protein [Oryza sativa (japonica
MPLCICEAPTPSSDAFPQQKPNPVIAAPSNPKPKKTDTVPKIRSSISTSKFSSMFNVGHVTNGTSDRPQIDYEVTGEGLREAIKNSDVAAVKKLLNEGVDANYRDKQGLSLLHLAAVFNQTDIVFILMDSGASLEYRNAQGETPLDCAPATLQYKMRKKMEEGGAVDQSI

SEQ ID NO: 54067 - DNA, 1380 bp, Glycine max
  misc_feature (1)..(1380): Ceres Seq. ID no. 14311407
gatgtccttcttcttaaccctttctttcaagtttcatctcttttcctcatttcattcttctaactttctctccgtttacttcacttcatgacggattcttctcctcttatccctcccttaccggtcacagtcaccgagatcgacctcgaagagggaccctccgaacaaattcaatgccggatttgtcttgaaactgatggtagaaatttcatagttccttgtaagtgcaaaggtacgtcaaagtacgtacatagagagtgtttagatcattggcgagccgtgaaggaagggtttgcatttgcccattgcactacttgcaaggctccataccatttgcgtgttcatggtgcttatagacaatggcgtactttcaaatttcggttttttgtaacccgagacattttgcttatatttctggctgttcagcttgtcattgcttcacttgcttatttggtttaccaaatagatggttacgagaagtattggcttcgtcttgtttggggttttggtagtgagctgagcttttactatatatgtggagcactggtgttttttgtgttgcttggcctgtctgggtgctttattacttgttctgatccaagaattcgcagtgatttgggtcagccttgtcgagaaatatgtctttgttgctgtcaacctggagtttgtgctgatcgtcatttgcatggtactccttatatgtacggtactccttatatgtcgactgattgcaatgcatgctgtgagaattgtggaactgaatgctgtggttgcacttgcatgagaggttctgaggacgaagcagggctaccattattattcataatggttttgttttttctggtactctttgctgtacttgggatattttacagtgtattagtggctacaatgataggacaacggatatggcagcgtcattatcacatacttgcgaaaaggatgctaacaaaggagtatgtcgttgagaacattgatggagagatagcagggcctaattggactcctccacccctcccccaggagcatgtacggcagctgaaaacattgggcctcctatgagtttgaaggagtcatctacctgctgaggagaatgacagtggcggtaaactgacaccttgcttcgtagtttggcccttgtcagggagatatgcagttaactgataaaattatgagtcacttaagtgactcagatcacttaggtttgacttggataattgttctagattgtggaaatttatgaatttctgttttgtctgcaaatgtaaagaaatggaagggaattctaagaatatatctaattacaaatgtacagttcaggatcttgatatgttttatattagcattaaatcaaccttgctatgtacggattttctctct

SEQ ID NO: 54068 - protein, 324 aa, Glycine max
  peptide (1)..(324): Ceres Seq. ID no. 14311408
  misc_feature (30)..(77): Pfam Name: Zinc finger, C3HC4 type (RING finger) Pfam Description: Zinc finger, C3HC4 type (RING finger)
  misc_feature (217)..(324): Homolog of NCBI NO: 21593635 NR Description: unknown [Arabidopsis thaliana]
  misc_feature (17)..(169): Homolog of NCBI NO: 21593635 NR Description: unknown [Arabidopsis thaliana]
  misc_feature (217)..(324): Homolog of NCBI NO: 18391230 NR Description: zinc finger (C3HC4-type RING finger) protein
  misc_feature (17)..(173): Homolog of NCBI NO: 18391230 NR Description: zinc finger (C3HC4-type RING finger) protein
  misc_feature (215)..(324): Homolog of NCBI NO: 40253895 NR Description: zinc finger (C3HC4-type RING finger) protein
  misc_feature (4)..(189): Homolog of NCBI NO: 40253895 NR Description: zinc finger (C3HC4-type RING finger) protein
  misc_feature (152)..(192): Homolog of NCBI NO: 15227153 NR Description: zinc finger (C3HC4-type RING finger) protein
  misc_feature (216)..(324): Homolog of NCBI NO: 15227153 NR Description: zinc finger (C3HC4-type RING finger) protein
  misc_feature (5)..(128): Homolog of NCBI NO: 15227153 NR Description: zinc finger (C3HC4-type RING finger) protein
  misc_feature (5)..(324): Homolog of NCBI NO: 28393273 NR Description: unknown protein [Arabidopsis thaliana]
MTDSSPLIPPLPVTVTEIDLEEGPSEQIQCRICLETDGRNFIVPCKCKGTSKYVHRECLDHWRAVKEGFAFAHCTTCKAPYHLRVHGAYRQWRTFKFRFFVTRDILLIFLAVQLVIASLAYLVYQIDGYEKYWLRLVWGFGSELSFYYICGALVFFVLLGLSGCFITCSDPRIRSDLGQPCREICLCCCQPGVCADRHLHGTPYMYGTPYMSTDCNACCENCGTECCGCTCMRGSEDEAGLPLLFIMVLFFLVLFAVLGIFYSVLVATMIGQRIWQRHYHILAKRMLTKEYVVENIDGEIAGPNWTPPPLPQEHVRQLKTLGLL

SEQ ID NO: 54069 - DNA, 1106 bp, Glycine max
  misc_feature (1)..(1106): Ceres Seq. ID no. 14307156
gaatcgacattttctttggatgttaattcaaagttggattgggaagcaatgggaaaagttcttgctcgcgggcacagccgagttcctgtctattctggaaatccaaggaatattattgggcttctactggtcaaaagtcttcttactgtacgaccagaaacagagacacctgtcagtgctgtatccatccggagaattccacgggttccatcagatatgcctctctatgatatactaaatgagttccaaaagggaagtagtcatatggctgctgttgttaaggctaggggaaaaggcaaagaaactccacaaatcattgatgaagagaaaaatgaagaaaacaaaagcattggtggggattcacagttgaccactccgttgctacagaagcaggatgcaaaatcaggaagtgttgttgttgacatagtcaagccttcaaagccttccagcattaataagctgtctgttttgcaacgtagtgatagcacaacaaatggtccctcttcagaaaatattgaagatggtgaagtgattggtattatcactttagaagatgtatttgaagaacttctgcaagaagaaattgttgatgagacagatgaatatgtggatgttcataagagaatacgtgttgctgcagctgcagctgcttcctcagtggcccgagctccatcatcgcgaaggttgactagccagaagggagcaggaatccaaagtaagccagggcaagctccaaagaaatctgcagaggaaaatggattgaactctacaaagcaataaggaaatgcatattagcctgtcgggataatgaacctttaatactgaggggctgtttatgtgtcagcaatatgatgaaaaagaagtcaaggagagttttttagtcatttgatctttatgatgtatcaaattaataactttccttttaggaagggcataaacggatgtattcctatttatataggttattaagccggtgccatgctgcaattttatgttagatccaaaatgtcttttgtttttaccgaaagaaaagtgtgtttgttagtttcttttacccatttctctcaataatctattatttacaaaaaaaaaaaaaaaaaaaagag

SEQ ID NO: 54070 - protein, 259 aa, Glycine max
  peptide (1)..(259): Ceres Seq. ID no. 14307157
  misc_feature (1)..(51): Pfam Name: CBS domain Pfam Description: CBS domain
  misc_feature (3)..(192): Homolog of NCBI NO: 25411569 NR Description: hypothetical protein At2g14520 [imported] -
  misc_feature (3)..(204): Homolog of NCBI NO: 30679136 NR Description: CBS domain containing protein [Arabidopsis
  misc_feature (3)..(204): Homolog of NCBI NO: 40538933 NR Description: expressed protein [Oryza sativa (japonica
  misc_feature (4)..(204): Homolog of NCBI NO: 22329131 NR Description: CBS domain containing protein [Arabidopsis
  misc_feature (4)..(204): Homolog of NCBI NO: 7487085 NR Description: hypothetical protein T16L1.190 - Arabidopsis
  misc_feature (165)..(243): Homolog of NCBI NO: 22330087 NR Description: expressed protein [Arabidopsis thaliana]
  misc_feature (2)..(115): Homolog of NCBI NO: 22330087 NR Description: expressed protein [Arabidopsis thaliana]
  misc_feature (53)..(259): Homolog of NCBI NO: 30682755 NR Description: expressed protein [Arabidopsis thaliana]
  misc_feature (1)..(247): Homolog of NCBI NO: 15218765 NR Description: hypothetical protein [Arabidopsis thaliana]
  misc_feature (1)..(251): Homolog of NCBI NO: 15236442 NR Description: hypothetical protein [Arabidopsis thaliana]
ESTFSLDVNSKLDWEAMGKVLARGHSRVPVYSGNPRNIIGLLLVKSLLTVRPETETPVSAVSIRRIPRVPSDMPLYDILNEFQKGSSHMAAVVKARGKGKETPQIIDEEKNEENKSIGGDSQLTTPLLQKQDAKSGSVVVDIVKPSKPSSINKLSVLQRSDSTTNGPSSENIEDGEVIGIITLEDVFEELLQEEIVDETDEYVDVHKRIRVAAAAAASSVARAPSSRRLTSQKGAGIQSKPGQAPKKSAEENGLNSTKQ

SEQ ID NO: 54071 - protein, 243 aa, Glycine max
  peptide (1)..(243): Ceres Seq. ID no. 14307158
  misc_feature (1)..(176): Homolog of NCBI NO: 25411569 NR Description: hypothetical protein At2g14520 [imported] -
  misc_feature (1)..(188): Homolog of NCBI NO: 30679136 NR Description: CBS domain containing protein [Arabidopsis
  misc_feature (1)..(188): Homolog of NCBI NO: 40538933 NR Description: expressed protein [Oryza sativa (japonica
  misc_feature (1)..(188): Homolog of NCBI NO: 22329131 NR Description: CBS domain containing protein [Arabidopsis
  misc_feature (1)..(188): Homolog of NCBI NO: 7487085 NR Description: hypothetical protein T16L1.190 - Arabidopsis
  misc_feature (149)..(227): Homolog of NCBI NO: 22330087 NR Description: expressed protein [Arabidopsis thaliana]
  misc_feature (1)..(99): Homolog of NCBI NO: 22330087 NR Description: expressed protein [Arabidopsis thaliana]
  misc_feature (37)..(243): Homolog of NCBI NO: 30682755 NR Description: expressed protein [Arabidopsis thaliana]
  misc_feature (1)..(231): Homolog of NCBI NO: 15218765 NR Description: hypothetical protein [Arabidopsis thaliana]
  misc_feature (1)..(235): Homolog of NCBI NO: 15236442 NR Description: hypothetical protein [Arabidopsis thaliana]
MGKVLARGHSRVPVYSGNPRNIIGLLLVKSLLTVRPETETPVSAVSIRRIPRVPSDMPLYDILNEFQKGSSHMAAVVKARGKGKETPQIIDEEKNEENKSIGGDSQLTTPLLQKQDAKSGSVVVDIVKPSKPSSINKLSVLQRSDSTTNGPSSENIEDGEVIGIITLEDVFEELLQEEIVDETDEYVDVHKRIRVAAAAAASSVARAPSSRRLTSQKGAGIQSKPGQAPKKSAEENGLNSTKQ

SEQ ID NO: 54072 - protein, 187 aa, Glycine max
  peptide (1)..(187): Ceres Seq. ID no. 14307159
  misc_feature (1)..(120): Homolog of NCBI NO: 25411569 NR Description: hypothetical protein At2g14520 [imported] -
  misc_feature (1)..(132): Homolog of NCBI NO: 30679136 NR Description: CBS domain containing protein [Arabidopsis
  misc_feature (1)..(132): Homolog of NCBI NO: 40538933 NR Description: expressed protein [Oryza sativa (japonica
  misc_feature (1)..(132): Homolog of NCBI NO: 22329131 NR Description: CBS domain containing protein [Arabidopsis
  misc_feature (1)..(132): Homolog of NCBI NO: 7487085 NR Description: hypothetical protein T16L1.190 - Arabidopsis
  misc_feature (93)..(171): Homolog of NCBI NO: 22330087 NR Description: expressed protein [Arabidopsis thaliana]
  misc_feature (1)..(43): Homolog of NCBI NO: 22330087 NR Description: expressed protein [Arabidopsis thaliana]
  misc_feature (1)..(187): Homolog of NCBI NO: 30682755 NR Description: expressed protein [Arabidopsis thaliana]
  misc_feature (1)..(175): Homolog of NCBI NO: 15218765 NR Description: hypothetical protein [Arabidopsis thaliana]
  misc_feature (1)..(179): Homolog of NCBI NO: 15236442 NR Description: hypothetical protein [Arabidopsis thaliana]
MPLYDILNEFQKGSSHMAAVVKARGKGKETPQIIDEEKNEENKSIGGDSQLTTPLLQKQDAKSGSVVVDIVKPSKPSSINKLSVLQRSDSTTNGPSSENIEDGEVIGIITLEDVFEELLQEEIVDETDEYVDVHKRIRVAAAAAASSVARAPSSRRLTSQKGAGIQSKPGQAPKKSAEENGLNSTKQ

SEQ ID NO: 54073 - DNA, 1653 bp, Glycine max
  misc_feature (1)..(1653): Ceres Seq. ID no. 14307374
gaatatcaagtagatgaaaaccaactaatccgtgcagaaaaagtgccagcttgtagaagatccatcaaacagcaatcaaggcatgttggccaaaataaaaatggtgttcagaggctactgcaaactcgtactcacgaaggtggaagtccttttaatcgtgtttttcctgttagtcctgctccatttccttcagctcccccacctgccccagcaacgccaccagtggttcagaagccagctcctgttgaccgaaataattctgcttctccttctcccctgcctggaccacgatctgcaccgctatataaaagtagctcatcaaagaaccatgtagttgttattttggctggagttatgggtggtgctgtatttcttctcatttcaatcattggcctatatctctgtaaaacaaacaaggtagctactgtaaaaccttgggccacaggattaagcggacagcttcagaacgcatttgtaacaggtgtgccaaagctaaagagatcagagcttgaagcagcatgtgaagattttagtaatgtaattggtacttcatccattggtacagtgtacaaagggactttatctagtggtgttgaaatagctgtggcatctgttgcagcgacatcatccaaagattggtcaaagactttagaagcccaatttaggaacaagatagatacattatcaaaagtgaaccacaagaattttgtaaatcttcttgtacattgtgaagaagatgagcctttcaccagaatggtggtttttgagtatgccccgaatggaacactctttgagcatttacacataaaagaatctgagcacttggattggggaacaagacttagaattgccatgggcatggcttactgcctacaacatatgcaccagttggagcctcctttggtccttagcaacctgaattcttcagctgtccaactcactgatgattatgctgccaaaatctctgatttgagtttcttaaatgaaatagcttcagctgtgataaaatctcctgctagaaaaaacactgacatgacaccagcaagtaacatttacagctttggtgttatattatttgaaatggtaactggcagactcccttattcagtggacaatgatggctcacttgatgactgggcttcacactatttacaaggggatcagcccctcaaagaaatggtggatccgactctagcatccttccaagaagaacaactagaacaagtcgatgctttgattaaatcttgtgtccatcctgatcaaaagcaaagaccaacaatgaaagaagtttgtgtgagattaagagagataacaaaaataacacctgatgcagctgttccaaagctttctccactttggtgggcagagcttgagattgcttctgtaaatgcaagctgaaatcggtaaatcaggttgtaagtatggagttcttaccttcctcatcctttttccatcggtgaaggcacaaaaatgtattcacctgtagattaatacatcttgtgttaattatggaagagaggcaaatcacatgtacataagggagataaaagaatgcgattttttcttttcttttcctgcggtgcttcgtttggttatggtttatgaaattatactaacaaaaaaaagtttcacatcagttaatttcatttgctc

SEQ ID NO: 54074 - protein, 465 aa, Glycine max
  peptide (1)..(465): Ceres Seq. ID no. 14307375
  misc_feature (54)..(465): Homolog of NCBI NO: 9758931 NR Description: receptor protein kinase-like protein [Arabidopsis
  misc_feature (54)..(465): Homolog of NCBI NO: 15242513 NR Description: leucine-rich repeat transmembrane protein kinase,
  misc_feature (56)..(465): Homolog of NCBI NO: 7486276 NR Description: hypothetical protein F28A21.50 - Arabidopsis
  misc_feature (56)..(465): Homolog of NCBI NO: 30684487 NR Description: leucine-rich repeat transmembrane protein kinase,
  misc_feature (56)..(465): Homolog of NCBI NO: 7268658 NR Description: putative protein (fragment) [Arabidopsis thaliana]
  misc_feature (58)..(465): Homolog of NCBI NO: 34898222 NR Description: P0034A04.22 [Oryza sativa (japonica
  misc_feature (52)..(461): Homolog of NCBI NO: 18405327 NR Description: protein kinase -related [Arabidopsis thaliana]
  misc_feature (52)..(461): Homolog of NCBI NO: 4588001 NR Description: hypothetical Ser-Thr protein kinase [Arabidopsis
  misc_feature (27)..(461): Homolog of NCBI NO: 15228810 NR Description: putative protein kinase [Arabidopsis thaliana]
  misc_feature (140)..(465): Homolog of NCBI NO: 28916446 NR Description: ser-thr protein kinase [Gossypium hirsutum]
EYQVDENQLIRAEKVPACRRSIKQQSRHVGQNKNGVQRLLQTRTHEGGSPFNRVFPVSPAPFPSAPPPAPATPPVVQKPAPVDRNNSASPSPLPGPRSAPLYKSSSSKNHVVVILAGVMGGAVFLLISIIGLYLCKTNKVATVKPWATGLSGQLQNAFVTGVPKLKRSELEAACEDFSNVIGTSSIGTVYKGTLSSGVEIAVASVAATSSKDWSKTLEAQFRNKIDTLSKVNHKNFVNLLVHCEEDEPFTRMVVFEYAPNGTLFEHLHIKESEHLDWGTRLRIAMGMAYCLQHMHQLEPPLVLSNLNSSAVQLTDDYAAKISDLSFLNEIASAVIKSPARKNTDMTPASNIYSFGVILFEMVTGRLPYSVDNDGSLDDWASHYLQGDQPLKEMVDPTLASFQEEQLEQVDALIKSCVHPDQKQRPTMKEVCVRLREITKITPDAAVPKLSPLWWAELEIASVNAS

SEQ ID NO: 54075 - protein, 347 aa, Glycine max
  peptide (1)..(347): Ceres Seq. ID no. 14307376
  misc_feature (1)..(347): Homolog of NCBI NO: 9758931 NR Description: receptor protein kinase-like protein [Arabidopsis
  misc_feature (1)..(347): Homolog of NCBI NO: 15242513 NR Description: leucine-rich repeat transmembrane protein kinase,
  misc_feature (1)..(347): Homolog of NCBI NO: 30684487 NR Description: leucine-rich repeat transmembrane protein kinase,
  misc_feature (1)..(347): Homolog of NCBI NO: 7486276 NR Description: hypothetical protein F28A21.50 - Arabidopsis
  misc_feature (1)..(347): Homolog of NCBI NO: 7268658 NR Description: putative protein (fragment) [Arabidopsis thaliana]
  misc_feature (1)..(347): Homolog of NCBI NO: 34898222 NR Description: P0034A04.22 [Oryza sativa (japonica
  misc_feature (1)..(343): Homolog of NCBI NO: 18405327 NR Description: protein kinase -related [Arabidopsis thaliana]
  misc_feature (1)..(343): Homolog of NCBI NO: 4588001 NR Description: hypothetical Ser-Thr protein kinase [Arabidopsis
  misc_feature (1)..(343): Homolog of NCBI NO: 15228810 NR Description: putative protein kinase [Arabidopsis thaliana]
  misc_feature (22)..(347): Homolog of NCBI NO: 28916446 NR Description: ser-thr protein kinase [Gossypium hirsutum]
MGGAVFLLISIIGLYLCKTNKVATVKPWATGLSGQLQNAFVTGVPKLKRSELEAACEDFSNVIGTSSIGTVYKGTLSSGVEIAVASVAATSSKDWSKTLEAQFRNKIDTLSKVNHKNFVNLLVHCEEDEPFTRMVVFEYAPNGTLFEHLHIKESEHLDWGTRLRIAMGMAYCLQHMHQLEPPLVLSNLNSSAVQLTDDYAAKISDLSFLNEIASAVIKSPARKNTDMTPASNIYSFGVILFEMVTGRLPYSVDNDGSLDDWASHYLQGDQPLKEMVDPTLASFQEEQLEQVDALIKSCVHPDQKQRPTMKEVCVRLREITKITPDAAVPKLSPLWWAELEIASVNAS

SEQ ID NO: 54076 - DNA, 1239 bp, Glycine max
  misc_feature (1)..(1239): Ceres Seq. ID no. 15175765
gaagaaagaaagagagagacagcgtagggtaactgaaagagacgaaggaaatgaagaagtcttcgggaagcgcagctgacaaaaagagggtgcgacgctcatccgcaccagatcccacctccgacgctcctcctaggaaacaagttgtcaagaaagatgtgttccaggtttttgctgagaaggttagagatcataaggaattggtttcaaggtgggctgttctacaggagacgcgtgttgagtattttagagggaaggattttgtgagcttcttgaaaaaccatccggagctcaaagacgtcctagaatcagataggaatttggaaacagaggagattgccaacattctactcgcaaaaaatcttttagtgcgctgtgatcgtgttgtgaaaactgttcgtcctgggaagaaaaagctgtctacctggcctgcacatttagaaattttccctgaacaagtattttctgaaaatgatgctttttttgcatggacgtttgtaaaacgccatccactttggcagacactcctctcgtttttctggcctgtgttaacattggctatttgcttatttcctgtgtaccctcatcgctgcaagctattgatactttactcatgtgccgggatccttttcctcatcctctctctactcttgataagaggtacaatatttggcgctttatatattattcttggaaagcgaatctggtttttccctaacatccttgccgaggaagcaacactgcgggagttgttcagattttggcctaagaaagatgaagaggaaaagcccaagtggacaacaagacttttctatgctggggtagctgtgctgttcatattattgctgaggcatcatgcacccgatgaagctgccagagcaaggtaccagaagagggtatctaacatcattgatgatgttcttgaatggtctccgactctagccttgtctgggatgatggataagcaacaaaatgtggctaatgccacagggtccgccgatgcgagcaaagatggaccggaggatgcagctccagccgatggtgacgatgcaaaagatttcatggaacaggataataatactgaagaagtcataaacgatgtggatgatgataaacatcatgattaaaggttatcatatacctaaatgaaatatatttagtgactagatcacaattttccttttgagtgtaaaagtaccatgtatgaaataataacagtaaaaatggttcttcgccttc

SEQ ID NO: 54077 - protein, 358 aa, Glycine max
  peptide (1)..(358): Ceres Seq. ID no. 15175766
  misc_feature (60)..(251): Pfam Name: Translocation protein Sec62 Pfam Description: Translocation protein Sec62
  misc_feature (23)..(253): Homolog of NCBI NO: 19115168 NR Description: putative translocation protein
  misc_feature (1)..(354): Homolog of NCBI NO: 21593719 NR Description: unknown [Arabidopsis thaliana]
  misc_feature (1)..(354): Homolog of NCBI NO: 18402801 NR Description: expressed protein [Arabidopsis thaliana]
MKKSSGSAADKKRVRRSSAPDPTSDAPPRKQVVKKDVFQVFAEKVRDHKELVSRWAVLQETRVEYFRGKDFVSFLKNHPELKDVLESDRNLETEEIANILLAKNLLVRCDRVVKTVRPGKKKLSTWPAHLEIFPEQVFSENDAFFAWTFVKRHPLWQTLLSFFWPVLTLAICLFPVYPHRCKLLILYSCAGILFLILSLLLIRGTIFGALYIILGKRIWFFPNILAEEATLRELFRFWPKKDEEEKPKWTTRLFYAGVAVLFILLLRHHAPDEAARARYQKRVSNIIDDVLEWSPTLALSGMMDKQQNVANATGSADASKDGPEDAAPADGDDAKDFMEQDNNTEEVINDVDDDKHHD

SEQ ID NO: 54078 - DNA, 1193 bp, Glycine max
  misc_feature (1)..(1193): Ceres Seq. ID no. 13593932
gattttcactctaccaaaggtacacacgttgagagagacaggttagttggatacaaaagtggcatcgctcgcagtttgatagggtgcgtgacaagtataaaagggacaacattgaagacaacgttatcatatccttctttgcttggaatggaacaagctgggaagcaaggaattatggtggcgtctcagagtcaaaaccccattgagcaaatccaagcgcgcttcaaggacttggaaactggattccgcctctggctctccaagcagtccctccccgtcgaggccgccgtcgtcaccaccaccagcgccgcccagggcgccgccatcggcgccttcatgggcaccctcaccgccgacgcctcctccaccttccccacccctcctcccaacgcctctctcaatccccaagccatggcgtctcttaaacaagcgcaggctctagctggaggtcctttaattcaggcgcgaaactttgctgtgatgacgggagtgaacgctgggatttcctgtgtcttgaaaaggataaggggaaaggaagatgtccagtctagcatggcggcagcttttggttcaggggccttgttttcattagtaagtggcatgggtggaccaaatcaagcaacaaatgcactcacttctggacttttctttgcacttgttcaaggtggacttttccagataggacaaaagttttctcaaccacctgctgaagatactcactatgctaaaacaagacacatgttgaacaatcttggccttcagagttacgaaaagaatttcaagaaaggcttgttaacagacaacactctgcctttactcacagacagtgctctcagagatgtgaggattcctcctggacctaggcttttgattcttgaccacatccagagggacgcggatttgaaagataagcgaggaagccgaaagtgactgatatgaatagtttgctggcttggaactttgaaagccattgaaaaatggatagtagaaagtttgtgttgcaaatgaattttgtcttttttgtttgttagctctgttccattgttgttgcagtgtacttgataaaatttggttaactaatcagttattttagttgtgccatgacacgtaaatggcttgaaagtaaattagggagcacgaatttgttaactctaaaataagaaaagttattgcttccttgtgtaggaattgtt

SEQ ID NO: 54079 - protein, 309 aa, Glycine max
  peptide (1)..(309): Ceres Seq. ID no. 13593933
  misc_feature (85)..(231): Pfam Name: Tim17/Tim22/Tim23 family Pfam Description: Tim17/Tim22/Tim23 family
  misc_feature (51)..(305): Homolog of NCBI NO: 15229167 NR Description: expressed protein [Arabidopsis thaliana]
  misc_feature (65)..(308): Homolog of NCBI NO: 21593899 NR Description: unknown [Arabidopsis thaliana]
  misc_feature (65)..(308): Homolog of NCBI NO: 15238598 NR Description: expressed protein [Arabidopsis thaliana]
  misc_feature (49)..(297): Homolog of NCBI NO: 32487911 NR Description: OJ000315_02.15 [Oryza sativa (japonica
DFHSTKGTHVERDRLVGYKSGIARSLIGCVTSIKGTTLKTTLSYPSLLGMEQAGKQGIMVASQSQNPIEQIQARFKDLETGFRLWLSKQSLPVEAAVVTTTSAAQGAAIGAFMGTLTADASSTFPTPPPNASLNPQAMASLKQAQALAGGPLIQARNFAVMTGVNAGISCVLKRIRGKEDVQSSMAAAFGSGALFSLVSGMGGPNQATNALTSGLFFALVQGGLFQIGQKFSQPPAEDTHYAKTRHMLNNLGLQSYEKNFKKGLLTDNTLPLLTDSALRDVRIPPGPRLLILDHIQRDADLKDKRGSRK

SEQ ID NO: 54080 - protein, 260 aa, Glycine max
  peptide (1)..(260): Ceres Seq. ID no. 13593934
  misc_feature (36)..(182): Pfam Name: Tim17/Tim22/Tim23 family Pfam Description: Tim17/Tim22/Tim23 family
  misc_feature (2)..(256): Homolog of NCBI NO: 15229167 NR Description: expressed protein [Arabidopsis thaliana]
  misc_feature (16)..(259): Homolog of NCBI NO: 21593899 NR Description: unknown [Arabidopsis thaliana]
  misc_feature (16)..(259): Homolog of NCBI NO: 15238598 NR Description: expressed protein [Arabidopsis thaliana]
  misc_feature (1)..(248): Homolog of NCBI NO: 32487911 NR Description: OJ000315_02.15 [Oryza sativa (japonica
MEQAGKQGIMVASQSQNPIEQIQARFKDLETGFRLWLSKQSLPVEAAVVTTTSAAQGAAIGAFMGTLTADASSTFPTPPPNASLNPQAMASLKQAQALAGGPLIQARNFAVMTGVNAGISCVLKRIRGKEDVQSSMAAAFGSGALFSLVSGMGGPNQATNALTSGLFFALVQGGLFQIGQKFSQPPAEDTHYAKTRHMLNNLGLQSYEKNFKKGLLTDNTLPLLTDSALRDVRIPPGPRLLILDHIQRDADLKDKRGSRK

SEQ ID NO: 54081 - protein, 251 aa, Glycine max
  peptide (1)..(251): Ceres Seq. ID no. 13593935
  misc_feature (27)..(173): Pfam Name: Tim17/Tim22/Tim23 family Pfam Description: Tim17/Tim22/Tim23 family
  misc_feature (1)..(247): Homolog of NCBI NO: 15229167 NR Description: expressed protein [Arabidopsis thaliana]
  misc_feature (7)..(250): Homolog of NCBI NO: 21593899 NR Description: unknown [Arabidopsis thaliana]
  misc_feature (7)..(250): Homolog of NCBI NO: 15238598 NR Description: expressed protein [Arabidopsis thaliana]
  misc_feature (1)..(239): Homolog of NCBI NO: 32487911 NR Description: OJ000315_02.15 [Oryza sativa (japonica
MVASQSQNPIEQIQARFKDLETGFRLWLSKQSLPVEAAVVTTTSAAQGAAIGAFMGTLTADASSTFPTPPPNASLNPQAMASLKQAQALAGGPLIQARNFAVMTGVNAGISCVLKRIRGKEDVQSSMAAAFGSGALFSLVSGMGGPNQATNALTSGLFFALVQGGLFQIGQKFSQPPAEDTHYAKTRHMLNNLGLQSYEKNFKKGLLTDNTLPLLTDSALRDVRIPPGPRLLILDHIQRDADLKDKRGSRK

SEQ ID NO: 54082 - DNA, 1417 bp, Glycine max
  misc_feature (1)..(1417): Ceres Seq. ID no. 14311355
aggattatgtttattgacttgttctttctttatttgtattttcaatgaatcagttattcatcaatttcatagactgttgtgtagaactggaatatcacctgtgcactgaaaatcttataccagattcttttgttaccgcagtggaggttgagattgatggctctgttactgtcgaaacagtaggaaatactgctataggtgaggttagtagcatagcggatgacaacagagaaggtggaagttctgttgaaccaaatgacaaccaagatcaacatgataatgggactcaagattcctctggagggatcactatcccatctgcaattcccacagtatcggttgtttcagttgaagagccctacgttggtcaggagtttgggtcagaagcagcagcacatgcattttataatgcttatgccacagaagttggatttatcgtacgtgtgagtaaactctcgcggtcaaggcgtgatggaactgctattggacgtactcttgtttgcaacaaagagggattcagaatggctgacaaacgtgaaaagattgtgaggcaaagggccgagaccagggttggttgcagggcaatgattatggtgaggaaacttagttctggcaaatgggttgttgcaaagtttgtgaaggaacacacacatcctttgacccctggcaaaggtagaagggatttctactatgaacaatatccggtcagtttcttttctttcactactgaacaactgtacatattatgttgtgtcaagtgttacttgtgcttaatagatcagttatgaaatctgagtgagatcatgatgctctcatattgtgctaaatattagagaatttcaggctatttcagaacgaagttttcaggataacattggttctcttaacattttccatctctattataatccataatccagagaatttttttcttctgcattacctcacatcatttgaaatttgctcaaattggtcttattacccttgcccttgtacaaattcctttactcataatgtaatgcaacttagaaagtgccacgtaagtaaagagcaacttgtgagattagtaaatattatattcctcactctttttcagttcctttttatgctattttcagactgaacaggataaaattcgggaactatctcaacagttggcaactgagaaaaagcgatctgcggcctataaaagacatcttgaattgatatttgagcaaattgaagagcagaatgataacctttcaaagaaaatacagcacatagtagactgcgtgaaggagatggaagccaaagaagaacatagtagacagtgtgaaggagatggaagccaaagaacaacagagtagactcagatagattcaacttacaacgtgatacttttagttggtagaggaaactagttcagtcaatgtagagg

SEQ ID NO: 54083 - protein, 247 aa, Glycine max
  peptide (1)..(247): Ceres Seq. ID no. 14311356
  misc_feature (120)..(220): Pfam Name: FAR1 family Pfam Description: FAR1 family
  misc_feature (104)..(207): Homolog of NCBI NO: 18483236 NR Description: putative far-red impaired response protein
  misc_feature (96)..(203): Homolog of NCBI NO: 28301931 NR Description: putative transposase [Oryza sativa (japonica
  misc_feature (100)..(205): Homolog of NCBI NO: 15235502 NR Description: hypothetical protein [Arabidopsis thaliana]
  misc_feature (104)..(207): Homolog of NCBI NO: 15233732 NR Description: expressed protein [Arabidopsis thaliana]
  misc_feature (120)..(211): Homolog of NCBI NO: 25370598 NR Description: hypothetical protein At2g43280 [imported] -
  misc_feature (104)..(211): Homolog of NCBI NO: 30689328 NR Description: expressed protein [Arabidopsis thaliana]
  misc_feature (104)..(207): Homolog of NCBI NO: 6041845 NR Description: hypothetical protein [Arabidopsis thaliana]
  misc_feature (104)..(220): Homolog of NCBI NO: 30680320 NR Description: expressed protein [Arabidopsis thaliana]
  misc_feature (53)..(220): Homolog of NCBI NO: 18411179 NR Description: expressed protein [Arabidopsis thaliana]
  misc_feature (53)..(220): Homolog of NCBI NO: 11358055 NR Description: hypothetical protein T16L24.20 - Arabidopsis
MNQLFINFIDCCVELEYHLCTENLIPDSFVTAVEVEIDGSVTVETVGNTAIGEVSSIADDNREGGSSVEPNDNQDQHDNGTQDSSGGITIPSAIPTVSVVSVEEPYVGQEFGSEAAAHAFYNAYATEVGFIVRVSKLSRSRRDGTAIGRTLVCNKEGFRMADKREKIVRQRAETRVGCRAMIMVRKLSSGKWVVAKFVKEHTHPLTPGKGRRDFYYEQYPVSFFSFTTEQLYILCCVKCYLCLIDQL

SEQ ID NO: 54084 - DNA, 1592 bp, Glycine max
  misc_feature (1)..(1592): Ceres Seq. ID no. 14313714
agaagaaatggtgtttttggtagaccactttgtgtgaacccctctggcaggagaaacctagttggtccagctttttattctctggagactagtgcttatgacgtggctgctttagaatctccttcccgtgttgcagaagaaaaagttggtgtgctgcttctcaatctaggaggaccagagacattgagtgacgtgcaaccttttctgtttaatctttttgcagatcctgatatcattcgtcttccaaggttgtttcggtttctccagcgaccattggcaaaattgatttctgtacttcgggctcctaaatccaaggaagggtatgctgctattggtggtggctctcctttacgaaaaattacagatgaccaggcacttgcaattaaaatggctttggaagcaaagggcatctcttcaaatgtctacgttgggatgcgatactggtacccatttactgaagaagcaattcagcaaattaagagggacagaataacaaggcttgtggtactacccctttatccccagttttctatatccacaactggatcaagcatccgtgttcttgagcatatattcagggaagatgcctacttgtctaagctccctgtttccattataaactcttggtatcaacgagaaggttatattaagtcaatggctaacttaattcagaaagagctccagagtttttctgaaccaaaagaggtaatgatatttttcagtgcccatggtgtacctgtcagttacgttgaggaagctggggatccataccgagaccaaatggaggagtgcatcttcttgatcatgcaagagttgaaagctagaggaattagtaatgagcacactcttgcttatcagagtcgagtgggtcctgtacagtggctgaaaccatatactgatgaagttctcgttgagcttggccaaaaaggtgtgaagagtcttttagctgttccagtgagttttgtgagtgagcatattgaaacccttgaagaaattgacatggagtacaaggaattggctcttgaatctggcatcaagaattgggcacgtgtacctgcccttggtgttaccccttccttcattacagatttagcagatgcagtaatagaagctctcccatcagcaacagcaatatatgcaccgaccagaacctctgaagatgttgatcatgacccagttagatattttatcaagatgttctttggttcaatcttggcattcatcttgttcttgtcacccaaaatgatcacggcattcaggaatcatgtcatttagaagaattaaatcctgcttgctgaattcaatctgcaagcatatagatgaagcctattgatagcaacaaagtatactttgattttttgtctttgttttacttatttcaacctctactgtatacagcacagagctataaggaagcaatttttcgcacttgattataatgagaacttgcacctcggcttaaagaggattcaaagaataataattgtagaccaggatctattcaggagccaagaggcattgtctccatctccgatattaaaccccgaacaagttattgatttttgtatattatttatttacactttttctac

SEQ ID NO: 54085 - protein, 424 aa, Glycine max
  peptide (1)..(424): Ceres Seq. ID no. 14313715
  misc_feature (48)..(372): Pfam Name: Ferrochelatase Pfam Description: Ferrochelatase
  misc_feature (27)..(378): Homolog of NCBI NO: 2623990 NR Description: ferrochelatase [Arabidopsis thaliana]
  misc_feature (27)..(378): Homolog of NCBI NO: 15227742 NR Description: ferrochelatase precusor -related [Arabidopsis
  misc_feature (44)..(378): Homolog of NCBI NO: 12082085 NR Description: ferrochelatase [Cucumis sativus]
  misc_feature (27)..(378): Homolog of NCBI NO: 15147828 NR Description: ferrochelatase [Nicotiana tabacum]
  misc_feature (46)..(378): Homolog of NCBI NO: 7437212 NR Description: probable ferrochelatase (EC 4.99.1.1) - potato
  misc_feature (44)..(378): Homolog of NCBI NO: 3913808 NR Description: Ferrochelatase II, chloroplast precursor
  misc_feature (42)..(421): Homolog of NCBI NO: 1170242 NR Description: Ferrochelatase II, chloroplast precursor
  misc_feature (42)..(421): Homolog of NCBI NO: 7437214 NR Description: probable ferrochelatase (EC 4.99.1.1) - barley
  misc_feature (6)..(421): Homolog of NCBI NO: 30690097 NR Description: ferrochelatase-I [Arabidopsis thaliana]
  misc_feature (14)..(424): Homolog of NCBI NO: 1170239 NR Description: Ferrochelatase II, chloroplast precursor
RRNGVFGRPLCVNPSGRRNLVGPAFYSLETSAYDVAALESPSRVAEEKVGVLLLNLGGPETLSDVQPFLFNLFADPDIIRLPRLFRFLQRPLAKLISVLRAPKSKEGYAAIGGGSPLRKITDDQALAIKMALEAKGISSNVYVGMRYWYPFTEEAIQQIKRDRITRLVVLPLYPQFSISTTGSSIRVLEHIFREDAYLSKLPVSIINSWYQREGYIKSMANLIQKELQSFSEPKEVMIFFSAHGVPVSYVEEAGDPYRDQMEECIFLIMQELKARGISNEHTLAYQSRVGPVQWLKPYTDEVLVELGQKGVKSLLAVPVSFVSEHIETLEEIDMEYKELALESGIKNWARVPALGVTPSFITDLADAVIEALPSATAIYAPTRTSEDVDHDPVRYFIKMFFGSILAFILFLSPKMITAFRNHVI

SEQ ID NO: 54086 - protein, 295 aa, Glycine max
  peptide (1)..(295): Ceres Seq. ID no. 14313716
  misc_feature (1)..(243): Pfam Name: Ferrochelatase Pfam Description: Ferrochelatase
  misc_feature (1)..(249): Homolog of NCBI NO: 2623990 NR Description: ferrochelatase [Arabidopsis thaliana]
  misc_feature (1)..(249): Homolog of NCBI NO: 15227742 NR Description: ferrochelatase precusor -related [Arabidopsis
  misc_feature (1)..(249): Homolog of NCBI NO: 12082085 NR Description: ferrochelatase [Cucumis sativus]
  misc_feature (1)..(249): Homolog of NCBI NO: 15147828 NR Description: ferrochelatase [Nicotiana tabacum]
  misc_feature (1)..(249): Homolog of NCBI NO: 7437212 NR Description: probable ferrochelatase (EC 4.99.1.1) - potato
  misc_feature (1)..(249): Homolog of NCBI NO: 3913808 NR Description: Ferrochelatase II, chloroplast precursor
  misc_feature (1)..(292): Homolog of NCBI NO: 1170242 NR Description: Ferrochelatase II, chloroplast precursor
  misc_feature (1)..(292): Homolog of NCBI NO: 7437214 NR Description: probable ferrochelatase (EC 4.99.1.1) - barley
  misc_feature (1)..(292): Homolog of NCBI NO: 30690097 NR Description: ferrochelatase-I [Arabidopsis thaliana]
  misc_feature (1)..(295): Homolog of NCBI NO: 1170239 NR Description: Ferrochelatase II, chloroplast precursor
MALEAKGISSNVYVGMRYWYPFTEEAIQQIKRDRITRLVVLPLYPQFSISTTGSSIRVLEHIFREDAYLSKLPVSIINSWYQREGYIKSMANLIQKELQSFSEPKEVMIFFSAHGVPVSYVEEAGDPYRDQMEECIFLIMQELKARGISNEHTLAYQSRVGPVQWLKPYTDEVLVELGQKGVKSLLAVPVSFVSEHIETLEEIDMEYKELALESGIKNWARVPALGVTPSFITDLADAVIEALPSATAIYAPTRTSEDVDHDPVRYFIKMFFGSILAFILFLSPKMITAFRNHVI

SEQ ID NO: 54087 - protein, 280 aa, Glycine max
  peptide (1)..(280): Ceres Seq. ID no. 14313717
  misc_feature (1)..(228): Pfam Name: Ferrochelatase Pfam Description: Ferrochelatase
  misc_feature (1)..(234): Homolog of NCBI NO: 2623990 NR Description: ferrochelatase [Arabidopsis thaliana]
  misc_feature (1)..(234): Homolog of NCBI NO: 15227742 NR Description: ferrochelatase precusor -related [Arabidopsis
  misc_feature (1)..(234): Homolog of NCBI NO: 12082085 NR Description: ferrochelatase [Cucumis sativus]
  misc_feature (1)..(234): Homolog of NCBI NO: 15147828 NR Description: ferrochelatase [Nicotiana tabacum]
  misc_feature (1)..(234): Homolog of NCBI NO: 7437212 NR Description: probable ferrochelatase (EC 4.99.1.1) - potato
  misc_feature (1)..(234): Homolog of NCBI NO: 3913808 NR Description: Ferrochelatase II, chloroplast precursor
  misc_feature (1)..(277): Homolog of NCBI NO: 1170242 NR Description: Ferrochelatase II, chloroplast precursor
  misc_feature (1)..(277): Homolog of NCBI NO: 7437214 NR Description: probable ferrochelatase (EC 4.99.1.1) - barley
  misc_feature (1)..(277): Homolog of NCBI NO: 30690097 NR Description: ferrochelatase-I [Arabidopsis thaliana]
  misc_feature (1)..(280): Homolog of NCBI NO: 1170239 NR Description: Ferrochelatase II, chloroplast precursor
MRYWYPFTEEAIQQIKRDRITRLVVLPLYPQFSISTTGSSIRVLEHIFREDAYLSKLPVSIINSWYQREGYIKSMANLIQKELQSFSEPKEVMIFFSAHGVPVSYVEEAGDPYRDQMEECIFLIMQELKARGISNEHTLAYQSRVGPVQWLKPYTDEVLVELGQKGVKSLLAVPVSFVSEHIETLEEIDMEYKELALESGIKNWARVPALGVTPSFITDLADAVIEALPSATAIYAPTRTSEDVDHDPVRYFIKMFFGSILAFILFLSPKMITAFRNHVI

SEQ ID NO: 54088 - DNA, 951 bp, Glycine max
  misc_feature (1)..(951): Ceres Seq. ID no. 14303374
ggtaaacatcccttctttcatctttcaactctctctctccccccctctttctctcacacacaaatgtctaaaataacaataacctctccaaaacactgtgctgacaaagaaggactaaaaatcaagaactacaagaagatctacttcactttctcagcatttttcatcacaatcctactactaatacttgttatatggctcatcctccaccctgcaaagcctcaattctccctcaaagaagtcgacatcttccaacttaacctttcaggcccaaacctcaactcctccatccaactcaccctcctctccaaaaacccaaaccagaaagttggcatttactacgacgagattcaactctatgcaacctacaagggccaacaaattactggtgatacccctgtgccacccttttatcaaggccaagaagagagtaatctcataacagcttctttggtgggaaatgctttacccgtggctccgtctcttggctatgaacttggtcgtgatcaaattgttggaagactagtcttgaatctcaaagccaatggaaagcttcgttggaaagtgggaacatgggtctctggacgttacaggttcaatgttaattgtgttgctatcaatgcctttggaccctctattcctgctgggcctctcacttcaaagcaaggggctcagtgttccaccacactttaaagttaaactcagcatgatcttcttactaacaacttcaacatataaatgatataaattataatctactattcatatatatcacggcgagtttttcaagttttcttgttagtagattttgttgcttggctttgtattgaagcgttattttgcagccactataagtgatttgtaaataataaaaatatatgtgaatgataggacaaaaagttacactttgtgagtgattatgaaaagaggatgcgtattagatggttaaat

SEQ ID NO: 54089 - protein, 230 aa, Glycine max
  peptide (1)..(230): Ceres Seq. ID no. 14303375
  misc_feature (54)..(207): Homolog of NCBI NO: 15227540 NR Description: harpin-induced protein 1 family (HIN1)
  misc_feature (54)..(207): Homolog of NCBI NO: 15233951 NR Description: harpin-induced protein 1 family (HIN1)
  misc_feature (45)..(227): Homolog of NCBI NO: 22326984 NR Description: harpin-induced protein 1 family (HIN1)
  misc_feature (54)..(207): Homolog of NCBI NO: 15227538 NR Description: harpin-induced protein 1 family (HIN1)
  misc_feature (31)..(207): Homolog of NCBI NO: 15231227 NR Description: harpin-induced protein 1 family (HIN1)
  misc_feature (31)..(210): Homolog of NCBI NO: 28392929 NR Description: putative VAMP protein SEC22 [Arabidopsis thaliana]
  misc_feature (31)..(210): Homolog of NCBI NO: 18399308 NR Description: harpin-induced protein 1 family (HIN1)
  misc_feature (27)..(221): Homolog of NCBI NO: 15240001 NR Description: harpin-induced protein, putative (HIN1)
  misc_feature (31)..(227): Homolog of NCBI NO: 15229906 NR Description: harpin-induced protein 1 family (HIN1)
  misc_feature (22)..(230): Homolog of NCBI NO: 15238828 NR Description: harpin-induced protein 1 family (HIN1)
GKHPFFHLSTLSLPPSFSHTQMSKITITSPKHCADKEGLKIKNYKKIYFTFSAFFITILLLILVIWLILHPAKPQFSLKEVDIFQLNLSGPNLNSSIQLTLLSKNPNQKVGIYYDEIQLYATYKGQQITGDTPVPPFYQGQEESNLITASLVGNALPVAPSLGYELGRDQIVGRLVLNLKANGKLRWKVGTWVSGRYRFNVNCVAINAFGPSIPAGPLTSKQGAQCSTTL

SEQ ID NO: 54090 - protein, 209 aa, Glycine max
  peptide (1)..(209): Ceres Seq. ID no. 14303376
  misc_feature (33)..(186): Homolog of NCBI NO: 15227540 NR Description: harpin-induced protein 1 family (HIN1)
  misc_feature (33)..(186): Homolog of NCBI NO: 15233951 NR Description: harpin-induced protein 1 family (HIN1)
  misc_feature (24)..(206): Homolog of NCBI NO: 22326984 NR Description: harpin-induced protein 1 family (HIN1)
  misc_feature (33)..(186): Homolog of NCBI NO: 15227538 NR Description: harpin-induced protein 1 family (HIN1)
  misc_feature (10)..(186): Homolog of NCBI NO: 15231227 NR Description: harpin-induced protein 1 family (HIN1)
  misc_feature (10)..(189): Homolog of NCBI NO: 28392929 NR Description: putative VAMP protein SEC22 [Arabidopsis thaliana]
  misc_feature (10)..(189): Homolog of NCBI NO: 18399308 NR Description: harpin-induced protein 1 family (HIN1)
  misc_feature (6)..(200): Homolog of NCBI NO: 15240001 NR Description: harpin-induced protein, putative (HIN1)
  misc_feature (10)..(206): Homolog of NCBI NO: 15229906 NR Description: harpin-induced protein 1 family (HIN1)
  misc_feature (1)..(209): Homolog of NCBI NO: 15238828 NR Description: harpin-induced protein 1 family (HIN1)
MSKITITSPKHCADKEGLKIKNYKKIYFTFSAFFITILLLILVIWLILHPAKPQFSLKEVDIFQLNLSGPNLNSSIQLTLLSKNPNQKVGIYYDEIQLYATYKGQQITGDTPVPPFYQGQEESNLITASLVGNALPVAPSLGYELGRDQIVGRLVLNLKANGKLRWKVGTWVSGRYRFNVNCVAINAFGPSIPAGPLTSKQGAQCSTTL

SEQ ID NO: 54091 - DNA, 1602 bp, Glycine max
  misc_feature (1)..(1602): Ceres Seq. ID no. 14307460
gagaacaataggagcatcatggttaggctatggtgctcttctctctcaattacacttttattccaacagctcatcagattgtgcatttcttggagtgtgcaaaccccaacacccccattgccaatcctccctctcccaacatattcccagttgaaatggcaacaaagggagatcataatgtttttccattttggtgtgaacacattcagtgacagagaatggggcactggccaggaaaacccagcaatcttcaatccaacggggctcaacaccacccagtgggccactgtggcagcagatgcaggagtttcattgatgatattaactgcaaaacaccatgatggcttctgcctctggccttccaagtacactgaccattctgtcattagcagccctaggcaaggtggcaagggtgatgtggttcaagactttgtcaatgcagccactgcacaaggaattgatgtaggggtctacctttcaccttgggatagacatgaccctagatatggcaatgatttgctctacaaccaatactacttggctcaactacaagagttgctcaagaaatatccaaatgttagagagatttggttcgatggagcaaagggtgccaatgcaaaaaatatgacgtattacttttcagattggttttccatggtgaaggagctgcagagttccatcaacatcttctctgatgcaggtcctgatgttaggtgggtgggagatgaaacaggttctgcagggtatacatgttggtctaccattaatcgaacctctctatccattggaagtccagacatcattcagtatataaacactggtgatccaaaagggacagattggctaccggcggaatgtgatgtatccattcgaaaaggatggttttggcacaaatcagaatcaccaaaaaagctaagcgagctacttgacatttattacaattcggttgggagaaattgtgtgttacttctcaatgtgcctcctaatacaagtggccttataactgaagttgatgccaatagattgaaagagtttagaagtgcaatcaagacaattttccatcagaatcttgctgaggattgttttgttaaagttagtagccaaagagggggtttcgggccagaaaagatgctagacagtgaccacttgtggtcatactgggccccaagggacgatgatgatgaaaaggaccattgggttgaaatttgggccaaggaagggagattgagattcaatgtggttagaatacaagaggcaattggtcttggtcaaaggatcaaacggcatgaaatctatgtggatggtaaattgatcatcaaagccacaacggttggttataagaggcttcataggcttgatgggggtgaagtgcacgctcgtggtgtgaggataagaattagaaaggcaagaggagtgcctcttatctcttctattggcttgcattatgatcctttctggcactcaaagtttactgtatcctgaagagttaagtaagtttaggtaaaggagcataactgcaataaattaagtagagccttaagaagaatattgaaatattgttctatcagtaaagaacaaaaaataaatttactttaaatttcc

SEQ ID NO: 54092 - protein, 493 aa, Glycine max
  peptide (1)..(493): Ceres Seq. ID no. 14307461
  misc_feature (84)..(332): Pfam Name: Alpha-L-fucosidase Pfam Description: Alpha-L-fucosidase
  misc_feature (36)..(481): Homolog of NCBI NO: 23107703 NR Description: hypothetical protein [Novosphingobium
  misc_feature (81)..(353): Homolog of NCBI NO: 23119502 NR Description: hypothetical protein [Desulfitobacterium
  misc_feature (69)..(484): Homolog of NCBI NO: 29350121 NR Description: conserved hypothetical protein
  misc_feature (15)..(481): Homolog of NCBI NO: 29347602 NR Description: conserved hypothetical protein
  misc_feature (44)..(484): Homolog of NCBI NO: 15903995 NR Description: Hypothetical protein [Streptococcus pneumoniae
  misc_feature (44)..(484): Homolog of NCBI NO: 15901959 NR Description: conserved hypothetical protein [Streptococcus
  misc_feature (45)..(484): Homolog of NCBI NO: 18310858 NR Description: conserved hypothetical protein [Clostridium
  misc_feature (36)..(485): Homolog of NCBI NO: 38345843 NR Description: OSJNBa0084K11.7 [Oryza sativa (japonica
  misc_feature (13)..(485): Homolog of NCBI NO: 26453078 NR Description: unknown protein [Arabidopsis thaliana]
  misc_feature (13)..(485): Homolog of NCBI NO: 30683758 NR Description: glycosyl hydrolase family 29 (alpha-L-fucosidase)
ENNRSIMVRLWCSSLSITLLFQQLIRLCISWSVQTPTPPLPILPLPTYSQLKWQQREIIMFFHFGVNTFSDREWGTGQENPAIFNPTGLNTTQWATVAADAGVSLMILTAKHHDGFCLWPSKYTDHSVISSPRQGGKGDVVQDFVNAATAQGIDVGVYLSPWDRHDPRYGNDLLYNQYYLAQLQELLKKYPNVREIWFDGAKGANAKNMTYYFSDWFSMVKELQSSINIFSDAGPDVRWVGDETGSAGYTCWSTINRTSLSIGSPDIIQYINTGDPKGTDWLPAECDVSIRKGWFWHKSESPKKLSELLDIYYNSVGRNCVLLLNVPPNTSGLITEVDANRLKEFRSAIKTIFHQNLAEDCFVKVSSQRGGFGPEKMLDSDHLWSYWAPRDDDDEKDHWVEIWAKEGRLRFNVVRIQEAIGLGQRIKRHEIYVDGKLIIKATTVGYKRLHRLDGGEVHARGVRIRIRKARGVPLISSIGLHYDPFWHSKFTVS

SEQ ID NO: 54093 - protein, 487 aa, Glycine max
  peptide (1)..(487): Ceres Seq. ID no. 14307462
  misc_feature (78)..(326): Pfam Name: Alpha-L-fucosidase Pfam Description: Alpha-L-fucosidase
  misc_feature (30)..(475): Homolog of NCBI NO: 23107703 NR Description: hypothetical protein [Novosphingobium
  misc_feature (75)..(347): Homolog of NCBI NO: 23119502 NR Description: hypothetical protein [Desulfitobacterium
  misc_feature (63)..(478): Homolog of NCBI NO: 29350121 NR Description: conserved hypothetical protein
  misc_feature (9)..(475): Homolog of NCBI NO: 29347602 NR Description: conserved hypothetical protein
  misc_feature (38)..(478): Homolog of NCBI NO: 15903995 NR Description: Hypothetical protein [Streptococcus pneumoniae
  misc_feature (38)..(478): Homolog of NCBI NO: 15901959 NR Description: conserved hypothetical protein [Streptococcus
  misc_feature (39)..(478): Homolog of NCBI NO: 18310858 NR Description: conserved hypothetical protein [Clostridium
  misc_feature (30)..(479): Homolog of NCBI NO: 38345843 NR Description: OSJNBa0084K11.7 [Oryza sativa (japonica
  misc_feature (7)..(479): Homolog of NCBI NO: 26453078 NR Description: unknown protein [Arabidopsis thaliana]
  misc_feature (7)..(479): Homolog of NCBI NO: 30683758 NR Description: glycosyl hydrolase family 29 (alpha-L-fucosidase)
MVRLWCSSLSITLLFQQLIRLCISWSVQTPTPPLPILPLPTYSQLKWQQREIIMFFHFGVNTFSDREWGTGQENPAIFNPTGLNTTQWATVAADAGVSLMILTAKHHDGFCLWPSKYTDHSVISSPRQGGKGDVVQDFVNAATAQGIDVGVYLSPWDRHDPRYGNDLLYNQYYLAQLQELLKKYPNVREIWFDGAKGANAKNMTYYFSDWFSMVKELQSSINIFSDAGPDVRWVGDETGSAGYTCWSTINRTSLSIGSPDIIQYINTGDPKGTDWLPAECDVSIRKGWFWHKSESPKKLSELLDIYYNSVGRNCVLLLNVPPNTSGLITEVDANRLKEFRSAIKTIFHQNLAEDCFVKVSSQRGGFGPEKMLDSDHLWSYWAPRDDDDEKDHWVEIWAKEGRLRFNVVRIQEAIGLGQRIKRHEIYVDGKLIIKATTVGYKRLHRLDGGEVHARGVRIRIRKARGVPLISSIGLHYDPFWHSKFTVS

SEQ ID NO: 54094 - protein, 434 aa, Glycine max
  peptide (1)..(434): Ceres Seq. ID no. 14307463
  misc_feature (25)..(273): Pfam Name: Alpha-L-fucosidase Pfam Description: Alpha-L-fucosidase
  misc_feature (1)..(422): Homolog of NCBI NO: 23107703 NR Description: hypothetical protein [Novosphingobium
  misc_feature (22)..(294): Homolog of NCBI NO: 23119502 NR Description: hypothetical protein [Desulfitobacterium
  misc_feature (10)..(425): Homolog of NCBI NO: 29350121 NR Description: conserved hypothetical protein
  misc_feature (1)..(422): Homolog of NCBI NO: 29347602 NR Description: conserved hypothetical protein
  misc_feature (1)..(425): Homolog of NCBI NO: 15903995 NR Description: Hypothetical protein [Streptococcus pneumoniae
  misc_feature (1)..(425): Homolog of NCBI NO: 15901959 NR Description: conserved hypothetical protein [Streptococcus
  misc_feature (1)..(425): Homolog of NCBI NO: 18310858 NR Description: conserved hypothetical protein [Clostridium
  misc_feature (1)..(426): Homolog of NCBI NO: 38345843 NR Description: OSJNBa0084K11.7 [Oryza sativa (japonica
  misc_feature (1)..(426): Homolog of NCBI NO: 26453078 NR Description: unknown protein [Arabidopsis thaliana]
  misc_feature (1)..(426): Homolog of NCBI NO: 30683758 NR Description: glycosyl hydrolase family 29 (alpha-L-fucosidase)
MFFHFGVNTFSDREWGTGQENPAIFNPTGLNTTQWATVAADAGVSLMILTAKHHDGFCLWPSKYTDHSVISSPRQGGKGDVVQDFVNAATAQGIDVGVYLSPWDRHDPRYGNDLLYNQYYLAQLQELLKKYPNVREIWFDGAKGANAKNMTYYFSDWFSMVKELQSSINIFSDAGPDVRWVGDETGSAGYTCWSTINRTSLSIGSPDIIQYINTGDPKGTDWLPAECDVSIRKGWFWHKSESPKKLSELLDIYYNSVGRNCVLLLNVPPNTSGLITEVDANRLKEFRSAIKTIFHQNLAEDCFVKVSSQRGGFGPEKMLDSDHLWSYWAPRDDDDEKDHWVEIWAKEGRLRFNVVRIQEAIGLGQRIKRHEIYVDGKLIIKATTVGYKRLHRLDGGEVHARGVRIRIRKARGVPLISSIGLHYDPFWHSKFTVS

SEQ ID NO: 54095 - DNA, 625 bp, Glycine max
  misc_feature (1)..(625): Ceres Seq. ID no. 13637911
ttattgtattttgcagccaaatctggtattgatccttccgattgtgttgagcttgcaaaacatgtgaaattgagctgcccaaacctagtgttctctggcctaatgacgataggaatgccagactataccttaactccacagaactttcagacactatcaaattgcagaactgaagtatgcaaggcacttgaaatgcccgaggaggaatgtgaactgtcaatgggcatgtctggtgattttgagttagcggtatggaatagtttactaaagttatttagcagttcaaattttcttgatagttacgttgcatgattgcacctgcaattatctcagttctggatgctttttagctcatcagggaatgaattgacgattatcataggaatggggttctttgatacttgatgtgatgatgatagtgtatgaagattcctaacaaacaacacactaacatattctttattattgaatagaattcagacaggtcccactaaataaatgaaaatcattaaattatacagggggtaagacccacatcatttagtgaacctctcatgaatgccacccaacaatagagtaatagatagcttgttgttagcattttttatggtttgtagatattgtt

SEQ ID NO: 54096 - protein, 103 aa, Glycine max
  peptide (1)..(103): Ceres Seq. ID no. 13637912
  misc_feature (6)..(84): Pfam Name: Alanine racemase, N-terminal domain Pfam Description: Alanine racemase, N-terminal domain
  misc_feature (6)..(84): Homolog of NCBI NO: 16930823 NR Description: proline synthetase co-transcribed [Mus musculus]
  misc_feature (6)..(84): Homolog of NCBI NO: 6005842 NR Description: proline synthetase co-transcribed homolog
  misc_feature (7)..(84): Homolog of NCBI NO: 11359716 NR Description: conserved hypothetical protein [imported] -
  misc_feature (56)..(84): Homolog of NCBI NO: 7445224 NR Description: hypothetical protein F10M23.200 - Arabidopsis
  misc_feature (6)..(50): Homolog of NCBI NO: 7445224 NR Description: hypothetical protein F10M23.200 - Arabidopsis
  misc_feature (6)..(84): Homolog of NCBI NO: 18391333 NR Description: Proline synthetase associated protein -related
  misc_feature (6)..(84): Homolog of NCBI NO: 30682530 NR Description: Proline synthetase associated protein -related
  misc_feature (6)..(84): Homolog of NCBI NO: 18416879 NR Description: Proline synthetase associated protein -related
  misc_feature (6)..(84): Homolog of NCBI NO: 14030629 NR Description: AT4g26860/F10M23_200 [Arabidopsis thaliana]
  misc_feature (6)..(103): Homolog of NCBI NO: 19386824 NR Description: B1147A04.19 [Oryza sativa (japonica
LLYFAAKSGIDPSDCVELAKHVKLSCPNLVFSGLMTIGMPDYTLTPQNFQTLSNCRTEVCKALEMPEEECELSMGMSGDFELAVWNSLLKLFSSSNFLDSYVA

SEQ ID NO: 54097 - protein, 69 aa, Glycine max
  peptide (1)..(69): Ceres Seq. ID no. 13637913
  misc_feature (1)..(50): Homolog of NCBI NO: 16930823 NR Description: proline synthetase co-transcribed [Mus musculus]
  misc_feature (1)..(50): Homolog of NCBI NO: 6005842 NR Description: proline synthetase co-transcribed homolog
  misc_feature (1)..(50): Homolog of NCBI NO: 11359716 NR Description: conserved hypothetical protein [imported] -
  misc_feature (22)..(50): Homolog of NCBI NO: 7445224 NR Description: hypothetical protein F10M23.200 - Arabidopsis
  misc_feature (1)..(16): Homolog of NCBI NO: 7445224 NR Description: hypothetical protein F10M23.200 - Arabidopsis
  misc_feature (1)..(50): Homolog of NCBI NO: 18391333 NR Description: Proline synthetase associated protein -related
  misc_feature (1)..(50): Homolog of NCBI NO: 30682530 NR Description: Proline synthetase associated protein -related
  misc_feature (1)..(50): Homolog of NCBI NO: 18416879 NR Description: Proline synthetase associated protein -related
  misc_feature (1)..(50): Homolog of NCBI NO: 14030629 NR Description: AT4g26860/F10M23_200 [Arabidopsis thaliana]
  misc_feature (1)..(69): Homolog of NCBI NO: 19386824 NR Description: B1147A04.19 [Oryza sativa (japonica
MTIGMPDYTLTPQNFQTLSNCRTEVCKALEMPEEECELSMGMSGDFELAVWNSLLKLFSSSNFLDSYVA

SEQ ID NO: 54098 - protein, 65 aa, Glycine max
  peptide (1)..(65): Ceres Seq. ID no. 13637914
  misc_feature (1)..(46): Homolog of NCBI NO: 16930823 NR Description: proline synthetase co-transcribed [Mus musculus]
  misc_feature (1)..(46): Homolog of NCBI NO: 6005842 NR Description: proline synthetase co-transcribed homolog
  misc_feature (1)..(46): Homolog of NCBI NO: 11359716 NR Description: conserved hypothetical protein [imported] -
  misc_feature (18)..(46): Homolog of NCBI NO: 7445224 NR Description: hypothetical protein F10M23.200 - Arabidopsis
  misc_feature (1)..(12): Homolog of NCBI NO: 7445224 NR Description: hypothetical protein F10M23.200 - Arabidopsis
  misc_feature (1)..(46): Homolog of NCBI NO: 18391333 NR Description: Proline synthetase associated protein -related
  misc_feature (1)..(46): Homolog of NCBI NO: 30682530 NR Description: Proline synthetase associated protein -related
  misc_feature (1)..(46): Homolog of NCBI NO: 18416879 NR Description: Proline synthetase associated protein -related
  misc_feature (1)..(46): Homolog of NCBI NO: 14030629 NR Description: AT4g26860/F10M23_200 [Arabidopsis thaliana]
  misc_feature (1)..(65): Homolog of NCBI NO: 19386824 NR Description: B1147A04.19 [Oryza sativa (japonica
MPDYTLTPQNFQTLSNCRTEVCKALEMPEEECELSMGMSGDFELAVWNSLLKLFSSSNFLDSYVA

SEQ ID NO: 54099 - DNA, 1526 bp, Glycine max
  misc_feature (1)..(1526): Ceres Seq. ID no. 14313049
gatggctcaagagatgaatgagcctgcaatgaacatcatagagcagtctcaagttgctcctccacagggctcccttccttcaacaattatccccctcactttcctcgacattccatggctcctcagccgccacgccagacgcatcttcttctacgactttccctttcctaccacccacttcttgcaaacagcacttcctattctgaaacattctctttcccacacactccaacacttcttcccctttgcctccaatctcatcctccctccacacccccacgtcccttacatccgttaccttgagggtgactctctctcattcactgtcgcagagtccagtcctgcagacttcactcttctcacatcagattcccctcgagactcctatgactggcaaccccttgctccggtgctaccctcgcaacgtacttctcacgacggcacgtgcgagttccccctcatggccattcaggtaacgatgataccaaactctggattcagcatctgtgttatcttcgaccacgttgcaggagatgggagaacccttcatcatttcatgaagttttgggcctccgtttgcaaggccaaaggagatttggatttcccttgctctatgcctctacccttatatgataggaacatagtcaaagaccccaaagggctcatgcacgtttacatgcaagacctgagaaattcagcgttgctaactaaacagttccgaggggttttacgtggtgtttacactgacaaggtacgtgcgactttcatattcagtagcgaacaagctcagaaattaaaaaaatgggtctctcttaaatgtaacggttcgcggactttacatatatcaacctttgtggtgacatgttctttgatatgggtgtgtatgctcagatcagaacaaaaggaaaaggaaggtaataatgagccatgcaacatcggattttccgcagactgtcataaccatcctcagttttcattaccttcaaactactttgggaattgtttgatccctctcattacaaggctaaagaggggtgagttggtggaacaaaatgggattgttgcagctgcaaatgccattgaaaagaacattagagatttcaagagtgatgctttgagatgggccgaaacaacgatgtcagatattagaggcttaaggaaatctggtcaatctcttgtagtgattgttggctcgccaaagctgaccgcgtacaacactgactttggttgggggaagcccgtgaagtctgaagtggtgaatcttgattctgtgggaacagtttctctctctgattgtagggaccaagaaggtggaattcaggttggaatggtactcgagaggattcgaatgaacaatttcaccagcatcttggaagaacaccttagtcatgttgccgttcttgactaattaaaccattcacgtattagtcatcaataaactgtatctttcacgctctgcgtttaatttgtttgttatactcttttatggttttaaataaatattaaaagtattgttgttcggtatg

SEQ ID NO: 54100 - protein, 468 aa, Glycine max
  peptide (1)..(468): Ceres Seq. ID no. 14313050
  misc_feature (11)..(459): Pfam Name: Transferase family Pfam Description: Transferase family
  misc_feature (12)..(455): Homolog of NCBI NO: 7415646 NR Description: anthocyanin acyltransferase [Perilla frutescens]
  misc_feature (6)..(466): Homolog of NCBI NO: 7415597 NR Description: acyltransferase homolog [Gentiana triflora]
  misc_feature (8)..(466): Homolog of NCBI NO: 28396175 NR Description: malonyl-coenzyme A: anthocyanidin
  misc_feature (1)..(463): Homolog of NCBI NO: 27372445 NR Description: putative malonyl CoA:anthocyanidin
  misc_feature (346)..(465): Homolog of NCBI NO: 15218822 NR Description: transferase family [Arabidopsis thaliana]
  misc_feature (1)..(292): Homolog of NCBI NO: 15218822 NR Description: transferase family [Arabidopsis thaliana]
  misc_feature (10)..(459): Homolog of NCBI NO: 38503267 NR Description: Anthocyanin 5-aromatic acyltransferase (5AT)
  misc_feature (6)..(461): Homolog of NCBI NO: 27372443 NR Description: malonyl CoA:anthocyanin
  misc_feature (1)..(465): Homolog of NCBI NO: 15219594 NR Description: transferase family [Arabidopsis thaliana]
  misc_feature (1)..(465): Homolog of NCBI NO: 25406735 NR Description: protein F21B7.12 [imported] - Arabidopsis
MAQEMNEPAMNIIEQSQVAPPQGSLPSTIIPLTFLDIPWLLSRHARRIFFYDFPFPTTHFLQTALPILKHSLSHTLQHFFPFASNLILPPHPHVPYIRYLEGDSLSFTVAESSPADFTLLTSDSPRDSYDWQPLAPVLPSQRTSHDGTCEFPLMAIQVTMIPNSGFSICVIFDHVAGDGRTLHHFMKFWASVCKAKGDLDFPCSMPLPLYDRNIVKDPKGLMHVYMQDLRNSALLTKQFRGVLRGVYTDKVRATFIFSSEQAQKLKKWVSLKCNGSRTLHISTFVVTCSLIWVCMLRSEQKEKEGNNEPCNIGFSADCHNHPQFSLPSNYFGNCLIPLITRLKRGELVEQNGIVAAANAIEKNIRDFKSDALRWAETTMSDIRGLRKSGQSLVVIVGSPKLTAYNTDFGWGKPVKSEVVNLDSVGTVSLSDCRDQEGGIQVGMVLERIRMNNFTSILEEHLSHVAVLD

SEQ ID NO: 54101 - protein, 464 aa, Glycine max
  peptide (1)..(464): Ceres Seq. ID no. 14313051
  misc_feature (7)..(455): Pfam Name: Transferase family Pfam Description: Transferase family
  misc_feature (8)..(451): Homolog of NCBI NO: 7415646 NR Description: anthocyanin acyltransferase [Perilla frutescens]
  misc_feature (2)..(462): Homolog of NCBI NO: 7415597 NR Description: acyltransferase homolog [Gentiana triflora]
  misc_feature (4)..(462): Homolog of NCBI NO: 28396175 NR Description: malonyl-coenzyme A: anthocyanidin
  misc_feature (1)..(459): Homolog of NCBI NO: 27372445 NR Description: putative malonyl CoA:anthocyanidin
  misc_feature (342)..(461): Homolog of NCBI NO: 15218822 NR Description: transferase family [Arabidopsis thaliana]
  misc_feature (1)..(288): Homolog of NCBI NO: 15218822 NR Description: transferase family [Arabidopsis thaliana]
  misc_feature (6)..(455): Homolog of NCBI NO: 38503267 NR Description: Anthocyanin 5-aromatic acyltransferase (5AT)
  misc_feature (2)..(457): Homolog of NCBI NO: 27372443 NR Description: malonyl CoA:anthocyanin
  misc_feature (1)..(461): Homolog of NCBI NO: 15219594 NR Description: transferase family [Arabidopsis thaliana]
  misc_feature (1)..(461): Homolog of NCBI NO: 25406735 NR Description: protein F21B7.12 [imported] - Arabidopsis
MNEPAMNIIEQSQVAPPQGSLPSTIIPLTFLDIPWLLSRHARRIFFYDFPFPTTHFLQTALPILKHSLSHTLQHFFPFASNLILPPHPHVPYIRYLEGDSLSFTVAESSPADFTLLTSDSPRDSYDWQPLAPVLPSQRTSHDGTCEFPLMAIQVTMIPNSGFSICVIFDHVAGDGRTLHHFMKFWASVCKAKGDLDFPCSMPLPLYDRNIVKDPKGLMHVYMQDLRNSALLTKQFRGVLRGVYTDKVRATFIFSSEQAQKLKKWVSLKCNGSRTLHISTFVVTCSLIWVCMLRSEQKEKEGNNEPCNIGFSADCHNHPQFSLPSNYFGNCLIPLITRLKRGELVEQNGIVAAANAIEKNIRDFKSDALRWAETTMSDIRGLRKSGQSLVVIVGSPKLTAYNTDFGWGKPVKSEVVNLDSVGTVSLSDCRDQEGGIQVGMVLERIRMNNFTSILEEHLSHVAVLD

SEQ ID NO: 54102 - protein, 459 aa, Glycine max
  peptide (1)..(459): Ceres Seq. ID no. 14313052
  misc_feature (2)..(450): Pfam Name: Transferase family Pfam Description: Transferase family
  misc_feature (3)..(446): Homolog of NCBI NO: 7415646 NR Description: anthocyanin acyltransferase [Perilla frutescens]
  misc_feature (1)..(457): Homolog of NCBI NO: 7415597 NR Description: acyltransferase homolog [Gentiana triflora]
  misc_feature (1)..(457): Homolog of NCBI NO: 28396175 NR Description: malonyl-coenzyme A: anthocyanidin
  misc_feature (1)..(454): Homolog of NCBI NO: 27372445 NR Description: putative malonyl CoA:anthocyanidin
  misc_feature (337)..(456): Homolog of NCBI NO: 15218822 NR Description: transferase family [Arabidopsis thaliana]
  misc_feature (1)..(283): Homolog of NCBI NO: 15218822 NR Description: transferase family [Arabidopsis thaliana]
  misc_feature (1)..(450): Homolog of NCBI NO: 38503267 NR Description: Anthocyanin 5-aromatic acyltransferase (5AT)
  misc_feature (1)..(452): Homolog of NCBI NO: 27372443 NR Description: malonyl CoA:anthocyanin
  misc_feature (1)..(456): Homolog of NCBI NO: 15219594 NR Description: transferase family [Arabidopsis thaliana]
  misc_feature (1)..(456): Homolog of NCBI NO: 25406735 NR Description: protein F21B7.12 [imported] - Arabidopsis
MNIIEQSQVAPPQGSLPSTIIPLTFLDIPWLLSRHARRIFFYDFPFPTTHFLQTALPILKHSLSHTLQHFFPFASNLILPPHPHVPYIRYLEGDSLSFTVAESSPADFTLLTSDSPRDSYDWQPLAPVLPSQRTSHDGTCEFPLMAIQVTMIPNSGFSICVIFDHVAGDGRTLHHFMKFWASVCKAKGDLDFPCSMPLPLYDRNIVKDPKGLMHVYMQDLRNSALLTKQFRGVLRGVYTDKVRATFIFSSEQAQKLKKWVSLKCNGSRTLHISTFVVTCSLIWVCMLRSEQKEKEGNNEPCNIGFSADCHNHPQFSLPSNYFGNCLIPLITRLKRGELVEQNGIVAAANAIEKNIRDFKSDALRWAETTMSDIRGLRKSGQSLVVIVGSPKLTAYNTDFGWGKPVKSEVVNLDSVGTVSLSDCRDQEGGIQVGMVLERIRMNNFTSILEEHLSHVAVLD

SEQ ID NO: 54103 - DNA, 1491 bp, Glycine max
  misc_feature (1)..(1491): Ceres Seq. ID no. 15224590
cgagtcactgataaggaattgtttttcgtgtcccccctcgagtgccttacggaaagccccccccccattcttctcgaacgttattctcaaaaggaaacacactctgctttagtagaagaagaaactgcgctcagcatcattgaacactagcaaactcggtgacaacgaagtggtttctgtgaagcaagaaagaaacaattttacggatgctcctcaacgaaaggaaataaagcttttaaaacatgtgatggaaagtggtttttggagcaacgttccgcagcgattgcaaacaaagaggaagagtaaattcaatggcaagggagcactttctacatcgaaggcagtgctttctaaaacgaaggaagcactttctagatccaatgaagcactttctgcacccaaggaagctctttctaaaccgaaggaagcacattctagacccaataaagcacattctagacccaataaagcactttctacacccaagaaagcgctttctacactgaaggaagcactttctagatccaaggaaaagctaaacagtggagattttgatatttacttgaagaaaatatggaagattttctcagaagataggttgaggcattgtacatactgacagcttatggtttagtctctacaggacctcttcatctaaagacaaagtgttgacttggattaaaaaagaacctattttctcaaagtcatatgtttttgtgttcctatagtctgctggggtcattggagcctcgtgccattttggtgaaagcttggaatcaactaccagatcacggtgcatgttgttgctggattctcttgaaatggccaatccaagacggctcaaacctaagattagaagatttgttttagatatttatagaacaggggacaggcctgaggctaagcatctcatatctcgaattccttttttggtgcccaaggtaattatcaccctttctattattttcatctccagtgtaaccaaatattgaagaaaaaacaaattattgtatgtgccacaacaaagagatggtaatgaatgtggatttttcatcctctatttcattaatttgtttttggagtgtgcgcctgataactttagcatggagggataccctttgtaagttatctcatttgctgttcttgaaatttatttattaaaacatgcattttgattcagttatgtttgacattgacatgctgcagatgaaaaaagattggtttacctttgaagacctagataggttttatgagagacttggttcactgaattagatgtccccaaacttgaccagactagtgattagatctaacatactttattgttgactgattatattgtattggtaacggggggatttgttcatataggataataggaggcaagcataacttagaagtttcttctattagagagggtactctcttctatgcatgtagttcaactctattggaattatattatgttctggaattgatgtttacactact

SEQ ID NO: 54104 - protein, 123 aa, Glycine max
  peptide (1)..(123): Ceres Seq. ID no. 15224591
MESGFWSNVPQRLQTKRKSKFNGKGALSTSKAVLSKTKEALSRSNEALSAPKEALSKPKEAHSRPNKAHSRPNKALSTPKKALSTLKEALSRSKEKLNSGDFDIYLKKIWKIFSEDRLRHCTY

SEQ ID NO: 54105 - protein, 64 aa, Glycine max
  peptide (1)..(64): Ceres Seq. ID no. 15224592
MAREHFLHRRQCFLKRRKHFLDPMKHFLHPRKLFLNRRKHILDPIKHILDPIKHFLHPRKRFLH

SEQ ID NO: 54106 - protein, 64 aa, Glycine max
  peptide (1)..(64): Ceres Seq. ID no. 15224593
  misc_feature (21)..(49): Homolog of NCBI NO: 15228382 NR Description: hypothetical protein [Arabidopsis thaliana]
MLLLDSLEMANPRRLKPKIRRFVLDIYRTGDRPEAKHLISRIPFLVPKVIITLSIIFISSVTKY

SEQ ID NO: 54107 - DNA, 1173 bp, Glycine max
  misc_feature (1)..(1173): Ceres Seq. ID no. 14307300
gaagtgcgagattaacagtcgctaacaaacaagttcgttagtgcagtgaagctctccagttcctatgcatagcaacaacggtgattgccttaaagaagccatagtcagaccacctgattgcttatgaaggactcaagcatagagtgtttgaggtctccttgactgatcttcaaggggatgaggatgatgcattcaagaagattaggttgagagctgaagatgtgcaagggaagaatgttctgacaaatttctagggaatggatttcacaacagagttgctgaggtcattggtacgaaaatggcaaactcttattgaagcccatgtggatgtaaagacaactgataattacacattcagaatgttttgcattggatttaccaagagaagagctaaccaggtgaagagaacctgttatgcacaatcaagccagaaactgaacttgaatttgctcctatgatcattgaccctatggtgatatcggcaccagaaactcaatcagcagcagctagcatactagttgcagaaactgaacttgaatttgctgtttgtgactgttgtggactaacagttttatgtgcaccccagcctatatagaaagaatcagacagaggtactttggaaaatgggtttgtgggttgtgtgctgaggctgttaaggatgaaattgtgaggtctgagagggttgtttgcacacaaaaagcaatggctaagcacatgaacttctacaaaaacttcaaggcatcagggcctcatccaaatccgacagtgcacttgatatcagccttgagacagattcttagaaggactttggattctcctagagtaaggtccacaccaaaaagtccaaccaagactcgcacaaaaattcatggttctgtgcttacaacatctgagagctgtttccctacctctctgaagggttgtgatgaagggaatacttgggtaattagttggataaaaatggaagcaggaagcagaaataaggacaaaaaaatataagctgcaaaagtttagatgttcaattgtagttttggccagtacagaacttgcaatatgtttgttagaaaatttgaacataagttggtcaagaattttgcttcactcagaccagttatgtaccttgttttgtatggcatttatttgtttgaaataagaaaaatatgttcttaactg

SEQ ID NO: 54108 - protein, 141 aa, Glycine max
  peptide (1)..(141): Ceres Seq. ID no. 14307301
  misc_feature (2)..(131): Homolog of NCBI NO: 7715593 NR Description: F20B17.20 [Arabidopsis thaliana]
  misc_feature (3)..(116): Homolog of NCBI NO: 25405692 NR Description: F15I1.18 [imported] - Arabidopsis thaliana
  misc_feature (2)..(112): Homolog of NCBI NO: 15242032 NR Description: expressed protein [Arabidopsis thaliana]
  misc_feature (2)..(110): Homolog of NCBI NO: 15218503 NR Description: expressed protein [Arabidopsis thaliana]
MCTPAYIERIRQRYFGKWVCGLCAEAVKDEIVRSERVVCTQKAMAKHMNFYKNFKASGPHPNPTVHLISALRQILRRTLDSPRVRSTPKSPTKTRTKIHGSVLTTSESCFPTSLKGCDEGNTWVISWIKMEAGSRNKDKKI

SEQ ID NO: 54109 - protein, 98 aa, Glycine max
  peptide (1)..(98): Ceres Seq. ID no. 14307302
  misc_feature (1)..(88): Homolog of NCBI NO: 7715593 NR Description: F20B17.20 [Arabidopsis thaliana]
  misc_feature (1)..(73): Homolog of NCBI NO: 25405692 NR Description: F15I1.18 [imported] - Arabidopsis thaliana
  misc_feature (1)..(69): Homolog of NCBI NO: 15242032 NR Description: expressed protein [Arabidopsis thaliana]
  misc_feature (1)..(67): Homolog of NCBI NO: 15218503 NR Description: expressed protein [Arabidopsis thaliana]
MAKHMNFYKNFKASGPHPNPTVHLISALRQILRRTLDSPRVRSTPKSPTKTRTKIHGSVLTTSESCFPTSLKGCDEGNTWVISWIKMEAGSRNKDKKI

SEQ ID NO: 54110 - protein, 94 aa, Glycine max
  peptide (1)..(94): Ceres Seq. ID no. 14307303
  misc_feature (1)..(84): Homolog of NCBI NO: 7715593 NR Description: F20B17.20 [Arabidopsis thaliana]
  misc_feature (1)..(69): Homolog of NCBI NO: 25405692 NR Description: F15I1.18 [imported] - Arabidopsis thaliana
  misc_feature (1)..(65): Homolog of NCBI NO: 15242032 NR Description: expressed protein [Arabidopsis thaliana]
  misc_feature (1)..(63): Homolog of NCBI NO: 15218503 NR Description: expressed protein [Arabidopsis thaliana]
MNFYKNFKASGPHPNPTVHLISALRQILRRTLDSPRVRSTPKSPTKTRTKIHGSVLTTSESCFPTSLKGCDEGNTWVISWIKMEAGSRNKDKKI

SEQ ID NO: 54111 - DNA, 1740 bp, Glycine max
  misc_feature (1)..(1740): Ceres Seq. ID no. 14306957
ataaaatgatttctgcgatttcgtgggtgcccaaaggggtttcgaagtcggaacctgtcgtggctgatcctcctcccgaagaggaaatccaagaaatcatcgccagccacactaccaaaagtggagacagtgacaatgaagtcgccaacaacgatgaagttgtggcacaagcattaaacgtagctgatgcagttggcaaagcctccaccggaagctgtgacgaaataacccttgcgttgaaggaccttgacatggaccgttatgacgacgaagatgaaggaattgaggtgttcagttctggaattggtgatctttattatcccagtaacgacatggatccatatatcaaagataaaaacgatgatgattctgatgaactcgaagacatgatcatcaacccaactgattctgtcattgtttatgcatgtactgaggatgaagtcagttatcttgaggttttggttatcgaggatgccgattctagcgaaatgaacgtgtatcctcaccataatatcattattccagcatttccactctgcacagcttggctcgattgcccccttaaaggaggagaaagagggaacttcatagctgttggttcaatggaaccttccatagaaatttgggaccttgatgttattgatgaggtgcagccatgtgtggttttgggtggatttgaagagaaaaagaaaaaggggaaaaagaaaccaatcaaatacaaagatgacagtcacactgactcagtacttggtcttgcttggaacaaggagtacaggaatatactagcaagtgccggtgctgacaagcgagtgaagatttgggatgtggttgccgggaagtgtgatattacaatggagcatcactcggacaaggttcaagcagttgcttggaatcatcatgcaccacaggttcttcttagtggttcatttgatcatactgttgtcttgaaggatggaaggatgccatcacattctggctataagtggtcagtcacagctgatgtagagagcttggcatgggatctacatactgagcactcgtttgtggtgagtcttgaagatggtattgtcaagggttttgatattcggactgccaactctgattcctcatcagatctgagttctacatttacacttcatgcacatgacaaagctgttacctcagtatcctataatccatcggcacccaatctccttgccactggatccatggacaaaacggtaaaactttgggatttgtcgaacaaccaaccctcttgtgtagcatctaaatctccgagagcaggggttatctttaaaatttctttctcagaggacaaccccttcttgttggctataggaggctcaaagggaaaattgcaagtttgggataccttatctgatgctggcatttctcgaagatatgggaattacaagaatagatcgcaatctgggtcttgaagttgtagtcttccttcccgtactgctcaagttgtgttgcataaatcaaaattttgggattcactgcaaaaatatgttcttgatttattctttttttgcatcctaataacctttatttgaaatagcataaatttgaattggttgaacgtaaattgttgtgattccaatttccaacactttatagtttagtttggacatcttttgggggggcaaggcccaatgaaaactacaaagacatgctccctctgttttatgttatttgccgtttaagataatgtatatatccatggtcttaacactt

SEQ ID NO: 54112 - protein, 478 aa, Glycine max
  peptide (1)..(478): Ceres Seq. ID no. 14306958
  misc_feature (375)..(456): Pfam Name: WD domain, G-beta repeat Pfam Description: WD domain, G-beta repeat
  misc_feature (42)..(467): Homolog of NCBI NO: 40746560 NR Description: hypothetical protein AN0310.2 [Aspergillus
  misc_feature (2)..(465): Homolog of NCBI NO: 32422969 NR Description: hypothetical protein [Neurospora crassa]
  misc_feature (2)..(468): Homolog of NCBI NO: 20161737 NR Description: B1033B05.3 [Oryza sativa (japonica
  misc_feature (251)..(427): Homolog of NCBI NO: 15236974 NR Description: transducin / WD-40 repeat protein family
  misc_feature (3)..(223): Homolog of NCBI NO: 15236974 NR Description: transducin / WD-40 repeat protein family
  misc_feature (1)..(101): Homolog of NCBI NO: 7485426 NR Description: hypothetical protein F13C5.70 - Arabidopsis
  misc_feature (94)..(256): Homolog of NCBI NO: 7485426 NR Description: hypothetical protein F13C5.70 - Arabidopsis
  misc_feature (258)..(472): Homolog of NCBI NO: 7485426 NR Description: hypothetical protein F13C5.70 - Arabidopsis
  misc_feature (24)..(473): Homolog of NCBI NO: 18415193 NR Description: transducin / WD-40 repeat protein family
  misc_feature (2)..(474): Homolog of NCBI NO: 18415195 NR Description: transducin / WD-40 repeat protein family
KMISAISWVPKGVSKSEPVVADPPPEEEIQEIIASHTTKSGDSDNEVANNDEVVAQALNVADAVGKASTGSCDEITLALKDLDMDRYDDEDEGIEVFSSGIGDLYYPSNDMDPYIKDKNDDDSDELEDMIINPTDSVIVYACTEDEVSYLEVLVIEDADSSEMNVYPHHNIIIPAFPLCTAWLDCPLKGGERGNFIAVGSMEPSIEIWDLDVIDEVQPCVVLGGFEEKKKKGKKKPIKYKDDSHTDSVLGLAWNKEYRNILASAGADKRVKIWDVVAGKCDITMEHHSDKVQAVAWNHHAPQVLLSGSFDHTVVLKDGRMPSHSGYKWSVTADVESLAWDLHTEHSFVVSLEDGIVKGFDIRTANSDSSSDLSSTFTLHAHDKAVTSVSYNPSAPNLLATGSMDKTVKLWDLSNNQPSCVASKSPRAGVIFKISFSEDNPFLLAIGGSKGKLQVWDTLSDAGISRRYGNYKNRSQSGS

SEQ ID NO: 54113 - protein, 477 aa, Glycine max
  peptide (1)..(477): Ceres Seq. ID no. 14306959
  misc_feature (374)..(455): Pfam Name: WD domain, G-beta repeat Pfam Description: WD domain, G-beta repeat
  misc_feature (41)..(466): Homolog of NCBI NO: 40746560 NR Description: hypothetical protein AN0310.2 [Aspergillus
  misc_feature (1)..(464): Homolog of NCBI NO: 32422969 NR Description: hypothetical protein [Neurospora crassa]
  misc_feature (1)..(467): Homolog of NCBI NO: 20161737 NR Description: B1033B05.3 [Oryza sativa (japonica
  misc_feature (250)..(426): Homolog of NCBI NO: 15236974 NR Description: transducin / WD-40 repeat protein family
  misc_feature (2)..(222): Homolog of NCBI NO: 15236974 NR Description: transducin / WD-40 repeat protein family
  misc_feature (1)..(100): Homolog of NCBI NO: 7485426 NR Description: hypothetical protein F13C5.70 - Arabidopsis
  misc_feature (93)..(255): Homolog of NCBI NO: 7485426 NR Description: hypothetical protein F13C5.70 - Arabidopsis
  misc_feature (257)..(471): Homolog of NCBI NO: 7485426 NR Description: hypothetical protein F13C5.70 - Arabidopsis
  misc_feature (23)..(472): Homolog of NCBI NO: 18415193 NR Description: transducin / WD-40 repeat protein family
  misc_feature (1)..(473): Homolog of NCBI NO: 18415195 NR Description: transducin / WD-40 repeat protein family
MISAISWVPKGVSKSEPVVADPPPEEEIQEIIASHTTKSGDSDNEVANNDEVVAQALNVADAVGKASTGSCDEITLALKDLDMDRYDDEDEGIEVFSSGIGDLYYPSNDMDPYIKDKNDDDSDELEDMIINPTDSVIVYACTEDEVSYLEVLVIEDADSSEMNVYPHHNIIIPAFPLCTAWLDCPLKGGERGNFIAVGSMEPSIEIWDLDVIDEVQPCVVLGGFEEKKKKGKKKPIKYKDDSHTDSVLGLAWNKEYRNILASAGADKRVKIWDVVAGKCDITMEHHSDKVQAVAWNHHAPQVLLSGSFDHTVVLKDGRMPSHSGYKWSVTADVESLAWDLHTEHSFVVSLEDGIVKGFDIRTANSDSSSDLSSTFTLHAHDKAVTSVSYNPSAPNLLATGSMDKTVKLWDLSNNQPSCVASKSPRAGVIFKISFSEDNPFLLAIGGSKGKLQVWDTLSDAGISRRYGNYKNRSQSGS

SEQ ID NO: 54114 - protein, 395 aa, Glycine max
  peptide (1)..(395): Ceres Seq. ID no. 14306960
  misc_feature (292)..(373): Pfam Name: WD domain, G-beta repeat Pfam Description: WD domain, G-beta repeat
  misc_feature (1)..(384): Homolog of NCBI NO: 40746560 NR Description: hypothetical protein AN0310.2 [Aspergillus
  misc_feature (1)..(382): Homolog of NCBI NO: 32422969 NR Description: hypothetical protein [Neurospora crassa]
  misc_feature (1)..(385): Homolog of NCBI NO: 20161737 NR Description: B1033B05.3 [Oryza sativa (japonica
  misc_feature (168)..(344): Homolog of NCBI NO: 15236974 NR Description: transducin / WD-40 repeat protein family
  misc_feature (1)..(140): Homolog of NCBI NO: 15236974 NR Description: transducin / WD-40 repeat protein family
  misc_feature (1)..(18): Homolog of NCBI NO: 7485426 NR Description: hypothetical protein F13C5.70 - Arabidopsis
  misc_feature (11)..(173): Homolog of NCBI NO: 7485426 NR Description: hypothetical protein F13C5.70 - Arabidopsis
  misc_feature (175)..(389): Homolog of NCBI NO: 7485426 NR Description: hypothetical protein F13C5.70 - Arabidopsis
  misc_feature (1)..(390): Homolog of NCBI NO: 18415193 NR Description: transducin / WD-40 repeat protein family
  misc_feature (1)..(391): Homolog of NCBI NO: 18415195 NR Description: transducin / WD-40 repeat protein family
MDRYDDEDEGIEVFSSGIGDLYYPSNDMDPYIKDKNDDDSDELEDMIINPTDSVIVYACTEDEVSYLEVLVIEDADSSEMNVYPHHNIIIPAFPLCTAWLDCPLKGGERGNFIAVGSMEPSIEIWDLDVIDEVQPCVVLGGFEEKKKKGKKKPIKYKDDSHTDSVLGLAWNKEYRNILASAGADKRVKIWDVVAGKCDITMEHHSDKVQAVAWNHHAPQVLLSGSFDHTVVLKDGRMPSHSGYKWSVTADVESLAWDLHTEHSFVVSLEDGIVKGFDIRTANSDSSSDLSSTFTLHAHDKAVTSVSYNPSAPNLLATGSMDKTVKLWDLSNNQPSCVASKSPRAGVIFKISFSEDNPFLLAIGGSKGKLQVWDTLSDAGISRRYGNYKNRSQSGS

SEQ ID NO: 54115 - DNA, 1322 bp, Glycine max
  misc_feature (1)..(1322): Ceres Seq. ID no. 14313694
aaaaaaaaaccgcatctgttccgtgtaaggagaagtcacaaaatttctcagctcctgcctgtatacttcacatggcctaatcccacagtcgcacactcttccaccctgccatcaccaatcatcaacacaacgcccattattatttaaaaatccttaatatattattattcttcgtccatcgctttttcttgaagactacttcatccttcttattagtttctttttatttcaatctttctcactcgcacgcacgcacgcacagtctctagtggtaccgtgccggttcatttgcttcatccaccacctcattttcagagatttcgtgcactcaacaaactctcatccacccatggcgtcatcactatcaacaatagctctattcctgccccaatcgctctatattaagccccgcctggcgccacggcctcttcctccccctcaattccgctcccttttcctaacctcaccggcgggtgctcgtactgctactgtcatgcctagaagggcggcagtcatcgtgtcggcggcgacggcggagacgccgaagaagaagggcgaatcgaaagggttcgtggaagagatgaggttcgtggcgatgaggctgcacacgagggaccaggccagggagggcgagaaggaggtcaagcagcccgaggagaaagccgttaccaagtgggacccatccgtcgaagggtacctgaaatttcttgtggacagtaagctcgtttatgacacgctggagaaaatcgttcaagaggctcctcatccttcttatgctgaattcagaaacactggattggaaaggtctgcaagtttggcagaagatttggagttgttcaaggagcaaggttataccattcctgaaccttcttctcctggtcttacctatgcacaatatcttaaggagttatctgtgaaggatccccaagcattcatttgccatttttacaatatctactttgctcattcagctggtggtcgaatgattgggaaaaaggttgctgaaaagttacttaacaacaaggcgttggagttctacaaatgggatgatgaccttccacgattgttgcagaatgtgagagacaagttgaataaagttgctgaaccttggagtcgggaagaaaaggaccactgtctggaagaaacagaaaaatcattcaagctctctggagagattctccgtttgattttatcatgataatagatgccctgctatctgtgtaattatgggtattaaagtgcatggcggaagccaacaacattaccatatgtgaattattttatttccaatacgcaaaggaataatagaactgatgttgatt

SEQ ID NO: 54116 - protein, 282 aa, Glycine max
  peptide (1)..(282): Ceres Seq. ID no. 14313695
  misc_feature (88)..(279): Pfam Name: Heme oxygenase Pfam Description: Heme oxygenase
MASSLSTIALFLPQSLYIKPRLAPRPLPPPQFRSLFLTSPAGARTATVMPRRAAVIVSAATAETPKKKGESKGFVEEMRFVAMRLHTRDQAREGEKEVKQPEEKAVTKWDPSVEGYLKFLVDSKLVYDTLEKIVQEAPHPSYAEFRNTGLERSASLAEDLELFKEQGYTIPEPSSPGLTYAQYLKELSVKDPQAFICHFYNIYFAHSAGGRMIGKKVAEKLLNNKALEFYKWDDDLPRLLQNVRDKLNKVAEPWSREEKDHCLEETEKSFKLSGEILRLILS

SEQ ID NO: 54117 - protein, 234 aa, Glycine max
  peptide (1)..(234): Ceres Seq. ID no. 14313696
  misc_feature (40)..(231): Pfam Name: Heme oxygenase Pfam Description: Heme oxygenase
MPRRAAVIVSAATAETPKKKGESKGFVEEMRFVAMRLHTRDQAREGEKEVKQPEEKAVTKWDPSVEGYLKFLVDSKLVYDTLEKIVQEAPHPSYAEFRNTGLERSASLAEDLELFKEQGYTIPEPSSPGLTYAQYLKELSVKDPQAFICHFYNIYFAHSAGGRMIGKKVAEKLLNNKALEFYKWDDDLPRLLQNVRDKLNKVAEPWSREEKDHCLEETEKSFKLSGEILRLILS

SEQ ID NO: 54118 - protein, 205 aa, Glycine max
  peptide (1)..(205): Ceres Seq. ID no. 14313697
  misc_feature (11)..(202): Pfam Name: Heme oxygenase Pfam Description: Heme oxygenase
MRFVAMRLHTRDQAREGEKEVKQPEEKAVTKWDPSVEGYLKFLVDSKLVYDTLEKIVQEAPHPSYAEFRNTGLERSASLAEDLELFKEQGYTIPEPSSPGLTYAQYLKELSVKDPQAFICHFYNIYFAHSAGGRMIGKKVAEKLLNNKALEFYKWDDDLPRLLQNVRDKLNKVAEPWSREEKDHCLEETEKSFKLSGEILRLILS

SEQ ID NO: 54119 - DNA, 1649 bp, Glycine max
  misc_feature (1)..(1649): Ceres Seq. ID no. 14314879
gaacaaagaaatcttcaatttgaattccaatgggtgaagagcgatccgagatagtgttcttcgatgtggagaccagcgttccgacccgggcggggcagggttttgcgcttctggaattcggcgccattttggtttgccccaggacgctcacggagctccgcgattactccactctcgtccgcccagccaacctctccgtcatcacccccttgtccgagcgctgcaacggcatcaacgccgccgctgtctccgccgcccctaccttcgccgacattgctcacctcgtttacgacctcctccacgggaggatttgggcggggcataacatcataagattcgactgtgttcggattagagatgcgtttgctgagattaatcagccaccgcctgaacctaaggggaccattgactcgctggttttgttgactcaaaagtttggtagaagagctggtgacatgaagatggctactcttgctacttattttgggcttggacgccagacacataggagcttggatgatgttcggatgaatcttgaagtcctcaaatactgtgcaacagttctattcttggagtcaagtctcccagatatattcactgcaaatagttgggtttcaccaaatgctactacaagaagccgcagtaatgggaaatctccatcacagtggggcttattaaatattaataaagattctgtattatcatctcctgcaactgaatccaaagacaaaaatcgtccaataatttcttttgcattgagcagcccaaaagggaatgtctcgaatattgcagatcctaacatggatcaatcagatccttttaacttgagcactcttgaggctgaaataaaaagagaatccattaagtcagatgtcgccttggaggaaaaacccatgcaagagtcaactgatttggcttcctcatcttctgtatctcagccttgcagcagctctattgctgttttggaacctgatggaatatgtataccttctattgatgcatctcttgttccatcttttcgtggcagtcaaagaatagagttactgcatgaaggtttcctgtttcagcttcattgtactgatttgaaagtgcggtttggaataaactcaaagttttttgatagtgctggccggccacgattgagttttgtggttgatccatcaccaagtctatgtaatgttcttgatgcatgtgaccgtgtagcacagaagttaaccgtggattctggtagcagctctgattggaggcctgttgttattaggaaagaaggcttcttcaactatcctactgtcagattacacatacctactgcagtagtggcagacattgctatttatgccacggaaatatatcaaagagaatcatctggaacagtgcaaagacttctcttcagtaagtttgatgctgcagaacttggttccttgttcatgcctgggacatttgttgatgccgtcttctccttagatccgtatgattatcagcagaatgcagggattaaattagttgccaaaaaattgatcattcatagcaaatagaaggaaattgataattaagtataggttagttattacatgctaaggttgatagattaaatattggttatgctgtaaagttagttccatttcatgtttgtagttcaattgaggttc

SEQ ID NO: 54120 - protein, 501 aa, Glycine max
  peptide (1)..(501): Ceres Seq. ID no. 14314880
  misc_feature (220)..(499): Homolog of NCBI NO: 30697522 NR Description: exonuclease protein family [Arabidopsis thaliana]
  misc_feature (6)..(206): Homolog of NCBI NO: 15236050 NR Description: exonuclease protein family [Arabidopsis thaliana]
  misc_feature (7)..(306): Homolog of NCBI NO: 37534222 NR Description: putative exonuclease [Oryza sativa (japonica
  misc_feature (3)..(301): Homolog of NCBI NO: 30697522 NR Description: exonuclease protein family [Arabidopsis thaliana]
  misc_feature (340)..(501): Homolog of NCBI NO: 37534220 NR Description: putative exonuclease [Oryza sativa (japonica
  misc_feature (1)..(190): Homolog of NCBI NO: 37534220 NR Description: putative exonuclease [Oryza sativa (japonica
  misc_feature (2)..(498): Homolog of NCBI NO: 15221225 NR Description: exonuclease protein family [Arabidopsis thaliana]
  misc_feature (3)..(499): Homolog of NCBI NO: 9757860 NR Description: exonuclease-like protein [Arabidopsis thaliana]
  misc_feature (252)..(500): Homolog of NCBI NO: 15240840 NR Description: exonuclease protein family [Arabidopsis thaliana]
  misc_feature (3)..(262): Homolog of NCBI NO: 15240840 NR Description: exonuclease protein family [Arabidopsis thaliana]
MGEERSEIVFFDVETSVPTRAGQGFALLEFGAILVCPRTLTELRDYSTLVRPANLSVITPLSERCNGINAAAVSAAPTFADIAHLVYDLLHGRIWAGHNIIRFDCVRIRDAFAEINQPPPEPKGTIDSLVLLTQKFGRRAGDMKMATLATYFGLGRQTHRSLDDVRMNLEVLKYCATVLFLESSLPDIFTANSWVSPNATTRSRSNGKSPSQWGLLNINKDSVLSSPATESKDKNRPIISFALSSPKGNVSNIADPNMDQSDPFNLSTLEAEIKRESIKSDVALEEKPMQESTDLASSSSVSQPCSSSIAVLEPDGICIPSIDASLVPSFRGSQRIELLHEGFLFQLHCTDLKVRFGINSKFFDSAGRPRLSFVVDPSPSLCNVLDACDRVAQKLTVDSGSSSDWRPVVIRKEGFFNYPTVRLHIPTAVVADIAIYATEIYQRESSGTVQRLLFSKFDAAELGSLFMPGTFVDAVFSLDPYDYQQNAGIKLVAKKLIIHSK

SEQ ID NO: 54121 - protein, 359 aa, Glycine max
  peptide (1)..(359): Ceres Seq. ID no. 14314881
  misc_feature (78)..(357): Homolog of NCBI NO: 30697522 NR Description: exonuclease protein family [Arabidopsis thaliana]
  misc_feature (1)..(64): Homolog of NCBI NO: 15236050 NR Description: exonuclease protein family [Arabidopsis thaliana]
  misc_feature (1)..(164): Homolog of NCBI NO: 37534222 NR Description: putative exonuclease [Oryza sativa (japonica
  misc_feature (1)..(159): Homolog of NCBI NO: 30697522 NR Description: exonuclease protein family [Arabidopsis thaliana]
  misc_feature (198)..(359): Homolog of NCBI NO: 37534220 NR Description: putative exonuclease [Oryza sativa (japonica
  misc_feature (1)..(48): Homolog of NCBI NO: 37534220 NR Description: putative exonuclease [Oryza sativa (japonica
  misc_feature (1)..(356): Homolog of NCBI NO: 15221225 NR Description: exonuclease protein family [Arabidopsis thaliana]
  misc_feature (1)..(357): Homolog of NCBI NO: 9757860 NR Description: exonuclease-like protein [Arabidopsis thaliana]
  misc_feature (110)..(358): Homolog of NCBI NO: 15240840 NR Description: exonuclease protein family [Arabidopsis thaliana]
  misc_feature (1)..(120): Homolog of NCBI NO: 15240840 NR Description: exonuclease protein family [Arabidopsis thaliana]
MKMATLATYFGLGRQTHRSLDDVRMNLEVLKYCATVLFLESSLPDIFTANSWVSPNATTRSRSNGKSPSQWGLLNINKDSVLSSPATESKDKNRPIISFALSSPKGNVSNIADPNMDQSDPFNLSTLEAEIKRESIKSDVALEEKPMQESTDLASSSSVSQPCSSSIAVLEPDGICIPSIDASLVPSFRGSQRIELLHEGFLFQLHCTDLKVRFGINSKFFDSAGRPRLSFVVDPSPSLCNVLDACDRVAQKLTVDSGSSSDWRPVVIRKEGFFNYPTVRLHIPTAVVADIAIYATEIYQRESSGTVQRLLFSKFDAAELGSLFMPGTFVDAVFSLDPYDYQQNAGIKLVAKKLIIHSK

SEQ ID NO: 54122 - protein, 357 aa, Glycine max
  peptide (1)..(357): Ceres Seq. ID no. 14314882
  misc_feature (76)..(355): Homolog of NCBI NO: 30697522 NR Description: exonuclease protein family [Arabidopsis thaliana]
  misc_feature (1)..(62): Homolog of NCBI NO: 15236050 NR Description: exonuclease protein family [Arabidopsis thaliana]
  misc_feature (1)..(162): Homolog of NCBI NO: 37534222 NR Description: putative exonuclease [Oryza sativa (japonica
  misc_feature (1)..(157): Homolog of NCBI NO: 30697522 NR Description: exonuclease protein family [Arabidopsis thaliana]
  misc_feature (196)..(357): Homolog of NCBI NO: 37534220 NR Description: putative exonuclease [Oryza sativa (japonica
  misc_feature (1)..(46): Homolog of NCBI NO: 37534220 NR Description: putative exonuclease [Oryza sativa (japonica
  misc_feature (1)..(354): Homolog of NCBI NO: 15221225 NR Description: exonuclease protein family [Arabidopsis thaliana]
  misc_feature (1)..(355): Homolog of NCBI NO: 9757860 NR Description: exonuclease-like protein [Arabidopsis thaliana]
  misc_feature (108)..(356): Homolog of NCBI NO: 15240840 NR Description: exonuclease protein family [Arabidopsis thaliana]
  misc_feature (1)..(118): Homolog of NCBI NO: 15240840 NR Description: exonuclease protein family [Arabidopsis thaliana]
MATLATYFGLGRQTHRSLDDVRMNLEVLKYCATVLFLESSLPDIFTANSWVSPNATTRSRSNGKSPSQWGLLNINKDSVLSSPATESKDKNRPIISFALSSPKGNVSNIADPNMDQSDPFNLSTLEAEIKRESIKSDVALEEKPMQESTDLASSSSVSQPCSSSIAVLEPDGICIPSIDASLVPSFRGSQRIELLHEGFLFQLHCTDLKVRFGINSKFFDSAGRPRLSFVVDPSPSLCNVLDACDRVAQKLTVDSGSSSDWRPVVIRKEGFFNYPTVRLHIPTAVVADIAIYATEIYQRESSGTVQRLLFSKFDAAELGSLFMPGTFVDAVFSLDPYDYQQNAGIKLVAKKLIIHSK

SEQ ID NO: 54123 - DNA, 1896 bp, Glycine max
  misc_feature (1)..(1896): Ceres Seq. ID no. 14303500
gtacaatcccacatcctcaagatatatattggcttgttccggcgtgcagagaatctcacaggtgcggaatatgaagccatagacatgatactactgaagaaacacgaaatggtcttcaattttgtctctgcactaataacaacaatattgctctccggagccatagttgaagttaagggtcttccacttcacacggattcacgatggatcgtcaacgaagatgggcagagggtcaagctggcatgtgtgaattgggtgtcccatttggaagctgtggtggccgaagggctcagcaaaaagcccgtggatgtcatttcaaatggaataaagtccatgggcttcaactgtgtcaggctcacttggcctatagttttggtcactaatgactctcttgcttctctcaccgttagaagctcctttcagaaccttgccctccttgaatccattgctggtgtccaaaccaacaacccctccattatcgatcttcccctcatccaagcttttcaggcagtggtgaaaagtctcggtgacaacgatgtgatggtgatattggacaaccacataacccagccagggtggtgctgcagtaactccgacggcaatggcttcttcggtgacaaattttttgacccaaaccagtggatattgggcctcaccaagatggcctccctcttcaatggagtcactaatgtggtgggcatgagcttgaggaatgagctccgagggcccaaacagaatgtcaacgattggtacaagtacatggtgaaaggagcagaagcgattcatgcagcaaatccggatgttcttgttattttatccggcctgaattttgataaagacttatctttcattcaaaatcggccagtgagcctcacatttaaggggaaattagtatatgaggcacactggtatgccttcactgatggtcaagcttgggttaatgggaatccaaaccaagtatgtggacaagtggcaggaaatatgatgagaacctcaggctttttagtgaaccaaggatggccattgtttattagtgagtttggtggagacttgagaggtaccaacgtgaatgacaaccgctaccttaactgcttcttggcagtggcagctgagcttgacttggattgggccttgtggacacttgttggtagctactactttagacaaggagttataggaatggaagagttttatgggattcttagttgggactggacccaagttagaaataccactttcttaaacagaatctctgccctccaacttccatttcgaggtccaggaataacaagaggcaatccatacaaattgatattccatcctttgaccggtttgtgtgtcataagaaagtcattactagacccattgacattgggtccttgctatttatctgatggctggaaatacacaccccagaaaattctatcaataaaaggaacttacttctgcatacaagcagagaatgaagggatgcctgcaaaacttgggataatatgctcagatcctaactctagatgggaaatgatctcagattcgaagttgcatctctcatctaaactcagcgatgattctaatgtatgcttagatgtagacgataacaacaacattgtgaccaatgcttgcaaatgcttgagcagagatcgtacatgtgaccctagtagccaatggttcaaacttattgacagcggaaggagatcaatgttgacaacctcaacatcatccatgctaaattcatcagacctttatggaaaccattaagctcagcataagttgttttaagaatattactgtaaatttctctaaccatgtacttatgttttaatggcaggaaagtgatgcattaaacatgtccatatgtatgactattgaattcaatacataatataccactattag

SEQ ID NO: 54124 - protein, 585 aa, Glycine max
  peptide (1)..(585): Ceres Seq. ID no. 14303501
  misc_feature (68)..(386): Pfam Name: Cellulase (glycosyl hydrolase family 5) Pfam Description: Cellulase (glycosyl hydrolase family 5)
  misc_feature (62)..(415): Homolog of NCBI NO: 32410513 NR Description: hypothetical protein [Neurospora crassa]
  misc_feature (62)..(459): Homolog of NCBI NO: 15237397 NR Description: glycosyl hydrolase family 5/cellulase
  misc_feature (62)..(559): Homolog of NCBI NO: 15237972 NR Description: glycosyl hydrolase family 5/cellulase
  misc_feature (48)..(565): Homolog of NCBI NO: 15231513 NR Description: glycosyl hydrolase family 5/cellulase
  misc_feature (45)..(564): Homolog of NCBI NO: 38345244 NR Description: OSJNBb0011N17.5 [Oryza sativa (japonica
  misc_feature (63)..(572): Homolog of NCBI NO: 38345246 NR Description: OSJNBb0011N17.7 [Oryza sativa (japonica
  misc_feature (45)..(580): Homolog of NCBI NO: 38345245 NR Description: OSJNBb0011N17.6 [Oryza sativa (japonica
  misc_feature (48)..(565): Homolog of NCBI NO: 11994430 NR Description: gene_id:MTC11.2~unknown protein [Arabidopsis
  misc_feature (62)..(560): Homolog of NCBI NO: 15231514 NR Description: glycosyl hydrolase family 5/cellulase
  misc_feature (62)..(576): Homolog of NCBI NO: 15222185 NR Description: glycosyl hydrolase family 5/cellulase
VQSHILKIYIGLFRRAENLTGAEYEAIDMILLKKHEMVFNFVSALITTILLSGAIVEVKGLPLHTDSRWIVNEDGQRVKLACVNWVSHLEAVVAEGLSKKPVDVISNGIKSMGFNCVRLTWPIVLVTNDSLASLTVRSSFQNLALLESIAGVQTNNPSIIDLPLIQAFQAVVKSLGDNDVMVILDNHITQPGWCCSNSDGNGFFGDKFFDPNQWILGLTKMASLFNGVTNVVGMSLRNELRGPKQNVNDWYKYMVKGAEAIHAANPDVLVILSGLNFDKDLSFIQNRPVSLTFKGKLVYEAHWYAFTDGQAWVNGNPNQVCGQVAGNMMRTSGFLVNQGWPLFISEFGGDLRGTNVNDNRYLNCFLAVAAELDLDWALWTLVGSYYFRQGVIGMEEFYGILSWDWTQVRNTTFLNRISALQLPFRGPGITRGNPYKLIFHPLTGLCVIRKSLLDPLTLGPCYLSDGWKYTPQKILSIKGTYFCIQAENEGMPAKLGIICSDPNSRWEMISDSKLHLSSKLSDDSNVCLDVDDNNNIVTNACKCLSRDRTCDPSSQWFKLIDSGRRSMLTTSTSSMLNSSDLYGNH

SEQ ID NO: 54125 - protein, 557 aa, Glycine max
  peptide (1)..(557): Ceres Seq. ID no. 14303502
  misc_feature (40)..(358): Pfam Name: Cellulase (glycosyl hydrolase family 5) Pfam Description: Cellulase (glycosyl hydrolase family 5)
  misc_feature (34)..(387): Homolog of NCBI NO: 32410513 NR Description: hypothetical protein [Neurospora crassa]
  misc_feature (34)..(431): Homolog of NCBI NO: 15237397 NR Description: glycosyl hydrolase family 5/cellulase
  misc_feature (34)..(531): Homolog of NCBI NO: 15237972 NR Description: glycosyl hydrolase family 5/cellulase
  misc_feature (20)..(537): Homolog of NCBI NO: 15231513 NR Description: glycosyl hydrolase family 5/cellulase
  misc_feature (17)..(536): Homolog of NCBI NO: 38345244 NR Description: OSJNBb0011N17.5 [Oryza sativa (japonica
  misc_feature (35)..(544): Homolog of NCBI NO: 38345246 NR Description: OSJNBb0011N17.7 [Oryza sativa (japonica
  misc_feature (17)..(552): Homolog of NCBI NO: 38345245 NR Description: OSJNBb0011N17.6 [Oryza sativa (japonica
  misc_feature (20)..(537): Homolog of NCBI NO: 11994430 NR Description: gene_id:MTC11.2~unknown protein [Arabidopsis
  misc_feature (34)..(532): Homolog of NCBI NO: 15231514 NR Description: glycosyl hydrolase family 5/cellulase
  misc_feature (34)..(548): Homolog of NCBI NO: 15222185 NR Description: glycosyl hydrolase family 5/cellulase
MILLKKHEMVFNFVSALITTILLSGAIVEVKGLPLHTDSRWIVNEDGQRVKLACVNWVSHLEAVVAEGLSKKPVDVISNGIKSMGFNCVRLTWPIVLVTNDSLASLTVRSSFQNLALLESIAGVQTNNPSIIDLPLIQAFQAVVKSLGDNDVMVILDNHITQPGWCCSNSDGNGFFGDKFFDPNQWILGLTKMASLFNGVTNVVGMSLRNELRGPKQNVNDWYKYMVKGAEAIHAANPDVLVILSGLNFDKDLSFIQNRPVSLTFKGKLVYEAHWYAFTDGQAWVNGNPNQVCGQVAGNMMRTSGFLVNQGWPLFISEFGGDLRGTNVNDNRYLNCFLAVAAELDLDWALWTLVGSYYFRQGVIGMEEFYGILSWDWTQVRNTTFLNRISALQLPFRGPGITRGNPYKLIFHPLTGLCVIRKSLLDPLTLGPCYLSDGWKYTPQKILSIKGTYFCIQAENEGMPAKLGIICSDPNSRWEMISDSKLHLSSKLSDDSNVCLDVDDNNNIVTNACKCLSRDRTCDPSSQWFKLIDSGRRSMLTTSTSSMLNSSDLYGNH

SEQ ID NO: 54126 - protein, 549 aa, Glycine max
  peptide (1)..(549): Ceres Seq. ID no. 14303503
  misc_feature (32)..(350): Pfam Name: Cellulase (glycosyl hydrolase family 5) Pfam Description: Cellulase (glycosyl hydrolase family 5)
  misc_feature (26)..(379): Homolog of NCBI NO: 32410513 NR Description: hypothetical protein [Neurospora crassa]
  misc_feature (26)..(423): Homolog of NCBI NO: 15237397 NR Description: glycosyl hydrolase family 5/cellulase
  misc_feature (26)..(523): Homolog of NCBI NO: 15237972 NR Description: glycosyl hydrolase family 5/cellulase
  misc_feature (12)..(529): Homolog of NCBI NO: 15231513 NR Description: glycosyl hydrolase family 5/cellulase
  misc_feature (9)..(528): Homolog of NCBI NO: 38345244 NR Description: OSJNBb0011N17.5 [Oryza sativa (japonica
  misc_feature (27)..(536): Homolog of NCBI NO: 38345246 NR Description: OSJNBb0011N17.7 [Oryza sativa (japonica
  misc_feature (9)..(544): Homolog of NCBI NO: 38345245 NR Description: OSJNBb0011N17.6 [Oryza sativa (japonica
  misc_feature (12)..(529): Homolog of NCBI NO: 11994430 NR Description: gene_id:MTC11.2~unknown protein [Arabidopsis
  misc_feature (26)..(524): Homolog of NCBI NO: 15231514 NR Description: glycosyl hydrolase family 5/cellulase
  misc_feature (26)..(540): Homolog of NCBI NO: 15222185 NR Description: glycosyl hydrolase family 5/cellulase
MVFNFVSALITTILLSGAIVEVKGLPLHTDSRWIVNEDGQRVKLACVNWVSHLEAVVAEGLSKKPVDVISNGIKSMGFNCVRLTWPIVLVTNDSLASLTVRSSFQNLALLESIAGVQTNNPSIIDLPLIQAFQAVVKSLGDNDVMVILDNHITQPGWCCSNSDGNGFFGDKFFDPNQWILGLTKMASLFNGVTNVVGMSLRNELRGPKQNVNDWYKYMVKGAEAIHAANPDVLVILSGLNFDKDLSFIQNRPVSLTFKGKLVYEAHWYAFTDGQAWVNGNPNQVCGQVAGNMMRTSGFLVNQGWPLFISEFGGDLRGTNVNDNRYLNCFLAVAAELDLDWALWTLVGSYYFRQGVIGMEEFYGILSWDWTQVRNTTFLNRISALQLPFRGPGITRGNPYKLIFHPLTGLCVIRKSLLDPLTLGPCYLSDGWKYTPQKILSIKGTYFCIQAENEGMPAKLGIICSDPNSRWEMISDSKLHLSSKLSDDSNVCLDVDDNNNIVTNACKCLSRDRTCDPSSQWFKLIDSGRRSMLTTSTSSMLNSSDLYGNH

SEQ ID NO: 54127 - DNA, 921 bp, Glycine max
  misc_feature (1)..(921): Ceres Seq. ID no. 14307370
gataaatagctgcaaccactttgatcttgactcatacaggtcccttgtagccacttgttctgtcttgaaaatccattttgcttcatttcattcctcacatttatttttcttccatggagaacttgttgggtctgctgagaattcatgttgaaaaaggtgtcaatcttgccatcagggatgtggtgagcagtgacccttatgttgtcatcaaaatgggcaagcagaagctgaagactcgggtagtcaataagaatctaaatcctgaatggaatgatgacttgaccttgtctatctctgaccctcatgctccaattcatctacatgtgtatgacaaggacacatttagcatggatgacaaaatgggggatgcagagtttttcataggtccatttattgaagcagtgaagatgcgcttatcaagtctccccaacaatactatagttacaaaagtgctacctagcagacaaaacagtttagctgaagagagtcacattgtgtggaaggatggcaaagttgtccaaaacatggttcttagactaagaaatgttgagactggggaagtggagctccagttgcattggattgacattcctggttcaaggcatctctagatcacagtccaaagcatggttcttacttcttagacttgccatattgtgaaaattagatttgcagcttcataaaccagcaggcagcagcaccttatgctttaatttctcctatccttttatctctttcgcacaacataaaaactgtttaatacgttggtattgcaattactagtagttaccgaaaaagaatgggagatgtagtttccctagctgtaatttagactttgaattatctgctagtcttgtgtaataatgtacaagaaatgtaacagaaagatgttgcacttaattagaacatccttagttaacg

SEQ ID NO: 54128 - protein, 165 aa, Glycine max
  peptide (1)..(165): Ceres Seq. ID no. 14307371
  misc_feature (8)..(87): Pfam Name: C2 domain Pfam Description: C2 domain
  misc_feature (1)..(164): Homolog of NCBI NO: 33146442 NR Description: zinc finger and C2 domain protein-like
  misc_feature (5)..(165): Homolog of NCBI NO: 18409675 NR Description: C2 domain-containing protein [Arabidopsis
  misc_feature (1)..(165): Homolog of NCBI NO: 13430460 NR Description: unknown protein [Arabidopsis thaliana]
  misc_feature (1)..(165): Homolog of NCBI NO: 18409682 NR Description: C2 domain-containing protein [Arabidopsis
  misc_feature (1)..(165): Homolog of NCBI NO: 15219500 NR Description: C2 domain-containing protein [Arabidopsis
  misc_feature (1)..(162): Homolog of NCBI NO: 18408493 NR Description: C2 domain-containing protein [Arabidopsis
  misc_feature (1)..(163): Homolog of NCBI NO: 15240322 NR Description: C2 domain-containing protein [Arabidopsis
  misc_feature (1)..(161): Homolog of NCBI NO: 25405940 NR Description: protein T1N15.21 [imported] - Arabidopsis
  misc_feature (1)..(161): Homolog of NCBI NO: 15221907 NR Description: C2 domain-containing protein [Arabidopsis
  misc_feature (1)..(165): Homolog of NCBI NO: 30684739 NR Description: C2 domain-containing protein [Arabidopsis
MENLLGLLRIHVEKGVNLAIRDVVSSDPYVVIKMGKQKLKTRVVNKNLNPEWNDDLTLSISDPHAPIHLHVYDKDTFSMDDKMGDAEFFIGPFIEAVKMRLSSLPNNTIVTKVLPSRQNSLAEESHIVWKDGKVVQNMVLRLRNVETGEVELQLHWIDIPGSRHL

SEQ ID NO: 54129 - protein, 132 aa, Glycine max
  peptide (1)..(132): Ceres Seq. ID no. 14307372
  misc_feature (1)..(54): Pfam Name: C2 domain Pfam Description: C2 domain
  misc_feature (1)..(131): Homolog of NCBI NO: 33146442 NR Description: zinc finger and C2 domain protein-like
  misc_feature (1)..(132): Homolog of NCBI NO: 18409675 NR Description: C2 domain-containing protein [Arabidopsis
  misc_feature (1)..(132): Homolog of NCBI NO: 13430460 NR Description: unknown protein [Arabidopsis thaliana]
  misc_feature (1)..(132): Homolog of NCBI NO: 18409682 NR Description: C2 domain-containing protein [Arabidopsis
  misc_feature (1)..(132): Homolog of NCBI NO: 15219500 NR Description: C2 domain-containing protein [Arabidopsis
  misc_feature (1)..(129): Homolog of NCBI NO: 18408493 NR Description: C2 domain-containing protein [Arabidopsis
  misc_feature (1)..(130): Homolog of NCBI NO: 15240322 NR Description: C2 domain-containing protein [Arabidopsis
  misc_feature (1)..(128): Homolog of NCBI NO: 25405940 NR Description: protein T1N15.21 [imported] - Arabidopsis
  misc_feature (1)..(128): Homolog of NCBI NO: 15221907 NR Description: C2 domain-containing protein [Arabidopsis
  misc_feature (1)..(132): Homolog of NCBI NO: 30684739 NR Description: C2 domain-containing protein [Arabidopsis
MGKQKLKTRVVNKNLNPEWNDDLTLSISDPHAPIHLHVYDKDTFSMDDKMGDAEFFIGPFIEAVKMRLSSLPNNTIVTKVLPSRQNSLAEESHIVWKDGKVVQNMVLRLRNVETGEVELQLHWIDIPGSRHL

SEQ ID NO: 54130 - protein, 87 aa, Glycine max
  peptide (1)..(87): Ceres Seq. ID no. 14307373
  misc_feature (1)..(86): Homolog of NCBI NO: 33146442 NR Description: zinc finger and C2 domain protein-like
  misc_feature (1)..(87): Homolog of NCBI NO: 18409675 NR Description: C2 domain-containing protein [Arabidopsis
  misc_feature (1)..(87): Homolog of NCBI NO: 13430460 NR Description: unknown protein [Arabidopsis thaliana]
  misc_feature (1)..(87): Homolog of NCBI NO: 18409682 NR Description: C2 domain-containing protein [Arabidopsis
  misc_feature (1)..(87): Homolog of NCBI NO: 15219500 NR Description: C2 domain-containing protein [Arabidopsis
  misc_feature (1)..(84): Homolog of NCBI NO: 18408493 NR Description: C2 domain-containing protein [Arabidopsis
  misc_feature (1)..(85): Homolog of NCBI NO: 15240322 NR Description: C2 domain-containing protein [Arabidopsis
  misc_feature (1)..(83): Homolog of NCBI NO: 25405940 NR Description: protein T1N15.21 [imported] - Arabidopsis
  misc_feature (1)..(83): Homolog of NCBI NO: 15221907 NR Description: C2 domain-containing protein [Arabidopsis
  misc_feature (1)..(87): Homolog of NCBI NO: 30684739 NR Description: C2 domain-containing protein [Arabidopsis
MDDKMGDAEFFIGPFIEAVKMRLSSLPNNTIVTKVLPSRQNSLAEESHIVWKDGKVVQNMVLRLRNVETGEVELQLHWIDIPGSRHL

SEQ ID NO: 54131 - DNA, 1063 bp, Glycine max
  misc_feature (1)..(1063): Ceres Seq. ID no. 14307324
gaagaagaagggttttaagagagagagagagagagcgaataattaaaaggcccttgccttcacctttggtgtccaaagatattgctagagagaagaactagttgttcaattagcttcttcttcttcttcttcttccacccttcttgtttgagtaaattaagaagcttgagatcagacatgtcgagctgcagcatcgatgttgcgcctgagcaactctgctacatcccctgcaacttctgcaatattgttcttgcggtgagtgttccatgcagtagcctgtttgacattgtgaccgttcgatgtgggcactgcaccaatctatggtccgtgaacatggccgccgcgtttcagtcactgtcatggcaagatgttcagggatctgggcactgcaatccagagtacaggattgacactggctccacgtccaaatgcaacaataggattgcaatgcgtgcgcccaccactcatgtaactgaggaaagggttgtgaacaggcctcccgagaagaggcagcgcgtaccttctgcttataaccagtttataaaggaagagattcagaggatcaaagccaataatcctgatatcagtcatagagaagctttcagtacagctgcaaagaactgggcacattttccccatattcatttcgggctgatgttggagagcaacaaccaagttaagatggagaatgtttctgagaagcatttaatgtcaagggctgcgctattgaataaatgaatgctatcttcatcatatcacaggacttgggtttcatttgaatctgtcaagtaaacaatgtcctgacctaaaaggagttttaaggacaatcatctctttttcttcgttagtgtacttgtcactacttactacttgttcaatggatgcttttcacttaatttgaagcaagaatgctagttttcccttgtcatctttcaataagttctatcttctagctgattcagatgaaagatgaaatatgtatgctactgttttaagctcgatggcgagaacatttatcatcatattttttggtaatactaataaacttttaagttaatttgtt

SEQ ID NO: 54132 - protein, 186 aa, Glycine max
  peptide (1)..(186): Ceres Seq. ID no. 14307325
  misc_feature (8)..(159): Pfam Name: YABBY protein Pfam Description: YABBY protein
  misc_feature (2)..(53): Homolog of NCBI NO: 32330677 NR Description: yabby15 protein [Zea mays]
  misc_feature (104)..(160): Homolog of NCBI NO: 32330677 NR Description: yabby15 protein [Zea mays]
  misc_feature (5)..(168): Homolog of NCBI NO: 4928751 NR Description: YABBY2 [Arabidopsis thaliana]
  misc_feature (1)..(53): Homolog of NCBI NO: 18406725 NR Description: abnormal floral organs protein (AFO) (FIL) YABBY1
  misc_feature (104)..(175): Homolog of NCBI NO: 18406725 NR Description: abnormal floral organs protein (AFO) (FIL) YABBY1
  misc_feature (3)..(159): Homolog of NCBI NO: 11280864 NR Description: hypothetical protein 2 [imported] - rice
  misc_feature (1)..(175): Homolog of NCBI NO: 27804377 NR Description: MADS-box transcription factor CDM51
  misc_feature (1)..(53): Homolog of NCBI NO: 37535908 NR Description: hypothetical protein [Oryza sativa (japonica
  misc_feature (88)..(176): Homolog of NCBI NO: 37535908 NR Description: hypothetical protein [Oryza sativa (japonica
  misc_feature (8)..(169): Homolog of NCBI NO: 30683176 NR Description: expressed protein [Arabidopsis thaliana]
MSSCSIDVAPEQLCYIPCNFCNIVLAVSVPCSSLFDIVTVRCGHCTNLWSVNMAAAFQSLSWQDVQGSGHCNPEYRIDTGSTSKCNNRIAMRAPTTHVTEERVVNRPPEKRQRVPSAYNQFIKEEIQRIKANNPDISHREAFSTAAKNWAHFPHIHFGLMLESNNQVKMENVSEKHLMSRAALLNK

SEQ ID NO: 54133 - protein, 134 aa, Glycine max
  peptide (1)..(134): Ceres Seq. ID no. 14307326
  misc_feature (1)..(107): Pfam Name: YABBY protein Pfam Description: YABBY protein
  misc_feature (1)..(18): Homolog of NCBI NO: 18411242 NR Description: YABBY3 axial regulator -related [Arabidopsis
  misc_feature (53)..(123): Homolog of NCBI NO: 18411242 NR Description: YABBY3 axial regulator -related [Arabidopsis
  misc_feature (52)..(127): Homolog of NCBI NO: 32330681 NR Description: yabby10 protein [Zea mays]
  misc_feature (52)..(108): Homolog of NCBI NO: 32330677 NR Description: yabby15 protein [Zea mays]
  misc_feature (1)..(116): Homolog of NCBI NO: 4928751 NR Description: YABBY2 [Arabidopsis thaliana]
  misc_feature (52)..(123): Homolog of NCBI NO: 18406725 NR Description: abnormal floral organs protein (AFO) (FIL) YABBY1
  misc_feature (1)..(107): Homolog of NCBI NO: 11280864 NR Description: hypothetical protein 2 [imported] - rice
  misc_feature (1)..(123): Homolog of NCBI NO: 27804377 NR Description: MADS-box transcription factor CDM51
  misc_feature (36)..(124): Homolog of NCBI NO: 37535908 NR Description: hypothetical protein [Oryza sativa (japonica
  misc_feature (1)..(117): Homolog of NCBI NO: 30683176 NR Description: expressed protein [Arabidopsis thaliana]
MAAAFQSLSWQDVQGSGHCNPEYRIDTGSTSKCNNRIAMRAPTTHVTEERVVNRPPEKRQRVPSAYNQFIKEEIQRIKANNPDISHREAFSTAAKNWAHFPHIHFGLMLESNNQVKMENVSEKHLMSRAALLNK

SEQ ID NO: 54134 - protein, 96 aa, Glycine max
  peptide (1)..(96): Ceres Seq. ID no. 14307327
  misc_feature (1)..(69): Pfam Name: YABBY protein Pfam Description: YABBY protein
  misc_feature (1)..(86): Homolog of NCBI NO: 8778574 NR Description: F28C11.6 [Arabidopsis thaliana]
  misc_feature (15)..(85): Homolog of NCBI NO: 18411242 NR Description: YABBY3 axial regulator -related [Arabidopsis
  misc_feature (14)..(89): Homolog of NCBI NO: 32330681 NR Description: yabby10 protein [Zea mays]
  misc_feature (14)..(70): Homolog of NCBI NO: 32330677 NR Description: yabby15 protein [Zea mays]
  misc_feature (1)..(78): Homolog of NCBI NO: 4928751 NR Description: YABBY2 [Arabidopsis thaliana]
  misc_feature (14)..(85): Homolog of NCBI NO: 18406725 NR Description: abnormal floral organs protein (AFO) (FIL) YABBY1
  misc_feature (1)..(69): Homolog of NCBI NO: 11280864 NR Description: hypothetical protein 2 [imported] - rice
  misc_feature (1)..(85): Homolog of NCBI NO: 27804377 NR Description: MADS-box transcription factor CDM51
  misc_feature (1)..(86): Homolog of NCBI NO: 37535908 NR Description: hypothetical protein [Oryza sativa (japonica
  misc_feature (1)..(79): Homolog of NCBI NO: 30683176 NR Description: expressed protein [Arabidopsis thaliana]
MRAPTTHVTEERVVNRPPEKRQRVPSAYNQFIKEEIQRIKANNPDISHREAFSTAAKNWAHFPHIHFGLMLESNNQVKMENVSEKHLMSRAALLNK

SEQ ID NO: 54135 - DNA, 933 bp, Glycine max
  misc_feature (1)..(933): Ceres Seq. ID no. 13593919
aaawtcaaaatawtgaaaagccgcgagggaggtttcgtttcgtttcgttcagttcacacattctattctctatcgattcctcttccctttttctcaatccactacaccacagttatgaggagccaacttgtgtgtaatgggtgtaggagcatcttggtttaccctagaggagcaaccaatgtttgctgtgcgttgtgcaacaccattacctctgttcctcctcctggaatggacatgtcacaactctattgtggaggctgtacgacattgctaatgtacacacgtggtgctacaagtgtgagatgttcctgctgtcacactattaaccttgtaccagaatctaatcaagtcattcattgtgcgaactgccggacaacactcatgtatccttatggagcttcctcagtcaaatgtgcaatttgttgctatattactaatatcagtatgaccaatggaaggctttcaattcctgtacagagaccaaatggaacagccaactctggaacagtatcttcaacttcatcgtcaatgccttattctcagagccaaactgtcgtagtagaaaatcctatgtctgttgattcgagtgggaaattggtgaggaatgtcgttgtgggcgttacaacagataagaaatgatacttgccacatgaaaatgttacacaagtgtaaagggaacatcatttgactcgtcaactgctggtgcttgaaaatattgttcgtgtatatgaaattgcagcttataagttaaagatatttttgttctaaatgagatttagactgatttaatttacatatatgtatacgaggaccagtggaaagggcacacaacttgtcatttattgaattgccaaggtcctctttttgctgcagttgtatcacagggtttttcgcatctcgaattacaagtcctagatgcacatttgattcctc

SEQ ID NO: 54136 - protein, 212 aa, Glycine max
  peptide (1)..(212): Ceres Seq. ID no. 15221255
  misc_feature (39)..(112): Homolog of NCBI NO: 17981378 NR Description: zinc finger protein LSD1 [Brassica oleracea]
  misc_feature (36)..(113): Homolog of NCBI NO: 25403154 NR Description: probable zinc-finger protein, 7043-7771
  misc_feature (39)..(172): Homolog of NCBI NO: 29467531 NR Description: P0582D05.23 [Oryza sativa (japonica
  misc_feature (36)..(147): Homolog of NCBI NO: 18398482 NR Description: zinc-finger protein -related [Arabidopsis
  misc_feature (40)..(152): Homolog of NCBI NO: 34905200 NR Description: P0672D01.2 [Oryza sativa (japonica
  misc_feature (36)..(155): Homolog of NCBI NO: 30692719 NR Description: zinc-finger protein -related [Arabidopsis
  misc_feature (73)..(212): Homolog of NCBI NO: 17981378 NR Description: zinc finger protein LSD1 [Brassica oleracea]
  misc_feature (39)..(212): Homolog of NCBI NO: 17981380 NR Description: zinc finger protein LSD2 [Brassica oleracea]
  misc_feature (39)..(212): Homolog of NCBI NO: 30685085 NR Description: zinc-finger protein Lsd1 [Arabidopsis thaliana]
  misc_feature (39)..(212): Homolog of NCBI NO: 30685083 NR Description: zinc-finger protein Lsd1 [Arabidopsis thaliana]
  misc_feature (2)..(2): Xaa is any aa, unknown or other
  misc_feature (5)..(5): Xaa is any aa, unknown or other
KXKIXKSREGGFVSFRSVHTFYSLSIPLPFFSIHYTTVMRSQLVCNGCRSILVYPRGATNVCCALCNTITSVPPPGMDMSQLYCGGCTTLLMYTRGATSVRCSCCHTINLVPESNQVIHCANCRTTLMYPYGASSVKCAICCYITNISMTNGRLSIPVQRPNGTANSGTVSSTSSSMPYSQSQTVVVENPMSVDSSGKLVRNVVVGVTTDKK

SEQ ID NO: 54137 - protein, 174 aa, Glycine max
  peptide (1)..(174): Ceres Seq. ID no. 15221256
  misc_feature (1)..(74): Homolog of NCBI NO: 17981378 NR Description: zinc finger protein LSD1 [Brassica oleracea]
  misc_feature (1)..(75): Homolog of NCBI NO: 25403154 NR Description: probable zinc-finger protein, 7043-7771
  misc_feature (1)..(134): Homolog of NCBI NO: 29467531 NR Description: P0582D05.23 [Oryza sativa (japonica
  misc_feature (1)..(109): Homolog of NCBI NO: 18398482 NR Description: zinc-finger protein -related [Arabidopsis
  misc_feature (2)..(114): Homolog of NCBI NO: 34905200 NR Description: P0672D01.2 [Oryza sativa (japonica
  misc_feature (1)..(117): Homolog of NCBI NO: 30692719 NR Description: zinc-finger protein -related [Arabidopsis
  misc_feature (35)..(174): Homolog of NCBI NO: 17981378 NR Description: zinc finger protein LSD1 [Brassica oleracea]
  misc_feature (1)..(174): Homolog of NCBI NO: 17981380 NR Description: zinc finger protein LSD2 [Brassica oleracea]
  misc_feature (1)..(174): Homolog of NCBI NO: 30685085 NR Description: zinc-finger protein Lsd1 [Arabidopsis thaliana]
  misc_feature (1)..(174): Homolog of NCBI NO: 30685083 NR Description: zinc-finger protein Lsd1 [Arabidopsis thaliana]
MRSQLVCNGCRSILVYPRGATNVCCALCNTITSVPPPGMDMSQLYCGGCTTLLMYTRGATSVRCSCCHTINLVPESNQVIHCANCRTTLMYPYGASSVKCAICCYITNISMTNGRLSIPVQRPNGTANSGTVSSTSSSMPYSQSQTVVVENPMSVDSSGKLVRNVVVGVTTDKK

SEQ ID NO: 54138 - protein, 136 aa, Glycine max
  peptide (1)..(136): Ceres Seq. ID no. 15221257
  misc_feature (1)..(36): Homolog of NCBI NO: 17981378 NR Description: zinc finger protein LSD1 [Brassica oleracea]
  misc_feature (1)..(37): Homolog of NCBI NO: 25403154 NR Description: probable zinc-finger protein, 7043-7771
  misc_feature (1)..(96): Homolog of NCBI NO: 29467531 NR Description: P0582D05.23 [Oryza sativa (japonica
  misc_feature (1)..(71): Homolog of NCBI NO: 18398482 NR Description: zinc-finger protein -related [Arabidopsis
  misc_feature (1)..(76): Homolog of NCBI NO: 34905200 NR Description: P0672D01.2 [Oryza sativa (japonica
  misc_feature (1)..(79): Homolog of NCBI NO: 30692719 NR Description: zinc-finger protein -related [Arabidopsis
  misc_feature (1)..(136): Homolog of NCBI NO: 17981378 NR Description: zinc finger protein LSD1 [Brassica oleracea]
  misc_feature (1)..(136): Homolog of NCBI NO: 17981380 NR Description: zinc finger protein LSD2 [Brassica oleracea]
  misc_feature (1)..(136): Homolog of NCBI NO: 30685085 NR Description: zinc-finger protein Lsd1 [Arabidopsis thaliana]
  misc_feature (1)..(136): Homolog of NCBI NO: 30685083 NR Description: zinc-finger protein Lsd1 [Arabidopsis thaliana]
MDMSQLYCGGCTTLLMYTRGATSVRCSCCHTINLVPESNQVIHCANCRTTLMYPYGASSVKCAICCYITNISMTNGRLSIPVQRPNGTANSGTVSSTSSSMPYSQSQTVVVENPMSVDSSGKLVRNVVVGVTTDKK

SEQ ID NO: 54139 - DNA, 1480 bp, Glycine max
  misc_feature (1)..(1480): Ceres Seq. ID no. 15178173
agaagaaagttgaatacagcccggcacgtatcttcggacccattaaaagtttggaaatctttgatatgggcaaacatataaaacgggaatcttcgtcgtggaatctgaggaaacgtcagtatgaaaatcatggagttttcctcgccataatgaacgagagagaatcactagaggcacatgttgttggtagaagaatttctctgggattgactttgattgaatgattgttcactgttcatgctaaacaacacaaaccaaacggctattctgactactttttgatcctgtttctaatcttgtttctaggatcctgtctgtctctcttggtttggtttattagacttgtgctgtgtctaagtctttctttcagggctctgtgagttgaattcaggtgtcacatccaaggcaacaaaacaagatgatgagtccaaaccttgcaaaacaagttggggacacaacctataccaagatctttgttggaggattagcttgggagactaagagagatactttaaaacgctatttcgatcagtttggggagatcttagaggccgtcgtcatcactgacagaatcacaggaagatcaaaaggatatggctttgtgatcttcagggacccaaattctgcaataagagcttgtcataatccctatcctgtgattgatggaaggagagctaactgtaatcttgcagctcttggtgcacagaaatttgatccatctataacaacaggaaggcaaaaattcagtagcccttcatggaatatggcaccaattccattgcaaggaacttccactcattacaatcagcacataccacactacccatttccgcatccagtctacaggtatcctggttatcctcacccacaagacttgtatgaaatgaactacaataatgcttatggtggacagcagcttccactctgttggtttccagcatattgccaacccttttatggccttagtagacagtttattccaacagcatatgtgaaaaaggcacaaacccctgacgtgtcacctcaggagttcacggttgttggcttctcagaacctatttcagcttctccctcaatttgcagcactggattagacacaggaacagtaccagctacaggagtgctagaatcccaccaagaacagaagtcttcaacttaaagctatgatgtcaatttactagaatagagaaagtaaaaaagaaaaatgacactgctgaataaaccaggaagctctaagtacattcccattgaggtggtctagcaaaggaactaaatcaagcaataacgtattgagatctcccatcgatggaacagctgatcctagagacctgacacttatgaagtgaatcctggatttgttcattgtctttgaacatttttttacttttcagcattctggtgcacagtattcattcttcggttttcctttttttttcattttagttttcttttttaaaattggattccagctaagctatag

SEQ ID NO: 54140 - protein, 246 aa, Glycine max
  peptide (1)..(246): Ceres Seq. ID no. 15178174
  misc_feature (18)..(76): Pfam Name: RNA recognition motif. (a.k.a. RRM, RBD, or RNP domain) Pfam Description: RNA recognition motif. (a.k.a. RRM, RBD, or RNP
  misc_feature (11)..(159): Homolog of NCBI NO: 25405025 NR Description: protein F3F9.20 [imported] - Arabidopsis thaliana
  misc_feature (11)..(181): Homolog of NCBI NO: 25518109 NR Description: T16E15.6 protein - Arabidopsis thaliana
  misc_feature (10)..(165): Homolog of NCBI NO: 18395177 NR Description: RNA recognition motif (RRM)-containing protein
  misc_feature (11)..(219): Homolog of NCBI NO: 23505939 NR Description: At1g20880/F9H16_14 [Arabidopsis thaliana]
  misc_feature (11)..(219): Homolog of NCBI NO: 18394923 NR Description: RNA recognition motif (RRM)-containing protein
  misc_feature (11)..(219): Homolog of NCBI NO: 15010636 NR Description: At1g20880/F9H16_14 [Arabidopsis thaliana]
  misc_feature (7)..(164): Homolog of NCBI NO: 34905758 NR Description: similar to RNA-binding protein
  misc_feature (11)..(181): Homolog of NCBI NO: 18411885 NR Description: RNA recognition motif (RRM)-containing protein
  misc_feature (1)..(189): Homolog of NCBI NO: 15226439 NR Description: RNA recognition motif (RRM)-containing protein
  misc_feature (1)..(168): Homolog of NCBI NO: 34907334 NR Description: P0698A10.29 [Oryza sativa (japonica
MMSPNLAKQVGDTTYTKIFVGGLAWETKRDTLKRYFDQFGEILEAVVITDRITGRSKGYGFVIFRDPNSAIRACHNPYPVIDGRRANCNLAALGAQKFDPSITTGRQKFSSPSWNMAPIPLQGTSTHYNQHIPHYPFPHPVYRYPGYPHPQDLYEMNYNNAYGGQQLPLCWFPAYCQPFYGLSRQFIPTAYVKKAQTPDVSPQEFTVVGFSEPISASPSICSTGLDTGTVPATGVLESHQEQKSST

SEQ ID NO: 54141 - protein, 245 aa, Glycine max
  peptide (1)..(245): Ceres Seq. ID no. 15178175
  misc_feature (17)..(75): Pfam Name: RNA recognition motif. (a.k.a. RRM, RBD, or RNP domain) Pfam Description: RNA recognition motif. (a.k.a. RRM, RBD, or RNP
  misc_feature (10)..(158): Homolog of NCBI NO: 25405025 NR Description: protein F3F9.20 [imported] - Arabidopsis thaliana
  misc_feature (10)..(180): Homolog of NCBI NO: 25518109 NR Description: T16E15.6 protein - Arabidopsis thaliana
  misc_feature (9)..(164): Homolog of NCBI NO: 18395177 NR Description: RNA recognition motif (RRM)-containing protein
  misc_feature (10)..(218): Homolog of NCBI NO: 23505939 NR Description: At1g20880/F9H16_14 [Arabidopsis thaliana]
  misc_feature (10)..(218): Homolog of NCBI NO: 18394923 NR Description: RNA recognition motif (RRM)-containing protein
  misc_feature (10)..(218): Homolog of NCBI NO: 15010636 NR Description: At1g20880/F9H16_14 [Arabidopsis thaliana]
  misc_feature (6)..(163): Homolog of NCBI NO: 34905758 NR Description: similar to RNA-binding protein
  misc_feature (10)..(180): Homolog of NCBI NO: 18411885 NR Description: RNA recognition motif (RRM)-containing protein
  misc_feature (1)..(188): Homolog of NCBI NO: 15226439 NR Description: RNA recognition motif (RRM)-containing protein
  misc_feature (1)..(167): Homolog of NCBI NO: 34907334 NR Description: P0698A10.29 [Oryza sativa (japonica
MSPNLAKQVGDTTYTKIFVGGLAWETKRDTLKRYFDQFGEILEAVVITDRITGRSKGYGFVIFRDPNSAIRACHNPYPVIDGRRANCNLAALGAQKFDPSITTGRQKFSSPSWNMAPIPLQGTSTHYNQHIPHYPFPHPVYRYPGYPHPQDLYEMNYNNAYGGQQLPLCWFPAYCQPFYGLSRQFIPTAYVKKAQTPDVSPQEFTVVGFSEPISASPSICSTGLDTGTVPATGVLESHQEQKSST

SEQ ID NO: 54142 - protein, 131 aa, Glycine max
  peptide (1)..(131): Ceres Seq. ID no. 15178176
  misc_feature (1)..(44): Homolog of NCBI NO: 25405025 NR Description: protein F3F9.20 [imported] - Arabidopsis thaliana
  misc_feature (1)..(66): Homolog of NCBI NO: 25518109 NR Description: T16E15.6 protein - Arabidopsis thaliana
  misc_feature (1)..(50): Homolog of NCBI NO: 18395177 NR Description: RNA recognition motif (RRM)-containing protein
  misc_feature (1)..(104): Homolog of NCBI NO: 23505939 NR Description: At1g20880/F9H16_14 [Arabidopsis thaliana]
  misc_feature (1)..(104): Homolog of NCBI NO: 18394923 NR Description: RNA recognition motif (RRM)-containing protein
  misc_feature (1)..(104): Homolog of NCBI NO: 15010636 NR Description: At1g20880/F9H16_14 [Arabidopsis thaliana]
  misc_feature (1)..(49): Homolog of NCBI NO: 34905758 NR Description: similar to RNA-binding protein
  misc_feature (1)..(66): Homolog of NCBI NO: 18411885 NR Description: RNA recognition motif (RRM)-containing protein
  misc_feature (1)..(74): Homolog of NCBI NO: 15226439 NR Description: RNA recognition motif (RRM)-containing protein
  misc_feature (1)..(53): Homolog of NCBI NO: 34907334 NR Description: P0698A10.29 [Oryza sativa (japonica
MAPIPLQGTSTHYNQHIPHYPFPHPVYRYPGYPHPQDLYEMNYNNAYGGQQLPLCWFPAYCQPFYGLSRQFIPTAYVKKAQTPDVSPQEFTVVGFSEPISASPSICSTGLDTGTVPATGVLESHQEQKSST

SEQ ID NO: 54143 - DNA, 1882 bp, Glycine max
  misc_feature (1)..(1882): Ceres Seq. ID no. 14313739
ggaggtttctgttcgtttcatttcatttggtcacacagtgttgtcggccactttctctctctttcgcgcttcaactttcgtttttgcactgattgaaattgtgaggagcaacagaccacttgagatagtttaactcagctgcagggatggatctgtggggtgctcatcatcgacttttgttcattggtcggcatgaggaagatggaactcctgatacttctatgggagaggaatcaaacgatgaagaagaaaaaataattaaaactgaacccgtctttgtgcctgaaattaagaaaaggaaacgccttagccttagtcagcttaaagaggtgaaagaggagtcacatgggaagcaaagcagtagcaagcctaagagaaagaagcatgatagtagggatagatggtcagctgagaggtatcaattggctgagcaaaacatgtgggaggtactaaaggctgaaggggcgtcatttgaaaacccaataacccgacctgcactaagattggctgcccgcaaacacattggagatactggacttttagatcacttactgaagcacattgatggtaaagtggcacctggagggactgagagattccgaagatggttcaacaccaatggaatcatggagtattggttggagagtgctgacttggacaaggtgcgccaggaggcaggggtgcaggaccctttctggataccgccatctgcatatagggcagccggtgccccttcccaaaatattgattcttctgatgaattgaaacagcttaaaatagaactgacacaaatgaagaaagatatgcatgagctcattgccaagaaggaagagaaaagtgatattaacatgatggaggagacacacaaggaatttgtgaagtggaaatttatgactgaccatcgccttactgaaatcatgacttctttgaaggatgttcagggaaagtatggtgaattgatgatttggaaaactacagttgcgcaacaacttatggaaataactaataaattgaatgatcttcaagcatctagggaatgcaccacttatagtcctccttcagaaaggtggaaagattggatagaaagcaccaacctagacaatattcaggaagatgcatttgctacttggattgggaatccagagctacttaatgttccacaagaggttatacttgaagatcccaacacgaccatgccaacacagccacccagtgaagaactgactaacaagaagagcgatgtgctggagttagtacctgtaaaactagaagatcaaccaaatgtaacccctgattcttctacaactgttaattcgaagtcagaccttgacaactcattgattatgtttcaggagatgtttatggatttatacaaatggaaagagaaaatggaacagcagctgatggaggtatcgaatactgtatatggtatgcttgcaatgaagtagacatcactccgaagtatcgaggctaagataggatataaccaccgtttcgttctcaagttttctttgttactcttaaaactggtaaagtttagatattgtacagcattaacaatctgatcctgaaaatctatgccaaccactaagttcacagaagaggttgagtctcaccctgctggctgagctgcaaattgtcgatatgtctgactggccttttacagtatacttggccttttaaattgaatgacttaaggtaggtcttcagtggtaatgaaattggttgttttctcaacttattgggtaagattatgagttcctttagtataggtctttaggtaggctacccgtatttaacgtattagctgaaactatcttgttagagcttgtacttaacctatttggtaacaagttgccatatatatatatagaatttctac

SEQ ID NO: 54144 - protein, 433 aa, Glycine max
  peptide (1)..(433): Ceres Seq. ID no. 14313740
  misc_feature (198)..(433): Homolog of NCBI NO: 15237794 NR Description: expressed protein [Arabidopsis thaliana]
  misc_feature (28)..(346): Homolog of NCBI NO: 30696040 NR Description: DYAD [Arabidopsis thaliana]
  misc_feature (28)..(346): Homolog of NCBI NO: 9759279 NR Description: gb|AAD12714.1~gene_id:MFG13.3~similar to unknown
  misc_feature (28)..(346): Homolog of NCBI NO: 16033414 NR Description: SWITCH1 splice variant S [Arabidopsis thaliana]
  misc_feature (13)..(387): Homolog of NCBI NO: 15237794 NR Description: expressed protein [Arabidopsis thaliana]
MDLWGAHHRLLFIGRHEEDGTPDTSMGEESNDEEEKIIKTEPVFVPEIKKRKRLSLSQLKEVKEESHGKQSSSKPKRKKHDSRDRWSAERYQLAEQNMWEVLKAEGASFENPITRPALRLAARKHIGDTGLLDHLLKHIDGKVAPGGTERFRRWFNTNGIMEYWLESADLDKVRQEAGVQDPFWIPPSAYRAAGAPSQNIDSSDELKQLKIELTQMKKDMHELIAKKEEKSDINMMEETHKEFVKWKFMTDHRLTEIMTSLKDVQGKYGELMIWKTTVAQQLMEITNKLNDLQASRECTTYSPPSERWKDWIESTNLDNIQEDAFATWIGNPELLNVPQEVILEDPNTTMPTQPPSEELTNKKSDVLELVPVKLEDQPNVTPDSSTTVNSKSDLDNSLIMFQEMFMDLYKWKEKMEQQLMEVSNTVYGMLAMK

SEQ ID NO: 54145 - protein, 408 aa, Glycine max
  peptide (1)..(408): Ceres Seq. ID no. 14313741
  misc_feature (173)..(408): Homolog of NCBI NO: 15237794 NR Description: expressed protein [Arabidopsis thaliana]
  misc_feature (3)..(321): Homolog of NCBI NO: 30696040 NR Description: DYAD [Arabidopsis thaliana]
  misc_feature (3)..(321): Homolog of NCBI NO: 9759279 NR Description: gb|AAD12714.1~gene_id:MFG13.3~similar to unknown
  misc_feature (3)..(321): Homolog of NCBI NO: 16033414 NR Description: SWITCH1 splice variant S [Arabidopsis thaliana]
  misc_feature (1)..(362): Homolog of NCBI NO: 15237794 NR Description: expressed protein [Arabidopsis thaliana]
MGEESNDEEEKIIKTEPVFVPEIKKRKRLSLSQLKEVKEESHGKQSSSKPKRKKHDSRDRWSAERYQLAEQNMWEVLKAEGASFENPITRPALRLAARKHIGDTGLLDHLLKHIDGKVAPGGTERFRRWFNTNGIMEYWLESADLDKVRQEAGVQDPFWIPPSAYRAAGAPSQNIDSSDELKQLKIELTQMKKDMHELIAKKEEKSDINMMEETHKEFVKWKFMTDHRLTEIMTSLKDVQGKYGELMIWKTTVAQQLMEITNKLNDLQASRECTTYSPPSERWKDWIESTNLDNIQEDAFATWIGNPELLNVPQEVILEDPNTTMPTQPPSEELTNKKSDVLELVPVKLEDQPNVTPDSSTTVNSKSDLDNSLIMFQEMFMDLYKWKEKMEQQLMEVSNTVYGMLAMK

SEQ ID NO: 54146 - protein, 336 aa, Glycine max
  peptide (1)..(336): Ceres Seq. ID no. 14313742
  misc_feature (101)..(336): Homolog of NCBI NO: 15237794 NR Description: expressed protein [Arabidopsis thaliana]
  misc_feature (1)..(249): Homolog of NCBI NO: 30696040 NR Description: DYAD [Arabidopsis thaliana]
  misc_feature (1)..(249): Homolog of NCBI NO: 9759279 NR Description: gb|AAD12714.1~gene_id:MFG13.3~similar to unknown
  misc_feature (1)..(249): Homolog of NCBI NO: 16033414 NR Description: SWITCH1 splice variant S [Arabidopsis thaliana]
  misc_feature (1)..(290): Homolog of NCBI NO: 15237794 NR Description: expressed protein [Arabidopsis thaliana]
MWEVLKAEGASFENPITRPALRLAARKHIGDTGLLDHLLKHIDGKVAPGGTERFRRWFNTNGIMEYWLESADLDKVRQEAGVQDPFWIPPSAYRAAGAPSQNIDSSDELKQLKIELTQMKKDMHELIAKKEEKSDINMMEETHKEFVKWKFMTDHRLTEIMTSLKDVQGKYGELMIWKTTVAQQLMEITNKLNDLQASRECTTYSPPSERWKDWIESTNLDNIQEDAFATWIGNPELLNVPQEVILEDPNTTMPTQPPSEELTNKKSDVLELVPVKLEDQPNVTPDSSTTVNSKSDLDNSLIMFQEMFMDLYKWKEKMEQQLMEVSNTVYGMLAMK

SEQ ID NO: 54147 - DNA, 2095 bp, Glycine max
  misc_feature (1)..(2095): Ceres Seq. ID no. 15177141
gttacaaaatacattaaatcacaactttaccatccaccaccctctctcctatggacaacctcgaatctagaatctctattggactcactttcaatgatgtcctccttgtcccccaatactccactgtcaattctcgctctgaaattgacctccgcactagattctccaagaacgtccctcttaatgtccccattgtctcttctcctatggacactgtcactgaaactgacatggccattgaaatggcaagatggggaggtttgggtattgttcacagatataatactatcgaagatcaagccaacatgatctctcaagtcaagagagctgaaagcttcgtcatcactactccttatactatcagtcaatctactaccgttagagctgtccaagctctttccaaggcttacagagtccaaactttccttgttactgatgatactcataagcctaatgaacttgctgatcctgtccaaaagcataaactcgtcggtatccttactggcagagatcttagaatcgctttgaacggtgatcaacttgtcgaagagattatgacccctagagaaagactcactactacttatgatcccgaaatctccctcaaggaagccaagagccttatgattaacaatagagttgaaaaacttcccattattactgagaagaatgacgtcttgggtcttattactcttcgtgatattatccttagagaacaaagacctttggctaatcttgatacttttggtagattgagagttggtgctgctgttggtgccaaggatgattatcttgaaagagccaagaagcttattgatgtcggaactgatgttcttgtcgttgatattgctaatggacatgctcaattatgtattgatgctgtcgaaagattgaaggaacaattcactgtcgatgttgttgctggatctattgcttccagagaaggtgctgaaaatctcatcaaggctggtgctgacggtatccgttgcggtattggaagtggtgctatttgcacaactagacttgttgctggctctggtgtccctcaattatctgctatctttgatgctgcctccgtttgtaatgaagctggtgttcctttaatctctgatggtggtaatggtaacagtggtaacatgtgcaaagctcttgctgctggtgctgattgcgtcatggttggaagacttattgctggttgtgatgaaagccctggtcaagttcttctcaaggatggtaagagagtcaagatctacagaggtatggctggctatggtgctaacttgtccaaggctcaaagaactaacgctgctgaacctcactctttgaacttcactcctgaaggtgttgaaggatatatcccatactgtggacctttgaaggatgtcttgaaccaattcgctcaaggaatcaagagtggtatgagctactgtggatctcatgagattatggagatgaagaagaaggctaaattcatcagattaagtcaaagcgctatagttgaaagtggcgttcatgacattaacaagttgtaaatttggaacatgagctttttggtaagagtgtctttggttattggttagaagaggttggattaactacttaaaaatcgttgtttttataaaaatacaaaaagaataaaaaaagcgatttgtgttttttttttcttgcttataaatatgttatcatggctgtaaatctgctttgatgatcattgcttattgatcgattcaaaagaatagatgagattcccttccctctgtcggtctcttaaggacgcttgaatgcaagaattaatgaaattgaacacatcacatcaaatgaaatgaagtcttctccctctcctctgcaattcataaaaacaacctgaaaacagccatagacatcatagaagcaatagactctctccctctaattaataattcgtgaaacacataatgaagcaatcaatacatttcttccaaaagctcttccaaaaaaacatcaaatcattataataaaacacacaaattcaataaattcatatattactaagtttctttttattttcaatatataaaaacacttcatcgtatttctcgacttttttcaatttatg

SEQ ID NO: 54148 - protein, 493 aa, Glycine max
  peptide (1)..(493): Ceres Seq. ID no. 15177142
  misc_feature (11)..(93): Pfam Name: IMP dehydrogenase / GMP reductase domain Pfam Description: IMP dehydrogenase / GMP reductase domain
  misc_feature (12)..(491): Homolog of NCBI NO: 23029305 NR Description: hypothetical protein [Microbulbifer degradans
  misc_feature (9)..(490): Homolog of NCBI NO: 13476895 NR Description: inosine monophosphate dehydrogenase
  misc_feature (13)..(490): Homolog of NCBI NO: 34496758 NR Description: inosine-5'-monophosphate dehydrogenase
  misc_feature (12)..(490): Homolog of NCBI NO: 15887965 NR Description: AGR_C_1108p [Agrobacterium tumefaciens]
  misc_feature (12)..(490): Homolog of NCBI NO: 15644099 NR Description: inosine-5'-monophosphate dehydrogenase
  misc_feature (11)..(490): Homolog of NCBI NO: 20807078 NR Description: IMP dehydrogenase/GMP reductase
  misc_feature (1)..(490): Homolog of NCBI NO: 15806878 NR Description: inosine-5`-monophosphate dehydrogenase
  misc_feature (8)..(170): Homolog of NCBI NO: 22406491 NR Description: hypothetical protein [Ferroplasma acidarmanus]
  misc_feature (141)..(490): Homolog of NCBI NO: 22406491 NR Description: hypothetical protein [Ferroplasma acidarmanus]
  misc_feature (1)..(490): Homolog of NCBI NO: 15607007 NR Description: inosine monophosphate dehydrogenase [Aquifex
MDNLESRISIGLTFNDVLLVPQYSTVNSRSEIDLRTRFSKNVPLNVPIVSSPMDTVTETDMAIEMARWGGLGIVHRYNTIEDQANMISQVKRAESFVITTPYTISQSTTVRAVQALSKAYRVQTFLVTDDTHKPNELADPVQKHKLVGILTGRDLRIALNGDQLVEEIMTPRERLTTTYDPEISLKEAKSLMINNRVEKLPIITEKNDVLGLITLRDIILREQRPLANLDTFGRLRVGAAVGAKDDYLERAKKLIDVGTDVLVVDIANGHAQLCIDAVERLKEQFTVDVVAGSIASREGAENLIKAGADGIRCGIGSGAICTTRLVAGSGVPQLSAIFDAASVCNEAGVPLISDGGNGNSGNMCKALAAGADCVMVGRLIAGCDESPGQVLLKDGKRVKIYRGMAGYGANLSKAQRTNAAEPHSLNFTPEGVEGYIPYCGPLKDVLNQFAQGIKSGMSYCGSHEIMEMKKKAKFIRLSQSAIVESGVHDINKL

SEQ ID NO: 54149 - protein, 441 aa, Glycine max
  peptide (1)..(441): Ceres Seq. ID no. 15177143
  misc_feature (173)..(436): Pfam Name: IMP dehydrogenase / GMP reductase domain Pfam Description: IMP dehydrogenase / GMP reductase domain
  misc_feature (1)..(439): Homolog of NCBI NO: 23029305 NR Description: hypothetical protein [Microbulbifer degradans
  misc_feature (1)..(438): Homolog of NCBI NO: 13476895 NR Description: inosine monophosphate dehydrogenase
  misc_feature (1)..(438): Homolog of NCBI NO: 34496758 NR Description: inosine-5'-monophosphate dehydrogenase
  misc_feature (1)..(438): Homolog of NCBI NO: 15887965 NR Description: AGR_C_1108p [Agrobacterium tumefaciens]
  misc_feature (1)..(438): Homolog of NCBI NO: 15644099 NR Description: inosine-5'-monophosphate dehydrogenase
  misc_feature (1)..(438): Homolog of NCBI NO: 20807078 NR Description: IMP dehydrogenase/GMP reductase
  misc_feature (1)..(438): Homolog of NCBI NO: 15806878 NR Description: inosine-5`-monophosphate dehydrogenase
  misc_feature (1)..(118): Homolog of NCBI NO: 22406491 NR Description: hypothetical protein [Ferroplasma acidarmanus]
  misc_feature (89)..(438): Homolog of NCBI NO: 22406491 NR Description: hypothetical protein [Ferroplasma acidarmanus]
  misc_feature (1)..(438): Homolog of NCBI NO: 15607007 NR Description: inosine monophosphate dehydrogenase [Aquifex
MDTVTETDMAIEMARWGGLGIVHRYNTIEDQANMISQVKRAESFVITTPYTISQSTTVRAVQALSKAYRVQTFLVTDDTHKPNELADPVQKHKLVGILTGRDLRIALNGDQLVEEIMTPRERLTTTYDPEISLKEAKSLMINNRVEKLPIITEKNDVLGLITLRDIILREQRPLANLDTFGRLRVGAAVGAKDDYLERAKKLIDVGTDVLVVDIANGHAQLCIDAVERLKEQFTVDVVAGSIASREGAENLIKAGADGIRCGIGSGAICTTRLVAGSGVPQLSAIFDAASVCNEAGVPLISDGGNGNSGNMCKALAAGADCVMVGRLIAGCDESPGQVLLKDGKRVKIYRGMAGYGANLSKAQRTNAAEPHSLNFTPEGVEGYIPYCGPLKDVLNQFAQGIKSGMSYCGSHEIMEMKKKAKFIRLSQSAIVESGVHDINKL

SEQ ID NO: 54150 - protein, 433 aa, Glycine max
  peptide (1)..(433): Ceres Seq. ID no. 15177144
  misc_feature (165)..(428): Pfam Name: IMP dehydrogenase / GMP reductase domain Pfam Description: IMP dehydrogenase / GMP reductase domain
  misc_feature (1)..(431): Homolog of NCBI NO: 23029305 NR Description: hypothetical protein [Microbulbifer degradans
  misc_feature (1)..(430): Homolog of NCBI NO: 13476895 NR Description: inosine monophosphate dehydrogenase
  misc_feature (1)..(430): Homolog of NCBI NO: 34496758 NR Description: inosine-5'-monophosphate dehydrogenase
  misc_feature (1)..(430): Homolog of NCBI NO: 15887965 NR Description: AGR_C_1108p [Agrobacterium tumefaciens]
  misc_feature (1)..(430): Homolog of NCBI NO: 15644099 NR Description: inosine-5'-monophosphate dehydrogenase
  misc_feature (1)..(430): Homolog of NCBI NO: 20807078 NR Description: IMP dehydrogenase/GMP reductase
  misc_feature (1)..(430): Homolog of NCBI NO: 15806878 NR Description: inosine-5`-monophosphate dehydrogenase
  misc_feature (1)..(110): Homolog of NCBI NO: 22406491 NR Description: hypothetical protein [Ferroplasma acidarmanus]
  misc_feature (81)..(430): Homolog of NCBI NO: 22406491 NR Description: hypothetical protein [Ferroplasma acidarmanus]
  misc_feature (1)..(430): Homolog of NCBI NO: 15607007 NR Description: inosine monophosphate dehydrogenase [Aquifex
MAIEMARWGGLGIVHRYNTIEDQANMISQVKRAESFVITTPYTISQSTTVRAVQALSKAYRVQTFLVTDDTHKPNELADPVQKHKLVGILTGRDLRIALNGDQLVEEIMTPRERLTTTYDPEISLKEAKSLMINNRVEKLPIITEKNDVLGLITLRDIILREQRPLANLDTFGRLRVGAAVGAKDDYLERAKKLIDVGTDVLVVDIANGHAQLCIDAVERLKEQFTVDVVAGSIASREGAENLIKAGADGIRCGIGSGAICTTRLVAGSGVPQLSAIFDAASVCNEAGVPLISDGGNGNSGNMCKALAAGADCVMVGRLIAGCDESPGQVLLKDGKRVKIYRGMAGYGANLSKAQRTNAAEPHSLNFTPEGVEGYIPYCGPLKDVLNQFAQGIKSGMSYCGSHEIMEMKKKAKFIRLSQSAIVESGVHDINKL

SEQ ID NO: 54151 - DNA, 1147 bp, Glycine max
  misc_feature (1)..(1147): Ceres Seq. ID no. 13593920
cgtgtatgtgtatcagcctctcttctcctcttctattcttcactgcactcccacccctcttattattaatatcagtgcttggaaagaaaaggaagcaaaagaaaagagaagatccatagctaataagctaggttcagtagttagtgagtgatcgatatctggagatgggtcgaggcaagattgagataaagttgattgagaaccccaccaacaggcaagtcacttactccaagcgaaggaatggtatcttcaagaaagctcatgaactcagtgttctctgtgatgccaaggtttcacttatcatgttctctaaaaacaacaagatgcatgaatacattagccctggcctcacgacaaaaaggatcattgatcagtatcagaagactttgggggatattgatctgtggcgttctcactatgagaaaatgcttgaaaacttgaagaagctgatagatattaacaacaagctcagaagacagatcaggcataggataggtgagggtttggacatggacgacatgagcttccagcaactgcgcactcttgaagaggatttggtttcttccatagggaaaatacgagaacgaaagttccacgtgatcaaaacacggactgatacctgcaggaaaaaggttaaaagcctggagcagatgaatagagatctgctgtttgaacttaaggaaaagtgtgcgatccatccacaatttattttgcacgatgaaggagacgaggaatcagcagttgcactggccaacggcgcctccaccctgtatgcgttctgtcatcagcaccattctcatctgaaccttccctcccaccattctcacggagaagaaccctttaaaactgatgaccttcgccttgcttaattgagtgcaacaattaactagcaatgtaaattaactagctagcaagcaagcactaagcacttgttaattatgctttgtattatcctatattggacctgttaaacttaaacgcaacgttgcttccaacctctctagtctctatccagatcgagaattagctgaagcttatatatattatgtagtatttggcaagagtgtggtatgaaaaacagaaagactgtattttatttgttattataagtttacattgagtggttatgtaatattaattgcttggt

SEQ ID NO: 54152 - protein, 234 aa, Glycine max
  peptide (1)..(234): Ceres Seq. ID no. 13593921
  misc_feature (71)..(172): Pfam Name: K-box region Pfam Description: K-box region
  misc_feature (1)..(234): Homolog of NCBI NO: 8163950 NR Description: MADS box transcription factor TM6 [Petunia x
  misc_feature (1)..(233): Homolog of NCBI NO: 28883608 NR Description: APETALA3 [Populus tomentosa]
  misc_feature (4)..(234): Homolog of NCBI NO: 24967132 NR Description: TDR6 transcription factor [Lycopersicon
  misc_feature (4)..(234): Homolog of NCBI NO: 19386 NR Description: TDR6 [Lycopersicon esculentum]
  misc_feature (4)..(234): Homolog of NCBI NO: 542029 NR Description: MADS box protein TDR6 - tomato (fragment)
  misc_feature (1)..(222): Homolog of NCBI NO: 15216293 NR Description: MADS-box protein [Rosa rugosa]
  misc_feature (1)..(224): Homolog of NCBI NO: 4218169 NR Description: MADs-box protein, GDEF1 [Gerbera hybrid cv.
  misc_feature (1)..(233): Homolog of NCBI NO: 10835358 NR Description: PTD protein [Populus balsamifera subsp.
  misc_feature (1)..(234): Homolog of NCBI NO: 16973294 NR Description: B-type MADS box protein [Malus x domestica]
  misc_feature (1)..(234): Homolog of NCBI NO: 22775408 NR Description: MADS-box protein [Malus x domestica]
MGRGKIEIKLIENPTNRQVTYSKRRNGIFKKAHELSVLCDAKVSLIMFSKNNKMHEYISPGLTTKRIIDQYQKTLGDIDLWRSHYEKMLENLKKLIDINNKLRRQIRHRIGEGLDMDDMSFQQLRTLEEDLVSSIGKIRERKFHVIKTRTDTCRKKVKSLEQMNRDLLFELKEKCAIHPQFILHDEGDEESAVALANGASTLYAFCHQHHSHLNLPSHHSHGEEPFKTDDLRLA

SEQ ID NO: 54153 - protein, 188 aa, Glycine max
  peptide (1)..(188): Ceres Seq. ID no. 13593922
  misc_feature (25)..(126): Pfam Name: K-box region Pfam Description: K-box region
  misc_feature (1)..(188): Homolog of NCBI NO: 8163950 NR Description: MADS box transcription factor TM6 [Petunia x
  misc_feature (1)..(187): Homolog of NCBI NO: 28883608 NR Description: APETALA3 [Populus tomentosa]
  misc_feature (1)..(188): Homolog of NCBI NO: 24967132 NR Description: TDR6 transcription factor [Lycopersicon
  misc_feature (1)..(188): Homolog of NCBI NO: 19386 NR Description: TDR6 [Lycopersicon esculentum]
  misc_feature (1)..(188): Homolog of NCBI NO: 542029 NR Description: MADS box protein TDR6 - tomato (fragment)
  misc_feature (1)..(176): Homolog of NCBI NO: 15216293 NR Description: MADS-box protein [Rosa rugosa]
  misc_feature (1)..(178): Homolog of NCBI NO: 4218169 NR Description: MADs-box protein, GDEF1 [Gerbera hybrid cv.
  misc_feature (1)..(187): Homolog of NCBI NO: 10835358 NR Description: PTD protein [Populus balsamifera subsp.
  misc_feature (1)..(188): Homolog of NCBI NO: 16973294 NR Description: B-type MADS box protein [Malus x domestica]
  misc_feature (1)..(188): Homolog of NCBI NO: 22775408 NR Description: MADS-box protein [Malus x domestica]
MFSKNNKMHEYISPGLTTKRIIDQYQKTLGDIDLWRSHYEKMLENLKKLIDINNKLRRQIRHRIGEGLDMDDMSFQQLRTLEEDLVSSIGKIRERKFHVIKTRTDTCRKKVKSLEQMNRDLLFELKEKCAIHPQFILHDEGDEESAVALANGASTLYAFCHQHHSHLNLPSHHSHGEEPFKTDDLRLA

SEQ ID NO: 54154 - protein, 181 aa, Glycine max
  peptide (1)..(181): Ceres Seq. ID no. 13593923
  misc_feature (18)..(119): Pfam Name: K-box region Pfam Description: K-box region
  misc_feature (1)..(181): Homolog of NCBI NO: 8163950 NR Description: MADS box transcription factor TM6 [Petunia x
  misc_feature (1)..(180): Homolog of NCBI NO: 28883608 NR Description: APETALA3 [Populus tomentosa]
  misc_feature (1)..(181): Homolog of NCBI NO: 24967132 NR Description: TDR6 transcription factor [Lycopersicon
  misc_feature (1)..(181): Homolog of NCBI NO: 19386 NR Description: TDR6 [Lycopersicon esculentum]
  misc_feature (1)..(181): Homolog of NCBI NO: 542029 NR Description: MADS box protein TDR6 - tomato (fragment)
  misc_feature (1)..(169): Homolog of NCBI NO: 15216293 NR Description: MADS-box protein [Rosa rugosa]
  misc_feature (1)..(171): Homolog of NCBI NO: 4218169 NR Description: MADs-box protein, GDEF1 [Gerbera hybrid cv.
  misc_feature (1)..(180): Homolog of NCBI NO: 10835358 NR Description: PTD protein [Populus balsamifera subsp.
  misc_feature (1)..(181): Homolog of NCBI NO: 16973294 NR Description: B-type MADS box protein [Malus x domestica]
  misc_feature (1)..(181): Homolog of NCBI NO: 22775408 NR Description: MADS-box protein [Malus x domestica]
MHEYISPGLTTKRIIDQYQKTLGDIDLWRSHYEKMLENLKKLIDINNKLRRQIRHRIGEGLDMDDMSFQQLRTLEEDLVSSIGKIRERKFHVIKTRTDTCRKKVKSLEQMNRDLLFELKEKCAIHPQFILHDEGDEESAVALANGASTLYAFCHQHHSHLNLPSHHSHGEEPFKTDDLRLA

SEQ ID NO: 54155 - DNA, 1256 bp, Glycine max
  misc_feature (1)..(1256): Ceres Seq. ID no. 12612408
ggaagaagaatcagagttcagaatccatggcaggtgctatagtaaagtacggaatcataggagtaggaatgatgggtagagagcatcttgtgaatttgtaccatcttcgcacccaaggcgtggcagttgttgctattgctgaccctcatcttccctctcaacaactcgctcttgacttagcacactcctttacttggcctctcaaggttttctcaggtcaccaggagctgttggacagtggactatgtgatgttttggtggtatccactcctaacatgacccatcataggattcttatggacattatcaatcattccaaaccccatcatgtactggtagagaagcccttgtgcaccacaatctcacactgcaaagaggttgtcaatgctgctagaaagagacctgatatattggtacaagttggactggaatatagatacatgccacctgttgcaaagctgatagaaatagttaagggaggaaaccttggacatgtcaaaatggtagcaattcgggagcatcggtttccttttctggttaaggtgaacaattggaaccggttcaatattaactcagggggcactctggtagagaagtgttgccacttctttgatctgatgagactgtttgttggtgcaaatcctgttcgtgtgatggcttctggagctattgatgttaatcacaaggatgaagtatatgatggaaaggtgccagatatcattgacaatgcatatgttatagttgaatttgacaatggttctcgaggaatgcttgacctttgtatgtttgctgaagggagtaaaaatgagcaagaaatatctgttgtcggtgatattggaaagggagaagcctttgttcctgagagtgttgtgcagtttggtacccgagaggcggggcgagatggtgtccagactttgaaagctgaggatcacaggataaaatatgatgggttacaccatgggtctagctatctggaacaccttaacttcttgtctgcaatcagagcaaaaggagaaaaggctcctagtgtagatctccaagatggattaatatctgttgctatgggagttgcagcacagctctctatagaatatggtcgatttgtttctattcaggaagttatgaatgagtgcaaaatttgagtgttgcaacttggaagtgagagtaatggttgtctctgctgttatgtgttctttgacaaagggatgctgtattgttgctatcactgcctcaagaaaaagtgcaaaatgatttgc

SEQ ID NO: 54156 - protein, 379 aa, Glycine max
  peptide (1)..(379): Ceres Seq. ID no. 12612409
  misc_feature (15)..(142): Pfam Name: Oxidoreductase family, NAD-binding Rossmann fold Pfam Description: Oxidoreductase family, NAD-binding Rossmann fold
  misc_feature (13)..(372): Homolog of NCBI NO: 40743395 NR Description: hypothetical protein AN5425.2 [Aspergillus
  misc_feature (14)..(221): Homolog of NCBI NO: 16264562 NR Description: putative oxidoreductase protein [Sinorhizobium
  misc_feature (14)..(173): Homolog of NCBI NO: 16767671 NR Description: putative dehydrogenase [Salmonella typhimurium
  misc_feature (9)..(372): Homolog of NCBI NO: 40738543 NR Description: hypothetical protein AN5984.2 [Aspergillus
  misc_feature (15)..(282): Homolog of NCBI NO: 29348881 NR Description: putative hydrogenase [Bacteroides
  misc_feature (10)..(279): Homolog of NCBI NO: 22987816 NR Description: hypothetical protein [Burkholderia fungorum]
  misc_feature (14)..(291): Homolog of NCBI NO: 15614728 NR Description: BH2165~unknown conserved protein [Bacillus
  misc_feature (13)..(374): Homolog of NCBI NO: 15236047 NR Description: putative protein; protein id: At4g17370.1
  misc_feature (5)..(66): Homolog of NCBI NO: 37573125 NR Description: organic cation transporter-like protein
  misc_feature (68)..(375): Homolog of NCBI NO: 37573125 NR Description: organic cation transporter-like protein
KKNQSSESMAGAIVKYGIIGVGMMGREHLVNLYHLRTQGVAVVAIADPHLPSQQLALDLAHSFTWPLKVFSGHQELLDSGLCDVLVVSTPNMTHHRILMDIINHSKPHHVLVEKPLCTTISHCKEVVNAARKRPDILVQVGLEYRYMPPVAKLIEIVKGGNLGHVKMVAIREHRFPFLVKVNNWNRFNINSGGTLVEKCCHFFDLMRLFVGANPVRVMASGAIDVNHKDEVYDGKVPDIIDNAYVIVEFDNGSRGMLDLCMFAEGSKNEQEISVVGDIGKGEAFVPESVVQFGTREAGRDGVQTLKAEDHRIKYDGLHHGSSYLEHLNFLSAIRAKGEKAPSVDLQDGLISVAMGVAAQLSIEYGRFVSIQEVMNECKI

SEQ ID NO: 54157 - protein, 371 aa, Glycine max
  peptide (1)..(371): Ceres Seq. ID no. 12612410
  misc_feature (7)..(134): Pfam Name: Oxidoreductase family, NAD-binding Rossmann fold Pfam Description: Oxidoreductase family, NAD-binding Rossmann fold
  misc_feature (5)..(364): Homolog of NCBI NO: 40743395 NR Description: hypothetical protein AN5425.2 [Aspergillus
  misc_feature (6)..(213): Homolog of NCBI NO: 16264562 NR Description: putative oxidoreductase protein [Sinorhizobium
  misc_feature (6)..(165): Homolog of NCBI NO: 16767671 NR Description: putative dehydrogenase [Salmonella typhimurium
  misc_feature (1)..(364): Homolog of NCBI NO: 40738543 NR Description: hypothetical protein AN5984.2 [Aspergillus
  misc_feature (7)..(274): Homolog of NCBI NO: 29348881 NR Description: putative hydrogenase [Bacteroides
  misc_feature (2)..(271): Homolog of NCBI NO: 22987816 NR Description: hypothetical protein [Burkholderia fungorum]
  misc_feature (6)..(283): Homolog of NCBI NO: 15614728 NR Description: BH2165~unknown conserved protein [Bacillus
  misc_feature (5)..(366): Homolog of NCBI NO: 15236047 NR Description: putative protein; protein id: At4g17370.1
  misc_feature (1)..(58): Homolog of NCBI NO: 37573125 NR Description: organic cation transporter-like protein
  misc_feature (60)..(367): Homolog of NCBI NO: 37573125 NR Description: organic cation transporter-like protein
MAGAIVKYGIIGVGMMGREHLVNLYHLRTQGVAVVAIADPHLPSQQLALDLAHSFTWPLKVFSGHQELLDSGLCDVLVVSTPNMTHHRILMDIINHSKPHHVLVEKPLCTTISHCKEVVNAARKRPDILVQVGLEYRYMPPVAKLIEIVKGGNLGHVKMVAIREHRFPFLVKVNNWNRFNINSGGTLVEKCCHFFDLMRLFVGANPVRVMASGAIDVNHKDEVYDGKVPDIIDNAYVIVEFDNGSRGMLDLCMFAEGSKNEQEISVVGDIGKGEAFVPESVVQFGTREAGRDGVQTLKAEDHRIKYDGLHHGSSYLEHLNFLSAIRAKGEKAPSVDLQDGLISVAMGVAAQLSIEYGRFVSIQEVMNECKI

SEQ ID NO: 54158 - protein, 357 aa, Glycine max
  peptide (1)..(357): Ceres Seq. ID no. 12612411
  misc_feature (1)..(120): Pfam Name: Oxidoreductase family, NAD-binding Rossmann fold Pfam Description: Oxidoreductase family, NAD-binding Rossmann fold
  misc_feature (1)..(350): Homolog of NCBI NO: 40743395 NR Description: hypothetical protein AN5425.2 [Aspergillus
  misc_feature (1)..(199): Homolog of NCBI NO: 16264562 NR Description: putative oxidoreductase protein [Sinorhizobium
  misc_feature (1)..(151): Homolog of NCBI NO: 16767671 NR Description: putative dehydrogenase [Salmonella typhimurium
  misc_feature (1)..(350): Homolog of NCBI NO: 40738543 NR Description: hypothetical protein AN5984.2 [Aspergillus
  misc_feature (1)..(260): Homolog of NCBI NO: 29348881 NR Description: putative hydrogenase [Bacteroides
  misc_feature (1)..(257): Homolog of NCBI NO: 22987816 NR Description: hypothetical protein [Burkholderia fungorum]
  misc_feature (1)..(269): Homolog of NCBI NO: 15614728 NR Description: BH2165~unknown conserved protein [Bacillus
  misc_feature (1)..(352): Homolog of NCBI NO: 15236047 NR Description: putative protein; protein id: At4g17370.1
  misc_feature (1)..(44): Homolog of NCBI NO: 37573125 NR Description: organic cation transporter-like protein
  misc_feature (46)..(353): Homolog of NCBI NO: 37573125 NR Description: organic cation transporter-like protein
MMGREHLVNLYHLRTQGVAVVAIADPHLPSQQLALDLAHSFTWPLKVFSGHQELLDSGLCDVLVVSTPNMTHHRILMDIINHSKPHHVLVEKPLCTTISHCKEVVNAARKRPDILVQVGLEYRYMPPVAKLIEIVKGGNLGHVKMVAIREHRFPFLVKVNNWNRFNINSGGTLVEKCCHFFDLMRLFVGANPVRVMASGAIDVNHKDEVYDGKVPDIIDNAYVIVEFDNGSRGMLDLCMFAEGSKNEQEISVVGDIGKGEAFVPESVVQFGTREAGRDGVQTLKAEDHRIKYDGLHHGSSYLEHLNFLSAIRAKGEKAPSVDLQDGLISVAMGVAAQLSIEYGRFVSIQEVMNECKI

SEQ ID NO: 54159 - DNA, 1397 bp, Glycine max
  misc_feature (1)..(1397): Ceres Seq. ID no. 15226526
ccgggccccccctcgagtcagctacgtaggcccccccccccccccaaaaaaaaaaattcaactagagaatggagatggtaaaaaacggggtaagcaatgagccatggaaattacgcgagcaaacagtttctgagtttcttctattttctgttcccaatttgtttcggatctctgttcacgaaccctaaatctgacgttaattcaccatgatctgaacacaacgtggttcccatctgatccactgcatcgtctttctcaattgtcgaaagatgagtacaagtggttaatgagattgaggaacttgcgttgtttgagcgaaacaaagcagagatgtacctgaaggagccgctatggagtgaaacagggaaaggcgatggaagtgcaaaaacagaggattatggtgcagtgagtgaggtcgtgaagtcactgcagcaacagagagtgtatagagaagtcactctcgcgctcagaacgggactcagagacgcgcgtgcagagttctcgtttctccgtgtccgtgctctccgttccattctcaagttcctgcgttccgttgcggagtctgattcaaccattgacctctttaaccaaatccaatccattccccaactccaagtggttccggttctgtttcagcactcgctcaaagagagtggggatgaatacagcgagaatagggtaggagatttgagtcatatattcggggttgaaccgatgaagttgacgagtccatccaccgatgctgaagttgcgcttgcccttagagtcttggaagggtgttgtttgcttcaccctcatagtacggctctcgcccatcaacacaacgctattcaggttttaatgaatatattatccactcgtggagtgcttgagcaaggtgcatgcttagatgctctaatctcattgatggtggattcatcattcaatcaaatggatttcgagaaatgtagtggtattatggaagttgctgaccttctaagagaccaagaactggatgaagatctcaggttaaaatgtggagagtttttgctgctgctcattggacatgtcaatggaagagatacgcctcctttagcaactatacacgaagatacaaggcgccttcttggggagaaatcagcctccttgatatgggcagccagtcgtcagttcgattcaacactagatactgagcagaggctaacagctcttcagatccaggctcgcagggtccttgaatcattggacttgtactgaattttatggtccgtttggaagagaaaatactagatggaaaaaaaacatggatcacgatgtctgatgtcgtttcttttatttgatttgatagaaaaactgaaagaaatactaaaggaatagttgacttcatgagacaaaaattttaatttttctttctttcc

SEQ ID NO: 54160 - protein, 301 aa, Glycine max
  peptide (1)..(301): Ceres Seq. ID no. 15226527
  misc_feature (41)..(78): Homolog of NCBI NO: 22093738 NR Description: hypothetical protein [Oryza sativa (japonica
  misc_feature (34)..(168): Homolog of NCBI NO: 37536150 NR Description: hypothetical protein [Oryza sativa (japonica
  misc_feature (4)..(301): Homolog of NCBI NO: 7452470 NR Description: hypothetical protein T29A15.240 - Arabidopsis
  misc_feature (9)..(226): Homolog of NCBI NO: 34898066 NR Description: ESTs AU030224(E50782),AU077702(E50782) correspond a region of the predicted gene.~Similar to Arabidopsis thaliana
  misc_feature (1)..(227): Homolog of NCBI NO: 7452470 NR Description: hypothetical protein T29A15.240 - Arabidopsis
  misc_feature (1)..(301): Homolog of NCBI NO: 30687718 NR Description: expressed protein [Arabidopsis thaliana]
MYLKEPLWSETGKGDGSAKTEDYGAVSEVVKSLQQQRVYREVTLALRTGLRDARAEFSFLRVRALRSILKFLRSVAESDSTIDLFNQIQSIPQLQVVPVLFQHSLKESGDEYSENRVGDLSHIFGVEPMKLTSPSTDAEVALALRVLEGCCLLHPHSTALAHQHNAIQVLMNILSTRGVLEQGACLDALISLMVDSSFNQMDFEKCSGIMEVADLLRDQELDEDLRLKCGEFLLLLIGHVNGRDTPPLATIHEDTRRLLGEKSASLIWAASRQFDSTLDTEQRLTALQIQARRVLESLDLY

SEQ ID NO: 54161 - protein, 173 aa, Glycine max
  peptide (1)..(173): Ceres Seq. ID no. 15226528
  misc_feature (1)..(40): Homolog of NCBI NO: 37536150 NR Description: hypothetical protein [Oryza sativa (japonica
  misc_feature (1)..(173): Homolog of NCBI NO: 7452470 NR Description: hypothetical protein T29A15.240 - Arabidopsis
  misc_feature (1)..(98): Homolog of NCBI NO: 34898066 NR Description: ESTs AU030224(E50782),AU077702(E50782) correspond a region of the predicted gene.~Similar to Arabidopsis thaliana
  misc_feature (1)..(99): Homolog of NCBI NO: 7452470 NR Description: hypothetical protein T29A15.240 - Arabidopsis
  misc_feature (1)..(173): Homolog of NCBI NO: 30687718 NR Description: expressed protein [Arabidopsis thaliana]
MKLTSPSTDAEVALALRVLEGCCLLHPHSTALAHQHNAIQVLMNILSTRGVLEQGACLDALISLMVDSSFNQMDFEKCSGIMEVADLLRDQELDEDLRLKCGEFLLLLIGHVNGRDTPPLATIHEDTRRLLGEKSASLIWAASRQFDSTLDTEQRLTALQIQARRVLESLDLY

SEQ ID NO: 54162 - DNA, 1425 bp, Glycine max
  misc_feature (1)..(1425): Ceres Seq. ID no. 14313662
attttacactttcattacctttcacacgtgctctctcaatctctcacgtagctctctcactctcacactgatccaactccaccacaagtcagagaatccgcagatttggccaaagaatctgtagatctgacatccaaagttttaaatacactatcccctcccacctcctcgatcgtgtgtattgtgaacatcactgccacggtcatcgtcactagagtccagtgctagcttttggagcactgtgccaaattatgtcgtgccgctcatcgtcgattcagattcacaatgctaaaaacctgtcataattagattcacagtttttataaatcggtctttgcaatcgacaatctctttcttttcttttcgtgtttagggatttagtctgattcctctgtgtttcttgttattgtgcaggcattacttgcgttttctttgaatctgattttgttactattaccaaatccaaagaggctgcgtgggatttcctcaagcttgaaatatttgtcaccgatatggcttgctatggtgttttagaatttgtgatggaaagtggggccaaaggatgcgaggtttgtttatggactcctaatattgtattgcatcatgtaatggtttggttgttattgttgtttgacctgagtaggtcattactagtggaaaactgagagctctgagagccaagtccatgaaattcaaggatggatacatgatttcttttggacaaccagtcaaggattatattgactcagtagtgagacacgtgctactaagatagggtgctcttggtatcaaggttaagatcatgcttgattgggatcctaaagggaatcagagtcctaaaactccctttcctgatcttgtcacgatccacactccaaaggaggaagaatacaagtagcctccagctgtattggcaaatgatattgagtgaaagcttgtgcaaagattaaagagtaaagtctttggatctacatccaacaaaaccatgtgacaaatattgttgggggctcaattggctggagaagatatcttgatcatcttatcagttcactatgtcatgataaagatatatctagcatggaacttcttctcttacagctgcttgacagttcatgttcaagaaagagagcttgcatcagggaatagtcttcgtggttatatccacttagttgacttggcaggaagctataaaggtaacaggtaaaggatgtgtaaaggtcatctttttactacaccagaacagtgggaacaactttgtcttgaagttagaagtgttgatgttttcagaattcagcttctttccttggtgtttttttttttggttttatctactcttagttctcagtcacggcttagttattctgaagaataatgaagttgtcatttggcaatccttaattatgaaaatgaggaagcatttgtgtc

SEQ ID NO: 54163 - protein, 54 aa, Glycine max
  peptide (1)..(54): Ceres Seq. ID no. 14313663
MCKGHLFTTPEQWEQLCLEVRSVDVFRIQLLSLVFFFLVLSTLSSQSRLSYSEE

SEQ ID NO: 54164 - protein, 50 aa, Glycine max
  peptide (1)..(50): Ceres Seq. ID no. 14313664
  misc_feature (2)..(20): Homolog of NCBI NO: 38512247 NR Description: Ribosomal protein S3 [Silurana tropicalis]
  misc_feature (2)..(20): Homolog of NCBI NO: 37595356 NR Description: ribosomal protein S3 [Danio rerio]
  misc_feature (2)..(20): Homolog of NCBI NO: 28374213 NR Description: similar to 40S ribosomal protein S3 [Danio rerio]
  misc_feature (2)..(20): Homolog of NCBI NO: 22001962 NR Description: 40S ribosomal protein S3
  misc_feature (2)..(20): Homolog of NCBI NO: 32403924 NR Description: 40S RIBOSOMAL PROTEIN S3 [Neurospora crassa]
  misc_feature (2)..(20): Homolog of NCBI NO: 15225107 NR Description: 40S ribosomal protein S3 (RPS3A) [Arabidopsis
  misc_feature (2)..(20): Homolog of NCBI NO: 14192875 NR Description: Putative 40S ribosomal protein; contains
  misc_feature (2)..(20): Homolog of NCBI NO: 15238533 NR Description: 40S ribosomal protein S3 (RPS3C) [Arabidopsis
  misc_feature (2)..(20): Homolog of NCBI NO: 15232352 NR Description: 40S ribosomal protein S3 (RPS3B) [Arabidopsis
  misc_feature (2)..(20): Homolog of NCBI NO: 22204124 NR Description: putative 40S ribosomal protein S3 [Triticum
MACYGVLEFVMESGAKGCEVCLWTPNIVLHHVMVWLLLLFDLSRSLLVEN

SEQ ID NO: 54165 - protein, 48 aa, Glycine max
  peptide (1)..(48): Ceres Seq. ID no. 14313665
MIKIYLAWNFFSYSCLTVHVQERELASGNSLRGYIHLVDLAGSYKGNR

SEQ ID NO: 54166 - DNA, 1596 bp, Glycine max
  misc_feature (1)..(1596): Ceres Seq. ID no. 14313147
tttttttgtcccaaaaataataaactgttaattttttttccacaaatggcacccagttttgattgcgtttcgagccttctctgtgccgaagacaacagtatttttgacgaaaacgattatgggggttcggtggaggttttggaggacgcgtggcaggatcctagatatcgtcgaaaccttagtcaaagtgagaacttggatgtcccaaatgggttttttccattgcagagtgatgagtgcttgagactgatggtggagaaggaatgggatcacttgcctaatggtgattatgtgaataggctgaggagtggggatttggattttggggccagaaaagaggccattgattggattgaaaaggttcaacagcactttggttttggacccctctgtgcatatctatccataaactacttggaccgtttcctttctgcatatgaattaccaaagcacagagcttggacaatgcaattgttggctgtggggtgcttatctctggcagccaaaatggaagagactgatgtccctttctctcttgatttgcaggtgggtgaatctaagtatatatttgaggctaaaacaatacagagaatggagcttctggtgctgagcacattgagatggagaatgcaggcaattaccccattttccttcattgaccatttcctttacaagatcaatgatgatcaaagtccaattggagcttcaattttgcaatccatccagcttatactgagcactgtaagaggaattgacttcttagaattcagaccctcagagattgcagcagcagtggcaatatctgtggtgggggagggccaaacagtgcacactgagaaagcaatttctgttctgattcagcttgtggaaaaggagagggtcttgaagtgtgttaaaatgatccaagagctggcatcaaatagtggtggttctgccaagggtgctagtgcttctgtttctgtccctagcgtgcccgaaagcccactaggggtgttggtcactgcatgcttcagctacaaaagtgatgacacaaatgctgcttcatatgcaaattcttcacataacattagtccagatgctaaaaggaggaagctaaacaaaacctttggataatagtcattgtggcctgtgattttcaacgtcattcctaggatgcctttacttaaaaaaataagatgttatgtgctttgaaggtgccccctcaagggaatacccaatgaaggaagtaggaatgtagatagggaaagtgaaaaaataaaaaaccatgcataaaagggtgccaaaaagataaaggtggatcgtgactagtgggagatttttaagggatggaatcaacaaatttcatgctccaagccggatgtgaccactcaacaccagctgttaaatattttataggtctttttaacagctataaaagaggtagtgaaagaggagggaataagaaagaaggactagtgtatttgtatgtgtaagtacattttgtctttttacttttaaatgagggagttaaatagaaacccataaggcagaaaaaaaaaaaaaacaaaacaaaataagatgcagagctactagtattgagaaatatttgcggcattc

SEQ ID NO: 54167 - protein, 370 aa, Glycine max
  peptide (1)..(370): Ceres Seq. ID no. 14313148
  misc_feature (79)..(211): Pfam Name: Cyclin, N-terminal domain Pfam Description: Cyclin, N-terminal domain
  misc_feature (66)..(353): Homolog of NCBI NO: 21536631 NR Description: D-type cyclin [Arabidopsis thaliana]
  misc_feature (66)..(353): Homolog of NCBI NO: 15238462 NR Description: cyclin, putative [Arabidopsis thaliana]
  misc_feature (16)..(354): Homolog of NCBI NO: 19070615 NR Description: D-type cyclin [Zea mays]
  misc_feature (77)..(366): Homolog of NCBI NO: 1076312 NR Description: cyclin delta-2 - Arabidopsis thaliana
  misc_feature (25)..(366): Homolog of NCBI NO: 15227224 NR Description: cyclin delta-2 (CYCD2) [Arabidopsis thaliana]
  misc_feature (19)..(367): Homolog of NCBI NO: 18916916 NR Description: cyclin [Oryza sativa (japonica cultivar-group)]
  misc_feature (25)..(365): Homolog of NCBI NO: 22091622 NR Description: cyclin D2 [Daucus carota]
  misc_feature (16)..(367): Homolog of NCBI NO: 19070611 NR Description: D-type cyclin [Zea mays]
  misc_feature (20)..(366): Homolog of NCBI NO: 4160298 NR Description: cyclin D2.1 protein [Nicotiana tabacum]
  misc_feature (16)..(368): Homolog of NCBI NO: 7484663 NR Description: cyclin D-like protein - red goosefoot
FFCPKNNKLLIFFPQMAPSFDCVSSLLCAEDNSIFDENDYGGSVEVLEDAWQDPRYRRNLSQSENLDVPNGFFPLQSDECLRLMVEKEWDHLPNGDYVNRLRSGDLDFGARKEAIDWIEKVQQHFGFGPLCAYLSINYLDRFLSAYELPKHRAWTMQLLAVGCLSLAAKMEETDVPFSLDLQVGESKYIFEAKTIQRMELLVLSTLRWRMQAITPFSFIDHFLYKINDDQSPIGASILQSIQLILSTVRGIDFLEFRPSEIAAAVAISVVGEGQTVHTEKAISVLIQLVEKERVLKCVKMIQELASNSGGSAKGASASVSVPSVPESPLGVLVTACFSYKSDDTNAASYANSSHNISPDAKRRKLNKTFG

SEQ ID NO: 54168 - protein, 355 aa, Glycine max
  peptide (1)..(355): Ceres Seq. ID no. 14313149
  misc_feature (64)..(196): Pfam Name: Cyclin, N-terminal domain Pfam Description: Cyclin, N-terminal domain
  misc_feature (51)..(338): Homolog of NCBI NO: 21536631 NR Description: D-type cyclin [Arabidopsis thaliana]
  misc_feature (51)..(338): Homolog of NCBI NO: 15238462 NR Description: cyclin, putative [Arabidopsis thaliana]
  misc_feature (1)..(339): Homolog of NCBI NO: 19070615 NR Description: D-type cyclin [Zea mays]
  misc_feature (62)..(351): Homolog of NCBI NO: 1076312 NR Description: cyclin delta-2 - Arabidopsis thaliana
  misc_feature (10)..(351): Homolog of NCBI NO: 15227224 NR Description: cyclin delta-2 (CYCD2) [Arabidopsis thaliana]
  misc_feature (4)..(352): Homolog of NCBI NO: 18916916 NR Description: cyclin [Oryza sativa (japonica cultivar-group)]
  misc_feature (10)..(350): Homolog of NCBI NO: 22091622 NR Description: cyclin D2 [Daucus carota]
  misc_feature (1)..(352): Homolog of NCBI NO: 19070611 NR Description: D-type cyclin [Zea mays]
  misc_feature (5)..(351): Homolog of NCBI NO: 4160298 NR Description: cyclin D2.1 protein [Nicotiana tabacum]
  misc_feature (1)..(353): Homolog of NCBI NO: 7484663 NR Description: cyclin D-like protein - red goosefoot
MAPSFDCVSSLLCAEDNSIFDENDYGGSVEVLEDAWQDPRYRRNLSQSENLDVPNGFFPLQSDECLRLMVEKEWDHLPNGDYVNRLRSGDLDFGARKEAIDWIEKVQQHFGFGPLCAYLSINYLDRFLSAYELPKHRAWTMQLLAVGCLSLAAKMEETDVPFSLDLQVGESKYIFEAKTIQRMELLVLSTLRWRMQAITPFSFIDHFLYKINDDQSPIGASILQSIQLILSTVRGIDFLEFRPSEIAAAVAISVVGEGQTVHTEKAISVLIQLVEKERVLKCVKMIQELASNSGGSAKGASASVSVPSVPESPLGVLVTACFSYKSDDTNAASYANSSHNISPDAKRRKLNKTFG

SEQ ID NO: 54169 - protein, 287 aa, Glycine max
  peptide (1)..(287): Ceres Seq. ID no. 14313150
  misc_feature (1)..(128): Pfam Name: Cyclin, N-terminal domain Pfam Description: Cyclin, N-terminal domain
  misc_feature (1)..(270): Homolog of NCBI NO: 21536631 NR Description: D-type cyclin [Arabidopsis thaliana]
  misc_feature (1)..(270): Homolog of NCBI NO: 15238462 NR Description: cyclin, putative [Arabidopsis thaliana]
  misc_feature (1)..(271): Homolog of NCBI NO: 19070615 NR Description: D-type cyclin [Zea mays]
  misc_feature (1)..(283): Homolog of NCBI NO: 1076312 NR Description: cyclin delta-2 - Arabidopsis thaliana
  misc_feature (1)..(283): Homolog of NCBI NO: 15227224 NR Description: cyclin delta-2 (CYCD2) [Arabidopsis thaliana]
  misc_feature (1)..(284): Homolog of NCBI NO: 18916916 NR Description: cyclin [Oryza sativa (japonica cultivar-group)]
  misc_feature (1)..(282): Homolog of NCBI NO: 22091622 NR Description: cyclin D2 [Daucus carota]
  misc_feature (1)..(284): Homolog of NCBI NO: 19070611 NR Description: D-type cyclin [Zea mays]
  misc_feature (1)..(283): Homolog of NCBI NO: 4160298 NR Description: cyclin D2.1 protein [Nicotiana tabacum]
  misc_feature (1)..(285): Homolog of NCBI NO: 7484663 NR Description: cyclin D-like protein - red goosefoot
MVEKEWDHLPNGDYVNRLRSGDLDFGARKEAIDWIEKVQQHFGFGPLCAYLSINYLDRFLSAYELPKHRAWTMQLLAVGCLSLAAKMEETDVPFSLDLQVGESKYIFEAKTIQRMELLVLSTLRWRMQAITPFSFIDHFLYKINDDQSPIGASILQSIQLILSTVRGIDFLEFRPSEIAAAVAISVVGEGQTVHTEKAISVLIQLVEKERVLKCVKMIQELASNSGGSAKGASASVSVPSVPESPLGVLVTACFSYKSDDTNAASYANSSHNISPDAKRRKLNKTFG

SEQ ID NO: 54170 - DNA, 1225 bp, Glycine max
  misc_feature (1)..(1225): Ceres Seq. ID no. 14307119
gttgggaatttagggatttgcgtttactgatctcaagtcttccacctcactgtcgtagcgtagtgattgtggggtttctcttctcagttctcatcgtgacgatcttgctgctccgaaaaagggttttcctaacatcgcccattcaatttccgggctgttcagttcgtgaatagactgttgtttgttctaaaaagtagtggatagtaaaaattatcgaacttttttaagagaaaaatgcagagtaaagaagcagttgtggaagatggggaaataaagagtgtgactgctgtagggtctgaaattgatgggtggaccaattttggggatgatgacataatgcaacagcagtatacaattctggctgaggaagccaagaaggttccatttgtgggtgacaaggaaccactgagtagcttagctgctgaatataaattaggcagtcctatcttgctggagaaaataaaggtgcttgatgagcaatatgctgccattcgtcgtactcggggagatggaaactgcttctttcgaagctttatgttttcatatcttgagcatattatggaatgtcaagaccaagcagaaattgatcgtatccaagccaatgttgaaaaaagtagaaaggcgctgcagaccttgggttatgcagacttgacttttgaagatttttttgcgttattccttgagcagctggaatctgttattcaagggaaagagacttccataagtcatgaagagcttgttcttagaagccgagatcagtcaatatctgattatgtcgttatgttcttcagatttgttacctctgctgaaatacaaaagcgtgcagaattttttgaaccattcatactgggcttaactaatacaacagtcgagcagttttgcaaatcatctgttgaaccaatgggtgaagagagcgaccacatgcacattactgccctttcggacgcattgggcattccaatccgtgttgtgtaccttgaccgcagctcatgtgatactggcggtgtcagtgtaaatcatcatgatttcatgccagtggctggtgatctcccaaatgctagttgcagctctgaaaagaacattcctttcatcacgctgctatatcgtcctggtcactatgatatcctctatacaaaatgatgacctttttggggggaaaagacctttgtttgttacttttttggtggtagtgggagccgcaacagctctgcactcagagctgttg

SEQ ID NO: 54171 - protein, 301 aa, Glycine max
  peptide (1)..(301): Ceres Seq. ID no. 14307120
  misc_feature (90)..(265): Pfam Name: OTU-like cysteine protease Pfam Description: OTU-like cysteine protease
  misc_feature (270)..(299): Homolog of NCBI NO: 13960159 NR Description: Unknown (protein for MGC:4584) [Homo sapiens]
  misc_feature (270)..(299): Homolog of NCBI NO: 19527388 NR Description: expressed sequence AI850305 [Mus musculus]
  misc_feature (270)..(299): Homolog of NCBI NO: 6841176 NR Description: HSPC263 [Homo sapiens]
  misc_feature (9)..(265): Homolog of NCBI NO: 13960159 NR Description: Unknown (protein for MGC:4584) [Homo sapiens]
  misc_feature (9)..(265): Homolog of NCBI NO: 19527388 NR Description: expressed sequence AI850305 [Mus musculus]
  misc_feature (9)..(265): Homolog of NCBI NO: 32484336 NR Description: AI850305 protein [Mus musculus]
  misc_feature (9)..(265): Homolog of NCBI NO: 6841176 NR Description: HSPC263 [Homo sapiens]
  misc_feature (101)..(301): Homolog of NCBI NO: 38175546 NR Description: putative ubiquitin-specific protease otubain 1
  misc_feature (1)..(301): Homolog of NCBI NO: 18396650 NR Description: expressed protein [Arabidopsis thaliana]
  misc_feature (1)..(301): Homolog of NCBI NO: 21536634 NR Description: unknown [Arabidopsis thaliana]
MQSKEAVVEDGEIKSVTAVGSEIDGWTNFGDDDIMQQQYTILAEEAKKVPFVGDKEPLSSLAAEYKLGSPILLEKIKVLDEQYAAIRRTRGDGNCFFRSFMFSYLEHIMECQDQAEIDRIQANVEKSRKALQTLGYADLTFEDFFALFLEQLESVIQGKETSISHEELVLRSRDQSISDYVVMFFRFVTSAEIQKRAEFFEPFILGLTNTTVEQFCKSSVEPMGEESDHMHITALSDALGIPIRVVYLDRSSCDTGGVSVNHHDFMPVAGDLPNASCSSEKNIPFITLLYRPGHYDILYTK

SEQ ID NO: 54172 - protein, 267 aa, Glycine max
  peptide (1)..(267): Ceres Seq. ID no. 14307121
  misc_feature (56)..(231): Pfam Name: OTU-like cysteine protease Pfam Description: OTU-like cysteine protease
  misc_feature (236)..(265): Homolog of NCBI NO: 32484336 NR Description: AI850305 protein [Mus musculus]
  misc_feature (236)..(265): Homolog of NCBI NO: 19527388 NR Description: expressed sequence AI850305 [Mus musculus]
  misc_feature (236)..(265): Homolog of NCBI NO: 6841176 NR Description: HSPC263 [Homo sapiens]
  misc_feature (1)..(231): Homolog of NCBI NO: 32484336 NR Description: AI850305 protein [Mus musculus]
  misc_feature (1)..(231): Homolog of NCBI NO: 19527388 NR Description: expressed sequence AI850305 [Mus musculus]
  misc_feature (1)..(231): Homolog of NCBI NO: 13960159 NR Description: Unknown (protein for MGC:4584) [Homo sapiens]
  misc_feature (1)..(231): Homolog of NCBI NO: 6841176 NR Description: HSPC263 [Homo sapiens]
  misc_feature (67)..(267): Homolog of NCBI NO: 38175546 NR Description: putative ubiquitin-specific protease otubain 1
  misc_feature (1)..(267): Homolog of NCBI NO: 18396650 NR Description: expressed protein [Arabidopsis thaliana]
  misc_feature (1)..(267): Homolog of NCBI NO: 21536634 NR Description: unknown [Arabidopsis thaliana]
MQQQYTILAEEAKKVPFVGDKEPLSSLAAEYKLGSPILLEKIKVLDEQYAAIRRTRGDGNCFFRSFMFSYLEHIMECQDQAEIDRIQANVEKSRKALQTLGYADLTFEDFFALFLEQLESVIQGKETSISHEELVLRSRDQSISDYVVMFFRFVTSAEIQKRAEFFEPFILGLTNTTVEQFCKSSVEPMGEESDHMHITALSDALGIPIRVVYLDRSSCDTGGVSVNHHDFMPVAGDLPNASCSSEKNIPFITLLYRPGHYDILYTK

SEQ ID NO: 54173 - protein, 201 aa, Glycine max
  peptide (1)..(201): Ceres Seq. ID no. 14307122
  misc_feature (1)..(165): Pfam Name: OTU-like cysteine protease Pfam Description: OTU-like cysteine protease
  misc_feature (170)..(199): Homolog of NCBI NO: 13960159 NR Description: Unknown (protein for MGC:4584) [Homo sapiens]
  misc_feature (170)..(199): Homolog of NCBI NO: 32484336 NR Description: AI850305 protein [Mus musculus]
  misc_feature (170)..(199): Homolog of NCBI NO: 6841176 NR Description: HSPC263 [Homo sapiens]
  misc_feature (1)..(165): Homolog of NCBI NO: 19527388 NR Description: expressed sequence AI850305 [Mus musculus]
  misc_feature (1)..(165): Homolog of NCBI NO: 32484336 NR Description: AI850305 protein [Mus musculus]
  misc_feature (1)..(165): Homolog of NCBI NO: 13960159 NR Description: Unknown (protein for MGC:4584) [Homo sapiens]
  misc_feature (1)..(165): Homolog of NCBI NO: 6841176 NR Description: HSPC263 [Homo sapiens]
  misc_feature (1)..(201): Homolog of NCBI NO: 38175546 NR Description: putative ubiquitin-specific protease otubain 1
  misc_feature (1)..(201): Homolog of NCBI NO: 18396650 NR Description: expressed protein [Arabidopsis thaliana]
  misc_feature (1)..(201): Homolog of NCBI NO: 21536634 NR Description: unknown [Arabidopsis thaliana]
MFSYLEHIMECQDQAEIDRIQANVEKSRKALQTLGYADLTFEDFFALFLEQLESVIQGKETSISHEELVLRSRDQSISDYVVMFFRFVTSAEIQKRAEFFEPFILGLTNTTVEQFCKSSVEPMGEESDHMHITALSDALGIPIRVVYLDRSSCDTGGVSVNHHDFMPVAGDLPNASCSSEKNIPFITLLYRPGHYDILYTK

SEQ ID NO: 54174 - DNA, 1360 bp, Glycine max
  misc_feature (1)..(1360): Ceres Seq. ID no. 15177803
atcatcgcatcttatcttcgctgccactgcaacagggtaggttaaagttctctctttatccttcttattccaataccacaataaacctcttaacttttcactaacctacgcaactcctatcactatccgtgcaaataaatgcaatcaatgaccctttttctctctcttgaaattaccttcttcctctgtaagagctgatttgccaggatcactaatttaacagcaacaaatggccaccttcattttcaaatgcttctgagacattatttcatcaataaggaagatgcatgagttctccattgttgatggttttgtggagataagtgaatgcatggcagagatgaccaagtacgtggctaatgaaccatccgttgggcttttctttatccaacagcatgctcaaaatgcagtacccaatatcatcaaagttaagaaaaatgttgttgagaagtctcatgaaacaactttgcacacagaagatttggaggactctgtcacaatggttcaatcaatgaaagagtgtggatttcccatagctgataagatgatcagagagattaaaaaatctctgataactatggaaacaaaacaaccgaaaagagggttaatccatccagcatcaagttctcattcagaaagagctagtttcttgggtaacgctgcattttatgctcaggagggcaatgaaaaaaggagtaactatttctcaaatgttttgaagtcagcaaaagagaaggctggcagcttcaagtggcggcagcttgatactcggggatcaatagattccacggatgagaagccaccaatgtaccctaatttgccgttgttggtcacatctgcaagcattacttcatcttttcgggctgccgaaactgatgagttgcctgtatcaagccaggttgaagacgagtctcagcacaaacagaccgatgttagtgatatcagcattaatttattgtcagtatcagaaagattcgacgacttcaaagctaataaagaagctaaactagcggagtggctggacggaactggcaaccttgatgataattgcggcacaggtgatgagaaaaggtcttagtttggcatgataaagaagctatacttcaataaaatgcttcaccccgtacatgctgttgtacaacatcaagtttctctgaattgtgattataaataaaatgatttttttgtaatgctgtagagattttctttgaaatttaaacaagcatgattctgtacggggtttgatcatgcatgatattgcattccttctacctggaacttcaatatttatttcttatgtcaactgatggaaaggagattttcaagaatgttgagaaaataagacttaaagagagtagtt

SEQ ID NO: 54175 - protein, 264 aa, Glycine max
  peptide (1)..(264): Ceres Seq. ID no. 15177804
  misc_feature (1)..(170): Homolog of NCBI NO: 15225042 NR Description: expressed protein [Arabidopsis thaliana]
MHEFSIVDGFVEISECMAEMTKYVANEPSVGLFFIQQHAQNAVPNIIKVKKNVVEKSHETTLHTEDLEDSVTMVQSMKECGFPIADKMIREIKKSLITMETKQPKRGLIHPASSSHSERASFLGNAAFYAQEGNEKRSNYFSNVLKSAKEKAGSFKWRQLDTRGSIDSTDEKPPMYPNLPLLVTSASITSSFRAAETDELPVSSQVEDESQHKQTDVSDISINLLSVSERFDDFKANKEAKLAEWLDGTGNLDDNCGTGDEKRS

SEQ ID NO: 54176 - protein, 248 aa, Glycine max
  peptide (1)..(248): Ceres Seq. ID no. 15177805
  misc_feature (1)..(154): Homolog of NCBI NO: 15225042 NR Description: expressed protein [Arabidopsis thaliana]
MAEMTKYVANEPSVGLFFIQQHAQNAVPNIIKVKKNVVEKSHETTLHTEDLEDSVTMVQSMKECGFPIADKMIREIKKSLITMETKQPKRGLIHPASSSHSERASFLGNAAFYAQEGNEKRSNYFSNVLKSAKEKAGSFKWRQLDTRGSIDSTDEKPPMYPNLPLLVTSASITSSFRAAETDELPVSSQVEDESQHKQTDVSDISINLLSVSERFDDFKANKEAKLAEWLDGTGNLDDNCGTGDEKRS

SEQ ID NO: 54177 - protein, 245 aa, Glycine max
  peptide (1)..(245): Ceres Seq. ID no. 15177806
  misc_feature (1)..(151): Homolog of NCBI NO: 15225042 NR Description: expressed protein [Arabidopsis thaliana]
MTKYVANEPSVGLFFIQQHAQNAVPNIIKVKKNVVEKSHETTLHTEDLEDSVTMVQSMKECGFPIADKMIREIKKSLITMETKQPKRGLIHPASSSHSERASFLGNAAFYAQEGNEKRSNYFSNVLKSAKEKAGSFKWRQLDTRGSIDSTDEKPPMYPNLPLLVTSASITSSFRAAETDELPVSSQVEDESQHKQTDVSDISINLLSVSERFDDFKANKEAKLAEWLDGTGNLDDNCGTGDEKRS

SEQ ID NO: 54178 - DNA, 1334 bp, Glycine max
  misc_feature (1)..(1334): Ceres Seq. ID no. 15171088
gggtaatgctttcggaacatgtgctgatttaactatacttcatattgccagcttggatacacaaaaaaacaagaagagagacatttccgaggagtgattacattagaggaatgcaatattgacgagattcctgatgatgatgaagcctccacaaagaattccaaggataaaaagtccaacggacctgattctggaaaagcatcaaaccttattttcaagataacaagcaaggtcccatacaagactgttatgaaatctgaaagtgcagttttgttaaaggctgagagtatggcagataaggttgagtggatcaacaagttaagaagtgttgcacaggctaaaggaggtcaagccattggtgaacctagttttcctatgcggcaaagcctttctgatgggtctcttgatacgatggccaggaaacctgcagatccagaggaggagctcagatggatgtctcaagaagtccgtggttatgttgaagctgttcttaacagccttgcagctaatgttccaaaagcagttgttctttgccaagtagagaaagccaaagaagacatgctgaaccagctatacagttccgtcagcgctcaaagctctgcaaaaattgaggagctgctccaggaagaccacaatgtcaagaacaaaagggagcgagttcagaaacagtctgcccttctttcaaaactcactaggcagcttggtgtccatgacaatagagcggctgcagcatccagttggtctgatagagggagtgcagcagaaagcagcccaagaagctctggaccctcatcaggtgatgattggaggtctgcatttgattctgctgccaatggtccaagcaacctgacgtctaggtatggttctggtggtcatagtagacgctacagtgacccatcccaaaatggtgatgtgagctcaggctcaaattccaacagtcgtcggacgccaactcggttgcccccggctcccccacaatctggttcaagatattagatgaagctacatatggttttaatcaaaattatgcactcatcggatggacgctttcagttttttctacttatatcgagactgtccctcctccttttagactttagtcggaatgttatagttttgtagataacgaaagtattgctatcgcattcatcttaaggtcatacgcagtctgcgtcctattttattcccttactgggtatgtgggggcattgttgggtgagatgattttgtgtcttcccaacattctttttctttacaaatgtaattgttttgtatgcaatgtgattatcagcatttacataaatgcgcattaatcgcgactgccttttgttttc

SEQ ID NO: 54179 - protein, 248 aa, Glycine max
  peptide (1)..(248): Ceres Seq. ID no. 15171089
  misc_feature (61)..(154): Pfam Name: Dynamin GTPase effector domain Pfam Description: Dynamin GTPase effector domain
  misc_feature (1)..(220): Homolog of NCBI NO: 38175440 NR Description: putative dynamin homolog [Oryza sativa (japonica
  misc_feature (1)..(160): Homolog of NCBI NO: 4803836 NR Description: a dynamin-like protein ADL3 [Arabidopsis thaliana]
  misc_feature (3)..(248): Homolog of NCBI NO: 25404867 NR Description: protein T30E16.17 [imported] - Arabidopsis
  misc_feature (3)..(248): Homolog of NCBI NO: 8778745 NR Description: T30E16.17 [Arabidopsis thaliana]
  misc_feature (1)..(248): Homolog of NCBI NO: 15218837 NR Description: dynamin-related protein [Arabidopsis thaliana]
  misc_feature (1)..(248): Homolog of NCBI NO: 6526977 NR Description: dynamin-like protein [Arabidopsis thaliana]
  misc_feature (1)..(248): Homolog of NCBI NO: 15218486 NR Description: phragmoplastin -related [Arabidopsis thaliana]
  misc_feature (1)..(248): Homolog of NCBI NO: 25402594 NR Description: protein F14N23.17 [imported] - Arabidopsis
  misc_feature (1)..(248): Homolog of NCBI NO: 6651399 NR Description: dynamin-like protein 6 [Arabidopsis thaliana]
  misc_feature (1)..(248): Homolog of NCBI NO: 6625788 NR Description: dynamin homolog [Astragalus sinicus]
MKSESAVLLKAESMADKVEWINKLRSVAQAKGGQAIGEPSFPMRQSLSDGSLDTMARKPADPEEELRWMSQEVRGYVEAVLNSLAANVPKAVVLCQVEKAKEDMLNQLYSSVSAQSSAKIEELLQEDHNVKNKRERVQKQSALLSKLTRQLGVHDNRAAAASSWSDRGSAAESSPRSSGPSSGDDWRSAFDSAANGPSNLTSRYGSGGHSRRYSDPSQNGDVSSGSNSNSRRTPTRLPPAPPQSGSRY

SEQ ID NO: 54180 - protein, 235 aa, Glycine max
  peptide (1)..(235): Ceres Seq. ID no. 15171090
  misc_feature (48)..(141): Pfam Name: Dynamin GTPase effector domain Pfam Description: Dynamin GTPase effector domain
  misc_feature (1)..(207): Homolog of NCBI NO: 38175440 NR Description: putative dynamin homolog [Oryza sativa (japonica
  misc_feature (1)..(147): Homolog of NCBI NO: 4803836 NR Description: a dynamin-like protein ADL3 [Arabidopsis thaliana]
  misc_feature (1)..(235): Homolog of NCBI NO: 25404867 NR Description: protein T30E16.17 [imported] - Arabidopsis
  misc_feature (1)..(235): Homolog of NCBI NO: 8778745 NR Description: T30E16.17 [Arabidopsis thaliana]
  misc_feature (1)..(235): Homolog of NCBI NO: 15218837 NR Description: dynamin-related protein [Arabidopsis thaliana]
  misc_feature (1)..(235): Homolog of NCBI NO: 6526977 NR Description: dynamin-like protein [Arabidopsis thaliana]
  misc_feature (1)..(235): Homolog of NCBI NO: 25402594 NR Description: protein F14N23.17 [imported] - Arabidopsis
  misc_feature (1)..(235): Homolog of NCBI NO: 15218486 NR Description: phragmoplastin -related [Arabidopsis thaliana]
  misc_feature (1)..(235): Homolog of NCBI NO: 6651399 NR Description: dynamin-like protein 6 [Arabidopsis thaliana]
  misc_feature (1)..(235): Homolog of NCBI NO: 6625788 NR Description: dynamin homolog [Astragalus sinicus]
MADKVEWINKLRSVAQAKGGQAIGEPSFPMRQSLSDGSLDTMARKPADPEEELRWMSQEVRGYVEAVLNSLAANVPKAVVLCQVEKAKEDMLNQLYSSVSAQSSAKIEELLQEDHNVKNKRERVQKQSALLSKLTRQLGVHDNRAAAASSWSDRGSAAESSPRSSGPSSGDDWRSAFDSAANGPSNLTSRYGSGGHSRRYSDPSQNGDVSSGSNSNSRRTPTRLPPAPPQSGSRY

SEQ ID NO: 54181 - protein, 206 aa, Glycine max
  peptide (1)..(206): Ceres Seq. ID no. 15171091
  misc_feature (19)..(112): Pfam Name: Dynamin GTPase effector domain Pfam Description: Dynamin GTPase effector domain
  misc_feature (1)..(178): Homolog of NCBI NO: 38175440 NR Description: putative dynamin homolog [Oryza sativa (japonica
  misc_feature (1)..(118): Homolog of NCBI NO: 4803836 NR Description: a dynamin-like protein ADL3 [Arabidopsis thaliana]
  misc_feature (1)..(206): Homolog of NCBI NO: 25404867 NR Description: protein T30E16.17 [imported] - Arabidopsis
  misc_feature (1)..(206): Homolog of NCBI NO: 8778745 NR Description: T30E16.17 [Arabidopsis thaliana]
  misc_feature (1)..(206): Homolog of NCBI NO: 15218837 NR Description: dynamin-related protein [Arabidopsis thaliana]
  misc_feature (1)..(206): Homolog of NCBI NO: 6526977 NR Description: dynamin-like protein [Arabidopsis thaliana]
  misc_feature (1)..(206): Homolog of NCBI NO: 25402594 NR Description: protein F14N23.17 [imported] - Arabidopsis
  misc_feature (1)..(206): Homolog of NCBI NO: 15218486 NR Description: phragmoplastin -related [Arabidopsis thaliana]
  misc_feature (1)..(206): Homolog of NCBI NO: 6651399 NR Description: dynamin-like protein 6 [Arabidopsis thaliana]
  misc_feature (1)..(206): Homolog of NCBI NO: 6625788 NR Description: dynamin homolog [Astragalus sinicus]
MRQSLSDGSLDTMARKPADPEEELRWMSQEVRGYVEAVLNSLAANVPKAVVLCQVEKAKEDMLNQLYSSVSAQSSAKIEELLQEDHNVKNKRERVQKQSALLSKLTRQLGVHDNRAAAASSWSDRGSAAESSPRSSGPSSGDDWRSAFDSAANGPSNLTSRYGSGGHSRRYSDPSQNGDVSSGSNSNSRRTPTRLPPAPPQSGSRY

SEQ ID NO: 54182 - DNA, 1575 bp, Glycine max
  misc_feature (1)..(1575): Ceres Seq. ID no. 14307123
gaactcaacaacaacccaaagataaaaagcacaacacaagacactgaactcgcactcactgggttttcaaccatggatgcgatacggaagcagctcgatgtgttgatgggagccaaccgtaacggcgacgtccgtgaagtcaatcgcaagtactacgatcgcgacgtctgtcgtctctacctcgtcggtctctgccctcacgaactcttccagttaacgaaaatggatatgggcccttgccctaaggtccactccttgcagctccggaaagaatacgaggaggcgaaagcaaaggggaccgataattatgacagggagttggaggatgtaatagataagcttattggtgagtgtgataggaaaattggcagggctctaaagcggctcgaggacgacgatgcgaaagcggctattgcaatttcggtctctgaagttactcaaacagatgaggtgcttgagttgtcgaagcaaatcaaagagaaattgaaagaagctgatcaatatgatcttgaaggcaagtcagatctcaagattcgagctttagaggttgtagaggaacttagaactaagagagcggacaagcagtctatgcttcttttagatgccttcaacaaagatagggcatctttgcctacacctctgccaaatccaccacctttggcacctcttcctgtagttgctcctgatgctcgaacacaggagatgataaatgaaaagctgaagaaggctgaggatcttggtgagcaaggaatggttgatgaggctcaaaaagcattggaagaggctgaagcacttaagaagcttcctgccaggcaggagccagtgttggattcttcaaagtatacagctgtggatgtgcggattactgatcagaagctacgtgtgtgcgacatttgtggagcatttttgagtgtttatgacagtgatcgccgtttagctgatcattttggaggcaaacttcatttagggtatatgcagattcgtgagaagttagccgaacttcaagaagaaaggaacaagagccgaaagactgatcggcttgatgacaggagatcaaaagaacggagtagggatcgagacagggagtctagtagggaccgtgaacttggtgatagtcgtgaacgagggcgagaccatgatcgtaggagcagagatcatgataggcattatgatagagatcgtggatatgatcgagaccgtgacagagactcagaccgcacccgctcctatgactcaagaagtcgtcggaggtcacgctctagatcccgagagcgatctagagattatgatcgacataggcgtcatgatcgatactagcaattgccatgaatcttatgggtatgagaaaatgtctagtttaggtgggtgttgaacctcatgttgaacaaataattttgcaatttcttctgtgttgaaccgtttctcggatgatggatgtaacttgagcttaggtgtcgctaaattatggtttgatgttgctttgcagacattaaatccaatttgtaatctgccttactttggagcagttcttgctattgtgcttaaaaatagtagtttgattggattgccatttac

SEQ ID NO: 54183 - protein, 438 aa, Glycine max
  peptide (1)..(438): Ceres Seq. ID no. 14307124
  misc_feature (25)..(375): Pfam Name: LUC7 N_terminus Pfam Description: LUC7 N_terminus
  misc_feature (234)..(437): Homolog of NCBI NO: 31222227 NR Description: ENSANGP00000018276 [Anopheles gambiae]
  misc_feature (23)..(195): Homolog of NCBI NO: 31222227 NR Description: ENSANGP00000018276 [Anopheles gambiae]
  misc_feature (234)..(427): Homolog of NCBI NO: 31222227 NR Description: ENSANGP00000018276 [Anopheles gambiae]
  misc_feature (25)..(419): Homolog of NCBI NO: 6017114 NR Description: unknown protein [Arabidopsis thaliana]
  misc_feature (122)..(438): Homolog of NCBI NO: 6017114 NR Description: unknown protein [Arabidopsis thaliana]
  misc_feature (91)..(438): Homolog of NCBI NO: 11357938 NR Description: hypothetical protein K3M16_10 - Arabidopsis
  misc_feature (75)..(438): Homolog of NCBI NO: 21595481 NR Description: unknown [Arabidopsis thaliana]
  misc_feature (25)..(438): Homolog of NCBI NO: 29367401 NR Description: sarcoplasmic reticulum protein-like protein
  misc_feature (25)..(438): Homolog of NCBI NO: 30678827 NR Description: expressed protein [Arabidopsis thaliana]
  misc_feature (25)..(438): Homolog of NCBI NO: 18418301 NR Description: expressed protein [Arabidopsis thaliana]
ELNNNPKIKSTTQDTELALTGFSTMDAIRKQLDVLMGANRNGDVREVNRKYYDRDVCRLYLVGLCPHELFQLTKMDMGPCPKVHSLQLRKEYEEAKAKGTDNYDRELEDVIDKLIGECDRKIGRALKRLEDDDAKAAIAISVSEVTQTDEVLELSKQIKEKLKEADQYDLEGKSDLKIRALEVVEELRTKRADKQSMLLLDAFNKDRASLPTPLPNPPPLAPLPVVAPDARTQEMINEKLKKAEDLGEQGMVDEAQKALEEAEALKKLPARQEPVLDSSKYTAVDVRITDQKLRVCDICGAFLSVYDSDRRLADHFGGKLHLGYMQIREKLAELQEERNKSRKTDRLDDRRSKERSRDRDRESSRDRELGDSRERGRDHDRRSRDHDRHYDRDRGYDRDRDRDSDRTRSYDSRSRRRSRSRSRERSRDYDRHRRHDRY

SEQ ID NO: 54184 - protein, 414 aa, Glycine max
  peptide (1)..(414): Ceres Seq. ID no. 14307125
  misc_feature (1)..(351): Pfam Name: LUC7 N_terminus Pfam Description: LUC7 N_terminus
  misc_feature (210)..(413): Homolog of NCBI NO: 31222227 NR Description: ENSANGP00000018276 [Anopheles gambiae]
  misc_feature (1)..(171): Homolog of NCBI NO: 31222227 NR Description: ENSANGP00000018276 [Anopheles gambiae]
  misc_feature (210)..(403): Homolog of NCBI NO: 31222227 NR Description: ENSANGP00000018276 [Anopheles gambiae]
  misc_feature (1)..(395): Homolog of NCBI NO: 6017114 NR Description: unknown protein [Arabidopsis thaliana]
  misc_feature (98)..(414): Homolog of NCBI NO: 6017114 NR Description: unknown protein [Arabidopsis thaliana]
  misc_feature (67)..(414): Homolog of NCBI NO: 11357938 NR Description: hypothetical protein K3M16_10 - Arabidopsis
  misc_feature (51)..(414): Homolog of NCBI NO: 21595481 NR Description: unknown [Arabidopsis thaliana]
  misc_feature (1)..(414): Homolog of NCBI NO: 29367401 NR Description: sarcoplasmic reticulum protein-like protein
  misc_feature (1)..(414): Homolog of NCBI NO: 30678827 NR Description: expressed protein [Arabidopsis thaliana]
  misc_feature (1)..(414): Homolog of NCBI NO: 18418301 NR Description: expressed protein [Arabidopsis thaliana]
MDAIRKQLDVLMGANRNGDVREVNRKYYDRDVCRLYLVGLCPHELFQLTKMDMGPCPKVHSLQLRKEYEEAKAKGTDNYDRELEDVIDKLIGECDRKIGRALKRLEDDDAKAAIAISVSEVTQTDEVLELSKQIKEKLKEADQYDLEGKSDLKIRALEVVEELRTKRADKQSMLLLDAFNKDRASLPTPLPNPPPLAPLPVVAPDARTQEMINEKLKKAEDLGEQGMVDEAQKALEEAEALKKLPARQEPVLDSSKYTAVDVRITDQKLRVCDICGAFLSVYDSDRRLADHFGGKLHLGYMQIREKLAELQEERNKSRKTDRLDDRRSKERSRDRDRESSRDRELGDSRERGRDHDRRSRDHDRHYDRDRGYDRDRDRDSDRTRSYDSRSRRRSRSRSRERSRDYDRHRRHDRY

SEQ ID NO: 54185 - protein, 403 aa, Glycine max
  peptide (1)..(403): Ceres Seq. ID no. 14307126
  misc_feature (1)..(340): Pfam Name: LUC7 N_terminus Pfam Description: LUC7 N_terminus
  misc_feature (199)..(402): Homolog of NCBI NO: 31222227 NR Description: ENSANGP00000018276 [Anopheles gambiae]
  misc_feature (1)..(160): Homolog of NCBI NO: 31222227 NR Description: ENSANGP00000018276 [Anopheles gambiae]
  misc_feature (199)..(392): Homolog of NCBI NO: 31222227 NR Description: ENSANGP00000018276 [Anopheles gambiae]
  misc_feature (1)..(384): Homolog of NCBI NO: 6017114 NR Description: unknown protein [Arabidopsis thaliana]
  misc_feature (87)..(403): Homolog of NCBI NO: 6017114 NR Description: unknown protein [Arabidopsis thaliana]
  misc_feature (56)..(403): Homolog of NCBI NO: 11357938 NR Description: hypothetical protein K3M16_10 - Arabidopsis
  misc_feature (40)..(403): Homolog of NCBI NO: 21595481 NR Description: unknown [Arabidopsis thaliana]
  misc_feature (1)..(403): Homolog of NCBI NO: 29367401 NR Description: sarcoplasmic reticulum protein-like protein
  misc_feature (1)..(403): Homolog of NCBI NO: 30678827 NR Description: expressed protein [Arabidopsis thaliana]
  misc_feature (1)..(403): Homolog of NCBI NO: 18418301 NR Description: expressed protein [Arabidopsis thaliana]
MGANRNGDVREVNRKYYDRDVCRLYLVGLCPHELFQLTKMDMGPCPKVHSLQLRKEYEEAKAKGTDNYDRELEDVIDKLIGECDRKIGRALKRLEDDDAKAAIAISVSEVTQTDEVLELSKQIKEKLKEADQYDLEGKSDLKIRALEVVEELRTKRADKQSMLLLDAFNKDRASLPTPLPNPPPLAPLPVVAPDARTQEMINEKLKKAEDLGEQGMVDEAQKALEEAEALKKLPARQEPVLDSSKYTAVDVRITDQKLRVCDICGAFLSVYDSDRRLADHFGGKLHLGYMQIREKLAELQEERNKSRKTDRLDDRRSKERSRDRDRESSRDRELGDSRERGRDHDRRSRDHDRHYDRDRGYDRDRDRDSDRTRSYDSRSRRRSRSRSRERSRDYDRHRRHDRY

SEQ ID NO: 54186 - DNA, 1831 bp, Glycine max
  misc_feature (1)..(1831): Ceres Seq. ID no. 15178007
gcggcgactcggattttaccggcgtagggtttgacttgccggtagtgaagcctcctggaaattcgccggcggtgaatgcgaaaaacgttgccggagaaaagagggaagagtctggcaaagaagtacaccctgatctgccatcaatttcaaagccactgaaagaaaaaaatacaaagggtgagagacgagcattgcaggaggcacaaagagctgcaaaagctgcttctaaagctgatggaaacacaacagttgctgaaactaggagggcagcccccagtaaaagaatgtggcagtcttcacaaaagaaagatggtcctcttgttatgtcaccagtggctactgacaagaaatcaggagatcgtcctttggagaaagagaggaaaaaagatgctcctcctccacgaatgcaatttgatgataaaaacagagtggaaaaggccaaaaggcgtgctgtagttgatcagaatgaagctagaaacagagttgaattatttcgccatttgcctcaatatgaacgttggactcagcttcctaaacttgaatcaaagtttttccaactggattcagtgcatcttgctgtgttcaaggttggaatgcgttatttggcaggagatatatctgggagtaatgcccgatgtattgaaatgcttagagcatttcaggaagccattatagactactccacaccgcctgggaaagtccttgtcagggatttaactgcaaaaatcagtagttatgtttcattttttagtgaatgcagaccactttctattagcatgggaaatgcaattaggtttgtaaagagttgtgttgccaagttgcctttaagtcatactgaatctgaagcaaaagcagctctttgttcagatattaatcaattcatcaacgaaaaaataattcttgctgataaggtgattgttggacatgctgcttcgaaagttagggatggagacgttcttcttacatatggatcatcatgtgttgttgagatgattcttttatatgcccatgatcttgggaaacagttccgtgttgtggtggtagactcacgaccaaagtttgaaagccgggccttacttcgtagactggtggctaggggcctgagttgtacatatacccatataaatgctgtttcttatgtcatgcatgaggtcacacgagtttttcttggagcatcttccattctgtgtaatggaactgcatatgcaaaggttgggactgcatgtgttgcaatggtagctcatacatttcgtgttcctgtattgatctgttgtgaagcttataagtttcatgaaagggtgcaacttgattcaatatgttctaatgaactaggtgacccagatgctgttgccgtggttcctggaagaatggatgtcaattatctggacaattggactaatcaagacaatttgcagcttctgaatttgttctatgatgctactccttcagattatgtatcggccattgttacagaccatggaatgatccctcctacaagtgtggccgtaattgtgcgcgagtatggacgagagcacttgatctagagatgcagagaagtcagcaagtggttttaacagcccacaaccgattttgataaatggaattttactgtatagttttatccctcaacgattatggagatgcatgttctttcaattgttccatttttttaatactcgatagtcttctgtaacactttgtttggatacaagttacaattaggaagtaaagaaatagagatgaaagaaatagaaatgaattttgaatggaaatgtgtgctgttttgattgatggaattgagaaaatgaatgaaataaaaggatttactttc

SEQ ID NO: 54187 - protein, 513 aa, Glycine max
  peptide (1)..(513): Ceres Seq. ID no. 15178008
  misc_feature (98)..(499): Pfam Name: Initiation factor 2 subunit family Pfam Description: Initiation factor 2 subunit family
  misc_feature (32)..(505): Homolog of NCBI NO: 471329 NR Description: translation initiation factor eIF-2B-delta
  misc_feature (32)..(505): Homolog of NCBI NO: 33337571 NR Description: EIF-2B-delta-like protein [Homo sapiens]
  misc_feature (84)..(505): Homolog of NCBI NO: 28381357 NR Description: Translation initiation factor eIF-2B delta
  misc_feature (32)..(505): Homolog of NCBI NO: 16758830 NR Description: eukaryotic translation initiation factor 2B
  misc_feature (32)..(505): Homolog of NCBI NO: 26986532 NR Description: eukaryotic translation initiation factor 2B,
  misc_feature (32)..(505): Homolog of NCBI NO: 6012058 NR Description: guanine nucleotide exchange factor [Homo sapiens]
  misc_feature (32)..(505): Homolog of NCBI NO: 6010114 NR Description: guanine nucleotide exchange factor (long isoform)
  misc_feature (215)..(513): Homolog of NCBI NO: 15224811 NR Description: translation initiation factor eIF-2B delta
  misc_feature (28)..(494): Homolog of NCBI NO: 15222019 NR Description: hypothetical protein [Arabidopsis thaliana]
  misc_feature (3)..(513): Homolog of NCBI NO: 15240967 NR Description: expressed protein [Arabidopsis thaliana]
GDSDFTGVGFDLPVVKPPGNSPAVNAKNVAGEKREESGKEVHPDLPSISKPLKEKNTKGERRALQEAQRAAKAASKADGNTTVAETRRAAPSKRMWQSSQKKDGPLVMSPVATDKKSGDRPLEKERKKDAPPPRMQFDDKNRVEKAKRRAVVDQNEARNRVELFRHLPQYERWTQLPKLESKFFQLDSVHLAVFKVGMRYLAGDISGSNARCIEMLRAFQEAIIDYSTPPGKVLVRDLTAKISSYVSFFSECRPLSISMGNAIRFVKSCVAKLPLSHTESEAKAALCSDINQFINEKIILADKVIVGHAASKVRDGDVLLTYGSSCVVEMILLYAHDLGKQFRVVVVDSRPKFESRALLRRLVARGLSCTYTHINAVSYVMHEVTRVFLGASSILCNGTAYAKVGTACVAMVAHTFRVPVLICCEAYKFHERVQLDSICSNELGDPDAVAVVPGRMDVNYLDNWTNQDNLQLLNLFYDATPSDYVSAIVTDHGMIPPTSVAVIVREYGREHLI

SEQ ID NO: 54188 - protein, 419 aa, Glycine max
  peptide (1)..(419): Ceres Seq. ID no. 15178009
  misc_feature (4)..(405): Pfam Name: Initiation factor 2 subunit family Pfam Description: Initiation factor 2 subunit family
  misc_feature (1)..(411): Homolog of NCBI NO: 471329 NR Description: translation initiation factor eIF-2B-delta
  misc_feature (1)..(411): Homolog of NCBI NO: 33337571 NR Description: EIF-2B-delta-like protein [Homo sapiens]
  misc_feature (1)..(411): Homolog of NCBI NO: 28381357 NR Description: Translation initiation factor eIF-2B delta
  misc_feature (1)..(411): Homolog of NCBI NO: 16758830 NR Description: eukaryotic translation initiation factor 2B
  misc_feature (1)..(411): Homolog of NCBI NO: 6012058 NR Description: guanine nucleotide exchange factor [Homo sapiens]
  misc_feature (1)..(411): Homolog of NCBI NO: 26986532 NR Description: eukaryotic translation initiation factor 2B,
  misc_feature (1)..(411): Homolog of NCBI NO: 6010114 NR Description: guanine nucleotide exchange factor (long isoform)
  misc_feature (121)..(419): Homolog of NCBI NO: 15224811 NR Description: translation initiation factor eIF-2B delta
  misc_feature (1)..(400): Homolog of NCBI NO: 15222019 NR Description: hypothetical protein [Arabidopsis thaliana]
  misc_feature (1)..(419): Homolog of NCBI NO: 15240967 NR Description: expressed protein [Arabidopsis thaliana]
MWQSSQKKDGPLVMSPVATDKKSGDRPLEKERKKDAPPPRMQFDDKNRVEKAKRRAVVDQNEARNRVELFRHLPQYERWTQLPKLESKFFQLDSVHLAVFKVGMRYLAGDISGSNARCIEMLRAFQEAIIDYSTPPGKVLVRDLTAKISSYVSFFSECRPLSISMGNAIRFVKSCVAKLPLSHTESEAKAALCSDINQFINEKIILADKVIVGHAASKVRDGDVLLTYGSSCVVEMILLYAHDLGKQFRVVVVDSRPKFESRALLRRLVARGLSCTYTHINAVSYVMHEVTRVFLGASSILCNGTAYAKVGTACVAMVAHTFRVPVLICCEAYKFHERVQLDSICSNELGDPDAVAVVPGRMDVNYLDNWTNQDNLQLLNLFYDATPSDYVSAIVTDHGMIPPTSVAVIVREYGREHLI

SEQ ID NO: 54189 - protein, 406 aa, Glycine max
  peptide (1)..(406): Ceres Seq. ID no. 15178010
  misc_feature (1)..(392): Pfam Name: Initiation factor 2 subunit family Pfam Description: Initiation factor 2 subunit family
  misc_feature (1)..(398): Homolog of NCBI NO: 471329 NR Description: translation initiation factor eIF-2B-delta
  misc_feature (1)..(398): Homolog of NCBI NO: 33337571 NR Description: EIF-2B-delta-like protein [Homo sapiens]
  misc_feature (1)..(398): Homolog of NCBI NO: 28381357 NR Description: Translation initiation factor eIF-2B delta
  misc_feature (1)..(398): Homolog of NCBI NO: 16758830 NR Description: eukaryotic translation initiation factor 2B
  misc_feature (1)..(398): Homolog of NCBI NO: 26986532 NR Description: eukaryotic translation initiation factor 2B,
  misc_feature (1)..(398): Homolog of NCBI NO: 6012058 NR Description: guanine nucleotide exchange factor [Homo sapiens]
  misc_feature (1)..(398): Homolog of NCBI NO: 6010114 NR Description: guanine nucleotide exchange factor (long isoform)
  misc_feature (108)..(406): Homolog of NCBI NO: 15224811 NR Description: translation initiation factor eIF-2B delta
  misc_feature (1)..(387): Homolog of NCBI NO: 15222019 NR Description: hypothetical protein [Arabidopsis thaliana]
  misc_feature (1)..(406): Homolog of NCBI NO: 15240967 NR Description: expressed protein [Arabidopsis thaliana]
MSPVATDKKSGDRPLEKERKKDAPPPRMQFDDKNRVEKAKRRAVVDQNEARNRVELFRHLPQYERWTQLPKLESKFFQLDSVHLAVFKVGMRYLAGDISGSNARCIEMLRAFQEAIIDYSTPPGKVLVRDLTAKISSYVSFFSECRPLSISMGNAIRFVKSCVAKLPLSHTESEAKAALCSDINQFINEKIILADKVIVGHAASKVRDGDVLLTYGSSCVVEMILLYAHDLGKQFRVVVVDSRPKFESRALLRRLVARGLSCTYTHINAVSYVMHEVTRVFLGASSILCNGTAYAKVGTACVAMVAHTFRVPVLICCEAYKFHERVQLDSICSNELGDPDAVAVVPGRMDVNYLDNWTNQDNLQLLNLFYDATPSDYVSAIVTDHGMIPPTSVAVIVREYGREHLI

SEQ ID NO: 54190 - DNA, 1563 bp, Glycine max
  misc_feature (1)..(1563): Ceres Seq. ID no. 15170354
gtaggccccccccccgggattagcatatttgacaaagtcatcatttcttttcctaactatggcctttgaataacaatgagggaaaagtaaccatgccatatgggaaagtttttgtgaagctagaactcaggaccaatttggtttctgcagggccaatgtttcaatgaaaaacttcctaaattgattttaagccacttctggagggtctaagactgcatgcattggatcattggctaagatttgcatgctaagagacagatttgaaaaacagatgcatgaactttgcaattctgtaaatgtgggtttggttagatcaattatttaggagtggaagatgagtttcttttcatgttgcacgtcacaagagaagatcgacaagaactcattgaaaaagagcagtaagaactaccatcacgcaaaagctctgccgtcgttagccaacatgtgttttaaatctgataccagcaaacggaagtacatagaagaagaaatagcaaaaattgggaaagggaatattacctctcagactttttcttatcacgagctatgtgttgcaactcggaactttcaccctgacaatatgattggcgaaggaggctttggaagggtttacaaaggacgcctcaaaagcataaatcaggttgttgctgtgaagaaacttaatagaaatggattccaaggaaacagggaatttcttgtagaggttttgattttgagtctcttgcaccaccctaaccttgtcaatttggtagggtattgcgcagatggtgatcaaaggattttggtatacgagtacatggtgaatggctctttagaagatcaccttcttgaactatctccggacagaaagcctttggattggcgtactagaatgaacattgcagccggtgcagctaaaggacttgaatatttacatgaagtagcaaatccgcctgtgatataccgtgatttcaaagcatcaaacatactattagatgaaaacttcaaccctaagctctctgattttggacttgcaaagcttggtccaactggtgataaaactcatgtatccaccagggtaatgggaacttatggctactgtgcacctgagtatgcctcaacaggtcaattgactacaaaatcagatatatatagctttggagtagtgtttctagagatgatcacaggaagaagagcaattgatcagtcaagaccatctgaagagcaaaacttggtcacttgggcacaaccactattcaaagacagaaggaaattttcatcaatggttgatccattgctgaaagggaactacccaacaaagggtctacaccaagcactagcagttgcagcaatgtgtattcaggaggaagctgatacccgacctttgattagtgacgtagttacagctcttgatgttttagcaaagaggcatatacaagtgggaagacaacaccgttcaaaagagacttttttcgagcatggggaatgtagttaacaaaacgaacctgaaaacagtagaggattacacaaaaggacaatgaatgaaaaagcagctgctaatgaagtttgagaatcattctatag

SEQ ID NO: 54191 - protein, 379 aa, Glycine max
  peptide (1)..(379): Ceres Seq. ID no. 15170355
  misc_feature (1)..(359): Homolog of NCBI NO: 34395193 NR Description: putative protein serine/threonine kinase
  misc_feature (19)..(358): Homolog of NCBI NO: 10445209 NR Description: protein serine/threonine kinase BNK1 [Brassica
  misc_feature (20)..(358): Homolog of NCBI NO: 30679773 NR Description: protein kinase family [Arabidopsis thaliana]
  misc_feature (20)..(358): Homolog of NCBI NO: 11259782 NR Description: protein kinase-like - Arabidopsis thaliana
  misc_feature (60)..(358): Homolog of NCBI NO: 34907210 NR Description: putative serine/threonine kinase PBS1 protein
  misc_feature (60)..(358): Homolog of NCBI NO: 15238886 NR Description: protein kinase family [Arabidopsis thaliana]
  misc_feature (1)..(358): Homolog of NCBI NO: 15240038 NR Description: protein kinase family [Arabidopsis thaliana]
  misc_feature (15)..(356): Homolog of NCBI NO: 11994140 NR Description: receptor protein kinase-like protein [Arabidopsis
  misc_feature (1)..(356): Homolog of NCBI NO: 28392990 NR Description: putative protein kinase [Arabidopsis thaliana]
  misc_feature (1)..(356): Homolog of NCBI NO: 15232294 NR Description: protein kinase family [Arabidopsis thaliana]
MSFFSCCTSQEKIDKNSLKKSSKNYHHAKALPSLANMCFKSDTSKRKYIEEEIAKIGKGNITSQTFSYHELCVATRNFHPDNMIGEGGFGRVYKGRLKSINQVVAVKKLNRNGFQGNREFLVEVLILSLLHHPNLVNLVGYCADGDQRILVYEYMVNGSLEDHLLELSPDRKPLDWRTRMNIAAGAAKGLEYLHEVANPPVIYRDFKASNILLDENFNPKLSDFGLAKLGPTGDKTHVSTRVMGTYGYCAPEYASTGQLTTKSDIYSFGVVFLEMITGRRAIDQSRPSEEQNLVTWAQPLFKDRRKFSSMVDPLLKGNYPTKGLHQALAVAAMCIQEEADTRPLISDVVTALDVLAKRHIQVGRQHRSKETFFEHGECS

SEQ ID NO: 54192 - protein, 343 aa, Glycine max
  peptide (1)..(343): Ceres Seq. ID no. 15170356
  misc_feature (1)..(323): Homolog of NCBI NO: 34395193 NR Description: putative protein serine/threonine kinase
  misc_feature (1)..(322): Homolog of NCBI NO: 10445209 NR Description: protein serine/threonine kinase BNK1 [Brassica
  misc_feature (1)..(322): Homolog of NCBI NO: 30679773 NR Description: protein kinase family [Arabidopsis thaliana]
  misc_feature (1)..(322): Homolog of NCBI NO: 11259782 NR Description: protein kinase-like - Arabidopsis thaliana
  misc_feature (24)..(322): Homolog of NCBI NO: 34907210 NR Description: putative serine/threonine kinase PBS1 protein
  misc_feature (24)..(322): Homolog of NCBI NO: 15238886 NR Description: protein kinase family [Arabidopsis thaliana]
  misc_feature (1)..(322): Homolog of NCBI NO: 15240038 NR Description: protein kinase family [Arabidopsis thaliana]
  misc_feature (1)..(320): Homolog of NCBI NO: 11994140 NR Description: receptor protein kinase-like protein [Arabidopsis
  misc_feature (1)..(320): Homolog of NCBI NO: 28392990 NR Description: putative protein kinase [Arabidopsis thaliana]
  misc_feature (1)..(320): Homolog of NCBI NO: 15232294 NR Description: protein kinase family [Arabidopsis thaliana]
MCFKSDTSKRKYIEEEIAKIGKGNITSQTFSYHELCVATRNFHPDNMIGEGGFGRVYKGRLKSINQVVAVKKLNRNGFQGNREFLVEVLILSLLHHPNLVNLVGYCADGDQRILVYEYMVNGSLEDHLLELSPDRKPLDWRTRMNIAAGAAKGLEYLHEVANPPVIYRDFKASNILLDENFNPKLSDFGLAKLGPTGDKTHVSTRVMGTYGYCAPEYASTGQLTTKSDIYSFGVVFLEMITGRRAIDQSRPSEEQNLVTWAQPLFKDRRKFSSMVDPLLKGNYPTKGLHQALAVAAMCIQEEADTRPLISDVVTALDVLAKRHIQVGRQHRSKETFFEHGECS

SEQ ID NO: 54193 - protein, 297 aa, Glycine max
  peptide (1)..(297): Ceres Seq. ID no. 15170357
  misc_feature (1)..(277): Homolog of NCBI NO: 34395193 NR Description: putative protein serine/threonine kinase
  misc_feature (1)..(276): Homolog of NCBI NO: 10445209 NR Description: protein serine/threonine kinase BNK1 [Brassica
  misc_feature (1)..(276): Homolog of NCBI NO: 30679773 NR Description: protein kinase family [Arabidopsis thaliana]
  misc_feature (1)..(276): Homolog of NCBI NO: 11259782 NR Description: protein kinase-like - Arabidopsis thaliana
  misc_feature (1)..(276): Homolog of NCBI NO: 34907210 NR Description: putative serine/threonine kinase PBS1 protein
  misc_feature (1)..(276): Homolog of NCBI NO: 15238886 NR Description: protein kinase family [Arabidopsis thaliana]
  misc_feature (1)..(276): Homolog of NCBI NO: 15240038 NR Description: protein kinase family [Arabidopsis thaliana]
  misc_feature (1)..(274): Homolog of NCBI NO: 11994140 NR Description: receptor protein kinase-like protein [Arabidopsis
  misc_feature (1)..(274): Homolog of NCBI NO: 28392990 NR Description: putative protein kinase [Arabidopsis thaliana]
  misc_feature (1)..(274): Homolog of NCBI NO: 15232294 NR Description: protein kinase family [Arabidopsis thaliana]
MIGEGGFGRVYKGRLKSINQVVAVKKLNRNGFQGNREFLVEVLILSLLHHPNLVNLVGYCADGDQRILVYEYMVNGSLEDHLLELSPDRKPLDWRTRMNIAAGAAKGLEYLHEVANPPVIYRDFKASNILLDENFNPKLSDFGLAKLGPTGDKTHVSTRVMGTYGYCAPEYASTGQLTTKSDIYSFGVVFLEMITGRRAIDQSRPSEEQNLVTWAQPLFKDRRKFSSMVDPLLKGNYPTKGLHQALAVAAMCIQEEADTRPLISDVVTALDVLAKRHIQVGRQHRSKETFFEHGECS

SEQ ID NO: 54194 - DNA, 1449 bp, Glycine max
  misc_feature (1)..(1449): Ceres Seq. ID no. 14304871
gaccatgacggtcgccagcaccaagagactcttcaagatcacgctctctctcctccgcctcggcttcaactcctccaaatgcaaaacggcagccaagatggccgtggccaggatcaagctgctgaggaacaagcgagaggtggtcgtgaggcagatgcgtcgcgacattgctcttcttctccagtctggtcaagacgccaccgctcgcatcagggttgagcatgtcatgagagagcaaaatgttttggctgcaaatgagttcattgaactcttctgtgaattagtggtggccaggctcgcaatcatttcaaagcaaaaggaatgtccagcagatttgaaagaaggaattgctagcttgatatttgcagcccctaggtgctctgaaatcccagaacttgtggcacttaagaatatctttgagaagaaatatgggaaagattttgtatctgcagctgttgatctaagacctagctgcggtgtaaatcgccagttgatcgaaaagctctcagtacgaacaccacctggtgaagtaaaattgaaagtgttgaaggaaatagctaaggaacatcatattgattgggatactacagatagcgagaaagaacttctcaagcctccagaagagctaatagtagggccaagtgcttttgtcagtgccagcagcctaccagtgaagccttctacagttatgtcggtggattcaaataaacccgctactagattatcgaggggtggaaaacccgatgccgagcattacaaagattctaagtctgctgccgaagcagcagctgaggcagctaagcaagcaattgctgctgctgaagttgctgcttatatgactatgaaggactataataatgaagctcctcaaccatatgcttacaatgataagttgtataactcaggagtcaactctgggaccttccaatcaaacaatcctgcaaaatgcaccctgaacatgacacctaaatctttaactgaggagaaaatgtacaggtcacagagcttaccaagatctgatcatatgaacaatgaggaggatgcattgcctaaccaatatggtggaaatgattataggaggcacagctaccatccagcttccgcacattcagatattaagtttgatgaatcaagttgtgatgaagaaattgaagcagaagagcctcctccggttactatgccccctaatcggcttccaccaccggtaccctcatctctggctaaacaggaaagccacattcgtgttcatcccaaattgccagattatgatgaacttgctgcccgctttgatgcactaaaattcaagaagtcacaatcctgaacccactttagcaaccaaccgtttatgaatctattaaattaatttatacacaataaatacatataagaatagtatattttgttatatagagatactaagaatgtattggatgctaaactttgctatgc

SEQ ID NO: 54195 - protein, 439 aa, Glycine max
  peptide (1)..(439): Ceres Seq. ID no. 14304872
  misc_feature (33)..(154): Pfam Name: Eukaryotic protein of unknown function, DUF292 Pfam Description: Eukaryotic protein of unknown function, DUF292
  misc_feature (33)..(282): Homolog of NCBI NO: 15224833 NR Description: hypothetical protein [Arabidopsis thaliana]
  misc_feature (17)..(237): Homolog of NCBI NO: 30688332 NR Description: expressed protein [Arabidopsis thaliana]
  misc_feature (12)..(307): Homolog of NCBI NO: 34910388 NR Description: P0692C11.15 [Oryza sativa (japonica
  misc_feature (17)..(212): Homolog of NCBI NO: 21595428 NR Description: unknown [Arabidopsis thaliana]
  misc_feature (17)..(212): Homolog of NCBI NO: 18395668 NR Description: expressed protein [Arabidopsis thaliana]
  misc_feature (16)..(163): Homolog of NCBI NO: 33589706 NR Description: At1g34220 [Arabidopsis thaliana]
  misc_feature (163)..(317): Homolog of NCBI NO: 33589706 NR Description: At1g34220 [Arabidopsis thaliana]
  misc_feature (16)..(317): Homolog of NCBI NO: 15218545 NR Description: expressed protein [Arabidopsis thaliana]
  misc_feature (21)..(420): Homolog of NCBI NO: 40253290 NR Description: unknown protein [Oryza sativa (japonica
  misc_feature (33)..(414): Homolog of NCBI NO: 15237108 NR Description: expressed protein [Arabidopsis thaliana]
TMTVASTKRLFKITLSLLRLGFNSSKCKTAAKMAVARIKLLRNKREVVVRQMRRDIALLLQSGQDATARIRVEHVMREQNVLAANEFIELFCELVVARLAIISKQKECPADLKEGIASLIFAAPRCSEIPELVALKNIFEKKYGKDFVSAAVDLRPSCGVNRQLIEKLSVRTPPGEVKLKVLKEIAKEHHIDWDTTDSEKELLKPPEELIVGPSAFVSASSLPVKPSTVMSVDSNKPATRLSRGGKPDAEHYKDSKSAAEAAAEAAKQAIAAAEVAAYMTMKDYNNEAPQPYAYNDKLYNSGVNSGTFQSNNPAKCTLNMTPKSLTEEKMYRSQSLPRSDHMNNEEDALPNQYGGNDYRRHSYHPASAHSDIKFDESSCDEEIEAEEPPPVTMPPNRLPPPVPSSLAKQESHIRVHPKLPDYDELAARFDALKFKKSQS

SEQ ID NO: 54196 - protein, 438 aa, Glycine max
  peptide (1)..(438): Ceres Seq. ID no. 14304873
  misc_feature (32)..(153): Pfam Name: Eukaryotic protein of unknown function, DUF292 Pfam Description: Eukaryotic protein of unknown function, DUF292
  misc_feature (32)..(281): Homolog of NCBI NO: 15224833 NR Description: hypothetical protein [Arabidopsis thaliana]
  misc_feature (16)..(236): Homolog of NCBI NO: 30688332 NR Description: expressed protein [Arabidopsis thaliana]
  misc_feature (11)..(306): Homolog of NCBI NO: 34910388 NR Description: P0692C11.15 [Oryza sativa (japonica
  misc_feature (16)..(211): Homolog of NCBI NO: 21595428 NR Description: unknown [Arabidopsis thaliana]
  misc_feature (16)..(211): Homolog of NCBI NO: 18395668 NR Description: expressed protein [Arabidopsis thaliana]
  misc_feature (15)..(162): Homolog of NCBI NO: 33589706 NR Description: At1g34220 [Arabidopsis thaliana]
  misc_feature (162)..(316): Homolog of NCBI NO: 33589706 NR Description: At1g34220 [Arabidopsis thaliana]
  misc_feature (15)..(316): Homolog of NCBI NO: 15218545 NR Description: expressed protein [Arabidopsis thaliana]
  misc_feature (20)..(419): Homolog of NCBI NO: 40253290 NR Description: unknown protein [Oryza sativa (japonica
  misc_feature (32)..(413): Homolog of NCBI NO: 15237108 NR Description: expressed protein [Arabidopsis thaliana]
MTVASTKRLFKITLSLLRLGFNSSKCKTAAKMAVARIKLLRNKREVVVRQMRRDIALLLQSGQDATARIRVEHVMREQNVLAANEFIELFCELVVARLAIISKQKECPADLKEGIASLIFAAPRCSEIPELVALKNIFEKKYGKDFVSAAVDLRPSCGVNRQLIEKLSVRTPPGEVKLKVLKEIAKEHHIDWDTTDSEKELLKPPEELIVGPSAFVSASSLPVKPSTVMSVDSNKPATRLSRGGKPDAEHYKDSKSAAEAAAEAAKQAIAAAEVAAYMTMKDYNNEAPQPYAYNDKLYNSGVNSGTFQSNNPAKCTLNMTPKSLTEEKMYRSQSLPRSDHMNNEEDALPNQYGGNDYRRHSYHPASAHSDIKFDESSCDEEIEAEEPPPVTMPPNRLPPPVPSSLAKQESHIRVHPKLPDYDELAARFDALKFKKSQS

SEQ ID NO: 54197 - protein, 407 aa, Glycine max
  peptide (1)..(407): Ceres Seq. ID no. 14304874
  misc_feature (1)..(122): Pfam Name: Eukaryotic protein of unknown function, DUF292 Pfam Description: Eukaryotic protein of unknown function, DUF292
  misc_feature (1)..(250): Homolog of NCBI NO: 15224833 NR Description: hypothetical protein [Arabidopsis thaliana]
  misc_feature (1)..(205): Homolog of NCBI NO: 30688332 NR Description: expressed protein [Arabidopsis thaliana]
  misc_feature (1)..(275): Homolog of NCBI NO: 34910388 NR Description: P0692C11.15 [Oryza sativa (japonica
  misc_feature (1)..(180): Homolog of NCBI NO: 21595428 NR Description: unknown [Arabidopsis thaliana]
  misc_feature (1)..(180): Homolog of NCBI NO: 18395668 NR Description: expressed protein [Arabidopsis thaliana]
  misc_feature (1)..(131): Homolog of NCBI NO: 33589706 NR Description: At1g34220 [Arabidopsis thaliana]
  misc_feature (131)..(285): Homolog of NCBI NO: 33589706 NR Description: At1g34220 [Arabidopsis thaliana]
  misc_feature (1)..(285): Homolog of NCBI NO: 15218545 NR Description: expressed protein [Arabidopsis thaliana]
  misc_feature (1)..(388): Homolog of NCBI NO: 40253290 NR Description: unknown protein [Oryza sativa (japonica
  misc_feature (1)..(382): Homolog of NCBI NO: 15237108 NR Description: expressed protein [Arabidopsis thaliana]
MAVARIKLLRNKREVVVRQMRRDIALLLQSGQDATARIRVEHVMREQNVLAANEFIELFCELVVARLAIISKQKECPADLKEGIASLIFAAPRCSEIPELVALKNIFEKKYGKDFVSAAVDLRPSCGVNRQLIEKLSVRTPPGEVKLKVLKEIAKEHHIDWDTTDSEKELLKPPEELIVGPSAFVSASSLPVKPSTVMSVDSNKPATRLSRGGKPDAEHYKDSKSAAEAAAEAAKQAIAAAEVAAYMTMKDYNNEAPQPYAYNDKLYNSGVNSGTFQSNNPAKCTLNMTPKSLTEEKMYRSQSLPRSDHMNNEEDALPNQYGGNDYRRHSYHPASAHSDIKFDESSCDEEIEAEEPPPVTMPPNRLPPPVPSSLAKQESHIRVHPKLPDYDELAARFDALKFKKSQS

SEQ ID NO: 54198 - DNA, 1408 bp, Glycine max
  misc_feature (1)..(1408): Ceres Seq. ID no. 14304842
gaaggttaaggttttcacagaattcctctaatggcatccatcgtatccaccaaagccaaccaatttcgctattccacgcgccttctcttctcacaccttcttcgccaaggcagaccctccacgctttcaccacccttctcttctcatcttcaaccactccatcacccttacaaggttcggaatcaaagttatggaaatgggtcgttgaggttgtgtcaaaggtttctatcttcttcttcttctcctcctgctgctaatgttagtggagaaaaaccagcatcagattcagatcactctgcaaaagatggttctggccaagggaaagagtctgggagtggaggagatgagggtcagaaaagtgatgctgggaaatccgttcgtggagggcctgtttcttggttgagctttctcttgctggtgctcactggagctggattggtgttctactatgacagggaaaagaaacgacatattgaagggatacgttctaatacagaggctgttaagcagggaccttctgtaggaacagctgcaattgggggtccatttcaccttgtcaaccatcacggaaaacatgtaactgaaaaggatttcttgggaaagtggactttgttatattttggctttactcactgcccggatatctgtccagaggaactacagaagttagcagctgctgttgataaaataaaggagaaagctggaattgaaactgtaccggtttttatctctgttgatcctgagagggatactgttgaacaagtgggtgaatatgtcaaagaatttcatccaaagttaattggattaactggtagcccggatgagatcaagaatgttgctcgtgcatatcgtgtttattacatgaagacagcagaggaagactcagattatcttgttgatcactccatagttatatacttgatgagtcctgaaatgaaatttgtaaagttttttggcaagaacaatgatgttgattcgcttgccgatggagttattaaagaggtaaagcagtataagaagtaacctgaacaatgctattggtaccctcatttctttagtggaagcgaaattgtcaatgaattctggccttgtggtagtaaactacaacagtatgtctgattatacttctgaaggctagctgttctttaggtgtttctggagattggacagtttcaaaaagcaacttattgtcattgtttcaatgtttagttttgtacttgaaatttttttggtgacatttatttgtgtatttgagatgcaacgacattacaattgtcatgttcaacatatgccttatatcagatatggcatctataataagaaataccatggtttatattgatgagatattaaattacgatcttcaacagggaagagcctacaatttaaaatgaatttgattggtttc

SEQ ID NO: 54199 - protein, 330 aa, Glycine max
  peptide (1)..(330): Ceres Seq. ID no. 14304843
  misc_feature (126)..(313): Pfam Name: SCO1/SenC Pfam Description: SCO1/SenC
  misc_feature (106)..(329): Homolog of NCBI NO: 4826992 NR Description: cytochrome oxidase deficient homolog 2 [Homo
  misc_feature (119)..(330): Homolog of NCBI NO: 40740887 NR Description: hypothetical protein AN4842.2 [Aspergillus
  misc_feature (119)..(321): Homolog of NCBI NO: 19112079 NR Description: putative cytochrome C oxidase assembly protein
  misc_feature (146)..(330): Homolog of NCBI NO: 4406651 NR Description: h-sco1 [Homo sapiens]
  misc_feature (115)..(328): Homolog of NCBI NO: 19920710 NR Description: CG8885-PA [Drosophila melanogaster]
  misc_feature (119)..(330): Homolog of NCBI NO: 31212937 NR Description: ENSANGP00000012964 [Anopheles gambiae]
  misc_feature (111)..(330): Homolog of NCBI NO: 4759068 NR Description: cytochrome oxidase deficient homolog 1 [Homo
  misc_feature (111)..(329): Homolog of NCBI NO: 32420339 NR Description: hypothetical protein [Neurospora crassa]
  misc_feature (59)..(330): Homolog of NCBI NO: 6403490 NR Description: putative SCO1 protein [Arabidopsis thaliana]
  misc_feature (1)..(330): Homolog of NCBI NO: 18398306 NR Description: SCO1 protein -related [Arabidopsis thaliana]
MASIVSTKANQFRYSTRLLFSHLLRQGRPSTLSPPFSSHLQPLHHPYKVRNQSYGNGSLRLCQRFLSSSSSPPAANVSGEKPASDSDHSAKDGSGQGKESGSGGDEGQKSDAGKSVRGGPVSWLSFLLLVLTGAGLVFYYDREKKRHIEGIRSNTEAVKQGPSVGTAAIGGPFHLVNHHGKHVTEKDFLGKWTLLYFGFTHCPDICPEELQKLAAAVDKIKEKAGIETVPVFISVDPERDTVEQVGEYVKEFHPKLIGLTGSPDEIKNVARAYRVYYMKTAEEDSDYLVDHSIVIYLMSPEMKFVKFFGKNNDVDSLADGVIKEVKQYKK

SEQ ID NO: 54200 - DNA, 1277 bp, Glycine max
  misc_feature (1)..(1277): Ceres Seq. ID no. 14304863
gaaaaatcgcaatatcttcaactctatctgcaacagccaactttctcgttcgtcgatcacaaaaatggcggcgaaacttcaaatatttacgggattgccccccgcgccatttcaatcttcctcctccactctctgcgtactcaagaagcctctcactacctccttcttcggcactgcacgagtggaagttctgaaacttcgagtgatgaggattgcgaagcctgcgcgcggtggaggtgctctcggtgctcgcatgaacctctttgacaggttcgccagagttgtgaagtcgtacgcaaacgctgtcttaagctcgtttgaagatccggagaaaatattggagcaagctgtgcttgaaatgaacgacgacttgaccaaaatgcgtcaagctactgcacaagtgttggcatctcaaaagcggttggaaaataaatacaaggctgcacaacaagcttctgaagagtggtaccggaaagcacaacttgctcttcagaaaggtgaagaggatcttgctcgtgaagcacttaagaggcgtaaatcttatgcggataatgccagttctttgaaagctcaacttgatcaacaaaagactgttgttgagaatcttgtctctaatacaaggcttttggagagtaagatacaagaggcaaggtcgaaaaaagatactctcaaagcaagagctcaatcggcaaagactgcaaccaaggtgagtgagatgctgggaaatgtcaatacaagtagtgctctttcagcttttgaaaagatggaagagaaagtgttgacaatggagtcccaagctgaagctcttggccagttgacaagtgatgatcttgaaggaaagtttgctttgcttgagggctcgtccgttgatgacgaccttgcgaatttgaaaaaagaattatctggtgcctcaaagaaaggggaccttcctcctggaagaagtaccaccagcgccaacactgggattccatttcgagatgctgagatcgagttggaacttgatcaattgaggcaaagagcaaaggaattttgaagcatggattcttttttgtttcttcatatcaaatcttcaatttagtttctttatttctgatatcaacgttgtacagctaaaggccaatcacgatattgttcgactactggccaaaaattgattagaaaaatgaactgattagctgcatgctcttgtagctcatgttatatgttaattaccttaagtgtgatgatattgtaatatataatttgtaccatcagaagtcttttttattcctattaag

SEQ ID NO: 54201 - protein, 343 aa, Glycine max
  peptide (1)..(343): Ceres Seq. ID no. 14304864
  misc_feature (86)..(302): Pfam Name: PspA/IM30 family Pfam Description: PspA/IM30 family
  misc_feature (82)..(300): Homolog of NCBI NO: 22970935 NR Description: hypothetical protein [Chloroflexus aurantiacus]
  misc_feature (85)..(306): Homolog of NCBI NO: 37526476 NR Description: Phage shock protein A
  misc_feature (85)..(305): Homolog of NCBI NO: 37520467 NR Description: unknown protein [Gloeobacter violaceus]
  misc_feature (85)..(339): Homolog of NCBI NO: 16331547 NR Description: chloroplast membrane-associated 30 kD protein
  misc_feature (85)..(338): Homolog of NCBI NO: 33866411 NR Description: similar to chloroplast membrane-associated 30 kD
  misc_feature (85)..(339): Homolog of NCBI NO: 17229834 NR Description: similar to chloroplast membrane-associated 30 kD
  misc_feature (85)..(336): Homolog of NCBI NO: 23126177 NR Description: hypothetical protein [Nostoc punctiforme]
  misc_feature (22)..(343): Homolog of NCBI NO: 18408237 NR Description: expressed protein [Arabidopsis thaliana]
  misc_feature (33)..(343): Homolog of NCBI NO: 34907594 NR Description: putative chloroplast membrane-associated 30 kD
  misc_feature (22)..(342): Homolog of NCBI NO: 729842 NR Description: Membrane-associated 30 kDa protein, chloroplast
KNRNIFNSICNSQLSRSSITKMAAKLQIFTGLPPAPFQSSSSTLCVLKKPLTTSFFGTARVEVLKLRVMRIAKPARGGGALGARMNLFDRFARVVKSYANAVLSSFEDPEKILEQAVLEMNDDLTKMRQATAQVLASQKRLENKYKAAQQASEEWYRKAQLALQKGEEDLAREALKRRKSYADNASSLKAQLDQQKTVVENLVSNTRLLESKIQEARSKKDTLKARAQSAKTATKVSEMLGNVNTSSALSAFEKMEEKVLTMESQAEALGQLTSDDLEGKFALLEGSSVDDDLANLKKELSGASKKGDLPPGRSTTSANTGIPFRDAEIELELDQLRQRAKEF

SEQ ID NO: 54202 - protein, 322 aa, Glycine max
  peptide (1)..(322): Ceres Seq. ID no. 14304865
  misc_feature (65)..(281): Pfam Name: PspA/IM30 family Pfam Description: PspA/IM30 family
  misc_feature (61)..(279): Homolog of NCBI NO: 22970935 NR Description: hypothetical protein [Chloroflexus aurantiacus]
  misc_feature (64)..(285): Homolog of NCBI NO: 37526476 NR Description: Phage shock protein A
  misc_feature (64)..(284): Homolog of NCBI NO: 37520467 NR Description: unknown protein [Gloeobacter violaceus]
  misc_feature (64)..(318): Homolog of NCBI NO: 16331547 NR Description: chloroplast membrane-associated 30 kD protein
  misc_feature (64)..(317): Homolog of NCBI NO: 33866411 NR Description: similar to chloroplast membrane-associated 30 kD
  misc_feature (64)..(318): Homolog of NCBI NO: 17229834 NR Description: similar to chloroplast membrane-associated 30 kD
  misc_feature (64)..(315): Homolog of NCBI NO: 23126177 NR Description: hypothetical protein [Nostoc punctiforme]
  misc_feature (1)..(322): Homolog of NCBI NO: 18408237 NR Description: expressed protein [Arabidopsis thaliana]
  misc_feature (12)..(322): Homolog of NCBI NO: 34907594 NR Description: putative chloroplast membrane-associated 30 kD
  misc_feature (1)..(321): Homolog of NCBI NO: 729842 NR Description: Membrane-associated 30 kDa protein, chloroplast
MAAKLQIFTGLPPAPFQSSSSTLCVLKKPLTTSFFGTARVEVLKLRVMRIAKPARGGGALGARMNLFDRFARVVKSYANAVLSSFEDPEKILEQAVLEMNDDLTKMRQATAQVLASQKRLENKYKAAQQASEEWYRKAQLALQKGEEDLAREALKRRKSYADNASSLKAQLDQQKTVVENLVSNTRLLESKIQEARSKKDTLKARAQSAKTATKVSEMLGNVNTSSALSAFEKMEEKVLTMESQAEALGQLTSDDLEGKFALLEGSSVDDDLANLKKELSGASKKGDLPPGRSTTSANTGIPFRDAEIELELDQLRQRAKEF

SEQ ID NO: 54203 - protein, 275 aa, Glycine max
  peptide (1)..(275): Ceres Seq. ID no. 14304866
  misc_feature (18)..(234): Pfam Name: PspA/IM30 family Pfam Description: PspA/IM30 family
  misc_feature (14)..(232): Homolog of NCBI NO: 22970935 NR Description: hypothetical protein [Chloroflexus aurantiacus]
  misc_feature (17)..(238): Homolog of NCBI NO: 37526476 NR Description: Phage shock protein A
  misc_feature (17)..(237): Homolog of NCBI NO: 37520467 NR Description: unknown protein [Gloeobacter violaceus]
  misc_feature (17)..(271): Homolog of NCBI NO: 16331547 NR Description: chloroplast membrane-associated 30 kD protein
  misc_feature (17)..(270): Homolog of NCBI NO: 33866411 NR Description: similar to chloroplast membrane-associated 30 kD
  misc_feature (17)..(271): Homolog of NCBI NO: 17229834 NR Description: similar to chloroplast membrane-associated 30 kD
  misc_feature (17)..(268): Homolog of NCBI NO: 23126177 NR Description: hypothetical protein [Nostoc punctiforme]
  misc_feature (1)..(275): Homolog of NCBI NO: 18408237 NR Description: expressed protein [Arabidopsis thaliana]
  misc_feature (1)..(275): Homolog of NCBI NO: 34907594 NR Description: putative chloroplast membrane-associated 30 kD
  misc_feature (1)..(274): Homolog of NCBI NO: 729842 NR Description: Membrane-associated 30 kDa protein, chloroplast
MRIAKPARGGGALGARMNLFDRFARVVKSYANAVLSSFEDPEKILEQAVLEMNDDLTKMRQATAQVLASQKRLENKYKAAQQASEEWYRKAQLALQKGEEDLAREALKRRKSYADNASSLKAQLDQQKTVVENLVSNTRLLESKIQEARSKKDTLKARAQSAKTATKVSEMLGNVNTSSALSAFEKMEEKVLTMESQAEALGQLTSDDLEGKFALLEGSSVDDDLANLKKELSGASKKGDLPPGRSTTSANTGIPFRDAEIELELDQLRQRAKEF

SEQ ID NO: 54204 - DNA, 1349 bp, Glycine max
  misc_feature (1)..(1349): Ceres Seq. ID no. 14311330
aagatcaggaaagtggaaccttgccttttatgaagttaatgtcttgctttcattgctttcacagtgaatgtatcattagatggtggaaatggcttcaaaattctaacaaagtagactcttctaatacagatagtgcagctgcacatcgtaaccaagataatcctaagaaaacggaagagagtgttggaaactgcccagtctgtcgcaagccttttcttgccaaggatttggaccatgtgcttgctctagttggttcatattcttcccaattgagttcagataatgaagaactcaacgaagaggaaaagctccttcaatcagaggatgagatcaataggagacagaaatatgaagccatcttaaatttacagaaggagaacagtggtttgattgaacccaaaaaagagatggtaatattgcccggtatgtatcttccacaaccagtagcaatgcccagctccacaccaaccaaggaatctgatgagccgcaacaaaaagatccacctgcagttgtgccagaaaaacatgcaggtgggacatccaacagcagcatacctagttctagcaggcagaggaattttggagcaaggagacagaaagcaagaagtgataaccactctagttcaaccgcaagaaatccaagaaaaccagcccaacagcagtgggtaagaagagataatcctagcaataagccatagaagtgatgtctttcactgctataggtcttattatcacatcaatgtttaaaagttgcgaagtaaagtatagatagtagaaaaagacagaaataggtgcctctcgtgtgccccatttctgttaaaggggtgttggagaagcagaagaagcgaagacaagcacatggtgcttccttgcgcaatttgctgtgttttttgtttttccttttttgattccgtgagcaagttttgacttgacatactgccttttttcgtgatagtgttttcttaatcacgaaattttcaatatgaagttatgaatgctacttttaagtagttatgcaatctgcatgctacacaaatgcaagccttcagagtgtaaagtatattcaattcgtggaatgagcattgagcatagttgattttaagcctcatgtttcagttcttgcagaatgaatctgcatgcaactgcagtctgaagcactatgctctctcccttgttcaagttgtgggtgttttgtctttcaatcttgtatctcatggttttctagtgacagtccttttgagccaataattgatgaaagtatctttagtagattattggggatggaattatattcagtgacatcattcgaccaatgaaatgctccttaaatgtaatcacacatttattat

SEQ ID NO: 54205 - protein, 231 aa, Glycine max
  peptide (1)..(231): Ceres Seq. ID no. 14311331
  misc_feature (36)..(230): Homolog of NCBI NO: 11357688 NR Description: hypothetical protein F27H5.90 - Arabidopsis
  misc_feature (1)..(230): Homolog of NCBI NO: 30695166 NR Description: expressed protein [Arabidopsis thaliana]
  misc_feature (1)..(230): Homolog of NCBI NO: 17065268 NR Description: putative protein [Arabidopsis thaliana]
DQESGTLPFMKLMSCFHCFHSECIIRWWKWLQNSNKVDSSNTDSAAAHRNQDNPKKTEESVGNCPVCRKPFLAKDLDHVLALVGSYSSQLSSDNEELNEEEKLLQSEDEINRRQKYEAILNLQKENSGLIEPKKEMVILPGMYLPQPVAMPSSTPTKESDEPQQKDPPAVVPEKHAGGTSNSSIPSSSRQRNFGARRQKARSDNHSSSTARNPRKPAQQQWVRRDNPSNKP

SEQ ID NO: 54206 - protein, 222 aa, Glycine max
  peptide (1)..(222): Ceres Seq. ID no. 14311332
  misc_feature (27)..(221): Homolog of NCBI NO: 11357688 NR Description: hypothetical protein F27H5.90 - Arabidopsis
  misc_feature (1)..(221): Homolog of NCBI NO: 30695166 NR Description: expressed protein [Arabidopsis thaliana]
  misc_feature (1)..(221): Homolog of NCBI NO: 17065268 NR Description: putative protein [Arabidopsis thaliana]
MKLMSCFHCFHSECIIRWWKWLQNSNKVDSSNTDSAAAHRNQDNPKKTEESVGNCPVCRKPFLAKDLDHVLALVGSYSSQLSSDNEELNEEEKLLQSEDEINRRQKYEAILNLQKENSGLIEPKKEMVILPGMYLPQPVAMPSSTPTKESDEPQQKDPPAVVPEKHAGGTSNSSIPSSSRQRNFGARRQKARSDNHSSSTARNPRKPAQQQWVRRDNPSNKP

SEQ ID NO: 54207 - protein, 219 aa, Glycine max
  peptide (1)..(219): Ceres Seq. ID no. 14311333
  misc_feature (24)..(218): Homolog of NCBI NO: 11357688 NR Description: hypothetical protein F27H5.90 - Arabidopsis
  misc_feature (1)..(218): Homolog of NCBI NO: 30695166 NR Description: expressed protein [Arabidopsis thaliana]
  misc_feature (1)..(218): Homolog of NCBI NO: 17065268 NR Description: putative protein [Arabidopsis thaliana]
MSCFHCFHSECIIRWWKWLQNSNKVDSSNTDSAAAHRNQDNPKKTEESVGNCPVCRKPFLAKDLDHVLALVGSYSSQLSSDNEELNEEEKLLQSEDEINRRQKYEAILNLQKENSGLIEPKKEMVILPGMYLPQPVAMPSSTPTKESDEPQQKDPPAVVPEKHAGGTSNSSIPSSSRQRNFGARRQKARSDNHSSSTARNPRKPAQQQWVRRDNPSNKP

SEQ ID NO: 54208 - DNA, 1857 bp, Glycine max
  misc_feature (1)..(1857): Ceres Seq. ID no. 14313784
tctagatgctcttgatacactttctagaactgaatcattcttcatgagctgtagtgtgagtggtttgagtgaatgggatgatcaagaggtccaactatcaggaaatttttcaacagatcaacaggcacgtgatttcatgattggcaggttcttgcctgcagcaaaggcaatggcttctgaaacacctcaaattcagcacaactctaggaagccacttgttacacaagaacaaccaaaacaggcatggaaggtagttagtggagcgaattcccgtccccttaatccaaaatggcaaaaggttttgccgcattatgctcaagatattggtagggaagagagcgaagatgaaagtgatgataatgatggatatgaaaacaatgcacccaaagtttgtgggctatttcctcggttctgccttttgaatccagttccaggattaagaatggagggtaggattcgaagttctacatttcatggagtgcagagtaaatcaattacttctcacagaagaactgcaaaagagcatggtagaactgctactaatgggaaaaagtcagtaaactcccagtctggttatacagaagagagagattttctgagtactgcagaaaaatctaagcatgatattgatccacatcgtagagcttgcagcaaatcatcagcctctgagagcaccgaatttgaatcaagttgtgatagccctgttgttgagaaaactctatatgtagattctgtacataaggtcaaatcttcagacaccaatatcagaggggatgattttgatactctaagaaaagacactgaccttgataaaagcctttctatagattcttcaattgaggatagcaaacccttgggtattgtggatgagaaggaagtatcagaacctaaaagtttagcttctcttgattcatctctccccgtttgttctgataattcaaatgacaatatgcaaatggaaatgaaaaatcattccaacaaaatatgcccagaaaagcaagagttgacaaagcctgattaccaaggaagtaacttagatcgcgatttggttgcaatctcaagtccagatatggttgcatgcaagaaaatagagtctgaaagcaaagattttagcactaaggaaagttctaatggcctaattaagaatcctgtttcaatgagaaacaggaaattttccagtgatgtgaaatttgattcaaagtgccaacaagctaccaaagtggttgatcaagaatgcactcttggatctagtgaggatcctagtaatttggctagctcaaaggtggtgggtgacacaaagatcaacttagaaagtcaattgcggatgaagttgagccatggaaagacttcaaatgcaagctcttcaaagcttcctcttgcccttccttcaccaaaagctccttcagagtcttggcttaagcgcacattaccaacagttccctcgaagagtatatctttacggtctaatcttgctacctacttccatgcacctgttaaaacttctgaagttaatcatgggcatcttcagtttgctcaggaactactcccacccattccagaagcatgaattttccggagatatcaggccattggttatttgatttgcttggtgaaatgtgccacgttttcttagtgtaattatttgttcttaggattctcattctacagcttggtcccccttttgcttttttatatatatacatgagacagtatactactcaaaagtgtaaatcacagttgccctttttgtcttgtaaatgtaataagttgtttcaactaaaatttatcactataaatcacaacaactttaaggtgatttgttcatgtaataatatcagggcaaaagaccttttgctt

SEQ ID NO: 54209 - protein, 521 aa, Glycine max
  peptide (1)..(521): Ceres Seq. ID no. 14313785
  misc_feature (1)..(299): Pfam Name: Protein of unknown function (DUF688) Pfam Description: Protein of unknown function (DUF688)
  misc_feature (2)..(338): Homolog of NCBI NO: 15226238 NR Description: expressed protein [Arabidopsis thaliana]
  misc_feature (434)..(515): Homolog of NCBI NO: 30690644 NR Description: expressed protein [Arabidopsis thaliana]
  misc_feature (2)..(370): Homolog of NCBI NO: 30690644 NR Description: expressed protein [Arabidopsis thaliana]
  misc_feature (364)..(485): Homolog of NCBI NO: 15224594 NR Description: hypothetical protein [Arabidopsis thaliana]
  misc_feature (1)..(299): Homolog of NCBI NO: 15224594 NR Description: hypothetical protein [Arabidopsis thaliana]
LDALDTLSRTESFFMSCSVSGLSEWDDQEVQLSGNFSTDQQARDFMIGRFLPAAKAMASETPQIQHNSRKPLVTQEQPKQAWKVVSGANSRPLNPKWQKVLPHYAQDIGREESEDESDDNDGYENNAPKVCGLFPRFCLLNPVPGLRMEGRIRSSTFHGVQSKSITSHRRTAKEHGRTATNGKKSVNSQSGYTEERDFLSTAEKSKHDIDPHRRACSKSSASESTEFESSCDSPVVEKTLYVDSVHKVKSSDTNIRGDDFDTLRKDTDLDKSLSIDSSIEDSKPLGIVDEKEVSEPKSLASLDSSLPVCSDNSNDNMQMEMKNHSNKICPEKQELTKPDYQGSNLDRDLVAISSPDMVACKKIESESKDFSTKESSNGLIKNPVSMRNRKFSSDVKFDSKCQQATKVVDQECTLGSSEDPSNLASSKVVGDTKINLESQLRMKLSHGKTSNASSSKLPLALPSPKAPSESWLKRTLPTVPSKSISLRSNLATYFHAPVKTSEVNHGHLQFAQELLPPIPEA

SEQ ID NO: 54210 - protein, 507 aa, Glycine max
  peptide (1)..(507): Ceres Seq. ID no. 14313786
  misc_feature (1)..(285): Pfam Name: Protein of unknown function (DUF688) Pfam Description: Protein of unknown function (DUF688)
  misc_feature (1)..(324): Homolog of NCBI NO: 15226238 NR Description: expressed protein [Arabidopsis thaliana]
  misc_feature (420)..(501): Homolog of NCBI NO: 30690644 NR Description: expressed protein [Arabidopsis thaliana]
  misc_feature (1)..(356): Homolog of NCBI NO: 30690644 NR Description: expressed protein [Arabidopsis thaliana]
  misc_feature (350)..(471): Homolog of NCBI NO: 15224594 NR Description: hypothetical protein [Arabidopsis thaliana]
  misc_feature (1)..(285): Homolog of NCBI NO: 15224594 NR Description: hypothetical protein [Arabidopsis thaliana]
MSCSVSGLSEWDDQEVQLSGNFSTDQQARDFMIGRFLPAAKAMASETPQIQHNSRKPLVTQEQPKQAWKVVSGANSRPLNPKWQKVLPHYAQDIGREESEDESDDNDGYENNAPKVCGLFPRFCLLNPVPGLRMEGRIRSSTFHGVQSKSITSHRRTAKEHGRTATNGKKSVNSQSGYTEERDFLSTAEKSKHDIDPHRRACSKSSASESTEFESSCDSPVVEKTLYVDSVHKVKSSDTNIRGDDFDTLRKDTDLDKSLSIDSSIEDSKPLGIVDEKEVSEPKSLASLDSSLPVCSDNSNDNMQMEMKNHSNKICPEKQELTKPDYQGSNLDRDLVAISSPDMVACKKIESESKDFSTKESSNGLIKNPVSMRNRKFSSDVKFDSKCQQATKVVDQECTLGSSEDPSNLASSKVVGDTKINLESQLRMKLSHGKTSNASSSKLPLALPSPKAPSESWLKRTLPTVPSKSISLRSNLATYFHAPVKTSEVNHGHLQFAQELLPPIPEA

SEQ ID NO: 54211 - protein, 476 aa, Glycine max
  peptide (1)..(476): Ceres Seq. ID no. 14313787
  misc_feature (1)..(254): Pfam Name: Protein of unknown function (DUF688) Pfam Description: Protein of unknown function (DUF688)
  misc_feature (1)..(293): Homolog of NCBI NO: 15226238 NR Description: expressed protein [Arabidopsis thaliana]
  misc_feature (389)..(470): Homolog of NCBI NO: 30690644 NR Description: expressed protein [Arabidopsis thaliana]
  misc_feature (1)..(325): Homolog of NCBI NO: 30690644 NR Description: expressed protein [Arabidopsis thaliana]
  misc_feature (319)..(440): Homolog of NCBI NO: 15224594 NR Description: hypothetical protein [Arabidopsis thaliana]
  misc_feature (1)..(254): Homolog of NCBI NO: 15224594 NR Description: hypothetical protein [Arabidopsis thaliana]
MIGRFLPAAKAMASETPQIQHNSRKPLVTQEQPKQAWKVVSGANSRPLNPKWQKVLPHYAQDIGREESEDESDDNDGYENNAPKVCGLFPRFCLLNPVPGLRMEGRIRSSTFHGVQSKSITSHRRTAKEHGRTATNGKKSVNSQSGYTEERDFLSTAEKSKHDIDPHRRACSKSSASESTEFESSCDSPVVEKTLYVDSVHKVKSSDTNIRGDDFDTLRKDTDLDKSLSIDSSIEDSKPLGIVDEKEVSEPKSLASLDSSLPVCSDNSNDNMQMEMKNHSNKICPEKQELTKPDYQGSNLDRDLVAISSPDMVACKKIESESKDFSTKESSNGLIKNPVSMRNRKFSSDVKFDSKCQQATKVVDQECTLGSSEDPSNLASSKVVGDTKINLESQLRMKLSHGKTSNASSSKLPLALPSPKAPSESWLKRTLPTVPSKSISLRSNLATYFHAPVKTSEVNHGHLQFAQELLPPIPEA

SEQ ID NO: 54212 - DNA, 1592 bp, Glycine max
  misc_feature (1)..(1592): Ceres Seq. ID no. 15225707
ggcgaattgggttccgggccccccctcgagtcagctacgtaggccccccccccccggaggagaagagagagaaagagaaaaactcaaagtcatcatcatctaccatggcaaattctgtggcattttccgacgagattcctaacatgagcatgagcttccctttctcccctgctttctctagtagcatctttgacatgatgccaccaccaccaccttcctcatctcacgatcctaaagctcccaactttgctaatagcttcatggacttgctcgctgtccctgctgattattataccccttctttattcgactggtcccaaaacaccgcccccacgtcagcaccaccaccttccaccacccaaatcaaccaccctcttccgtcgccagccagctccaatgtccccgacggctccgaggttctcaacactccggcgtctcccaattcttcgtctatttcatcatcgtccaacgaagcagcagccgccaccaccgccaacaaaacaacgggaaatgataatgaagaggaggaagatgaaacagcaatagatgcaacagcaggcagagaagaagaagatcatcaagaccaagacaagactaagaaacagctcaagccaaaaaagaagaaccaaaaaaagcaaagagagccgagatttgcgttcatgacaaagagtgaagtggatcacctcgacgatggctatagatggcgcaagtacggtcaaaaagccgtcaaaaacagccctcatccaaggagctattatcgttgcaccaccgcgacatgcggcgtgaagaagcgcgtggagcgttcctcggaggatcctacggtggtggtgacaacctacgaggggcaacacactcacccgtgtcctgccacgtcacgggctagcttcgggttcatgcactccgaagcaagtgggttcggacccaccagtggactaggttcggcacactttatgctgcaacaacaacaacagtttcgggaccaagcacaagcacaagcagcaatgttgtataactccacctcatcgtcattgtcattgccactgaatgttgttaactcagcttcttgtgttaataatagctatgccaatacgtcatcgttgagtggctttcttcagggccaagagaatcatcagcgaggttttgtgccgtctagggtggtggctcctcatattttcttgagggacaatgggcttcttcaggacattgttccaacgcagatggggaatgaggagaatgaagatcgtgtgtaggtgatgatcatcataatatatagtcatattttgggttaattaattaatcatagaacttaattatgacaaattagtttattttaattattttgttgtatattaattatatgtatctttgtatggtatattattatgtaccgttggttctttagctaactgaactaatggtgaaaagtgaaaacctctatgggcgggcttcttggggtgttttgtgttttactttagaggttaccatagagaaacctcgcttcaactgatggcttgtgttcatatgaaacattttggaggttcccactttttatggttagataatagatatatatggagggactttgtattctg

SEQ ID NO: 54213 - protein, 415 aa, Glycine max
  peptide (1)..(415): Ceres Seq. ID no. 15225708
  misc_feature (228)..(286): Pfam Name: WRKY DNA -binding domain Pfam Description: WRKY DNA -binding domain
  misc_feature (142)..(299): Homolog of NCBI NO: 25518132 NR Description: F1N18.10 protein - Arabidopsis thaliana
  misc_feature (142)..(299): Homolog of NCBI NO: 15220582 NR Description: WRKY family transcription factor [Arabidopsis
  misc_feature (143)..(303): Homolog of NCBI NO: 34910900 NR Description: P0003E08.17 [Oryza sativa (japonica
  misc_feature (134)..(294): Homolog of NCBI NO: 15236785 NR Description: WRKY family transcription factor [Arabidopsis
  misc_feature (90)..(316): Homolog of NCBI NO: 33519202 NR Description: WRKY17 [Oryza sativa (japonica cultivar-group)]
  misc_feature (144)..(317): Homolog of NCBI NO: 34912866 NR Description: putative DNA-binding protein homolog
  misc_feature (86)..(371): Homolog of NCBI NO: 21536889 NR Description: putative WRKY-type DNA binding protein
  misc_feature (383)..(410): Homolog of NCBI NO: 15226550 NR Description: WRKY family transcription factor [Arabidopsis
  misc_feature (86)..(371): Homolog of NCBI NO: 15226550 NR Description: WRKY family transcription factor [Arabidopsis
  misc_feature (21)..(409): Homolog of NCBI NO: 15239913 NR Description: WRKY family transcription factor [Arabidopsis
RIGFRAPPRVSYVGPPPPEEKREKEKNSKSSSSTMANSVAFSDEIPNMSMSFPFSPAFSSSIFDMMPPPPPSSSHDPKAPNFANSFMDLLAVPADYYTPSLFDWSQNTAPTSAPPPSTTQINHPLPSPASSNVPDGSEVLNTPASPNSSSISSSSNEAAAATTANKTTGNDNEEEEDETAIDATAGREEEDHQDQDKTKKQLKPKKKNQKKQREPRFAFMTKSEVDHLDDGYRWRKYGQKAVKNSPHPRSYYRCTTATCGVKKRVERSSEDPTVVVTTYEGQHTHPCPATSRASFGFMHSEASGFGPTSGLGSAHFMLQQQQQFRDQAQAQAAMLYNSTSSSLSLPLNVVNSASCVNNSYANTSSLSGFLQGQENHQRGFVPSRVVAPHIFLRDNGLLQDIVPTQMGNEENEDRV

SEQ ID NO: 54214 - protein, 381 aa, Glycine max
  peptide (1)..(381): Ceres Seq. ID no. 15225709
  misc_feature (194)..(252): Pfam Name: WRKY DNA -binding domain Pfam Description: WRKY DNA -binding domain
  misc_feature (108)..(265): Homolog of NCBI NO: 25518132 NR Description: F1N18.10 protein - Arabidopsis thaliana
  misc_feature (108)..(265): Homolog of NCBI NO: 15220582 NR Description: WRKY family transcription factor [Arabidopsis
  misc_feature (109)..(269): Homolog of NCBI NO: 34910900 NR Description: P0003E08.17 [Oryza sativa (japonica
  misc_feature (100)..(260): Homolog of NCBI NO: 15236785 NR Description: WRKY family transcription factor [Arabidopsis
  misc_feature (56)..(282): Homolog of NCBI NO: 33519202 NR Description: WRKY17 [Oryza sativa (japonica cultivar-group)]
  misc_feature (110)..(283): Homolog of NCBI NO: 34912866 NR Description: putative DNA-binding protein homolog
  misc_feature (52)..(337): Homolog of NCBI NO: 21536889 NR Description: putative WRKY-type DNA binding protein
  misc_feature (349)..(376): Homolog of NCBI NO: 15226550 NR Description: WRKY family transcription factor [Arabidopsis
  misc_feature (52)..(337): Homolog of NCBI NO: 15226550 NR Description: WRKY family transcription factor [Arabidopsis
  misc_feature (1)..(375): Homolog of NCBI NO: 15239913 NR Description: WRKY family transcription factor [Arabidopsis
MANSVAFSDEIPNMSMSFPFSPAFSSSIFDMMPPPPPSSSHDPKAPNFANSFMDLLAVPADYYTPSLFDWSQNTAPTSAPPPSTTQINHPLPSPASSNVPDGSEVLNTPASPNSSSISSSSNEAAAATTANKTTGNDNEEEEDETAIDATAGREEEDHQDQDKTKKQLKPKKKNQKKQREPRFAFMTKSEVDHLDDGYRWRKYGQKAVKNSPHPRSYYRCTTATCGVKKRVERSSEDPTVVVTTYEGQHTHPCPATSRASFGFMHSEASGFGPTSGLGSAHFMLQQQQQFRDQAQAQAAMLYNSTSSSLSLPLNVVNSASCVNNSYANTSSLSGFLQGQENHQRGFVPSRVVAPHIFLRDNGLLQDIVPTQMGNEENEDRV

SEQ ID NO: 54215 - protein, 368 aa, Glycine max
  peptide (1)..(368): Ceres Seq. ID no. 15225710
  misc_feature (181)..(239): Pfam Name: WRKY DNA -binding domain Pfam Description: WRKY DNA -binding domain
  misc_feature (95)..(252): Homolog of NCBI NO: 25518132 NR Description: F1N18.10 protein - Arabidopsis thaliana
  misc_feature (95)..(252): Homolog of NCBI NO: 15220582 NR Description: WRKY family transcription factor [Arabidopsis
  misc_feature (96)..(256): Homolog of NCBI NO: 34910900 NR Description: P0003E08.17 [Oryza sativa (japonica
  misc_feature (87)..(247): Homolog of NCBI NO: 15236785 NR Description: WRKY family transcription factor [Arabidopsis
  misc_feature (43)..(269): Homolog of NCBI NO: 33519202 NR Description: WRKY17 [Oryza sativa (japonica cultivar-group)]
  misc_feature (97)..(270): Homolog of NCBI NO: 34912866 NR Description: putative DNA-binding protein homolog
  misc_feature (39)..(324): Homolog of NCBI NO: 21536889 NR Description: putative WRKY-type DNA binding protein
  misc_feature (336)..(363): Homolog of NCBI NO: 15226550 NR Description: WRKY family transcription factor [Arabidopsis
  misc_feature (39)..(324): Homolog of NCBI NO: 15226550 NR Description: WRKY family transcription factor [Arabidopsis
  misc_feature (1)..(362): Homolog of NCBI NO: 15239913 NR Description: WRKY family transcription factor [Arabidopsis
MSMSFPFSPAFSSSIFDMMPPPPPSSSHDPKAPNFANSFMDLLAVPADYYTPSLFDWSQNTAPTSAPPPSTTQINHPLPSPASSNVPDGSEVLNTPASPNSSSISSSSNEAAAATTANKTTGNDNEEEEDETAIDATAGREEEDHQDQDKTKKQLKPKKKNQKKQREPRFAFMTKSEVDHLDDGYRWRKYGQKAVKNSPHPRSYYRCTTATCGVKKRVERSSEDPTVVVTTYEGQHTHPCPATSRASFGFMHSEASGFGPTSGLGSAHFMLQQQQQFRDQAQAQAAMLYNSTSSSLSLPLNVVNSASCVNNSYANTSSLSGFLQGQENHQRGFVPSRVVAPHIFLRDNGLLQDIVPTQMGNEENEDRV

SEQ ID NO: 54216 - DNA, 2054 bp, Glycine max
  misc_feature (1)..(2054): Ceres Seq. ID no. 14307148
aagtctgatttctattttctacactcagagagtgaagcgaacgagtcacgactcagcgatggtgggcccacagtacgattttctggcgaaccctttgggcgtcgtcagatccaccttcgatgccgccgtagcctctgtttccgatccctccgccttcgacgggcgcgactggggcgtcttcccgctcttccaccacttcctctccgaccagtccagtctctctcaggttccacttctgacccctgccaccatcaaatgggtgaagcctaatactctggttcggtttcgcgggatgatacaagacatgctcgggaacgaattttacattggcgcttataaggatggttcggtgtggaggacgaacaagtttatggatgtttctcaatctcttatggcttcttcggtggatatgcgaatctgggaacgtcgactgctttattgtgttccggttccaggactgagtccatggactcaagtttcagttgaagaatttggcgatctatctatggattgcaaatcggagaatagagaaaagcggaggagagaagatggcgagtcttctgatatgcctgtatctggtgatgaggttcagaattccccaaatagtaaaagaatgagagaaggtgaacactcttctgttgcttctcattctcagggagctgcaactgagattgccagctctggtaccagtttggtgtctggtcttgatagcaattcacctccctgtcttgtgaagatatatgattctccagattctgaattgaaactgaatgacatttttgagtttgtgggtatccttacatctgatctagagcttgaagaggacgatgaagattgtgatttatcagatggattttctgaagatcctttgcgtcatctcccacctagcaaggtgccacaccttcattgttttattcagaggaaattagcggttcacgacttccttcagcacaatcctattgtagagccaaggcccaacttggtcagaggaatcagggaagcattgctaaggcatctcacggctgttcttagcaatgatgatttggctactcatttcatgttgctgcatcttctatccaaggtgcatgctagagcagatgatcttgctgtgggaaagctttcattaaatcttacttgttttagcaaagaaaccgtgtctgtatttggaaaaccactaagcgttgctttgaagaacctcctgccattcacattttgcataccccttacagttgaatacttgaattctgtttcacttacgccaaaaaagaattacgatactaatagactggaaactggagtcttacaactagctgaaggttcacacttgattgttgatgagaccaaactagaagctggaactctcaactctgtaggggtagagaatacaaggctactgaaaaatttaatggaattgcaaaaggttgaatatgatttcaagtactataaagtggatatgacaactgatttccaactgctagttttgtcggaggggaaatcaaatatcttgccagccgatgtaattgtaccgttccgaccttctgcaaccagttgctctggagctgtgactgcagaagctttggaggcctggaggtggtatttggccactgtcagacagctatcacacactattgaaccagaaatgcagaaggtgatagaaagtgatctagttgcagcaagacaagcagacaggagcttgagctcccaagatttaagcagattggtaacaatgggccgtctcatgtcattgagctatggtgagaccagcttgtcactagaacattggcaaatggtcaaggaactagaaaggctgcgaagagagaggctataatgaaaaacaccatggaattacaagtggttccaatttgtacaaggttttaaatgagtcaagttatggtgttgacgtcttaaattgtgttgtcggttcaaggaaatgaatgcagttcaaagggtcttggcggttagttgttctgattaccagaattgtcttatgaacagatactcggttccgtaagttgtgcattcagtaaaatgcaatataagaccatttcactaag

SEQ ID NO: 54217 - protein, 608 aa, Glycine max
  peptide (1)..(608): Ceres Seq. ID no. 14307149
  misc_feature (286)..(608): Homolog of NCBI NO: 13376243 NR Description: hypothetical protein FLJ13081 [Homo sapiens]
  misc_feature (26)..(608): Homolog of NCBI NO: 34859388 NR Description: similar to cDNA sequence BC025641 [Rattus
  misc_feature (26)..(240): Homolog of NCBI NO: 22122389 NR Description: cDNA sequence BC025641 [Mus musculus]
  misc_feature (275)..(608): Homolog of NCBI NO: 22122389 NR Description: cDNA sequence BC025641 [Mus musculus]
  misc_feature (26)..(240): Homolog of NCBI NO: 13278834 NR Description: Unknown (protein for MGC:2809) [Homo sapiens]
  misc_feature (240)..(608): Homolog of NCBI NO: 13278834 NR Description: Unknown (protein for MGC:2809) [Homo sapiens]
  misc_feature (20)..(286): Homolog of NCBI NO: 15226711 NR Description: expressed protein [Arabidopsis thaliana]
  misc_feature (322)..(608): Homolog of NCBI NO: 15226711 NR Description: expressed protein [Arabidopsis thaliana]
  misc_feature (20)..(189): Homolog of NCBI NO: 34896132 NR Description: P0701D05.20 [Oryza sativa (japonica
  misc_feature (246)..(608): Homolog of NCBI NO: 34896132 NR Description: P0701D05.20 [Oryza sativa (japonica
SLISIFYTQRVKRTSHDSAMVGPQYDFLANPLGVVRSTFDAAVASVSDPSAFDGRDWGVFPLFHHFLSDQSSLSQVPLLTPATIKWVKPNTLVRFRGMIQDMLGNEFYIGAYKDGSVWRTNKFMDVSQSLMASSVDMRIWERRLLYCVPVPGLSPWTQVSVEEFGDLSMDCKSENREKRRREDGESSDMPVSGDEVQNSPNSKRMREGEHSSVASHSQGAATEIASSGTSLVSGLDSNSPPCLVKIYDSPDSELKLNDIFEFVGILTSDLELEEDDEDCDLSDGFSEDPLRHLPPSKVPHLHCFIQRKLAVHDFLQHNPIVEPRPNLVRGIREALLRHLTAVLSNDDLATHFMLLHLLSKVHARADDLAVGKLSLNLTCFSKETVSVFGKPLSVALKNLLPFTFCIPLTVEYLNSVSLTPKKNYDTNRLETGVLQLAEGSHLIVDETKLEAGTLNSVGVENTRLLKNLMELQKVEYDFKYYKVDMTTDFQLLVLSEGKSNILPADVIVPFRPSATSCSGAVTAEALEAWRWYLATVRQLSHTIEPEMQKVIESDLVAARQADRSLSSQDLSRLVTMGRLMSLSYGETSLSLEHWQMVKELERLRRERL

SEQ ID NO: 54218 - protein, 589 aa, Glycine max
  peptide (1)..(589): Ceres Seq. ID no. 14307150
  misc_feature (267)..(589): Homolog of NCBI NO: 13376243 NR Description: hypothetical protein FLJ13081 [Homo sapiens]
  misc_feature (7)..(589): Homolog of NCBI NO: 34859388 NR Description: similar to cDNA sequence BC025641 [Rattus
  misc_feature (7)..(221): Homolog of NCBI NO: 22122389 NR Description: cDNA sequence BC025641 [Mus musculus]
  misc_feature (256)..(589): Homolog of NCBI NO: 22122389 NR Description: cDNA sequence BC025641 [Mus musculus]
  misc_feature (7)..(221): Homolog of NCBI NO: 13278834 NR Description: Unknown (protein for MGC:2809) [Homo sapiens]
  misc_feature (221)..(589): Homolog of NCBI NO: 13278834 NR Description: Unknown (protein for MGC:2809) [Homo sapiens]
  misc_feature (1)..(267): Homolog of NCBI NO: 15226711 NR Description: expressed protein [Arabidopsis thaliana]
  misc_feature (303)..(589): Homolog of NCBI NO: 15226711 NR Description: expressed protein [Arabidopsis thaliana]
  misc_feature (1)..(170): Homolog of NCBI NO: 34896132 NR Description: P0701D05.20 [Oryza sativa (japonica
  misc_feature (227)..(589): Homolog of NCBI NO: 34896132 NR Description: P0701D05.20 [Oryza sativa (japonica
MVGPQYDFLANPLGVVRSTFDAAVASVSDPSAFDGRDWGVFPLFHHFLSDQSSLSQVPLLTPATIKWVKPNTLVRFRGMIQDMLGNEFYIGAYKDGSVWRTNKFMDVSQSLMASSVDMRIWERRLLYCVPVPGLSPWTQVSVEEFGDLSMDCKSENREKRRREDGESSDMPVSGDEVQNSPNSKRMREGEHSSVASHSQGAATEIASSGTSLVSGLDSNSPPCLVKIYDSPDSELKLNDIFEFVGILTSDLELEEDDEDCDLSDGFSEDPLRHLPPSKVPHLHCFIQRKLAVHDFLQHNPIVEPRPNLVRGIREALLRHLTAVLSNDDLATHFMLLHLLSKVHARADDLAVGKLSLNLTCFSKETVSVFGKPLSVALKNLLPFTFCIPLTVEYLNSVSLTPKKNYDTNRLETGVLQLAEGSHLIVDETKLEAGTLNSVGVENTRLLKNLMELQKVEYDFKYYKVDMTTDFQLLVLSEGKSNILPADVIVPFRPSATSCSGAVTAEALEAWRWYLATVRQLSHTIEPEMQKVIESDLVAARQADRSLSSQDLSRLVTMGRLMSLSYGETSLSLEHWQMVKELERLRRERL

SEQ ID NO: 54219 - protein, 511 aa, Glycine max
  peptide (1)..(511): Ceres Seq. ID no. 14307151
  misc_feature (189)..(511): Homolog of NCBI NO: 13376243 NR Description: hypothetical protein FLJ13081 [Homo sapiens]
  misc_feature (1)..(511): Homolog of NCBI NO: 34859388 NR Description: similar to cDNA sequence BC025641 [Rattus
  misc_feature (1)..(143): Homolog of NCBI NO: 22122389 NR Description: cDNA sequence BC025641 [Mus musculus]
  misc_feature (178)..(511): Homolog of NCBI NO: 22122389 NR Description: cDNA sequence BC025641 [Mus musculus]
  misc_feature (1)..(143): Homolog of NCBI NO: 13278834 NR Description: Unknown (protein for MGC:2809) [Homo sapiens]
  misc_feature (143)..(511): Homolog of NCBI NO: 13278834 NR Description: Unknown (protein for MGC:2809) [Homo sapiens]
  misc_feature (1)..(189): Homolog of NCBI NO: 15226711 NR Description: expressed protein [Arabidopsis thaliana]
  misc_feature (225)..(511): Homolog of NCBI NO: 15226711 NR Description: expressed protein [Arabidopsis thaliana]
  misc_feature (1)..(92): Homolog of NCBI NO: 34896132 NR Description: P0701D05.20 [Oryza sativa (japonica
  misc_feature (149)..(511): Homolog of NCBI NO: 34896132 NR Description: P0701D05.20 [Oryza sativa (japonica
MIQDMLGNEFYIGAYKDGSVWRTNKFMDVSQSLMASSVDMRIWERRLLYCVPVPGLSPWTQVSVEEFGDLSMDCKSENREKRRREDGESSDMPVSGDEVQNSPNSKRMREGEHSSVASHSQGAATEIASSGTSLVSGLDSNSPPCLVKIYDSPDSELKLNDIFEFVGILTSDLELEEDDEDCDLSDGFSEDPLRHLPPSKVPHLHCFIQRKLAVHDFLQHNPIVEPRPNLVRGIREALLRHLTAVLSNDDLATHFMLLHLLSKVHARADDLAVGKLSLNLTCFSKETVSVFGKPLSVALKNLLPFTFCIPLTVEYLNSVSLTPKKNYDTNRLETGVLQLAEGSHLIVDETKLEAGTLNSVGVENTRLLKNLMELQKVEYDFKYYKVDMTTDFQLLVLSEGKSNILPADVIVPFRPSATSCSGAVTAEALEAWRWYLATVRQLSHTIEPEMQKVIESDLVAARQADRSLSSQDLSRLVTMGRLMSLSYGETSLSLEHWQMVKELERLRRERL

SEQ ID NO: 54220 - DNA, 1256 bp, Glycine max
  misc_feature (1)..(1256): Ceres Seq. ID no. 13639419
ctttattgtgtttaaacagcaaacttgagtttggcctcattagtaacaaatgcaacggttctataaattttgcagatgatagtatcatggagatattacaaaagggtgagacagattctaatcgcattgaagcacaaatttactctttgaggtctgcaatagagagtgctgaaactaagcaccaggaagaacagatcgagtgttctgtgaagattaggaaagcctatgagttgattgaacagataaaatcagaatcaagcaagagggaatctcagctagaggctgaattaaaaagaaagaatgccgatattgaagagttgaaggctaacctaatggacaaggaaactgagttgcagtgcattgtggaggagaatgagaagttgaatttgaagcttgaaaaaaggatgtcatcacaaagagaacatgaacttcaaaaggagcttcgaaaactagatgaatgcgtggctggattgaaggccgacctgatggaaaagaaaacaacgttgcaaagcatatctgaagagaatgaaatgctgaagttggagatcagtaagaggtttgcacatggtggtaaggtgatggaggaagttgctgcacaactagaggcagctaaggcttcggaacgcgaggcggttatgaagcttggtattgtgatggaagattcagacagaagcaaccgaaaggcggcgagggtggccgagcaactggaagcatctcaagcagcaaattcaataatagaagctgaactaagaaggttgaagatacagtctgatcaatggagaaaggctgcagaggcagctgctgcaatgctctcagcagggaacaatgggaaacttagtgagagatcaatgtctttggacaacaactataactctataatgaacaagtactcacctttttgtgaagagcttgatgatgatgattttcagaccaagaaaaatggcaacatgctcaagaagattggggtcttgtggaggaaacctaaaaaatagtcaatgttggctgtttacgagttatgacccgcttctaatgttatgattatgttaactgtaatgtttatgttatgcaattttgtctgaccgctaccctcctttttgtttggtgaaacgttgtctacagatgcttagtagtttgaatgaattaagcgcttttataattcaaggacgtgtaggtagagattagagattgtcaatgtttaacccaaaagggttggggtaaggttttctttccatcagtgaaaatcgtgtttgatttct

SEQ ID NO: 54221 - protein, 329 aa, Glycine max
  peptide (1)..(329): Ceres Seq. ID no. 13639420
  misc_feature (12)..(319): Pfam Name: Myosin tail Pfam Description: Myosin tail
  misc_feature (21)..(212): Homolog of NCBI NO: 11357801 NR Description: hypothetical protein F4P12.50 - Arabidopsis
  misc_feature (24)..(170): Homolog of NCBI NO: 34908020 NR Description: P0460C04.20 [Oryza sativa (japonica
  misc_feature (79)..(326): Homolog of NCBI NO: 29367581 NR Description: myosin heavy chain-like protein
  misc_feature (54)..(326): Homolog of NCBI NO: 34908020 NR Description: P0460C04.20 [Oryza sativa (japonica
  misc_feature (77)..(326): Homolog of NCBI NO: 18394444 NR Description: expressed protein [Arabidopsis thaliana]
  misc_feature (70)..(326): Homolog of NCBI NO: 15218348 NR Description: expressed protein [Arabidopsis thaliana]
  misc_feature (26)..(329): Homolog of NCBI NO: 30697347 NR Description: expressed protein [Arabidopsis thaliana]
  misc_feature (26)..(329): Homolog of NCBI NO: 8885572 NR Description: myosin heavy chain-like [Arabidopsis thaliana]
  misc_feature (15)..(329): Homolog of NCBI NO: 15228082 NR Description: myosin heavy chain -related [Arabidopsis
  misc_feature (38)..(329): Homolog of NCBI NO: 18076679 NR Description: P70 protein [Nicotiana tabacum]
LLCLNSKLEFGLISNKCNGSINFADDSIMEILQKGETDSNRIEAQIYSLRSAIESAETKHQEEQIECSVKIRKAYELIEQIKSESSKRESQLEAELKRKNADIEELKANLMDKETELQCIVEENEKLNLKLEKRMSSQREHELQKELRKLDECVAGLKADLMEKKTTLQSISEENEMLKLEISKRFAHGGKVMEEVAAQLEAAKASEREAVMKLGIVMEDSDRSNRKAARVAEQLEASQAANSIIEAELRRLKIQSDQWRKAAEAAAAMLSAGNNGKLSERSMSLDNNYNSIMNKYSPFCEELDDDDFQTKKNGNMLKKIGVLWRKPKK

SEQ ID NO: 54222 - protein, 301 aa, Glycine max
  peptide (1)..(301): Ceres Seq. ID no. 13639421
  misc_feature (1)..(291): Pfam Name: Myosin tail Pfam Description: Myosin tail
  misc_feature (1)..(184): Homolog of NCBI NO: 11357801 NR Description: hypothetical protein F4P12.50 - Arabidopsis
  misc_feature (1)..(142): Homolog of NCBI NO: 34908020 NR Description: P0460C04.20 [Oryza sativa (japonica
  misc_feature (51)..(298): Homolog of NCBI NO: 29367581 NR Description: myosin heavy chain-like protein
  misc_feature (26)..(298): Homolog of NCBI NO: 34908020 NR Description: P0460C04.20 [Oryza sativa (japonica
  misc_feature (49)..(298): Homolog of NCBI NO: 18394444 NR Description: expressed protein [Arabidopsis thaliana]
  misc_feature (42)..(298): Homolog of NCBI NO: 15218348 NR Description: expressed protein [Arabidopsis thaliana]
  misc_feature (1)..(301): Homolog of NCBI NO: 30697347 NR Description: expressed protein [Arabidopsis thaliana]
  misc_feature (1)..(301): Homolog of NCBI NO: 8885572 NR Description: myosin heavy chain-like [Arabidopsis thaliana]
  misc_feature (1)..(301): Homolog of NCBI NO: 15228082 NR Description: myosin heavy chain -related [Arabidopsis
  misc_feature (10)..(301): Homolog of NCBI NO: 18076679 NR Description: P70 protein [Nicotiana tabacum]
MEILQKGETDSNRIEAQIYSLRSAIESAETKHQEEQIECSVKIRKAYELIEQIKSESSKRESQLEAELKRKNADIEELKANLMDKETELQCIVEENEKLNLKLEKRMSSQREHELQKELRKLDECVAGLKADLMEKKTTLQSISEENEMLKLEISKRFAHGGKVMEEVAAQLEAAKASEREAVMKLGIVMEDSDRSNRKAARVAEQLEASQAANSIIEAELRRLKIQSDQWRKAAEAAAAMLSAGNNGKLSERSMSLDNNYNSIMNKYSPFCEELDDDDFQTKKNGNMLKKIGVLWRKPKK

SEQ ID NO: 54223 - protein, 219 aa, Glycine max
  peptide (1)..(219): Ceres Seq. ID no. 13639422
  misc_feature (1)..(209): Pfam Name: Myosin tail Pfam Description: Myosin tail
  misc_feature (1)..(102): Homolog of NCBI NO: 11357801 NR Description: hypothetical protein F4P12.50 - Arabidopsis
  misc_feature (1)..(60): Homolog of NCBI NO: 34908020 NR Description: P0460C04.20 [Oryza sativa (japonica
  misc_feature (1)..(216): Homolog of NCBI NO: 29367581 NR Description: myosin heavy chain-like protein
  misc_feature (1)..(216): Homolog of NCBI NO: 34908020 NR Description: P0460C04.20 [Oryza sativa (japonica
  misc_feature (1)..(216): Homolog of NCBI NO: 18394444 NR Description: expressed protein [Arabidopsis thaliana]
  misc_feature (1)..(216): Homolog of NCBI NO: 15218348 NR Description: expressed protein [Arabidopsis thaliana]
  misc_feature (1)..(219): Homolog of NCBI NO: 30697347 NR Description: expressed protein [Arabidopsis thaliana]
  misc_feature (1)..(219): Homolog of NCBI NO: 8885572 NR Description: myosin heavy chain-like [Arabidopsis thaliana]
  misc_feature (1)..(219): Homolog of NCBI NO: 15228082 NR Description: myosin heavy chain -related [Arabidopsis
  misc_feature (1)..(219): Homolog of NCBI NO: 18076679 NR Description: P70 protein [Nicotiana tabacum]
MDKETELQCIVEENEKLNLKLEKRMSSQREHELQKELRKLDECVAGLKADLMEKKTTLQSISEENEMLKLEISKRFAHGGKVMEEVAAQLEAAKASEREAVMKLGIVMEDSDRSNRKAARVAEQLEASQAANSIIEAELRRLKIQSDQWRKAAEAAAAMLSAGNNGKLSERSMSLDNNYNSIMNKYSPFCEELDDDDFQTKKNGNMLKKIGVLWRKPKK

SEQ ID NO: 54224 - DNA, 1477 bp, Glycine max
  misc_feature (1)..(1477): Ceres Seq. ID no. 14314717
aatccaatgtagaggacattcactcgtattaatattgttccaaactcccaagtcccaaccttctctccctgtctttgcttctgcaattactcccactctggaaatgggttcgctacccgatttagacactctcccccctctgagctcgaggatttcaacggtggttccagcaacccctcgagaagatgaaaacggtgcgtttcaactcaactacatggacctcctcgtgaagctccattacatacgacccgttttcttcttcacttccgaagccgttcaaggcctctcaatctccgacttgaagaaacccatgttcccgcttctcgacccgtattaccacgtttcgggtcgggtcagaagatccgaatccggacgcccctttattaagtgcaacgacgccggtgttcgcatcgctgagtcgcactgcgacagaaccctcgaagaatggttccgtgaaaacggaaacggcgccgttgaagggcttgtccatgatcacgtgcttggacctgatcttgccttttctcctctcgttttcgtcaagttcacttggttcaaatgtggaggattatccgtgggattaagctgggctcacgttcttggagatgccttttctgcatttaatttcctgtccaagtggagtcaaatactagcagtttccattaaaaagacaaatattcttggagagtattggctcgctactaattaccacgatgtggctactcactcttttcacatcacttccaaacaacttcaccatttggtaacagccacatttaatcaaaccaatgacaataccaataaggccaagaccaccacctattttgaaattatttcagcattactttggaagtgtatagcaaacataaggggccaaaaaattggaccaaatgttgtgactatatgtactagtgaatctaatcgtgcagaaaacgaattccccaccaatggcttcttagtgttaagcaaaattgaagcagatttttcgactgggaaatatgaaatttcagaattggtgaagctgattgctgagaacaagatggttgagaaccatgtaatggaaaaattggtggaggcagatgaagggaaagaggattttatagtttatggggtaaacttgacgtttgtgaatttggaagaagctaatatttatgatgggatgaatctgaatggacagaaaccaattatggcaaattgtacatttcgtggggtgagtgataaaggggttgttttggttcttccagcaccagaagatgacgaagatggtggtaatggaaggattgttactgtttctttgcctcgtgaagaactatatcagctgaaagataagctaggaggagaatggggcatacactaattgttcgtgtccgtgttttttatttttggaagcaaaactggtttaagtcgtgtggattgtttttcatctatttgttattgcatttagtatgtttgccggtaataaaatactaatgatttggtc

SEQ ID NO: 54225 - protein, 450 aa, Glycine max
  peptide (1)..(450): Ceres Seq. ID no. 14314718
  misc_feature (50)..(440): Pfam Name: Transferase family Pfam Description: Transferase family
  misc_feature (271)..(432): Homolog of NCBI NO: 30017587 NR Description: unknown protein [Oryza sativa (japonica
  misc_feature (52)..(290): Homolog of NCBI NO: 40644084 NR Description: hydroxycinnamoyl CoA quinate transferase
  misc_feature (50)..(180): Homolog of NCBI NO: 38568009 NR Description: OSJNBa0070C17.1 [Oryza sativa (japonica
  misc_feature (45)..(217): Homolog of NCBI NO: 15233851 NR Description: CER2 [Arabidopsis thaliana]
  misc_feature (50)..(226): Homolog of NCBI NO: 2130139 NR Description: hypothetical protein - maize
  misc_feature (50)..(217): Homolog of NCBI NO: 38345799 NR Description: OSJNBa0085I10.16 [Oryza sativa (japonica
  misc_feature (121)..(443): Homolog of NCBI NO: 15233851 NR Description: CER2 [Arabidopsis thaliana]
  misc_feature (45)..(440): Homolog of NCBI NO: 15236357 NR Description: transferase family [Arabidopsis thaliana]
  misc_feature (35)..(440): Homolog of NCBI NO: 18403923 NR Description: transferase family [Arabidopsis thaliana]
  misc_feature (35)..(440): Homolog of NCBI NO: 21593424 NR Description: fatty acid elongase-like protein (cer2-like)
IQCRGHSLVLILFQTPKSQPSLPVFASAITPTLEMGSLPDLDTLPPLSSRISTVVPATPREDENGAFQLNYMDLLVKLHYIRPVFFFTSEAVQGLSISDLKKPMFPLLDPYYHVSGRVRRSESGRPFIKCNDAGVRIAESHCDRTLEEWFRENGNGAVEGLVHDHVLGPDLAFSPLVFVKFTWFKCGGLSVGLSWAHVLGDAFSAFNFLSKWSQILAVSIKKTNILGEYWLATNYHDVATHSFHITSKQLHHLVTATFNQTNDNTNKAKTTTYFEIISALLWKCIANIRGQKIGPNVVTICTSESNRAENEFPTNGFLVLSKIEADFSTGKYEISELVKLIAENKMVENHVMEKLVEADEGKEDFIVYGVNLTFVNLEEANIYDGMNLNGQKPIMANCTFRGVSDKGVVLVLPAPEDDEDGGNGRIVTVSLPREELYQLKDKLGGEWGIH

SEQ ID NO: 54226 - protein, 416 aa, Glycine max
  peptide (1)..(416): Ceres Seq. ID no. 14314719
  misc_feature (16)..(406): Pfam Name: Transferase family Pfam Description: Transferase family
  misc_feature (237)..(398): Homolog of NCBI NO: 30017587 NR Description: unknown protein [Oryza sativa (japonica
  misc_feature (18)..(256): Homolog of NCBI NO: 40644084 NR Description: hydroxycinnamoyl CoA quinate transferase
  misc_feature (16)..(146): Homolog of NCBI NO: 38568009 NR Description: OSJNBa0070C17.1 [Oryza sativa (japonica
  misc_feature (11)..(183): Homolog of NCBI NO: 15233851 NR Description: CER2 [Arabidopsis thaliana]
  misc_feature (16)..(192): Homolog of NCBI NO: 2130139 NR Description: hypothetical protein - maize
  misc_feature (16)..(183): Homolog of NCBI NO: 38345799 NR Description: OSJNBa0085I10.16 [Oryza sativa (japonica
  misc_feature (87)..(409): Homolog of NCBI NO: 15233851 NR Description: CER2 [Arabidopsis thaliana]
  misc_feature (11)..(406): Homolog of NCBI NO: 15236357 NR Description: transferase family [Arabidopsis thaliana]
  misc_feature (1)..(406): Homolog of NCBI NO: 18403923 NR Description: transferase family [Arabidopsis thaliana]
  misc_feature (1)..(406): Homolog of NCBI NO: 21593424 NR Description: fatty acid elongase-like protein (cer2-like)
MGSLPDLDTLPPLSSRISTVVPATPREDENGAFQLNYMDLLVKLHYIRPVFFFTSEAVQGLSISDLKKPMFPLLDPYYHVSGRVRRSESGRPFIKCNDAGVRIAESHCDRTLEEWFRENGNGAVEGLVHDHVLGPDLAFSPLVFVKFTWFKCGGLSVGLSWAHVLGDAFSAFNFLSKWSQILAVSIKKTNILGEYWLATNYHDVATHSFHITSKQLHHLVTATFNQTNDNTNKAKTTTYFEIISALLWKCIANIRGQKIGPNVVTICTSESNRAENEFPTNGFLVLSKIEADFSTGKYEISELVKLIAENKMVENHVMEKLVEADEGKEDFIVYGVNLTFVNLEEANIYDGMNLNGQKPIMANCTFRGVSDKGVVLVLPAPEDDEDGGNGRIVTVSLPREELYQLKDKLGGEWGIH

SEQ ID NO: 54227 - protein, 379 aa, Glycine max
  peptide (1)..(379): Ceres Seq. ID no. 14314720
  misc_feature (1)..(369): Pfam Name: Transferase family Pfam Description: Transferase family
  misc_feature (200)..(361): Homolog of NCBI NO: 30017587 NR Description: unknown protein [Oryza sativa (japonica
  misc_feature (1)..(219): Homolog of NCBI NO: 40644084 NR Description: hydroxycinnamoyl CoA quinate transferase
  misc_feature (1)..(109): Homolog of NCBI NO: 38568009 NR Description: OSJNBa0070C17.1 [Oryza sativa (japonica
  misc_feature (1)..(146): Homolog of NCBI NO: 15233851 NR Description: CER2 [Arabidopsis thaliana]
  misc_feature (1)..(155): Homolog of NCBI NO: 2130139 NR Description: hypothetical protein - maize
  misc_feature (1)..(146): Homolog of NCBI NO: 38345799 NR Description: OSJNBa0085I10.16 [Oryza sativa (japonica
  misc_feature (50)..(372): Homolog of NCBI NO: 15233851 NR Description: CER2 [Arabidopsis thaliana]
  misc_feature (1)..(369): Homolog of NCBI NO: 15236357 NR Description: transferase family [Arabidopsis thaliana]
  misc_feature (1)..(369): Homolog of NCBI NO: 18403923 NR Description: transferase family [Arabidopsis thaliana]
  misc_feature (1)..(369): Homolog of NCBI NO: 21593424 NR Description: fatty acid elongase-like protein (cer2-like)
MDLLVKLHYIRPVFFFTSEAVQGLSISDLKKPMFPLLDPYYHVSGRVRRSESGRPFIKCNDAGVRIAESHCDRTLEEWFRENGNGAVEGLVHDHVLGPDLAFSPLVFVKFTWFKCGGLSVGLSWAHVLGDAFSAFNFLSKWSQILAVSIKKTNILGEYWLATNYHDVATHSFHITSKQLHHLVTATFNQTNDNTNKAKTTTYFEIISALLWKCIANIRGQKIGPNVVTICTSESNRAENEFPTNGFLVLSKIEADFSTGKYEISELVKLIAENKMVENHVMEKLVEADEGKEDFIVYGVNLTFVNLEEANIYDGMNLNGQKPIMANCTFRGVSDKGVVLVLPAPEDDEDGGNGRIVTVSLPREELYQLKDKLGGEWGIH

SEQ ID NO: 54228 - DNA, 1151 bp, Glycine max
  misc_feature (1)..(1151): Ceres Seq. ID no. 14307424
aaaaaaacacaccccattacaattctctgtatttcagggttgaaaattcacacgttgaattgaaatttggaaatcgtgacaccaaccctacaccaccatggcctccgtagacaaattttgggcttttgccctcgctcttctcctccttgcctcccctctcctccaagttgctaggtgtcagtcagactccgaagatgtagtggaggctgctgaagaatcaagtgatatcggcattgttggtgatgatgtccaagactttggtgatgggaccttcccttctgctccaggaattgaaacaataagtgtttttccaaaaaatagtgcgagattgataacagctggagaagagacagagctgcttgttggtgttaaaaatgatggggattcaagcttgaatgttattgcgatcaaggctagtgttcaccttccttttgatcaccgtatgctggttcaaaatcttactgcacagggttttaacaatggttctgtaccagcctcagcacaagctactttcccatatttatttgcagtcagtaagttcttgcaggcaggaacttttgaccttgtgggcactattatatacgagatagatgaacatccatatcaaagcaccttttttaatggcactgttgaggttgttgaatctggtgcttttcttagcatggaatccgtttttcttgttactcttggggttgcactccttgtcctcctggggctatggattcatggccaaatacagtacctatctaagaaaacaaagagggctccaaaagttgaagttgggactaagactactgatgcttcaacagatgaatggctacagggaactgcttatactcagtctctgtcaagcaagtcaaagaagaagaagtagataaacaatttctcacgttcagccactcactagactctaccatggatatggaatacagaatcctgtaactgactagggttgagtatgagagaacacgaggaagtagttgtgaaattttggctgaaagatccagctttctgttgtagcttaagaatttttacttttctacatttgaatgaagttgagctttttctaaactaacaaggatttcagttaggaaggatacaacttttgagatgtggcataatttttattagataacgtttgttttactttt

SEQ ID NO: 54229 - protein, 258 aa, Glycine max
  peptide (1)..(258): Ceres Seq. ID no. 14307425
  misc_feature (27)..(256): Homolog of NCBI NO: 39595546 NR Description: Hypothetical protein CBG04219 [Caenorhabditis
  misc_feature (27)..(241): Homolog of NCBI NO: 17510497 NR Description: translocon-associated protein (28.6 kD) (1D497)
  misc_feature (32)..(258): Homolog of NCBI NO: 18921153 NR Description: CG32701-PA [Drosophila melanogaster]
  misc_feature (124)..(258): Homolog of NCBI NO: 15227250 NR Description: TRAP protein -related [Arabidopsis thaliana]
  misc_feature (12)..(258): Homolog of NCBI NO: 18399609 NR Description: signal sequence receptor, alpha subunit
  misc_feature (12)..(258): Homolog of NCBI NO: 25335776 NR Description: hypothetical protein At2g21160 [imported] -
  misc_feature (12)..(258): Homolog of NCBI NO: 547391 NR Description: alpha-subunit; putative
  misc_feature (12)..(258): Homolog of NCBI NO: 21555380 NR Description: putative signal sequence receptor, alpha subunit
MASVDKFWAFALALLLLASPLLQVARCQSDSEDVVEAAEESSDIGIVGDDVQDFGDGTFPSAPGIETISVFPKNSARLITAGEETELLVGVKNDGDSSLNVIAIKASVHLPFDHRMLVQNLTAQGFNNGSVPASAQATFPYLFAVSKFLQAGTFDLVGTIIYEIDEHPYQSTFFNGTVEVVESGAFLSMESVFLVTLGVALLVLLGLWIHGQIQYLSKKTKRAPKVEVGTKTTDASTDEWLQGTAYTQSLSSKSKKKK

SEQ ID NO: 54230 - protein, 143 aa, Glycine max
  peptide (1)..(143): Ceres Seq. ID no. 14307426
  misc_feature (1)..(141): Homolog of NCBI NO: 39595546 NR Description: Hypothetical protein CBG04219 [Caenorhabditis
  misc_feature (1)..(126): Homolog of NCBI NO: 17510497 NR Description: translocon-associated protein (28.6 kD) (1D497)
  misc_feature (1)..(143): Homolog of NCBI NO: 18921153 NR Description: CG32701-PA [Drosophila melanogaster]
  misc_feature (9)..(143): Homolog of NCBI NO: 15227250 NR Description: TRAP protein -related [Arabidopsis thaliana]
  misc_feature (1)..(143): Homolog of NCBI NO: 25335776 NR Description: hypothetical protein At2g21160 [imported] -
  misc_feature (1)..(143): Homolog of NCBI NO: 18399609 NR Description: signal sequence receptor, alpha subunit
  misc_feature (1)..(143): Homolog of NCBI NO: 547391 NR Description: alpha-subunit; putative
  misc_feature (1)..(143): Homolog of NCBI NO: 21555380 NR Description: putative signal sequence receptor, alpha subunit
MLVQNLTAQGFNNGSVPASAQATFPYLFAVSKFLQAGTFDLVGTIIYEIDEHPYQSTFFNGTVEVVESGAFLSMESVFLVTLGVALLVLLGLWIHGQIQYLSKKTKRAPKVEVGTKTTDASTDEWLQGTAYTQSLSSKSKKKK

SEQ ID NO: 54231 - DNA, 1353 bp, Glycine max
  misc_feature (1)..(1353): Ceres Seq. ID no. 14307404
ggtctccctcacatcgcacacgctttcgctttctttctctcactgtttctctggagtttgtgatctgagtataaagatggagctgagtagcatcaaagatgcatttgatcgtgtagccaagaagcaaaaattatcctcttccaagtctcaagaagttgttgaccaggtggggtgtgaaattgagcaagcattggcaacaattcagtcatcacatgacccctcagctcctgttgaccagaaatctgttctcacagaacttaagtttaagcttaatgctattggaccacttcaacagttggaaggatcaaataaggaattgaacataagtcttaccaagtatcaaaaactccttgaaaaattgttaaaccctgacatatcaaaggcatacagaaatgtggactttgatactcatattgtcaatcagataattgcaaaccacttttaccatcaaggtttgtttgatcttggagatagcatcataaatgaggctggagagcctgatgcagctgcacttagatctcaatttttggaaatgcatcagattattggagctatgagggagagaaaccttcagcctgctctcacatgggtctctgctaatcgagagaaacttgttcagattggttcaaatcttgagcttaagattcacacgttgcagtttgtagaggtcctgcaaaatggaacacgagctgatgccttaaaatatgcccgaacataccttgctccttttgcttctctcaacaagggtgagttcccaaagcttatgggttgcctcttgtatgcaggaaggctagagagctccccttattctgagctgttgtccccaattcattgggagatgacaactgaagagctcacacggcagttctgcactctcctgggtcagtcctatgagaacccactgagtgtagcagttgcagcaggagttgaggggttgcctacactgttaaagcttgcaaatgtaatggcagcaaagaagcaggagtggcaggaaatgaagcagttgccggtgccggttgaattgggtaaggagtttcagttccattcgatttttgtttgccctgtgagtagggatcaaggaagtgaagaaaatcctccaatgctgctgccatgcttacatgtcctttgcaaacaatcaattatgaagctatcaaaaaacagcacccgaacattcaagtgtccatactgtccagccgaagctactgttgcaaactgcaaacagctgtatttctgatgatgtttatgtattttatctcttccatacatttcatttgtgcaaatacagcatttacagctttctggttgtatataaatattctaaaaatcttttacattttgataagaccaacgagt

SEQ ID NO: 54232 - protein, 410 aa, Glycine max
  peptide (1)..(410): Ceres Seq. ID no. 14307405
  misc_feature (22)..(410): Homolog of NCBI NO: 31044429 NR Description: hypothetical protein MGC59617 [Mus musculus]
  misc_feature (22)..(410): Homolog of NCBI NO: 10434433 NR Description: unnamed protein product [Homo sapiens]
  misc_feature (96)..(410): Homolog of NCBI NO: 37590378 NR Description: Unknown (protein for MGC:73277) [Danio rerio]
  misc_feature (22)..(410): Homolog of NCBI NO: 12232469 NR Description: hypothetical protein FLJ13910 [Homo sapiens]
  misc_feature (29)..(410): Homolog of NCBI NO: 31240441 NR Description: ENSANGP00000021271 [Anopheles gambiae]
  misc_feature (25)..(410): Homolog of NCBI NO: 28829262 NR Description: similar to Arabidopsis thaliana (Mouse-ear
  misc_feature (30)..(410): Homolog of NCBI NO: 15242463 NR Description: expressed protein [Arabidopsis thaliana]
  misc_feature (26)..(410): Homolog of NCBI NO: 21593562 NR Description: unknown [Arabidopsis thaliana]
  misc_feature (26)..(410): Homolog of NCBI NO: 18400050 NR Description: expressed protein [Arabidopsis thaliana]
  misc_feature (26)..(410): Homolog of NCBI NO: 15235735 NR Description: expressed protein [Arabidopsis thaliana]
VSLTSHTLSLSFSHCFSGVCDLSIKMELSSIKDAFDRVAKKQKLSSSKSQEVVDQVGCEIEQALATIQSSHDPSAPVDQKSVLTELKFKLNAIGPLQQLEGSNKELNISLTKYQKLLEKLLNPDISKAYRNVDFDTHIVNQIIANHFYHQGLFDLGDSIINEAGEPDAAALRSQFLEMHQIIGAMRERNLQPALTWVSANREKLVQIGSNLELKIHTLQFVEVLQNGTRADALKYARTYLAPFASLNKGEFPKLMGCLLYAGRLESSPYSELLSPIHWEMTTEELTRQFCTLLGQSYENPLSVAVAAGVEGLPTLLKLANVMAAKKQEWQEMKQLPVPVELGKEFQFHSIFVCPVSRDQGSEENPPMLLPCLHVLCKQSIMKLSKNSTRTFKCPYCPAEATVANCKQLYF

SEQ ID NO: 54233 - protein, 385 aa, Glycine max
  peptide (1)..(385): Ceres Seq. ID no. 14307406
  misc_feature (1)..(385): Homolog of NCBI NO: 31044429 NR Description: hypothetical protein MGC59617 [Mus musculus]
  misc_feature (1)..(385): Homolog of NCBI NO: 10434433 NR Description: unnamed protein product [Homo sapiens]
  misc_feature (71)..(385): Homolog of NCBI NO: 37590378 NR Description: Unknown (protein for MGC:73277) [Danio rerio]
  misc_feature (1)..(385): Homolog of NCBI NO: 12232469 NR Description: hypothetical protein FLJ13910 [Homo sapiens]
  misc_feature (4)..(385): Homolog of NCBI NO: 31240441 NR Description: ENSANGP00000021271 [Anopheles gambiae]
  misc_feature (1)..(385): Homolog of NCBI NO: 28829262 NR Description: similar to Arabidopsis thaliana (Mouse-ear
  misc_feature (5)..(385): Homolog of NCBI NO: 15242463 NR Description: expressed protein [Arabidopsis thaliana]
  misc_feature (1)..(385): Homolog of NCBI NO: 21593562 NR Description: unknown [Arabidopsis thaliana]
  misc_feature (1)..(385): Homolog of NCBI NO: 18400050 NR Description: expressed protein [Arabidopsis thaliana]
  misc_feature (1)..(385): Homolog of NCBI NO: 15235735 NR Description: expressed protein [Arabidopsis thaliana]
MELSSIKDAFDRVAKKQKLSSSKSQEVVDQVGCEIEQALATIQSSHDPSAPVDQKSVLTELKFKLNAIGPLQQLEGSNKELNISLTKYQKLLEKLLNPDISKAYRNVDFDTHIVNQIIANHFYHQGLFDLGDSIINEAGEPDAAALRSQFLEMHQIIGAMRERNLQPALTWVSANREKLVQIGSNLELKIHTLQFVEVLQNGTRADALKYARTYLAPFASLNKGEFPKLMGCLLYAGRLESSPYSELLSPIHWEMTTEELTRQFCTLLGQSYENPLSVAVAAGVEGLPTLLKLANVMAAKKQEWQEMKQLPVPVELGKEFQFHSIFVCPVSRDQGSEENPPMLLPCLHVLCKQSIMKLSKNSTRTFKCPYCPAEATVANCKQLYF

SEQ ID NO: 54234 - protein, 233 aa, Glycine max
  peptide (1)..(233): Ceres Seq. ID no. 14307407
  misc_feature (1)..(233): Homolog of NCBI NO: 31044429 NR Description: hypothetical protein MGC59617 [Mus musculus]
  misc_feature (1)..(233): Homolog of NCBI NO: 10434433 NR Description: unnamed protein product [Homo sapiens]
  misc_feature (1)..(233): Homolog of NCBI NO: 37590378 NR Description: Unknown (protein for MGC:73277) [Danio rerio]
  misc_feature (1)..(233): Homolog of NCBI NO: 12232469 NR Description: hypothetical protein FLJ13910 [Homo sapiens]
  misc_feature (1)..(233): Homolog of NCBI NO: 31240441 NR Description: ENSANGP00000021271 [Anopheles gambiae]
  misc_feature (1)..(233): Homolog of NCBI NO: 28829262 NR Description: similar to Arabidopsis thaliana (Mouse-ear
  misc_feature (1)..(233): Homolog of NCBI NO: 15242463 NR Description: expressed protein [Arabidopsis thaliana]
  misc_feature (1)..(233): Homolog of NCBI NO: 21593562 NR Description: unknown [Arabidopsis thaliana]
  misc_feature (1)..(233): Homolog of NCBI NO: 18400050 NR Description: expressed protein [Arabidopsis thaliana]
  misc_feature (1)..(233): Homolog of NCBI NO: 15235735 NR Description: expressed protein [Arabidopsis thaliana]
MHQIIGAMRERNLQPALTWVSANREKLVQIGSNLELKIHTLQFVEVLQNGTRADALKYARTYLAPFASLNKGEFPKLMGCLLYAGRLESSPYSELLSPIHWEMTTEELTRQFCTLLGQSYENPLSVAVAAGVEGLPTLLKLANVMAAKKQEWQEMKQLPVPVELGKEFQFHSIFVCPVSRDQGSEENPPMLLPCLHVLCKQSIMKLSKNSTRTFKCPYCPAEATVANCKQLYF

SEQ ID NO: 54235 - DNA, 794 bp, Glycine max
  misc_feature (1)..(794): Ceres Seq. ID no. 14307480
aaacgtggaacacacctgacacctgatccgcgagcgagggtttgtgaagatgacgacgattcgcaggttttgctgcaacgatcttcttcgctttgccgccgtcaatctcgaccatctcaccgaaacattcaacatgtccttctacatgacctatcttgcaagatggcctgactatttccacgttgccgaaggccctggaaatcgaatcatgggttacattatgggtaaagttgaggggcaaggagaatcttggcatggccatgtaactgcggtgaccgttgctccagagtatcgaaggcagcagttagccaaaaaacttatgaatctgctggaagacatcagtgacaatattgataaggctttttttgttgatctctttgtgagagcgtcaaatgcaccagccatcaagatgtatgaaaagcttggctatgtgatttatcgacgagtgctacgctactattctggggaagaagatggtttggatatgaggaaggcattgtctcgtgatgttgaaaagaagtccatcatccctcttaaacggccggtcactcctgatgaattagagtatgactaagtctgcgtttcatgcaacagagttgcatgagcttattgtgtctcaaagtaaaccatgttgtgcttgataggctgtcaagttgaaaggagttgaacatattatgttggaacttcgaaggtttagtaaatgaaaaatgatcctagaagataatcttgctagtaaaatgaaaaatcttgtcttgtatccaatatgttataattaaatatcacttgcgcgtgtt

SEQ ID NO: 54236 - protein, 174 aa, Glycine max
  peptide (1)..(174): Ceres Seq. ID no. 14307481
  misc_feature (45)..(128): Pfam Name: Acetyltransferase (GNAT) family Pfam Description: Acetyltransferase (GNAT) family
  misc_feature (1)..(172): Homolog of NCBI NO: 28278699 NR Description: Unknown (protein for MGC:53877) [Xenopus laevis]
  misc_feature (1)..(172): Homolog of NCBI NO: 19920354 NR Description: CG14222-PA [Drosophila melanogaster]
  misc_feature (1)..(172): Homolog of NCBI NO: 7705823 NR Description: N-acetyltransferase 5 isoform a
  misc_feature (1)..(172): Homolog of NCBI NO: 31241517 NR Description: ENSANGP00000020842 [Anopheles gambiae]
  misc_feature (1)..(174): Homolog of NCBI NO: 28273362 NR Description: silencing group B protein [Oryza sativa (japonica
  misc_feature (1)..(174): Homolog of NCBI NO: 14550118 NR Description: silencing group B protein [Zea mays]
  misc_feature (124)..(174): Homolog of NCBI NO: 25518612 NR Description: hypothetical protein F10O3.2 [imported] -
  misc_feature (1)..(124): Homolog of NCBI NO: 25518612 NR Description: hypothetical protein F10O3.2 [imported] -
  misc_feature (1)..(174): Homolog of NCBI NO: 14423552 NR Description: Unknown protein [Arabidopsis thaliana]
  misc_feature (1)..(174): Homolog of NCBI NO: 18379062 NR Description: GCN5-related N-acetyltransferase (GNAT) family
MTTIRRFCCNDLLRFAAVNLDHLTETFNMSFYMTYLARWPDYFHVAEGPGNRIMGYIMGKVEGQGESWHGHVTAVTVAPEYRRQQLAKKLMNLLEDISDNIDKAFFVDLFVRASNAPAIKMYEKLGYVIYRRVLRYYSGEEDGLDMRKALSRDVEKKSIIPLKRPVTPDELEYD

SEQ ID NO: 54237 - protein, 146 aa, Glycine max
  peptide (1)..(146): Ceres Seq. ID no. 14307482
  misc_feature (17)..(100): Pfam Name: Acetyltransferase (GNAT) family Pfam Description: Acetyltransferase (GNAT) family
  misc_feature (1)..(144): Homolog of NCBI NO: 28278699 NR Description: Unknown (protein for MGC:53877) [Xenopus laevis]
  misc_feature (1)..(144): Homolog of NCBI NO: 19920354 NR Description: CG14222-PA [Drosophila melanogaster]
  misc_feature (1)..(144): Homolog of NCBI NO: 7705823 NR Description: N-acetyltransferase 5 isoform a
  misc_feature (1)..(144): Homolog of NCBI NO: 31241517 NR Description: ENSANGP00000020842 [Anopheles gambiae]
  misc_feature (1)..(146): Homolog of NCBI NO: 28273362 NR Description: silencing group B protein [Oryza sativa (japonica
  misc_feature (1)..(146): Homolog of NCBI NO: 14550118 NR Description: silencing group B protein [Zea mays]
  misc_feature (96)..(146): Homolog of NCBI NO: 25518612 NR Description: hypothetical protein F10O3.2 [imported] -
  misc_feature (1)..(96): Homolog of NCBI NO: 25518612 NR Description: hypothetical protein F10O3.2 [imported] -
  misc_feature (1)..(146): Homolog of NCBI NO: 14423552 NR Description: Unknown protein [Arabidopsis thaliana]
  misc_feature (1)..(146): Homolog of NCBI NO: 18379062 NR Description: GCN5-related N-acetyltransferase (GNAT) family
MSFYMTYLARWPDYFHVAEGPGNRIMGYIMGKVEGQGESWHGHVTAVTVAPEYRRQQLAKKLMNLLEDISDNIDKAFFVDLFVRASNAPAIKMYEKLGYVIYRRVLRYYSGEEDGLDMRKALSRDVEKKSIIPLKRPVTPDELEYD

SEQ ID NO: 54238 - protein, 142 aa, Glycine max
  peptide (1)..(142): Ceres Seq. ID no. 14307483
  misc_feature (13)..(96): Pfam Name: Acetyltransferase (GNAT) family Pfam Description: Acetyltransferase (GNAT) family
  misc_feature (1)..(140): Homolog of NCBI NO: 28278699 NR Description: Unknown (protein for MGC:53877) [Xenopus laevis]
  misc_feature (1)..(140): Homolog of NCBI NO: 19920354 NR Description: CG14222-PA [Drosophila melanogaster]
  misc_feature (1)..(140): Homolog of NCBI NO: 7705823 NR Description: N-acetyltransferase 5 isoform a
  misc_feature (1)..(140): Homolog of NCBI NO: 31241517 NR Description: ENSANGP00000020842 [Anopheles gambiae]
  misc_feature (1)..(142): Homolog of NCBI NO: 28273362 NR Description: silencing group B protein [Oryza sativa (japonica
  misc_feature (1)..(142): Homolog of NCBI NO: 14550118 NR Description: silencing group B protein [Zea mays]
  misc_feature (92)..(142): Homolog of NCBI NO: 25518612 NR Description: hypothetical protein F10O3.2 [imported] -
  misc_feature (1)..(92): Homolog of NCBI NO: 25518612 NR Description: hypothetical protein F10O3.2 [imported] -
  misc_feature (1)..(142): Homolog of NCBI NO: 14423552 NR Description: Unknown protein [Arabidopsis thaliana]
  misc_feature (1)..(142): Homolog of NCBI NO: 18379062 NR Description: GCN5-related N-acetyltransferase (GNAT) family
MTYLARWPDYFHVAEGPGNRIMGYIMGKVEGQGESWHGHVTAVTVAPEYRRQQLAKKLMNLLEDISDNIDKAFFVDLFVRASNAPAIKMYEKLGYVIYRRVLRYYSGEEDGLDMRKALSRDVEKKSIIPLKRPVTPDELEYD

SEQ ID NO: 54239 - DNA, 1159 bp, Glycine max
  misc_feature (1)..(1159): Ceres Seq. ID no. 14307442
actattattgccacacacaaatcaattaactgaattcttagacagagaaagaggagtagtactagtgataaggtgatcataatagagcataatataagagagtgaaaactcatggaggttggcctcaacaagaaggagaacatggggtttgaggaaactgagctaaggcttggactgcctggaaacgtaggaggcactggcactgaagaagtgctcatcaggaagagaggtttctctgagactgaaactgaaactgaggaggatgagtctgctaccactgtggatttgatgcttaatctttcttctaaggaagctgctgctgctgcagatccaactgataagcacaagactttgcctaaggagaagactcttctgcctgcagatcctgctaagcctccagccaaggcacaggtggtaggttggccacctgtgcggtccttccggaagaacatgttagctgtacaaaagagcgtcggagaagagaacgagaagaacagcagcagccctaatgcaagctttgtcaaagttagcatggatggagcaccttacctccgcaaagtggacttgaagatgtacaagagttaccgagagctctctgattctttaggcaaaatgttcagctccttcaccataggcaattgtgaatcccaaggaatgaaggatttcatgaatgagagcaagctgaatgatcttttgaacagctctgattatgtcccaacctatgaggacaaggatggtgactggatgcttgtcggtgatgtcccatgggagatgtttgttgaatcatgcaagcgtttacgcatcatgaaaggaaaggaggccattggtcttggtcttgcaccaagagccatggcaaaatccaagaacaggagctagactagtcgcacaattcatgacctgccccatcctttgtaattgcggtgcccagttggcttagttactaaagtaaggataattaagctgcagcagacacggatggacattgctaagtggttgaattatagttaatttgtgtcattatggtttgttataatatttcatcaaacaaaacaatgagatgcatgtctaattaagtactaatcatgaacaggaacataatgactctcaatcatgttgttagacttggctttcttatatatcgatctttgcttgttttgtg

SEQ ID NO: 54240 - protein, 254 aa, Glycine max
  peptide (1)..(254): Ceres Seq. ID no. 14307443
  misc_feature (11)..(244): Pfam Name: AUX/IAA family Pfam Description: AUX/IAA family
  misc_feature (11)..(241): Homolog of NCBI NO: 7442224 NR Description: auxin-induced protein - Arabidopsis thaliana
  misc_feature (11)..(254): Homolog of NCBI NO: 15229343 NR Description: auxin-responsive protein IAA16 (Indoleacetic
  misc_feature (90)..(253): Homolog of NCBI NO: 22725714 NR Description: auxin-responsive protein IAA1; MjAux/IAA1
  misc_feature (11)..(254): Homolog of NCBI NO: 15228943 NR Description: auxin-responsive protein IAA7 (Indoleacetic
  misc_feature (11)..(254): Homolog of NCBI NO: 21593352 NR Description: indoleacetic acid (IAA)-inducible gene (IAA7)
  misc_feature (11)..(254): Homolog of NCBI NO: 22328628 NR Description: auxin-responsive protein, putative [Arabidopsis
  misc_feature (8)..(254): Homolog of NCBI NO: 4887020 NR Description: Nt-iaa28 deduced protein [Nicotiana tabacum]
  misc_feature (5)..(241): Homolog of NCBI NO: 20269061 NR Description: aux/IAA protein [Populus tremula x Populus
  misc_feature (11)..(254): Homolog of NCBI NO: 20385508 NR Description: auxin-regulated protein [Populus tremula x
  misc_feature (11)..(254): Homolog of NCBI NO: 114734 NR Description: AUXIN-INDUCED PROTEIN AUX28
MEVGLNKKENMGFEETELRLGLPGNVGGTGTEEVLIRKRGFSETETETEEDESATTVDLMLNLSSKEAAAAADPTDKHKTLPKEKTLLPADPAKPPAKAQVVGWPPVRSFRKNMLAVQKSVGEENEKNSSSPNASFVKVSMDGAPYLRKVDLKMYKSYRELSDSLGKMFSSFTIGNCESQGMKDFMNESKLNDLLNSSDYVPTYEDKDGDWMLVGDVPWEMFVESCKRLRIMKGKEAIGLGLAPRAMAKSKNRS

SEQ ID NO: 54241 - protein, 244 aa, Glycine max
  peptide (1)..(244): Ceres Seq. ID no. 14307444
  misc_feature (1)..(234): Pfam Name: AUX/IAA family Pfam Description: AUX/IAA family
  misc_feature (1)..(231): Homolog of NCBI NO: 7442224 NR Description: auxin-induced protein - Arabidopsis thaliana
  misc_feature (1)..(244): Homolog of NCBI NO: 15229343 NR Description: auxin-responsive protein IAA16 (Indoleacetic
  misc_feature (80)..(243): Homolog of NCBI NO: 22725714 NR Description: auxin-responsive protein IAA1; MjAux/IAA1
  misc_feature (1)..(244): Homolog of NCBI NO: 15228943 NR Description: auxin-responsive protein IAA7 (Indoleacetic
  misc_feature (1)..(244): Homolog of NCBI NO: 21593352 NR Description: indoleacetic acid (IAA)-inducible gene (IAA7)
  misc_feature (1)..(244): Homolog of NCBI NO: 22328628 NR Description: auxin-responsive protein, putative [Arabidopsis
  misc_feature (1)..(244): Homolog of NCBI NO: 4887020 NR Description: Nt-iaa28 deduced protein [Nicotiana tabacum]
  misc_feature (1)..(231): Homolog of NCBI NO: 20269061 NR Description: aux/IAA protein [Populus tremula x Populus
  misc_feature (1)..(244): Homolog of NCBI NO: 20385508 NR Description: auxin-regulated protein [Populus tremula x
  misc_feature (1)..(244): Homolog of NCBI NO: 114734 NR Description: AUXIN-INDUCED PROTEIN AUX28
MGFEETELRLGLPGNVGGTGTEEVLIRKRGFSETETETEEDESATTVDLMLNLSSKEAAAAADPTDKHKTLPKEKTLLPADPAKPPAKAQVVGWPPVRSFRKNMLAVQKSVGEENEKNSSSPNASFVKVSMDGAPYLRKVDLKMYKSYRELSDSLGKMFSSFTIGNCESQGMKDFMNESKLNDLLNSSDYVPTYEDKDGDWMLVGDVPWEMFVESCKRLRIMKGKEAIGLGLAPRAMAKSKNRS

SEQ ID NO: 54242 - protein, 195 aa, Glycine max
  peptide (1)..(195): Ceres Seq. ID no. 14307445
  misc_feature (1)..(185): Pfam Name: AUX/IAA family Pfam Description: AUX/IAA family
  misc_feature (1)..(182): Homolog of NCBI NO: 7442224 NR Description: auxin-induced protein - Arabidopsis thaliana
  misc_feature (1)..(195): Homolog of NCBI NO: 15229343 NR Description: auxin-responsive protein IAA16 (Indoleacetic
  misc_feature (31)..(194): Homolog of NCBI NO: 22725714 NR Description: auxin-responsive protein IAA1; MjAux/IAA1
  misc_feature (1)..(195): Homolog of NCBI NO: 15228943 NR Description: auxin-responsive protein IAA7 (Indoleacetic
  misc_feature (1)..(195): Homolog of NCBI NO: 21593352 NR Description: indoleacetic acid (IAA)-inducible gene (IAA7)
  misc_feature (1)..(195): Homolog of NCBI NO: 22328628 NR Description: auxin-responsive protein, putative [Arabidopsis
  misc_feature (1)..(195): Homolog of NCBI NO: 4887020 NR Description: Nt-iaa28 deduced protein [Nicotiana tabacum]
  misc_feature (1)..(182): Homolog of NCBI NO: 20269061 NR Description: aux/IAA protein [Populus tremula x Populus
  misc_feature (1)..(195): Homolog of NCBI NO: 20385508 NR Description: auxin-regulated protein [Populus tremula x
  misc_feature (1)..(195): Homolog of NCBI NO: 114734 NR Description: AUXIN-INDUCED PROTEIN AUX28
MLNLSSKEAAAAADPTDKHKTLPKEKTLLPADPAKPPAKAQVVGWPPVRSFRKNMLAVQKSVGEENEKNSSSPNASFVKVSMDGAPYLRKVDLKMYKSYRELSDSLGKMFSSFTIGNCESQGMKDFMNESKLNDLLNSSDYVPTYEDKDGDWMLVGDVPWEMFVESCKRLRIMKGKEAIGLGLAPRAMAKSKNRS

SEQ ID NO: 54243 - DNA, 1390 bp, Glycine max
  misc_feature (1)..(1390): Ceres Seq. ID no. 14303423
tggtcgatactaactggacaggaataatgcatcgcaattcacttaaaagatcaaatgatagtacccggattatcatcacagctattatgggaattgcctttggattttttattggtatttcaatttcatctgtgcatttgactaagcctgtagggaattcttttgatgtacctgtagctgaatctgaaatagacagattttcagctgaagtaaacagatctcctgctgttattgacgagtcttctggaaccaaaaatcttgaaaccctagggtcaattagattaccaaagatatttgttgcatcaaatcctcgtggagctgaatcactaccccctggaatcgttgtatcagaatcagatttttatttacgaagactatggggtgaacctagtgaggatctgaagaaaaagccgaagtatttagttacattcactgttggttatgaacaaaggcataatatcaatgctacagtgaaaaagttttctgatgattttgcaattttgctctttcattatgatggtcggactagtgaatgggatcaatttgagtggtcaaggaatgcaatccatgttagtgcaaggaaacaaactaaatggtggtatgctaaaagatttttgcaccctgatatagtatcagcttatgaatatatttttatttgggatgaagatcttggagtagaacacttcaatgcagacaagtatattcatttagtgaaaaaatatggtttggagatctctcaacctggtcttgagcctaataatggattgacatgggagatgacaaaaagaaggggtgacaaagaagttcacatggtgacagaagagaaaccaggctggtgtagtgatccacatttgcctccttgtgctgcatttgtggaaattatggcacctgtcttttctcgtgaagcttggcgttgtgtgtggcacatgattcagaatgatctagtgcatggatggggattggactttgctctcagaagatgtgtagagccagcacatgaaaaaattggtgtaattgattcacaatggattgttcatcaagtaattccttctcttgggaaccagggagagtctgacaaaggaaaaatgccatgggattcggtccgagccagatgcaaaagtgaatgggcccagtttcaacttcgcgtaaccaatgctgataagtcttatcttgaaggacataaacgtaatgggaaggattgatatgtggatccatctacctattgtatatgttttacgtacacactcggtggtagtatttgttttgcattgtttcctcccctcaggtgccatgcgaatttttgagccatatttttgaggaattaatctatagccatgtaaatcaatcacttttatgttattgaataacttttttatcagccgttagattg

SEQ ID NO: 54244 - protein, 399 aa, Glycine max
  peptide (1)..(399): Ceres Seq. ID no. 14303424
  misc_feature (96)..(394): Pfam Name: Protein of unknown function (DUF707) Pfam Description: Protein of unknown function (DUF707)
  misc_feature (290)..(390): Homolog of NCBI NO: 20197601 NR Description: unknown protein [Arabidopsis thaliana]
  misc_feature (81)..(273): Homolog of NCBI NO: 20197601 NR Description: unknown protein [Arabidopsis thaliana]
  misc_feature (7)..(59): Homolog of NCBI NO: 20466346 NR Description: unknown protein [Arabidopsis thaliana]
  misc_feature (81)..(363): Homolog of NCBI NO: 20466346 NR Description: unknown protein [Arabidopsis thaliana]
  misc_feature (11)..(389): Homolog of NCBI NO: 14719314 NR Description: putative protein [Oryza sativa]
  misc_feature (15)..(41): Homolog of NCBI NO: 25407018 NR Description: protein T6D22.12 [imported] - Arabidopsis
  misc_feature (96)..(394): Homolog of NCBI NO: 25407018 NR Description: protein T6D22.12 [imported] - Arabidopsis
  misc_feature (7)..(59): Homolog of NCBI NO: 30683843 NR Description: expressed protein [Arabidopsis thaliana]
  misc_feature (81)..(390): Homolog of NCBI NO: 30683843 NR Description: expressed protein [Arabidopsis thaliana]
  misc_feature (7)..(394): Homolog of NCBI NO: 18390845 NR Description: storage protein -related [Arabidopsis thaliana]
VDTNWTGIMHRNSLKRSNDSTRIIITAIMGIAFGFFIGISISSVHLTKPVGNSFDVPVAESEIDRFSAEVNRSPAVIDESSGTKNLETLGSIRLPKIFVASNPRGAESLPPGIVVSESDFYLRRLWGEPSEDLKKKPKYLVTFTVGYEQRHNINATVKKFSDDFAILLFHYDGRTSEWDQFEWSRNAIHVSARKQTKWWYAKRFLHPDIVSAYEYIFIWDEDLGVEHFNADKYIHLVKKYGLEISQPGLEPNNGLTWEMTKRRGDKEVHMVTEEKPGWCSDPHLPPCAAFVEIMAPVFSREAWRCVWHMIQNDLVHGWGLDFALRRCVEPAHEKIGVIDSQWIVHQVIPSLGNQGESDKGKMPWDSVRARCKSEWAQFQLRVTNADKSYLEGHKRNGKD

SEQ ID NO: 54245 - protein, 391 aa, Glycine max
  peptide (1)..(391): Ceres Seq. ID no. 14303425
  misc_feature (88)..(386): Pfam Name: Protein of unknown function (DUF707) Pfam Description: Protein of unknown function (DUF707)
  misc_feature (282)..(382): Homolog of NCBI NO: 20197601 NR Description: unknown protein [Arabidopsis thaliana]
  misc_feature (73)..(265): Homolog of NCBI NO: 20197601 NR Description: unknown protein [Arabidopsis thaliana]
  misc_feature (1)..(51): Homolog of NCBI NO: 20466346 NR Description: unknown protein [Arabidopsis thaliana]
  misc_feature (73)..(355): Homolog of NCBI NO: 20466346 NR Description: unknown protein [Arabidopsis thaliana]
  misc_feature (3)..(381): Homolog of NCBI NO: 14719314 NR Description: putative protein [Oryza sativa]
  misc_feature (7)..(33): Homolog of NCBI NO: 25407018 NR Description: protein T6D22.12 [imported] - Arabidopsis
  misc_feature (88)..(386): Homolog of NCBI NO: 25407018 NR Description: protein T6D22.12 [imported] - Arabidopsis
  misc_feature (1)..(51): Homolog of NCBI NO: 30683843 NR Description: expressed protein [Arabidopsis thaliana]
  misc_feature (73)..(382): Homolog of NCBI NO: 30683843 NR Description: expressed protein [Arabidopsis thaliana]
  misc_feature (1)..(386): Homolog of NCBI NO: 18390845 NR Description: storage protein -related [Arabidopsis thaliana]
MHRNSLKRSNDSTRIIITAIMGIAFGFFIGISISSVHLTKPVGNSFDVPVAESEIDRFSAEVNRSPAVIDESSGTKNLETLGSIRLPKIFVASNPRGAESLPPGIVVSESDFYLRRLWGEPSEDLKKKPKYLVTFTVGYEQRHNINATVKKFSDDFAILLFHYDGRTSEWDQFEWSRNAIHVSARKQTKWWYAKRFLHPDIVSAYEYIFIWDEDLGVEHFNADKYIHLVKKYGLEISQPGLEPNNGLTWEMTKRRGDKEVHMVTEEKPGWCSDPHLPPCAAFVEIMAPVFSREAWRCVWHMIQNDLVHGWGLDFALRRCVEPAHEKIGVIDSQWIVHQVIPSLGNQGESDKGKMPWDSVRARCKSEWAQFQLRVTNADKSYLEGHKRNGKD

SEQ ID NO: 54246 - protein, 371 aa, Glycine max
  peptide (1)..(371): Ceres Seq. ID no. 14303426
  misc_feature (68)..(366): Pfam Name: Protein of unknown function (DUF707) Pfam Description: Protein of unknown function (DUF707)
  misc_feature (262)..(362): Homolog of NCBI NO: 20197601 NR Description: unknown protein [Arabidopsis thaliana]
  misc_feature (53)..(245): Homolog of NCBI NO: 20197601 NR Description: unknown protein [Arabidopsis thaliana]
  misc_feature (1)..(31): Homolog of NCBI NO: 20466346 NR Description: unknown protein [Arabidopsis thaliana]
  misc_feature (53)..(335): Homolog of NCBI NO: 20466346 NR Description: unknown protein [Arabidopsis thaliana]
  misc_feature (1)..(361): Homolog of NCBI NO: 14719314 NR Description: putative protein [Oryza sativa]
  misc_feature (1)..(13): Homolog of NCBI NO: 25407018 NR Description: protein T6D22.12 [imported] - Arabidopsis
  misc_feature (68)..(366): Homolog of NCBI NO: 25407018 NR Description: protein T6D22.12 [imported] - Arabidopsis
  misc_feature (1)..(31): Homolog of NCBI NO: 30683843 NR Description: expressed protein [Arabidopsis thaliana]
  misc_feature (53)..(362): Homolog of NCBI NO: 30683843 NR Description: expressed protein [Arabidopsis thaliana]
  misc_feature (1)..(366): Homolog of NCBI NO: 18390845 NR Description: storage protein -related [Arabidopsis thaliana]
MGIAFGFFIGISISSVHLTKPVGNSFDVPVAESEIDRFSAEVNRSPAVIDESSGTKNLETLGSIRLPKIFVASNPRGAESLPPGIVVSESDFYLRRLWGEPSEDLKKKPKYLVTFTVGYEQRHNINATVKKFSDDFAILLFHYDGRTSEWDQFEWSRNAIHVSARKQTKWWYAKRFLHPDIVSAYEYIFIWDEDLGVEHFNADKYIHLVKKYGLEISQPGLEPNNGLTWEMTKRRGDKEVHMVTEEKPGWCSDPHLPPCAAFVEIMAPVFSREAWRCVWHMIQNDLVHGWGLDFALRRCVEPAHEKIGVIDSQWIVHQVIPSLGNQGESDKGKMPWDSVRARCKSEWAQFQLRVTNADKSYLEGHKRNGKD

SEQ ID NO: 54247 - DNA, 1288 bp, Glycine max
  misc_feature (1)..(1288): Ceres Seq. ID no. 14313768
tgcaatgctagctagacacgctgaaaggggcttaggcattgataatccgatgcaaggtggtaggaatgagttaccaaattatgaaaggtctggggtttcccgatattcagatgtacggccaacaagtgcacctcatcactctggtggggttcagctggctcgaaatgatggaaaaattgttgggtctgatttgcagcaccctatgccttctgaactaactgagcgacctaaactgaagttgctaccaagggcaaagccagtggaaagttcagaacctgctgtcatggattatgcacagggtaatcgtcaggttaatgattctggccatgttgaaaccgtttatcaagcacatggccatgctaattttgtgaagcctgtatcagctggaaatgacaatgggaaagacgcaggacagcgtccgaagctgaatttgaagcctcggtctcagcccactgaaaagctggatggaaacagtgaaagagacaggaatgttttatttggtggagctcgcccacgtgaactagtattgaaggagcgagggattgatgatgtttcaatcaatgtggtggagcattcaaacagggttgaaaacaatattttgagggttcagaaacatcctgaccattcaacccagactcgatatggtgaaaagaccgaggatgctcatcttgatcaaaagacaggcagaaaacctgaaaggaaggagcaaagggcagatggtgatagggctcatgcgcagaggagaaattggcggggtgatactcggagaaatgggaaggagaccgataggcagccgcatgccccggagaggcaaccttcacctgagacatggcgtaagcctgtggagcagcagctaaaatcagctccaggtgctgctagcacacggtacagtagagcagcttcggcggttgaacttgcacaagcattctccagatctgtatcagatccaaaagtgaatgataggttttcaggtcaaaggggtctgaacactggcaacagcagcaggacacaagttccattttcacggcttgttggtcctacatcaaggcctcagatcaatggttattaaaatatttggtggataattggactcactcaagaccaatttctatgagatagcattggattcatgcaatgtggaattgcagagcacttcatgtagtggctgtggttttagttattttctcctcattcacaacaattgagtgagaaattaatgatttctcaagttacatagccttggttgtgacaataccttcttacaattaccatgctttattttgttttt

SEQ ID NO: 54248 - protein, 355 aa, Glycine max
  peptide (1)..(355): Ceres Seq. ID no. 14313769
  misc_feature (13)..(355): Homolog of NCBI NO: 34898492 NR Description: OJ1612_A04.2 [Oryza sativa (japonica
  misc_feature (6)..(355): Homolog of NCBI NO: 25402665 NR Description: protein T23J18.15 [imported] - Arabidopsis
  misc_feature (13)..(355): Homolog of NCBI NO: 33146526 NR Description: unknown protein [Oryza sativa (japonica
  misc_feature (6)..(355): Homolog of NCBI NO: 18391283 NR Description: expressed protein [Arabidopsis thaliana]
AMLARHAERGLGIDNPMQGGRNELPNYERSGVSRYSDVRPTSAPHHSGGVQLARNDGKIVGSDLQHPMPSELTERPKLKLLPRAKPVESSEPAVMDYAQGNRQVNDSGHVETVYQAHGHANFVKPVSAGNDNGKDAGQRPKLNLKPRSQPTEKLDGNSERDRNVLFGGARPRELVLKERGIDDVSINVVEHSNRVENNILRVQKHPDHSTQTRYGEKTEDAHLDQKTGRKPERKEQRADGDRAHAQRRNWRGDTRRNGKETDRQPHAPERQPSPETWRKPVEQQLKSAPGAASTRYSRAASAVELAQAFSRSVSDPKVNDRFSGQRGLNTGNSSRTQVPFSRLVGPTSRPQINGY

SEQ ID NO: 54249 - protein, 354 aa, Glycine max
  peptide (1)..(354): Ceres Seq. ID no. 14313770
  misc_feature (12)..(354): Homolog of NCBI NO: 34898492 NR Description: OJ1612_A04.2 [Oryza sativa (japonica
  misc_feature (5)..(354): Homolog of NCBI NO: 25402665 NR Description: protein T23J18.15 [imported] - Arabidopsis
  misc_feature (12)..(354): Homolog of NCBI NO: 33146526 NR Description: unknown protein [Oryza sativa (japonica
  misc_feature (5)..(354): Homolog of NCBI NO: 18391283 NR Description: expressed protein [Arabidopsis thaliana]
MLARHAERGLGIDNPMQGGRNELPNYERSGVSRYSDVRPTSAPHHSGGVQLARNDGKIVGSDLQHPMPSELTERPKLKLLPRAKPVESSEPAVMDYAQGNRQVNDSGHVETVYQAHGHANFVKPVSAGNDNGKDAGQRPKLNLKPRSQPTEKLDGNSERDRNVLFGGARPRELVLKERGIDDVSINVVEHSNRVENNILRVQKHPDHSTQTRYGEKTEDAHLDQKTGRKPERKEQRADGDRAHAQRRNWRGDTRRNGKETDRQPHAPERQPSPETWRKPVEQQLKSAPGAASTRYSRAASAVELAQAFSRSVSDPKVNDRFSGQRGLNTGNSSRTQVPFSRLVGPTSRPQINGY

SEQ ID NO: 54250 - protein, 339 aa, Glycine max
  peptide (1)..(339): Ceres Seq. ID no. 14313771
  misc_feature (1)..(339): Homolog of NCBI NO: 34898492 NR Description: OJ1612_A04.2 [Oryza sativa (japonica
  misc_feature (1)..(339): Homolog of NCBI NO: 25402665 NR Description: protein T23J18.15 [imported] - Arabidopsis
  misc_feature (1)..(339): Homolog of NCBI NO: 33146526 NR Description: unknown protein [Oryza sativa (japonica
  misc_feature (1)..(339): Homolog of NCBI NO: 18391283 NR Description: expressed protein [Arabidopsis thaliana]
MQGGRNELPNYERSGVSRYSDVRPTSAPHHSGGVQLARNDGKIVGSDLQHPMPSELTERPKLKLLPRAKPVESSEPAVMDYAQGNRQVNDSGHVETVYQAHGHANFVKPVSAGNDNGKDAGQRPKLNLKPRSQPTEKLDGNSERDRNVLFGGARPRELVLKERGIDDVSINVVEHSNRVENNILRVQKHPDHSTQTRYGEKTEDAHLDQKTGRKPERKEQRADGDRAHAQRRNWRGDTRRNGKETDRQPHAPERQPSPETWRKPVEQQLKSAPGAASTRYSRAASAVELAQAFSRSVSDPKVNDRFSGQRGLNTGNSSRTQVPFSRLVGPTSRPQINGY

SEQ ID NO: 54251 - DNA, 1412 bp, Glycine max
  misc_feature (1)..(1412): Ceres Seq. ID no. 14310362
atctctccatgatcgcctatactgtagtgatgtgaaaaaggaaccactaacatggaagcagagactaaagatctgcataggagcagcacgtggactacacttccttcacacaggtgtcaagcgaaccatctttcatcgtgacgtaacaccttataaaattcttttgggtagcaacatggtggccaaacttgcagacttccggctttccttaacaggaccgcattatgcatcaaagccaaaaccaaagacaatttcaaaagatggctttataggtacatatggttatgtggctcctgagatttccgaaaacaatacaataacagaaaaatgtgatgtttattcctttggggtagtgctactggaactggtatgcaaagacaagctaaaagatgttgagaagcgggagaagcaccctgttgaggagaatattgatccgaatatcaaaggaaagattgcaccagagtgttgggaagtatttatggatatcacagaaagatgcttgaagtttgatccgaatgagcggccagcaatgggtgaagtggaggtgcaacttgagcttgctctgtcactgcaggaagaagcagatataataaatactggcgatgattataccctattatcgatgatcattatgaattaatcctcaaccagaataggtaccatctttagctggaaactaaactgatagattatagaacttccaaggttgtctcaatgataattgataacagttcaacagattgttcaatcacagtagagcagatgaatgggaagtcatgggaaaatattttttttagttcaagaatgaaattgagttatttgccagttttgtcactcaaggcattttttgtctctctagtaagattttatgaccgcaaagacaagaagattgttgtgactggtgtatgagaacacaggcactgccaattgatctctccataatttcctaaactgtcatgatatgaaaatggaatcacttttgtggatatatataggctgaaagatccttcaaagctgcagtgcatggactacattacattcacacaggagtcacgtgcaccgactttcatcatgcagccaatatcctgcaatattttagcccttcattagtcattgcacagaaatgaaggaacagaaaaatgtaatgaatagttcctatttagctatagagaaaattttgatggagaggcaggagaggatccatacttgttttggataacaatacggtgcctgaactcagatttttgcttttttgaggtatctatactgttttcttgttaattatacatcacttacagcttagaagctggcccagtaatccagtatcaacttcaaatttgatctcttgttgtataaagtttgcgtctgtgtagatccatatagaaataatcgctatgaaagaatttgttggg

SEQ ID NO: 54252 - protein, 212 aa, Glycine max
  peptide (1)..(212): Ceres Seq. ID no. 14310363
  misc_feature (1)..(195): Homolog of NCBI NO: 15230520 NR Description: protein kinase family [Arabidopsis thaliana]
  misc_feature (1)..(195): Homolog of NCBI NO: 14334760 NR Description: putative receptor-protein kinase [Arabidopsis
  misc_feature (2)..(208): Homolog of NCBI NO: 14488367 NR Description: putative protein kinase [Oryza sativa (japonica
  misc_feature (2)..(202): Homolog of NCBI NO: 19070477 NR Description: PTH-2 [Cucumis melo]
  misc_feature (1)..(195): Homolog of NCBI NO: 17887381 NR Description: receptor protein kinase-like protein [Capsicum
  misc_feature (1)..(195): Homolog of NCBI NO: 15229329 NR Description: protein kinase family [Arabidopsis thaliana]
  misc_feature (1)..(195): Homolog of NCBI NO: 34909896 NR Description: putative receptor-protein kinase
  misc_feature (1)..(195): Homolog of NCBI NO: 15241880 NR Description: protein kinase family [Arabidopsis thaliana]
  misc_feature (16)..(80): Homolog of NCBI NO: 9796478 NR Description: serine threonine kinase homolog COK-4 [Phaseolus
  misc_feature (90)..(212): Homolog of NCBI NO: 9796478 NR Description: serine threonine kinase homolog COK-4 [Phaseolus
SLHDRLYCSDVKKEPLTWKQRLKICIGAARGLHFLHTGVKRTIFHRDVTPYKILLGSNMVAKLADFRLSLTGPHYASKPKPKTISKDGFIGTYGYVAPEISENNTITEKCDVYSFGVVLLELVCKDKLKDVEKREKHPVEENIDPNIKGKIAPECWEVFMDITERCLKFDPNERPAMGEVEVQLELALSLQEEADIINTGDDYTLLSMIIMN

SEQ ID NO: 54253 - protein, 154 aa, Glycine max
  peptide (1)..(154): Ceres Seq. ID no. 14310364
  misc_feature (1)..(137): Homolog of NCBI NO: 15230520 NR Description: protein kinase family [Arabidopsis thaliana]
  misc_feature (1)..(137): Homolog of NCBI NO: 14334760 NR Description: putative receptor-protein kinase [Arabidopsis
  misc_feature (1)..(150): Homolog of NCBI NO: 14488367 NR Description: putative protein kinase [Oryza sativa (japonica
  misc_feature (1)..(144): Homolog of NCBI NO: 19070477 NR Description: PTH-2 [Cucumis melo]
  misc_feature (1)..(137): Homolog of NCBI NO: 17887381 NR Description: receptor protein kinase-like protein [Capsicum
  misc_feature (1)..(137): Homolog of NCBI NO: 15229329 NR Description: protein kinase family [Arabidopsis thaliana]
  misc_feature (1)..(137): Homolog of NCBI NO: 34909896 NR Description: putative receptor-protein kinase
  misc_feature (1)..(137): Homolog of NCBI NO: 15241880 NR Description: protein kinase family [Arabidopsis thaliana]
  misc_feature (1)..(22): Homolog of NCBI NO: 9796478 NR Description: serine threonine kinase homolog COK-4 [Phaseolus
  misc_feature (32)..(154): Homolog of NCBI NO: 9796478 NR Description: serine threonine kinase homolog COK-4 [Phaseolus
MVAKLADFRLSLTGPHYASKPKPKTISKDGFIGTYGYVAPEISENNTITEKCDVYSFGVVLLELVCKDKLKDVEKREKHPVEENIDPNIKGKIAPECWEVFMDITERCLKFDPNERPAMGEVEVQLELALSLQEEADIINTGDDYTLLSMIIMN

SEQ ID NO: 54254 - DNA, 1191 bp, Glycine max
  misc_feature (1)..(1191): Ceres Seq. ID no. 14303479
aagtttcaaacgccgcaaccaccacacaattcctacacatttctactctttagtttctccaattttctttctcaattctcaacaatggccactacaacacaacttcacttaccccctggattcagattccatccaacagatgaagaactcgtcatccactacctttgtcgcaaatgcgcttcgcaacatatcgcggttcccataatcgccgaaattgatctgtacaagtacgacccttgggaccttccaggaatggctttgtacggagagaaagagtggtattttttcacgccgagggaccgcaagtacccgaacggttcgcggccgaaccggtccgcgggaaccgggtactggaaggcaaccggagcggataaaccagttggtaaaccgaaaccggttgggatcaagaaagcgttggttttttacgctggaaaagcgcccaagggagagaaaactaactggatcatgcacgagtatcgtcttgcagacgtggatcgttccgttcgcaaaaagaacagcttaaggctggatgactgggtgctgtgccgaatttacaacaagaaaggtgcaattgaaaagcaacaactaccaccaccgagtggggtccgcaaaattgaatgttccgaaatggaggacgagaagccggagattctgccgccagatccgccgtatacggcggcgacggtggcggattgcctgtacttcgaggcttccgactcggtgccccggctgcacacgacggactcgagctgctccgagcaggtggtgtcggcggagtttgcgagcgaggtgcagagcgagccgaagaggggcagcaacaacaacaacgagtttgcatataattacgtggatgccactctcgggaataatcagatgtcgccgctgcaggatattttcatgtacctctccaagtccttctgcaattaacacgcaccaccaccacgacgagacgacgtcgttctgtgttgtgtgtatgcattatgcatttttgcagtagctgctccactgcaccatttgcacggaagcacgagactgagtgaagatccgtgagtgtgtccgtgctggttcgtgtagacgattattacaaaaaaaaacaaaaaagcaccaagatgaagaagaagaaagattcttatatgaacatgatgaattatgagtatattaaattaatgaagtattaatacatcattgagc

SEQ ID NO: 54255 - protein, 308 aa, Glycine max
  peptide (1)..(308): Ceres Seq. ID no. 14303480
  misc_feature (37)..(162): Pfam Name: No apical meristem (NAM) protein Pfam Description: No apical meristem (NAM) protein
  misc_feature (91)..(306): Homolog of NCBI NO: 480618 NR Description: ATAF1 protein - Arabidopsis thaliana (fragment)
  misc_feature (29)..(205): Homolog of NCBI NO: 15223963 NR Description: No apical meristem (NAM) protein family
  misc_feature (34)..(284): Homolog of NCBI NO: 21105734 NR Description: nam-like protein 3 [Petunia x hybrida]
  misc_feature (34)..(287): Homolog of NCBI NO: 14485513 NR Description: putative NAC domain protein [Solanum tuberosum]
  misc_feature (34)..(287): Homolog of NCBI NO: 40647397 NR Description: NAC domain protein [Lycopersicon esculentum]
  misc_feature (29)..(269): Homolog of NCBI NO: 25458553 NR Description: OsNAC6 protein [imported] - rice
  misc_feature (31)..(288): Homolog of NCBI NO: 21105748 NR Description: nam-like protein 10 [Petunia x hybrida]
  misc_feature (33)..(301): Homolog of NCBI NO: 31322576 NR Description: NAC-domain protein 5-11 [Brassica napus]
  misc_feature (33)..(301): Homolog of NCBI NO: 31322578 NR Description: NAC-domain protein 18 [Brassica napus]
  misc_feature (35)..(306): Homolog of NCBI NO: 15223456 NR Description: No apical meristem (NAM) protein family
KFQTPQPPHNSYTFLLFSFSNFLSQFSTMATTTQLHLPPGFRFHPTDEELVIHYLCRKCASQHIAVPIIAEIDLYKYDPWDLPGMALYGEKEWYFFTPRDRKYPNGSRPNRSAGTGYWKATGADKPVGKPKPVGIKKALVFYAGKAPKGEKTNWIMHEYRLADVDRSVRKKNSLRLDDWVLCRIYNKKGAIEKQQLPPPSGVRKIECSEMEDEKPEILPPDPPYTAATVADCLYFEASDSVPRLHTTDSSCSEQVVSAEFASEVQSEPKRGSNNNNEFAYNYVDATLGNNQMSPLQDIFMYLSKSFCN

SEQ ID NO: 54256 - protein, 280 aa, Glycine max
  peptide (1)..(280): Ceres Seq. ID no. 14303481
  misc_feature (9)..(134): Pfam Name: No apical meristem (NAM) protein Pfam Description: No apical meristem (NAM) protein
  misc_feature (63)..(278): Homolog of NCBI NO: 480618 NR Description: ATAF1 protein - Arabidopsis thaliana (fragment)
  misc_feature (1)..(177): Homolog of NCBI NO: 15223963 NR Description: No apical meristem (NAM) protein family
  misc_feature (6)..(256): Homolog of NCBI NO: 21105734 NR Description: nam-like protein 3 [Petunia x hybrida]
  misc_feature (6)..(259): Homolog of NCBI NO: 14485513 NR Description: putative NAC domain protein [Solanum tuberosum]
  misc_feature (6)..(259): Homolog of NCBI NO: 40647397 NR Description: NAC domain protein [Lycopersicon esculentum]
  misc_feature (1)..(241): Homolog of NCBI NO: 25458553 NR Description: OsNAC6 protein [imported] - rice
  misc_feature (3)..(260): Homolog of NCBI NO: 21105748 NR Description: nam-like protein 10 [Petunia x hybrida]
  misc_feature (5)..(273): Homolog of NCBI NO: 31322576 NR Description: NAC-domain protein 5-11 [Brassica napus]
  misc_feature (5)..(273): Homolog of NCBI NO: 31322578 NR Description: NAC-domain protein 18 [Brassica napus]
  misc_feature (7)..(278): Homolog of NCBI NO: 15223456 NR Description: No apical meristem (NAM) protein family
MATTTQLHLPPGFRFHPTDEELVIHYLCRKCASQHIAVPIIAEIDLYKYDPWDLPGMALYGEKEWYFFTPRDRKYPNGSRPNRSAGTGYWKATGADKPVGKPKPVGIKKALVFYAGKAPKGEKTNWIMHEYRLADVDRSVRKKNSLRLDDWVLCRIYNKKGAIEKQQLPPPSGVRKIECSEMEDEKPEILPPDPPYTAATVADCLYFEASDSVPRLHTTDSSCSEQVVSAEFASEVQSEPKRGSNNNNEFAYNYVDATLGNNQMSPLQDIFMYLSKSFCN

SEQ ID NO: 54257 - protein, 224 aa, Glycine max
  peptide (1)..(224): Ceres Seq. ID no. 14303482
  misc_feature (1)..(78): Pfam Name: No apical meristem (NAM) protein Pfam Description: No apical meristem (NAM) protein
  misc_feature (7)..(222): Homolog of NCBI NO: 480618 NR Description: ATAF1 protein - Arabidopsis thaliana (fragment)
  misc_feature (1)..(121): Homolog of NCBI NO: 15223963 NR Description: No apical meristem (NAM) protein family
  misc_feature (1)..(200): Homolog of NCBI NO: 21105734 NR Description: nam-like protein 3 [Petunia x hybrida]
  misc_feature (1)..(203): Homolog of NCBI NO: 14485513 NR Description: putative NAC domain protein [Solanum tuberosum]
  misc_feature (1)..(203): Homolog of NCBI NO: 40647397 NR Description: NAC domain protein [Lycopersicon esculentum]
  misc_feature (1)..(185): Homolog of NCBI NO: 25458553 NR Description: OsNAC6 protein [imported] - rice
  misc_feature (1)..(204): Homolog of NCBI NO: 21105748 NR Description: nam-like protein 10 [Petunia x hybrida]
  misc_feature (1)..(217): Homolog of NCBI NO: 31322576 NR Description: NAC-domain protein 5-11 [Brassica napus]
  misc_feature (1)..(217): Homolog of NCBI NO: 31322578 NR Description: NAC-domain protein 18 [Brassica napus]
  misc_feature (1)..(222): Homolog of NCBI NO: 15223456 NR Description: No apical meristem (NAM) protein family
MALYGEKEWYFFTPRDRKYPNGSRPNRSAGTGYWKATGADKPVGKPKPVGIKKALVFYAGKAPKGEKTNWIMHEYRLADVDRSVRKKNSLRLDDWVLCRIYNKKGAIEKQQLPPPSGVRKIECSEMEDEKPEILPPDPPYTAATVADCLYFEASDSVPRLHTTDSSCSEQVVSAEFASEVQSEPKRGSNNNNEFAYNYVDATLGNNQMSPLQDIFMYLSKSFCN

SEQ ID NO: 54258 - DNA, 1263 bp, Glycine max
  misc_feature (1)..(1263): Ceres Seq. ID no. 15169286
gttttcttttaggaggatatattttgtttgttcttgtttctctcttctttaataacttttttgtaaaaaaaactaggtaaaaccatttctgaaactacaaaaccagactacggtgctcttgcacttgttcaattaaaatgatttgtgatctggtactaattgttttcaatgtgttacagacgggattttgggctccatgtctgagatacagaccttacctggtgaaattccttctaatgaaagggctggatgtgaagtgattaaatctgatgacaaactttcacattttgagaatttctgccagtctggattgtctcatcttggaattaaacattcacaggatataaaccttcaaggcatatggaaggaagcagaaccatttgccgaccttgtaggaccttattggtctctcagagctgctttagggcctcttttggaaactcttattatacttgataggttattgtttcttcaagagcaaggcagtgctctagaagcctgcttgttaccgatatttgatccaaaaatatcaccaagaaatgtggcaataattgcaaaaaagatcgacaaagatttaagatcctcctgttgctaaaaggtaagtagtggctgcacgtgtcatttatgtgtatccctaccatttaatactgttacccaattacagctctttgaatatcctttcattttattactctattactgtctttctgtaactggatacatcccaatcttctctttccaaaaaacaaaggtgtgaagctagacaatgcagcttctgtcttcaagcatgaatgactcaatgttgcttggttggagtggagtttctttatgagatccttttcttggttggatgatttttctgtcacatgttgatattgttaaatttgttaaaccatgtaaagtaacggtattgcttctccctattccactgctagactttcttgagagttgagttgattgtcaagattccctcagttgaagaaagtcaatttcacatgggacaaggtcacaatgatctacaattcaatgcctgtctttcatgagttgtgttgattctcaagatcggtgcaggtgaaggtcaagatcatttgggacaaggagacaatgctgctgactgctttcctctgttcttgttggtgaaagtttgttactcaggttccaacatcatgctaagttactttgttatcataatcatatgtaatgttctgagtagctagctgggcaattcacttaaatgatgcaagcttgtaaaatttttgcacc

SEQ ID NO: 54259 - protein, 132 aa, Glycine max
  peptide (1)..(132): Ceres Seq. ID no. 15169287
  misc_feature (4)..(122): Homolog of NCBI NO: 31559899 NR Description: hypothetical protein MGC38548 [Mus musculus]
  misc_feature (1)..(122): Homolog of NCBI NO: 34857919 NR Description: similar to CGI-41 protein [Rattus norvegicus]
  misc_feature (12)..(123): Homolog of NCBI NO: 21361525 NR Description: CGI-41 protein [Homo sapiens]
  misc_feature (12)..(123): Homolog of NCBI NO: 4929553 NR Description: CGI-41 protein [Homo sapiens]
  misc_feature (24)..(123): Homolog of NCBI NO: 15219307 NR Description: hypothetical protein [Arabidopsis thaliana]
  misc_feature (24)..(123): Homolog of NCBI NO: 25518057 NR Description: F19K19.6 protein - Arabidopsis thaliana
MSEIQTLPGEIPSNERAGCEVIKSDDKLSHFENFCQSGLSHLGIKHSQDINLQGIWKEAEPFADLVGPYWSLRAALGPLLETLIILDRLLFLQEQGSALEACLLPIFDPKISPRNVAIIAKKIDKDLRSSCC

SEQ ID NO: 54260 - DNA, 1548 bp, Glycine max
  misc_feature (1)..(1548): Ceres Seq. ID no. 14310398
gaagacgaagggtttggcttagacttagatggagtcgcgtggacactcaaacccgcttctgtcattttccagcttcatccatcaacactgcgtccgcttagggtccgacctcgcgactcgtttggatgacacgaagcgagccctagctcaatctcatcataatcttgtcttccccaaacacgccctcgcccacgccgccactgctaccctgggctcccagcacgtggctaagtccctcgtcggcacctccgttttcaccgtcagcaattccaacaatgagttcgttcttatctccgaccccgacggtgccaagtccattggattgctttgctttcgccaagaggacgccgaagcctttctcgctcaggttcgatcacggagtagagagcttcgaagcaaggctagggttgttccaattactctcgaccaggtatacatgttgaaggttgaaggcattgccttccgattcttacctgatcctgttcaaataaggaatgctttggagcttaaaccagtcaacaagggaggttttgatggagttcctgtttttcagtcggagcttttggttgtgaagaagaggaataagcgttactgccctgtgtatttctctaaggaggatattgagcaggaactgtccaaagtttccagggcatcaagaggacctggtgtttctcagcatatagcggtctagaatctaccatctctttctctttatttaatacttttgacaaatcaatgtatttgtcaaagctgcatactagtttcacaatttttctaatccccaaaagcagtagcatattttattgaaccctcagatagttaatttgtgttgcatatgctttatgcaagacttatcttggataaaaataaacatttaactacctgtatgatcaacatgaaaacttactgaacatttggttgaatcatagtggtttgtgtagtatatcttattgatatttgataaccatgagataaatttattttaaggcagtgattaaggtaagaaatgcttgtgctatttaaatttttctttgaaccaaactatatggctgtggaaacaattatgctaatggaataattagttttcgttctataaatgatttgctttttgttgatgtctttttcaattttcatgggaaacaaagcatctgttcaatggcaatgtggaaatagaaatctaagggatttttttatcaaagaaaatatttttgttctcatttttttgttttcactagtaactatgaaaatgctatgttgtttttattatattccctgtttgcaaaaatttactataggaaatgatgaaaggttaggtgaagatcaaagatttgtattcaccgatttttgtatatatctttgaaaacagttgaccaagtgaaaacaaagtaactattgtaattcttagtgaaaataagaaaagaaaacaaagaacattttttcaaaccaaacagagacttaaattctatccatgttcaattaagctcacgtaactcttgtaatctgtcttccatgaaaaaggttagaggaaaagggagaaacttttttttc

SEQ ID NO: 54261 - protein, 220 aa, Glycine max
  peptide (1)..(220): Ceres Seq. ID no. 14310399
  misc_feature (1)..(220): Pfam Name: Tic22-like family Pfam Description: Tic22-like family
  misc_feature (61)..(206): Homolog of NCBI NO: 9293945 NR Description: contains similarity to unknown
  misc_feature (52)..(212): Homolog of NCBI NO: 27817952 NR Description: putative Tic22 [Oryza sativa (japonica
  misc_feature (61)..(206): Homolog of NCBI NO: 15229502 NR Description: Tic22 -related [Arabidopsis thaliana]
  misc_feature (1)..(211): Homolog of NCBI NO: 15234162 NR Description: Tic22 -related protein [Arabidopsis thaliana]
  misc_feature (1)..(220): Homolog of NCBI NO: 3769671 NR Description: Tic22 [Pisum sativum]
MESRGHSNPLLSFSSFIHQHCVRLGSDLATRLDDTKRALAQSHHNLVFPKHALAHAATATLGSQHVAKSLVGTSVFTVSNSNNEFVLISDPDGAKSIGLLCFRQEDAEAFLAQVRSRSRELRSKARVVPITLDQVYMLKVEGIAFRFLPDPVQIRNALELKPVNKGGFDGVPVFQSELLVVKKRNKRYCPVYFSKEDIEQELSKVSRASRGPGVSQHIAV

SEQ ID NO: 54262 - DNA, 1270 bp, Glycine max
  misc_feature (1)..(1270): Ceres Seq. ID no. 14307053
ggttgcatcccaaatggaataagttcagacatgtccatagcgttgaacaaaactaacagcagcaaaatgagcacacccttgttccatgaattcaaaaagcaagcttctttcttcttcaaggagaaaattaagactgctagattagctctaacagatgtcacccctgcagaactgatgacagaagaggcaacaagtggaaatccatgggccccagatgccagaactctcagatcaatttcaagggatgcttttgagctagacgattattggaggattgtggagattctgcataaaaggtttcttaaatttgaaaagaagaattggaggatctcttacaattccctgatcgtgcttgagcacttgttgactcatggaccagagagtgttgcggaggaatttaagagtgacaaagatgtcattagccaaatgaaaggttttcagtatattgatgacactgggtttaattggggcctaactgtgagaaagaaatctgagaggataatgaaactgctggaaaaagggactcttctcaaggaagagagaaaaaatgctagaaggttatctagagggattgaaggtttcggaagtttctctcatcggtcaactccggcacaaggtgttctacgtgagaaatcattgccaaccacacttaagagatatgactcagacttaaacaaccatgaagatcaggaaaaccattcctcttgttcaaacaatgttgtgaatgtggacacagtggctgtcaaatctcctagccatcaaggtgaaacttttaagtcattgggtagtgtggaagccaaggaataccaggatgatgatcttggcaacaatcaaatgcttccgaaatctgaaacaagttctaaagaaaacatggagcctagcaaggaggagttccatctatggaacttgaatggggagtccaaagcacttttggattgtggtgaagaggattccaagcttggaatcatcagaacagaagatgatcaccccttcagttcagcagaaatgcatgccactgcctctttgctttcggcttgctagagacggaaatactagtatactacaagggtgttgaagcaatttgaagatttaaatgaacccaccaagttcaagttgttagcaaatattgcattttcaattcagaagagcatagtctaaagaacgtcttatggtacatgtattcatatttgatggatatgggcaaccattatgttactgctagaatttcccctctatcacggtttgttactcaacaaagagaaattttgtc

SEQ ID NO: 54263 - protein, 346 aa, Glycine max
  peptide (1)..(346): Ceres Seq. ID no. 14307054
  misc_feature (53)..(177): Pfam Name: ENTH domain Pfam Description: ENTH domain
  misc_feature (56)..(184): Homolog of NCBI NO: 8569264 NR Description: Chain A, Crystal Structure Of The Epsin
  misc_feature (56)..(254): Homolog of NCBI NO: 12654425 NR Description: EPN3 protein [Homo sapiens]
  misc_feature (23)..(146): Homolog of NCBI NO: 15229428 NR Description: hypothetical protein [Arabidopsis thaliana]
  misc_feature (20)..(59): Homolog of NCBI NO: 7485982 NR Description: hypothetical protein F22O13.16 - Arabidopsis
  misc_feature (103)..(198): Homolog of NCBI NO: 7485982 NR Description: hypothetical protein F22O13.16 - Arabidopsis
  misc_feature (24)..(153): Homolog of NCBI NO: 34908158 NR Description: P0408C03.22 [Oryza sativa (japonica
  misc_feature (23)..(235): Homolog of NCBI NO: 11994320 NR Description: gene_id:MLM24.8~unknown protein [Arabidopsis
  misc_feature (20)..(198): Homolog of NCBI NO: 22329424 NR Description: expressed protein [Arabidopsis thaliana]
  misc_feature (11)..(312): Homolog of NCBI NO: 21536910 NR Description: unknown [Arabidopsis thaliana]
  misc_feature (11)..(312): Homolog of NCBI NO: 15231451 NR Description: expressed protein [Arabidopsis thaliana]
GCIPNGISSDMSIALNKTNSSKMSTPLFHEFKKQASFFFKEKIKTARLALTDVTPAELMTEEATSGNPWAPDARTLRSISRDAFELDDYWRIVEILHKRFLKFEKKNWRISYNSLIVLEHLLTHGPESVAEEFKSDKDVISQMKGFQYIDDTGFNWGLTVRKKSERIMKLLEKGTLLKEERKNARRLSRGIEGFGSFSHRSTPAQGVLREKSLPTTLKRYDSDLNNHEDQENHSSCSNNVVNVDTVAVKSPSHQGETFKSLGSVEAKEYQDDDLGNNQMLPKSETSSKENMEPSKEEFHLWNLNGESKALLDCGEEDSKLGIIRTEDDHPFSSAEMHATASLLSAC

SEQ ID NO: 54264 - protein, 336 aa, Glycine max
  peptide (1)..(336): Ceres Seq. ID no. 14307055
  misc_feature (43)..(167): Pfam Name: ENTH domain Pfam Description: ENTH domain
  misc_feature (46)..(174): Homolog of NCBI NO: 8569264 NR Description: Chain A, Crystal Structure Of The Epsin
  misc_feature (46)..(244): Homolog of NCBI NO: 12654425 NR Description: EPN3 protein [Homo sapiens]
  misc_feature (13)..(136): Homolog of NCBI NO: 15229428 NR Description: hypothetical protein [Arabidopsis thaliana]
  misc_feature (10)..(49): Homolog of NCBI NO: 7485982 NR Description: hypothetical protein F22O13.16 - Arabidopsis
  misc_feature (93)..(188): Homolog of NCBI NO: 7485982 NR Description: hypothetical protein F22O13.16 - Arabidopsis
  misc_feature (14)..(143): Homolog of NCBI NO: 34908158 NR Description: P0408C03.22 [Oryza sativa (japonica
  misc_feature (13)..(225): Homolog of NCBI NO: 11994320 NR Description: gene_id:MLM24.8~unknown protein [Arabidopsis
  misc_feature (10)..(188): Homolog of NCBI NO: 22329424 NR Description: expressed protein [Arabidopsis thaliana]
  misc_feature (1)..(302): Homolog of NCBI NO: 21536910 NR Description: unknown [Arabidopsis thaliana]
  misc_feature (1)..(302): Homolog of NCBI NO: 15231451 NR Description: expressed protein [Arabidopsis thaliana]
MSIALNKTNSSKMSTPLFHEFKKQASFFFKEKIKTARLALTDVTPAELMTEEATSGNPWAPDARTLRSISRDAFELDDYWRIVEILHKRFLKFEKKNWRISYNSLIVLEHLLTHGPESVAEEFKSDKDVISQMKGFQYIDDTGFNWGLTVRKKSERIMKLLEKGTLLKEERKNARRLSRGIEGFGSFSHRSTPAQGVLREKSLPTTLKRYDSDLNNHEDQENHSSCSNNVVNVDTVAVKSPSHQGETFKSLGSVEAKEYQDDDLGNNQMLPKSETSSKENMEPSKEEFHLWNLNGESKALLDCGEEDSKLGIIRTEDDHPFSSAEMHATASLLSAC

SEQ ID NO: 54265 - protein, 324 aa, Glycine max
  peptide (1)..(324): Ceres Seq. ID no. 14307056
  misc_feature (31)..(155): Pfam Name: ENTH domain Pfam Description: ENTH domain
  misc_feature (34)..(162): Homolog of NCBI NO: 8569264 NR Description: Chain A, Crystal Structure Of The Epsin
  misc_feature (34)..(232): Homolog of NCBI NO: 12654425 NR Description: EPN3 protein [Homo sapiens]
  misc_feature (1)..(124): Homolog of NCBI NO: 15229428 NR Description: hypothetical protein [Arabidopsis thaliana]
  misc_feature (1)..(37): Homolog of NCBI NO: 7485982 NR Description: hypothetical protein F22O13.16 - Arabidopsis
  misc_feature (81)..(176): Homolog of NCBI NO: 7485982 NR Description: hypothetical protein F22O13.16 - Arabidopsis
  misc_feature (2)..(131): Homolog of NCBI NO: 34908158 NR Description: P0408C03.22 [Oryza sativa (japonica
  misc_feature (1)..(213): Homolog of NCBI NO: 11994320 NR Description: gene_id:MLM24.8~unknown protein [Arabidopsis
  misc_feature (1)..(176): Homolog of NCBI NO: 22329424 NR Description: expressed protein [Arabidopsis thaliana]
  misc_feature (1)..(290): Homolog of NCBI NO: 21536910 NR Description: unknown [Arabidopsis thaliana]
  misc_feature (1)..(290): Homolog of NCBI NO: 15231451 NR Description: expressed protein [Arabidopsis thaliana]
MSTPLFHEFKKQASFFFKEKIKTARLALTDVTPAELMTEEATSGNPWAPDARTLRSISRDAFELDDYWRIVEILHKRFLKFEKKNWRISYNSLIVLEHLLTHGPESVAEEFKSDKDVISQMKGFQYIDDTGFNWGLTVRKKSERIMKLLEKGTLLKEERKNARRLSRGIEGFGSFSHRSTPAQGVLREKSLPTTLKRYDSDLNNHEDQENHSSCSNNVVNVDTVAVKSPSHQGETFKSLGSVEAKEYQDDDLGNNQMLPKSETSSKENMEPSKEEFHLWNLNGESKALLDCGEEDSKLGIIRTEDDHPFSSAEMHATASLLSAC

SEQ ID NO: 54266 - DNA, 1236 bp, Glycine max
  misc_feature (1)..(1236): Ceres Seq. ID no. 15171080
atcattacattacatcttaggagtctttcttcctttgtaatagaaagcacgcgtttctctctctccctctctcaacgaatatttgtgtacttcctcttttgtgggtagattcaatttaccatgtcgagttcatcggaatactctcaattttccggccagaaaccggcgaggtcgccggagaaatcgagcttctctcagacttgtagcctgttgagtcaatacatcaaggagaagggtagcttcggagatcttaccctcggaatgacatcatgtgggtcacctgagacatcttgtcaatctgctacaaccatgaacttgtttcctaccaaggaaaacaacgtgacaccaaaggacctgacagctatggatttgttctctccacaagcttcctcctatcgtccttcagaggagattccaaccttgattaattccagtgcaattaaatctgtgagcaagagtgctaaaactgcacagatgacaatcttttatggtggacaagttgttgtctttgatgattttcctgctgacaaagcaagtgagatcatgtcctatgccaccaaagggatcccccaaagccagaacaattctgttttcacctacacaccgagccagccttcatttcctgctaatttggtcagaacttcagctgattcaagtgctccaattattcctagtgtgaacattaccaactccattcatgaacaccctcaagcatcatccagacctgttgtttgtgatctgccaattgctagaaaagcttcactccaccggtttctggagaagagaaaggatagaattgcttccaaagcaccatatcaactagcaaatgggtcttctaaccagccagctgagtccatgccatggcttgggctgagtgcttcttcacctcgaatctgagagcagctatagtttatatgtaatttttaagcattatttttgttgtgaaaatgctaactagtcagaagcttttttgccagaattcttgactaagtttctggttatattttttttcctgactaaatagcattattacttcttttttctcttttttttcgccgataaaaaaacctctttttttttttttctttaaatgtttttcagatgatttatgggcttcttgctaggcctgtatttgtcatagtaatgttggctctgctgggccgtatcatagatctaactattggttagttgatgctgctctaattatagtgattcaatatattcattgttaagatt

SEQ ID NO: 54267 - protein, 258 aa, Glycine max
  peptide (1)..(258): Ceres Seq. ID no. 15171081
  misc_feature (117)..(145): Pfam Name: ZIM motif Pfam Description: ZIM motif
  misc_feature (77)..(251): Homolog of NCBI NO: 29788814 NR Description: unknown protein [Oryza sativa (japonica
  misc_feature (2)..(88): Homolog of NCBI NO: 12247470 NR Description: PnFL-2 [Ipomoea nil]
  misc_feature (171)..(256): Homolog of NCBI NO: 12247470 NR Description: PnFL-2 [Ipomoea nil]
  misc_feature (17)..(258): Homolog of NCBI NO: 18410088 NR Description: expressed protein [Arabidopsis thaliana]
  misc_feature (1)..(152): Homolog of NCBI NO: 16604489 NR Description: At1g19180/T29M8_5 [Arabidopsis thaliana]
  misc_feature (22)..(255): Homolog of NCBI NO: 23237931 NR Description: unknown protein [Oryza sativa (japonica
  misc_feature (1)..(247): Homolog of NCBI NO: 21592605 NR Description: unknown [Arabidopsis thaliana]
  misc_feature (1)..(247): Homolog of NCBI NO: 18410737 NR Description: expressed protein [Arabidopsis thaliana]
  misc_feature (1)..(253): Homolog of NCBI NO: 21593416 NR Description: unknown [Arabidopsis thaliana]
  misc_feature (1)..(253): Homolog of NCBI NO: 18394706 NR Description: expressed protein [Arabidopsis thaliana]
MSSSSEYSQFSGQKPARSPEKSSFSQTCSLLSQYIKEKGSFGDLTLGMTSCGSPETSCQSATTMNLFPTKENNVTPKDLTAMDLFSPQASSYRPSEEIPTLINSSAIKSVSKSAKTAQMTIFYGGQVVVFDDFPADKASEIMSYATKGIPQSQNNSVFTYTPSQPSFPANLVRTSADSSAPIIPSVNITNSIHEHPQASSRPVVCDLPIARKASLHRFLEKRKDRIASKAPYQLANGSSNQPAESMPWLGLSASSPRI

SEQ ID NO: 54268 - protein, 211 aa, Glycine max
  peptide (1)..(211): Ceres Seq. ID no. 15171082
  misc_feature (70)..(98): Pfam Name: ZIM motif Pfam Description: ZIM motif
  misc_feature (30)..(204): Homolog of NCBI NO: 29788814 NR Description: unknown protein [Oryza sativa (japonica
  misc_feature (1)..(41): Homolog of NCBI NO: 12247470 NR Description: PnFL-2 [Ipomoea nil]
  misc_feature (124)..(209): Homolog of NCBI NO: 12247470 NR Description: PnFL-2 [Ipomoea nil]
  misc_feature (1)..(211): Homolog of NCBI NO: 18410088 NR Description: expressed protein [Arabidopsis thaliana]
  misc_feature (1)..(105): Homolog of NCBI NO: 16604489 NR Description: At1g19180/T29M8_5 [Arabidopsis thaliana]
  misc_feature (1)..(208): Homolog of NCBI NO: 23237931 NR Description: unknown protein [Oryza sativa (japonica
  misc_feature (1)..(200): Homolog of NCBI NO: 21592605 NR Description: unknown [Arabidopsis thaliana]
  misc_feature (1)..(200): Homolog of NCBI NO: 18410737 NR Description: expressed protein [Arabidopsis thaliana]
  misc_feature (1)..(206): Homolog of NCBI NO: 21593416 NR Description: unknown [Arabidopsis thaliana]
  misc_feature (1)..(206): Homolog of NCBI NO: 18394706 NR Description: expressed protein [Arabidopsis thaliana]
MTSCGSPETSCQSATTMNLFPTKENNVTPKDLTAMDLFSPQASSYRPSEEIPTLINSSAIKSVSKSAKTAQMTIFYGGQVVVFDDFPADKASEIMSYATKGIPQSQNNSVFTYTPSQPSFPANLVRTSADSSAPIIPSVNITNSIHEHPQASSRPVVCDLPIARKASLHRFLEKRKDRIASKAPYQLANGSSNQPAESMPWLGLSASSPRI

SEQ ID NO: 54269 - protein, 195 aa, Glycine max
  peptide (1)..(195): Ceres Seq. ID no. 15171083
  misc_feature (54)..(82): Pfam Name: ZIM motif Pfam Description: ZIM motif
  misc_feature (14)..(188): Homolog of NCBI NO: 29788814 NR Description: unknown protein [Oryza sativa (japonica
  misc_feature (1)..(25): Homolog of NCBI NO: 12247470 NR Description: PnFL-2 [Ipomoea nil]
  misc_feature (108)..(193): Homolog of NCBI NO: 12247470 NR Description: PnFL-2 [Ipomoea nil]
  misc_feature (1)..(195): Homolog of NCBI NO: 18410088 NR Description: expressed protein [Arabidopsis thaliana]
  misc_feature (1)..(89): Homolog of NCBI NO: 16604489 NR Description: At1g19180/T29M8_5 [Arabidopsis thaliana]
  misc_feature (1)..(192): Homolog of NCBI NO: 23237931 NR Description: unknown protein [Oryza sativa (japonica
  misc_feature (1)..(184): Homolog of NCBI NO: 21592605 NR Description: unknown [Arabidopsis thaliana]
  misc_feature (1)..(184): Homolog of NCBI NO: 18410737 NR Description: expressed protein [Arabidopsis thaliana]
  misc_feature (1)..(190): Homolog of NCBI NO: 21593416 NR Description: unknown [Arabidopsis thaliana]
  misc_feature (1)..(190): Homolog of NCBI NO: 18394706 NR Description: expressed protein [Arabidopsis thaliana]
MNLFPTKENNVTPKDLTAMDLFSPQASSYRPSEEIPTLINSSAIKSVSKSAKTAQMTIFYGGQVVVFDDFPADKASEIMSYATKGIPQSQNNSVFTYTPSQPSFPANLVRTSADSSAPIIPSVNITNSIHEHPQASSRPVVCDLPIARKASLHRFLEKRKDRIASKAPYQLANGSSNQPAESMPWLGLSASSPRI

SEQ ID NO: 54270 - DNA, 1564 bp, Glycine max
  misc_feature (1)..(1564): Ceres Seq. ID no. 14314964
gattattatgaagagcattttactgtgcctcatcagagaattgttttagtaaccaataaacgagtcatgcttcttcagtgtcttgctcccgacaagatggataaaaaagcatgcaagattatttgggacgtaccttgggatgagttgatggcactggagttggcaaaagcaggcagttcccaaccttctttcttgatcctccatctgaaacatttccggagatctgaaaattttgtgcgagtgataaaatgcaatagtgtggaagtgtttgaaggaagagaaccccaagctattaagatatgttcagtggtgcgtagagcatggaagacatatcagtctaacatgaaaaacttgattctgaaggttccttcaagtcagagacaagtgcatttttcctggactgaagttgatagtagagaaccacgaatccccaataaggccattattagttctagggagatttcatcaaacagtactgcatctgatgatagacgatttgtgagacacatcattactttttcaaagatctggagcagcgaacaagaatacaacggtcgatgctcgttatgcagcagaaaacagatctcgcaagatggcagaatatgtagcatttggaggcctgtgtgtcctgttggatatatatatattggggatattgctcgtgttggtatccatcctccaaatgttgctgctgtctaccgcaagattgatggattttttgctctcccgatgggatatgacctggtgtggcgaaattgtccggaagattatgttactccattatcaatttggcacccacgggcaccagatggatttgtggctcccggatgtgttgccattgctggttatttggaaccagagcctgatcttgtttactgtatcgcggagtcacttgttgaggaaacagaatttgaagagttgaaggtttggtctgcacctgactcatatccatggacctgtcatatctatccagtacagagtgatgctttgcattttgttgctctacgacaaagcaaggaagaatccgactggaagccaaagagggtccgtgataaccctcactgtcagttgcaatcaccttagtctttaaactggttaacctccgttttttatttctttggaggtcagctccaaagaatgtgcgtgtgccatctccgaaagaagacagtaatgtaagttggacgatgtttataataggagaggctgtgtttgtcgcgtgattattattactactttccagcatccaatggtgatgggactcagattgggatcatgtatattctctctgattctgtggtatatagtgtataaaagcaccacgtcggaaactgccaaaaggcacatgtaacttgtctacttatccttgtgtgtgttttgctcatgtctcagactattttgcgaagatgcgttggcgttttctttttcaaaagccacatacatacttgatttgcgagggatagaatattacatggttgacaatctaggcaaagactggccaccgaggtctatttttgaagatatgccaattttatgatgcgattcgaacattatatttccatggctc

SEQ ID NO: 54271 - protein, 360 aa, Glycine max
  peptide (1)..(360): Ceres Seq. ID no. 14314965
  misc_feature (144)..(314): Homolog of NCBI NO: 15235975 NR Description: hypothetical protein [Arabidopsis thaliana]
  misc_feature (1)..(161): Homolog of NCBI NO: 21536529 NR Description: unknown [Arabidopsis thaliana]
  misc_feature (26)..(352): Homolog of NCBI NO: 37536928 NR Description: unknown protein [Oryza sativa (japonica
  misc_feature (33)..(352): Homolog of NCBI NO: 15235973 NR Description: hypothetical protein [Arabidopsis thaliana]
DYYEEHFTVPHQRIVLVTNKRVMLLQCLAPDKMDKKACKIIWDVPWDELMALELAKAGSSQPSFLILHLKHFRRSENFVRVIKCNSVEVFEGREPQAIKICSVVRRAWKTYQSNMKNLILKVPSSQRQVHFSWTEVDSREPRIPNKAIISSREISSNSTASDDRRFVRHIITFSKIWSSEQEYNGRCSLCSRKQISQDGRICSIWRPVCPVGYIYIGDIARVGIHPPNVAAVYRKIDGFFALPMGYDLVWRNCPEDYVTPLSIWHPRAPDGFVAPGCVAIAGYLEPEPDLVYCIAESLVEETEFEELKVWSAPDSYPWTCHIYPVQSDALHFVALRQSKEESDWKPKRVRDNPHCQLQSP

SEQ ID NO: 54272 - protein, 338 aa, Glycine max
  peptide (1)..(338): Ceres Seq. ID no. 14314966
  misc_feature (122)..(292): Homolog of NCBI NO: 15235975 NR Description: hypothetical protein [Arabidopsis thaliana]
  misc_feature (1)..(139): Homolog of NCBI NO: 21536529 NR Description: unknown [Arabidopsis thaliana]
  misc_feature (4)..(330): Homolog of NCBI NO: 37536928 NR Description: unknown protein [Oryza sativa (japonica
  misc_feature (11)..(330): Homolog of NCBI NO: 15235973 NR Description: hypothetical protein [Arabidopsis thaliana]
MLLQCLAPDKMDKKACKIIWDVPWDELMALELAKAGSSQPSFLILHLKHFRRSENFVRVIKCNSVEVFEGREPQAIKICSVVRRAWKTYQSNMKNLILKVPSSQRQVHFSWTEVDSREPRIPNKAIISSREISSNSTASDDRRFVRHIITFSKIWSSEQEYNGRCSLCSRKQISQDGRICSIWRPVCPVGYIYIGDIARVGIHPPNVAAVYRKIDGFFALPMGYDLVWRNCPEDYVTPLSIWHPRAPDGFVAPGCVAIAGYLEPEPDLVYCIAESLVEETEFEELKVWSAPDSYPWTCHIYPVQSDALHFVALRQSKEESDWKPKRVRDNPHCQLQSP

SEQ ID NO: 54273 - protein, 328 aa, Glycine max
  peptide (1)..(328): Ceres Seq. ID no. 14314967
  misc_feature (112)..(282): Homolog of NCBI NO: 15235975 NR Description: hypothetical protein [Arabidopsis thaliana]
  misc_feature (1)..(129): Homolog of NCBI NO: 21536529 NR Description: unknown [Arabidopsis thaliana]
  misc_feature (1)..(320): Homolog of NCBI NO: 37536928 NR Description: unknown protein [Oryza sativa (japonica
  misc_feature (1)..(320): Homolog of NCBI NO: 15235973 NR Description: hypothetical protein [Arabidopsis thaliana]
MDKKACKIIWDVPWDELMALELAKAGSSQPSFLILHLKHFRRSENFVRVIKCNSVEVFEGREPQAIKICSVVRRAWKTYQSNMKNLILKVPSSQRQVHFSWTEVDSREPRIPNKAIISSREISSNSTASDDRRFVRHIITFSKIWSSEQEYNGRCSLCSRKQISQDGRICSIWRPVCPVGYIYIGDIARVGIHPPNVAAVYRKIDGFFALPMGYDLVWRNCPEDYVTPLSIWHPRAPDGFVAPGCVAIAGYLEPEPDLVYCIAESLVEETEFEELKVWSAPDSYPWTCHIYPVQSDALHFVALRQSKEESDWKPKRVRDNPHCQLQSP

SEQ ID NO: 54274 - DNA, 1105 bp, Glycine max
  misc_feature (1)..(1105): Ceres Seq. ID no. 15169711
acacattctctagagcacacacaaacccgtccctcacactctccaaaccctagcggcactacacactagttctatcgctatctccccaagatgtcgagcgccgatcccgagcacagagaagaggaggaggcacccgccgttggcgacgacgaggacaccggagctcacgtcgctccaatcgtcaagctcgaggaggttgctgtcaccaccggcgaggaggacgaagatgcaatcctggatctcaaatcgaagctttaccggttcgacaaggacgggaaccagtggaaggagcgtggcgccggcactgtgaagttcctgaagcataaggcttccggcaaggttaggcttctcatgaggcaatccaagacgctcaagatctgcgctaatcatctcattttgcctacgatgagtgtgcaagagcacgctgggaacgagaaatcctgcgtttggcatgctagggattttgctgatggtgaactcaaggacgagctcttctgcatccgttttccttctattgaaaattgcaaaagcttcatggaaacattccaagaagttgctgaaacacaaaaggcagaggatgagaaggaatcatctgatgcagctggtcttattgagaaattaagtgttgaagagaaggctgatgcagagaagaaagatgaagagaagtctgaggacaaaactgtggagaaagaatctgcatcaggaaaggaaagcaaggcagttgaagagcctgcttcctcagcttgagtatttcttattcatattccatacttggctatctgacaaggttaggtggttgatgtttttgccgcccatatcttgggatattctcatacttgatggttgccggattgtgtcactgaattgagctgtttgtgtcctcttgagtttttgtcagcttgcaaagttagggttgggtttgaattttgaggcttgaatggttgagctttcggggtctgggagtctattattattgttattttcattctacatatgtatttgttgcgagtaatgggtcattttggttgggagggtgcagtccagaaatagtaaaaattatagacgaaggttttggtacaacttgtttgagttccacaattatttc

SEQ ID NO: 54275 - protein, 218 aa, Glycine max
  peptide (1)..(218): Ceres Seq. ID no. 15169712
  misc_feature (37)..(158): Pfam Name: RanBP1 domain Pfam Description: RanBP1 domain
  misc_feature (4)..(201): Homolog of NCBI NO: 38174136 NR Description: Unknown (protein for MGC:76028) [Silurana
  misc_feature (1)..(213): Homolog of NCBI NO: 14091665 NR Description: Ran binding protein-1 [Lycopersicon esculentum]
  misc_feature (1)..(216): Homolog of NCBI NO: 5106769 NR Description: Ran-binding protein siRanBP [Arabidopsis thaliana]
  misc_feature (1)..(218): Homolog of NCBI NO: 30697102 NR Description: Ran binding protein 1 homolog - like [Arabidopsis
  misc_feature (1)..(218): Homolog of NCBI NO: 8843780 NR Description: contains similarity to small GTPase Ran binding
  misc_feature (7)..(218): Homolog of NCBI NO: 2058284 NR Description: atranbp1b [Arabidopsis thaliana]
  misc_feature (1)..(210): Homolog of NCBI NO: 15222310 NR Description: Ran-binding protein (atranbp1a) [Arabidopsis
  misc_feature (1)..(216): Homolog of NCBI NO: 2058282 NR Description: atranbp1a [Arabidopsis thaliana]
  misc_feature (7)..(218): Homolog of NCBI NO: 20260400 NR Description: Ran binding protein [Arabidopsis thaliana]
  misc_feature (7)..(218): Homolog of NCBI NO: 15227700 NR Description: Ran binding protein (AtRanBP1b) [Arabidopsis
MSSADPEHREEEEAPAVGDDEDTGAHVAPIVKLEEVAVTTGEEDEDAILDLKSKLYRFDKDGNQWKERGAGTVKFLKHKASGKVRLLMRQSKTLKICANHLILPTMSVQEHAGNEKSCVWHARDFADGELKDELFCIRFPSIENCKSFMETFQEVAETQKAEDEKESSDAAGLIEKLSVEEKADAEKKDEEKSEDKTVEKESASGKESKAVEEPASSA

SEQ ID NO: 54276 - protein, 131 aa, Glycine max
  peptide (1)..(131): Ceres Seq. ID no. 15169713
  misc_feature (1)..(71): Pfam Name: RanBP1 domain Pfam Description: RanBP1 domain
  misc_feature (1)..(114): Homolog of NCBI NO: 38174136 NR Description: Unknown (protein for MGC:76028) [Silurana
  misc_feature (1)..(126): Homolog of NCBI NO: 14091665 NR Description: Ran binding protein-1 [Lycopersicon esculentum]
  misc_feature (1)..(129): Homolog of NCBI NO: 5106769 NR Description: Ran-binding protein siRanBP [Arabidopsis thaliana]
  misc_feature (1)..(131): Homolog of NCBI NO: 30697102 NR Description: Ran binding protein 1 homolog - like [Arabidopsis
  misc_feature (1)..(131): Homolog of NCBI NO: 8843780 NR Description: contains similarity to small GTPase Ran binding
  misc_feature (1)..(131): Homolog of NCBI NO: 2058284 NR Description: atranbp1b [Arabidopsis thaliana]
  misc_feature (1)..(123): Homolog of NCBI NO: 15222310 NR Description: Ran-binding protein (atranbp1a) [Arabidopsis
  misc_feature (1)..(129): Homolog of NCBI NO: 2058282 NR Description: atranbp1a [Arabidopsis thaliana]
  misc_feature (1)..(131): Homolog of NCBI NO: 20260400 NR Description: Ran binding protein [Arabidopsis thaliana]
  misc_feature (1)..(131): Homolog of NCBI NO: 15227700 NR Description: Ran binding protein (AtRanBP1b) [Arabidopsis
MRQSKTLKICANHLILPTMSVQEHAGNEKSCVWHARDFADGELKDELFCIRFPSIENCKSFMETFQEVAETQKAEDEKESSDAAGLIEKLSVEEKADAEKKDEEKSEDKTVEKESASGKESKAVEEPASSA

SEQ ID NO: 54277 - protein, 113 aa, Glycine max
  peptide (1)..(113): Ceres Seq. ID no. 15169714
  misc_feature (1)..(53): Pfam Name: RanBP1 domain Pfam Description: RanBP1 domain
  misc_feature (1)..(96): Homolog of NCBI NO: 38174136 NR Description: Unknown (protein for MGC:76028) [Silurana
  misc_feature (1)..(108): Homolog of NCBI NO: 14091665 NR Description: Ran binding protein-1 [Lycopersicon esculentum]
  misc_feature (1)..(111): Homolog of NCBI NO: 5106769 NR Description: Ran-binding protein siRanBP [Arabidopsis thaliana]
  misc_feature (1)..(113): Homolog of NCBI NO: 30697102 NR Description: Ran binding protein 1 homolog - like [Arabidopsis
  misc_feature (1)..(113): Homolog of NCBI NO: 8843780 NR Description: contains similarity to small GTPase Ran binding
  misc_feature (1)..(113): Homolog of NCBI NO: 2058284 NR Description: atranbp1b [Arabidopsis thaliana]
  misc_feature (1)..(105): Homolog of NCBI NO: 15222310 NR Description: Ran-binding protein (atranbp1a) [Arabidopsis
  misc_feature (1)..(111): Homolog of NCBI NO: 2058282 NR Description: atranbp1a [Arabidopsis thaliana]
  misc_feature (1)..(113): Homolog of NCBI NO: 20260400 NR Description: Ran binding protein [Arabidopsis thaliana]
  misc_feature (1)..(113): Homolog of NCBI NO: 15227700 NR Description: Ran binding protein (AtRanBP1b) [Arabidopsis
MSVQEHAGNEKSCVWHARDFADGELKDELFCIRFPSIENCKSFMETFQEVAETQKAEDEKESSDAAGLIEKLSVEEKADAEKKDEEKSEDKTVEKESASGKESKAVEEPASSA

SEQ ID NO: 54278 - DNA, 1322 bp, Glycine max
  misc_feature (1)..(1322): Ceres Seq. ID no. 13593955
aaatcttcattccattgttgagggtcatcattgatatttattctggtccatcccttgctcatcctcatagctatcatggaagcctctaactcacattcgtttcgctctcgtgtgcacctttttgtgcttttcttgttatgttttgtggtcacaattgaagctaatttaaagaagaaggtcccagccttttatgtgtttggagactccacagtagactcaggaaacaacaacttcatagacacggctttcagaagcgattttcctccctatggtagagattttgttaaccaagctcccacgggaaggttcacaaatgggaagcttggcactgattttgtagcttcatatttaggcctaaaagagttggtgccaccatatttggatccaaatctcagtgacaaagaacttgtaactggtgtcagttttgcctctgctggttctggctttgaccctctcactccaatgctgggaaatgtaattccaatagcaaagcagttggaatatttcaaagaatacaaacagaggttagagggtatgcttggcaagaaaagaaccgaatatcacataaacaatgctttatttttcatcagcgcgggcacaaatgactacgtcattaattatttttcgttgccaatacgaagaaagacctacaccacccccttaacctacgggcacttcttgcttcaacacataaaagatttcatacagaatttatggaaagaaggtgcacgaaaaatagctttggttggagtacctccaatgggatgcttgccgatcatgatcaccttgaattcccataatgtatttctcgaacgtggttgtgtggacaagtattccgctgttgcaagagatcacaatatgatgcttcaacaggaattgttcttaatgcaactaaatttctctaataataaccctgccagtgctaaaatctcttacctcgacatatatggacccttggacgacatgattcaagcgcatcaaaatctaggttttgatgcggttgatcgtggctgttgtggaagtggttacatcgaagcaacttttttgtgtaatggggtttcatacgtgtgctctgatccatctaagtttgtcttctgggattcaatacaccctacggagaaggcatactatgacctatttatggcagcccgtcccaaaattgatgcccttatcaatggctagggatatatattctttttggcccccctcaatttggtcattagaaatttataacaaataaaggcttgcagctttgtgccaaactaaaaggaattattggaaaatagaaagaaaaaaaaaagaacaaagtttttttgtactgt

SEQ ID NO: 54279 - protein, 368 aa, Glycine max
  peptide (1)..(368): Ceres Seq. ID no. 15221268
  misc_feature (40)..(355): Pfam Name: GDSL-like Lipase/Acylhydrolase Pfam Description: GDSL-like Lipase/Acylhydrolase
  misc_feature (11)..(351): Homolog of NCBI NO: 21592974 NR Description: proline-rich protein, putative [Arabidopsis
  misc_feature (15)..(351): Homolog of NCBI NO: 15225096 NR Description: GDSL-motif lipase/hydrolase protein [Arabidopsis
  misc_feature (22)..(368): Homolog of NCBI NO: 21537117 NR Description: putative GDSL-motif lipase/hydrolase [Arabidopsis
  misc_feature (11)..(351): Homolog of NCBI NO: 25336283 NR Description: hypothetical protein RXF26 [imported] -
  misc_feature (11)..(351): Homolog of NCBI NO: 15217963 NR Description: GDSL-motif lipase/hydrolase protein [Arabidopsis
  misc_feature (15)..(351): Homolog of NCBI NO: 15227734 NR Description: GDSL-motif lipase/hydrolase protein [Arabidopsis
  misc_feature (23)..(351): Homolog of NCBI NO: 25336267 NR Description: hypothetical protein [imported] - Arabidopsis
  misc_feature (1)..(351): Homolog of NCBI NO: 18390708 NR Description: GDSL-motif lipase/hydrolase protein [Arabidopsis
  misc_feature (6)..(366): Homolog of NCBI NO: 21536954 NR Description: GDSL-motif lipase/hydrolase-like protein
  misc_feature (1)..(366): Homolog of NCBI NO: 15237351 NR Description: GDSL-motif lipase/hydrolase protein [Arabidopsis
MEASNSHSFRSRVHLFVLFLLCFVVTIEANLKKKVPAFYVFGDSTVDSGNNNFIDTAFRSDFPPYGRDFVNQAPTGRFTNGKLGTDFVASYLGLKELVPPYLDPNLSDKELVTGVSFASAGSGFDPLTPMLGNVIPIAKQLEYFKEYKQRLEGMLGKKRTEYHINNALFFISAGTNDYVINYFSLPIRRKTYTTPLTYGHFLLQHIKDFIQNLWKEGARKIALVGVPPMGCLPIMITLNSHNVFLERGCVDKYSAVARDHNMMLQQELFLMQLNFSNNNPASAKISYLDIYGPLDDMIQAHQNLGFDAVDRGCCGSGYIEATFLCNGVSYVCSDPSKFVFWDSIHPTEKAYYDLFMAARPKIDALING

SEQ ID NO: 54280 - protein, 239 aa, Glycine max
  peptide (1)..(239): Ceres Seq. ID no. 15221269
  misc_feature (1)..(226): Pfam Name: GDSL-like Lipase/Acylhydrolase Pfam Description: GDSL-like Lipase/Acylhydrolase
  misc_feature (1)..(222): Homolog of NCBI NO: 21592974 NR Description: proline-rich protein, putative [Arabidopsis
  misc_feature (1)..(222): Homolog of NCBI NO: 15225096 NR Description: GDSL-motif lipase/hydrolase protein [Arabidopsis
  misc_feature (1)..(239): Homolog of NCBI NO: 21537117 NR Description: putative GDSL-motif lipase/hydrolase [Arabidopsis
  misc_feature (1)..(222): Homolog of NCBI NO: 25336283 NR Description: hypothetical protein RXF26 [imported] -
  misc_feature (1)..(222): Homolog of NCBI NO: 15217963 NR Description: GDSL-motif lipase/hydrolase protein [Arabidopsis
  misc_feature (1)..(222): Homolog of NCBI NO: 15227734 NR Description: GDSL-motif lipase/hydrolase protein [Arabidopsis
  misc_feature (1)..(222): Homolog of NCBI NO: 25336267 NR Description: hypothetical protein [imported] - Arabidopsis
  misc_feature (1)..(222): Homolog of NCBI NO: 18390708 NR Description: GDSL-motif lipase/hydrolase protein [Arabidopsis
  misc_feature (1)..(237): Homolog of NCBI NO: 21536954 NR Description: GDSL-motif lipase/hydrolase-like protein
  misc_feature (1)..(237): Homolog of NCBI NO: 15237351 NR Description: GDSL-motif lipase/hydrolase protein [Arabidopsis
MLGNVIPIAKQLEYFKEYKQRLEGMLGKKRTEYHINNALFFISAGTNDYVINYFSLPIRRKTYTTPLTYGHFLLQHIKDFIQNLWKEGARKIALVGVPPMGCLPIMITLNSHNVFLERGCVDKYSAVARDHNMMLQQELFLMQLNFSNNNPASAKISYLDIYGPLDDMIQAHQNLGFDAVDRGCCGSGYIEATFLCNGVSYVCSDPSKFVFWDSIHPTEKAYYDLFMAARPKIDALING

SEQ ID NO: 54281 - protein, 215 aa, Glycine max
  peptide (1)..(215): Ceres Seq. ID no. 15221270
  misc_feature (1)..(202): Pfam Name: GDSL-like Lipase/Acylhydrolase Pfam Description: GDSL-like Lipase/Acylhydrolase
  misc_feature (1)..(198): Homolog of NCBI NO: 21592974 NR Description: proline-rich protein, putative [Arabidopsis
  misc_feature (1)..(198): Homolog of NCBI NO: 15225096 NR Description: GDSL-motif lipase/hydrolase protein [Arabidopsis
  misc_feature (1)..(215): Homolog of NCBI NO: 21537117 NR Description: putative GDSL-motif lipase/hydrolase [Arabidopsis
  misc_feature (1)..(198): Homolog of NCBI NO: 25336283 NR Description: hypothetical protein RXF26 [imported] -
  misc_feature (1)..(198): Homolog of NCBI NO: 15217963 NR Description: GDSL-motif lipase/hydrolase protein [Arabidopsis
  misc_feature (1)..(198): Homolog of NCBI NO: 15227734 NR Description: GDSL-motif lipase/hydrolase protein [Arabidopsis
  misc_feature (1)..(198): Homolog of NCBI NO: 25336267 NR Description: hypothetical protein [imported] - Arabidopsis
  misc_feature (1)..(198): Homolog of NCBI NO: 18390708 NR Description: GDSL-motif lipase/hydrolase protein [Arabidopsis
  misc_feature (1)..(213): Homolog of NCBI NO: 21536954 NR Description: GDSL-motif lipase/hydrolase-like protein
  misc_feature (1)..(213): Homolog of NCBI NO: 15237351 NR Description: GDSL-motif lipase/hydrolase protein [Arabidopsis
MLGKKRTEYHINNALFFISAGTNDYVINYFSLPIRRKTYTTPLTYGHFLLQHIKDFIQNLWKEGARKIALVGVPPMGCLPIMITLNSHNVFLERGCVDKYSAVARDHNMMLQQELFLMQLNFSNNNPASAKISYLDIYGPLDDMIQAHQNLGFDAVDRGCCGSGYIEATFLCNGVSYVCSDPSKFVFWDSIHPTEKAYYDLFMAARPKIDALING

SEQ ID NO: 54282 - DNA, 1478 bp, Glycine max
  misc_feature (1)..(1478): Ceres Seq. ID no. 14307813
gattgattttacttccttatcctctcttcttcttcttctcccgctcgcgccttctgtctcaatctcaatccaccagaaatggcaacaatagttagccaccaccaccgcctattctccgccgccacgcgcttcaattccactggcagagactcgcggcggcaaaggagcggcgcaaactcggtccggtgcgctgacgtaagcacggtcacgagcgagaatcagcgagtgacggtgagtaacaggagcgattcgctggagatatgccgcgtgctgaacggaatgtggcagaccagcggcggatggggccgaatcgaccgagacgacgccgtcgaggctatgcttcgctacgccgacgccggcctaactaccttcgacatggccgatcactatggacctgctgaagatctatatgggattttcattaatcgagttcgtcgagagcgtcctgctgaattgttggaacaggtcagaggtctcactaagtgggttcctccgccagttaagatgactagtagctatgtaagagacagcatcaatgtttcaaggaagagaatggatgtggaatccttggacatgcttcagtttcattggtgggattactcgaatccaggctacctggatgcactaaaacacctaacagatttgaaagaagaaggtaaaatcaagactgtggctctgacaaattttgatacggagagattacaaattattcttgaaaatgaggttcctgttgtaagcaatcaggtgcaacattcccttgttgatatgcgtccccaacagagaatggcagagctttgtcagcatacaggagtcaaacttataacgtatggaacagtaatgggtggtctgttgtctgagaagttccttgacaccaacatagctattccttttgctggtcctgcaataaacactccctccctccaaaagtacaaaaggatggtagatgcttggggaggatggagtttgttccagggactgcttcggactcttaaacaagtagcttctaaacatggcgtatcgatcgcaactgttgctgtgaagtatatactagatcagcctgcagtagcaggatcaatggttggtgtcagacttggcttggcagaacatattcaagataccaatgctatcttttcacttgttctcgatgaagatgacgtgaacagcataagagaagccacagcgaaaggaaaggatctgcttaaagtgattggtgattgtggagatgagtacaggcgtgcatgagtcatgttggcttatcaacctggtgaagtgctttaatttatataggacaaggggatggaaaaaaagggagggggacacaggaaaagtgttcaagctcaattttttgtcagttgaagaatttgtgtgtaatacttttatggattacccagtaatgatcaaaagacaaaatagatgaaaggaggaagtaatgtattctgtagtatatatcttgtgagatttatgcaaactttcctcac

SEQ ID NO: 54283 - protein, 387 aa, Glycine max
  peptide (1)..(387): Ceres Seq. ID no. 14307814
  misc_feature (94)..(365): Homolog of NCBI NO: 30262030 NR Description: oxidoreductase, aldo/keto reductase family
  misc_feature (52)..(337): Homolog of NCBI NO: 32477283 NR Description: probable oxidoreductase [Pirellula sp.]
  misc_feature (69)..(371): Homolog of NCBI NO: 17228720 NR Description: hypothetical protein [Nostoc sp. PCC 7120]
  misc_feature (69)..(363): Homolog of NCBI NO: 23125728 NR Description: hypothetical protein [Nostoc punctiforme]
  misc_feature (56)..(337): Homolog of NCBI NO: 23126608 NR Description: hypothetical protein [Nostoc punctiforme]
  misc_feature (59)..(385): Homolog of NCBI NO: 40741502 NR Description: hypothetical protein AN8658.2 [Aspergillus
  misc_feature (61)..(384): Homolog of NCBI NO: 13475981 NR Description: hypothetical protein [Mesorhizobium loti]
  misc_feature (59)..(386): Homolog of NCBI NO: 23123814 NR Description: hypothetical protein [Nostoc punctiforme]
  misc_feature (76)..(386): Homolog of NCBI NO: 11762116 NR Description: At2g27680 [Arabidopsis thaliana]
  misc_feature (15)..(386): Homolog of NCBI NO: 18401495 NR Description: aldo/keto reductase family [Arabidopsis thaliana]
MATIVSHHHRLFSAATRFNSTGRDSRRQRSGANSVRCADVSTVTSENQRVTVSNRSDSLEICRVLNGMWQTSGGWGRIDRDDAVEAMLRYADAGLTTFDMADHYGPAEDLYGIFINRVRRERPAELLEQVRGLTKWVPPPVKMTSSYVRDSINVSRKRMDVESLDMLQFHWWDYSNPGYLDALKHLTDLKEEGKIKTVALTNFDTERLQIILENEVPVVSNQVQHSLVDMRPQQRMAELCQHTGVKLITYGTVMGGLLSEKFLDTNIAIPFAGPAINTPSLQKYKRMVDAWGGWSLFQGLLRTLKQVASKHGVSIATVAVKYILDQPAVAGSMVGVRLGLAEHIQDTNAIFSLVLDEDDVNSIREATAKGKDLLKVIGDCGDEYRRA

SEQ ID NO: 54284 - protein, 320 aa, Glycine max
  peptide (1)..(320): Ceres Seq. ID no. 14307815
  misc_feature (27)..(298): Homolog of NCBI NO: 30262030 NR Description: oxidoreductase, aldo/keto reductase family
  misc_feature (1)..(270): Homolog of NCBI NO: 32477283 NR Description: probable oxidoreductase [Pirellula sp.]
  misc_feature (2)..(304): Homolog of NCBI NO: 17228720 NR Description: hypothetical protein [Nostoc sp. PCC 7120]
  misc_feature (2)..(296): Homolog of NCBI NO: 23125728 NR Description: hypothetical protein [Nostoc punctiforme]
  misc_feature (1)..(270): Homolog of NCBI NO: 23126608 NR Description: hypothetical protein [Nostoc punctiforme]
  misc_feature (1)..(318): Homolog of NCBI NO: 40741502 NR Description: hypothetical protein AN8658.2 [Aspergillus
  misc_feature (1)..(317): Homolog of NCBI NO: 13475981 NR Description: hypothetical protein [Mesorhizobium loti]
  misc_feature (1)..(319): Homolog of NCBI NO: 23123814 NR Description: hypothetical protein [Nostoc punctiforme]
  misc_feature (9)..(319): Homolog of NCBI NO: 11762116 NR Description: At2g27680 [Arabidopsis thaliana]
  misc_feature (1)..(319): Homolog of NCBI NO: 18401495 NR Description: aldo/keto reductase family [Arabidopsis thaliana]
MWQTSGGWGRIDRDDAVEAMLRYADAGLTTFDMADHYGPAEDLYGIFINRVRRERPAELLEQVRGLTKWVPPPVKMTSSYVRDSINVSRKRMDVESLDMLQFHWWDYSNPGYLDALKHLTDLKEEGKIKTVALTNFDTERLQIILENEVPVVSNQVQHSLVDMRPQQRMAELCQHTGVKLITYGTVMGGLLSEKFLDTNIAIPFAGPAINTPSLQKYKRMVDAWGGWSLFQGLLRTLKQVASKHGVSIATVAVKYILDQPAVAGSMVGVRLGLAEHIQDTNAIFSLVLDEDDVNSIREATAKGKDLLKVIGDCGDEYRRA

SEQ ID NO: 54285 - protein, 301 aa, Glycine max
  peptide (1)..(301): Ceres Seq. ID no. 14307816
  misc_feature (8)..(279): Homolog of NCBI NO: 30262030 NR Description: oxidoreductase, aldo/keto reductase family
  misc_feature (1)..(251): Homolog of NCBI NO: 32477283 NR Description: probable oxidoreductase [Pirellula sp.]
  misc_feature (1)..(285): Homolog of NCBI NO: 17228720 NR Description: hypothetical protein [Nostoc sp. PCC 7120]
  misc_feature (1)..(277): Homolog of NCBI NO: 23125728 NR Description: hypothetical protein [Nostoc punctiforme]
  misc_feature (1)..(251): Homolog of NCBI NO: 23126608 NR Description: hypothetical protein [Nostoc punctiforme]
  misc_feature (1)..(299): Homolog of NCBI NO: 40741502 NR Description: hypothetical protein AN8658.2 [Aspergillus
  misc_feature (1)..(298): Homolog of NCBI NO: 13475981 NR Description: hypothetical protein [Mesorhizobium loti]
  misc_feature (1)..(300): Homolog of NCBI NO: 23123814 NR Description: hypothetical protein [Nostoc punctiforme]
  misc_feature (1)..(300): Homolog of NCBI NO: 11762116 NR Description: At2g27680 [Arabidopsis thaliana]
  misc_feature (1)..(300): Homolog of NCBI NO: 18401495 NR Description: aldo/keto reductase family [Arabidopsis thaliana]
MLRYADAGLTTFDMADHYGPAEDLYGIFINRVRRERPAELLEQVRGLTKWVPPPVKMTSSYVRDSINVSRKRMDVESLDMLQFHWWDYSNPGYLDALKHLTDLKEEGKIKTVALTNFDTERLQIILENEVPVVSNQVQHSLVDMRPQQRMAELCQHTGVKLITYGTVMGGLLSEKFLDTNIAIPFAGPAINTPSLQKYKRMVDAWGGWSLFQGLLRTLKQVASKHGVSIATVAVKYILDQPAVAGSMVGVRLGLAEHIQDTNAIFSLVLDEDDVNSIREATAKGKDLLKVIGDCGDEYRRA

SEQ ID NO: 54286 - DNA, 1265 bp, Glycine max
  misc_feature (1)..(1265): Ceres Seq. ID no. 14303939
actagaaatgctgctttcttcttcttcttctcgcggttatcttcactaacaacttctctctctctctccgtctgtgcattttccattgttgaagaaggagaaaggtcttgaggtgtggggtcggtgatggacggtggagtgaactacaaccctcgcactgtggaagaggttttccgggacttcaagggtcgtagagccggcatgatcaaggctctcaccactgatgttgaagaatttttccagcagtgcgatcctgaaaaggataacctttgtttatacgggttccctaatgagcaatgggaagttaatttacctgcggaagaagttcctccggagcttcctgagcctgcattgggcataaactttgctagggatgggatgcaggataaggactggctgtctttggttgccgttcacagtgatgcatggttacttgcagtggctttctactttggggcacgatttggttttgataaagctgacaggaaacgcctgttcactatgattaatgatttaccaacaatattcgagattgtgactggaagtgcaaaaaaacagactaaggaaaagtcatccatttcaaaccactccagcaacaaatcaaaatctggttcaaaagggcgaggatctgaatcagggaagtattcaaagcaaacaaaggacgaggaggaagaggtaccggatgaagaagatgacgaggagcatggggaaactttgtgtggggcatgtggagagaactatgcgtctgatgagttctggatttgttgtgacatatgtgagaagtggttccatggcaagtgtgtgaagatcactccagccagagccgagcacatcaagcagtataagtgcccctcatgcagcaataagagagcacggccttgatatagttgagagtgggacagttctcaccccttgtaactaaatcatgttggacttctaacttgttagtggcttaggattcctgtgccatgccatgatgggcatatgtattcagtactttgggtcttgtgaacttcttagtggatatatttttttttaatatttatagtttgcaggttctggatatgtctccaatcttcatcctgactggtatacttatatttgtagcatatgatagtgcacgtgtgcacacatacatgtatgtttgaacatatgtcgtatttgctagcatgacgcattggattgatcagatttatggtctacccaatgtagcagtgtggcatctgtgttagctttggaagaacggcagagttggcttaaggtgt

SEQ ID NO: 54287 - protein, 251 aa, Glycine max
  peptide (1)..(251): Ceres Seq. ID no. 14303940
  misc_feature (198)..(247): Pfam Name: PHD-finger Pfam Description: PHD-finger
  misc_feature (1)..(250): Homolog of NCBI NO: 34900462 NR Description: putative nucleic acid binding protein
  misc_feature (1)..(250): Homolog of NCBI NO: 38344539 NR Description: OSJNBa0027P08.7 [Oryza sativa (japonica
  misc_feature (1)..(250): Homolog of NCBI NO: 7488751 NR Description: probable zinc finger protein - alfalfa (fragment)
  misc_feature (1)..(250): Homolog of NCBI NO: 34907474 NR Description: nucleic acid binding protein
  misc_feature (7)..(245): Homolog of NCBI NO: 34394182 NR Description: putative nucleic acid binding protein
  misc_feature (7)..(245): Homolog of NCBI NO: 14192880 NR Description: Putative nucleic acid binding protein [Oryza
  misc_feature (1)..(250): Homolog of NCBI NO: 7486722 NR Description: hypothetical protein F9D12.13 - Arabidopsis
  misc_feature (1)..(250): Homolog of NCBI NO: 15229157 NR Description: nucleic acid binding protein-related [Arabidopsis
  misc_feature (1)..(251): Homolog of NCBI NO: 30687843 NR Description: zinc finger protein - like [Arabidopsis thaliana]
  misc_feature (1)..(250): Homolog of NCBI NO: 15239624 NR Description: nucleic acid binding protein - like [Arabidopsis
MDGGVNYNPRTVEEVFRDFKGRRAGMIKALTTDVEEFFQQCDPEKDNLCLYGFPNEQWEVNLPAEEVPPELPEPALGINFARDGMQDKDWLSLVAVHSDAWLLAVAFYFGARFGFDKADRKRLFTMINDLPTIFEIVTGSAKKQTKEKSSISNHSSNKSKSGSKGRGSESGKYSKQTKDEEEEVPDEEDDEEHGETLCGACGENYASDEFWICCDICEKWFHGKCVKITPARAEHIKQYKCPSCSNKRARP

SEQ ID NO: 54288 - protein, 226 aa, Glycine max
  peptide (1)..(226): Ceres Seq. ID no. 14303941
  misc_feature (173)..(222): Pfam Name: PHD-finger Pfam Description: PHD-finger
  misc_feature (1)..(225): Homolog of NCBI NO: 34900462 NR Description: putative nucleic acid binding protein
  misc_feature (1)..(225): Homolog of NCBI NO: 38344539 NR Description: OSJNBa0027P08.7 [Oryza sativa (japonica
  misc_feature (1)..(225): Homolog of NCBI NO: 7488751 NR Description: probable zinc finger protein - alfalfa (fragment)
  misc_feature (1)..(225): Homolog of NCBI NO: 34907474 NR Description: nucleic acid binding protein
  misc_feature (1)..(220): Homolog of NCBI NO: 34394182 NR Description: putative nucleic acid binding protein
  misc_feature (1)..(220): Homolog of NCBI NO: 14192880 NR Description: Putative nucleic acid binding protein [Oryza
  misc_feature (1)..(225): Homolog of NCBI NO: 7486722 NR Description: hypothetical protein F9D12.13 - Arabidopsis
  misc_feature (1)..(225): Homolog of NCBI NO: 15229157 NR Description: nucleic acid binding protein-related [Arabidopsis
  misc_feature (1)..(226): Homolog of NCBI NO: 30687843 NR Description: zinc finger protein - like [Arabidopsis thaliana]
  misc_feature (1)..(225): Homolog of NCBI NO: 15239624 NR Description: nucleic acid binding protein - like [Arabidopsis
MIKALTTDVEEFFQQCDPEKDNLCLYGFPNEQWEVNLPAEEVPPELPEPALGINFARDGMQDKDWLSLVAVHSDAWLLAVAFYFGARFGFDKADRKRLFTMINDLPTIFEIVTGSAKKQTKEKSSISNHSSNKSKSGSKGRGSESGKYSKQTKDEEEEVPDEEDDEEHGETLCGACGENYASDEFWICCDICEKWFHGKCVKITPARAEHIKQYKCPSCSNKRARP

SEQ ID NO: 54289 - protein, 167 aa, Glycine max
  peptide (1)..(167): Ceres Seq. ID no. 14303942
  misc_feature (114)..(163): Pfam Name: PHD-finger Pfam Description: PHD-finger
  misc_feature (1)..(166): Homolog of NCBI NO: 34900462 NR Description: putative nucleic acid binding protein
  misc_feature (1)..(166): Homolog of NCBI NO: 38344539 NR Description: OSJNBa0027P08.7 [Oryza sativa (japonica
  misc_feature (1)..(166): Homolog of NCBI NO: 7488751 NR Description: probable zinc finger protein - alfalfa (fragment)
  misc_feature (1)..(166): Homolog of NCBI NO: 34907474 NR Description: nucleic acid binding protein
  misc_feature (1)..(161): Homolog of NCBI NO: 34394182 NR Description: putative nucleic acid binding protein
  misc_feature (1)..(161): Homolog of NCBI NO: 14192880 NR Description: Putative nucleic acid binding protein [Oryza
  misc_feature (1)..(166): Homolog of NCBI NO: 7486722 NR Description: hypothetical protein F9D12.13 - Arabidopsis
  misc_feature (1)..(166): Homolog of NCBI NO: 15229157 NR Description: nucleic acid binding protein-related [Arabidopsis
  misc_feature (1)..(167): Homolog of NCBI NO: 30687843 NR Description: zinc finger protein - like [Arabidopsis thaliana]
  misc_feature (1)..(166): Homolog of NCBI NO: 15239624 NR Description: nucleic acid binding protein - like [Arabidopsis
MQDKDWLSLVAVHSDAWLLAVAFYFGARFGFDKADRKRLFTMINDLPTIFEIVTGSAKKQTKEKSSISNHSSNKSKSGSKGRGSESGKYSKQTKDEEEEVPDEEDDEEHGETLCGACGENYASDEFWICCDICEKWFHGKCVKITPARAEHIKQYKCPSCSNKRARP

SEQ ID NO: 54290 - DNA, 1137 bp, Glycine max
  misc_feature (1)..(1137): Ceres Seq. ID no. 14310890
aaatttatttttaaatataattttacaataattttttttaaggtatattagtactaaaaaaaatttgggatcttttttttttgaacctaaagccgttgtttgggccttaagccagcctgtcgctgaacatataagctattaacgaatgtcacacaataataatagagatcaaaaataaaattttaactttttgcgggatgaaaattacaagtaaaattataaggaaaaaaaaatcaaaattactaattttatagaaattaaaaatatatttaagtcaaattataaagatacacccacttttattacaatctcaaagcttttttacctaagaatataatgtcaaagaagatgaattcataattaatttgtaaactacagattaagtcgtcaccgtgtacgtgttttggtaaaattagcatgtactttatcacatttgtatgtttctatttgttgtattgttttgcagtgttagaggaacgatcgataggtacaagaaagcatgtgctgcctccacaaatccagaatctgtctctgaagctaatacacagttttatcagcaggaagcgtccaaattaaaacgacaaatcagagacattcagaatctaaacaggcacatccttggtgaagctcttagctctctgagtctgaaggaattaaagaacctggagagtagactggagaaaggtttaagcagagttagatccagaaagcatgaaactttgtttgccgatatcgagttcatgcaaaagcgggaaatagagctgcaaaaccataataattttctgagagctaagatagctgaacacgagaaagcacaacaacggcaacaggatatgataccgggaaatgtgtgcgagtcaaccatacctccacaatcatatgaccgcaatttcttccctgttaatctcatagattccaataatcaatattcaaatcaagaccagactgctcttcaacttgtcctttcaagtggtgtgggatcccttacatcgtcctatgtttcgtgaaggagagtgcccttagaaactcctctgctaaagttcttacaacggagaacaagagaaaaactaatcagcatttgtaccaatacatcatttgatattgtttatgtatctttcaatatatatagtttctatt

SEQ ID NO: 54291 - protein, 189 aa, Glycine max
  peptide (1)..(189): Ceres Seq. ID no. 14310891
  misc_feature (21)..(122): Pfam Name: K-box region Pfam Description: K-box region
  misc_feature (10)..(175): Homolog of NCBI NO: 15231135 NR Description: MADS-box protein [Arabidopsis thaliana]
  misc_feature (10)..(175): Homolog of NCBI NO: 30689162 NR Description: floral homeodomain transcription factor (AGL5)
  misc_feature (10)..(175): Homolog of NCBI NO: 28392912 NR Description: putative floral homeodomain transcription factor
  misc_feature (10)..(174): Homolog of NCBI NO: 25307910 NR Description: floral homeodomain transcription factor (AGL5)
  misc_feature (10)..(175): Homolog of NCBI NO: 18406070 NR Description: floral homeodomain transcription factor (AGL5)
  misc_feature (10)..(175): Homolog of NCBI NO: 5031217 NR Description: AGAMOUS homolog [Liquidambar styraciflua]
  misc_feature (10)..(175): Homolog of NCBI NO: 6970411 NR Description: MADS-box protein [Rosa rugosa]
  misc_feature (10)..(175): Homolog of NCBI NO: 33308109 NR Description: AGAMOUS-like protein [Malus x domestica]
  misc_feature (10)..(175): Homolog of NCBI NO: 14279306 NR Description: MAD-box transcripion factor [Vitis vinifera]
  misc_feature (10)..(175): Homolog of NCBI NO: 16973296 NR Description: C-type MADS box protein [Malus x domestica]
MFLFVVLFCSVRGTIDRYKKACAASTNPESVSEANTQFYQQEASKLKRQIRDIQNLNRHILGEALSSLSLKELKNLESRLEKGLSRVRSRKHETLFADIEFMQKREIELQNHNNFLRAKIAEHEKAQQRQQDMIPGNVCESTIPPQSYDRNFFPVNLIDSNNQYSNQDQTALQLVLSSGVGSLTSSYVS

SEQ ID NO: 54292 - DNA, 726 bp, Glycine max
  misc_feature (1)..(726): Ceres Seq. ID no. 15174662
gaaagtgctgcagatttgtgcgttaagaaagaaagaaaaaaaaaaaaagtcatggcagcgagtgacggttgcagcagcttcttaacattgtcgtgtgcaggtgcagtgcaaaatcaacatgtatcacaccctacaacgtttttgggagttcctaaaaacaatcagagaaaaaggaaaacaccgcacaggttagttgtggttgcggtgactcaaggctctgctgaatcaagcaagtccgatgaaaaaatcccttcgtgggccaaaccggactccgatgaacctccgccgtgggcccgggacgagcccaacaacaacagttcgcaacaagaaggatttgagatcccgttctatgcttatttgtttgcctctgctatcactgctattgccgctataggctccattttcgaatatgtgaatcaaaagcctgttttcggagtattaagctctgacagcgtgttttatgctcccttgcttggtttttttgtcttcaccggcattccctcatcggcttttctgtggttcaagtccgttcaagctgctaacaaggaagcggaggaacaagataagagggatggctatttgtagggtgtgagtggttctgagttgaacacgcttcctttgttttattgatgtaagttatatgagtaaattgcacataatgcctattgtatgtcacactttaaatttaatgtgaatattcatgctttgtatgaaatcagagattag

SEQ ID NO: 54293 - protein, 194 aa, Glycine max
  peptide (1)..(194): Ceres Seq. ID no. 15174663
  misc_feature (57)..(194): Homolog of NCBI NO: 15230505 NR Description: expressed protein [Arabidopsis thaliana]
ESAADLCVKKERKKKKVMAASDGCSSFLTLSCAGAVQNQHVSHPTTFLGVPKNNQRKRKTPHRLVVVAVTQGSAESSKSDEKIPSWAKPDSDEPPPWARDEPNNNSSQQEGFEIPFYAYLFASAITAIAAIGSIFEYVNQKPVFGVLSSDSVFYAPLLGFFVFTGIPSSAFLWFKSVQAANKEAEEQDKRDGYL

SEQ ID NO: 54294 - protein, 177 aa, Glycine max
  peptide (1)..(177): Ceres Seq. ID no. 15174664
  misc_feature (40)..(177): Homolog of NCBI NO: 15230505 NR Description: expressed protein [Arabidopsis thaliana]
MAASDGCSSFLTLSCAGAVQNQHVSHPTTFLGVPKNNQRKRKTPHRLVVVAVTQGSAESSKSDEKIPSWAKPDSDEPPPWARDEPNNNSSQQEGFEIPFYAYLFASAITAIAAIGSIFEYVNQKPVFGVLSSDSVFYAPLLGFFVFTGIPSSAFLWFKSVQAANKEAEEQDKRDGYL

SEQ ID NO: 54295 - DNA, 1308 bp, Glycine max
  misc_feature (1)..(1308): Ceres Seq. ID no. 15176465
atagggctggaccccacaaaacagtttttagttcacatagcaactggagcagaagttgaaaaagatcttcgaattcagaagagcatgctccctgcagttggccagatagaaataagagctgatctaatggacgcccacttgtatgcattcaaaagatcagttctacaagaagttctagatcagaagagtgcatttcatagcttaaagcatgatgtattgccatatctagtccggagccaactgaagtattattaaatggtatgccacaagcagaagaaaacggaactgaaaaggttatttctcaaagcaatcaacaaatgctatctcaaatactcgctaatgcatctgaaccaatctttcatctacgaaatgcactgggtcctcatggttctacttctgatcgaagaacccacaaatgttgtgtgtatattgctggaagcagcaagtactgtgctcgcttaaattctatacaagcatacagtgacataaaccgagatgtgacaggagaggctagtcacttatcagggtattccttctctgctcaaaacaacattatccatccttctgcagagcttggggcaaaaacaactgttggaccacattgtatactgggggaaggttcacagatgggtgacaaatgcagtgtgaaacgatctgtcattggccgtcattgtcggataggtcccaatgttaaggttgtcaattcagtagttatgaatcatgttactattggagaatcttgttcaatccaaggttctattatctccagcaatgtacagctccaagaacgtgccatcctaaaagattgccaagttggagcaggttttgtggtcactgctggtagtgagtgcaagggggaggtcttggctaagaaatgaatctggaatgtgaaaatggaggctggggaaatacatagcaaaatgacttctattctgcttgatcattgcttggagcaaattttgtgctttttgctgtcagcagttacaatttggtgatgttagcagaaggagcaactaagaaattctaatacttccaatttatatgcatgccctttgcagtttcttgcaatttgtttgaaaatggctgcaatcggtgttgaatattcatttgtgtaaatgactaccaattgcttccctttcatcacaattttctgccatatgttacaagggactttcggttggtatcttgctgctgtgctaaagcggtataatccagcgccatcagttttgtattcgagcaaatgtagtactattggcgtatctcgtttgggctttttgtttgagatctagtgataataatgtttacttg

SEQ ID NO: 54296 - protein, 205 aa, Glycine max
  peptide (1)..(205): Ceres Seq. ID no. 15176466
  misc_feature (66)..(195): Homolog of NCBI NO: 11559596 NR Description: eukaryotic initiation factor eIF2B gamma subunit
  misc_feature (52)..(159): Homolog of NCBI NO: 21739873 NR Description: hypothetical protein [Homo sapiens]
  misc_feature (52)..(159): Homolog of NCBI NO: 17511746 NR Description: Similar to eukaryotic translation initiation
  misc_feature (52)..(202): Homolog of NCBI NO: 10433787 NR Description: unnamed protein product [Homo sapiens]
  misc_feature (57)..(202): Homolog of NCBI NO: 19115874 NR Description: translation initiation factor eif-2b gamma
  misc_feature (1)..(202): Homolog of NCBI NO: 30354582 NR Description: Similar to eukaryotic translation initiation
  misc_feature (52)..(202): Homolog of NCBI NO: 10436247 NR Description: unnamed protein product [Homo sapiens]
  misc_feature (52)..(202): Homolog of NCBI NO: 9966779 NR Description: eukaryotic translation initiation factor 2B,
  misc_feature (52)..(202): Homolog of NCBI NO: 19424322 NR Description: eukaryotic translation initiation factor 2B,
  misc_feature (52)..(202): Homolog of NCBI NO: 27370998 NR Description: Similar to eukaryotic translation initiation
MPQAEENGTEKVISQSNQQMLSQILANASEPIFHLRNALGPHGSTSDRRTHKCCVYIAGSSKYCARLNSIQAYSDINRDVTGEASHLSGYSFSAQNNIIHPSAELGAKTTVGPHCILGEGSQMGDKCSVKRSVIGRHCRIGPNVKVVNSVVMNHVTIGESCSIQGSIISSNVQLQERAILKDCQVGAGFVVTAGSECKGEVLAKK

SEQ ID NO: 54297 - protein, 186 aa, Glycine max
  peptide (1)..(186): Ceres Seq. ID no. 15176467
  misc_feature (47)..(176): Homolog of NCBI NO: 11559596 NR Description: eukaryotic initiation factor eIF2B gamma subunit
  misc_feature (33)..(140): Homolog of NCBI NO: 21739873 NR Description: hypothetical protein [Homo sapiens]
  misc_feature (33)..(140): Homolog of NCBI NO: 17511746 NR Description: Similar to eukaryotic translation initiation
  misc_feature (33)..(183): Homolog of NCBI NO: 10433787 NR Description: unnamed protein product [Homo sapiens]
  misc_feature (38)..(183): Homolog of NCBI NO: 19115874 NR Description: translation initiation factor eif-2b gamma
  misc_feature (1)..(183): Homolog of NCBI NO: 30354582 NR Description: Similar to eukaryotic translation initiation
  misc_feature (33)..(183): Homolog of NCBI NO: 10436247 NR Description: unnamed protein product [Homo sapiens]
  misc_feature (33)..(183): Homolog of NCBI NO: 9966779 NR Description: eukaryotic translation initiation factor 2B,
  misc_feature (33)..(183): Homolog of NCBI NO: 19424322 NR Description: eukaryotic translation initiation factor 2B,
  misc_feature (33)..(183): Homolog of NCBI NO: 27370998 NR Description: Similar to eukaryotic translation initiation
MLSQILANASEPIFHLRNALGPHGSTSDRRTHKCCVYIAGSSKYCARLNSIQAYSDINRDVTGEASHLSGYSFSAQNNIIHPSAELGAKTTVGPHCILGEGSQMGDKCSVKRSVIGRHCRIGPNVKVVNSVVMNHVTIGESCSIQGSIISSNVQLQERAILKDCQVGAGFVVTAGSECKGEVLAKK

SEQ ID NO: 54298 - DNA, 1246 bp, Glycine max
  misc_feature (1)..(1246): Ceres Seq. ID no. 14307265
ttctctgttctctctcatctcatcggatcgatcaagcatcagggagctttgagggttgattctctggtgtagtagcaatcagcacaatagaaaatgttttttgacggatatggatatcatgggacatcatttgagcagatatatcgatgctacccagcttcctttattgaaaagccccaaatcgaaagtggtgacaaaattatcatgcctccatcagcccttgaccgtctagcatctctgcatattgattacccaatgttgtttgaactccgtaatgatgctgccgagcgggtttctcattgtggggttctggagttcattgctgaggaaggcatgatatacatgccatactggatgatggagaacatgcttttacaagagggggacattgtcaaagtgaaaaatgtgacacttccaaaggggacatatgttaagttacagccccacacaaaagactttttggatatttccaatccaaaagctatcttagaaacaacattgaggaatttttcctgcttgactactggagatagcattatggtggcttacaacaacaagaaatattacatagatattatagaaactaagcctgacactgccataagcataattgagactgactgtgaggtggactttgctcctcccttggattacaaggaacctgaaaaacccactgcacccctttctgctgggaaggcagcagtggctgctgaggtgatccctgctgaagatgagcccaagttcaacccattttctggaactgggagacgcttggatggaaaacctttgaattatcagcctcctccagtttcctcttcagggtctaaggaccagaaacctgatgttgtcaatttgcagtcttctacagcttctagttcacaaagtaatgctcgtcaatctcagggcaagcttgtgtttgggtcaaatgctaaccgtactaaagagacaggaaaggcgaaagagtcaaaaccagagccacctaaagagaaagaagagccgaaatttcaacctttttcagggaagaagtattctttacggggttaaattaaaatggccttttacttttaaagcaagttactttgttgatctatgcatggatcgatgtctattgcaaaaacttttatttatttattgtattataagcagtagatagaccagtagatgccacagaaaatacctttgattacttgtgaacgaagctcttgacgagggttgcaatcgtgtctgaatggtaacatgctgtgtg

SEQ ID NO: 54299 - protein, 316 aa, Glycine max
  peptide (1)..(316): Ceres Seq. ID no. 14307266
  misc_feature (10)..(184): Pfam Name: Ubiquitin fusion degradation protein UFD1 Pfam Description: Ubiquitin fusion degradation protein UFD1
  misc_feature (13)..(238): Homolog of NCBI NO: 20891983 NR Description: ubiquitin fusion degradation 1 like [Mus
  misc_feature (13)..(238): Homolog of NCBI NO: 16758158 NR Description: ubiquitin fusion degradation 1-like [Rattus
  misc_feature (38)..(316): Homolog of NCBI NO: 30684115 NR Description: ubiquitin fusion degradation (UFD) protein,
  misc_feature (32)..(316): Homolog of NCBI NO: 7488408 NR Description: probable ubiquitin fusion-degradation protein
  misc_feature (1)..(315): Homolog of NCBI NO: 38345534 NR Description: OSJNBa0020J04.9 [Oryza sativa (japonica
  misc_feature (1)..(316): Homolog of NCBI NO: 18420341 NR Description: ubiquitin fusion degradation protein UFD1 family
  misc_feature (1)..(316): Homolog of NCBI NO: 7488221 NR Description: probable ubiquitin-dependent proteolytic protein
  misc_feature (2)..(316): Homolog of NCBI NO: 25347017 NR Description: probable ubiquitin fusion-degradation protein
  misc_feature (1)..(316): Homolog of NCBI NO: 18399646 NR Description: ubiquitin fusion degradation (UFD) protein,
  misc_feature (1)..(316): Homolog of NCBI NO: 21592947 NR Description: putative ubiquitin fusion-degradation protein
MFFDGYGYHGTSFEQIYRCYPASFIEKPQIESGDKIIMPPSALDRLASLHIDYPMLFELRNDAAERVSHCGVLEFIAEEGMIYMPYWMMENMLLQEGDIVKVKNVTLPKGTYVKLQPHTKDFLDISNPKAILETTLRNFSCLTTGDSIMVAYNNKKYYIDIIETKPDTAISIIETDCEVDFAPPLDYKEPEKPTAPLSAGKAAVAAEVIPAEDEPKFNPFSGTGRRLDGKPLNYQPPPVSSSGSKDQKPDVVNLQSSTASSSQSNARQSQGKLVFGSNANRTKETGKAKESKPEPPKEKEEPKFQPFSGKKYSLRG

SEQ ID NO: 54300 - protein, 279 aa, Glycine max
  peptide (1)..(279): Ceres Seq. ID no. 14307267
  misc_feature (1)..(147): Pfam Name: Ubiquitin fusion degradation protein UFD1 Pfam Description: Ubiquitin fusion degradation protein UFD1
  misc_feature (1)..(201): Homolog of NCBI NO: 20891983 NR Description: ubiquitin fusion degradation 1 like [Mus
  misc_feature (1)..(201): Homolog of NCBI NO: 16758158 NR Description: ubiquitin fusion degradation 1-like [Rattus
  misc_feature (1)..(279): Homolog of NCBI NO: 30684115 NR Description: ubiquitin fusion degradation (UFD) protein,
  misc_feature (1)..(279): Homolog of NCBI NO: 7488408 NR Description: probable ubiquitin fusion-degradation protein
  misc_feature (1)..(278): Homolog of NCBI NO: 38345534 NR Description: OSJNBa0020J04.9 [Oryza sativa (japonica
  misc_feature (1)..(279): Homolog of NCBI NO: 18420341 NR Description: ubiquitin fusion degradation protein UFD1 family
  misc_feature (1)..(279): Homolog of NCBI NO: 7488221 NR Description: probable ubiquitin-dependent proteolytic protein
  misc_feature (1)..(279): Homolog of NCBI NO: 25347017 NR Description: probable ubiquitin fusion-degradation protein
  misc_feature (1)..(279): Homolog of NCBI NO: 18399646 NR Description: ubiquitin fusion degradation (UFD) protein,
  misc_feature (1)..(279): Homolog of NCBI NO: 21592947 NR Description: putative ubiquitin fusion-degradation protein
MPPSALDRLASLHIDYPMLFELRNDAAERVSHCGVLEFIAEEGMIYMPYWMMENMLLQEGDIVKVKNVTLPKGTYVKLQPHTKDFLDISNPKAILETTLRNFSCLTTGDSIMVAYNNKKYYIDIIETKPDTAISIIETDCEVDFAPPLDYKEPEKPTAPLSAGKAAVAAEVIPAEDEPKFNPFSGTGRRLDGKPLNYQPPPVSSSGSKDQKPDVVNLQSSTASSSQSNARQSQGKLVFGSNANRTKETGKAKESKPEPPKEKEEPKFQPFSGKKYSLRG

SEQ ID NO: 54301 - protein, 262 aa, Glycine max
  peptide (1)..(262): Ceres Seq. ID no. 14307268
  misc_feature (1)..(130): Pfam Name: Ubiquitin fusion degradation protein UFD1 Pfam Description: Ubiquitin fusion degradation protein UFD1
  misc_feature (1)..(184): Homolog of NCBI NO: 20891983 NR Description: ubiquitin fusion degradation 1 like [Mus
  misc_feature (1)..(184): Homolog of NCBI NO: 16758158 NR Description: ubiquitin fusion degradation 1-like [Rattus
  misc_feature (1)..(262): Homolog of NCBI NO: 30684115 NR Description: ubiquitin fusion degradation (UFD) protein,
  misc_feature (1)..(262): Homolog of NCBI NO: 7488408 NR Description: probable ubiquitin fusion-degradation protein
  misc_feature (1)..(261): Homolog of NCBI NO: 38345534 NR Description: OSJNBa0020J04.9 [Oryza sativa (japonica
  misc_feature (1)..(262): Homolog of NCBI NO: 18420341 NR Description: ubiquitin fusion degradation protein UFD1 family
  misc_feature (1)..(262): Homolog of NCBI NO: 7488221 NR Description: probable ubiquitin-dependent proteolytic protein
  misc_feature (1)..(262): Homolog of NCBI NO: 25347017 NR Description: probable ubiquitin fusion-degradation protein
  misc_feature (1)..(262): Homolog of NCBI NO: 18399646 NR Description: ubiquitin fusion degradation (UFD) protein,
  misc_feature (1)..(262): Homolog of NCBI NO: 21592947 NR Description: putative ubiquitin fusion-degradation protein
MLFELRNDAAERVSHCGVLEFIAEEGMIYMPYWMMENMLLQEGDIVKVKNVTLPKGTYVKLQPHTKDFLDISNPKAILETTLRNFSCLTTGDSIMVAYNNKKYYIDIIETKPDTAISIIETDCEVDFAPPLDYKEPEKPTAPLSAGKAAVAAEVIPAEDEPKFNPFSGTGRRLDGKPLNYQPPPVSSSGSKDQKPDVVNLQSSTASSSQSNARQSQGKLVFGSNANRTKETGKAKESKPEPPKEKEEPKFQPFSGKKYSLRG

SEQ ID NO: 54302 - DNA, 1382 bp, Glycine max
  misc_feature (1)..(1382): Ceres Seq. ID no. 14307273
gggtgatcttttggagttgtaggagcccttacaccttgcagagtcatctcaacattcccaagggctcctactacgcaataacgccaagctcgatctcaaattaatatatcatttattcctcttaatcaaatattaaataagaaaagatgggagagatgtcaaacttccaattgggtgtgattggtgcactatttctctcggttgcttcttctgtctccattgtcatctgcaacaaagccttgatgagcaatcttggcttccctttcgccacaacgcttactagttggcatttgatggtcacattttgcacccttcatgcggctcaacgcttgaatctatttgtgtccaaatccgttgacttgaaaacggtcatgctttttggtattctaaatggcatttccattggatttctcaacttgagtcttggctttaattccattggattctaccagatgacaaaacttgcgatcataccattcactgtattattagaaactattttcttaaagaagcagttcagctcgaaaataaaattctctttatccctattacttgtgggagttggcattgcttctatcacagaccttcagctcaattttgtgggaaccattctttcccttctggcaatcataacgacatgtgttggccaaatcctgaccaacacaatacagaagaagcttaacgtctcttccacacagctgctctaccagtctgctccattccaagcagcaattctttttgtttcaggccctcttgtggatcagatgctcaccaagcaaaatgtctttgcctacaaatattctcctgtggtcttggcattcatcatcttgtcttgcttgatagctgtttctgtgaacttcagcacatttctggtcataggcaaaacatctcctgtaacatatcaagtgctaggccacctcaagacatgccttgttctaggatttggctacacattactgcatgaccctttcaccggaaggaacattcttggaatactaattgccgtttttgggatgggtttatactcttatttctgcactgaggagaacaaaaagaaacagttagctagtgatctcccactggcctctcaggtcaaagacaaagatagcttaccacttttggccgggaaaaacgtgggtaatcaaaacgaggaaaatcatgagactaagaaattaagcaaggattctgttatttgaaaggacaggctccatgtctttttaagatttcgtatattttgggtttctttcaatttctaggaaactagtaatgagtgtaaatcaaatttgtttaataagttttctgtaactttaagtcggtgcatttcatttacctaccatatattcattaaactgcaggaggaaattcaaatttcataaaattgc

SEQ ID NO: 54303 - protein, 349 aa, Glycine max
  peptide (1)..(349): Ceres Seq. ID no. 14307274
  misc_feature (162)..(295): Pfam Name: Integral membrane protein DUF6 Pfam Description: Integral membrane protein DUF6
  misc_feature (12)..(325): Homolog of NCBI NO: 18394949 NR Description: transporter-related [Arabidopsis thaliana]
  misc_feature (103)..(329): Homolog of NCBI NO: 25406945 NR Description: hypothetical protein [imported] - Arabidopsis
  misc_feature (8)..(81): Homolog of NCBI NO: 37535412 NR Description: putative
  misc_feature (103)..(327): Homolog of NCBI NO: 37535412 NR Description: putative
  misc_feature (8)..(327): Homolog of NCBI NO: 13384378 NR Description: putative phosphate translocator
  misc_feature (7)..(326): Homolog of NCBI NO: 13699188 NR Description: putative glucose-6-phosphate/phosphate-tranlocat
  misc_feature (1)..(342): Homolog of NCBI NO: 27311731 NR Description: putative integral membrane protein [Arabidopsis
  misc_feature (7)..(336): Homolog of NCBI NO: 34896140 NR Description: P0701D05.25 [Oryza sativa (japonica
  misc_feature (1)..(329): Homolog of NCBI NO: 22329373 NR Description: transporter-related [Arabidopsis thaliana]
  misc_feature (1)..(349): Homolog of NCBI NO: 30683853 NR Description: transporter-related [Arabidopsis thaliana]
MGEMSNFQLGVIGALFLSVASSVSIVICNKALMSNLGFPFATTLTSWHLMVTFCTLHAAQRLNLFVSKSVDLKTVMLFGILNGISIGFLNLSLGFNSIGFYQMTKLAIIPFTVLLETIFLKKQFSSKIKFSLSLLLVGVGIASITDLQLNFVGTILSLLAIITTCVGQILTNTIQKKLNVSSTQLLYQSAPFQAAILFVSGPLVDQMLTKQNVFAYKYSPVVLAFIILSCLIAVSVNFSTFLVIGKTSPVTYQVLGHLKTCLVLGFGYTLLHDPFTGRNILGILIAVFGMGLYSYFCTEENKKKQLASDLPLASQVKDKDSLPLLAGKNVGNQNEENHETKKLSKDSVI

SEQ ID NO: 54304 - protein, 346 aa, Glycine max
  peptide (1)..(346): Ceres Seq. ID no. 14307275
  misc_feature (159)..(292): Pfam Name: Integral membrane protein DUF6 Pfam Description: Integral membrane protein DUF6
  misc_feature (9)..(322): Homolog of NCBI NO: 18394949 NR Description: transporter-related [Arabidopsis thaliana]
  misc_feature (100)..(326): Homolog of NCBI NO: 25406945 NR Description: hypothetical protein [imported] - Arabidopsis
  misc_feature (5)..(78): Homolog of NCBI NO: 37535412 NR Description: putative
  misc_feature (100)..(324): Homolog of NCBI NO: 37535412 NR Description: putative
  misc_feature (5)..(324): Homolog of NCBI NO: 13384378 NR Description: putative phosphate translocator
  misc_feature (4)..(323): Homolog of NCBI NO: 13699188 NR Description: putative glucose-6-phosphate/phosphate-tranlocat
  misc_feature (1)..(339): Homolog of NCBI NO: 27311731 NR Description: putative integral membrane protein [Arabidopsis
  misc_feature (4)..(333): Homolog of NCBI NO: 34896140 NR Description: P0701D05.25 [Oryza sativa (japonica
  misc_feature (1)..(326): Homolog of NCBI NO: 22329373 NR Description: transporter-related [Arabidopsis thaliana]
  misc_feature (1)..(346): Homolog of NCBI NO: 30683853 NR Description: transporter-related [Arabidopsis thaliana]
MSNFQLGVIGALFLSVASSVSIVICNKALMSNLGFPFATTLTSWHLMVTFCTLHAAQRLNLFVSKSVDLKTVMLFGILNGISIGFLNLSLGFNSIGFYQMTKLAIIPFTVLLETIFLKKQFSSKIKFSLSLLLVGVGIASITDLQLNFVGTILSLLAIITTCVGQILTNTIQKKLNVSSTQLLYQSAPFQAAILFVSGPLVDQMLTKQNVFAYKYSPVVLAFIILSCLIAVSVNFSTFLVIGKTSPVTYQVLGHLKTCLVLGFGYTLLHDPFTGRNILGILIAVFGMGLYSYFCTEENKKKQLASDLPLASQVKDKDSLPLLAGKNVGNQNEENHETKKLSKDSVI

SEQ ID NO: 54305 - protein, 317 aa, Glycine max
  peptide (1)..(317): Ceres Seq. ID no. 14307276
  misc_feature (130)..(263): Pfam Name: Integral membrane protein DUF6 Pfam Description: Integral membrane protein DUF6
  misc_feature (1)..(293): Homolog of NCBI NO: 18394949 NR Description: transporter-related [Arabidopsis thaliana]
  misc_feature (71)..(297): Homolog of NCBI NO: 25406945 NR Description: hypothetical protein [imported] - Arabidopsis
  misc_feature (1)..(49): Homolog of NCBI NO: 37535412 NR Description: putative
  misc_feature (71)..(295): Homolog of NCBI NO: 37535412 NR Description: putative
  misc_feature (1)..(295): Homolog of NCBI NO: 13384378 NR Description: putative phosphate translocator
  misc_feature (1)..(294): Homolog of NCBI NO: 13699188 NR Description: putative glucose-6-phosphate/phosphate-tranlocat
  misc_feature (1)..(310): Homolog of NCBI NO: 27311731 NR Description: putative integral membrane protein [Arabidopsis
  misc_feature (1)..(304): Homolog of NCBI NO: 34896140 NR Description: P0701D05.25 [Oryza sativa (japonica
  misc_feature (1)..(297): Homolog of NCBI NO: 22329373 NR Description: transporter-related [Arabidopsis thaliana]
  misc_feature (1)..(317): Homolog of NCBI NO: 30683853 NR Description: transporter-related [Arabidopsis thaliana]
MSNLGFPFATTLTSWHLMVTFCTLHAAQRLNLFVSKSVDLKTVMLFGILNGISIGFLNLSLGFNSIGFYQMTKLAIIPFTVLLETIFLKKQFSSKIKFSLSLLLVGVGIASITDLQLNFVGTILSLLAIITTCVGQILTNTIQKKLNVSSTQLLYQSAPFQAAILFVSGPLVDQMLTKQNVFAYKYSPVVLAFIILSCLIAVSVNFSTFLVIGKTSPVTYQVLGHLKTCLVLGFGYTLLHDPFTGRNILGILIAVFGMGLYSYFCTEENKKKQLASDLPLASQVKDKDSLPLLAGKNVGNQNEENHETKKLSKDSVI

SEQ ID NO: 54306 - DNA, 1813 bp, Glycine max
  misc_feature (1)..(1813): Ceres Seq. ID no. 15171943
caatctttcaattttgttctgtttctggttgatttttctgtgtcaatatatgacacataatcacgcatcgctcaatatgcaccaccagcttaatccttcaagggtcgctagctatctaagtgttgtaaaaaactagctttgtcccaatgtggattatgctgaattatatcctgttggcacccacttggattatcaagctttcataactcaagcattggaagggaataacaagctatagtacactcagaaaaaacgatgagtcccatgaccatgatcacgaccacgatgtttctttagacatgtcaaagttcgatacctgctaaggttgccttgatttctgtgaagattctcgtatatacgtgtttaccctccatattatattaacatttggacagtgattccctgtggctactagttagagtgtgtctggttggtgagatttggcttgtgtgttgagttctgaccaccgattttgatggagctgaaatcgttctcttcttgttctgtgtccacatctgaggttgcccatgttggaagatcctactccactttgatctccagtttcagacacaaagttggagttagattttctacccacttccagtgtcgcagagggttgtttctgacgacttattgtgcctcggataacacttatttgacagataaagcagtcattagttcagttggtcaagataattttgcagcagaaacgagttcccatcgaattaatggaacaaatggctcaatttcaagattctattccacaaatctgaaattacttgatgcctttgatgatgaatatgggggagttgttgttcatccagataggttaccatccaacccatatacctttgcatctgtgttgcgtttgtctctttctcagtggaaaaagatgggaaagaagggaatttggcttaagttgcctttagaccaatctgaccttgttccaattgctgtgaaggaaggcttccaataccaccatgcagagccaggatatgtgatgttaacatactggattcctgaaggacctagcatgcttccagcgaatgcatcacatcaagttggagttgggggatttgtcatcaatgacaacaatgaagtgcttgtagtacaagagaggcattgttctccaacaactcttggtctttggaagataccaactggattcattcttgaggctgaggagatatatacaggagctgtaagagaagtgaaggaggaaactgggatcgatacagagttcgttgaagtcatagcattcaggcatgcacataatgtggcctttgagaagtcagatttgttcttcatctgtattctaagacccctgtcatctaagatcattgttgatgatcttgaaattgcagcagcgaagtggatgcccctggttgactttgtagagcaaccactcatccaagaagactccatgttcaagaaaatcgtagatatcttcattgctcgtctcgggaagcgatattgtggcttgtcaactcatcaagtagtttcaaagtttgatggcatggtgtcttccttatactacaatgtcattgacaatgcggataacaactgtgttggaaaatgaagactcgaacacgcacaactcttcttggcttctcaaatgtcagcaacaagttgaaaactgggctaaccactatactgcagatatccaatcggatatgtaaacattcaaatgacaatttattcctatagttataatgtatataaatatctctgataacaatgttcctgtggaacatgtttgatcatcacagttgttccacatttactaatgattcttgcaaacagaacattaacc

SEQ ID NO: 54307 - protein, 367 aa, Glycine max
  peptide (1)..(367): Ceres Seq. ID no. 15171944
  misc_feature (194)..(324): Pfam Name: NUDIX domain Pfam Description: NUDIX domain
  misc_feature (99)..(237): Homolog of NCBI NO: 15228146 NR Description: MutT/nudix family protein [Arabidopsis thaliana]
  misc_feature (100)..(355): Homolog of NCBI NO: 7486814 NR Description: hypothetical protein M7J2.190 - Arabidopsis
  misc_feature (101)..(363): Homolog of NCBI NO: 9758793 NR Description: MutT domain protein-like [Arabidopsis thaliana]
  misc_feature (100)..(355): Homolog of NCBI NO: 38564312 NR Description: At4g25434 [Arabidopsis thaliana]
  misc_feature (85)..(363): Homolog of NCBI NO: 18422823 NR Description: MutT/nudix family protein [Arabidopsis thaliana]
  misc_feature (85)..(364): Homolog of NCBI NO: 38346172 NR Description: OSJNBa0079A21.19 [Oryza sativa (japonica
  misc_feature (84)..(364): Homolog of NCBI NO: 8809607 NR Description: mutT domain protein-like [Arabidopsis thaliana]
  misc_feature (10)..(364): Homolog of NCBI NO: 21593371 NR Description: mutT domain protein-like [Arabidopsis thaliana]
  misc_feature (10)..(364): Homolog of NCBI NO: 21928133 NR Description: AT5g47240/MQL5_10 [Arabidopsis thaliana]
  misc_feature (10)..(364): Homolog of NCBI NO: 18422772 NR Description: MutT/nudix family protein [Arabidopsis thaliana]
MELKSFSSCSVSTSEVAHVGRSYSTLISSFRHKVGVRFSTHFQCRRGLFLTTYCASDNTYLTDKAVISSVGQDNFAAETSSHRINGTNGSISRFYSTNLKLLDAFDDEYGGVVVHPDRLPSNPYTFASVLRLSLSQWKKMGKKGIWLKLPLDQSDLVPIAVKEGFQYHHAEPGYVMLTYWIPEGPSMLPANASHQVGVGGFVINDNNEVLVVQERHCSPTTLGLWKIPTGFILEAEEIYTGAVREVKEETGIDTEFVEVIAFRHAHNVAFEKSDLFFICILRPLSSKIIVDDLEIAAAKWMPLVDFVEQPLIQEDSMFKKIVDIFIARLGKRYCGLSTHQVVSKFDGMVSSLYYNVIDNADNNCVGK

SEQ ID NO: 54308 - protein, 228 aa, Glycine max
  peptide (1)..(228): Ceres Seq. ID no. 15171945
  misc_feature (55)..(185): Pfam Name: NUDIX domain Pfam Description: NUDIX domain
  misc_feature (1)..(98): Homolog of NCBI NO: 15228146 NR Description: MutT/nudix family protein [Arabidopsis thaliana]
  misc_feature (1)..(216): Homolog of NCBI NO: 7486814 NR Description: hypothetical protein M7J2.190 - Arabidopsis
  misc_feature (1)..(224): Homolog of NCBI NO: 9758793 NR Description: MutT domain protein-like [Arabidopsis thaliana]
  misc_feature (1)..(216): Homolog of NCBI NO: 38564312 NR Description: At4g25434 [Arabidopsis thaliana]
  misc_feature (1)..(224): Homolog of NCBI NO: 18422823 NR Description: MutT/nudix family protein [Arabidopsis thaliana]
  misc_feature (1)..(225): Homolog of NCBI NO: 38346172 NR Description: OSJNBa0079A21.19 [Oryza sativa (japonica
  misc_feature (1)..(225): Homolog of NCBI NO: 8809607 NR Description: mutT domain protein-like [Arabidopsis thaliana]
  misc_feature (1)..(225): Homolog of NCBI NO: 21593371 NR Description: mutT domain protein-like [Arabidopsis thaliana]
  misc_feature (1)..(225): Homolog of NCBI NO: 21928133 NR Description: AT5g47240/MQL5_10 [Arabidopsis thaliana]
  misc_feature (1)..(225): Homolog of NCBI NO: 18422772 NR Description: MutT/nudix family protein [Arabidopsis thaliana]
MGKKGIWLKLPLDQSDLVPIAVKEGFQYHHAEPGYVMLTYWIPEGPSMLPANASHQVGVGGFVINDNNEVLVVQERHCSPTTLGLWKIPTGFILEAEEIYTGAVREVKEETGIDTEFVEVIAFRHAHNVAFEKSDLFFICILRPLSSKIIVDDLEIAAAKWMPLVDFVEQPLIQEDSMFKKIVDIFIARLGKRYCGLSTHQVVSKFDGMVSSLYYNVIDNADNNCVGK

SEQ ID NO: 54309 - protein, 192 aa, Glycine max
  peptide (1)..(192): Ceres Seq. ID no. 15171946
  misc_feature (19)..(149): Pfam Name: NUDIX domain Pfam Description: NUDIX domain
  misc_feature (1)..(62): Homolog of NCBI NO: 15228146 NR Description: MutT/nudix family protein [Arabidopsis thaliana]
  misc_feature (1)..(180): Homolog of NCBI NO: 7486814 NR Description: hypothetical protein M7J2.190 - Arabidopsis
  misc_feature (1)..(188): Homolog of NCBI NO: 9758793 NR Description: MutT domain protein-like [Arabidopsis thaliana]
  misc_feature (1)..(180): Homolog of NCBI NO: 38564312 NR Description: At4g25434 [Arabidopsis thaliana]
  misc_feature (1)..(188): Homolog of NCBI NO: 18422823 NR Description: MutT/nudix family protein [Arabidopsis thaliana]
  misc_feature (1)..(189): Homolog of NCBI NO: 38346172 NR Description: OSJNBa0079A21.19 [Oryza sativa (japonica
  misc_feature (1)..(189): Homolog of NCBI NO: 8809607 NR Description: mutT domain protein-like [Arabidopsis thaliana]
  misc_feature (1)..(189): Homolog of NCBI NO: 21593371 NR Description: mutT domain protein-like [Arabidopsis thaliana]
  misc_feature (1)..(189): Homolog of NCBI NO: 21928133 NR Description: AT5g47240/MQL5_10 [Arabidopsis thaliana]
  misc_feature (1)..(189): Homolog of NCBI NO: 18422772 NR Description: MutT/nudix family protein [Arabidopsis thaliana]
MLTYWIPEGPSMLPANASHQVGVGGFVINDNNEVLVVQERHCSPTTLGLWKIPTGFILEAEEIYTGAVREVKEETGIDTEFVEVIAFRHAHNVAFEKSDLFFICILRPLSSKIIVDDLEIAAAKWMPLVDFVEQPLIQEDSMFKKIVDIFIARLGKRYCGLSTHQVVSKFDGMVSSLYYNVIDNADNNCVGK

SEQ ID NO: 54310 - DNA, 1159 bp, Glycine max
  misc_feature (1)..(1159): Ceres Seq. ID no. 14307698
agtcacacaagaagcccaacaagccagatcagaattccatgaaagcaagaggcagaagctggagcgacagccgtggtgccgtggaagtggcgagtcatggaggcagagttggtcagtgcaaagttgtgcgaagcgaagccaggctacgcagacaagcaggccgagggcgaaggcggtcgggtgccacagatggaggcgctgggacagggtggtgaggtgaagaggacggggtcgagagcagctacagtgcgtgcatctgtcccctcctttgttttttcaccaagcctacctaaaatctatcaaattattcagggtaagatagccgaatacatctacctctggttaattttattttttttttaacatgcaagtactttattcagctgattgggtcttcttttacttccgttcctcaattgtattcattggctgatcgccatgcatctagaaggtgatgtcctgaagcatctatcaacatggattatagaccgaattatcaacaagtatggtgttagccagtgttaccgtgctctaaaactatgcaatagtgatctcaaagaaccataaatatccaacatagtggtggactttggcattttgtgtttctgttatgactttcctttgaatattttgttaattttctaattaatctttccttaccagcactgtcagagtgtgattcattatagaaaatttgattgaagatctcaatgatggcaattctttacatatgtatagttgttcagctcctgctttctgaaactatacaggaaatttgattgaagatatgattgatggcgattctagaaaagtgtttgctccatcagattcacataaaaagaaattgcacaactgcatcatggctgtccagtatatgaaggaagctccggttctgatatctgattcagatgcagtcagagtttcagcagaatatattcttaatggcgacaaggaactaattcttgcatttctatggaatatgttcattcatatgcaggttaatctacacatgtcgttcagtatctcattactcatgttgaagttttatactgttttatttcacctttcgtttgtactgaagaggtggactaatggactgactttgtatttttcactcactgcataggcagcattacagtagagatatgttgtacttctc

SEQ ID NO: 54311 - protein, 112 aa, Glycine max
  peptide (1)..(112): Ceres Seq. ID no. 14307699
  misc_feature (7)..(73): Homolog of NCBI NO: 15234600 NR Description: calmodulin-binding protein family [Arabidopsis
  misc_feature (1)..(71): Homolog of NCBI NO: 34901890 NR Description: OSJNBa0036M16.11 [Oryza sativa (japonica
MIDGDSRKVFAPSDSHKKKLHNCIMAVQYMKEAPVLISDSDAVRVSAEYILNGDKELILAFLWNMFIHMQVNLHMSFSISLLMLKFYTVLFHLSFVLKRWTNGLTLYFSLTA

SEQ ID NO: 54312 - protein, 88 aa, Glycine max
  peptide (1)..(88): Ceres Seq. ID no. 14307700
MEAELVSAKLCEAKPGYADKQAEGEGGRVPQMEALGQGGEVKRTGSRAATVRASVPSFVFSPSLPKIYQIIQGKIAEYIYLWLILFFF

SEQ ID NO: 54313 - protein, 88 aa, Glycine max
  peptide (1)..(88): Ceres Seq. ID no. 14307701
  misc_feature (1)..(49): Homolog of NCBI NO: 15234600 NR Description: calmodulin-binding protein family [Arabidopsis
  misc_feature (1)..(47): Homolog of NCBI NO: 34901890 NR Description: OSJNBa0036M16.11 [Oryza sativa (japonica
MAVQYMKEAPVLISDSDAVRVSAEYILNGDKELILAFLWNMFIHMQVNLHMSFSISLLMLKFYTVLFHLSFVLKRWTNGLTLYFSLTA

SEQ ID NO: 54314 - DNA, 1350 bp, Glycine max
  misc_feature (1)..(1350): Ceres Seq. ID no. 14307206
tttatttttctttcttctcttcctctgcccttcttggcttggttcttctgttttaagcagctttctcttgttgatcattaatcatgtccgatatttaagacatagggttattgctatggcagtcgtacctgttgagagtattgcctcattgaatagtgatctcctctatgacatattacgacgccttgatggccctacgttggctagtgcagcttgcacttgtgcatcattttcttccatctcaaaagaagagagtttatgggaaaatgtatgttcttctgtgtggccttcaaccaatagggaagatgtcaaaagtttaatatcttctaccggtggattcagaaaattctatgcagattgttttcctcttattataaacaaggaggtaggagagtatcaattgagcagctatcttgagtaccctgatgattggactgaggccaaatattatggggacatgattgaatttgaaagcatctctccatcagattttgtttccattgtggatatcaggtttaaggagaaaccaatctgctccaaagttctatgcggaattccaaacgcaaatggctatgatgagtggttctacaactgtccttttcggattgatcttctgagttgtgcggatagagatgataacaatgatggtgtggttaccctttctgtatctgatggattgccaccaataacatccatggaaagggaaaagaaagatgggaaactatggcaggagcttcgtgatggtctcttgcttagttggatcatagtaaacaagaaaataaagcaatctgctaatcttgcaagttggatctccttagatggacaaagacattggccaacagataaggatttcgtctttcgtttcggatctgttctctctgccaaggacatttttccttctcaagtagtgcagtgcatccttattatgaagtttagagtggttcacactgaagaagagggggttcaaacaactcttaaaacaacagagttgagtatgcagttggaagacatggaaggtgctcatgttaatgggaggaacagtttgcttattcttaaggaagcacttagctgccgaaggagcaaaaactatagtgaagtacttgaatcctgtcttattttctcaaaagtgcaaaataagttgaaagaggagaagattaaaaacgaaagtaggttggacacactttgtatattaagtggcattgttgctgtaatgacattctggtactatgttttctgatatggtatggcgttgttcgttttactggaataagctaatgttgatctagcagatgatcaaatttggcactccccttctgtaacataagattcctaataaagtaactaattgat

SEQ ID NO: 54315 - protein, 411 aa, Glycine max
  peptide (1)..(411): Ceres Seq. ID no. 14307207
  misc_feature (47)..(91): Pfam Name: F-box domain Pfam Description: F-box domain
  misc_feature (39)..(122): Homolog of NCBI NO: 15225867 NR Description: F-box protein family [Arabidopsis thaliana]
  misc_feature (42)..(124): Homolog of NCBI NO: 15238908 NR Description: F-box protein family [Arabidopsis thaliana]
  misc_feature (47)..(124): Homolog of NCBI NO: 15227574 NR Description: F-box protein family [Arabidopsis thaliana]
  misc_feature (268)..(401): Homolog of NCBI NO: 15227574 NR Description: F-box protein family [Arabidopsis thaliana]
LFFFLLFLCPSWLGSSVLSSFLLLIINHVRYLRHRVIAMAVVPVESIASLNSDLLYDILRRLDGPTLASAACTCASFSSISKEESLWENVCSSVWPSTNREDVKSLISSTGGFRKFYADCFPLIINKEVGEYQLSSYLEYPDDWTEAKYYGDMIEFESISPSDFVSIVDIRFKEKPICSKVLCGIPNANGYDEWFYNCPFRIDLLSCADRDDNNDGVVTLSVSDGLPPITSMEREKKDGKLWQELRDGLLLSWIIVNKKIKQSANLASWISLDGQRHWPTDKDFVFRFGSVLSAKDIFPSQVVQCILIMKFRVVHTEEEGVQTTLKTTELSMQLEDMEGAHVNGRNSLLILKEALSCRRSKNYSEVLESCLIFSKVQNKLKEEKIKNESRLDTLCILSGIVAVMTFWYYVF

SEQ ID NO: 54316 - protein, 373 aa, Glycine max
  peptide (1)..(373): Ceres Seq. ID no. 14307208
  misc_feature (9)..(53): Pfam Name: F-box domain Pfam Description: F-box domain
  misc_feature (1)..(84): Homolog of NCBI NO: 15225867 NR Description: F-box protein family [Arabidopsis thaliana]
  misc_feature (4)..(86): Homolog of NCBI NO: 15238908 NR Description: F-box protein family [Arabidopsis thaliana]
  misc_feature (9)..(86): Homolog of NCBI NO: 15227574 NR Description: F-box protein family [Arabidopsis thaliana]
  misc_feature (230)..(363): Homolog of NCBI NO: 15227574 NR Description: F-box protein family [Arabidopsis thaliana]
MAVVPVESIASLNSDLLYDILRRLDGPTLASAACTCASFSSISKEESLWENVCSSVWPSTNREDVKSLISSTGGFRKFYADCFPLIINKEVGEYQLSSYLEYPDDWTEAKYYGDMIEFESISPSDFVSIVDIRFKEKPICSKVLCGIPNANGYDEWFYNCPFRIDLLSCADRDDNNDGVVTLSVSDGLPPITSMEREKKDGKLWQELRDGLLLSWIIVNKKIKQSANLASWISLDGQRHWPTDKDFVFRFGSVLSAKDIFPSQVVQCILIMKFRVVHTEEEGVQTTLKTTELSMQLEDMEGAHVNGRNSLLILKEALSCRRSKNYSEVLESCLIFSKVQNKLKEEKIKNESRLDTLCILSGIVAVMTFWYYVF

SEQ ID NO: 54317 - protein, 259 aa, Glycine max
  peptide (1)..(259): Ceres Seq. ID no. 14307209
  misc_feature (116)..(249): Homolog of NCBI NO: 15227574 NR Description: F-box protein family [Arabidopsis thaliana]
MIEFESISPSDFVSIVDIRFKEKPICSKVLCGIPNANGYDEWFYNCPFRIDLLSCADRDDNNDGVVTLSVSDGLPPITSMEREKKDGKLWQELRDGLLLSWIIVNKKIKQSANLASWISLDGQRHWPTDKDFVFRFGSVLSAKDIFPSQVVQCILIMKFRVVHTEEEGVQTTLKTTELSMQLEDMEGAHVNGRNSLLILKEALSCRRSKNYSEVLESCLIFSKVQNKLKEEKIKNESRLDTLCILSGIVAVMTFWYYVF

SEQ ID NO: 54318 - DNA, 1356 bp, Glycine max
  misc_feature (1)..(1356): Ceres Seq. ID no. 14307288
gattgatcaatcaaagagagagagagagagggaatgggagatcaagtggagggaacggtgcagaacgttctggaacaggagactctgaagtggatcttcgttggtggcaaaggcggcgtcggcaaaacgacatgcagttcaatcctctccattctcctcgccaccgttcgctcctccgtcctcatcatctccaccgaccccgcccacaacctcagcgacgccttccagcagcgtttcaccaaaacccccactctcgtcaatggcttttccaacctctacgccatggaggtggatcctactgttgagcatgaggacatgggtggcgctgatgggatggactccttgttctccgagctcgccggcgcgattcccgggattgatgaggccatgagctttgctgagatgttgaaattggtgcagacaatggattattctgttattgtatttgatactgctcccactggccatacactcagactattgcaattcccatcggttttagaaaagggtcttgcaaaagtgatgtctttgaaaaataaatttggtggtttgtttaatcagatgacccgcatgtttggcatgggtgatgattttggagatgatcaaattcttgggaggcttgaaggcatgaaggatgtaattgaacaagttaataagcaattcaaagatccggacatgacaacctttgtctgtgtgtgcattcctgaattcctttctctatatgaaacagaaagattggttcaggagcttacaaagtttgaaattgacacccacaatatcatcatcaatcaagtaatctttgatgatgaagatgttgaatccaagttacttaaagcaagaatgaaaatgcaacagaaatatctggaccagttttacatgttgtatgatgactttaacattaccaagctgccactgctcccagaagaggttactggggttgaagctctgaaagcattttcaagacattttacatcaccatatcaagccttatgcagtaaaggagatccagtagaacggttggagagtaaagtatcagcattacagcgccagttacacgaggctgaagaagagttggagagactcaaaagtggcaattaggtttgatggtatccattcatgaataatgtcattgtatgcctttttggttcacattattttttagcttaaatttgataaagcatctttttctttgttgggctgccaacacaagtcattccctatatgctttttatttaattattgtcacagtgagctttcttataaccccccaaaaaatattgctgaggttagtctaatttgtttcatgaatattctttacttgtatctttcatattatgagtagaatagtttcttatc

SEQ ID NO: 54319 - protein, 354 aa, Glycine max
  peptide (1)..(354): Ceres Seq. ID no. 14307289
  misc_feature (18)..(312): Pfam Name: Anion-transporting ATPase Pfam Description: Anion-transporting ATPase
  misc_feature (3)..(317): Homolog of NCBI NO: 2905657 NR Description: arsenite translocating ATPase [Homo sapiens]
  misc_feature (3)..(317): Homolog of NCBI NO: 12025542 NR Description: arsA (bacterial) arsenite transporter,
  misc_feature (3)..(317): Homolog of NCBI NO: 6647417 NR Description: Arsenical pump-driving ATPase ATPase) (Arsenical resistance ATPase) (Arsenite-transporting
  misc_feature (3)..(317): Homolog of NCBI NO: 4757796 NR Description: arsA arsenite transporter, ATP-binding, homolog 1
  misc_feature (3)..(316): Homolog of NCBI NO: 19717679 NR Description: arsenite transport subunit A [Dictyostelium
  misc_feature (3)..(327): Homolog of NCBI NO: 17945070 NR Description: RE07422p [Drosophila melanogaster]
  misc_feature (3)..(327): Homolog of NCBI NO: 24586297 NR Description: CG1598-PA [Drosophila melanogaster]
  misc_feature (6)..(316): Homolog of NCBI NO: 31214034 NR Description: ENSANGP00000018739 [Anopheles gambiae]
  misc_feature (3)..(353): Homolog of NCBI NO: 25290846 NR Description: hypothetical protein F22M8.4 [imported] -
  misc_feature (3)..(353): Homolog of NCBI NO: 18378897 NR Description: arsA homolog (hASNA-I) -related [Arabidopsis
MGDQVEGTVQNVLEQETLKWIFVGGKGGVGKTTCSSILSILLATVRSSVLIISTDPAHNLSDAFQQRFTKTPTLVNGFSNLYAMEVDPTVEHEDMGGADGMDSLFSELAGAIPGIDEAMSFAEMLKLVQTMDYSVIVFDTAPTGHTLRLLQFPSVLEKGLAKVMSLKNKFGGLFNQMTRMFGMGDDFGDDQILGRLEGMKDVIEQVNKQFKDPDMTTFVCVCIPEFLSLYETERLVQELTKFEIDTHNIIINQVIFDDEDVESKLLKARMKMQQKYLDQFYMLYDDFNITKLPLLPEEVTGVEALKAFSRHFTSPYQALCSKGDPVERLESKVSALQRQLHEAEEELERLKSGN

SEQ ID NO: 54320 - protein, 271 aa, Glycine max
  peptide (1)..(271): Ceres Seq. ID no. 14307290
  misc_feature (1)..(229): Pfam Name: Anion-transporting ATPase Pfam Description: Anion-transporting ATPase
  misc_feature (1)..(234): Homolog of NCBI NO: 2905657 NR Description: arsenite translocating ATPase [Homo sapiens]
  misc_feature (1)..(234): Homolog of NCBI NO: 12025542 NR Description: arsA (bacterial) arsenite transporter,
  misc_feature (1)..(234): Homolog of NCBI NO: 6647417 NR Description: Arsenical pump-driving ATPase ATPase) (Arsenical resistance ATPase) (Arsenite-transporting
  misc_feature (1)..(234): Homolog of NCBI NO: 4757796 NR Description: arsA arsenite transporter, ATP-binding, homolog 1
  misc_feature (1)..(233): Homolog of NCBI NO: 19717679 NR Description: arsenite transport subunit A [Dictyostelium
  misc_feature (1)..(244): Homolog of NCBI NO: 17945070 NR Description: RE07422p [Drosophila melanogaster]
  misc_feature (1)..(244): Homolog of NCBI NO: 24586297 NR Description: CG1598-PA [Drosophila melanogaster]
  misc_feature (1)..(233): Homolog of NCBI NO: 31214034 NR Description: ENSANGP00000018739 [Anopheles gambiae]
  misc_feature (1)..(270): Homolog of NCBI NO: 25290846 NR Description: hypothetical protein F22M8.4 [imported] -
  misc_feature (1)..(270): Homolog of NCBI NO: 18378897 NR Description: arsA homolog (hASNA-I) -related [Arabidopsis
MEVDPTVEHEDMGGADGMDSLFSELAGAIPGIDEAMSFAEMLKLVQTMDYSVIVFDTAPTGHTLRLLQFPSVLEKGLAKVMSLKNKFGGLFNQMTRMFGMGDDFGDDQILGRLEGMKDVIEQVNKQFKDPDMTTFVCVCIPEFLSLYETERLVQELTKFEIDTHNIIINQVIFDDEDVESKLLKARMKMQQKYLDQFYMLYDDFNITKLPLLPEEVTGVEALKAFSRHFTSPYQALCSKGDPVERLESKVSALQRQLHEAEEELERLKSGN

SEQ ID NO: 54321 - protein, 260 aa, Glycine max
  peptide (1)..(260): Ceres Seq. ID no. 14307291
  misc_feature (1)..(218): Pfam Name: Anion-transporting ATPase Pfam Description: Anion-transporting ATPase
  misc_feature (1)..(223): Homolog of NCBI NO: 2905657 NR Description: arsenite translocating ATPase [Homo sapiens]
  misc_feature (1)..(223): Homolog of NCBI NO: 12025542 NR Description: arsA (bacterial) arsenite transporter,
  misc_feature (1)..(223): Homolog of NCBI NO: 6647417 NR Description: Arsenical pump-driving ATPase ATPase) (Arsenical resistance ATPase) (Arsenite-transporting
  misc_feature (1)..(223): Homolog of NCBI NO: 4757796 NR Description: arsA arsenite transporter, ATP-binding, homolog 1
  misc_feature (1)..(222): Homolog of NCBI NO: 19717679 NR Description: arsenite transport subunit A [Dictyostelium
  misc_feature (1)..(233): Homolog of NCBI NO: 17945070 NR Description: RE07422p [Drosophila melanogaster]
  misc_feature (1)..(233): Homolog of NCBI NO: 24586297 NR Description: CG1598-PA [Drosophila melanogaster]
  misc_feature (1)..(222): Homolog of NCBI NO: 31214034 NR Description: ENSANGP00000018739 [Anopheles gambiae]
  misc_feature (1)..(259): Homolog of NCBI NO: 25290846 NR Description: hypothetical protein F22M8.4 [imported] -
  misc_feature (1)..(259): Homolog of NCBI NO: 18378897 NR Description: arsA homolog (hASNA-I) -related [Arabidopsis
MGGADGMDSLFSELAGAIPGIDEAMSFAEMLKLVQTMDYSVIVFDTAPTGHTLRLLQFPSVLEKGLAKVMSLKNKFGGLFNQMTRMFGMGDDFGDDQILGRLEGMKDVIEQVNKQFKDPDMTTFVCVCIPEFLSLYETERLVQELTKFEIDTHNIIINQVIFDDEDVESKLLKARMKMQQKYLDQFYMLYDDFNITKLPLLPEEVTGVEALKAFSRHFTSPYQALCSKGDPVERLESKVSALQRQLHEAEEELERLKSGN

SEQ ID NO: 54322 - DNA, 2166 bp, Glycine max
  misc_feature (1)..(2166): Ceres Seq. ID no. 14307069
atgccagtcttttagacctcaacctgaagaaagtgatcaaaaaacttttccagacacaaaatcgttggaccctgcattatcttctatggctgcacctaatgctaaacttccccaaagcctcgacagaaatgaaaatgatgataaagaacaaactgaaaatattacaaataatctggatgcatccagatatgttgaggcaaacacagatcagtgcagaaaaatgaagacacatacacacgaactttcaagatcaggggatgctttgctgactgatgctgaaattgatgaccatcttgaacaaaatgccaatgggagatcagaacaagtgattggcaagttagagactgtcgggagtatggttaatacagagctgactgattttgaagatgcacctaaattttcatcacttgaaccttcattgttttgcaatcctcagccaaatgctgaaggctccttgacatctggttatgataagttccatggtggtgataaaggccaatctggatctgagaaatgtgcagaggactcactagaaaacaatgaagttgttcaatcaagccactgccgtaacctcaaaatgaaagcgcctgtgaaatcaaccaagttagttattaaaaagaaacaaatttcaccagacactgaaggttcttgcaaactgaagattgttagttctaaggcagattcaactggtgctagaggtattgtaatatctggaagttcctcctttatggggcctaatctagtcacagaagtaccagaaggtgaagatgacagaaaatttagttctccacagctactgcattcatattctgacaagagaagttatgatcatgtccataaaagggacaagtcatataaaggtaaagtcaatcaagatggttttgaatcttttgattgtgatacggaagaacatacttctgttttcagcaatccacatggtttaggaattggtttgtttgatgttacaagtgatcctatgcgtcaaacacgatctataaggatgaagacaacttctgaggagccaagcacttcaaacagaagaattaaaattcgacagggtcaaagctccaggggcaaacctgaagagggtgtcaatgattctggtacttcaactcgaagggtgtcaaatcaccatgtcaaaaaattgtcatggctgatgttgtcagagcttgaagagggttaccgatatattcctcaacttggtgatgaagttgtgtactttagacagggccatcaagagtacatagagtcatattcattatctgaatcaggtccatggagactatttgtaggactaggtgcttctgaaatttgcaaggttgaagaacttgagtatgcggagctaccaggctctggggatagctgttgtaaacttaaacttagatttgtggatccttcttcgtgtgtgcatggcaaatcatttaaattaactctacctgaattgattaacttcactgactttgttattgagaaaacatggtatgatactgccatgaagagaaattggtcttcaagagataaatgcatggtctggtggagaaatgaagatgggaaaggtggaagttggtgggatggtcggattattcaagtgcaggccaagtctgatgacttccctaacagtccctgggaaaggtatcgggtccagtacaagactgatccaagcgagaatcatctgcatagtccgtgggaactatatgatcctgagatgctgtgggagcatccccacattgatcatgagatcagagataagctgctttcctatttcatcaaattagaccacaggcagaggtttgatatccaagcattgaaccaagtagctgagaggttagagtttgcaaacaggtttcctgccccattctatcctgaactaattcaatcaagattgaagaatgactactatcggagtgtggaaggtgtgaagcatgatataatggtaatgttatcaaatgctgaagaatactttaaaattacaaaaaatgctcagctggtgagcaagatcaggagaatatcagaatggtttagaaggaaacttgaaaggatatagaaagctcaaattgggttttataggcttcttctaacattgttttgcattctttaatccaattttggagaattagttggtgtttaagttggttttataaaatgaaaaaggtcataggtggtggc

SEQ ID NO: 54323 - protein, 680 aa, Glycine max
  peptide (1)..(680): Ceres Seq. ID no. 14307070
  misc_feature (618)..(666): Pfam Name: Bromodomain Pfam Description: Bromodomain
  misc_feature (282)..(676): Homolog of NCBI NO: 24649631 NR Description: CG31132-PA [Drosophila melanogaster]
  misc_feature (282)..(676): Homolog of NCBI NO: 20151643 NR Description: LD40380p [Drosophila melanogaster]
  misc_feature (614)..(680): Homolog of NCBI NO: 15226044 NR Description: hypothetical protein [Arabidopsis thaliana]
  misc_feature (432)..(547): Homolog of NCBI NO: 15226044 NR Description: hypothetical protein [Arabidopsis thaliana]
  misc_feature (314)..(680): Homolog of NCBI NO: 22135972 NR Description: putative WD-40 repeat protein [Arabidopsis
  misc_feature (314)..(680): Homolog of NCBI NO: 30690675 NR Description: transducin / WD-40 repeat protein family
  misc_feature (314)..(680): Homolog of NCBI NO: 25409048 NR Description: probable WD-40 repeat protein [imported] -
  misc_feature (314)..(680): Homolog of NCBI NO: 7487572 NR Description: hypothetical protein T30B22.29 - Arabidopsis
  misc_feature (379)..(677): Homolog of NCBI NO: 15239884 NR Description: transducin / WD-40 repeat protein family
  misc_feature (379)..(677): Homolog of NCBI NO: 9759426 NR Description: WD-40 repeat protein-like [Arabidopsis thaliana]
CQSFRPQPEESDQKTFPDTKSLDPALSSMAAPNAKLPQSLDRNENDDKEQTENITNNLDASRYVEANTDQCRKMKTHTHELSRSGDALLTDAEIDDHLEQNANGRSEQVIGKLETVGSMVNTELTDFEDAPKFSSLEPSLFCNPQPNAEGSLTSGYDKFHGGDKGQSGSEKCAEDSLENNEVVQSSHCRNLKMKAPVKSTKLVIKKKQISPDTEGSCKLKIVSSKADSTGARGIVISGSSSFMGPNLVTEVPEGEDDRKFSSPQLLHSYSDKRSYDHVHKRDKSYKGKVNQDGFESFDCDTEEHTSVFSNPHGLGIGLFDVTSDPMRQTRSIRMKTTSEEPSTSNRRIKIRQGQSSRGKPEEGVNDSGTSTRRVSNHHVKKLSWLMLSELEEGYRYIPQLGDEVVYFRQGHQEYIESYSLSESGPWRLFVGLGASEICKVEELEYAELPGSGDSCCKLKLRFVDPSSCVHGKSFKLTLPELINFTDFVIEKTWYDTAMKRNWSSRDKCMVWWRNEDGKGGSWWDGRIIQVQAKSDDFPNSPWERYRVQYKTDPSENHLHSPWELYDPEMLWEHPHIDHEIRDKLLSYFIKLDHRQRFDIQALNQVAERLEFANRFPAPFYPELIQSRLKNDYYRSVEGVKHDIMVMLSNAEEYFKITKNAQLVSKIRRISEWFRRKLERI

SEQ ID NO: 54324 - protein, 652 aa, Glycine max
  peptide (1)..(652): Ceres Seq. ID no. 14307071
  misc_feature (590)..(638): Pfam Name: Bromodomain Pfam Description: Bromodomain
  misc_feature (254)..(648): Homolog of NCBI NO: 24649631 NR Description: CG31132-PA [Drosophila melanogaster]
  misc_feature (254)..(648): Homolog of NCBI NO: 20151643 NR Description: LD40380p [Drosophila melanogaster]
  misc_feature (586)..(652): Homolog of NCBI NO: 15226044 NR Description: hypothetical protein [Arabidopsis thaliana]
  misc_feature (404)..(519): Homolog of NCBI NO: 15226044 NR Description: hypothetical protein [Arabidopsis thaliana]
  misc_feature (286)..(652): Homolog of NCBI NO: 22135972 NR Description: putative WD-40 repeat protein [Arabidopsis
  misc_feature (286)..(652): Homolog of NCBI NO: 30690675 NR Description: transducin / WD-40 repeat protein family
  misc_feature (286)..(652): Homolog of NCBI NO: 25409048 NR Description: probable WD-40 repeat protein [imported] -
  misc_feature (286)..(652): Homolog of NCBI NO: 7487572 NR Description: hypothetical protein T30B22.29 - Arabidopsis
  misc_feature (351)..(649): Homolog of NCBI NO: 15239884 NR Description: transducin / WD-40 repeat protein family
  misc_feature (351)..(649): Homolog of NCBI NO: 9759426 NR Description: WD-40 repeat protein-like [Arabidopsis thaliana]
MAAPNAKLPQSLDRNENDDKEQTENITNNLDASRYVEANTDQCRKMKTHTHELSRSGDALLTDAEIDDHLEQNANGRSEQVIGKLETVGSMVNTELTDFEDAPKFSSLEPSLFCNPQPNAEGSLTSGYDKFHGGDKGQSGSEKCAEDSLENNEVVQSSHCRNLKMKAPVKSTKLVIKKKQISPDTEGSCKLKIVSSKADSTGARGIVISGSSSFMGPNLVTEVPEGEDDRKFSSPQLLHSYSDKRSYDHVHKRDKSYKGKVNQDGFESFDCDTEEHTSVFSNPHGLGIGLFDVTSDPMRQTRSIRMKTTSEEPSTSNRRIKIRQGQSSRGKPEEGVNDSGTSTRRVSNHHVKKLSWLMLSELEEGYRYIPQLGDEVVYFRQGHQEYIESYSLSESGPWRLFVGLGASEICKVEELEYAELPGSGDSCCKLKLRFVDPSSCVHGKSFKLTLPELINFTDFVIEKTWYDTAMKRNWSSRDKCMVWWRNEDGKGGSWWDGRIIQVQAKSDDFPNSPWERYRVQYKTDPSENHLHSPWELYDPEMLWEHPHIDHEIRDKLLSYFIKLDHRQRFDIQALNQVAERLEFANRFPAPFYPELIQSRLKNDYYRSVEGVKHDIMVMLSNAEEYFKITKNAQLVSKIRRISEWFRRKLERI

SEQ ID NO: 54325 - protein, 607 aa, Glycine max
  peptide (1)..(607): Ceres Seq. ID no. 14307072
  misc_feature (545)..(593): Pfam Name: Bromodomain Pfam Description: Bromodomain
  misc_feature (209)..(603): Homolog of NCBI NO: 24649631 NR Description: CG31132-PA [Drosophila melanogaster]
  misc_feature (209)..(603): Homolog of NCBI NO: 20151643 NR Description: LD40380p [Drosophila melanogaster]
  misc_feature (541)..(607): Homolog of NCBI NO: 15226044 NR Description: hypothetical protein [Arabidopsis thaliana]
  misc_feature (359)..(474): Homolog of NCBI NO: 15226044 NR Description: hypothetical protein [Arabidopsis thaliana]
  misc_feature (241)..(607): Homolog of NCBI NO: 22135972 NR Description: putative WD-40 repeat protein [Arabidopsis
  misc_feature (241)..(607): Homolog of NCBI NO: 30690675 NR Description: transducin / WD-40 repeat protein family
  misc_feature (241)..(607): Homolog of NCBI NO: 25409048 NR Description: probable WD-40 repeat protein [imported] -
  misc_feature (241)..(607): Homolog of NCBI NO: 7487572 NR Description: hypothetical protein T30B22.29 - Arabidopsis
  misc_feature (306)..(604): Homolog of NCBI NO: 15239884 NR Description: transducin / WD-40 repeat protein family
  misc_feature (306)..(604): Homolog of NCBI NO: 9759426 NR Description: WD-40 repeat protein-like [Arabidopsis thaliana]
MKTHTHELSRSGDALLTDAEIDDHLEQNANGRSEQVIGKLETVGSMVNTELTDFEDAPKFSSLEPSLFCNPQPNAEGSLTSGYDKFHGGDKGQSGSEKCAEDSLENNEVVQSSHCRNLKMKAPVKSTKLVIKKKQISPDTEGSCKLKIVSSKADSTGARGIVISGSSSFMGPNLVTEVPEGEDDRKFSSPQLLHSYSDKRSYDHVHKRDKSYKGKVNQDGFESFDCDTEEHTSVFSNPHGLGIGLFDVTSDPMRQTRSIRMKTTSEEPSTSNRRIKIRQGQSSRGKPEEGVNDSGTSTRRVSNHHVKKLSWLMLSELEEGYRYIPQLGDEVVYFRQGHQEYIESYSLSESGPWRLFVGLGASEICKVEELEYAELPGSGDSCCKLKLRFVDPSSCVHGKSFKLTLPELINFTDFVIEKTWYDTAMKRNWSSRDKCMVWWRNEDGKGGSWWDGRIIQVQAKSDDFPNSPWERYRVQYKTDPSENHLHSPWELYDPEMLWEHPHIDHEIRDKLLSYFIKLDHRQRFDIQALNQVAERLEFANRFPAPFYPELIQSRLKNDYYRSVEGVKHDIMVMLSNAEEYFKITKNAQLVSKIRRISEWFRRKLERI

SEQ ID NO: 54326 - DNA, 1629 bp, Glycine max
  misc_feature (1)..(1629): Ceres Seq. ID no. 15170885
attaaatgccactcttattttgcctgttttgaagcaggaccagatttggaaggaccaaacgaaatttgaagacatttttgatgtggatcacttcattgactacctgaagtatgatgttcgtattgtccgtgatatcccagaatggtttaccgataaatcagagctatttactagcataagacggactgtaaaaaacattcccaaatatgcaccagcacaattttacatcgataatgttctgccccgagtcaaggagaagaagattatggctctgaaaccctttgttgacaggctgggatatgacaatgttcctcctgaaatcaacaagttgagatgcagagttaattatcatgcactgaaatttcttcctgatatagagcagatggctaattcacttgcatcaagaatgagaaaccgaactggcagttcaaatccttacatggctctgcatcttagatttgagaaaggaatggtgggactatcattctgtgattttgtggggacaagagaggagaaagccaaaatggcggagtatagaaaaaaggagtggcctcgacggtacaagaatggttcccatctgtggcaattagctctgcagaagcgaaaggaaggacggtgtcctctagagcctggagaagtggctgttattcttcgggccatgggctatccaaaggaaactcaaatttacgtagcttctggacaggtgtatggtggacagaaccggatggctccgctaaggaatatgttccctaatctggttaccaaggaggagttggcaactaaagaggagttagatggtttcagaaagcatgtgacaagcctggcagctcttgacttcttggtgtgcttgaagtcagatgtattcgtgatgacccatggaggcaactttgctaagctgatcattggagcacgtagatacatgggtcaccgtctaaaatcaattaagcctgacaaagggctaatgtccaagtcttttggggatccatatatgggttgggctccttttgtagaagatgttgttgttactcaccagacacggacgggattgccagaagagactttccctaactacgacctctgggagaaccctctgacaccctgcatgtgtagagcctgattacagcaattttatcgataacaatgggactttactcaagatgcatttgggagaaatatgccatctaagttatgaattctatctatctacagggtaaacgacggaatctgggctcctgccaatgcaagctttgaggtaggaggggcagtaaatagaaatttgaagcagtgatattggcttgaagggaatgagattggactgttggttatcactttaatgaacagatttcctattctgagtattctctttgccgagaccaggtggattttgtcttttcgtctaacttgtagcaattccccgccctcttttcttcttccaggaaaaaaaattgatcaattttttgtaccaagaaagatgtgcaaatcattaatgaatttcatgttgctattataggaggatttggctccttaaaagtgcagagtgtaattgaagatgcattagaaattgtgataaaacagatgcccatgtaaaataagttataaaattattaatattttaacttttgattttcc

SEQ ID NO: 54327 - protein, 371 aa, Glycine max
  peptide (1)..(371): Ceres Seq. ID no. 15170886
  misc_feature (1)..(335): Pfam Name: Plant protein family Pfam Description: Plant protein family
  misc_feature (1)..(370): Homolog of NCBI NO: 15226282 NR Description: axi 1 protein from Nicotiana tabacum -related
  misc_feature (1)..(152): Homolog of NCBI NO: 15144512 NR Description: putative auxin growth promotor protein
  misc_feature (119)..(371): Homolog of NCBI NO: 15144512 NR Description: putative auxin growth promotor protein
  misc_feature (1)..(144): Homolog of NCBI NO: 22328073 NR Description: expressed protein [Arabidopsis thaliana]
  misc_feature (1)..(144): Homolog of NCBI NO: 20260536 NR Description: unknown protein [Arabidopsis thaliana]
  misc_feature (107)..(369): Homolog of NCBI NO: 22328073 NR Description: expressed protein [Arabidopsis thaliana]
  misc_feature (107)..(369): Homolog of NCBI NO: 20260536 NR Description: unknown protein [Arabidopsis thaliana]
  misc_feature (89)..(371): Homolog of NCBI NO: 18404918 NR Description: expressed protein [Arabidopsis thaliana]
  misc_feature (30)..(371): Homolog of NCBI NO: 21618319 NR Description: unknown [Arabidopsis thaliana]
  misc_feature (1)..(371): Homolog of NCBI NO: 9294295 NR Description: contains similarity to the auxin-independent
LNATLILPVLKQDQIWKDQTKFEDIFDVDHFIDYLKYDVRIVRDIPEWFTDKSELFTSIRRTVKNIPKYAPAQFYIDNVLPRVKEKKIMALKPFVDRLGYDNVPPEINKLRCRVNYHALKFLPDIEQMANSLASRMRNRTGSSNPYMALHLRFEKGMVGLSFCDFVGTREEKAKMAEYRKKEWPRRYKNGSHLWQLALQKRKEGRCPLEPGEVAVILRAMGYPKETQIYVASGQVYGGQNRMAPLRNMFPNLVTKEELATKEELDGFRKHVTSLAALDFLVCLKSDVFVMTHGGNFAKLIIGARRYMGHRLKSIKPDKGLMSKSFGDPYMGWAPFVEDVVVTHQTRTGLPEETFPNYDLWENPLTPCMCRA

SEQ ID NO: 54328 - protein, 283 aa, Glycine max
  peptide (1)..(283): Ceres Seq. ID no. 15170887
  misc_feature (1)..(247): Pfam Name: Plant protein family Pfam Description: Plant protein family
  misc_feature (1)..(282): Homolog of NCBI NO: 15226282 NR Description: axi 1 protein from Nicotiana tabacum -related
  misc_feature (1)..(64): Homolog of NCBI NO: 15144512 NR Description: putative auxin growth promotor protein
  misc_feature (31)..(283): Homolog of NCBI NO: 15144512 NR Description: putative auxin growth promotor protein
  misc_feature (1)..(56): Homolog of NCBI NO: 22328073 NR Description: expressed protein [Arabidopsis thaliana]
  misc_feature (1)..(56): Homolog of NCBI NO: 20260536 NR Description: unknown protein [Arabidopsis thaliana]
  misc_feature (19)..(281): Homolog of NCBI NO: 22328073 NR Description: expressed protein [Arabidopsis thaliana]
  misc_feature (19)..(281): Homolog of NCBI NO: 20260536 NR Description: unknown protein [Arabidopsis thaliana]
  misc_feature (1)..(283): Homolog of NCBI NO: 18404918 NR Description: expressed protein [Arabidopsis thaliana]
  misc_feature (1)..(283): Homolog of NCBI NO: 21618319 NR Description: unknown [Arabidopsis thaliana]
  misc_feature (1)..(283): Homolog of NCBI NO: 9294295 NR Description: contains similarity to the auxin-independent
MALKPFVDRLGYDNVPPEINKLRCRVNYHALKFLPDIEQMANSLASRMRNRTGSSNPYMALHLRFEKGMVGLSFCDFVGTREEKAKMAEYRKKEWPRRYKNGSHLWQLALQKRKEGRCPLEPGEVAVILRAMGYPKETQIYVASGQVYGGQNRMAPLRNMFPNLVTKEELATKEELDGFRKHVTSLAALDFLVCLKSDVFVMTHGGNFAKLIIGARRYMGHRLKSIKPDKGLMSKSFGDPYMGWAPFVEDVVVTHQTRTGLPEETFPNYDLWENPLTPCMCRA

SEQ ID NO: 54329 - protein, 244 aa, Glycine max
  peptide (1)..(244): Ceres Seq. ID no. 15170888
  misc_feature (1)..(208): Pfam Name: Plant protein family Pfam Description: Plant protein family
  misc_feature (1)..(243): Homolog of NCBI NO: 15226282 NR Description: axi 1 protein from Nicotiana tabacum -related
  misc_feature (1)..(25): Homolog of NCBI NO: 15144512 NR Description: putative auxin growth promotor protein
  misc_feature (1)..(244): Homolog of NCBI NO: 15144512 NR Description: putative auxin growth promotor protein
  misc_feature (1)..(17): Homolog of NCBI NO: 22328073 NR Description: expressed protein [Arabidopsis thaliana]
  misc_feature (1)..(17): Homolog of NCBI NO: 20260536 NR Description: unknown protein [Arabidopsis thaliana]
  misc_feature (1)..(242): Homolog of NCBI NO: 22328073 NR Description: expressed protein [Arabidopsis thaliana]
  misc_feature (1)..(242): Homolog of NCBI NO: 20260536 NR Description: unknown protein [Arabidopsis thaliana]
  misc_feature (1)..(244): Homolog of NCBI NO: 18404918 NR Description: expressed protein [Arabidopsis thaliana]
  misc_feature (1)..(244): Homolog of NCBI NO: 21618319 NR Description: unknown [Arabidopsis thaliana]
  misc_feature (1)..(244): Homolog of NCBI NO: 9294295 NR Description: contains similarity to the auxin-independent
MANSLASRMRNRTGSSNPYMALHLRFEKGMVGLSFCDFVGTREEKAKMAEYRKKEWPRRYKNGSHLWQLALQKRKEGRCPLEPGEVAVILRAMGYPKETQIYVASGQVYGGQNRMAPLRNMFPNLVTKEELATKEELDGFRKHVTSLAALDFLVCLKSDVFVMTHGGNFAKLIIGARRYMGHRLKSIKPDKGLMSKSFGDPYMGWAPFVEDVVVTHQTRTGLPEETFPNYDLWENPLTPCMCRA

SEQ ID NO: 54330 - DNA, 1232 bp, Glycine max
  misc_feature (1)..(1232): Ceres Seq. ID no. 14307202
gattttcgcagcgattcggatagcgaaagcaatcccccacccctaattttgatttgtgtcgaggaaaggacaggtcttggaaccctaaccgcacctctctctttcttcccgtgtgcgtcaaagcgaagcaacgcgacacgatggtgttctacttcaaagcgcgccccgaagccggcgatttcaccatcttcatgggccttgacaagtacgagaacgaggaactcatcaaatacggttttcccgaagacatctggttccatgtcgataaaatgtcttcagcccatgtctatgtcaggttgcacaaaggccagaccatcgatgacatgagtgagggtttactggaagactgtgctcagcttgtcaaagcaaattcaattcaaggaaataaagtgaacaatgtcgatgttgtttacacaccctggtctaatttaaagaaaactgcttcaatggatgttggccaagttggttttcacaactcaaaaatggttcgaactgtaagagttgagaagaggataaatgagattgttaacaggctaaacaagacaaaagtggaaaggaaacctgatttgaaagctgagcgagaagcagttaatgcagctgagagagctgagagaaaacaacaactgagagaaaaaaaacgtcgggaggaattgggaaggcttgaaaaggagaaacaaacagagcttaggagctacaagggtttgatggttgcagaaaatatgacatccaacaaacaaattgcatcaggaagcaaatcattacaggaactggaggaggatttcatgtaatcatttattgggttatggacagatgactggtggtcaacttactacctggcagatttatgtttttgattaaccaaccctactttggattttgaagctgcattatcttggttggttgaggaaaccaagtagtgtgtacacaaattgtgattgagggatgccgggtggggaggtgaatcctgataaggtcaatataccttatctacaactataaccttgcttgagacaatggtttttgttatttaatgttctcacagtcgagtcaaaaactggaatttcgtgctatttttatcgtggtcgtttacgctagtcgggttttgaaatttgtttccctctttgaattggtgttcactgcttgcgaaattattggggacattatgtagtgtttatgctacatgcaatgataatactcttgttgggaacattatgtagtgttccctgtttgga

SEQ ID NO: 54331 - protein, 215 aa, Glycine max
  peptide (1)..(215): Ceres Seq. ID no. 14307203
  misc_feature (7)..(99): Pfam Name: Domain of unknown function (DUF814) Pfam Description: Domain of unknown function (DUF814)
  misc_feature (1)..(198): Homolog of NCBI NO: 33416640 NR Description: Unknown (protein for MGC:68866) [Xenopus laevis]
  misc_feature (1)..(198): Homolog of NCBI NO: 31418990 NR Description: Unknown (protein for MGC:64173) [Danio rerio]
  misc_feature (1)..(198): Homolog of NCBI NO: 34874343 NR Description: similar to RIKEN cDNA 2610528H13 [Rattus
  misc_feature (1)..(198): Homolog of NCBI NO: 22164768 NR Description: RIKEN cDNA 2610528H13 [Mus musculus]
  misc_feature (1)..(198): Homolog of NCBI NO: 29165654 NR Description: Similar to RIKEN cDNA 2610528H13 gene [Homo
  misc_feature (1)..(198): Homolog of NCBI NO: 14042911 NR Description: unnamed protein product [Homo sapiens]
  misc_feature (1)..(215): Homolog of NCBI NO: 34909556 NR Description: P0046E05.9 [Oryza sativa (japonica
  misc_feature (1)..(215): Homolog of NCBI NO: 13878175 NR Description: unknown protein [Arabidopsis thaliana]
  misc_feature (1)..(215): Homolog of NCBI NO: 21593571 NR Description: unknown [Arabidopsis thaliana]
  misc_feature (1)..(215): Homolog of NCBI NO: 15239074 NR Description: expressed protein [Arabidopsis thaliana]
MVFYFKARPEAGDFTIFMGLDKYENEELIKYGFPEDIWFHVDKMSSAHVYVRLHKGQTIDDMSEGLLEDCAQLVKANSIQGNKVNNVDVVYTPWSNLKKTASMDVGQVGFHNSKMVRTVRVEKRINEIVNRLNKTKVERKPDLKAEREAVNAAERAERKQQLREKKRREELGRLEKEKQTELRSYKGLMVAENMTSNKQIASGSKSLQELEEDFM

SEQ ID NO: 54332 - protein, 198 aa, Glycine max
  peptide (1)..(198): Ceres Seq. ID no. 14307204
  misc_feature (1)..(82): Pfam Name: Domain of unknown function (DUF814) Pfam Description: Domain of unknown function (DUF814)
  misc_feature (1)..(181): Homolog of NCBI NO: 33416640 NR Description: Unknown (protein for MGC:68866) [Xenopus laevis]
  misc_feature (1)..(181): Homolog of NCBI NO: 31418990 NR Description: Unknown (protein for MGC:64173) [Danio rerio]
  misc_feature (1)..(181): Homolog of NCBI NO: 34874343 NR Description: similar to RIKEN cDNA 2610528H13 [Rattus
  misc_feature (1)..(181): Homolog of NCBI NO: 22164768 NR Description: RIKEN cDNA 2610528H13 [Mus musculus]
  misc_feature (1)..(181): Homolog of NCBI NO: 29165654 NR Description: Similar to RIKEN cDNA 2610528H13 gene [Homo
  misc_feature (1)..(181): Homolog of NCBI NO: 14042911 NR Description: unnamed protein product [Homo sapiens]
  misc_feature (1)..(198): Homolog of NCBI NO: 34909556 NR Description: P0046E05.9 [Oryza sativa (japonica
  misc_feature (1)..(198): Homolog of NCBI NO: 13878175 NR Description: unknown protein [Arabidopsis thaliana]
  misc_feature (1)..(198): Homolog of NCBI NO: 21593571 NR Description: unknown [Arabidopsis thaliana]
  misc_feature (1)..(198): Homolog of NCBI NO: 15239074 NR Description: expressed protein [Arabidopsis thaliana]
MGLDKYENEELIKYGFPEDIWFHVDKMSSAHVYVRLHKGQTIDDMSEGLLEDCAQLVKANSIQGNKVNNVDVVYTPWSNLKKTASMDVGQVGFHNSKMVRTVRVEKRINEIVNRLNKTKVERKPDLKAEREAVNAAERAERKQQLREKKRREELGRLEKEKQTELRSYKGLMVAENMTSNKQIASGSKSLQELEEDFM

SEQ ID NO: 54333 - protein, 172 aa, Glycine max
  peptide (1)..(172): Ceres Seq. ID no. 14307205
  misc_feature (1)..(56): Pfam Name: Domain of unknown function (DUF814) Pfam Description: Domain of unknown function (DUF814)
  misc_feature (1)..(155): Homolog of NCBI NO: 33416640 NR Description: Unknown (protein for MGC:68866) [Xenopus laevis]
  misc_feature (1)..(155): Homolog of NCBI NO: 31418990 NR Description: Unknown (protein for MGC:64173) [Danio rerio]
  misc_feature (1)..(155): Homolog of NCBI NO: 34874343 NR Description: similar to RIKEN cDNA 2610528H13 [Rattus
  misc_feature (1)..(155): Homolog of NCBI NO: 22164768 NR Description: RIKEN cDNA 2610528H13 [Mus musculus]
  misc_feature (1)..(155): Homolog of NCBI NO: 29165654 NR Description: Similar to RIKEN cDNA 2610528H13 gene [Homo
  misc_feature (1)..(155): Homolog of NCBI NO: 14042911 NR Description: unnamed protein product [Homo sapiens]
  misc_feature (1)..(172): Homolog of NCBI NO: 34909556 NR Description: P0046E05.9 [Oryza sativa (japonica
  misc_feature (1)..(172): Homolog of NCBI NO: 13878175 NR Description: unknown protein [Arabidopsis thaliana]
  misc_feature (1)..(172): Homolog of NCBI NO: 21593571 NR Description: unknown [Arabidopsis thaliana]
  misc_feature (1)..(172): Homolog of NCBI NO: 15239074 NR Description: expressed protein [Arabidopsis thaliana]
MSSAHVYVRLHKGQTIDDMSEGLLEDCAQLVKANSIQGNKVNNVDVVYTPWSNLKKTASMDVGQVGFHNSKMVRTVRVEKRINEIVNRLNKTKVERKPDLKAEREAVNAAERAERKQQLREKKRREELGRLEKEKQTELRSYKGLMVAENMTSNKQIASGSKSLQELEEDFM

SEQ ID NO: 54334 - DNA, 1245 bp, Glycine max
  misc_feature (1)..(1245): Ceres Seq. ID no. 14313644
atcaacaacaatgcaacatcatttgttagtaataattttttatacatctttgtcaaaaaaaactttttttcatacttctccacccatgaaccacttaacacacttctccaatagaaaacacctttactcaaaataaaatttacttggttttaaaaaaccattatgtaaaataaaatttacatttactctaagtaaaagaaaatattcaataatttactcaaaatccctttcactaatgcaaattgctaaaccctaataatccttctctctctctctctctccatgagcacagtaccgtaacgtaacgtaaccacgagatgcctctattctagcacttggaaccccaaatccgtgccaattcctccgctccttttcgcagacgaaggcacattctgacgattggaaggcaagactaaagattccaccacctgatacaagctagaaaacagaggtttgaaatggctgtgtcactgtggagaagtcgcactgcttcatcagcactgaacttgttcaacaatactcttcgctgtttctcttccgaggcaacaaactccagtcctcatagtacacgagagagtatgatgtattctgacataaactcacgaattgggagttgcatgccactgtctgcaatgcgcattggaacaatcattcacaacattgagttgaacccagggcaaggtggcaagctcgtccgagctgctggaactagtgcaaagatcttgaaagagcccacatcggcatactgtttaatccaactgccctcgggtgttaaaaagttgattgattctcgatgtagggccactgttggtgttgtatctaatcctagccatggggatcgcaaacttaggaaggccggacacagccgatggcttggtcgaagaccagttgtccgaggagtggcaatgaatccagtagatcatcctcatggtggaggagagggtaagagcaagagtggtggacgatttgggcgaggatctctcactccttggggcaagccaactaagagtggctacaagactggacccctgaagcgcaaaaggtagtaggataccatattcattatagctgtttctgatgtttccttatgagatgcttgtaagttgtaataattgtggaaactgtcattcctatttaggaaattcattgaactgattaggttcacagccaatttgtggattttatgggttcaaattttattgttgttaaagtaaaatgtttttgaaatgatcacattttcctctg

SEQ ID NO: 54335 - protein, 195 aa, Glycine max
  peptide (1)..(195): Ceres Seq. ID no. 14313645
  misc_feature (48)..(181): Pfam Name: Ribosomal Proteins L2, C-terminal domain Pfam Description: Ribosomal Proteins L2, C-terminal domain
  misc_feature (45)..(183): Homolog of NCBI NO: 17933118 NR Description: ribosomal protein L2 [Platanus occidentalis]
  misc_feature (34)..(189): Homolog of NCBI NO: 7440638 NR Description: probable ribosomal protein L2 [imported] - rice
  misc_feature (34)..(189): Homolog of NCBI NO: 6094106 NR Description: MITOCHONDRIAL 60S RIBOSOMAL PROTEIN L2
  misc_feature (34)..(187): Homolog of NCBI NO: 17933116 NR Description: ribosomal protein L2 [Dicentra sp. Qiu 95026]
  misc_feature (27)..(188): Homolog of NCBI NO: 17644110 NR Description: ribosomal protein L2 [Zea mays]
  misc_feature (38)..(195): Homolog of NCBI NO: 1076398 NR Description: ribosomal protein L2 - Arabidopsis thaliana
  misc_feature (3)..(195): Homolog of NCBI NO: 21592449 NR Description: unknown [Arabidopsis thaliana]
  misc_feature (3)..(195): Homolog of NCBI NO: 18406440 NR Description: ribosomal protein L2p family [Arabidopsis
  misc_feature (19)..(194): Homolog of NCBI NO: 17644114 NR Description: ribosomal protein L2 [Gossypium arboreum]
  misc_feature (3)..(195): Homolog of NCBI NO: 17644112 NR Description: ribosomal protein L2 [Lycopersicon esculentum]
MAVSLWRSRTASSALNLFNNTLRCFSSEATNSSPHSTRESMMYSDINSRIGSCMPLSAMRIGTIIHNIELNPGQGGKLVRAAGTSAKILKEPTSAYCLIQLPSGVKKLIDSRCRATVGVVSNPSHGDRKLRKAGHSRWLGRRPVVRGVAMNPVDHPHGGGEGKSKSGGRFGRGSLTPWGKPTKSGYKTGPLKRKR

SEQ ID NO: 54336 - protein, 155 aa, Glycine max
  peptide (1)..(155): Ceres Seq. ID no. 14313646
  misc_feature (8)..(141): Pfam Name: Ribosomal Proteins L2, C-terminal domain Pfam Description: Ribosomal Proteins L2, C-terminal domain
  misc_feature (5)..(143): Homolog of NCBI NO: 17933118 NR Description: ribosomal protein L2 [Platanus occidentalis]
  misc_feature (1)..(149): Homolog of NCBI NO: 7440638 NR Description: probable ribosomal protein L2 [imported] - rice
  misc_feature (1)..(149): Homolog of NCBI NO: 6094106 NR Description: MITOCHONDRIAL 60S RIBOSOMAL PROTEIN L2
  misc_feature (1)..(147): Homolog of NCBI NO: 17933116 NR Description: ribosomal protein L2 [Dicentra sp. Qiu 95026]
  misc_feature (1)..(148): Homolog of NCBI NO: 17644110 NR Description: ribosomal protein L2 [Zea mays]
  misc_feature (1)..(155): Homolog of NCBI NO: 1076398 NR Description: ribosomal protein L2 - Arabidopsis thaliana
  misc_feature (1)..(155): Homolog of NCBI NO: 21592449 NR Description: unknown [Arabidopsis thaliana]
  misc_feature (1)..(155): Homolog of NCBI NO: 18406440 NR Description: ribosomal protein L2p family [Arabidopsis
  misc_feature (1)..(154): Homolog of NCBI NO: 17644114 NR Description: ribosomal protein L2 [Gossypium arboreum]
  misc_feature (1)..(155): Homolog of NCBI NO: 17644112 NR Description: ribosomal protein L2 [Lycopersicon esculentum]
MMYSDINSRIGSCMPLSAMRIGTIIHNIELNPGQGGKLVRAAGTSAKILKEPTSAYCLIQLPSGVKKLIDSRCRATVGVVSNPSHGDRKLRKAGHSRWLGRRPVVRGVAMNPVDHPHGGGEGKSKSGGRFGRGSLTPWGKPTKSGYKTGPLKRKR

SEQ ID NO: 54337 - protein, 154 aa, Glycine max
  peptide (1)..(154): Ceres Seq. ID no. 14313647
  misc_feature (7)..(140): Pfam Name: Ribosomal Proteins L2, C-terminal domain Pfam Description: Ribosomal Proteins L2, C-terminal domain
  misc_feature (4)..(142): Homolog of NCBI NO: 17933118 NR Description: ribosomal protein L2 [Platanus occidentalis]
  misc_feature (1)..(148): Homolog of NCBI NO: 7440638 NR Description: probable ribosomal protein L2 [imported] - rice
  misc_feature (1)..(148): Homolog of NCBI NO: 6094106 NR Description: MITOCHONDRIAL 60S RIBOSOMAL PROTEIN L2
  misc_feature (1)..(146): Homolog of NCBI NO: 17933116 NR Description: ribosomal protein L2 [Dicentra sp. Qiu 95026]
  misc_feature (1)..(147): Homolog of NCBI NO: 17644110 NR Description: ribosomal protein L2 [Zea mays]
  misc_feature (1)..(154): Homolog of NCBI NO: 1076398 NR Description: ribosomal protein L2 - Arabidopsis thaliana
  misc_feature (1)..(154): Homolog of NCBI NO: 21592449 NR Description: unknown [Arabidopsis thaliana]
  misc_feature (1)..(154): Homolog of NCBI NO: 18406440 NR Description: ribosomal protein L2p family [Arabidopsis
  misc_feature (1)..(153): Homolog of NCBI NO: 17644114 NR Description: ribosomal protein L2 [Gossypium arboreum]
  misc_feature (1)..(154): Homolog of NCBI NO: 17644112 NR Description: ribosomal protein L2 [Lycopersicon esculentum]
MYSDINSRIGSCMPLSAMRIGTIIHNIELNPGQGGKLVRAAGTSAKILKEPTSAYCLIQLPSGVKKLIDSRCRATVGVVSNPSHGDRKLRKAGHSRWLGRRPVVRGVAMNPVDHPHGGGEGKSKSGGRFGRGSLTPWGKPTKSGYKTGPLKRKR

SEQ ID NO: 54338 - DNA, 1317 bp, Glycine max
  misc_feature (1)..(1317): Ceres Seq. ID no. 14310907
aagcaaactcataaattctcctacaccgacaaaaaatggaactttcaccacaagaattcattttccgttccccactccccgatattcccatccccacacacctcccattgtactcttactgcttccaaaagttgtcacagttccatgaccgtccatgcctcatcgacggcgacaccagcgaaaccctcacctacgccgacgtcgatctctccgctcgccgcatctccgccggcctccacaaaatcggcatctgccagggtgacgtcatcatgctcgtcctccgcaactgcccgcagttcgcactcgccttcctgggcgccactcaccgcggcgccgtcgtcaccaccgccaaccccttctacactccggcggagctcgcgaagcaagcgatggccacgaaaaccaggctggtcataacgcaatccgcgtaccttgagaaaatcaagagtttcgcggacgacagcgatgtcatggtgatgtgcattgatgacgattattcttctgaaaacgatggcgttttgcatttctcaacgctcaccaacgccgacgaaagggaagcccctgccgttaagattaaccctgacgacctcgttgcgcttccgttttcttctggcacgtctgggctccccaagggggttatgttatcgcatgaaaacttggttaccacgatatcgcagttagttgacggcgaaaacccgcaccagtacacgcacagcgaggatgtgttactctgtgtgctgcctatgtttcacatctatgcgctcaattctattttgctctgcgggattcgatctggtgcggctgtacttattgtgcaaaagtttgagatcactactctgtttgagctcatcgagaagtacaaggtgacggttgcgtcgtttgttcctcccatcgttttggcgttggttaagagcggagagactcatcgctacgacctgtcgtctattcgcgctgtggtcaccggtgcggcaccgttgggaggggaactccaagaagccgttaaggctaggctaccacacgctacttttggacaggtttcattttcattattatttttaaaaattaattagtttataaaaaggacattttcatttttcaagatttaacttctaattttacaaagtgacatggcaaattttgattggtttataacaagtcagattttagcgacctaagctgcagtaacagtcgcagtcgcagtttcttcacacgcttcttcacgatataataactacaaaacacttaatttctattcataaaattaaggaaaatgttttatcaacacccattaacctatttaacatcgagaaagagaat

SEQ ID NO: 54339 - protein, 344 aa, Glycine max
  peptide (1)..(344): Ceres Seq. ID no. 14310908
  misc_feature (52)..(333): Pfam Name: AMP-binding enzyme Pfam Description: AMP-binding enzyme
MELSPQEFIFRSPLPDIPIPTHLPLYSYCFQKLSQFHDRPCLIDGDTSETLTYADVDLSARRISAGLHKIGICQGDVIMLVLRNCPQFALAFLGATHRGAVVTTANPFYTPAELAKQAMATKTRLVITQSAYLEKIKSFADDSDVMVMCIDDDYSSENDGVLHFSTLTNADEREAPAVKINPDDLVALPFSSGTSGLPKGVMLSHENLVTTISQLVDGENPHQYTHSEDVLLCVLPMFHIYALNSILLCGIRSGAAVLIVQKFEITTLFELIEKYKVTVASFVPPIVLALVKSGETHRYDLSSIRAVVTGAAPLGGELQEAVKARLPHATFGQVSFSLLFLKIN

SEQ ID NO: 54340 - protein, 266 aa, Glycine max
  peptide (1)..(266): Ceres Seq. ID no. 14310909
  misc_feature (1)..(255): Pfam Name: AMP-binding enzyme Pfam Description: AMP-binding enzyme
MLVLRNCPQFALAFLGATHRGAVVTTANPFYTPAELAKQAMATKTRLVITQSAYLEKIKSFADDSDVMVMCIDDDYSSENDGVLHFSTLTNADEREAPAVKINPDDLVALPFSSGTSGLPKGVMLSHENLVTTISQLVDGENPHQYTHSEDVLLCVLPMFHIYALNSILLCGIRSGAAVLIVQKFEITTLFELIEKYKVTVASFVPPIVLALVKSGETHRYDLSSIRAVVTGAAPLGGELQEAVKARLPHATFGQVSFSLLFLKIN

SEQ ID NO: 54341 - protein, 226 aa, Glycine max
  peptide (1)..(226): Ceres Seq. ID no. 14310910
  misc_feature (1)..(215): Pfam Name: AMP-binding enzyme Pfam Description: AMP-binding enzyme
MATKTRLVITQSAYLEKIKSFADDSDVMVMCIDDDYSSENDGVLHFSTLTNADEREAPAVKINPDDLVALPFSSGTSGLPKGVMLSHENLVTTISQLVDGENPHQYTHSEDVLLCVLPMFHIYALNSILLCGIRSGAAVLIVQKFEITTLFELIEKYKVTVASFVPPIVLALVKSGETHRYDLSSIRAVVTGAAPLGGELQEAVKARLPHATFGQVSFSLLFLKIN

SEQ ID NO: 54342 - DNA, 1383 bp, Glycine max
  misc_feature (1)..(1383): Ceres Seq. ID no. 13595688
gaaacacgcgaatggctgctactgctccttggttttttagttgttgtgttgttgtcttcaactccacacagttccctcacttctcttccctttgaccattcaaccttcctcgcctttgcctccgtttccgtgactgagatggctggaggtgttattcagcagatattgaggaggaaactccaccctcggtttactaactctcccttgttgtcacccatcgtagcaaaaaaagatgatgctggctctactggcagtcagtccttaagagcacttgcattaattggagctggtttgtcaggtcttttcagtttttcaacaatggcagcagctgatgaagctgaacatggcctggcatgtccaagctatccatggcctcacaagggaattcttagttcatatgatcacgcttcgattcgtcgtggtcatcaagtttatacagaagtctgtgcttcctgccattctatgtctttgatatcgtatcgtgatttggttggtgttgcttatacagaagaagaggtaaaggctatggcagctgagattgaggtggttgatggccctaacgatgagggtgagatgtttacacgccctggtaaactcagtgatcgttttcctcagccatatgcaaatgaagcagctgctaggtttgctaatggaggagcttatcctccagatctaagtcttgttaccaaagcccgtcacaatggtcagaactatgtttttgcccttctgactggttatcgtgacccacctgctggtgtttcgataagagagggacttcattataatccttactttcctggtggagcaattgccatgcctaaaatgcttaatgatggtgctgtggaatatgaagatggtactcctgctacagaagctcagatggggaaggatgttgtgtcattcttaacttgggccgccgaacccgagatggaagagagaaaactgatgggatttaaatggatatttgtactgtcattggcactacttcaggctgcctattaccgccgcttgaggtggtcagttctaaagtctcgcaagctggttcttgatgttgtcaactagctctgcctcgagtttcattttcacttgaacaaagtttactgttggcaataatttgtcagatgattaagttgtttcatcatttcaaattctttcagctaagttaatgtttaatggaacaacaactagaagagtgttataattttgtttgagataaaaaaaaatgttccatgcacgagatgcgtttaatttttctcatcacccatctcggacttgtgtattgttgcattttccgagagctgttcctgtttcataaactattgaattttgtggaacttgtcgttattattcaagaaaaataatagataaatatgctcacgttgg

SEQ ID NO: 54343 - protein, 353 aa, Glycine max
  peptide (1)..(353): Ceres Seq. ID no. 13595689
  misc_feature (119)..(343): Pfam Name: Cytochrome C1 family Pfam Description: Cytochrome C1 family
  misc_feature (94)..(353): Homolog of NCBI NO: 82264 NR Description: ubiquinol-cytochrome-c reductase (EC 1.10.2.2)
  misc_feature (48)..(353): Homolog of NCBI NO: 34907202 NR Description: putative cytochrome c1 precursor
  misc_feature (78)..(353): Homolog of NCBI NO: 117765 NR Description: Cytochrome c1, heme protein, mitochondrial
  misc_feature (78)..(353): Homolog of NCBI NO: 82263 NR Description: ubiquinol-cytochrome-c reductase (EC 1.10.2.2)
  misc_feature (78)..(353): Homolog of NCBI NO: 7547401 NR Description: cytochrome c1 precursor [Solanum tuberosum]
  misc_feature (47)..(353): Homolog of NCBI NO: 15809956 NR Description: AT3g27240/K17E12_6 [Arabidopsis thaliana]
  misc_feature (47)..(353): Homolog of NCBI NO: 15215624 NR Description: AT5g40810/MHK7_4 [Arabidopsis thaliana]
  misc_feature (47)..(353): Homolog of NCBI NO: 15232125 NR Description: cytochrome c -related [Arabidopsis thaliana]
  misc_feature (47)..(353): Homolog of NCBI NO: 21593678 NR Description: cytochrome c, putative [Arabidopsis thaliana]
  misc_feature (47)..(353): Homolog of NCBI NO: 15237497 NR Description: cytochrome c1 precursor [Arabidopsis thaliana]
ETREWLLLLLGFLVVVLLSSTPHSSLTSLPFDHSTFLAFASVSVTEMAGGVIQQILRRKLHPRFTNSPLLSPIVAKKDDAGSTGSQSLRALALIGAGLSGLFSFSTMAAADEAEHGLACPSYPWPHKGILSSYDHASIRRGHQVYTEVCASCHSMSLISYRDLVGVAYTEEEVKAMAAEIEVVDGPNDEGEMFTRPGKLSDRFPQPYANEAAARFANGGAYPPDLSLVTKARHNGQNYVFALLTGYRDPPAGVSIREGLHYNPYFPGGAIAMPKMLNDGAVEYEDGTPATEAQMGKDVVSFLTWAAEPEMEERKLMGFKWIFVLSLALLQAAYYRRLRWSVLKSRKLVLDVVN

SEQ ID NO: 54344 - protein, 307 aa, Glycine max
  peptide (1)..(307): Ceres Seq. ID no. 13595690
  misc_feature (73)..(297): Pfam Name: Cytochrome C1 family Pfam Description: Cytochrome C1 family
  misc_feature (48)..(307): Homolog of NCBI NO: 82264 NR Description: ubiquinol-cytochrome-c reductase (EC 1.10.2.2)
  misc_feature (2)..(307): Homolog of NCBI NO: 34907202 NR Description: putative cytochrome c1 precursor
  misc_feature (32)..(307): Homolog of NCBI NO: 117765 NR Description: Cytochrome c1, heme protein, mitochondrial
  misc_feature (32)..(307): Homolog of NCBI NO: 82263 NR Description: ubiquinol-cytochrome-c reductase (EC 1.10.2.2)
  misc_feature (32)..(307): Homolog of NCBI NO: 7547401 NR Description: cytochrome c1 precursor [Solanum tuberosum]
  misc_feature (1)..(307): Homolog of NCBI NO: 15809956 NR Description: AT3g27240/K17E12_6 [Arabidopsis thaliana]
  misc_feature (1)..(307): Homolog of NCBI NO: 15215624 NR Description: AT5g40810/MHK7_4 [Arabidopsis thaliana]
  misc_feature (1)..(307): Homolog of NCBI NO: 15232125 NR Description: cytochrome c -related [Arabidopsis thaliana]
  misc_feature (1)..(307): Homolog of NCBI NO: 21593678 NR Description: cytochrome c, putative [Arabidopsis thaliana]
  misc_feature (1)..(307): Homolog of NCBI NO: 15237497 NR Description: cytochrome c1 precursor [Arabidopsis thaliana]
MAGGVIQQILRRKLHPRFTNSPLLSPIVAKKDDAGSTGSQSLRALALIGAGLSGLFSFSTMAAADEAEHGLACPSYPWPHKGILSSYDHASIRRGHQVYTEVCASCHSMSLISYRDLVGVAYTEEEVKAMAAEIEVVDGPNDEGEMFTRPGKLSDRFPQPYANEAAARFANGGAYPPDLSLVTKARHNGQNYVFALLTGYRDPPAGVSIREGLHYNPYFPGGAIAMPKMLNDGAVEYEDGTPATEAQMGKDVVSFLTWAAEPEMEERKLMGFKWIFVLSLALLQAAYYRRLRWSVLKSRKLVLDVVN

SEQ ID NO: 54345 - protein, 247 aa, Glycine max
  peptide (1)..(247): Ceres Seq. ID no. 13595691
  misc_feature (13)..(237): Pfam Name: Cytochrome C1 family Pfam Description: Cytochrome C1 family
  misc_feature (1)..(247): Homolog of NCBI NO: 82264 NR Description: ubiquinol-cytochrome-c reductase (EC 1.10.2.2)
  misc_feature (1)..(247): Homolog of NCBI NO: 34907202 NR Description: putative cytochrome c1 precursor
  misc_feature (1)..(247): Homolog of NCBI NO: 117765 NR Description: Cytochrome c1, heme protein, mitochondrial
  misc_feature (1)..(247): Homolog of NCBI NO: 82263 NR Description: ubiquinol-cytochrome-c reductase (EC 1.10.2.2)
  misc_feature (1)..(247): Homolog of NCBI NO: 7547401 NR Description: cytochrome c1 precursor [Solanum tuberosum]
  misc_feature (1)..(247): Homolog of NCBI NO: 15809956 NR Description: AT3g27240/K17E12_6 [Arabidopsis thaliana]
  misc_feature (1)..(247): Homolog of NCBI NO: 15215624 NR Description: AT5g40810/MHK7_4 [Arabidopsis thaliana]
  misc_feature (1)..(247): Homolog of NCBI NO: 15232125 NR Description: cytochrome c -related [Arabidopsis thaliana]
  misc_feature (1)..(247): Homolog of NCBI NO: 21593678 NR Description: cytochrome c, putative [Arabidopsis thaliana]
  misc_feature (1)..(247): Homolog of NCBI NO: 15237497 NR Description: cytochrome c1 precursor [Arabidopsis thaliana]
MAAADEAEHGLACPSYPWPHKGILSSYDHASIRRGHQVYTEVCASCHSMSLISYRDLVGVAYTEEEVKAMAAEIEVVDGPNDEGEMFTRPGKLSDRFPQPYANEAAARFANGGAYPPDLSLVTKARHNGQNYVFALLTGYRDPPAGVSIREGLHYNPYFPGGAIAMPKMLNDGAVEYEDGTPATEAQMGKDVVSFLTWAAEPEMEERKLMGFKWIFVLSLALLQAAYYRRLRWSVLKSRKLVLDVVN

SEQ ID NO: 54346 - DNA, 1248 bp, Glycine max
  misc_feature (1)..(1248): Ceres Seq. ID no. 14314164
actctcatcttttcagtttatctgtttctcaatcgttagatctcatcttatactcaccggcgagtccatctcgcgccagcgtcgacgccgctccggcaaccgctccggccaccgcctttggttccctcactttctcgtccttcttcttctcagaaatatgccttctcagaaagttgaaacgggtcatcaagacacggtccatgatgttgcaatggattactatggtaagaggctggccacggcttcatcagatcacacaattaagataattggggtgagtaatacggcctctcagcatctcgcaacattgactggtcaccaaggacctgtttggcaagtggcgtgggctcaccctaagtttggttctctacttgcatcgtgttcctatgatggtcgtgtcattgtttggaaggagggcaaccaaaatgaatggactcaagctcatgtgtttgatgaccacaagtcatctgtgaattcggttgcttgggcgcctcacgagttgggtctttgcttggcttgtggctcgtctgatgggaatatatctgttctgactgcaagagcagacggtggctgggacactgtgagaattgatcaggctcatccagttggtgtcacttcggtgtcatgggcgccatcgatggcacccggagcccttgtcggtgcagggttgcttgatccagtacagaagctgtgctctggtggttgtgataatactgtgaaggtatggaagctaaacaatggactctggaagatggactgcttccctgctcttcagatgcacacggattgggttcgagatgttgcttgggcacccaatttagggctccctaaatctaccattgctagcgcatcacaggacggtaaagtgattatatggaccgtggcgaaagagggggatcagtgggaaggcaaggttttgaatgatttcaacacccctgtttggagggtctcatggtcattgacaggaaacatattggctgtggctgatgggaacaacaatgtgacattgtggaaggaagcagttgatggggaatggcaacaggtgacaacagtggagccttagaatttgatattttttttttgaaaatggttagaattttcgttttgaaatatatagttgacgacatcttgtttctttgcatactatacagttgattaattgtgcttcataatgcactaagttccttgacgtttgtgatccattgagtattccgtgattggaagaatgaagttaattagtttgagttg

SEQ ID NO: 54347 - protein, 353 aa, Glycine max
  peptide (1)..(353): Ceres Seq. ID no. 14314165
  misc_feature (192)..(243): Pfam Name: WD domain, G-beta repeat Pfam Description: WD domain, G-beta repeat
  misc_feature (58)..(351): Homolog of NCBI NO: 27696242 NR Description: Similar to RIKEN cDNA 1110003H02 gene [Xenopus
  misc_feature (58)..(351): Homolog of NCBI NO: 32451650 NR Description: Unknown (protein for MGC:63980) [Danio rerio]
  misc_feature (58)..(351): Homolog of NCBI NO: 38174439 NR Description: Unknown (protein for MGC:76017) [Silurana
  misc_feature (53)..(353): Homolog of NCBI NO: 34897242 NR Description: putative coat protein complex II (COPII)
  misc_feature (53)..(353): Homolog of NCBI NO: 34393220 NR Description: putative Sec13p [Oryza sativa (japonica
  misc_feature (53)..(353): Homolog of NCBI NO: 21593236 NR Description: transport protein SEC13, putative [Arabidopsis
  misc_feature (53)..(352): Homolog of NCBI NO: 18147582 NR Description: Sec13p [Oryza sativa]
  misc_feature (53)..(353): Homolog of NCBI NO: 15232095 NR Description: protein transport protein SEC13 family / WD-40
  misc_feature (53)..(353): Homolog of NCBI NO: 21593146 NR Description: putative protein transport protein SEC13
  misc_feature (53)..(353): Homolog of NCBI NO: 15227692 NR Description: transducin / WD-40 repeat protein family
LSSFQFICFSIVRSHLILTGESISRQRRRRSGNRSGHRLWFPHFLVLLLLRNMPSQKVETGHQDTVHDVAMDYYGKRLATASSDHTIKIIGVSNTASQHLATLTGHQGPVWQVAWAHPKFGSLLASCSYDGRVIVWKEGNQNEWTQAHVFDDHKSSVNSVAWAPHELGLCLACGSSDGNISVLTARADGGWDTVRIDQAHPVGVTSVSWAPSMAPGALVGAGLLDPVQKLCSGGCDNTVKVWKLNNGLWKMDCFPALQMHTDWVRDVAWAPNLGLPKSTIASASQDGKVIIWTVAKEGDQWEGKVLNDFNTPVWRVSWSLTGNILAVADGNNNVTLWKEAVDGEWQQVTTVEP

SEQ ID NO: 54348 - protein, 301 aa, Glycine max
  peptide (1)..(301): Ceres Seq. ID no. 14314166
  misc_feature (140)..(191): Pfam Name: WD domain, G-beta repeat Pfam Description: WD domain, G-beta repeat
  misc_feature (6)..(299): Homolog of NCBI NO: 27696242 NR Description: Similar to RIKEN cDNA 1110003H02 gene [Xenopus
  misc_feature (6)..(299): Homolog of NCBI NO: 32451650 NR Description: Unknown (protein for MGC:63980) [Danio rerio]
  misc_feature (6)..(299): Homolog of NCBI NO: 38174439 NR Description: Unknown (protein for MGC:76017) [Silurana
  misc_feature (1)..(301): Homolog of NCBI NO: 34897242 NR Description: putative coat protein complex II (COPII)
  misc_feature (1)..(301): Homolog of NCBI NO: 34393220 NR Description: putative Sec13p [Oryza sativa (japonica
  misc_feature (1)..(301): Homolog of NCBI NO: 21593236 NR Description: transport protein SEC13, putative [Arabidopsis
  misc_feature (1)..(300): Homolog of NCBI NO: 18147582 NR Description: Sec13p [Oryza sativa]
  misc_feature (1)..(301): Homolog of NCBI NO: 15232095 NR Description: protein transport protein SEC13 family / WD-40
  misc_feature (1)..(301): Homolog of NCBI NO: 21593146 NR Description: putative protein transport protein SEC13
  misc_feature (1)..(301): Homolog of NCBI NO: 15227692 NR Description: transducin / WD-40 repeat protein family
MPSQKVETGHQDTVHDVAMDYYGKRLATASSDHTIKIIGVSNTASQHLATLTGHQGPVWQVAWAHPKFGSLLASCSYDGRVIVWKEGNQNEWTQAHVFDDHKSSVNSVAWAPHELGLCLACGSSDGNISVLTARADGGWDTVRIDQAHPVGVTSVSWAPSMAPGALVGAGLLDPVQKLCSGGCDNTVKVWKLNNGLWKMDCFPALQMHTDWVRDVAWAPNLGLPKSTIASASQDGKVIIWTVAKEGDQWEGKVLNDFNTPVWRVSWSLTGNILAVADGNNNVTLWKEAVDGEWQQVTTVEP

SEQ ID NO: 54349 - protein, 283 aa, Glycine max
  peptide (1)..(283): Ceres Seq. ID no. 14314167
  misc_feature (122)..(173): Pfam Name: WD domain, G-beta repeat Pfam Description: WD domain, G-beta repeat
  misc_feature (1)..(281): Homolog of NCBI NO: 27696242 NR Description: Similar to RIKEN cDNA 1110003H02 gene [Xenopus
  misc_feature (1)..(281): Homolog of NCBI NO: 32451650 NR Description: Unknown (protein for MGC:63980) [Danio rerio]
  misc_feature (1)..(281): Homolog of NCBI NO: 38174439 NR Description: Unknown (protein for MGC:76017) [Silurana
  misc_feature (1)..(283): Homolog of NCBI NO: 34897242 NR Description: putative coat protein complex II (COPII)
  misc_feature (1)..(283): Homolog of NCBI NO: 34393220 NR Description: putative Sec13p [Oryza sativa (japonica
  misc_feature (1)..(283): Homolog of NCBI NO: 21593236 NR Description: transport protein SEC13, putative [Arabidopsis
  misc_feature (1)..(282): Homolog of NCBI NO: 18147582 NR Description: Sec13p [Oryza sativa]
  misc_feature (1)..(283): Homolog of NCBI NO: 15232095 NR Description: protein transport protein SEC13 family / WD-40
  misc_feature (1)..(283): Homolog of NCBI NO: 21593146 NR Description: putative protein transport protein SEC13
  misc_feature (1)..(283): Homolog of NCBI NO: 15227692 NR Description: transducin / WD-40 repeat protein family
MDYYGKRLATASSDHTIKIIGVSNTASQHLATLTGHQGPVWQVAWAHPKFGSLLASCSYDGRVIVWKEGNQNEWTQAHVFDDHKSSVNSVAWAPHELGLCLACGSSDGNISVLTARADGGWDTVRIDQAHPVGVTSVSWAPSMAPGALVGAGLLDPVQKLCSGGCDNTVKVWKLNNGLWKMDCFPALQMHTDWVRDVAWAPNLGLPKSTIASASQDGKVIIWTVAKEGDQWEGKVLNDFNTPVWRVSWSLTGNILAVADGNNNVTLWKEAVDGEWQQVTTVEP

SEQ ID NO: 54350 - DNA, 1379 bp, Glycine max
  misc_feature (1)..(1379): Ceres Seq. ID no. 14314174
ggaaggatgcttcttcaattccctttccttctttcttagctttgaagaccaactcatttcaacttaacccatcaaaaccatcgctctctattttcgtcctttctacctttctccgatcccaatccctaatctttctctcttcaaactctaattttttcatctggggagatcggctgacgaatcgagaggatctcatcgctcgcaagggattagggtttcaatcgatcgcatcacatatcacaatcatgtttagccggatgttcggtaaacctaaacaggaaaccaatgctgttgccactttggacaagctaaacgagacacttgaaatgctggagaaaaaggagaaagtgctccttaaaaaggtggcagcagaagttgaaaaggccaaagaattcacaagggggaagaacaaaagggcggcaatacaatgtctgaagaggaagaggttatatgaacagcaaatagagcagcttggaaatttccagttgcgtattcatgaccagatgataatgttggaaggtgctaaagccaccacagaaacggtagacgcgttaagaactggagcagctgctatgaaggctatgcaaaaagcaacgaatattgatgatgttgacaagactatggatgagatcaatgaacagactgagaatatgaaacagattcaggatgcattgtctgctccaattggtgcggctgctgattttgacgaggatgaattggaagcagaacttgaagaactggagggtgctgagttggaagaacagcttcttcagccagcaactacagctcctgcggccccagtgcaggtcccagctgggcagcaacctactcgcccagttcccgcaaagcgaactccggaagaagatgaattggcagctttgcaggctgagatggcactttgagcagaattttgcaggcttttttttgtgcatggcttcaatgaagaattgtaaccactattacgtggagaattctgcttctctcctgctcgcttatctttgaaattattgagctgaccagaggatgtatataaaagtggaaaaaaaattatcataaaagtcttcaaaacgtactacttttattttggatgagttcgaacccctcctttccattatacgtatcaagtatattgatgcatttgactatcttatactttatgtggttgagtttaacgtggtcagtttaatcaatgtattatatcttaaacatgcttacagcaaagtataaggaataagaatttggttagcctatgagctagaacacagccatgattaaggtgatgatttttatttgtccataggaggatttacaagctgcactgccactgtgaatgtaaaattttattttctttatattataataatgattaagtaattaag

SEQ ID NO: 54351 - protein, 299 aa, Glycine max
  peptide (1)..(299): Ceres Seq. ID no. 14314175
  misc_feature (99)..(277): Pfam Name: SNF7 Pfam Description: SNF7
  misc_feature (100)..(296): Homolog of NCBI NO: 34859075 NR Description: similar to RIKEN cDNA 2010012F05 [Rattus
  misc_feature (85)..(299): Homolog of NCBI NO: 28850339 NR Description: similar to C56C10.3.p
  misc_feature (100)..(289): Homolog of NCBI NO: 28077049 NR Description: RIKEN cDNA 2010012F05 [Mus musculus]
  misc_feature (83)..(296): Homolog of NCBI NO: 31212691 NR Description: ENSANGP00000020979 [Anopheles gambiae]
  misc_feature (83)..(299): Homolog of NCBI NO: 19115183 NR Description: similar to yeast Snf7 protein involved in glucose
  misc_feature (82)..(289): Homolog of NCBI NO: 28278647 NR Description: Similar to RIKEN cDNA 2010012F05 gene [Danio
  misc_feature (82)..(295): Homolog of NCBI NO: 28277855 NR Description: Unknown (protein for MGC:56112) [Danio rerio]
  misc_feature (82)..(299): Homolog of NCBI NO: 15224854 NR Description: copia-related retroelement pol polyprotein
  misc_feature (84)..(299): Homolog of NCBI NO: 21594892 NR Description: copia-like retroelement pol polyprotein
  misc_feature (82)..(299): Homolog of NCBI NO: 15233464 NR Description: expressed protein [Arabidopsis thaliana]
KDASSIPFPSFLALKTNSFQLNPSKPSLSIFVLSTFLRSQSLIFLSSNSNFFIWGDRLTNREDLIARKGLGFQSIASHITIMFSRMFGKPKQETNAVATLDKLNETLEMLEKKEKVLLKKVAAEVEKAKEFTRGKNKRAAIQCLKRKRLYEQQIEQLGNFQLRIHDQMIMLEGAKATTETVDALRTGAAAMKAMQKATNIDDVDKTMDEINEQTENMKQIQDALSAPIGAAADFDEDELEAELEELEGAELEEQLLQPATTAPAAPVQVPAGQQPTRPVPAKRTPEEDELAALQAEMAL

SEQ ID NO: 54352 - protein, 218 aa, Glycine max
  peptide (1)..(218): Ceres Seq. ID no. 14314176
  misc_feature (18)..(196): Pfam Name: SNF7 Pfam Description: SNF7
  misc_feature (19)..(215): Homolog of NCBI NO: 34859075 NR Description: similar to RIKEN cDNA 2010012F05 [Rattus
  misc_feature (4)..(218): Homolog of NCBI NO: 28850339 NR Description: similar to C56C10.3.p
  misc_feature (19)..(208): Homolog of NCBI NO: 28077049 NR Description: RIKEN cDNA 2010012F05 [Mus musculus]
  misc_feature (2)..(215): Homolog of NCBI NO: 31212691 NR Description: ENSANGP00000020979 [Anopheles gambiae]
  misc_feature (2)..(218): Homolog of NCBI NO: 19115183 NR Description: similar to yeast Snf7 protein involved in glucose
  misc_feature (1)..(208): Homolog of NCBI NO: 28278647 NR Description: Similar to RIKEN cDNA 2010012F05 gene [Danio
  misc_feature (1)..(214): Homolog of NCBI NO: 28277855 NR Description: Unknown (protein for MGC:56112) [Danio rerio]
  misc_feature (1)..(218): Homolog of NCBI NO: 15224854 NR Description: copia-related retroelement pol polyprotein
  misc_feature (3)..(218): Homolog of NCBI NO: 21594892 NR Description: copia-like retroelement pol polyprotein
  misc_feature (1)..(218): Homolog of NCBI NO: 15233464 NR Description: expressed protein [Arabidopsis thaliana]
MFSRMFGKPKQETNAVATLDKLNETLEMLEKKEKVLLKKVAAEVEKAKEFTRGKNKRAAIQCLKRKRLYEQQIEQLGNFQLRIHDQMIMLEGAKATTETVDALRTGAAAMKAMQKATNIDDVDKTMDEINEQTENMKQIQDALSAPIGAAADFDEDELEAELEELEGAELEEQLLQPATTAPAAPVQVPAGQQPTRPVPAKRTPEEDELAALQAEMAL

SEQ ID NO: 54353 - protein, 214 aa, Glycine max
  peptide (1)..(214): Ceres Seq. ID no. 14314177
  misc_feature (14)..(192): Pfam Name: SNF7 Pfam Description: SNF7
  misc_feature (15)..(211): Homolog of NCBI NO: 34859075 NR Description: similar to RIKEN cDNA 2010012F05 [Rattus
  misc_feature (1)..(214): Homolog of NCBI NO: 28850339 NR Description: similar to C56C10.3.p
  misc_feature (15)..(204): Homolog of NCBI NO: 28077049 NR Description: RIKEN cDNA 2010012F05 [Mus musculus]
  misc_feature (1)..(211): Homolog of NCBI NO: 31212691 NR Description: ENSANGP00000020979 [Anopheles gambiae]
  misc_feature (1)..(214): Homolog of NCBI NO: 19115183 NR Description: similar to yeast Snf7 protein involved in glucose
  misc_feature (1)..(204): Homolog of NCBI NO: 28278647 NR Description: Similar to RIKEN cDNA 2010012F05 gene [Danio
  misc_feature (1)..(210): Homolog of NCBI NO: 28277855 NR Description: Unknown (protein for MGC:56112) [Danio rerio]
  misc_feature (1)..(214): Homolog of NCBI NO: 15224854 NR Description: copia-related retroelement pol polyprotein
  misc_feature (1)..(214): Homolog of NCBI NO: 21594892 NR Description: copia-like retroelement pol polyprotein
  misc_feature (1)..(214): Homolog of NCBI NO: 15233464 NR Description: expressed protein [Arabidopsis thaliana]
MFGKPKQETNAVATLDKLNETLEMLEKKEKVLLKKVAAEVEKAKEFTRGKNKRAAIQCLKRKRLYEQQIEQLGNFQLRIHDQMIMLEGAKATTETVDALRTGAAAMKAMQKATNIDDVDKTMDEINEQTENMKQIQDALSAPIGAAADFDEDELEAELEELEGAELEEQLLQPATTAPAAPVQVPAGQQPTRPVPAKRTPEEDELAALQAEMAL

SEQ ID NO: 54354 - DNA, 1982 bp, Glycine max
  misc_feature (1)..(1982): Ceres Seq. ID no. 14313167
atgatttctactctctttactctttagtttttttgttttgtatatattaaggcggcacagcacaggcctaagtgggtgtaagtgagtcttgggagtgagtcactcttcctgcagaacccagatctgtagacaatatgggaagcactggtttgctacatttgatatgccttgtcattgctttagtaagtgtgtcgcttgtgcaagcagaagatgcgtataagtatttcacatggacggtgacttatgggactctttatcccttggctagtccccagcaggttattcttatcaatggtcagtttcctgggcctagacttgacttggtaactaatgaaaatgtaattctcaaccttatcaacaagctggacgaaccatttttactcacttggaacggtattaaacaaaggaagaattcatggcaagatggagttttgggaaccaactgccccattcctccaaactcaaattacacatacaagtttcaggccaaggatcagattggcacatatacatactttccatcaactcaactgcataaagcagctggagggtttggagcactcaatgtttatcacagatctgtcatcccaatcccttatccaaaccctgatggagattttactctactcgttggtgattggtacaagaccaaccacaagacactaaggcaaactttagattctggaaaatctcttgcatttcctgatggcctccttattaatggtcaggctcattctaccttcactggtaaccaggggaaaacctatatgtttaggatctcaaatgtaggcttgtcaacctcaattaacttcagaattcagggtcataccctaaaattagttgaggttgaaggatcacacactgttcagaacctatacgattcacttgatgtgcatgttgggcaatcagttgcagtgttagtaaccttgaatcagcctccaaaggactactacattgttgcctcaacaagatttaccgagacacctctcactacaactgcagtactacactatgcaaactctttttcctctgcattaggacccgtgcctgctccccccgttgataaatatgactttgattggtccatgaagcaagctagaacctacagatggaatctgacagcaaatgctgctaggcctaatccacaagggtcattccattatgggaagattactcctacaaaagtaattaagttggccaattcagcacctttgatcaatggaaagctccgttatgctgttaacagtgtctcatatgttaaccctgacacccctctcaagcttgctgattacttcaacattcccggagtcttcagtgtgaatttactccaaaactctccctcaaacggtccaggatacataggcacctcagtgttgcaaacttctctccatgattttattgaggttattttccagaacaacgaaaacaccatgcaatcttggcatcttgatggttatgatttttgggtcattggtcatggtttcggccagtggacagatgctagcagaaaaacatataatctagtggatgccctgactagacacactgcacaggtgtatccaaaatcctggactactatattggtgtctttggataaccaaggcatgtggaacttgaggtctgcaatatgggaaagacaatatcttgggcaacagttctatcttagagtgtggaatgcacagaaaagccttgctaatgaatatgacattcccaataatgttctgctttgtggcaaagctgttggacatcacccttagtatatatatcggtgtattttctggtcatgagggcttgactacacaactagaattatttttcctttttcttaagaaagaaaaggacaatgtgggagaagtcaatttctccaaatttcggatagacttgcgtatatttgagaaaaaagtcttgtattaatttttcgttgctcgtttatgtattaacaattgagttcatacttaatttatttatagctgtaagttgtg

SEQ ID NO: 54355 - protein, 540 aa, Glycine max
  peptide (1)..(540): Ceres Seq. ID no. 14313168
  misc_feature (12)..(539): Homolog of NCBI NO: 1255951 NR Description: PS60 [Nicotiana tabacum]
  misc_feature (18)..(244): Homolog of NCBI NO: 34394659 NR Description: putative PS60 [Oryza sativa (japonica
  misc_feature (204)..(537): Homolog of NCBI NO: 34394659 NR Description: putative PS60 [Oryza sativa (japonica
  misc_feature (10)..(539): Homolog of NCBI NO: 15234688 NR Description: pectinesterase (pectin methylesterase), putative
  misc_feature (8)..(540): Homolog of NCBI NO: 18400335 NR Description: pectinesterase (pectin methylesterase) family
  misc_feature (1)..(535): Homolog of NCBI NO: 15235448 NR Description: pectinesterase (pectin methylesterase) family
  misc_feature (14)..(537): Homolog of NCBI NO: 33146556 NR Description: putative pollen-specific protein NTP303 precursor
  misc_feature (3)..(539): Homolog of NCBI NO: 21536987 NR Description: pectinesterase-like protein [Arabidopsis thaliana]
  misc_feature (3)..(539): Homolog of NCBI NO: 18425129 NR Description: pectinesterase (pectin methylesterase) family
  misc_feature (3)..(539): Homolog of NCBI NO: 9758142 NR Description: pectinesterase like protein [Arabidopsis thaliana]
MGSTGLLHLICLVIALVSVSLVQAEDAYKYFTWTVTYGTLYPLASPQQVILINGQFPGPRLDLVTNENVILNLINKLDEPFLLTWNGIKQRKNSWQDGVLGTNCPIPPNSNYTYKFQAKDQIGTYTYFPSTQLHKAAGGFGALNVYHRSVIPIPYPNPDGDFTLLVGDWYKTNHKTLRQTLDSGKSLAFPDGLLINGQAHSTFTGNQGKTYMFRISNVGLSTSINFRIQGHTLKLVEVEGSHTVQNLYDSLDVHVGQSVAVLVTLNQPPKDYYIVASTRFTETPLTTTAVLHYANSFSSALGPVPAPPVDKYDFDWSMKQARTYRWNLTANAARPNPQGSFHYGKITPTKVIKLANSAPLINGKLRYAVNSVSYVNPDTPLKLADYFNIPGVFSVNLLQNSPSNGPGYIGTSVLQTSLHDFIEVIFQNNENTMQSWHLDGYDFWVIGHGFGQWTDASRKTYNLVDALTRHTAQVYPKSWTTILVSLDNQGMWNLRSAIWERQYLGQQFYLRVWNAQKSLANEYDIPNNVLLCGKAVGHHP

SEQ ID NO: 54356 - protein, 329 aa, Glycine max
  peptide (1)..(329): Ceres Seq. ID no. 14313169
  misc_feature (1)..(328): Homolog of NCBI NO: 1255951 NR Description: PS60 [Nicotiana tabacum]
  misc_feature (1)..(33): Homolog of NCBI NO: 34394659 NR Description: putative PS60 [Oryza sativa (japonica
  misc_feature (1)..(326): Homolog of NCBI NO: 34394659 NR Description: putative PS60 [Oryza sativa (japonica
  misc_feature (1)..(328): Homolog of NCBI NO: 15234688 NR Description: pectinesterase (pectin methylesterase), putative
  misc_feature (1)..(329): Homolog of NCBI NO: 18400335 NR Description: pectinesterase (pectin methylesterase) family
  misc_feature (1)..(324): Homolog of NCBI NO: 15235448 NR Description: pectinesterase (pectin methylesterase) family
  misc_feature (1)..(326): Homolog of NCBI NO: 33146556 NR Description: putative pollen-specific protein NTP303 precursor
  misc_feature (1)..(328): Homolog of NCBI NO: 21536987 NR Description: pectinesterase-like protein [Arabidopsis thaliana]
  misc_feature (1)..(328): Homolog of NCBI NO: 18425129 NR Description: pectinesterase (pectin methylesterase) family
  misc_feature (1)..(328): Homolog of NCBI NO: 9758142 NR Description: pectinesterase like protein [Arabidopsis thaliana]
MFRISNVGLSTSINFRIQGHTLKLVEVEGSHTVQNLYDSLDVHVGQSVAVLVTLNQPPKDYYIVASTRFTETPLTTTAVLHYANSFSSALGPVPAPPVDKYDFDWSMKQARTYRWNLTANAARPNPQGSFHYGKITPTKVIKLANSAPLINGKLRYAVNSVSYVNPDTPLKLADYFNIPGVFSVNLLQNSPSNGPGYIGTSVLQTSLHDFIEVIFQNNENTMQSWHLDGYDFWVIGHGFGQWTDASRKTYNLVDALTRHTAQVYPKSWTTILVSLDNQGMWNLRSAIWERQYLGQQFYLRVWNAQKSLANEYDIPNNVLLCGKAVGHHP

SEQ ID NO: 54357 - DNA, 1373 bp, Glycine max
  misc_feature (1)..(1373): Ceres Seq. ID no. 14315388
ggtttatggaatagctggaaagcggagtcagtcacatcgataaaaaaaaagggcgggaaagaaagggtgtgtcaaaattttgagagccactcccagttttgcaccctcccacaaaatcaaaatcttcgttccgtgttttagcaatcggtagagagcgagacacggaatttgaaaattcatccaaaaactctccctctctacgcggcgcgaccctcacttcggcactccgcactgtctcggatcactcgctctctctgttggttctggtcatttctgatgtttatgaatctcacctaatgtgtgaatatgtgactttaaacttgttttgacaactggtctgtaaacaatattccaaaatttgataatactgtagctcataatgctagtaaatgagtgtcatatgcttgtaattttgagccaatatccatctactcaatctcatatgtaatctcaacatgctatttctttcatgtttctgcattattgctttcagagggactcattgcaggtaattgttgctcacatctttgcttcaaagttcactcatttcaatgacatatgataatatgatttgctcattgattgtaagcaatggagaaaacgcccaaacaaggttccgatgcatcactttttccttctactggaattggatcgaggttctccaatttgaacaagtctttcaaatattctctcagatctttgctcacttcatgctcaaaggaggaattttataaagcattttcaagtttctctaacactgaaaaggaattgctccatcgcctatttcttcaggtcattacttcgttgcatgaaaacttagaggatgggtttgagacggtctgtcttcaaacacaggcaggagctactcttgatgctgtggaggaaattgtggaagaacaagatctggatgtcttattttcagataggagtaacataatggatgttgctgagaatctgtctatggcaaagaagaatgaaatccaacacttaaagcatatggttcaattgggagaggaacataatcaaatgttgcgcactcgactgcaactccttagagaaggcaatcaagtgttatctggtgcctcacaagctgttgagaagttcaaaagcatgaatgtaaattatggggcaaacagcggtgatggccatgatgtataacatgtcttgctcattctttcctgcaaattgacgaaggttcattctctggtgaataattcccattgttttatgttgtagcaatgtttcttaagattcttacttcacgagtaagtctaccttagtccttgagattatagggtcatgtattttagaagctaagattttaaaaatcgtgcattagttcctgactttataaaacatactaatttgctttc

SEQ ID NO: 54358 - protein, 188 aa, Glycine max
  peptide (1)..(188): Ceres Seq. ID no. 14315389
  misc_feature (52)..(173): Homolog of NCBI NO: 7487713 NR Description: hypothetical protein T5K18.130 - Arabidopsis
  misc_feature (15)..(175): Homolog of NCBI NO: 34905298 NR Description: P0577B11.20 [Oryza sativa (japonica
  misc_feature (20)..(173): Homolog of NCBI NO: 18415295 NR Description: expressed protein [Arabidopsis thaliana]
MEKTPKQGSDASLFPSTGIGSRFSNLNKSFKYSLRSLLTSCSKEEFYKAFSSFSNTEKELLHRLFLQVITSLHENLEDGFETVCLQTQAGATLDAVEEIVEEQDLDVLFSDRSNIMDVAENLSMAKKNEIQHLKHMVQLGEEHNQMLRTRLQLLREGNQVLSGASQAVEKFKSMNVNYGANSGDGHDV

SEQ ID NO: 54359 - DNA, 1078 bp, Glycine max
  misc_feature (1)..(1078): Ceres Seq. ID no. 15172503
tcaatgcaaaacaattttatcaaaatcaagaaatgtgttggtttcccgaaatgcgactcaaatacccaatatcattgttagactcaccggatttaacgccggccgccaaggattcgatcaatcattttcataattttaaatatgattatccacaagaagtgcttaatacacatccatccataatggtatgctccgtattaaaagaacaatgcaatgctgactcatctctgccaaagcgcttggtcactgttctattggctgctctacgctcaaatggatcgtttggtgtgcatgtgtgcatcaatacaaccgatcgttttatgcatcaattctattcgaagctcggattcaccgaaattttcgaagacaccacaaaagtgtatttaggtcgaaatttctgaaacacaaatttacgttaaacacttttgatttcatcgaattttcatacgtgacaaccgatcgattagcgaaacaaatttcttttttgtttcacggaaattggaaaaaaagtggtttgaagttagatatttgttacttactttgaatccaaacataaaaatattaagagatgatattaatatagataaactattccgttcgtaaaaaaaagtgcccatgacttggaagcagcatacttcaaatggctcatggctaactgagatgtgaatgaatgtcaatacatatctattcaatatttaaataattgtcttcaaccctcttttttcattggtttgttgtattttgtaattgaatggatcgaaaaattgaagataagaaaataaatcgatggaacatttgcaggtaaatatatgaatttttttaaaattaaactgaaaatgcatgttatgtctgcagaatagcacacatagaaaaatatcaataaatctaaatgtgaatttaatgtattcaagcaatccaaaatgaaaaaccacaacaacaacaataagaaaaaaacacacagacttaatattaatccatttttttttctctattttattttatttcaaaacattatttatgtaaatttcatcaacaaaacatgaaataaataaaaaaaagcgattcattggaaatgaac

SEQ ID NO: 54360 - protein, 132 aa, Glycine max
  peptide (1)..(132): Ceres Seq. ID no. 15172504
  misc_feature (5)..(131): Homolog of NCBI NO: 12852831 NR Description: unnamed protein product [Mus musculus]
  misc_feature (5)..(132): Homolog of NCBI NO: 24648670 NR Description: CG5871-PA [Drosophila melanogaster]
  misc_feature (5)..(132): Homolog of NCBI NO: 15291431 NR Description: GH20986p [Drosophila melanogaster]
  misc_feature (1)..(131): Homolog of NCBI NO: 31197887 NR Description: ENSANGP00000006225 [Anopheles gambiae]
NAKQFYQNQEMCWFPEMRLKYPISLLDSPDLTPAAKDSINHFHNFKYDYPQEVLNTHPSIMVCSVLKEQCNADSSLPKRLVTVLLAALRSNGSFGVHVCINTTDRFMHQFYSKLGFTEIFEDTTKVYLGRNF

SEQ ID NO: 54361 - protein, 122 aa, Glycine max
  peptide (1)..(122): Ceres Seq. ID no. 15172505
  misc_feature (1)..(121): Homolog of NCBI NO: 12852831 NR Description: unnamed protein product [Mus musculus]
  misc_feature (1)..(122): Homolog of NCBI NO: 24648670 NR Description: CG5871-PA [Drosophila melanogaster]
  misc_feature (1)..(122): Homolog of NCBI NO: 15291431 NR Description: GH20986p [Drosophila melanogaster]
  misc_feature (1)..(121): Homolog of NCBI NO: 31197887 NR Description: ENSANGP00000006225 [Anopheles gambiae]
MCWFPEMRLKYPISLLDSPDLTPAAKDSINHFHNFKYDYPQEVLNTHPSIMVCSVLKEQCNADSSLPKRLVTVLLAALRSNGSFGVHVCINTTDRFMHQFYSKLGFTEIFEDTTKVYLGRNF

SEQ ID NO: 54362 - protein, 116 aa, Glycine max
  peptide (1)..(116): Ceres Seq. ID no. 15172506
  misc_feature (1)..(115): Homolog of NCBI NO: 12852831 NR Description: unnamed protein product [Mus musculus]
  misc_feature (1)..(116): Homolog of NCBI NO: 24648670 NR Description: CG5871-PA [Drosophila melanogaster]
  misc_feature (1)..(116): Homolog of NCBI NO: 15291431 NR Description: GH20986p [Drosophila melanogaster]
  misc_feature (1)..(115): Homolog of NCBI NO: 31197887 NR Description: ENSANGP00000006225 [Anopheles gambiae]
MRLKYPISLLDSPDLTPAAKDSINHFHNFKYDYPQEVLNTHPSIMVCSVLKEQCNADSSLPKRLVTVLLAALRSNGSFGVHVCINTTDRFMHQFYSKLGFTEIFEDTTKVYLGRNF

SEQ ID NO: 54363 - DNA, 676 bp, Glycine max
  misc_feature (1)..(676): Ceres Seq. ID no. 14314120
ttcattaaatggaaattaccctgcaaaatcattgtcaaattttgcagacattatctctagatgccttcagtctgagccagaatttaggccagcaatgtccgaggtcgtcctatacttgctaaatatgataaggaaggagtctcagcaaactgaatcaaatgaaaaatgagaaaggtagtgacatttgtttgtgaatttatcataatgtgcagagatgagagatccacttgctgaatatcaacttgtagagatgtcatgtcgtctgaggggagcccaattagttgtctccatgcttcattattccctactaacctattcaacattcacatgccaagttctaccaagagttttgtccaatcaaaaacttaagagaatggtagtgaccaacctcatatttgtagtcttatgatatctgataatttcatagtggattaaaatatgccatattaatattgtagatacgtgccaactaacccatttgtttgataattgtttcccaagtcttgatagcaaatgtaattccgttgtggcatccttgtggtttttaggttcatccttcgtaataaaagtttgttgatcatttgtattaaatcacagacaagcattgtaatttattgattgttctttgtacactacaaaaagatgttaggataaaatcattgtattttggtctttg

SEQ ID NO: 54364 - protein, 64 aa, Glycine max
  peptide (1)..(64): Ceres Seq. ID no. 14314121
MRDPLAEYQLVEMSCRLRGAQLVVSMLHYSLLTYSTFTCQVLPRVLSNQKLKRMVVTNLIFVVL

SEQ ID NO: 54365 - protein, 55 aa, Glycine max
  peptide (1)..(55): Ceres Seq. ID no. 14314122
  misc_feature (1)..(53): Homolog of NCBI NO: 15219262 NR Description: leucine-rich repeat transmembrane protein kinase,
  misc_feature (1)..(47): Homolog of NCBI NO: 15234728 NR Description: protein kinase family [Arabidopsis thaliana]
  misc_feature (1)..(53): Homolog of NCBI NO: 18399502 NR Description: LRR receptor protein kinase -related [Arabidopsis
  misc_feature (1)..(53): Homolog of NCBI NO: 25411997 NR Description: probable LRR receptor protein kinase
  misc_feature (1)..(46): Homolog of NCBI NO: 15236294 NR Description: leucine-rich repeat transmembrane protein kinase,
SLNGNYPAKSLSNFADIISRCLQSEPEFRPAMSEVVLYLLNMIRKESQQTESNEK

SEQ ID NO: 54366 - protein, 52 aa, Glycine max
  peptide (1)..(52): Ceres Seq. ID no. 14314123
MSCRLRGAQLVVSMLHYSLLTYSTFTCQVLPRVLSNQKLKRMVVTNLIFVVL

SEQ ID NO: 54367 - DNA, 1409 bp, Glycine max
  misc_feature (1)..(1409): Ceres Seq. ID no. 14307827
ggaaacattcctaaatgctaacctacttttgtttgtttcctctcatgttttcgctttcctttcttcttcttcttcttctgcattgagccttctttctttttctgttttcatggcatcaagcaacaacaacattcaggcaatatctcgcagccgaaaacatcaaaactcagccgtgacgatcgcccttggccgcaggagggggacccacaagaaacactctggtggtggtgatggcaattgcagttccccagttgtgaattcttgggaaggtggttccaagaaaagtgaggtttctgcgaggaagctcgctgctgggttgtggcagatgcagtatattcaagtctcaagggatcatcatgctgctgcttttggacacagctcctttccttcctccatgtcccagctggctaatggaaatgcaaagatcaggtttccccattatgacaaacctggtgaaaagtttcaagagaccaaggatcagctaaagaggccaataaccatcttgcgttcaagaaacggacttcgatctgagcttgaatcttctatgccacatctcaatggttcaaaagaaatggccacagaatggagccctactctcaatgaagcatccaatgagttcatcatgatccatagcaggaagcttctcgaagacaaaaaattagtaggtgaccataactctgttgtctccactttgctagaagaactccttcaagctcaaagatccatcaataaactcaaagcagagcaaaagaccatccagaaaaacgttgaacattttttgcagaatctcaaagatgacaaaatctttttgaagagcaaggaacaccacaagattaaagcaacaataggtgaattaaagggtaagttggaaagggaaagaagaagtagagagaggatggagttacttaacaccaaattggtgcatgaactagctgaagccaacttattaaggaagcagtttatgacaaactgcgagaaagagaagaaagagagagaactaatggaggaaatgtgcgaagaactagccatgcaaataggagaagacaaggctaagcttacagtaatactaagtgagtccaagagaatttgcgaggaagtggaagaagagaggaacatgatgcaaatggctgaactttggcgcgaagaacgcgtgcaaatgaagcttgttgatgcacaatttgttcttgaagacaagtataaccggttggtgcaacttgctgcttctcttgaaaggttcttgatatcaaggggtgctgaacttgacactacggaactagaggatgctgagttgatcaaacaagaagttgaatcattgaatattcaacgtgttatggagctttcttttgatgtctaaaaaacttccaagatatatatagttcacaatattctaggaacatggtatgaacagt

SEQ ID NO: 54368 - protein, 450 aa, Glycine max
  peptide (1)..(450): Ceres Seq. ID no. 14307828
  misc_feature (156)..(450): Pfam Name: Myosin tail Pfam Description: Myosin tail
  misc_feature (226)..(442): Homolog of NCBI NO: 38346645 NR Description: OSJNBa0072D21.15 [Oryza sativa (japonica
  misc_feature (217)..(417): Homolog of NCBI NO: 34394172 NR Description: hypothetical protein [Oryza sativa (japonica
  misc_feature (175)..(439): Homolog of NCBI NO: 18399293 NR Description: expressed protein [Arabidopsis thaliana]
  misc_feature (175)..(439): Homolog of NCBI NO: 15724288 NR Description: AT3g11590/F24K9_26 [Arabidopsis thaliana]
  misc_feature (273)..(433): Homolog of NCBI NO: 29367527 NR Description: unknown [Oryza sativa (japonica cultivar-group)]
  misc_feature (55)..(443): Homolog of NCBI NO: 40253811 NR Description: hypothetical protein [Oryza sativa (japonica
  misc_feature (190)..(450): Homolog of NCBI NO: 9294553 NR Description: gb|AAF00675.1~gene_id:MQC12.10~similar to unknown
  misc_feature (67)..(443): Homolog of NCBI NO: 38344183 NR Description: OSJNBa0053K19.22 [Oryza sativa (japonica
  misc_feature (98)..(450): Homolog of NCBI NO: 15231114 NR Description: expressed protein [Arabidopsis thaliana]
  misc_feature (97)..(450): Homolog of NCBI NO: 15223613 NR Description: expressed protein [Arabidopsis thaliana]
ETFLNANLLLFVSSHVFAFLSSSSSSALSLLSFSVFMASSNNNIQAISRSRKHQNSAVTIALGRRRGTHKKHSGGGDGNCSSPVVNSWEGGSKKSEVSARKLAAGLWQMQYIQVSRDHHAAAFGHSSFPSSMSQLANGNAKIRFPHYDKPGEKFQETKDQLKRPITILRSRNGLRSELESSMPHLNGSKEMATEWSPTLNEASNEFIMIHSRKLLEDKKLVGDHNSVVSTLLEELLQAQRSINKLKAEQKTIQKNVEHFLQNLKDDKIFLKSKEHHKIKATIGELKGKLERERRSRERMELLNTKLVHELAEANLLRKQFMTNCEKEKKERELMEEMCEELAMQIGEDKAKLTVILSESKRICEEVEEERNMMQMAELWREERVQMKLVDAQFVLEDKYNRLVQLAASLERFLISRGAELDTTELEDAELIKQEVESLNIQRVMELSFDV

SEQ ID NO: 54369 - protein, 414 aa, Glycine max
  peptide (1)..(414): Ceres Seq. ID no. 14307829
  misc_feature (120)..(414): Pfam Name: Myosin tail Pfam Description: Myosin tail
  misc_feature (190)..(406): Homolog of NCBI NO: 38346645 NR Description: OSJNBa0072D21.15 [Oryza sativa (japonica
  misc_feature (181)..(381): Homolog of NCBI NO: 34394172 NR Description: hypothetical protein [Oryza sativa (japonica
  misc_feature (139)..(403): Homolog of NCBI NO: 18399293 NR Description: expressed protein [Arabidopsis thaliana]
  misc_feature (139)..(403): Homolog of NCBI NO: 15724288 NR Description: AT3g11590/F24K9_26 [Arabidopsis thaliana]
  misc_feature (237)..(397): Homolog of NCBI NO: 29367527 NR Description: unknown [Oryza sativa (japonica cultivar-group)]
  misc_feature (19)..(407): Homolog of NCBI NO: 40253811 NR Description: hypothetical protein [Oryza sativa (japonica
  misc_feature (154)..(414): Homolog of NCBI NO: 9294553 NR Description: gb|AAF00675.1~gene_id:MQC12.10~similar to unknown
  misc_feature (31)..(407): Homolog of NCBI NO: 38344183 NR Description: OSJNBa0053K19.22 [Oryza sativa (japonica
  misc_feature (62)..(414): Homolog of NCBI NO: 15231114 NR Description: expressed protein [Arabidopsis thaliana]
  misc_feature (61)..(414): Homolog of NCBI NO: 15223613 NR Description: expressed protein [Arabidopsis thaliana]
MASSNNNIQAISRSRKHQNSAVTIALGRRRGTHKKHSGGGDGNCSSPVVNSWEGGSKKSEVSARKLAAGLWQMQYIQVSRDHHAAAFGHSSFPSSMSQLANGNAKIRFPHYDKPGEKFQETKDQLKRPITILRSRNGLRSELESSMPHLNGSKEMATEWSPTLNEASNEFIMIHSRKLLEDKKLVGDHNSVVSTLLEELLQAQRSINKLKAEQKTIQKNVEHFLQNLKDDKIFLKSKEHHKIKATIGELKGKLERERRSRERMELLNTKLVHELAEANLLRKQFMTNCEKEKKERELMEEMCEELAMQIGEDKAKLTVILSESKRICEEVEEERNMMQMAELWREERVQMKLVDAQFVLEDKYNRLVQLAASLERFLISRGAELDTTELEDAELIKQEVESLNIQRVMELSFDV

SEQ ID NO: 54370 - protein, 342 aa, Glycine max
  peptide (1)..(342): Ceres Seq. ID no. 14307830
  misc_feature (48)..(342): Pfam Name: Myosin tail Pfam Description: Myosin tail
  misc_feature (118)..(334): Homolog of NCBI NO: 38346645 NR Description: OSJNBa0072D21.15 [Oryza sativa (japonica
  misc_feature (109)..(309): Homolog of NCBI NO: 34394172 NR Description: hypothetical protein [Oryza sativa (japonica
  misc_feature (67)..(331): Homolog of NCBI NO: 18399293 NR Description: expressed protein [Arabidopsis thaliana]
  misc_feature (67)..(331): Homolog of NCBI NO: 15724288 NR Description: AT3g11590/F24K9_26 [Arabidopsis thaliana]
  misc_feature (165)..(325): Homolog of NCBI NO: 29367527 NR Description: unknown [Oryza sativa (japonica cultivar-group)]
  misc_feature (1)..(335): Homolog of NCBI NO: 40253811 NR Description: hypothetical protein [Oryza sativa (japonica
  misc_feature (82)..(342): Homolog of NCBI NO: 9294553 NR Description: gb|AAF00675.1~gene_id:MQC12.10~similar to unknown
  misc_feature (1)..(335): Homolog of NCBI NO: 38344183 NR Description: OSJNBa0053K19.22 [Oryza sativa (japonica
  misc_feature (1)..(342): Homolog of NCBI NO: 15231114 NR Description: expressed protein [Arabidopsis thaliana]
  misc_feature (1)..(342): Homolog of NCBI NO: 15223613 NR Description: expressed protein [Arabidopsis thaliana]
MQYIQVSRDHHAAAFGHSSFPSSMSQLANGNAKIRFPHYDKPGEKFQETKDQLKRPITILRSRNGLRSELESSMPHLNGSKEMATEWSPTLNEASNEFIMIHSRKLLEDKKLVGDHNSVVSTLLEELLQAQRSINKLKAEQKTIQKNVEHFLQNLKDDKIFLKSKEHHKIKATIGELKGKLERERRSRERMELLNTKLVHELAEANLLRKQFMTNCEKEKKERELMEEMCEELAMQIGEDKAKLTVILSESKRICEEVEEERNMMQMAELWREERVQMKLVDAQFVLEDKYNRLVQLAASLERFLISRGAELDTTELEDAELIKQEVESLNIQRVMELSFDV

SEQ ID NO: 54371 - DNA, 1745 bp, Glycine max
  misc_feature (1)..(1745): Ceres Seq. ID no. 15174535
gccttcatgataagctatctattgaattcatcatgctcttgctggctactatatatggtaccccttttgtatgttatggcttttaatataatcatttacaggtaaacacggcagcagaggttatatatgacctcgtggaccctactgctaatttaatatttggagcagtaatagatccatcactcagtggtcaagtaagttaaactatgtaaatctgtatcattaattatatgaagttgtaaataatatgcagtgattccaccagaaatgaattgcaccacataccccactctcgtgtaatgtgtataactagaagaaggagatatactgccattgttccttaatattaaagtcagtatgatgtaacgggcatgtgataaccattagtaattcatgactgtagaaaagattttacgataagttctctttgcaagtgatagagactagttagcaatcaatttgaatttctaaaatattagtataatcctttcattgttttgggttaatttcgccaagtgaaggatcattagctttaaaaaagtcacccaacacaattgacctcaaatattaattatttagtcctcaaaggaaataactaaatgtcctactttcacattgtggaccacaaaatctgagtactattaggtgaaaagaactaaaattaatatattgcttgtgtataagtgggccaagtttaaactaccatgttaaatacattaaataagaatagtgcttctctttcagtaagaggttagagaataataaagttcaatatatgctttattctcctaacataattgttaatatgttagatgatagtggtagaaaagattaataaatttgggttgttctggacacattaatagtcataatatggaacagaatggacttttattcaagataactatttgcttgaactgtatgtaagactttaattttacaatatgtacataccagtatcattttgctgaatttgagattctgtcctttgcaagtcaatttcttcaactcaaatgctcatttcttattacaagttaatggtagtgatctttctttatttatggtgaacttgtccagtgattatttgtgttgctggcatttgggttgagtgttagtttaattatttggacatataatatgatcattatggtgaaccatgaaatttggtttcatacaggtgagcataacattgattgcaactgggttcaagcgtcaagaggagagccaagggaggcctctgcaggtaaggatcatctcttccaactactctgtttctgtcatgcatatggcatactgtaattctggttttgttctgatcacaggtcagtcaactcactcaagcggatacaacctatggcaccaaccggcggtcttcctctttcgctgatggtggtttgtttgagataccagaattcctaaagaagaaaggaggaggttcacgctatccaagggcgtaatactcttcatcctaatttctttgatcccttgcatttcttcacctttggatatacatagcattggtctagttcttaggtccctgtcttgcccttttttggattttagtcagagtagtgaatacagtttgttcatgaaagttgattactttccactgtccagtcttgtgcgcctaactggaggtattgcagcatggatgcttttcttggcatatttgaataagtttgttagcttgtacagagaatatttcagtaatgctgagagcttgttatagaaaattcattattgtt

SEQ ID NO: 54372 - protein, 76 aa, Glycine max
  peptide (1)..(76): Ceres Seq. ID no. 15174536
  misc_feature (1)..(30): Homolog of NCBI NO: 18404086 NR Description: plastid division protein FtsZ [Arabidopsis
  misc_feature (1)..(30): Homolog of NCBI NO: 25300190 NR Description: plastid division protein (FtsZ) [imported] -
  misc_feature (1)..(29): Homolog of NCBI NO: 11277908 NR Description: plastid division protein ftsZ [imported] -
  misc_feature (1)..(29): Homolog of NCBI NO: 15810585 NR Description: putative plastid division protein FtsZ
  misc_feature (1)..(29): Homolog of NCBI NO: 15231677 NR Description: plastid division protein FtsZ, putative
  misc_feature (1)..(29): Homolog of NCBI NO: 11277907 NR Description: chloroplast FtsZ-like protein [imported] - common
  misc_feature (1)..(29): Homolog of NCBI NO: 14787784 NR Description: FtsZ-like protein [Nicotiana tabacum]
MKFGFIQVSITLIATGFKRQEESQGRPLQVRIISSNYSVSVMHMAYCNSGFVLITGQSTHSSGYNLWHQPAVFLFR

SEQ ID NO: 54373 - protein, 53 aa, Glycine max
  peptide (1)..(53): Ceres Seq. ID no. 15174537
MIIMVNHEIWFHTGEHNIDCNWVQASRGEPREASAGKDHLFQLLCFCHAYGIL

SEQ ID NO: 54374 - protein, 50 aa, Glycine max
  peptide (1)..(50): Ceres Seq. ID no. 15174538
MVNHEIWFHTGEHNIDCNWVQASRGEPREASAGKDHLFQLLCFCHAYGIL

SEQ ID NO: 54375 - DNA, 1813 bp, Glycine max
  misc_feature (1)..(1813): Ceres Seq. ID no. 14304867
gtgattctgaaaatctgaaatttcatttctctctgtataaatatcctagtccttatcagcttcactatttcgattgaaatcgccgaagaaggtattgacgtcgatgatgaaaatgaaattggtgaaaacattactgcttctcctttgtgtgaaactcttctgttatgcagtgattggtgctcctcaaacttgtcctgctaacaatgaggataaatgcggcgattcagatgaatggaaaggggagtttttccctgacattcccaaaattaaatatgagggtccgtcaagtaagaatgtgctttcatttaaatggtataatgcagaggaggaaattcttgggaagaagatgaaggattggttaagatttagtgttgcattttggcatacattccgtggaacaggtgctgacccatttggtgcacctaccaaatactggctatgggaagatggtaccaattcattaaacatggctaaaagacgaatgagagctaactttgagttcataagcaaactcggtgttgacttttggtgtttccacgacagggatatagcccctgatggaaaaactcttgaggaatctaatgcaaacttggatgaagtggttgcccttgctcaagagctccagactaaggctaaaaaaagagtgttatggggaacagctcagttgttcatgcatcctcgttacatgcatggtgctgctactagctctgaattaaaggtctatgcatatgctgctgctcaagtgaagaaagccatagaggtgacacattatttggggggagaaaattatgttttctggggtggtcgtgaaggttatcaatctcttttgaacacagatatggagcgagagcttaatcatttggctaggttttttgaagctgctgttgcatacaaaaagaagattggattcaatgggacatttctaatcgaaccaaagccacaagaacctacaaaacaccagtatgattgggatgctgcaacctcagctaatttcttgcgaaaatatggacttacaggggaattcaaactcaacatagagtgcaaccatgccaccctctctggccacagttgtcatcatgagctcgaaactgcaaggatcaatggattgctgggtaatattgatgcaaacactggtgatcctcaagttggttgggacactgatcagtttcttgtagatattcaagaggcgacactgattatgctcagtgtgatcagaaatggaggacttgcacccggtggattcaacttcgatgcgaaattgcggagagagagcacagatgttgaagacttgttcatagcccacattgttggaatggataccctggcccgtggcctgaggaatgctgccaagttgattgaggatggttctcttgctgagcttgttcgtaagcgttatcagagttttgacactgaaattggggctcaaatagaggctggtaaggctgactttgaactgcttgagaagaaggtcaaggaatggggagaaccaaaggttgcttctgcgaaacaggagctagccgagatgatcctccaatctgttctgtagaaagtagaatctagccgtgtgtggtggctatttttcgtctattatattaggaacaattcggtataattaggtttactaataaaaggaaattaagattgacttatgcctgcttcgttttccttgggaaaatataagtgtgaagctgttatctgctaggtggatacgaagcctggtgaagtgcatgttagcttatgtataaaactacgtgatgcatagcttccctggctttgagcatgcttgagttaattaattttagtttcactccgc

SEQ ID NO: 54376 - protein, 480 aa, Glycine max
  peptide (1)..(480): Ceres Seq. ID no. 14304868
  misc_feature (73)..(480): Pfam Name: Xylose isomerase Pfam Description: Xylose isomerase
  misc_feature (49)..(480): Homolog of NCBI NO: 32472084 NR Description: xylose isomerase [Pirellula sp.]
  misc_feature (47)..(480): Homolog of NCBI NO: 2581797 NR Description: xylose isomerase; XylA [Thermoanaerobacter
  misc_feature (47)..(480): Homolog of NCBI NO: 139827 NR Description: Xylose isomerase
  misc_feature (4)..(480): Homolog of NCBI NO: 2130051 NR Description: xylose isomerase (EC 5.3.1.5) - barley
  misc_feature (4)..(480): Homolog of NCBI NO: 6175480 NR Description: Xylose isomerase
  misc_feature (4)..(469): Homolog of NCBI NO: 17433690 NR Description: Xylose isomerase
  misc_feature (8)..(480): Homolog of NCBI NO: 34899308 NR Description: putative xylose isomerase [Oryza sativa (japonica
  misc_feature (8)..(480): Homolog of NCBI NO: 34395196 NR Description: putative xylose isomerase [Oryza sativa (japonica
  misc_feature (4)..(480): Homolog of NCBI NO: 21537178 NR Description: xylose isomerase [Arabidopsis thaliana]
  misc_feature (4)..(480): Homolog of NCBI NO: 30696904 NR Description: expressed protein [Arabidopsis thaliana]
MMKMKLVKTLLLLLCVKLFCYAVIGAPQTCPANNEDKCGDSDEWKGEFFPDIPKIKYEGPSSKNVLSFKWYNAEEEILGKKMKDWLRFSVAFWHTFRGTGADPFGAPTKYWLWEDGTNSLNMAKRRMRANFEFISKLGVDFWCFHDRDIAPDGKTLEESNANLDEVVALAQELQTKAKKRVLWGTAQLFMHPRYMHGAATSSELKVYAYAAAQVKKAIEVTHYLGGENYVFWGGREGYQSLLNTDMERELNHLARFFEAAVAYKKKIGFNGTFLIEPKPQEPTKHQYDWDAATSANFLRKYGLTGEFKLNIECNHATLSGHSCHHELETARINGLLGNIDANTGDPQVGWDTDQFLVDIQEATLIMLSVIRNGGLAPGGFNFDAKLRRESTDVEDLFIAHIVGMDTLARGLRNAAKLIEDGSLAELVRKRYQSFDTEIGAQIEAGKADFELLEKKVKEWGEPKVASAKQELAEMILQSVL

SEQ ID NO: 54377 - protein, 479 aa, Glycine max
  peptide (1)..(479): Ceres Seq. ID no. 14304869
  misc_feature (72)..(479): Pfam Name: Xylose isomerase Pfam Description: Xylose isomerase
  misc_feature (48)..(479): Homolog of NCBI NO: 32472084 NR Description: xylose isomerase [Pirellula sp.]
  misc_feature (46)..(479): Homolog of NCBI NO: 2581797 NR Description: xylose isomerase; XylA [Thermoanaerobacter
  misc_feature (46)..(479): Homolog of NCBI NO: 139827 NR Description: Xylose isomerase
  misc_feature (3)..(479): Homolog of NCBI NO: 2130051 NR Description: xylose isomerase (EC 5.3.1.5) - barley
  misc_feature (3)..(479): Homolog of NCBI NO: 6175480 NR Description: Xylose isomerase
  misc_feature (3)..(468): Homolog of NCBI NO: 17433690 NR Description: Xylose isomerase
  misc_feature (7)..(479): Homolog of NCBI NO: 34899308 NR Description: putative xylose isomerase [Oryza sativa (japonica
  misc_feature (7)..(479): Homolog of NCBI NO: 34395196 NR Description: putative xylose isomerase [Oryza sativa (japonica
  misc_feature (3)..(479): Homolog of NCBI NO: 21537178 NR Description: xylose isomerase [Arabidopsis thaliana]
  misc_feature (3)..(479): Homolog of NCBI NO: 30696904 NR Description: expressed protein [Arabidopsis thaliana]
MKMKLVKTLLLLLCVKLFCYAVIGAPQTCPANNEDKCGDSDEWKGEFFPDIPKIKYEGPSSKNVLSFKWYNAEEEILGKKMKDWLRFSVAFWHTFRGTGADPFGAPTKYWLWEDGTNSLNMAKRRMRANFEFISKLGVDFWCFHDRDIAPDGKTLEESNANLDEVVALAQELQTKAKKRVLWGTAQLFMHPRYMHGAATSSELKVYAYAAAQVKKAIEVTHYLGGENYVFWGGREGYQSLLNTDMERELNHLARFFEAAVAYKKKIGFNGTFLIEPKPQEPTKHQYDWDAATSANFLRKYGLTGEFKLNIECNHATLSGHSCHHELETARINGLLGNIDANTGDPQVGWDTDQFLVDIQEATLIMLSVIRNGGLAPGGFNFDAKLRRESTDVEDLFIAHIVGMDTLARGLRNAAKLIEDGSLAELVRKRYQSFDTEIGAQIEAGKADFELLEKKVKEWGEPKVASAKQELAEMILQSVL

SEQ ID NO: 54378 - protein, 477 aa, Glycine max
  peptide (1)..(477): Ceres Seq. ID no. 14304870
  misc_feature (70)..(477): Pfam Name: Xylose isomerase Pfam Description: Xylose isomerase
  misc_feature (46)..(477): Homolog of NCBI NO: 32472084 NR Description: xylose isomerase [Pirellula sp.]
  misc_feature (44)..(477): Homolog of NCBI NO: 2581797 NR Description: xylose isomerase; XylA [Thermoanaerobacter
  misc_feature (44)..(477): Homolog of NCBI NO: 139827 NR Description: Xylose isomerase
  misc_feature (1)..(477): Homolog of NCBI NO: 2130051 NR Description: xylose isomerase (EC 5.3.1.5) - barley
  misc_feature (1)..(477): Homolog of NCBI NO: 6175480 NR Description: Xylose isomerase
  misc_feature (1)..(466): Homolog of NCBI NO: 17433690 NR Description: Xylose isomerase
  misc_feature (5)..(477): Homolog of NCBI NO: 34899308 NR Description: putative xylose isomerase [Oryza sativa (japonica
  misc_feature (5)..(477): Homolog of NCBI NO: 34395196 NR Description: putative xylose isomerase [Oryza sativa (japonica
  misc_feature (1)..(477): Homolog of NCBI NO: 21537178 NR Description: xylose isomerase [Arabidopsis thaliana]
  misc_feature (1)..(477): Homolog of NCBI NO: 30696904 NR Description: expressed protein [Arabidopsis thaliana]
MKLVKTLLLLLCVKLFCYAVIGAPQTCPANNEDKCGDSDEWKGEFFPDIPKIKYEGPSSKNVLSFKWYNAEEEILGKKMKDWLRFSVAFWHTFRGTGADPFGAPTKYWLWEDGTNSLNMAKRRMRANFEFISKLGVDFWCFHDRDIAPDGKTLEESNANLDEVVALAQELQTKAKKRVLWGTAQLFMHPRYMHGAATSSELKVYAYAAAQVKKAIEVTHYLGGENYVFWGGREGYQSLLNTDMERELNHLARFFEAAVAYKKKIGFNGTFLIEPKPQEPTKHQYDWDAATSANFLRKYGLTGEFKLNIECNHATLSGHSCHHELETARINGLLGNIDANTGDPQVGWDTDQFLVDIQEATLIMLSVIRNGGLAPGGFNFDAKLRRESTDVEDLFIAHIVGMDTLARGLRNAAKLIEDGSLAELVRKRYQSFDTEIGAQIEAGKADFELLEKKVKEWGEPKVASAKQELAEMILQSVL

SEQ ID NO: 54379 - DNA, 1169 bp, Glycine max
  misc_feature (1)..(1169): Ceres Seq. ID no. 14307839
atgttgcaacagagagacagaaaaaggactcacaatcacgaaggagaagaaacccaataagtgattctcatttttatggctcttgccctgaagtcaagttgcttcttgcaattgaagaaacctgaggctggtttcaatgtttgtttttcatctaagaaagctataatctccgtgaaacgacacactcccgtggctgctatcaggaccatggaagcagtgggactctctgcaacattcaccaggttgaaaaaagaaggaaaagtagctttcatcccgtatgtcactgctggtgatcctgacctttcaaccacagcagaagcactgaaagtgcttgattcatgtgggtctgacataattgagctaggtgttccatactctgatcctttggcagatggtcctgttatccaggctgctgctacaagatctttagcaaaggggaccaatttgaatgcgattattgatatgttgaaggaggttgttccgcaactgtcatgtccaattgcactgtttacatattacaatccaatactgaagcgtggtactgataaatttatgtccactataagagacagtggtgtacatgggcttgtagtcccagatgtccctctggaggagacggaaactttaaggacagaagctaagaaacatggaattgaactggtactcctcacaacacccacaactccaacaaaccgaatgagagccattgttgatgtggcagaaggatttgtgtatcttgtgagctcagtgggggtcactggagcccgagcatcagttagtggttctgttcagtctcttttgaaggaaattaaagaggcaactactaaacctgtggcagttggttttggaatatcaaaacctgagcatgtgaaacaggtagtggtatggggagctgatggtgtgattgttggcagtgctatagtgaaggtgcttggtgaggccaaatctcctcaagagggattgaaagaacttgaagttttcacccgctccttaaaagcggcacttccttaaaaaatatgttttaagagctcgaacttcatgtagttgttgtcgtcatcgtagatattggattcaataaaatgcggttcagttgtttttcttctgttcatgatatagtagttttgacatttttatttccttttcaattatgattggatttcttagttacc

SEQ ID NO: 54380 - protein, 311 aa, Glycine max
  peptide (1)..(311): Ceres Seq. ID no. 14307840
  misc_feature (54)..(310): Pfam Name: Tryptophan synthase alpha chain Pfam Description: Tryptophan synthase alpha chain
  misc_feature (38)..(311): Homolog of NCBI NO: 34897218 NR Description: putative indole-3-glycerol phosphate lyase
  misc_feature (38)..(311): Homolog of NCBI NO: 34897212 NR Description: putative indole-3-glycerol phosphate lyase
  misc_feature (28)..(311): Homolog of NCBI NO: 11993325 NR Description: indole-3-glycerol phosphate lyase [Zea mays]
  misc_feature (86)..(310): Homolog of NCBI NO: 32441888 NR Description: putative tryptophan synthase alpha chain
  misc_feature (50)..(311): Homolog of NCBI NO: 11993328 NR Description: putative tryptophan synthase alpha [Zea mays]
  misc_feature (49)..(311): Homolog of NCBI NO: 34897224 NR Description: putative indole-3-glycerol phosphate lyase
  misc_feature (38)..(311): Homolog of NCBI NO: 34393530 NR Description: putative tryptophan synthase alpha chain
  misc_feature (48)..(310): Homolog of NCBI NO: 15235430 NR Description: tryptophan synthase, alpha subunit (TSA1),
  misc_feature (1)..(310): Homolog of NCBI NO: 21593559 NR Description: tryptophan synthase alpha chain [Arabidopsis
  misc_feature (1)..(310): Homolog of NCBI NO: 18410104 NR Description: tryptophan synthase, alpha subunit (TSA1)
MALALKSSCFLQLKKPEAGFNVCFSSKKAIISVKRHTPVAAIRTMEAVGLSATFTRLKKEGKVAFIPYVTAGDPDLSTTAEALKVLDSCGSDIIELGVPYSDPLADGPVIQAAATRSLAKGTNLNAIIDMLKEVVPQLSCPIALFTYYNPILKRGTDKFMSTIRDSGVHGLVVPDVPLEETETLRTEAKKHGIELVLLTTPTTPTNRMRAIVDVAEGFVYLVSSVGVTGARASVSGSVQSLLKEIKEATTKPVAVGFGISKPEHVKQVVVWGADGVIVGSAIVKVLGEAKSPQEGLKELEVFTRSLKAALP

SEQ ID NO: 54381 - protein, 267 aa, Glycine max
  peptide (1)..(267): Ceres Seq. ID no. 14307841
  misc_feature (10)..(266): Pfam Name: Tryptophan synthase alpha chain Pfam Description: Tryptophan synthase alpha chain
  misc_feature (1)..(267): Homolog of NCBI NO: 34897218 NR Description: putative indole-3-glycerol phosphate lyase
  misc_feature (1)..(267): Homolog of NCBI NO: 34897212 NR Description: putative indole-3-glycerol phosphate lyase
  misc_feature (1)..(267): Homolog of NCBI NO: 11993325 NR Description: indole-3-glycerol phosphate lyase [Zea mays]
  misc_feature (42)..(266): Homolog of NCBI NO: 32441888 NR Description: putative tryptophan synthase alpha chain
  misc_feature (6)..(267): Homolog of NCBI NO: 11993328 NR Description: putative tryptophan synthase alpha [Zea mays]
  misc_feature (5)..(267): Homolog of NCBI NO: 34897224 NR Description: putative indole-3-glycerol phosphate lyase
  misc_feature (1)..(267): Homolog of NCBI NO: 34393530 NR Description: putative tryptophan synthase alpha chain
  misc_feature (4)..(266): Homolog of NCBI NO: 15235430 NR Description: tryptophan synthase, alpha subunit (TSA1),
  misc_feature (1)..(266): Homolog of NCBI NO: 21593559 NR Description: tryptophan synthase alpha chain [Arabidopsis
  misc_feature (1)..(266): Homolog of NCBI NO: 18410104 NR Description: tryptophan synthase, alpha subunit (TSA1)
MEAVGLSATFTRLKKEGKVAFIPYVTAGDPDLSTTAEALKVLDSCGSDIIELGVPYSDPLADGPVIQAAATRSLAKGTNLNAIIDMLKEVVPQLSCPIALFTYYNPILKRGTDKFMSTIRDSGVHGLVVPDVPLEETETLRTEAKKHGIELVLLTTPTTPTNRMRAIVDVAEGFVYLVSSVGVTGARASVSGSVQSLLKEIKEATTKPVAVGFGISKPEHVKQVVVWGADGVIVGSAIVKVLGEAKSPQEGLKELEVFTRSLKAALP

SEQ ID NO: 54382 - protein, 182 aa, Glycine max
  peptide (1)..(182): Ceres Seq. ID no. 14307842
  misc_feature (1)..(181): Pfam Name: Tryptophan synthase alpha chain Pfam Description: Tryptophan synthase alpha chain
  misc_feature (1)..(182): Homolog of NCBI NO: 34897218 NR Description: putative indole-3-glycerol phosphate lyase
  misc_feature (1)..(182): Homolog of NCBI NO: 34897212 NR Description: putative indole-3-glycerol phosphate lyase
  misc_feature (1)..(182): Homolog of NCBI NO: 11993325 NR Description: indole-3-glycerol phosphate lyase [Zea mays]
  misc_feature (1)..(181): Homolog of NCBI NO: 32441888 NR Description: putative tryptophan synthase alpha chain
  misc_feature (1)..(182): Homolog of NCBI NO: 11993328 NR Description: putative tryptophan synthase alpha [Zea mays]
  misc_feature (1)..(182): Homolog of NCBI NO: 34897224 NR Description: putative indole-3-glycerol phosphate lyase
  misc_feature (1)..(182): Homolog of NCBI NO: 34393530 NR Description: putative tryptophan synthase alpha chain
  misc_feature (1)..(181): Homolog of NCBI NO: 15235430 NR Description: tryptophan synthase, alpha subunit (TSA1),
  misc_feature (1)..(181): Homolog of NCBI NO: 21593559 NR Description: tryptophan synthase alpha chain [Arabidopsis
  misc_feature (1)..(181): Homolog of NCBI NO: 18410104 NR Description: tryptophan synthase, alpha subunit (TSA1)
MLKEVVPQLSCPIALFTYYNPILKRGTDKFMSTIRDSGVHGLVVPDVPLEETETLRTEAKKHGIELVLLTTPTTPTNRMRAIVDVAEGFVYLVSSVGVTGARASVSGSVQSLLKEIKEATTKPVAVGFGISKPEHVKQVVVWGADGVIVGSAIVKVLGEAKSPQEGLKELEVFTRSLKAALP

SEQ ID NO: 54383 - DNA, 1194 bp, Glycine max
  misc_feature (1)..(1194): Ceres Seq. ID no. 15177071
gaaaaacctcgtcctttcccctgcttcgttttcaaaacttttgcgaaatttctatcttcttcaccttgctctcaccttctgggtaatgtttgaaacttggtgttagctgagctgtttgacaaaaatgaatattgcacaagttacagcatggcagcctgggatttgtgtgaaaaatatgtctcagttgcaccggcttcaatctaaaccatgtgttataccaaagagttttggtcctctcacttgtgttctactgagcttaagagcaagacaatcgtttagctcgaaatgttggcccattttacaatctcggaaacctcttcatatttgcttagccggtggaaaagggatgatgggaaatgatgagaattccccatggaaatctattgagaaagctattggaaaatttaagggagaatcatcaatagaggatgtattacggcgccaaattgaaaagggtgtatattatgacagtggtggtggtggagtgaaaccaccaggaggcgggaacagtggtggtggccctgatggctctggtgaatcagaagaagaaagccttgctgggatgtgggaagaaaatatccaagtgattttagcgacccttggctttatatttctgtacatttatattctcactggggaggaactcacaaagctagctagagactatatcaagtatctatttgggggaagccagagtgtccgactgaaaaatgccatgtatcaatggggacaactctatgaaagcatgacagctcagaaagaagaggaagacgagtattggttgcagaaggccattctggatacaccaacttggtggcacgaccctgctgattaccgtgaagcccttaaaaactacttgctatcaggtacagatgaggccattgccaccaggaattacttagaattagattcagatgcagacgttaggtattgcttggaatcagatgacgaagaagatgaagatgaagatcaatatcaatataaagatgattatgaagaaaagtttgcctagagtccggagcaacttctattgctctccatctattttcccctcctcaagtttaataaagctttgtatacgttgtatcatcatgcttgtagtgtattgccctttcttgcatttgtttttcccacaatactaatggaatcatgacaacaatttgacttttatatgaactgaagttgtttctctat

SEQ ID NO: 54384 - protein, 295 aa, Glycine max
  peptide (1)..(295): Ceres Seq. ID no. 15177072
  misc_feature (39)..(237): Homolog of NCBI NO: 38345414 NR Description: OSJNBb0091E11.5 [Oryza sativa (japonica
  misc_feature (1)..(221): Homolog of NCBI NO: 15231725 NR Description: glycine-rich protein [Arabidopsis thaliana]
  misc_feature (96)..(269): Homolog of NCBI NO: 25408887 NR Description: hypothetical protein At2g43630 [imported] -
  misc_feature (1)..(269): Homolog of NCBI NO: 30689439 NR Description: expressed protein [Arabidopsis thaliana]
MNIAQVTAWQPGICVKNMSQLHRLQSKPCVIPKSFGPLTCVLLSLRARQSFSSKCWPILQSRKPLHICLAGGKGMMGNDENSPWKSIEKAIGKFKGESSIEDVLRRQIEKGVYYDSGGGGVKPPGGGNSGGGPDGSGESEEESLAGMWEENIQVILATLGFIFLYIYILTGEELTKLARDYIKYLFGGSQSVRLKNAMYQWGQLYESMTAQKEEEDEYWLQKAILDTPTWWHDPADYREALKNYLLSGTDEAIATRNYLELDSDADVRYCLESDDEEDEDEDQYQYKDDYEEKFA

SEQ ID NO: 54385 - protein, 278 aa, Glycine max
  peptide (1)..(278): Ceres Seq. ID no. 15177073
  misc_feature (22)..(220): Homolog of NCBI NO: 38345414 NR Description: OSJNBb0091E11.5 [Oryza sativa (japonica
  misc_feature (1)..(204): Homolog of NCBI NO: 15231725 NR Description: glycine-rich protein [Arabidopsis thaliana]
  misc_feature (79)..(252): Homolog of NCBI NO: 25408887 NR Description: hypothetical protein At2g43630 [imported] -
  misc_feature (1)..(252): Homolog of NCBI NO: 30689439 NR Description: expressed protein [Arabidopsis thaliana]
MSQLHRLQSKPCVIPKSFGPLTCVLLSLRARQSFSSKCWPILQSRKPLHICLAGGKGMMGNDENSPWKSIEKAIGKFKGESSIEDVLRRQIEKGVYYDSGGGGVKPPGGGNSGGGPDGSGESEEESLAGMWEENIQVILATLGFIFLYIYILTGEELTKLARDYIKYLFGGSQSVRLKNAMYQWGQLYESMTAQKEEEDEYWLQKAILDTPTWWHDPADYREALKNYLLSGTDEAIATRNYLELDSDADVRYCLESDDEEDEDEDQYQYKDDYEEKFA

SEQ ID NO: 54386 - protein, 221 aa, Glycine max
  peptide (1)..(221): Ceres Seq. ID no. 15177074
  misc_feature (1)..(163): Homolog of NCBI NO: 38345414 NR Description: OSJNBb0091E11.5 [Oryza sativa (japonica
  misc_feature (1)..(147): Homolog of NCBI NO: 15231725 NR Description: glycine-rich protein [Arabidopsis thaliana]
  misc_feature (22)..(195): Homolog of NCBI NO: 25408887 NR Description: hypothetical protein At2g43630 [imported] -
  misc_feature (1)..(195): Homolog of NCBI NO: 30689439 NR Description: expressed protein [Arabidopsis thaliana]
MMGNDENSPWKSIEKAIGKFKGESSIEDVLRRQIEKGVYYDSGGGGVKPPGGGNSGGGPDGSGESEEESLAGMWEENIQVILATLGFIFLYIYILTGEELTKLARDYIKYLFGGSQSVRLKNAMYQWGQLYESMTAQKEEEDEYWLQKAILDTPTWWHDPADYREALKNYLLSGTDEAIATRNYLELDSDADVRYCLESDDEEDEDEDQYQYKDDYEEKFA

SEQ ID NO: 54387 - DNA, 1524 bp, Glycine max
  misc_feature (1)..(1524): Ceres Seq. ID no. 15177434
ataccatcattactttttgcgttaggtttcgtatttatgtttactattgggggattatcaggtgtggttcttgctaacgcatcacttgatattgctttccacgatacttactacgtagttgctcatttccactacgtgttaagtatgggtgccgtatttgccttatttagtggatgatacttctgaatccctaaaatattagggttagattataacttactatattctaaagctcacttctgagttctatttactggagttaatttaactttcttccctcaacacttcttaggattacaaggtatgccacgtagaattagtgattaccctgacgcctttacaggttgaaacttcattagtagtattggttcacttatctctgttgctgctactgtgttattcttacacatagtatacttacaacttgttaaagggaaagctatatttggttacccttgagcagttcctcaactatttagtgattacttaagaatacttaaagataaatgtgctccagggttagagtgagcattaagtaatccacctaaacctcacgcatttactagcttaccattacaaagtagtacaatcttatcttctatttttgccgcaattagcactttatttgctgtttctagtgaattcgtatgtgatgcacctagagcgtgaggattatacttccaagatagtgctagtccacaaatggaagctttaatcgaattacatgataacattatgtattacttagttgctattttatttagtgttggttgaatacaaggagctattattaaaaattttgatagcgcaaaatcacctataagtaataaataccttaaccacggtacattaatagaattaatttgaacaattacacctgctctaatattagtattaattgctttcccttctttcaaactattatacttaatggatgaagttactgatccttcactatctgtattagcagaagggcaccaatgatactgaagttacgagtacccagatttcttaaatagtgatggagactttgtagaatttgattcttacttagtatctgaatctgacttagaagaaggggctttaagaatgttagaagtagataatagagttattcttcctgaaattacacacactagatttattcttactgctgctgatgtaatccattcatttgctataccagcattaggtgttaaatgtgatgcatacccaggtagattaaatcaattctctgttttaattaacagattaggaacattctacggtcaatgttcagaaatatgtggtattttacacagttctatgccaattgttgtagaatctgtatcactagaaaaattcttatcatgattacaagaacaataataagtaatttacaataagaaattactgagtctcttaaagataaaagggctttagacaaaaaagtttaaagtctgaactttacaaagatttaaccattttttttactttaatttgaatacctaaatttcttaatgtaaaaattaaaattagttaagc

SEQ ID NO: 54388 - protein, 87 aa, Glycine max
  peptide (1)..(87): Ceres Seq. ID no. 15177435
  misc_feature (1)..(87): Pfam Name: Cytochrome C oxidase subunit II, periplasmic domain Pfam Description: Cytochrome C oxidase subunit II, periplasmic
  misc_feature (1)..(81): Homolog of NCBI NO: 6525111 NR Description: cytochrome oxidase subunit 2 [Lespedeza formosa]
  misc_feature (1)..(87): Homolog of NCBI NO: 33302600 NR Description: Cytochrome c oxidase polypeptide II,
  misc_feature (1)..(87): Homolog of NCBI NO: 38639922 NR Description: cytochrome-c oxidase subunit 2 [Penicillium
  misc_feature (1)..(85): Homolog of NCBI NO: 544082 NR Description: Cytochrome c oxidase polypeptide II
  misc_feature (1)..(85): Homolog of NCBI NO: 320104 NR Description: cytochrome-c oxidase (EC 1.9.3.1) chain II -
  misc_feature (1)..(81): Homolog of NCBI NO: 11467051 NR Description: cytochrome oxidase subunit 1 and subunit 2
  misc_feature (1)..(87): Homolog of NCBI NO: 7524975 NR Description: cytochrome oxidase subunit 1 and subunit 2
  misc_feature (1)..(87): Homolog of NCBI NO: 2655920 NR Description: cytochrome-c oxidase subunit I and subunit II
  misc_feature (1)..(87): Homolog of NCBI NO: 12408617 NR Description: cytochrome c oxidase subunit 2 [Podospora
  misc_feature (1)..(87): Homolog of NCBI NO: 117030 NR Description: Cytochrome c oxidase polypeptide II
MLEVDNRVILPEITHTRFILTAADVIHSFAIPALGVKCDAYPGRLNQFSVLINRLGTFYGQCSEICGILHSSMPIVVESVSLEKFLS

SEQ ID NO: 54389 - protein, 58 aa, Glycine max
  peptide (1)..(58): Ceres Seq. ID no. 15177436
  misc_feature (2)..(58): Pfam Name: Cytochrome C and Quinol oxidase polypeptide I Pfam Description: Cytochrome C and Quinol oxidase polypeptide I
  misc_feature (2)..(58): Homolog of NCBI NO: 9957433 NR Description: cytochrome oxidase subunit 1 [Aspergillus niger]
  misc_feature (2)..(58): Homolog of NCBI NO: 8926250 NR Description: cytochrome oxidase subunit I [Aspergillus
  misc_feature (2)..(58): Homolog of NCBI NO: 38639912 NR Description: cytochrome-c oxidase subunit 1 [Penicillium
  misc_feature (2)..(58): Homolog of NCBI NO: 12408633 NR Description: cytochrome c oxidase subunit 1 [Podospora
  misc_feature (2)..(58): Homolog of NCBI NO: 227388 NR Description: cytochrome oxidase I
  misc_feature (2)..(58): Homolog of NCBI NO: 4218451 NR Description: cytochrome oxidase subunit I [Neurospora crassa]
  misc_feature (2)..(58): Homolog of NCBI NO: 116983 NR Description: Cytochrome c oxidase polypeptide I
  misc_feature (4)..(58): Homolog of NCBI NO: 11467051 NR Description: cytochrome oxidase subunit 1 and subunit 2
  misc_feature (4)..(58): Homolog of NCBI NO: 7524975 NR Description: cytochrome oxidase subunit 1 and subunit 2
  misc_feature (4)..(58): Homolog of NCBI NO: 2655920 NR Description: cytochrome-c oxidase subunit I and subunit II
IPSLLFALGFVFMFTIGGLSGVVLANASLDIAFHDTYYVVAHFHYVLSMGAVFALFSG

SEQ ID NO: 54390 - protein, 46 aa, Glycine max
  peptide (1)..(46): Ceres Seq. ID no. 15177437
  misc_feature (1)..(46): Homolog of NCBI NO: 9957433 NR Description: cytochrome oxidase subunit 1 [Aspergillus niger]
  misc_feature (1)..(46): Homolog of NCBI NO: 8926250 NR Description: cytochrome oxidase subunit I [Aspergillus
  misc_feature (1)..(46): Homolog of NCBI NO: 38639912 NR Description: cytochrome-c oxidase subunit 1 [Penicillium
  misc_feature (1)..(46): Homolog of NCBI NO: 12408633 NR Description: cytochrome c oxidase subunit 1 [Podospora
  misc_feature (1)..(46): Homolog of NCBI NO: 227388 NR Description: cytochrome oxidase I
  misc_feature (1)..(46): Homolog of NCBI NO: 4218451 NR Description: cytochrome oxidase subunit I [Neurospora crassa]
  misc_feature (1)..(46): Homolog of NCBI NO: 116983 NR Description: Cytochrome c oxidase polypeptide I
  misc_feature (1)..(46): Homolog of NCBI NO: 11467051 NR Description: cytochrome oxidase subunit 1 and subunit 2
  misc_feature (1)..(46): Homolog of NCBI NO: 7524975 NR Description: cytochrome oxidase subunit 1 and subunit 2
  misc_feature (1)..(46): Homolog of NCBI NO: 2655920 NR Description: cytochrome-c oxidase subunit I and subunit II
MFTIGGLSGVVLANASLDIAFHDTYYVVAHFHYVLSMGAVFALFSG

SEQ ID NO: 54391 - DNA, 1392 bp, Glycine max
  misc_feature (1)..(1392): Ceres Seq. ID no. 14307736
tctcttctcgtatcacacgatccatctacacggtcaaaaagaaaatcgttttccttgagaaaatacggacacagagacagagagagggagagagagaaggaaatgggaagcacaaagtttctattgttggtgatggtgtttctcgcagtgtgcgtggggacatgcaggccttggggtgatgatgtagttgaagatggagaggaggccaaacattttgcagcaaaagccgtgcatgatgtcgaggaagagacccgctcttgggctgattgggctcaagacaagttctccaaaagtttcggggccgaagaggatcatgaaaaacaagcgactcaaaacatgaagtatcaagctgaagatgctgcttcaagggccacggagagagtgaaatctgcagcatcaggagcctcggactatgcttctcaaaaggctacggatgctaagtaagcagtttcaggtgctaaggtcatcaaaatgccaacagatagcattaacaatgcaaaacacacaatgggagatacctacgaggatgctaagcaaaaaatgaacacagcttcagataaggcttcaagtatggctcacaatgccaaagataacacggctgagtccatggaatatggaaaagatatagcagccaatgcctatgaccagggtaagcaaaaaataaacattgcttcagatacagcatcagagaaattctatgatgccaaggacaaggcaagtgatgttaggcataaagtgaaaggagccatgggttgtggaggagataaggccaataatgatgctaaaaataacatgggcgtgaaaatggaacatggaagggacaaagtagccgaaacttttgaccaggctaaacgtgaagtgggtgaagcatatgtatcagcaaagaataccatgactgaagaggccaaagctaagtacgaggctgcaaaggagaaggcttcggatgcaacaggtgatttaggagctaagatgaggaacaccccaaacgtataagcgcatggttagtttaccgcttattcttaactatgacaacctctattagtttttagctctagtttccacaagttatcgtttatattgtgctttaatctcttgtaatgtgttagtcttttacacgttcttgtatgcttttctctttaatagagatgcaaaaaatacttgttagacattatgaaaaagtcattacgtacaaatctattctccataatgataggagagagcctgaaaggtcccacggttaggttcttctatgatctatcacgatgccaggtagattcatatacagggtgctgccccataatgttgtagggactttgcagcttatatatagtaggctatatgtatgtgtaattataacattttgcagttagtggatcctctcacgattggtac

SEQ ID NO: 54392 - protein, 173 aa, Glycine max
  peptide (1)..(173): Ceres Seq. ID no. 14307737
  misc_feature (1)..(167): Homolog of NCBI NO: 39590066 NR Description: Hypothetical protein CBG04813 [Caenorhabditis
  misc_feature (1)..(158): Homolog of NCBI NO: 17562388 NR Description: plant Late Embryo Abundant related, contains
  misc_feature (1)..(166): Homolog of NCBI NO: 21322750 NR Description: LEA-like protein [Lilium longiflorum]
  misc_feature (1)..(143): Homolog of NCBI NO: 39590049 NR Description: Hypothetical protein CBG04792 [Caenorhabditis
  misc_feature (1)..(169): Homolog of NCBI NO: 17562388 NR Description: plant Late Embryo Abundant related, contains
  misc_feature (1)..(169): Homolog of NCBI NO: 22265914 NR Description: Hypothetical protein K08H10.2a [Caenorhabditis
  misc_feature (1)..(169): Homolog of NCBI NO: 7505593 NR Description: hypothetical protein K08H10.2a - Caenorhabditis
  misc_feature (1)..(158): Homolog of NCBI NO: 81552 NR Description: embryonic abundant protein D-29 - upland cotton
  misc_feature (1)..(169): Homolog of NCBI NO: 25407743 NR Description: hypothetical protein AT4g36600 [imported] -
  misc_feature (1)..(169): Homolog of NCBI NO: 30690704 NR Description: late embryogenesis abundant (LEA)
MPTDSINNAKHTMGDTYEDAKQKMNTASDKASSMAHNAKDNTAESMEYGKDIAANAYDQGKQKINIASDTASEKFYDAKDKASDVRHKVKGAMGCGGDKANNDAKNNMGVKMEHGRDKVAETFDQAKREVGEAYVSAKNTMTEEAKAKYEAAKEKASDATGDLGAKMRNTPNV

SEQ ID NO: 54393 - protein, 161 aa, Glycine max
  peptide (1)..(161): Ceres Seq. ID no. 14307738
  misc_feature (1)..(155): Homolog of NCBI NO: 39590066 NR Description: Hypothetical protein CBG04813 [Caenorhabditis
  misc_feature (1)..(146): Homolog of NCBI NO: 17562388 NR Description: plant Late Embryo Abundant related, contains
  misc_feature (1)..(154): Homolog of NCBI NO: 21322750 NR Description: LEA-like protein [Lilium longiflorum]
  misc_feature (1)..(131): Homolog of NCBI NO: 39590049 NR Description: Hypothetical protein CBG04792 [Caenorhabditis
  misc_feature (1)..(157): Homolog of NCBI NO: 17562388 NR Description: plant Late Embryo Abundant related, contains
  misc_feature (1)..(157): Homolog of NCBI NO: 22265914 NR Description: Hypothetical protein K08H10.2a [Caenorhabditis
  misc_feature (1)..(157): Homolog of NCBI NO: 7505593 NR Description: hypothetical protein K08H10.2a - Caenorhabditis
  misc_feature (1)..(146): Homolog of NCBI NO: 81552 NR Description: embryonic abundant protein D-29 - upland cotton
  misc_feature (1)..(157): Homolog of NCBI NO: 25407743 NR Description: hypothetical protein AT4g36600 [imported] -
  misc_feature (1)..(157): Homolog of NCBI NO: 30690704 NR Description: late embryogenesis abundant (LEA)
MGDTYEDAKQKMNTASDKASSMAHNAKDNTAESMEYGKDIAANAYDQGKQKINIASDTASEKFYDAKDKASDVRHKVKGAMGCGGDKANNDAKNNMGVKMEHGRDKVAETFDQAKREVGEAYVSAKNTMTEEAKAKYEAAKEKASDATGDLGAKMRNTPNV

SEQ ID NO: 54394 - protein, 150 aa, Glycine max
  peptide (1)..(150): Ceres Seq. ID no. 14307739
  misc_feature (1)..(144): Homolog of NCBI NO: 39590066 NR Description: Hypothetical protein CBG04813 [Caenorhabditis
  misc_feature (1)..(135): Homolog of NCBI NO: 17562388 NR Description: plant Late Embryo Abundant related, contains
  misc_feature (1)..(143): Homolog of NCBI NO: 21322750 NR Description: LEA-like protein [Lilium longiflorum]
  misc_feature (1)..(120): Homolog of NCBI NO: 39590049 NR Description: Hypothetical protein CBG04792 [Caenorhabditis
  misc_feature (1)..(146): Homolog of NCBI NO: 17562388 NR Description: plant Late Embryo Abundant related, contains
  misc_feature (1)..(146): Homolog of NCBI NO: 22265914 NR Description: Hypothetical protein K08H10.2a [Caenorhabditis
  misc_feature (1)..(146): Homolog of NCBI NO: 7505593 NR Description: hypothetical protein K08H10.2a - Caenorhabditis
  misc_feature (1)..(135): Homolog of NCBI NO: 81552 NR Description: embryonic abundant protein D-29 - upland cotton
  misc_feature (1)..(146): Homolog of NCBI NO: 25407743 NR Description: hypothetical protein AT4g36600 [imported] -
  misc_feature (1)..(146): Homolog of NCBI NO: 30690704 NR Description: late embryogenesis abundant (LEA)
MNTASDKASSMAHNAKDNTAESMEYGKDIAANAYDQGKQKINIASDTASEKFYDAKDKASDVRHKVKGAMGCGGDKANNDAKNNMGVKMEHGRDKVAETFDQAKREVGEAYVSAKNTMTEEAKAKYEAAKEKASDATGDLGAKMRNTPNV

SEQ ID NO: 54395 - DNA, 1449 bp, Glycine max
  misc_feature (1)..(1449): Ceres Seq. ID no. 14307233
aacatagactagtgcggtgcattccctcgtttaccatgctttcctaagagaaagagaaaagtaaaacccctcactactgatagattttcattcctccgaggaaaaaaaaaacatgtcggatgctttgatcaatggattggccggagctggaggagggatcattgctcagctcatcacatacccacttcaaactgtaaacactcgccaacaaaccgagcgtgatccgaagaaagacacgaggagtcaaggggccctcgaacgaatgtgccaggttgtaaaagaagaggggtgggaacggttgtatggaggcttgatgccatcggtagtgggtacagctgcgtctcagggagtttactattatttctatcaaatattcaggaacaaagctgaagcagctgcactacaacaaaagaaaatgggcgttggtgatggatcagttgggatgctctcctctcttgttgttgctgctttatctgggtgtgttaacgtgctcttgacaaatcccatatgggtagttgttacgcgtatgcagacacatagaaaagagtcgaacagaactccagctgatcagggtttgtttgttgccactgagcagccaattctttctgcagttgagcctcttccttatggaactagtcatgtgattcaagaaatctacggtgaagctggaatttggggtttctggaaaggtgtattaccaacattaatcatggtaagcaatccttccatacagttcatgctgtatgaagccatgttggcaaagttaagaaaaagacgtgcttggagtaagaagggtagcaacggggtaactgctttagagatatttcttattggagctttagctaagcttggagctactgttgtaacttatccgatcctagttgtgaaggcaaggctccaagctagacaggataaaactggagacaggagacaccattacaaaggtacatgggatgctattattaaaatgatccgctatgaggggtttaatgggttttacaaaggcatgggcacaaaaatcgtacaaagtgtgctggctgctgctgttttgttcatgatgaaggaagaattagttaggggggttcgtttcttgcttgccaaggatgctgtaaagccaaagaatctgtgattggaggccactagcttgatcaagatttcatgtaccatcttcagttagcaaattagttcaaatggtaggggaattagagtgattcaaacaacatattgaaatatggctttaactgtatcttgattattttcatcaggttagtttccatagaggaaattcatgccaaaaattacacactgggttcattggtttgtttcatgaacaagacagggttgtagatttgaagtatgctgctgaaacaaatattctttttacgaacgaatatcactatctgatttcattggcagctaaagatttagatcaaaatttaattcacgaat

SEQ ID NO: 54396 - protein, 338 aa, Glycine max
  peptide (1)..(338): Ceres Seq. ID no. 14307234
  misc_feature (173)..(320): Homolog of NCBI NO: 19921888 NR Description: CG8026-PB [Drosophila melanogaster]
  misc_feature (53)..(320): Homolog of NCBI NO: 32404402 NR Description: hypothetical protein [Neurospora crassa]
  misc_feature (2)..(146): Homolog of NCBI NO: 40739628 NR Description: hypothetical protein AN4280.2 [Aspergillus
  misc_feature (169)..(320): Homolog of NCBI NO: 40739628 NR Description: hypothetical protein AN4280.2 [Aspergillus
  misc_feature (2)..(320): Homolog of NCBI NO: 38105196 NR Description: hypothetical protein MG03247.4 [Magnaporthe
  misc_feature (186)..(321): Homolog of NCBI NO: 28828484 NR Description: hypothetical protein [Dictyostelium discoideum]
  misc_feature (1)..(140): Homolog of NCBI NO: 28828484 NR Description: hypothetical protein [Dictyostelium discoideum]
  misc_feature (1)..(338): Homolog of NCBI NO: 34901996 NR Description: unknown protein [Oryza sativa (japonica
  misc_feature (1)..(329): Homolog of NCBI NO: 21593883 NR Description: putative peroxisomal membrane carrier protein
  misc_feature (1)..(329): Homolog of NCBI NO: 15225602 NR Description: peroxisomal membrane protein (PMP36) [Arabidopsis
MSDALINGLAGAGGGIIAQLITYPLQTVNTRQQTERDPKKDTRSQGALERMCQVVKEEGWERLYGGLMPSVVGTAASQGVYYYFYQIFRNKAEAAALQQKKMGVGDGSVGMLSSLVVAALSGCVNVLLTNPIWVVVTRMQTHRKESNRTPADQGLFVATEQPILSAVEPLPYGTSHVIQEIYGEAGIWGFWKGVLPTLIMVSNPSIQFMLYEAMLAKLRKRRAWSKKGSNGVTALEIFLIGALAKLGATVVTYPILVVKARLQARQDKTGDRRHHYKGTWDAIIKMIRYEGFNGFYKGMGTKIVQSVLAAAVLFMMKEELVRGVRFLLAKDAVKPKNL

SEQ ID NO: 54397 - protein, 288 aa, Glycine max
  peptide (1)..(288): Ceres Seq. ID no. 14307235
  misc_feature (123)..(270): Homolog of NCBI NO: 19921888 NR Description: CG8026-PB [Drosophila melanogaster]
  misc_feature (3)..(270): Homolog of NCBI NO: 32404402 NR Description: hypothetical protein [Neurospora crassa]
  misc_feature (1)..(96): Homolog of NCBI NO: 40739628 NR Description: hypothetical protein AN4280.2 [Aspergillus
  misc_feature (119)..(270): Homolog of NCBI NO: 40739628 NR Description: hypothetical protein AN4280.2 [Aspergillus
  misc_feature (1)..(270): Homolog of NCBI NO: 38105196 NR Description: hypothetical protein MG03247.4 [Magnaporthe
  misc_feature (136)..(271): Homolog of NCBI NO: 28828484 NR Description: hypothetical protein [Dictyostelium discoideum]
  misc_feature (1)..(90): Homolog of NCBI NO: 28828484 NR Description: hypothetical protein [Dictyostelium discoideum]
  misc_feature (1)..(288): Homolog of NCBI NO: 34901996 NR Description: unknown protein [Oryza sativa (japonica
  misc_feature (1)..(279): Homolog of NCBI NO: 21593883 NR Description: putative peroxisomal membrane carrier protein
  misc_feature (1)..(279): Homolog of NCBI NO: 15225602 NR Description: peroxisomal membrane protein (PMP36) [Arabidopsis
MCQVVKEEGWERLYGGLMPSVVGTAASQGVYYYFYQIFRNKAEAAALQQKKMGVGDGSVGMLSSLVVAALSGCVNVLLTNPIWVVVTRMQTHRKESNRTPADQGLFVATEQPILSAVEPLPYGTSHVIQEIYGEAGIWGFWKGVLPTLIMVSNPSIQFMLYEAMLAKLRKRRAWSKKGSNGVTALEIFLIGALAKLGATVVTYPILVVKARLQARQDKTGDRRHHYKGTWDAIIKMIRYEGFNGFYKGMGTKIVQSVLAAAVLFMMKEELVRGVRFLLAKDAVKPKNL

SEQ ID NO: 54398 - protein, 271 aa, Glycine max
  peptide (1)..(271): Ceres Seq. ID no. 14307236
  misc_feature (106)..(253): Homolog of NCBI NO: 19921888 NR Description: CG8026-PB [Drosophila melanogaster]
  misc_feature (1)..(253): Homolog of NCBI NO: 32404402 NR Description: hypothetical protein [Neurospora crassa]
  misc_feature (1)..(79): Homolog of NCBI NO: 40739628 NR Description: hypothetical protein AN4280.2 [Aspergillus
  misc_feature (102)..(253): Homolog of NCBI NO: 40739628 NR Description: hypothetical protein AN4280.2 [Aspergillus
  misc_feature (1)..(253): Homolog of NCBI NO: 38105196 NR Description: hypothetical protein MG03247.4 [Magnaporthe
  misc_feature (119)..(254): Homolog of NCBI NO: 28828484 NR Description: hypothetical protein [Dictyostelium discoideum]
  misc_feature (1)..(73): Homolog of NCBI NO: 28828484 NR Description: hypothetical protein [Dictyostelium discoideum]
  misc_feature (1)..(271): Homolog of NCBI NO: 34901996 NR Description: unknown protein [Oryza sativa (japonica
  misc_feature (1)..(262): Homolog of NCBI NO: 21593883 NR Description: putative peroxisomal membrane carrier protein
  misc_feature (1)..(262): Homolog of NCBI NO: 15225602 NR Description: peroxisomal membrane protein (PMP36) [Arabidopsis
MPSVVGTAASQGVYYYFYQIFRNKAEAAALQQKKMGVGDGSVGMLSSLVVAALSGCVNVLLTNPIWVVVTRMQTHRKESNRTPADQGLFVATEQPILSAVEPLPYGTSHVIQEIYGEAGIWGFWKGVLPTLIMVSNPSIQFMLYEAMLAKLRKRRAWSKKGSNGVTALEIFLIGALAKLGATVVTYPILVVKARLQARQDKTGDRRHHYKGTWDAIIKMIRYEGFNGFYKGMGTKIVQSVLAAAVLFMMKEELVRGVRFLLAKDAVKPKNL

SEQ ID NO: 54399 - DNA, 1646 bp, Glycine max
  misc_feature (1)..(1646): Ceres Seq. ID no. 14312212
acctaggaaaaaccgtttccaactttacattttcccaccaaccctcctctccattcctcaaaacaatcgttaatctcttctccattgtgaactctgatattctccaagtacacaacacaaacacacatcaatttatagcacccgatttctcttttccccctcaaattcagctccattttgttacagattcaaataataagccaagcagccacaccatgatctcgtcaatgaaatgcacagcctcatctctcacatgttctgctttctcaaacagaaagcttcccattgcaaggcctcaactcgtgacattaccaaccatcaacaacgttgaacaaaacatgggtccctctcagttgtgttcacagaagcctctctacctttcatccaccgagaacttggcattggtgaggagaaggagagtgacggagtgccaggcctatgaagctgacaggtcacggcctctggagatcaacattgagctgccggctgaagaggcggcgcagaggttcaagattggtgtgtattttgctacatggtgggctttgaatgtagttttcaacatttacaataagaaggttttgaatgcttttccttacccgtggctcacctccactttgtcccttgctgctggctccctcatgatgttagtctcatgggccaccagggttgctgaggtcccaaaagtcaacttggacttctggaagggcttgtttcctgttgccgtggcacacacaattgggcatgttgctgcaactgtgagcatgtccaaggttgctgtttcattcactcacatcatcaagagtggagagccagctttcagtgtccttgtgtcaaggttcttgctcggagaagcattcccaatgccggtttatctgtcactgctgccaattattggtggttgtgcactagctgcagtgactgagctcaatttcaacatgattggcttcatgggggctatgatatcaaatttggcatttgtcttccgcaatatattctcaaagaaagggatgaagggaatgtctgttagtggaatgaactactatgcttgtctttccataatgtcactgttaattctgacaccttttgccattgctgttgagggccccaaggtttgggctgcaggctggcaaacagctgtatctcaaattggtcccaattttgtatggtgggtagctgcacagagtgtcttttaccacttgtacaatcaagtctcatacatgtctcttgatcagatttctcccttaacatttagcattggaaacacaatgaagaggatttcggtcattgtttcttccatccttatctttcacacgcctgttcagcccatcaatgctcttggtgctgccattgcaattcttggcaccttcctctattcacaggctaaacagtaaggtggttattttgaagcttttatgtaacacaaggaaacgatgactcatggttggagctcaaagtgtcactgatgaggactatggcattaattagctagtatgttttgttgttaataggaatttaagtttatttcttttgggccatagcagcagcatttgtaatcacgttttgatctttgtaaattagctttagaaggatggaatgcactaaactgtacttaatcttgaggctgaaagtctatgaagaatttcttg

SEQ ID NO: 54400 - protein, 462 aa, Glycine max
  peptide (1)..(462): Ceres Seq. ID no. 14312213
  misc_feature (180)..(305): Pfam Name: Integral membrane protein DUF6 Pfam Description: Integral membrane protein DUF6
  misc_feature (118)..(459): Homolog of NCBI NO: 9758260 NR Description: glucose-6-phosphate/phosphate translocator
  misc_feature (86)..(461): Homolog of NCBI NO: 7489744 NR Description: glucose-6-phosphate/phosphate-translocator
  misc_feature (118)..(461): Homolog of NCBI NO: 21554690 NR Description: glucose-6-phosphate/phosphate translocator
  misc_feature (118)..(461): Homolog of NCBI NO: 18423670 NR Description: glucose-6-phosphate/phosphate translocator,
  misc_feature (96)..(462): Homolog of NCBI NO: 27752361 NR Description: glucose-6-phosphate/phosphate translocator 2
  misc_feature (96)..(462): Homolog of NCBI NO: 7489258 NR Description: probable
  misc_feature (72)..(462): Homolog of NCBI NO: 7488807 NR Description: glucose-6-phosphate/phosphate-translocator
  misc_feature (72)..(462): Homolog of NCBI NO: 7484980 NR Description: glucose-6-phosphate/phosphate translocator
  misc_feature (72)..(462): Homolog of NCBI NO: 14596173 NR Description: Similar to
  misc_feature (72)..(462): Homolog of NCBI NO: 18407336 NR Description: glucose-6-phosphate/phosphate-translocator,
LGKTVSNFTFSHQPSSPFLKTIVNLFSIVNSDILQVHNTNTHQFIAPDFSFPPQIQLHFVTDSNNKPSSHTMISSMKCTASSLTCSAFSNRKLPIARPQLVTLPTINNVEQNMGPSQLCSQKPLYLSSTENLALVRRRRVTECQAYEADRSRPLEINIELPAEEAAQRFKIGVYFATWWALNVVFNIYNKKVLNAFPYPWLTSTLSLAAGSLMMLVSWATRVAEVPKVNLDFWKGLFPVAVAHTIGHVAATVSMSKVAVSFTHIIKSGEPAFSVLVSRFLLGEAFPMPVYLSLLPIIGGCALAAVTELNFNMIGFMGAMISNLAFVFRNIFSKKGMKGMSVSGMNYYACLSIMSLLILTPFAIAVEGPKVWAAGWQTAVSQIGPNFVWWVAAQSVFYHLYNQVSYMSLDQISPLTFSIGNTMKRISVIVSSILIFHTPVQPINALGAAIAILGTFLYSQAKQ

SEQ ID NO: 54401 - protein, 391 aa, Glycine max
  peptide (1)..(391): Ceres Seq. ID no. 14312214
  misc_feature (109)..(234): Pfam Name: Integral membrane protein DUF6 Pfam Description: Integral membrane protein DUF6
  misc_feature (47)..(388): Homolog of NCBI NO: 9758260 NR Description: glucose-6-phosphate/phosphate translocator
  misc_feature (15)..(390): Homolog of NCBI NO: 7489744 NR Description: glucose-6-phosphate/phosphate-translocator
  misc_feature (47)..(390): Homolog of NCBI NO: 21554690 NR Description: glucose-6-phosphate/phosphate translocator
  misc_feature (47)..(390): Homolog of NCBI NO: 18423670 NR Description: glucose-6-phosphate/phosphate translocator,
  misc_feature (25)..(391): Homolog of NCBI NO: 27752361 NR Description: glucose-6-phosphate/phosphate translocator 2
  misc_feature (25)..(391): Homolog of NCBI NO: 7489258 NR Description: probable
  misc_feature (1)..(391): Homolog of NCBI NO: 7488807 NR Description: glucose-6-phosphate/phosphate-translocator
  misc_feature (1)..(391): Homolog of NCBI NO: 7484980 NR Description: glucose-6-phosphate/phosphate translocator
  misc_feature (1)..(391): Homolog of NCBI NO: 14596173 NR Description: Similar to
  misc_feature (1)..(391): Homolog of NCBI NO: 18407336 NR Description: glucose-6-phosphate/phosphate-translocator,
MISSMKCTASSLTCSAFSNRKLPIARPQLVTLPTINNVEQNMGPSQLCSQKPLYLSSTENLALVRRRRVTECQAYEADRSRPLEINIELPAEEAAQRFKIGVYFATWWALNVVFNIYNKKVLNAFPYPWLTSTLSLAAGSLMMLVSWATRVAEVPKVNLDFWKGLFPVAVAHTIGHVAATVSMSKVAVSFTHIIKSGEPAFSVLVSRFLLGEAFPMPVYLSLLPIIGGCALAAVTELNFNMIGFMGAMISNLAFVFRNIFSKKGMKGMSVSGMNYYACLSIMSLLILTPFAIAVEGPKVWAAGWQTAVSQIGPNFVWWVAAQSVFYHLYNQVSYMSLDQISPLTFSIGNTMKRISVIVSSILIFHTPVQPINALGAAIAILGTFLYSQAKQ

SEQ ID NO: 54402 - protein, 387 aa, Glycine max
  peptide (1)..(387): Ceres Seq. ID no. 14312215
  misc_feature (105)..(230): Pfam Name: Integral membrane protein DUF6 Pfam Description: Integral membrane protein DUF6
  misc_feature (43)..(384): Homolog of NCBI NO: 9758260 NR Description: glucose-6-phosphate/phosphate translocator
  misc_feature (11)..(386): Homolog of NCBI NO: 7489744 NR Description: glucose-6-phosphate/phosphate-translocator
  misc_feature (43)..(386): Homolog of NCBI NO: 21554690 NR Description: glucose-6-phosphate/phosphate translocator
  misc_feature (43)..(386): Homolog of NCBI NO: 18423670 NR Description: glucose-6-phosphate/phosphate translocator,
  misc_feature (21)..(387): Homolog of NCBI NO: 27752361 NR Description: glucose-6-phosphate/phosphate translocator 2
  misc_feature (21)..(387): Homolog of NCBI NO: 7489258 NR Description: probable
  misc_feature (1)..(387): Homolog of NCBI NO: 7488807 NR Description: glucose-6-phosphate/phosphate-translocator
  misc_feature (1)..(387): Homolog of NCBI NO: 7484980 NR Description: glucose-6-phosphate/phosphate translocator
  misc_feature (1)..(387): Homolog of NCBI NO: 14596173 NR Description: Similar to
  misc_feature (1)..(387): Homolog of NCBI NO: 18407336 NR Description: glucose-6-phosphate/phosphate-translocator,
MKCTASSLTCSAFSNRKLPIARPQLVTLPTINNVEQNMGPSQLCSQKPLYLSSTENLALVRRRRVTECQAYEADRSRPLEINIELPAEEAAQRFKIGVYFATWWALNVVFNIYNKKVLNAFPYPWLTSTLSLAAGSLMMLVSWATRVAEVPKVNLDFWKGLFPVAVAHTIGHVAATVSMSKVAVSFTHIIKSGEPAFSVLVSRFLLGEAFPMPVYLSLLPIIGGCALAAVTELNFNMIGFMGAMISNLAFVFRNIFSKKGMKGMSVSGMNYYACLSIMSLLILTPFAIAVEGPKVWAAGWQTAVSQIGPNFVWWVAAQSVFYHLYNQVSYMSLDQISPLTFSIGNTMKRISVIVSSILIFHTPVQPINALGAAIAILGTFLYSQAKQ

SEQ ID NO: 54403 - DNA, 1422 bp, Glycine max
  misc_feature (1)..(1422): Ceres Seq. ID no. 14314144
gatgaggctgatagactcttagatatgggattccagaagcagataacttctattataactctcttgcctaagcttcggagaactggtctgttctctgctactcaaactgaggctattgaagagcttgctaaggcaggattgaggaacccagtgagggttgaagttcgagcagaaacaaaatcagaaaatggtcctgcatcatcaaaacaaccagaatcttccaaaacaccttcaggacttcacattgagtacttggaatgcgaggcagataagaagccatcacagctagtacatatcctgataaagaatctctcgaaaaaaattattatatatttcatgacttgtgcttgtgttgattattggggagctgtccttccttgtctttctgttttgaaaggcttctccttgattcccctgcatggaaagatgaagcagtctgccagggagaaagcactagcttcatttacatccctttcaaatggaattcttctatgtacggatgttgcagcacgtggactggacataccaggtgtagattgtatagtgcagtatgatcctcctcaagatccaaatgttttcatacatagagtaggtcgaactgctcggctgggtaaacaaggtcatgctgttgtcttcttattaccaaaggaggaatcttatgtagaattcctgcgtataagaagagttcctcttcaagagagaatatgtgctgatgaagcatctgatgttgttcctcagattcgttctgctgcaaaaaaagatcgcgatgtcatggaaaagggaattaaggcctttgtctcttacatccgtgcttataaagagcatcactgttcctatatttttaggtggaaagaacttgaaattggtaaattggccacaggatttggcttattacaacttccttcaatgccagaggtaaaacaccactcactttccattgatggatttgaaccagttgaagatatcaatttgggggacattaagtacagggataaatcacgggagaaacaaaggaagaagaaccttcaagcaaagaaagaagccaaagagaaagagccaaaacctcaaaaaccgaagaaaaccccaaatgcacccactgacatgcggaagaaaacagcccgacagagacgtgctcagcagacaatggaagacgaggaagagttgatgcatgaataccgcttgttgaagaaattgaagaaagggaccatagatgagaatgaatatgccaagttgacaggcactgaggaattactttgaaagcaaagtatgcatgcctgattatgctgttctggataccatggttgaaagcaaagtaatgaatgacagtttcaaacaccacaattttggctagtaagttactagattcttgccatgtgggtacactgtaggcatctaatctaataatataaaatttgttaatcc

SEQ ID NO: 54404 - protein, 418 aa, Glycine max
  peptide (1)..(418): Ceres Seq. ID no. 14314145
  misc_feature (128)..(204): Pfam Name: Helicase conserved C-terminal domain Pfam Description: Helicase conserved C-terminal domain
  misc_feature (1)..(410): Homolog of NCBI NO: 28175486 NR Description: 2810021H22Rik protein [Mus musculus]
  misc_feature (1)..(410): Homolog of NCBI NO: 26329441 NR Description: unnamed protein product [Mus musculus]
  misc_feature (1)..(410): Homolog of NCBI NO: 37543870 NR Description: similar to CG9630-PA [Homo sapiens]
  misc_feature (1)..(410): Homolog of NCBI NO: 20987604 NR Description: Similar to RIKEN cDNA 2810021H22 gene [Homo
  misc_feature (1)..(410): Homolog of NCBI NO: 10047265 NR Description: KIAA1595 protein [Homo sapiens]
  misc_feature (67)..(417): Homolog of NCBI NO: 11358800 NR Description: RNA helicase RH18 [imported] - Arabidopsis
  misc_feature (1)..(388): Homolog of NCBI NO: 26451630 NR Description: putative ATP-dependent RNA helicase [Arabidopsis
  misc_feature (1)..(388): Homolog of NCBI NO: 15217442 NR Description: DEAD/DEAH box helicase, putative [Arabidopsis
  misc_feature (1)..(416): Homolog of NCBI NO: 34896098 NR Description: putative RNA helicase [Oryza sativa (japonica
  misc_feature (1)..(417): Homolog of NCBI NO: 15239115 NR Description: DEAD/DEAH box helicase, putative [Arabidopsis
DEADRLLDMGFQKQITSIITLLPKLRRTGLFSATQTEAIEELAKAGLRNPVRVEVRAETKSENGPASSKQPESSKTPSGLHIEYLECEADKKPSQLVHILIKNLSKKIIIYFMTCACVDYWGAVLPCLSVLKGFSLIPLHGKMKQSAREKALASFTSLSNGILLCTDVAARGLDIPGVDCIVQYDPPQDPNVFIHRVGRTARLGKQGHAVVFLLPKEESYVEFLRIRRVPLQERICADEASDVVPQIRSAAKKDRDVMEKGIKAFVSYIRAYKEHHCSYIFRWKELEIGKLATGFGLLQLPSMPEVKHHSLSIDGFEPVEDINLGDIKYRDKSREKQRKKNLQAKKEAKEKEPKPQKPKKTPNAPTDMRKKTARQRRAQQTMEDEEELMHEYRLLKKLKKGTIDENEYAKLTGTEELL

SEQ ID NO: 54405 - protein, 410 aa, Glycine max
  peptide (1)..(410): Ceres Seq. ID no. 14314146
  misc_feature (120)..(196): Pfam Name: Helicase conserved C-terminal domain Pfam Description: Helicase conserved C-terminal domain
  misc_feature (1)..(402): Homolog of NCBI NO: 28175486 NR Description: 2810021H22Rik protein [Mus musculus]
  misc_feature (1)..(402): Homolog of NCBI NO: 26329441 NR Description: unnamed protein product [Mus musculus]
  misc_feature (1)..(402): Homolog of NCBI NO: 37543870 NR Description: similar to CG9630-PA [Homo sapiens]
  misc_feature (1)..(402): Homolog of NCBI NO: 20987604 NR Description: Similar to RIKEN cDNA 2810021H22 gene [Homo
  misc_feature (1)..(402): Homolog of NCBI NO: 10047265 NR Description: KIAA1595 protein [Homo sapiens]
  misc_feature (59)..(409): Homolog of NCBI NO: 11358800 NR Description: RNA helicase RH18 [imported] - Arabidopsis
  misc_feature (1)..(380): Homolog of NCBI NO: 26451630 NR Description: putative ATP-dependent RNA helicase [Arabidopsis
  misc_feature (1)..(380): Homolog of NCBI NO: 15217442 NR Description: DEAD/DEAH box helicase, putative [Arabidopsis
  misc_feature (1)..(408): Homolog of NCBI NO: 34896098 NR Description: putative RNA helicase [Oryza sativa (japonica
  misc_feature (1)..(409): Homolog of NCBI NO: 15239115 NR Description: DEAD/DEAH box helicase, putative [Arabidopsis
MGFQKQITSIITLLPKLRRTGLFSATQTEAIEELAKAGLRNPVRVEVRAETKSENGPASSKQPESSKTPSGLHIEYLECEADKKPSQLVHILIKNLSKKIIIYFMTCACVDYWGAVLPCLSVLKGFSLIPLHGKMKQSAREKALASFTSLSNGILLCTDVAARGLDIPGVDCIVQYDPPQDPNVFIHRVGRTARLGKQGHAVVFLLPKEESYVEFLRIRRVPLQERICADEASDVVPQIRSAAKKDRDVMEKGIKAFVSYIRAYKEHHCSYIFRWKELEIGKLATGFGLLQLPSMPEVKHHSLSIDGFEPVEDINLGDIKYRDKSREKQRKKNLQAKKEAKEKEPKPQKPKKTPNAPTDMRKKTARQRRAQQTMEDEEELMHEYRLLKKLKKGTIDENEYAKLTGTEELL

SEQ ID NO: 54406 - protein, 306 aa, Glycine max
  peptide (1)..(306): Ceres Seq. ID no. 14314147
  misc_feature (16)..(92): Pfam Name: Helicase conserved C-terminal domain Pfam Description: Helicase conserved C-terminal domain
  misc_feature (1)..(298): Homolog of NCBI NO: 28175486 NR Description: 2810021H22Rik protein [Mus musculus]
  misc_feature (1)..(298): Homolog of NCBI NO: 26329441 NR Description: unnamed protein product [Mus musculus]
  misc_feature (1)..(298): Homolog of NCBI NO: 37543870 NR Description: similar to CG9630-PA [Homo sapiens]
  misc_feature (1)..(298): Homolog of NCBI NO: 20987604 NR Description: Similar to RIKEN cDNA 2810021H22 gene [Homo
  misc_feature (1)..(298): Homolog of NCBI NO: 10047265 NR Description: KIAA1595 protein [Homo sapiens]
  misc_feature (1)..(305): Homolog of NCBI NO: 11358800 NR Description: RNA helicase RH18 [imported] - Arabidopsis
  misc_feature (1)..(276): Homolog of NCBI NO: 26451630 NR Description: putative ATP-dependent RNA helicase [Arabidopsis
  misc_feature (1)..(276): Homolog of NCBI NO: 15217442 NR Description: DEAD/DEAH box helicase, putative [Arabidopsis
  misc_feature (1)..(304): Homolog of NCBI NO: 34896098 NR Description: putative RNA helicase [Oryza sativa (japonica
  misc_feature (1)..(305): Homolog of NCBI NO: 15239115 NR Description: DEAD/DEAH box helicase, putative [Arabidopsis
MTCACVDYWGAVLPCLSVLKGFSLIPLHGKMKQSAREKALASFTSLSNGILLCTDVAARGLDIPGVDCIVQYDPPQDPNVFIHRVGRTARLGKQGHAVVFLLPKEESYVEFLRIRRVPLQERICADEASDVVPQIRSAAKKDRDVMEKGIKAFVSYIRAYKEHHCSYIFRWKELEIGKLATGFGLLQLPSMPEVKHHSLSIDGFEPVEDINLGDIKYRDKSREKQRKKNLQAKKEAKEKEPKPQKPKKTPNAPTDMRKKTARQRRAQQTMEDEEELMHEYRLLKKLKKGTIDENEYAKLTGTEELL

SEQ ID NO: 54407 - DNA, 1322 bp, Glycine max
  misc_feature (1)..(1322): Ceres Seq. ID no. 14313955
gaatcaattgatgtcttgtccttctcctccctcagttcctcttcactccctttcattctccctcgcctcacacgcacacgcacacttgtcattctcaaaacacgcccaaattcgaatcaaattagggttagggtttccaactcccctcgaattatccctgtaatgcagtttaattcccgggtcctactaccatggagccatcagcaatgtacggacactcccagcccctgagcatgccctcgcagatcggcggcggcgaaagcgacgacggctccggaaacgagcacgccgtcgacggccaccaccaccacattcagtacgaaacgcacgcgctcgaggacggtgccgccgtcgtcgtcgaggatgttacctcggatgcggtctatgtctccggcggtggaggccccgtagagtccagccagcttacgctgtcgtttcgtggccaagtgtacgtcttcgatgccgttacgcctgataaggttcaagcggtgttgttactgttgggtggatgtgaactatcttcaggtggttcgccatgtgtggatccgggggctcaacataatcaaaggggttcaatggaatttcctaaatgtagtctaccacaccgagctgcctcattacataggttcaggcagaagaggaaagagcgatgctttgacaaaaaagtgagatatagcgtgcggcaagaagttgcgctcaggatgcaccgtaacaagggccagtttacttcatctaagaaacaagatggagctaatagttatggtactgaccaagattcaggacaggatgatagtcaatccgaaacctcatgtacacattgtggcattagttcaaaatccaccccaatgatgcggcgagggccatctggtccaaggtcactttgcaacgcttgtgggcttttttgggcaaataggggtgctttgcgagacctttctaagagaaatcaggaacactctcttccaccagttgagcaggttgatgaaggtaatgactcggactgtcggactgccactgccgaccctgcacataacaatcttcctgctttctcagagcatgataatccagctttggtagctgatcataaagttttccagtctcagaaaatgttgaagtagtttactctggcataagtaggtctatagttcttccattcagattgaccaataggaatgtacagacataacaatactcccatcaatgcaagaactttgtttttatatggttggatctatggcattaaccattgatctctggatgtataacctgaaacttgaatgatgacttggtgatggtctcacccaataccttgaatttaattttac

SEQ ID NO: 54408 - protein, 307 aa, Glycine max
  peptide (1)..(307): Ceres Seq. ID no. 14313956
  misc_feature (145)..(182): Pfam Name: CCT motif Pfam Description: CCT motif
  misc_feature (171)..(249): Homolog of NCBI NO: 26451385 NR Description: unknown protein [Arabidopsis thaliana]
  misc_feature (32)..(214): Homolog of NCBI NO: 25405485 NR Description: hypothetical protein F19C24.17 [imported] -
  misc_feature (71)..(249): Homolog of NCBI NO: 21537322 NR Description: flowering protein CONSTANS, putative [Arabidopsis
  misc_feature (71)..(249): Homolog of NCBI NO: 18402914 NR Description: GATA zinc finger protein [Arabidopsis thaliana]
  misc_feature (20)..(261): Homolog of NCBI NO: 13174240 NR Description: putative zinc finger protein [Oryza sativa]
  misc_feature (39)..(249): Homolog of NCBI NO: 30686115 NR Description: GATA zinc finger protein [Arabidopsis thaliana]
  misc_feature (71)..(269): Homolog of NCBI NO: 15028099 NR Description: putative flowering protein CONSTANS [Arabidopsis
  misc_feature (71)..(269): Homolog of NCBI NO: 18403600 NR Description: zinc finger protein family [Arabidopsis thaliana]
  misc_feature (48)..(297): Homolog of NCBI NO: 11358938 NR Description: zinc-finger protein - Arabidopsis thaliana
  misc_feature (48)..(297): Homolog of NCBI NO: 15233844 NR Description: Zinc finger protein, Zim [Arabidopsis thaliana]
MEPSAMYGHSQPLSMPSQIGGGESDDGSGNEHAVDGHHHHIQYETHALEDGAAVVVEDVTSDAVYVSGGGGPVESSQLTLSFRGQVYVFDAVTPDKVQAVLLLLGGCELSSGGSPCVDPGAQHNQRGSMEFPKCSLPHRAASLHRFRQKRKERCFDKKVRYSVRQEVALRMHRNKGQFTSSKKQDGANSYGTDQDSGQDDSQSETSCTHCGISSKSTPMMRRGPSGPRSLCNACGLFWANRGALRDLSKRNQEHSLPPVEQVDEGNDSDCRTATADPAHNNLPAFSEHDNPALVADHKVFQSQKMLK

SEQ ID NO: 54409 - protein, 302 aa, Glycine max
  peptide (1)..(302): Ceres Seq. ID no. 14313957
  misc_feature (140)..(177): Pfam Name: CCT motif Pfam Description: CCT motif
  misc_feature (166)..(244): Homolog of NCBI NO: 26451385 NR Description: unknown protein [Arabidopsis thaliana]
  misc_feature (27)..(209): Homolog of NCBI NO: 25405485 NR Description: hypothetical protein F19C24.17 [imported] -
  misc_feature (66)..(244): Homolog of NCBI NO: 21537322 NR Description: flowering protein CONSTANS, putative [Arabidopsis
  misc_feature (66)..(244): Homolog of NCBI NO: 18402914 NR Description: GATA zinc finger protein [Arabidopsis thaliana]
  misc_feature (15)..(256): Homolog of NCBI NO: 13174240 NR Description: putative zinc finger protein [Oryza sativa]
  misc_feature (34)..(244): Homolog of NCBI NO: 30686115 NR Description: GATA zinc finger protein [Arabidopsis thaliana]
  misc_feature (66)..(264): Homolog of NCBI NO: 15028099 NR Description: putative flowering protein CONSTANS [Arabidopsis
  misc_feature (66)..(264): Homolog of NCBI NO: 18403600 NR Description: zinc finger protein family [Arabidopsis thaliana]
  misc_feature (43)..(292): Homolog of NCBI NO: 11358938 NR Description: zinc-finger protein - Arabidopsis thaliana
  misc_feature (43)..(292): Homolog of NCBI NO: 15233844 NR Description: Zinc finger protein, Zim [Arabidopsis thaliana]
MYGHSQPLSMPSQIGGGESDDGSGNEHAVDGHHHHIQYETHALEDGAAVVVEDVTSDAVYVSGGGGPVESSQLTLSFRGQVYVFDAVTPDKVQAVLLLLGGCELSSGGSPCVDPGAQHNQRGSMEFPKCSLPHRAASLHRFRQKRKERCFDKKVRYSVRQEVALRMHRNKGQFTSSKKQDGANSYGTDQDSGQDDSQSETSCTHCGISSKSTPMMRRGPSGPRSLCNACGLFWANRGALRDLSKRNQEHSLPPVEQVDEGNDSDCRTATADPAHNNLPAFSEHDNPALVADHKVFQSQKMLK

SEQ ID NO: 54410 - protein, 293 aa, Glycine max
  peptide (1)..(293): Ceres Seq. ID no. 14313958
  misc_feature (131)..(168): Pfam Name: CCT motif Pfam Description: CCT motif
  misc_feature (157)..(235): Homolog of NCBI NO: 26451385 NR Description: unknown protein [Arabidopsis thaliana]
  misc_feature (18)..(200): Homolog of NCBI NO: 25405485 NR Description: hypothetical protein F19C24.17 [imported] -
  misc_feature (57)..(235): Homolog of NCBI NO: 21537322 NR Description: flowering protein CONSTANS, putative [Arabidopsis
  misc_feature (57)..(235): Homolog of NCBI NO: 18402914 NR Description: GATA zinc finger protein [Arabidopsis thaliana]
  misc_feature (6)..(247): Homolog of NCBI NO: 13174240 NR Description: putative zinc finger protein [Oryza sativa]
  misc_feature (25)..(235): Homolog of NCBI NO: 30686115 NR Description: GATA zinc finger protein [Arabidopsis thaliana]
  misc_feature (57)..(255): Homolog of NCBI NO: 15028099 NR Description: putative flowering protein CONSTANS [Arabidopsis
  misc_feature (57)..(255): Homolog of NCBI NO: 18403600 NR Description: zinc finger protein family [Arabidopsis thaliana]
  misc_feature (34)..(283): Homolog of NCBI NO: 11358938 NR Description: zinc-finger protein - Arabidopsis thaliana
  misc_feature (34)..(283): Homolog of NCBI NO: 15233844 NR Description: Zinc finger protein, Zim [Arabidopsis thaliana]
MPSQIGGGESDDGSGNEHAVDGHHHHIQYETHALEDGAAVVVEDVTSDAVYVSGGGGPVESSQLTLSFRGQVYVFDAVTPDKVQAVLLLLGGCELSSGGSPCVDPGAQHNQRGSMEFPKCSLPHRAASLHRFRQKRKERCFDKKVRYSVRQEVALRMHRNKGQFTSSKKQDGANSYGTDQDSGQDDSQSETSCTHCGISSKSTPMMRRGPSGPRSLCNACGLFWANRGALRDLSKRNQEHSLPPVEQVDEGNDSDCRTATADPAHNNLPAFSEHDNPALVADHKVFQSQKMLK

SEQ ID NO: 54411 - DNA, 816 bp, Glycine max
  misc_feature (1)..(816): Ceres Seq. ID no. 14303437
aagggaaaaatgacagaggagcaattaaaaaaggtggctcagactgagagtatttcccctaatcctgcacctgaacctgaacctgaacctgctgttccaaaagaggaagtggctgaggagaaatctgtaattccacaaccctcttcctctccttctgatgagtccaaagctcttgtcatagttgagaagactagtgaagttgctcaagagaaaccaattgaggggtctgtgaaccgagatgctgtccttgcgagagttgcaactgagaagaggctgtcactaatcaaagcatgggaagaaagtgaaaagtcaaaatcagagaacaagtctcacaaaaagctttcagtcatttcagcatgggagaacagtatgaaagctgcagcggaggcagaattgagaaagattgaagaacaactggagaagaaaaaagcagaatatggagagaaattgaaaaacaaaatagctacaatccaccgagaagctgaagaaaagagggcatttattgaggcccaaaaaggggaagatttcttgaaggcagaggagacagctgcaaagtacagggcaactggaacagccccaacgaaactctttggttgtttctaacaaccctgatcattaaaaaatgctgtattattattatggttattattattattatgtattttctttgatagttcatgtaacatgtgtggtttggttgtcttttgctgagttgtgttcatgttcatttattacgtgtgcatagtgatatgttggttcgaatataacaatttatctttgtgtatacacaagaaattgaattattcaatttggggt

SEQ ID NO: 54412 - protein, 200 aa, Glycine max
  peptide (1)..(200): Ceres Seq. ID no. 14303438
  misc_feature (88)..(196): Pfam Name: Remorin, C-terminal region Pfam Description: Remorin, C-terminal region
  misc_feature (39)..(199): Homolog of NCBI NO: 4883530 NR Description: remorin 2 [Lycopersicon esculentum]
  misc_feature (4)..(200): Homolog of NCBI NO: 601843 NR Description: DNA-binding protein
  misc_feature (4)..(200): Homolog of NCBI NO: 15225899 NR Description: remorin [Arabidopsis thaliana]
  misc_feature (27)..(200): Homolog of NCBI NO: 15229057 NR Description: remorin -related protein [Arabidopsis thaliana]
  misc_feature (13)..(200): Homolog of NCBI NO: 15233068 NR Description: DNA-binding protein -related [Arabidopsis
  misc_feature (4)..(200): Homolog of NCBI NO: 32489830 NR Description: OSJNBb0039L24.13 [Oryza sativa (japonica
  misc_feature (4)..(199): Homolog of NCBI NO: 21555669 NR Description: remorin [Arabidopsis thaliana]
  misc_feature (4)..(200): Homolog of NCBI NO: 4731573 NR Description: remorin 1 [Lycopersicon esculentum]
  misc_feature (4)..(199): Homolog of NCBI NO: 15237822 NR Description: expressed protein [Arabidopsis thaliana]
  misc_feature (4)..(200): Homolog of NCBI NO: 34925093 NR Description: Remorin (pp34)
KGKMTEEQLKKVAQTESISPNPAPEPEPEPAVPKEEVAEEKSVIPQPSSSPSDESKALVIVEKTSEVAQEKPIEGSVNRDAVLARVATEKRLSLIKAWEESEKSKSENKSHKKLSVISAWENSMKAAAEAELRKIEEQLEKKKAEYGEKLKNKIATIHREAEEKRAFIEAQKGEDFLKAEETAAKYRATGTAPTKLFGCF

SEQ ID NO: 54413 - protein, 197 aa, Glycine max
  peptide (1)..(197): Ceres Seq. ID no. 14303439
  misc_feature (85)..(193): Pfam Name: Remorin, C-terminal region Pfam Description: Remorin, C-terminal region
  misc_feature (36)..(196): Homolog of NCBI NO: 4883530 NR Description: remorin 2 [Lycopersicon esculentum]
  misc_feature (1)..(197): Homolog of NCBI NO: 601843 NR Description: DNA-binding protein
  misc_feature (1)..(197): Homolog of NCBI NO: 15225899 NR Description: remorin [Arabidopsis thaliana]
  misc_feature (24)..(197): Homolog of NCBI NO: 15229057 NR Description: remorin -related protein [Arabidopsis thaliana]
  misc_feature (10)..(197): Homolog of NCBI NO: 15233068 NR Description: DNA-binding protein -related [Arabidopsis
  misc_feature (1)..(197): Homolog of NCBI NO: 32489830 NR Description: OSJNBb0039L24.13 [Oryza sativa (japonica
  misc_feature (1)..(196): Homolog of NCBI NO: 21555669 NR Description: remorin [Arabidopsis thaliana]
  misc_feature (1)..(197): Homolog of NCBI NO: 4731573 NR Description: remorin 1 [Lycopersicon esculentum]
  misc_feature (1)..(196): Homolog of NCBI NO: 15237822 NR Description: expressed protein [Arabidopsis thaliana]
  misc_feature (1)..(197): Homolog of NCBI NO: 34925093 NR Description: Remorin (pp34)
MTEEQLKKVAQTESISPNPAPEPEPEPAVPKEEVAEEKSVIPQPSSSPSDESKALVIVEKTSEVAQEKPIEGSVNRDAVLARVATEKRLSLIKAWEESEKSKSENKSHKKLSVISAWENSMKAAAEAELRKIEEQLEKKKAEYGEKLKNKIATIHREAEEKRAFIEAQKGEDFLKAEETAAKYRATGTAPTKLFGCF

SEQ ID NO: 54414 - DNA, 2017 bp, Glycine max
  misc_feature (1)..(2017): Ceres Seq. ID no. 12581821
cagctacgtaggccccccccccagatattccctagtgtcacctttgtgttaaacttccaactccactcttttttttcttcttcctctttcctcagccattactctctctctgacacctacctgtgtctcttcattatttttcttctgccttcaaacaaagtgatgaaagaggtgacggttgaagctgaaggaggagcaccaggagtggtgcaagagggtggaaaaggaaccacggttaggccagacatacacaacagtgccatgaaaattttgagggctagagagccttataatgggtacactgaggaagtgggagagaagccctcagggtttgaggttatggggtggtacctttatgagttttgcttctactttgttcaaactgtgcttgttcctgttgtgttccctctcattatcagtcagctacagcctctccctgctgcagattcacttcaggaatggaacaaaaaccacccaaccaagcactgctcacaaaaggaatttcatctgtatagcaaactgacaaatcacaccataagaaccagtggtggatcaaacttctctgctctggagtggacatcaattgcttgggccacaggactagccctggctgctccaattcttggcttcatttcctttcaccttgatggccacttcccaaagctcatcacagcagcagccacaggcattggagtgttcttctgccttcctgcaggcttcttcaaggtcacagccatcttcattccctacattgccggcattgtcgcggccagcacggtggccagcgctgctcacacccaccacctaggcctcatgatccgctgcttcacaggaccaaccctaaaaagaagcgaattctccatcaggcaagcagtctccagcaggctctccctccatgccacggcggctggatgcctcggagcagccttaatttcatcattcacataccatatgctccgggaactcaactacaacgaccgtgacgtgatgagtctctgggttgtttcaatctttagtggcctaatttggcttgttggggttttgcacattgtcacagccataggaagaaccactgattccatctcattctcctcaaggctccaccctttctccatcttcaagtaccctcatgcaattggaggccttgcaggggttttcctctcctcattcaccaccatgtcaattttcactggaggagttattttcatagtgggacaactctgcattaagccactgcacttgctctatctctggctaacctacttcctttttcctcttgtttctttgtcactgctacaacccttgttgcacgtgatcaagatgaattctgtgaagatgcaaattgtggggtttcttttgtcactcttgtcatcagggtttggattctactacggccacagtcactggaaatggggccacttggtgctatttggtgcagttcaaagcacagccacagggattttatacgcttttggaaggctcttggtgttggactgtgctccctctggcaaagaaggtgcgttctccatttggtatgcttggatgagagctgcagggctgtgcgtggggttcacggtggggtcggtcgcgccgggacgagttaggacctcgtttggagttgcgttttgcactgccattgctggaattgtggtactgcttttcgggaacatcagtgatgttggtggtgctgttgctgcggggcacgttagagatgaatgcgagagaagttcggctgtgctgcctggcttggattctaaggaatctgcacgcgtttgaataatggaaactggaaaatgaagaagattattattgttgttgtcttgtgggtcatatgattctttgcaaaatgatgttaatgcatgcaagagtagtattataaggtttctttttatgattgatttttagatgtattctggtagttagttttactgttgttgtgcatgcatatgatgtttggtctctgttgaggatttgggtgctgctgctgctggcttgtgtaactgtcttagtattttgt

SEQ ID NO: 54415 - protein, 591 aa, Glycine max
  peptide (1)..(591): Ceres Seq. ID no. 12581822
  misc_feature (64)..(570): Homolog of NCBI NO: 34897922 NR Description: ESTs D23841(R0349) correspond to a region of the predicted
  misc_feature (94)..(584): Homolog of NCBI NO: 32470647 NR Description: hypothetical protein [Solanum bulbocastanum]
QLRRPPPQIFPSVTFVLNFQLHSFFSSSSFLSHYSLSDTYLCLFIIFLLPSNKVMKEVTVEAEGGAPGVVQEGGKGTTVRPDIHNSAMKILRAREPYNGYTEEVGEKPSGFEVMGWYLYEFCFYFVQTVLVPVVFPLIISQLQPLPAADSLQEWNKNHPTKHCSQKEFHLYSKLTNHTIRTSGGSNFSALEWTSIAWATGLALAAPILGFISFHLDGHFPKLITAAATGIGVFFCLPAGFFKVTAIFIPYIAGIVAASTVASAAHTHHLGLMIRCFTGPTLKRSEFSIRQAVSSRLSLHATAAGCLGAALISSFTYHMLRELNYNDRDVMSLWVVSIFSGLIWLVGVLHIVTAIGRTTDSISFSSRLHPFSIFKYPHAIGGLAGVFLSSFTTMSIFTGGVIFIVGQLCIKPLHLLYLWLTYFLFPLVSLSLLQPLLHVIKMNSVKMQIVGFLLSLLSSGFGFYYGHSHWKWGHLVLFGAVQSTATGILYAFGRLLVLDCAPSGKEGAFSIWYAWMRAAGLCVGFTVGSVAPGRVRTSFGVAFCTAIAGIVVLLFGNISDVGGAVAAGHVRDECERSSAVLPGLDSKESARV

SEQ ID NO: 54416 - protein, 537 aa, Glycine max
  peptide (1)..(537): Ceres Seq. ID no. 12581823
  misc_feature (10)..(516): Homolog of NCBI NO: 34897922 NR Description: ESTs D23841(R0349) correspond to a region of the predicted
  misc_feature (40)..(530): Homolog of NCBI NO: 32470647 NR Description: hypothetical protein [Solanum bulbocastanum]
MKEVTVEAEGGAPGVVQEGGKGTTVRPDIHNSAMKILRAREPYNGYTEEVGEKPSGFEVMGWYLYEFCFYFVQTVLVPVVFPLIISQLQPLPAADSLQEWNKNHPTKHCSQKEFHLYSKLTNHTIRTSGGSNFSALEWTSIAWATGLALAAPILGFISFHLDGHFPKLITAAATGIGVFFCLPAGFFKVTAIFIPYIAGIVAASTVASAAHTHHLGLMIRCFTGPTLKRSEFSIRQAVSSRLSLHATAAGCLGAALISSFTYHMLRELNYNDRDVMSLWVVSIFSGLIWLVGVLHIVTAIGRTTDSISFSSRLHPFSIFKYPHAIGGLAGVFLSSFTTMSIFTGGVIFIVGQLCIKPLHLLYLWLTYFLFPLVSLSLLQPLLHVIKMNSVKMQIVGFLLSLLSSGFGFYYGHSHWKWGHLVLFGAVQSTATGILYAFGRLLVLDCAPSGKEGAFSIWYAWMRAAGLCVGFTVGSVAPGRVRTSFGVAFCTAIAGIVVLLFGNISDVGGAVAAGHVRDECERSSAVLPGLDSKESARV

SEQ ID NO: 54417 - protein, 504 aa, Glycine max
  peptide (1)..(504): Ceres Seq. ID no. 12581824
  misc_feature (1)..(483): Homolog of NCBI NO: 34897922 NR Description: ESTs D23841(R0349) correspond to a region of the predicted
  misc_feature (7)..(497): Homolog of NCBI NO: 32470647 NR Description: hypothetical protein [Solanum bulbocastanum]
MKILRAREPYNGYTEEVGEKPSGFEVMGWYLYEFCFYFVQTVLVPVVFPLIISQLQPLPAADSLQEWNKNHPTKHCSQKEFHLYSKLTNHTIRTSGGSNFSALEWTSIAWATGLALAAPILGFISFHLDGHFPKLITAAATGIGVFFCLPAGFFKVTAIFIPYIAGIVAASTVASAAHTHHLGLMIRCFTGPTLKRSEFSIRQAVSSRLSLHATAAGCLGAALISSFTYHMLRELNYNDRDVMSLWVVSIFSGLIWLVGVLHIVTAIGRTTDSISFSSRLHPFSIFKYPHAIGGLAGVFLSSFTTMSIFTGGVIFIVGQLCIKPLHLLYLWLTYFLFPLVSLSLLQPLLHVIKMNSVKMQIVGFLLSLLSSGFGFYYGHSHWKWGHLVLFGAVQSTATGILYAFGRLLVLDCAPSGKEGAFSIWYAWMRAAGLCVGFTVGSVAPGRVRTSFGVAFCTAIAGIVVLLFGNISDVGGAVAAGHVRDECERSSAVLPGLDSKESARV

SEQ ID NO: 54418 - DNA, 1592 bp, Glycine max
  misc_feature (1)..(1592): Ceres Seq. ID no. 14303366
attacacaattcaagcaccttcttctctcgtgtttcacaaactaaagaacaacaatatgcctccaatcttgccggatttctccaactcggtgaaactcaagtacgtgaaactagggtaccaatacctggtgaaccacattctgactctcactctcatacccatgatgatcgccatcttcatggagattctacgcttaggccctgaagagatcctgaacctctggcactccctccacttggaccttgtccaaatcctctgctccgccttcctcatcatcttcatcgccaccgtctacttcatgtccaaaccccgcaccatctacctcgtcgactacgcctgcttcaagccacccgtcacctgccgcgtccccttcgcaaccttcatggaacactccaggctcatccttaaagacaaccctaagagcgtcgagttccaaatgcgtattctcgaacgttccggtctcggtgaagaaacatgtctccccccagcaatccactacatccctcccaagcccaccatggaggccgcccgaggagaagccgaacttgttatcttctccgccatggattctttgttcaacaaaacaggtctcaagcctaaggacatagatattcttattgtcaattgcagtcttttttctcccactccttctttgtctgctatggtcatcaacaagtactagctcaggagcaacataaagagcttcaacctctccggcatgggttgcagtgatggcttgatatccgttgacttggctcgtgaccttctccaggttcaccctaactcaaacgccgtcgttgtaagcaccgagatcatcacccctaactactaccaaggcaaagagagagccatgcttcttcctaattgcctcttccgaatggggggtgctgctattctcttatccaaccgaacctccgaacgcaggagagccaagtacaggttggtgcacgttgttcgcactcacaaaggcgctgatgacaaagcctaccgttgcgtttttgaagaggaagacagagaagggaaagtggggatttcacttcagaaggatctcatggctattgcaggtgaggctctcaagtctaacattactactatgggtcctcttgttcttccggcttccgagcagttgctgttccttctcactctcattgggaggaaaatcttcaaccccaaatggaagccttatattcctgacttcaaacaagcctttgagcacttctgcatccacgctggtggacgtgctgtgattgatgagcttcagaagaatcttcagctttctactgaacacgttgaggcttctagaatgacccttcacaggtttgggaacacttcgtcttcttcgctgtggtatgagctcaactacattgagtccaaggggaggatgaagaagggtgatagggtgtggcagatagcgtttgggagtggctttaaatgcaacagtgctgtgtggaagtgcaacagaagcattaagacaccggttgatgggccttgggctgattgcattgatcgttacccggtcgatattcctgagatcgttaagctctaggatggagaattgttcaagaacaagaagataattgcttattttatg

SEQ ID NO: 54419 - protein, 275 aa, Glycine max
  peptide (1)..(275): Ceres Seq. ID no. 14303367
  misc_feature (109)..(248): Pfam Name: Chalcone and stilbene synthases, C-terminal domain Pfam Description: Chalcone and stilbene synthases, C-terminal
  misc_feature (1)..(275): Homolog of NCBI NO: 29417540 NR Description: beta-ketoacyl-CoA-synthase [Marchantia polymorpha]
  misc_feature (1)..(269): Homolog of NCBI NO: 15223556 NR Description: very-long-chain fatty acid condensing enzyme
  misc_feature (1)..(269): Homolog of NCBI NO: 15226724 NR Description: very-long-chain fatty acid condensing enzyme
  misc_feature (1)..(274): Homolog of NCBI NO: 32172502 NR Description: FAE1 [Marchantia polymorpha]
  misc_feature (1)..(275): Homolog of NCBI NO: 28393607 NR Description: putative fatty acid condensing enzyme CUT1
  misc_feature (1)..(275): Homolog of NCBI NO: 21618184 NR Description: fatty acid condensing enzyme CUT1, putative
  misc_feature (1)..(275): Homolog of NCBI NO: 15222592 NR Description: very-long-chain fatty acid condensing enzyme
  misc_feature (1)..(275): Homolog of NCBI NO: 21593111 NR Description: very-long-chain fatty acid condensing enzyme CUT1
  misc_feature (1)..(275): Homolog of NCBI NO: 15221431 NR Description: very-long-chain fatty acid condensing enzyme
  misc_feature (1)..(275): Homolog of NCBI NO: 17979464 NR Description: At1g68530/T26J14_10 [Arabidopsis thaliana]
MGCSDGLISVDLARDLLQVHPNSNAVVVSTEIITPNYYQGKERAMLLPNCLFRMGGAAILLSNRTSERRRAKYRLVHVVRTHKGADDKAYRCVFEEEDREGKVGISLQKDLMAIAGEALKSNITTMGPLVLPASEQLLFLLTLIGRKIFNPKWKPYIPDFKQAFEHFCIHAGGRAVIDELQKNLQLSTEHVEASRMTLHRFGNTSSSSLWYELNYIESKGRMKKGDRVWQIAFGSGFKCNSAVWKCNRSIKTPVDGPWADCIDRYPVDIPEIVKL

SEQ ID NO: 54420 - protein, 231 aa, Glycine max
  peptide (1)..(231): Ceres Seq. ID no. 14303368
  misc_feature (65)..(204): Pfam Name: Chalcone and stilbene synthases, C-terminal domain Pfam Description: Chalcone and stilbene synthases, C-terminal
  misc_feature (1)..(231): Homolog of NCBI NO: 29417540 NR Description: beta-ketoacyl-CoA-synthase [Marchantia polymorpha]
  misc_feature (1)..(225): Homolog of NCBI NO: 15223556 NR Description: very-long-chain fatty acid condensing enzyme
  misc_feature (1)..(225): Homolog of NCBI NO: 15226724 NR Description: very-long-chain fatty acid condensing enzyme
  misc_feature (1)..(230): Homolog of NCBI NO: 32172502 NR Description: FAE1 [Marchantia polymorpha]
  misc_feature (1)..(231): Homolog of NCBI NO: 28393607 NR Description: putative fatty acid condensing enzyme CUT1
  misc_feature (1)..(231): Homolog of NCBI NO: 21618184 NR Description: fatty acid condensing enzyme CUT1, putative
  misc_feature (1)..(231): Homolog of NCBI NO: 15222592 NR Description: very-long-chain fatty acid condensing enzyme
  misc_feature (1)..(231): Homolog of NCBI NO: 21593111 NR Description: very-long-chain fatty acid condensing enzyme CUT1
  misc_feature (1)..(231): Homolog of NCBI NO: 15221431 NR Description: very-long-chain fatty acid condensing enzyme
  misc_feature (1)..(231): Homolog of NCBI NO: 17979464 NR Description: At1g68530/T26J14_10 [Arabidopsis thaliana]
MLLPNCLFRMGGAAILLSNRTSERRRAKYRLVHVVRTHKGADDKAYRCVFEEEDREGKVGISLQKDLMAIAGEALKSNITTMGPLVLPASEQLLFLLTLIGRKIFNPKWKPYIPDFKQAFEHFCIHAGGRAVIDELQKNLQLSTEHVEASRMTLHRFGNTSSSSLWYELNYIESKGRMKKGDRVWQIAFGSGFKCNSAVWKCNRSIKTPVDGPWADCIDRYPVDIPEIVKL

SEQ ID NO: 54421 - protein, 226 aa, Glycine max
  peptide (1)..(226): Ceres Seq. ID no. 14303369
  misc_feature (128)..(226): Pfam Name: Chalcone and stilbene synthases, N-terminal domain Pfam Description: Chalcone and stilbene synthases, N-terminal
  misc_feature (23)..(226): Homolog of NCBI NO: 29417540 NR Description: beta-ketoacyl-CoA-synthase [Marchantia polymorpha]
  misc_feature (22)..(226): Homolog of NCBI NO: 15223556 NR Description: very-long-chain fatty acid condensing enzyme
  misc_feature (17)..(226): Homolog of NCBI NO: 15226724 NR Description: very-long-chain fatty acid condensing enzyme
  misc_feature (23)..(226): Homolog of NCBI NO: 32172502 NR Description: FAE1 [Marchantia polymorpha]
  misc_feature (23)..(226): Homolog of NCBI NO: 28393607 NR Description: putative fatty acid condensing enzyme CUT1
  misc_feature (23)..(226): Homolog of NCBI NO: 21618184 NR Description: fatty acid condensing enzyme CUT1, putative
  misc_feature (23)..(226): Homolog of NCBI NO: 15222592 NR Description: very-long-chain fatty acid condensing enzyme
  misc_feature (23)..(226): Homolog of NCBI NO: 21593111 NR Description: very-long-chain fatty acid condensing enzyme CUT1
  misc_feature (19)..(226): Homolog of NCBI NO: 15221431 NR Description: very-long-chain fatty acid condensing enzyme
  misc_feature (19)..(226): Homolog of NCBI NO: 17979464 NR Description: At1g68530/T26J14_10 [Arabidopsis thaliana]
YTIQAPSSLVFHKLKNNNMPPILPDFSNSVKLKYVKLGYQYLVNHILTLTLIPMMIAIFMEILRLGPEEILNLWHSLHLDLVQILCSAFLIIFIATVYFMSKPRTIYLVDYACFKPPVTCRVPFATFMEHSRLILKDNPKSVEFQMRILERSGLGEETCLPPAIHYIPPKPTMEAARGEAELVIFSAMDSLFNKTGLKPKDIDILIVNCSLFSPTPSLSAMVINKY

SEQ ID NO: 54422 - DNA, 1477 bp, Glycine max
  misc_feature (1)..(1477): Ceres Seq. ID no. 14307431
aaaaaattgccaccttctacatactgtccgaaagcagcaagttcagtacttcagttcactgcgccttcctctccttttcgatggcaaagggttgctccaacaacacttatgaagaggctagaaaacaaagacttgaagaaaacaaaaagaggtttgaggatttgggaatttcgaggatttcaaaaaacttgactgaaatcgcaagttctgcaaagaagaagctgcgtcatgttcctaaacagaaaacaaagaagacaaatgttgaagtggaacctaggcgatcttctcgtgtgcgaaacccagttcgttcataccgtgaagatgtgaacatagaccttccacccttgcggaagaggtcaaggtcaagttcttcatcatggggaagttacattgcgaggcctctagatgaaatcaaagaagcaacaaaagaggaaagactttgtgctctggaggctgcagaggcaatccaaatcaatttgaactcatcaaatccatcatttatcaagtcaatggttcggtctcatgtttatagctgcttttggttgggtcttccttctaaattttgtgaggaacatctgccaaaaactttacatgacatggttttagaagatgaaaatggctcagaatatgaggctgtttacattggcaacagagctgggcttagtggtggttggagagcatttgcattggatcataaactcgatgatggtgatgcccttgtttttgaattgattgaagcttcaagatttaagatttatattgtaagagcatttccagattcagttgaagaaaagggaaataatattttagaggaagaaggaaatgtgcgtgcaaccaaagcaccaaaagctgcctgtaatcttgaatcggaatgtaagacaaaaaagccaaaacaggctgcagtttatgaaactaaggaatcagagagttctcaggaatatcttctagatagcagcattgacaacgaagtgaaaccacagggagtaaatccaactaataaggaaactaaattttctcagaaaaatacgccaaagaaatctaaatatcctgctactgctgattcaaaagggaaagtgcaaattaaaactgagaaaccaaaggcatctataaagctgtcaaacaatacaaggaagtcgaaagaaggtataaatgaaattggtggttcagacaagttagagaagaatgagtttgttcaggatgctgatagcaagttagagaaagttgaactagttgaagaagcaagaaaatgtgtcacaaaaaagctagaaaaaaccagctccaaatttttcagaaagaaagcataatcttggagctaatgactggtaaattataaaatgtattaagacttgtatggagtatattatggtagtagacaatattttctgttgtggattaatggaagtaaagtgtaagatatgtatttgatttgatatctatcagtatgttagttataatacataaaaaacaatgttttgtt

SEQ ID NO: 54423 - protein, 433 aa, Glycine max
  peptide (1)..(433): Ceres Seq. ID no. 14307432
  misc_feature (166)..(255): Pfam Name: B3 DNA binding domain Pfam Description: B3 DNA binding domain
  misc_feature (102)..(261): Homolog of NCBI NO: 34910734 NR Description: P0022F10.13 [Oryza sativa (japonica
  misc_feature (93)..(250): Homolog of NCBI NO: 34904376 NR Description: unnamed protein product [Oryza sativa (japonica
  misc_feature (46)..(255): Homolog of NCBI NO: 30694114 NR Description: expressed protein [Arabidopsis thaliana]
  misc_feature (23)..(263): Homolog of NCBI NO: 15217278 NR Description: Unknown protein [Oryza sativa]
  misc_feature (32)..(274): Homolog of NCBI NO: 9294620 NR Description: gene_id:MVI11.9~unknown protein [Arabidopsis
  misc_feature (36)..(255): Homolog of NCBI NO: 15237157 NR Description: transcriptional factor B3 family [Arabidopsis
KIATFYILSESSKFSTSVHCAFLSFSMAKGCSNNTYEEARKQRLEENKKRFEDLGISRISKNLTEIASSAKKKLRHVPKQKTKKTNVEVEPRRSSRVRNPVRSYREDVNIDLPPLRKRSRSSSSSWGSYIARPLDEIKEATKEERLCALEAAEAIQINLNSSNPSFIKSMVRSHVYSCFWLGLPSKFCEEHLPKTLHDMVLEDENGSEYEAVYIGNRAGLSGGWRAFALDHKLDDGDALVFELIEASRFKIYIVRAFPDSVEEKGNNILEEEGNVRATKAPKAACNLESECKTKKPKQAAVYETKESESSQEYLLDSSIDNEVKPQGVNPTNKETKFSQKNTPKKSKYPATADSKGKVQIKTEKPKASIKLSNNTRKSKEGINEIGGSDKLEKNEFVQDADSKLEKVELVEEARKCVTKKLEKTSSKFFRKKA

SEQ ID NO: 54424 - protein, 407 aa, Glycine max
  peptide (1)..(407): Ceres Seq. ID no. 14307433
  misc_feature (140)..(229): Pfam Name: B3 DNA binding domain Pfam Description: B3 DNA binding domain
  misc_feature (76)..(235): Homolog of NCBI NO: 34910734 NR Description: P0022F10.13 [Oryza sativa (japonica
  misc_feature (67)..(224): Homolog of NCBI NO: 34904376 NR Description: unnamed protein product [Oryza sativa (japonica
  misc_feature (20)..(229): Homolog of NCBI NO: 30694114 NR Description: expressed protein [Arabidopsis thaliana]
  misc_feature (1)..(237): Homolog of NCBI NO: 15217278 NR Description: Unknown protein [Oryza sativa]
  misc_feature (6)..(248): Homolog of NCBI NO: 9294620 NR Description: gene_id:MVI11.9~unknown protein [Arabidopsis
  misc_feature (10)..(229): Homolog of NCBI NO: 15237157 NR Description: transcriptional factor B3 family [Arabidopsis
MAKGCSNNTYEEARKQRLEENKKRFEDLGISRISKNLTEIASSAKKKLRHVPKQKTKKTNVEVEPRRSSRVRNPVRSYREDVNIDLPPLRKRSRSSSSSWGSYIARPLDEIKEATKEERLCALEAAEAIQINLNSSNPSFIKSMVRSHVYSCFWLGLPSKFCEEHLPKTLHDMVLEDENGSEYEAVYIGNRAGLSGGWRAFALDHKLDDGDALVFELIEASRFKIYIVRAFPDSVEEKGNNILEEEGNVRATKAPKAACNLESECKTKKPKQAAVYETKESESSQEYLLDSSIDNEVKPQGVNPTNKETKFSQKNTPKKSKYPATADSKGKVQIKTEKPKASIKLSNNTRKSKEGINEIGGSDKLEKNEFVQDADSKLEKVELVEEARKCVTKKLEKTSSKFFRKKA

SEQ ID NO: 54425 - protein, 264 aa, Glycine max
  peptide (1)..(264): Ceres Seq. ID no. 14307434
  misc_feature (1)..(86): Pfam Name: B3 DNA binding domain Pfam Description: B3 DNA binding domain
  misc_feature (1)..(92): Homolog of NCBI NO: 34910734 NR Description: P0022F10.13 [Oryza sativa (japonica
  misc_feature (1)..(81): Homolog of NCBI NO: 34904376 NR Description: unnamed protein product [Oryza sativa (japonica
  misc_feature (1)..(86): Homolog of NCBI NO: 30694114 NR Description: expressed protein [Arabidopsis thaliana]
  misc_feature (1)..(94): Homolog of NCBI NO: 15217278 NR Description: Unknown protein [Oryza sativa]
  misc_feature (1)..(105): Homolog of NCBI NO: 9294620 NR Description: gene_id:MVI11.9~unknown protein [Arabidopsis
  misc_feature (1)..(86): Homolog of NCBI NO: 15237157 NR Description: transcriptional factor B3 family [Arabidopsis
MVRSHVYSCFWLGLPSKFCEEHLPKTLHDMVLEDENGSEYEAVYIGNRAGLSGGWRAFALDHKLDDGDALVFELIEASRFKIYIVRAFPDSVEEKGNNILEEEGNVRATKAPKAACNLESECKTKKPKQAAVYETKESESSQEYLLDSSIDNEVKPQGVNPTNKETKFSQKNTPKKSKYPATADSKGKVQIKTEKPKASIKLSNNTRKSKEGINEIGGSDKLEKNEFVQDADSKLEKVELVEEARKCVTKKLEKTSSKFFRKKA

SEQ ID NO: 54426 - DNA, 1697 bp, Glycine max
  misc_feature (1)..(1697): Ceres Seq. ID no. 14310452
gatttcagaacacaatggagcaaccacaactcttgcatgacccaaatttccctctcttcaaaaccccttcttcacccgccgtaaccaccaccgccactcacaaacccctttcaaccacacccatcaccaccacctccaacggtgagcgtcgagaagaccactccgtcgaaaccgccgccaccgttgccgccgacgcggaggcgttcggcgacctcgggctggcggaatgggcggtgaagacgtgccgggagctcgggatgcggaggccgcgccccgtgcagcggcggtgcatcccgcgcgtgctggagggccggcacgtgctgggcatcgacgagacagggagcgggaagacggccgccttcgcgctcccgatcctgcaccgtctcgccgagcatcccttcggcgtgttcgccctcgtggtgacgcccacgcgcgagctcgccttccagctcgccgagcagttccgcgccctcggctccgccgtgcacctccgcatcacggtggttgtcgggggcatggacatgctcaggcagaccaaggagctcgccgcgaggccgcacctcgtcattgccacccccgggaggatccacgccctgctccgcaataaccctgatattccccccgttttctccagaactaagttccttgtcttggatgaagcagatcgtgtcctggatgttggttttcaggaggaattgagatttatctttcagtgcttaccagaaaatcgacaaaacctgttcttttctgcaacaactacaagtaatctgcaaaagttgcgtgaacgttaccaagataagatgtatgtctatgaggcttatgaaggttttaaaacagttgaaacacttaagcaacaggctatattcatccctaaaaaggtgaaggatgtatatttgatgcatattttggctaaaatggaagatatgggaattcggtctgccattgtatttatctcaacatgcagagattgtcatcgtttaagtttaatgctggaagtgcttgatcaagaagcagcagctctgtattcattcaaatcacaagctcagaggcttgaagcacttcaccaatttaaatcaggaaaggtttcaatactgctagcaactgatgttgctagccgcggtttggatattcctacagttgatcttgtcatcaattatgatgttccaaggtttccacgagattatattcatcgtgtaggtcgtacagcaagagcaggtagagggggactggctttgagtcttgtcacccagaatgatgttgatcttattcatgaaatagaagcacttattgagaagcaacttgaaatgattgaatacaaagaaaatgaggtgctttctctcatgaaaaaggttttcagtgctaagaacgtagcagaaatgaagatgatagatgatggctttgaagagaaagctaaagagcggaaaaaacagaagctgaaaatgctagcagataaaggattgttaaataaaagaagtaaaaagagaaaacgaaataaagaatttgcagaggaaggggaagaacaaaaaaatgaggttttcactgttaggaatgtgacggaaatgaagaggatggatgaggatggcattgaggagaaagcagaagaggggggaatacaaaaacttaaaatgcgaacacagaaaggtttgtcaaagaaaaaaaagttaaaagaaagaaataacgaatttgcagatgaaagg

SEQ ID NO: 54427 - protein, 565 aa, Glycine max
  peptide (1)..(565): Ceres Seq. ID no. 14310453
  misc_feature (79)..(285): Pfam Name: DEAD/DEAH box helicase Pfam Description: DEAD/DEAH box helicase
  misc_feature (70)..(463): Homolog of NCBI NO: 24585582 NR Description: CG9253-PA [Drosophila melanogaster]
  misc_feature (70)..(463): Homolog of NCBI NO: 21464402 NR Description: RE27528p [Drosophila melanogaster]
  misc_feature (66)..(497): Homolog of NCBI NO: 19113586 NR Description: atp-dependent rna helicase [Schizosaccharomyces
  misc_feature (68)..(542): Homolog of NCBI NO: 39595087 NR Description: Hypothetical protein CBG03667 [Caenorhabditis
  misc_feature (68)..(506): Homolog of NCBI NO: 34877820 NR Description: similar to R27090_2 [Rattus norvegicus]
  misc_feature (68)..(506): Homolog of NCBI NO: 31542656 NR Description: hypothetical protein FLJ10432 [Homo sapiens]
  misc_feature (66)..(534): Homolog of NCBI NO: 29612573 NR Description: Similar to hypothetical protein FLJ10432 [Xenopus
  misc_feature (66)..(534): Homolog of NCBI NO: 40787696 NR Description: Unknown (protein for MGC:76291) [Silurana
  misc_feature (7)..(477): Homolog of NCBI NO: 34913306 NR Description: P0519E12.31 [Oryza sativa (japonica
  misc_feature (36)..(495): Homolog of NCBI NO: 15219185 NR Description: DEAD/DEAH box helicase, putative [Arabidopsis
FQNTMEQPQLLHDPNFPLFKTPSSPAVTTTATHKPLSTTPITTTSNGERREDHSVETAATVAADAEAFGDLGLAEWAVKTCRELGMRRPRPVQRRCIPRVLEGRHVLGIDETGSGKTAAFALPILHRLAEHPFGVFALVVTPTRELAFQLAEQFRALGSAVHLRITVVVGGMDMLRQTKELAARPHLVIATPGRIHALLRNNPDIPPVFSRTKFLVLDEADRVLDVGFQEELRFIFQCLPENRQNLFFSATTTSNLQKLRERYQDKMYVYEAYEGFKTVETLKQQAIFIPKKVKDVYLMHILAKMEDMGIRSAIVFISTCRDCHRLSLMLEVLDQEAAALYSFKSQAQRLEALHQFKSGKVSILLATDVASRGLDIPTVDLVINYDVPRFPRDYIHRVGRTARAGRGGLALSLVTQNDVDLIHEIEALIEKQLEMIEYKENEVLSLMKKVFSAKNVAEMKMIDDGFEEKAKERKKQKLKMLADKGLLNKRSKKRKRNKEFAEEGEEQKNEVFTVRNVTEMKRMDEDGIEEKAEEGGIQKLKMRTQKGLSKKKKLKERNNEFADER

SEQ ID NO: 54428 - protein, 561 aa, Glycine max
  peptide (1)..(561): Ceres Seq. ID no. 14310454
  misc_feature (75)..(281): Pfam Name: DEAD/DEAH box helicase Pfam Description: DEAD/DEAH box helicase
  misc_feature (66)..(459): Homolog of NCBI NO: 24585582 NR Description: CG9253-PA [Drosophila melanogaster]
  misc_feature (66)..(459): Homolog of NCBI NO: 21464402 NR Description: RE27528p [Drosophila melanogaster]
  misc_feature (62)..(493): Homolog of NCBI NO: 19113586 NR Description: atp-dependent rna helicase [Schizosaccharomyces
  misc_feature (64)..(538): Homolog of NCBI NO: 39595087 NR Description: Hypothetical protein CBG03667 [Caenorhabditis
  misc_feature (64)..(502): Homolog of NCBI NO: 34877820 NR Description: similar to R27090_2 [Rattus norvegicus]
  misc_feature (64)..(502): Homolog of NCBI NO: 31542656 NR Description: hypothetical protein FLJ10432 [Homo sapiens]
  misc_feature (62)..(530): Homolog of NCBI NO: 29612573 NR Description: Similar to hypothetical protein FLJ10432 [Xenopus
  misc_feature (62)..(530): Homolog of NCBI NO: 40787696 NR Description: Unknown (protein for MGC:76291) [Silurana
  misc_feature (3)..(473): Homolog of NCBI NO: 34913306 NR Description: P0519E12.31 [Oryza sativa (japonica
  misc_feature (32)..(491): Homolog of NCBI NO: 15219185 NR Description: DEAD/DEAH box helicase, putative [Arabidopsis
MEQPQLLHDPNFPLFKTPSSPAVTTTATHKPLSTTPITTTSNGERREDHSVETAATVAADAEAFGDLGLAEWAVKTCRELGMRRPRPVQRRCIPRVLEGRHVLGIDETGSGKTAAFALPILHRLAEHPFGVFALVVTPTRELAFQLAEQFRALGSAVHLRITVVVGGMDMLRQTKELAARPHLVIATPGRIHALLRNNPDIPPVFSRTKFLVLDEADRVLDVGFQEELRFIFQCLPENRQNLFFSATTTSNLQKLRERYQDKMYVYEAYEGFKTVETLKQQAIFIPKKVKDVYLMHILAKMEDMGIRSAIVFISTCRDCHRLSLMLEVLDQEAAALYSFKSQAQRLEALHQFKSGKVSILLATDVASRGLDIPTVDLVINYDVPRFPRDYIHRVGRTARAGRGGLALSLVTQNDVDLIHEIEALIEKQLEMIEYKENEVLSLMKKVFSAKNVAEMKMIDDGFEEKAKERKKQKLKMLADKGLLNKRSKKRKRNKEFAEEGEEQKNEVFTVRNVTEMKRMDEDGIEEKAEEGGIQKLKMRTQKGLSKKKKLKERNNEFADER

SEQ ID NO: 54429 - protein, 480 aa, Glycine max
  peptide (1)..(480): Ceres Seq. ID no. 14310455
  misc_feature (1)..(200): Pfam Name: DEAD/DEAH box helicase Pfam Description: DEAD/DEAH box helicase
  misc_feature (1)..(378): Homolog of NCBI NO: 24585582 NR Description: CG9253-PA [Drosophila melanogaster]
  misc_feature (1)..(378): Homolog of NCBI NO: 21464402 NR Description: RE27528p [Drosophila melanogaster]
  misc_feature (1)..(412): Homolog of NCBI NO: 19113586 NR Description: atp-dependent rna helicase [Schizosaccharomyces
  misc_feature (1)..(457): Homolog of NCBI NO: 39595087 NR Description: Hypothetical protein CBG03667 [Caenorhabditis
  misc_feature (1)..(421): Homolog of NCBI NO: 34877820 NR Description: similar to R27090_2 [Rattus norvegicus]
  misc_feature (1)..(421): Homolog of NCBI NO: 31542656 NR Description: hypothetical protein FLJ10432 [Homo sapiens]
  misc_feature (1)..(449): Homolog of NCBI NO: 29612573 NR Description: Similar to hypothetical protein FLJ10432 [Xenopus
  misc_feature (1)..(449): Homolog of NCBI NO: 40787696 NR Description: Unknown (protein for MGC:76291) [Silurana
  misc_feature (1)..(392): Homolog of NCBI NO: 34913306 NR Description: P0519E12.31 [Oryza sativa (japonica
  misc_feature (1)..(410): Homolog of NCBI NO: 15219185 NR Description: DEAD/DEAH box helicase, putative [Arabidopsis
MRRPRPVQRRCIPRVLEGRHVLGIDETGSGKTAAFALPILHRLAEHPFGVFALVVTPTRELAFQLAEQFRALGSAVHLRITVVVGGMDMLRQTKELAARPHLVIATPGRIHALLRNNPDIPPVFSRTKFLVLDEADRVLDVGFQEELRFIFQCLPENRQNLFFSATTTSNLQKLRERYQDKMYVYEAYEGFKTVETLKQQAIFIPKKVKDVYLMHILAKMEDMGIRSAIVFISTCRDCHRLSLMLEVLDQEAAALYSFKSQAQRLEALHQFKSGKVSILLATDVASRGLDIPTVDLVINYDVPRFPRDYIHRVGRTARAGRGGLALSLVTQNDVDLIHEIEALIEKQLEMIEYKENEVLSLMKKVFSAKNVAEMKMIDDGFEEKAKERKKQKLKMLADKGLLNKRSKKRKRNKEFAEEGEEQKNEVFTVRNVTEMKRMDEDGIEEKAEEGGIQKLKMRTQKGLSKKKKLKERNNEFADER

SEQ ID NO: 54430 - DNA, 1622 bp, Glycine max
  misc_feature (1)..(1622): Ceres Seq. ID no. 15176571
cccaaaaaggaacctttcactttgcctgcacccacaccgctctctctctctccacaactctttctcacccgctagggtttccttccatcgcatcttgatttcgcaacctcgtctagcaattctccatggagggtgctgggatggaagagaataatattattaatgatgataataagtctgaggcgcatttgacttctgccgctgcttttgtggagggtggaattcaggatgcttgtgatgatgcttgcagcatatgccttgaagctttctgtgatagtgatccctccacggtgacaagttgcaagcatgagtttcatcttcagtgcattctggaatggtgtcaaagaagctcccagtgccccatgtgttggcaacctatcagtctcaaagatccaacaagccaagaattacttgaggcagtggaaagagagcggaactttaggttcaatccatctagaaatgccaccatatttcatcatccaacactgggggattttgagttacaacatttgccagttggagctagtgatgctgatcttgaagagcgcattatccaacacttagctgctgcagcagcgatgggaagagcacggcacgttgctagaagagaaggccagagaaacagatcatcagctcaaggtcgccaacattttttggttttttcaactcatcctaattcaccacccatggctcctgcttcttcctctccatctcagaggggggatgatgaaccaactcctacaattgatgttgccaatctgtctccaactcctgcaactggagaagaatcatcgcagccgactttagtttcgcctgttcaagcagaacaggtgtctgcttcaggatctggaactactgctcttgctacagatcatcagggatcatcctacaacaataggagatctcctaatcagtcatctccaagtagtcaagacagagcaggaccatcagaattacagtcattttcagaatctctgaaatctaaactgaatgctgtgtcaacaagatacaaggaatcaatttccaagagcacaagagggtggaaggagagatggttctcccgtaacaacactatgtctgaccttggatctgaagttaggcgagaagttaatgcagggattgcaactgtgtcacgcatgatggaacgcctggagaccagagacaataatagaagcaatagcaattctgctccaagtaatatagaggatggttcagtgcagggatctaatgatcagactttaacagcaggcaatgaagggggctctcttgtgagagacaataacacaaaagcttcttgtgctgcaggttctagttcgaactaagcatatagaaggaattgcttgaactctgagatttgttttgtccaaaaggaagaaatagaattgcccattggggatgtgaaattccatggatggcattgcctattggctggcgcagaccaggcaagtgataatccattggcctgcagaagaccaacaattgtgatattggaaataaaaaacttaaaaaaggaagcagtggtctctttcgtttgaaacctaggaacctatatatgattgtatattcacattgtaaacttatttatggatattcctcagataatctttgcataaagtactgtg

SEQ ID NO: 54431 - protein, 398 aa, Glycine max
  peptide (1)..(398): Ceres Seq. ID no. 15176572
  misc_feature (41)..(81): Pfam Name: Zinc finger, C3HC4 type (RING finger) Pfam Description: Zinc finger, C3HC4 type (RING finger)
  misc_feature (6)..(304): Homolog of NCBI NO: 26450997 NR Description: putative RING-H2 finger protein RHF1a
  misc_feature (6)..(304): Homolog of NCBI NO: 30682750 NR Description: zinc finger (C3HC4-type RING finger) protein
  misc_feature (6)..(304): Homolog of NCBI NO: 25360953 NR Description: RING-H2 finger protein RHF1a [imported] -
  misc_feature (15)..(122): Homolog of NCBI NO: 32400766 NR Description: RING-H2 finger protein [Triticum aestivum]
  misc_feature (265)..(397): Homolog of NCBI NO: 27819501 NR Description: putative zinc finger protein
  misc_feature (17)..(211): Homolog of NCBI NO: 27819501 NR Description: putative zinc finger protein
  misc_feature (15)..(398): Homolog of NCBI NO: 32493110 NR Description: putative RING-H2 zinc finger protein
  misc_feature (1)..(375): Homolog of NCBI NO: 26451710 NR Description: putative RING-H2 finger protein RHF2a
  misc_feature (18)..(398): Homolog of NCBI NO: 30688252 NR Description: zinc finger (C3HC4-type RING finger) protein
  misc_feature (1)..(398): Homolog of NCBI NO: 18420424 NR Description: zinc finger (C3HC4-type RING finger) protein
MEGAGMEENNIINDDNKSEAHLTSAAAFVEGGIQDACDDACSICLEAFCDSDPSTVTSCKHEFHLQCILEWCQRSSQCPMCWQPISLKDPTSQELLEAVERERNFRFNPSRNATIFHHPTLGDFELQHLPVGASDADLEERIIQHLAAAAAMGRARHVARREGQRNRSSAQGRQHFLVFSTHPNSPPMAPASSSPSQRGDDEPTPTIDVANLSPTPATGEESSQPTLVSPVQAEQVSASGSGTTALATDHQGSSYNNRRSPNQSSPSSQDRAGPSELQSFSESLKSKLNAVSTRYKESISKSTRGWKERWFSRNNTMSDLGSEVRREVNAGIATVSRMMERLETRDNNRSNSNSAPSNIEDGSVQGSNDQTLTAGNEGGSLVRDNNTKASCAAGSSSN

SEQ ID NO: 54432 - protein, 393 aa, Glycine max
  peptide (1)..(393): Ceres Seq. ID no. 15176573
  misc_feature (36)..(76): Pfam Name: Zinc finger, C3HC4 type (RING finger) Pfam Description: Zinc finger, C3HC4 type (RING finger)
  misc_feature (1)..(299): Homolog of NCBI NO: 26450997 NR Description: putative RING-H2 finger protein RHF1a
  misc_feature (1)..(299): Homolog of NCBI NO: 30682750 NR Description: zinc finger (C3HC4-type RING finger) protein
  misc_feature (1)..(299): Homolog of NCBI NO: 25360953 NR Description: RING-H2 finger protein RHF1a [imported] -
  misc_feature (10)..(117): Homolog of NCBI NO: 32400766 NR Description: RING-H2 finger protein [Triticum aestivum]
  misc_feature (260)..(392): Homolog of NCBI NO: 27819501 NR Description: putative zinc finger protein
  misc_feature (12)..(206): Homolog of NCBI NO: 27819501 NR Description: putative zinc finger protein
  misc_feature (10)..(393): Homolog of NCBI NO: 32493110 NR Description: putative RING-H2 zinc finger protein
  misc_feature (1)..(370): Homolog of NCBI NO: 26451710 NR Description: putative RING-H2 finger protein RHF2a
  misc_feature (13)..(393): Homolog of NCBI NO: 30688252 NR Description: zinc finger (C3HC4-type RING finger) protein
  misc_feature (1)..(393): Homolog of NCBI NO: 18420424 NR Description: zinc finger (C3HC4-type RING finger) protein
MEENNIINDDNKSEAHLTSAAAFVEGGIQDACDDACSICLEAFCDSDPSTVTSCKHEFHLQCILEWCQRSSQCPMCWQPISLKDPTSQELLEAVERERNFRFNPSRNATIFHHPTLGDFELQHLPVGASDADLEERIIQHLAAAAAMGRARHVARREGQRNRSSAQGRQHFLVFSTHPNSPPMAPASSSPSQRGDDEPTPTIDVANLSPTPATGEESSQPTLVSPVQAEQVSASGSGTTALATDHQGSSYNNRRSPNQSSPSSQDRAGPSELQSFSESLKSKLNAVSTRYKESISKSTRGWKERWFSRNNTMSDLGSEVRREVNAGIATVSRMMERLETRDNNRSNSNSAPSNIEDGSVQGSNDQTLTAGNEGGSLVRDNNTKASCAAGSSSN

SEQ ID NO: 54433 - protein, 319 aa, Glycine max
  peptide (1)..(319): Ceres Seq. ID no. 15176574
  misc_feature (1)..(225): Homolog of NCBI NO: 26450997 NR Description: putative RING-H2 finger protein RHF1a
  misc_feature (1)..(225): Homolog of NCBI NO: 30682750 NR Description: zinc finger (C3HC4-type RING finger) protein
  misc_feature (1)..(225): Homolog of NCBI NO: 25360953 NR Description: RING-H2 finger protein RHF1a [imported] -
  misc_feature (1)..(43): Homolog of NCBI NO: 32400766 NR Description: RING-H2 finger protein [Triticum aestivum]
  misc_feature (186)..(318): Homolog of NCBI NO: 27819501 NR Description: putative zinc finger protein
  misc_feature (1)..(132): Homolog of NCBI NO: 27819501 NR Description: putative zinc finger protein
  misc_feature (1)..(319): Homolog of NCBI NO: 32493110 NR Description: putative RING-H2 zinc finger protein
  misc_feature (1)..(296): Homolog of NCBI NO: 26451710 NR Description: putative RING-H2 finger protein RHF2a
  misc_feature (1)..(319): Homolog of NCBI NO: 30688252 NR Description: zinc finger (C3HC4-type RING finger) protein
  misc_feature (1)..(319): Homolog of NCBI NO: 18420424 NR Description: zinc finger (C3HC4-type RING finger) protein
MCWQPISLKDPTSQELLEAVERERNFRFNPSRNATIFHHPTLGDFELQHLPVGASDADLEERIIQHLAAAAAMGRARHVARREGQRNRSSAQGRQHFLVFSTHPNSPPMAPASSSPSQRGDDEPTPTIDVANLSPTPATGEESSQPTLVSPVQAEQVSASGSGTTALATDHQGSSYNNRRSPNQSSPSSQDRAGPSELQSFSESLKSKLNAVSTRYKESISKSTRGWKERWFSRNNTMSDLGSEVRREVNAGIATVSRMMERLETRDNNRSNSNSAPSNIEDGSVQGSNDQTLTAGNEGGSLVRDNNTKASCAAGSSSN

SEQ ID NO: 54434 - DNA, 986 bp, Glycine max
  misc_feature (1)..(986): Ceres Seq. ID no. 15169682
ggtcatagcacaaccttctatcgcttcacacacaagttcattcacagagagatagaatcactgaagagcttcaatggcggtttctctctctgttactcctctttctctctccaattcttctccttctctatcttccaagccaaagtttccatctttgtgctttttctctggcaacaacaccttgagggtcaaatgcccaaaaccttcgcactcaacaactgttgttcatgttgctccagaagcgttggattcttcacttgatcccttagacccacctccagaaacccttgatgatgactctgacgccaccacctttgaggttggtgacttggggactcctagcacttcggcaattagcattggtggcgatgcagatacaatggcaccaaagcagaagattagaatcaagcttagatcttactgggtgcccttgatagaggattcctgcaagcagatattagatgtagcaaggaataccaatgcaaaaacgatgggacctgtgccattaccaaccaagaagcgaatctactgtgttcttaaatccccacacgtacataaggatgctcggttccatttcgagatcagaacacaccagcgtctcattgatattctataccctacagctcaaacaatagattctctgatgcaactagatcttcctgctggtgttgatgtggaggtcaagctctagagatattttcttttcaggttgctaaccattttgaatctgagtgaggttcaacttgttatatcaatggccaaaatatattggcagatatcatgtatttcaatgaacaatgttaaaatccttttgcttgctttccccttttgtccccaacaaggtttcaattagtgtattcctgatttcctgttcttgcttagatatttgtatatcatatacaatgttatgtaattctgatgtccccacaatcgcttcatttttttctctggtaaattatgtttatgaatttatttattttgatctc

SEQ ID NO: 54435 - protein, 205 aa, Glycine max
  peptide (1)..(205): Ceres Seq. ID no. 15169683
  misc_feature (108)..(203): Pfam Name: Ribosomal protein S10p/S20e Pfam Description: Ribosomal protein S10p/S20e
  misc_feature (105)..(205): Homolog of NCBI NO: 39997950 NR Description: ribosomal protein S10 [Geobacter sulfurreducens
  misc_feature (106)..(205): Homolog of NCBI NO: 11467745 NR Description: ribosomal protein S10 [Guillardia theta]
  misc_feature (106)..(205): Homolog of NCBI NO: 17231828 NR Description: 30S ribosomal protein S10 [Nostoc sp. PCC 7120]
  misc_feature (106)..(205): Homolog of NCBI NO: 16330912 NR Description: 30S ribosomal protein S10 [Synechocystis sp. PCC
  misc_feature (106)..(205): Homolog of NCBI NO: 1350919 NR Description: 30S ribosomal protein S10
  misc_feature (106)..(205): Homolog of NCBI NO: 23125142 NR Description: hypothetical protein [Nostoc punctiforme]
  misc_feature (102)..(205): Homolog of NCBI NO: 11465752 NR Description: ribosomal protein S10 [Porphyra purpurea]
  misc_feature (103)..(205): Homolog of NCBI NO: 11467349 NR Description: ribosomal protein S10 [Cyanophora paradoxa]
  misc_feature (63)..(205): Homolog of NCBI NO: 15231154 NR Description: chloroplast 30S ribosomal protein S10, putative
  misc_feature (1)..(205): Homolog of NCBI NO: 7578929 NR Description: plastid ribosomal protein S10 precursor
MAVSLSVTPLSLSNSSPSLSSKPKFPSLCFFSGNNTLRVKCPKPSHSTTVVHVAPEALDSSLDPLDPPPETLDDDSDATTFEVGDLGTPSTSAISIGGDADTMAPKQKIRIKLRSYWVPLIEDSCKQILDVARNTNAKTMGPVPLPTKKRIYCVLKSPHVHKDARFHFEIRTHQRLIDILYPTAQTIDSLMQLDLPAGVDVEVKL

SEQ ID NO: 54436 - protein, 103 aa, Glycine max
  peptide (1)..(103): Ceres Seq. ID no. 15169684
  misc_feature (6)..(101): Pfam Name: Ribosomal protein S10p/S20e Pfam Description: Ribosomal protein S10p/S20e
  misc_feature (3)..(103): Homolog of NCBI NO: 39997950 NR Description: ribosomal protein S10 [Geobacter sulfurreducens
  misc_feature (4)..(103): Homolog of NCBI NO: 11467745 NR Description: ribosomal protein S10 [Guillardia theta]
  misc_feature (4)..(103): Homolog of NCBI NO: 17231828 NR Description: 30S ribosomal protein S10 [Nostoc sp. PCC 7120]
  misc_feature (4)..(103): Homolog of NCBI NO: 16330912 NR Description: 30S ribosomal protein S10 [Synechocystis sp. PCC
  misc_feature (4)..(103): Homolog of NCBI NO: 1350919 NR Description: 30S ribosomal protein S10
  misc_feature (4)..(103): Homolog of NCBI NO: 23125142 NR Description: hypothetical protein [Nostoc punctiforme]
  misc_feature (1)..(103): Homolog of NCBI NO: 11465752 NR Description: ribosomal protein S10 [Porphyra purpurea]
  misc_feature (1)..(103): Homolog of NCBI NO: 11467349 NR Description: ribosomal protein S10 [Cyanophora paradoxa]
  misc_feature (1)..(103): Homolog of NCBI NO: 15231154 NR Description: chloroplast 30S ribosomal protein S10, putative
  misc_feature (1)..(103): Homolog of NCBI NO: 7578929 NR Description: plastid ribosomal protein S10 precursor
MAPKQKIRIKLRSYWVPLIEDSCKQILDVARNTNAKTMGPVPLPTKKRIYCVLKSPHVHKDARFHFEIRTHQRLIDILYPTAQTIDSLMQLDLPAGVDVEVKL

SEQ ID NO: 54437 - DNA, 1374 bp, Glycine max
  misc_feature (1)..(1374): Ceres Seq. ID no. 14307022
gagccattcttttccaccacaagataagaaaaaagaaaaaatgtttgcagggaaaggggctgtttggttctccagagcggtggcgttggcagcaatcgcggtggtagcttgcgttggccttacacaggcccaacccgaggccaggttcaactgcaacagcgcgaacatccccacgtgtcgcgcgctcataagctactctcacccgaacaccaccaccctcggcgacatccaaaagctcttcaacgtgaaacacatcctcgacatcgtgggagcgaacaacctcccaagcaacgccacaaaaacatacgcggtgggccccaacgaggttgtgaaggtccctttcccgtgcaggtgcagcaacaacacgggactctcggaccgtgttccgctgtacaggatcaagaagggggacacgctgtactacatcgcgacgacgacgttcgcgggtctgatgaagtggccgcagatccaggtggccaataacatagccaacgcgaataatatcaccaccggggacatgctttatattccgctgccgtgtagctgcgacgaggtgggtgggaagagtgtggtgcactatgcgcatcttgtggcgccgcagagcaccgtggaggggattgcggaggagtttggtaccactcagcagatactgctcaaccttaatggaatttctgaccccaaaaatcttcaggcagggcagattctcgatgttcccctccaagcttgttcctcgaatgtgaaaaatgattcattggactatcccttgcttgtcccaaatgctacttacgcctatactgcccatgaatgcgtcaaatgcaagtgtgactccagtaacaatttcatattacaatgtgagccatcccaactcaaaccaaccaactggtctgtttgcccctctatggaatgctcagccaacgtcttgattggcaaaaccatttcctcagattcctgcaatcgcacaacctgcgcctatactggttatagattccacaatatctctgcagaagctgtaactgagaacacttgtgctgtgccgccgactccgagtggttcaggaggatcaactggttctgattcaggagcgtcaaggagcaccttgcaaggcttgttttggagtaatcttttcattgtcattcactttgtcctctttcttgtctatgttttgtagtaaaatagaataccctgcacttccgcagctattttttataatagattagtccactctgtaatttgctgagttcagatagattggttcgtgttgtgagtgttgcaataactgaaccttttgtgtttttcctttgcaatatttgtatcttaaataaataaatatgttccgaagaataagagtgatgtctaatctattttaatgtgatc

SEQ ID NO: 54438 - protein, 388 aa, Glycine max
  peptide (1)..(388): Ceres Seq. ID no. 14307023
  misc_feature (49)..(221): Homolog of NCBI NO: 37651074 NR Description: Nod-factor receptor 5 [Lotus corniculatus var.
  misc_feature (51)..(327): Homolog of NCBI NO: 25406518 NR Description: unknown protein T5M16.22 [imported] - Arabidopsis
  misc_feature (51)..(327): Homolog of NCBI NO: 30699276 NR Description: expressed protein [Arabidopsis thaliana]
  misc_feature (25)..(326): Homolog of NCBI NO: 30687570 NR Description: expressed protein [Arabidopsis thaliana]
  misc_feature (25)..(326): Homolog of NCBI NO: 18395044 NR Description: expressed protein [Arabidopsis thaliana]
  misc_feature (30)..(388): Homolog of NCBI NO: 22758281 NR Description: Unknown protein [Oryza sativa (japonica
  misc_feature (43)..(370): Homolog of NCBI NO: 18398317 NR Description: delta-8 sphingolipid desaturase [Arabidopsis
  misc_feature (43)..(364): Homolog of NCBI NO: 21593990 NR Description: unknown [Arabidopsis thaliana]
  misc_feature (27)..(342): Homolog of NCBI NO: 28207683 NR Description: Erwinia induced protein 1 [Solanum tuberosum]
SHSFPPQDKKKEKMFAGKGAVWFSRAVALAAIAVVACVGLTQAQPEARFNCNSANIPTCRALISYSHPNTTTLGDIQKLFNVKHILDIVGANNLPSNATKTYAVGPNEVVKVPFPCRCSNNTGLSDRVPLYRIKKGDTLYYIATTTFAGLMKWPQIQVANNIANANNITTGDMLYIPLPCSCDEVGGKSVVHYAHLVAPQSTVEGIAEEFGTTQQILLNLNGISDPKNLQAGQILDVPLQACSSNVKNDSLDYPLLVPNATYAYTAHECVKCKCDSSNNFILQCEPSQLKPTNWSVCPSMECSANVLIGKTISSDSCNRTTCAYTGYRFHNISAEAVTENTCAVPPTPSGSGGSTGSDSGASRSTLQGLFWSNLFIVIHFVLFLVYVL

SEQ ID NO: 54439 - protein, 375 aa, Glycine max
  peptide (1)..(375): Ceres Seq. ID no. 14307024
  misc_feature (36)..(208): Homolog of NCBI NO: 37651074 NR Description: Nod-factor receptor 5 [Lotus corniculatus var.
  misc_feature (38)..(314): Homolog of NCBI NO: 25406518 NR Description: unknown protein T5M16.22 [imported] - Arabidopsis
  misc_feature (38)..(314): Homolog of NCBI NO: 30699276 NR Description: expressed protein [Arabidopsis thaliana]
  misc_feature (12)..(313): Homolog of NCBI NO: 30687570 NR Description: expressed protein [Arabidopsis thaliana]
  misc_feature (12)..(313): Homolog of NCBI NO: 18395044 NR Description: expressed protein [Arabidopsis thaliana]
  misc_feature (17)..(375): Homolog of NCBI NO: 22758281 NR Description: Unknown protein [Oryza sativa (japonica
  misc_feature (30)..(357): Homolog of NCBI NO: 18398317 NR Description: delta-8 sphingolipid desaturase [Arabidopsis
  misc_feature (30)..(351): Homolog of NCBI NO: 21593990 NR Description: unknown [Arabidopsis thaliana]
  misc_feature (14)..(329): Homolog of NCBI NO: 28207683 NR Description: Erwinia induced protein 1 [Solanum tuberosum]
MFAGKGAVWFSRAVALAAIAVVACVGLTQAQPEARFNCNSANIPTCRALISYSHPNTTTLGDIQKLFNVKHILDIVGANNLPSNATKTYAVGPNEVVKVPFPCRCSNNTGLSDRVPLYRIKKGDTLYYIATTTFAGLMKWPQIQVANNIANANNITTGDMLYIPLPCSCDEVGGKSVVHYAHLVAPQSTVEGIAEEFGTTQQILLNLNGISDPKNLQAGQILDVPLQACSSNVKNDSLDYPLLVPNATYAYTAHECVKCKCDSSNNFILQCEPSQLKPTNWSVCPSMECSANVLIGKTISSDSCNRTTCAYTGYRFHNISAEAVTENTCAVPPTPSGSGGSTGSDSGASRSTLQGLFWSNLFIVIHFVLFLVYVL

SEQ ID NO: 54440 - protein, 238 aa, Glycine max
  peptide (1)..(238): Ceres Seq. ID no. 14307025
  misc_feature (1)..(71): Homolog of NCBI NO: 37651074 NR Description: Nod-factor receptor 5 [Lotus corniculatus var.
  misc_feature (1)..(177): Homolog of NCBI NO: 25406518 NR Description: unknown protein T5M16.22 [imported] - Arabidopsis
  misc_feature (1)..(177): Homolog of NCBI NO: 30699276 NR Description: expressed protein [Arabidopsis thaliana]
  misc_feature (1)..(176): Homolog of NCBI NO: 30687570 NR Description: expressed protein [Arabidopsis thaliana]
  misc_feature (1)..(176): Homolog of NCBI NO: 18395044 NR Description: expressed protein [Arabidopsis thaliana]
  misc_feature (1)..(238): Homolog of NCBI NO: 22758281 NR Description: Unknown protein [Oryza sativa (japonica
  misc_feature (1)..(220): Homolog of NCBI NO: 18398317 NR Description: delta-8 sphingolipid desaturase [Arabidopsis
  misc_feature (1)..(214): Homolog of NCBI NO: 21593990 NR Description: unknown [Arabidopsis thaliana]
  misc_feature (1)..(192): Homolog of NCBI NO: 28207683 NR Description: Erwinia induced protein 1 [Solanum tuberosum]
MKWPQIQVANNIANANNITTGDMLYIPLPCSCDEVGGKSVVHYAHLVAPQSTVEGIAEEFGTTQQILLNLNGISDPKNLQAGQILDVPLQACSSNVKNDSLDYPLLVPNATYAYTAHECVKCKCDSSNNFILQCEPSQLKPTNWSVCPSMECSANVLIGKTISSDSCNRTTCAYTGYRFHNISAEAVTENTCAVPPTPSGSGGSTGSDSGASRSTLQGLFWSNLFIVIHFVLFLVYVL

SEQ ID NO: 54441 - DNA, 1339 bp, Glycine max
  misc_feature (1)..(1339): Ceres Seq. ID no. 15175488
cgggacatcaagctaagaaagggaaagagaaagatcacagaaagagaattcatctttctttgcgaacagctaaaaacctcaaagggaaagaaggcatgaatagaggtgttcttcagagctcaccagtgcaacaaatgatgactggaaaccctaactggtggaacatcaatatcaatagcatggctccacaagctcctcctttcttgtccactcctaacaactttcctatcccttgtgctcccacttctcttccctttccttcttggcatgagaatcaagatcttccagagtcatggagccagctacttatgagtggagtggtggatgaacaaggtaaggctgggatgggtcagtttattcagactaagaagttggagagctgggaggatcaaatgctaggtcaggctccaaacgcttctcttgttgatgttaaacaagaaaacttggttaacagctatgcatatgggcatggaagcgaagaacttcagtcatcaaagccatcttggtctccaaaatcatgtgtgacaacaagtttcagtagcaacatgttagatttctctaacaataagacagatgcaaggcatccaccaccagatctatcttctgagtgcaacagcactgcagctggtggggcactcaagaaagctagggttcaaccctctgctacaacgcagactacgttcaaggttaggaaggaaaagctaggtgagagaattacggcccttcatcagctcgtttccccatttgggaagactgacacggcctctgtcttgttagaagctattgggtatatcagattccttcagagtcaaattgaggctcttagcttaccatacttgagcggtggatcagggaacacgaggcagcaacattctgttcaaggagagaagagatgtatattccctgaagaccccggtcagctgctggatgaaaactgcttgaagaggaaagcagctggagagccggatactcaagaagaaccaaagaaggggctgaggagtagagggttgtgtctggtgccagtgtcatgcacactgcaagttggaagtgacaatggagcagattattgggctccagccctaggagggggctttcgttaggagttttttacaaatggggcagcatatacatataaatatggtagcatgcatagaggtaaattcatggaaatgatataacatcatgagcagtcaatctgctaaaaaaatctaaggctgattgctcatgatgctatacttcattattcctgaataaaatgtgtgctagctagccgtgacagtatttgcaagcccttgaagacttcataattcatggaaatcaagcttaattagttttcttt

SEQ ID NO: 54442 - protein, 365 aa, Glycine max
  peptide (1)..(365): Ceres Seq. ID no. 15175489
  misc_feature (220)..(267): Pfam Name: Helix-loop-helix DNA-binding domain Pfam Description: Helix-loop-helix DNA-binding domain
  misc_feature (213)..(279): Homolog of NCBI NO: 21536756 NR Description: unknown [Arabidopsis thaliana]
  misc_feature (213)..(279): Homolog of NCBI NO: 18402256 NR Description: expressed protein [Arabidopsis thaliana]
  misc_feature (311)..(365): Homolog of NCBI NO: 21553730 NR Description: unknown [Arabidopsis thaliana]
  misc_feature (311)..(365): Homolog of NCBI NO: 18407276 NR Description: expressed protein [Arabidopsis thaliana]
  misc_feature (148)..(297): Homolog of NCBI NO: 21553730 NR Description: unknown [Arabidopsis thaliana]
  misc_feature (148)..(297): Homolog of NCBI NO: 18407276 NR Description: expressed protein [Arabidopsis thaliana]
  misc_feature (20)..(361): Homolog of NCBI NO: 33111977 NR Description: putative bHLH133 transcription factor
  misc_feature (123)..(361): Homolog of NCBI NO: 11045087 NR Description: putative protein [Brassica napus]
  misc_feature (32)..(127): Homolog of NCBI NO: 15233452 NR Description: bHLH068 putative bHLH transcription factor
  misc_feature (108)..(364): Homolog of NCBI NO: 15233452 NR Description: bHLH068 putative bHLH transcription factor
GHQAKKGKEKDHRKRIHLSLRTAKNLKGKEGMNRGVLQSSPVQQMMTGNPNWWNININSMAPQAPPFLSTPNNFPIPCAPTSLPFPSWHENQDLPESWSQLLMSGVVDEQGKAGMGQFIQTKKLESWEDQMLGQAPNASLVDVKQENLVNSYAYGHGSEELQSSKPSWSPKSCVTTSFSSNMLDFSNNKTDARHPPPDLSSECNSTAAGGALKKARVQPSATTQTTFKVRKEKLGERITALHQLVSPFGKTDTASVLLEAIGYIRFLQSQIEALSLPYLSGGSGNTRQQHSVQGEKRCIFPEDPGQLLDENCLKRKAAGEPDTQEEPKKGLRSRGLCLVPVSCTLQVGSDNGADYWAPALGGGFR

SEQ ID NO: 54443 - protein, 334 aa, Glycine max
  peptide (1)..(334): Ceres Seq. ID no. 15175490
  misc_feature (189)..(236): Pfam Name: Helix-loop-helix DNA-binding domain Pfam Description: Helix-loop-helix DNA-binding domain
  misc_feature (182)..(248): Homolog of NCBI NO: 21536756 NR Description: unknown [Arabidopsis thaliana]
  misc_feature (182)..(248): Homolog of NCBI NO: 18402256 NR Description: expressed protein [Arabidopsis thaliana]
  misc_feature (280)..(334): Homolog of NCBI NO: 21553730 NR Description: unknown [Arabidopsis thaliana]
  misc_feature (280)..(334): Homolog of NCBI NO: 18407276 NR Description: expressed protein [Arabidopsis thaliana]
  misc_feature (117)..(266): Homolog of NCBI NO: 21553730 NR Description: unknown [Arabidopsis thaliana]
  misc_feature (117)..(266): Homolog of NCBI NO: 18407276 NR Description: expressed protein [Arabidopsis thaliana]
  misc_feature (1)..(330): Homolog of NCBI NO: 33111977 NR Description: putative bHLH133 transcription factor
  misc_feature (92)..(330): Homolog of NCBI NO: 11045087 NR Description: putative protein [Brassica napus]
  misc_feature (1)..(96): Homolog of NCBI NO: 15233452 NR Description: bHLH068 putative bHLH transcription factor
  misc_feature (77)..(333): Homolog of NCBI NO: 15233452 NR Description: bHLH068 putative bHLH transcription factor
MNRGVLQSSPVQQMMTGNPNWWNININSMAPQAPPFLSTPNNFPIPCAPTSLPFPSWHENQDLPESWSQLLMSGVVDEQGKAGMGQFIQTKKLESWEDQMLGQAPNASLVDVKQENLVNSYAYGHGSEELQSSKPSWSPKSCVTTSFSSNMLDFSNNKTDARHPPPDLSSECNSTAAGGALKKARVQPSATTQTTFKVRKEKLGERITALHQLVSPFGKTDTASVLLEAIGYIRFLQSQIEALSLPYLSGGSGNTRQQHSVQGEKRCIFPEDPGQLLDENCLKRKAAGEPDTQEEPKKGLRSRGLCLVPVSCTLQVGSDNGADYWAPALGGGFR

SEQ ID NO: 54444 - protein, 321 aa, Glycine max
  peptide (1)..(321): Ceres Seq. ID no. 15175491
  misc_feature (176)..(223): Pfam Name: Helix-loop-helix DNA-binding domain Pfam Description: Helix-loop-helix DNA-binding domain
  misc_feature (169)..(235): Homolog of NCBI NO: 21536756 NR Description: unknown [Arabidopsis thaliana]
  misc_feature (169)..(235): Homolog of NCBI NO: 18402256 NR Description: expressed protein [Arabidopsis thaliana]
  misc_feature (267)..(321): Homolog of NCBI NO: 21553730 NR Description: unknown [Arabidopsis thaliana]
  misc_feature (267)..(321): Homolog of NCBI NO: 18407276 NR Description: expressed protein [Arabidopsis thaliana]
  misc_feature (104)..(253): Homolog of NCBI NO: 21553730 NR Description: unknown [Arabidopsis thaliana]
  misc_feature (104)..(253): Homolog of NCBI NO: 18407276 NR Description: expressed protein [Arabidopsis thaliana]
  misc_feature (1)..(317): Homolog of NCBI NO: 33111977 NR Description: putative bHLH133 transcription factor
  misc_feature (79)..(317): Homolog of NCBI NO: 11045087 NR Description: putative protein [Brassica napus]
  misc_feature (1)..(83): Homolog of NCBI NO: 15233452 NR Description: bHLH068 putative bHLH transcription factor
  misc_feature (64)..(320): Homolog of NCBI NO: 15233452 NR Description: bHLH068 putative bHLH transcription factor
MMTGNPNWWNININSMAPQAPPFLSTPNNFPIPCAPTSLPFPSWHENQDLPESWSQLLMSGVVDEQGKAGMGQFIQTKKLESWEDQMLGQAPNASLVDVKQENLVNSYAYGHGSEELQSSKPSWSPKSCVTTSFSSNMLDFSNNKTDARHPPPDLSSECNSTAAGGALKKARVQPSATTQTTFKVRKEKLGERITALHQLVSPFGKTDTASVLLEAIGYIRFLQSQIEALSLPYLSGGSGNTRQQHSVQGEKRCIFPEDPGQLLDENCLKRKAAGEPDTQEEPKKGLRSRGLCLVPVSCTLQVGSDNGADYWAPALGGGFR

SEQ ID NO: 54445 - DNA, 621 bp, Glycine max
  misc_feature (1)..(621): Ceres Seq. ID no. 15176290
atatatcatcagcctcagccatgtcttattcgctcttgcacctcctcttccttcagcaactacgatcttcgatagtgatttatcagattcttcctttgcggtcgaatcatggagcccatggacatcgttggtaaatcaaaggaagacgcttcgcttcctaaagcaacaatgacaaaaattattaaagagatgttacccccagatgtacgtgttgcaagagatgcccaagatctattgattgagtgttgtgtagagtttataaaccttgtctcgtcagaatccaatgaagtctgtaatagagaggataaacggacaattgcacctgagcatgtattgaaggctctacaggttctaggatttggtgagtacattgaagaagtttatgcagcatatgaacagcacaaactggagaccatgcaggactctttaagagggggtggtggtggtggtaaatggaacaatggagctgagatgactgaggaagaagcattagcagagcagcaaaggatgtttgcagaggcacgtgctaggatgaatggtggagccattgcttctaagcagccagatgctgaccaaagtttagatagctaactttaggatctttattgaagcataggcaag

SEQ ID NO: 54446 - protein, 160 aa, Glycine max
  peptide (1)..(160): Ceres Seq. ID no. 15176291
  misc_feature (14)..(79): Pfam Name: Histone-like transcription factor (CBF/NF-Y) and Pfam Description: Histone-like transcription factor (CBF/NF-Y)
MEPMDIVGKSKEDASLPKATMTKIIKEMLPPDVRVARDAQDLLIECCVEFINLVSSESNEVCNREDKRTIAPEHVLKALQVLGFGEYIEEVYAAYEQHKLETMQDSLRGGGGGGKWNNGAEMTEEEALAEQQRMFAEARARMNGGAIASKQPDADQSLDS

SEQ ID NO: 54447 - protein, 157 aa, Glycine max
  peptide (1)..(157): Ceres Seq. ID no. 15176292
  misc_feature (11)..(76): Pfam Name: Histone-like transcription factor (CBF/NF-Y) and Pfam Description: Histone-like transcription factor (CBF/NF-Y)
MDIVGKSKEDASLPKATMTKIIKEMLPPDVRVARDAQDLLIECCVEFINLVSSESNEVCNREDKRTIAPEHVLKALQVLGFGEYIEEVYAAYEQHKLETMQDSLRGGGGGGKWNNGAEMTEEEALAEQQRMFAEARARMNGGAIASKQPDADQSLDS

SEQ ID NO: 54448 - protein, 140 aa, Glycine max
  peptide (1)..(140): Ceres Seq. ID no. 15176293
  misc_feature (1)..(59): Pfam Name: Histone-like transcription factor (CBF/NF-Y) and Pfam Description: Histone-like transcription factor (CBF/NF-Y)
MTKIIKEMLPPDVRVARDAQDLLIECCVEFINLVSSESNEVCNREDKRTIAPEHVLKALQVLGFGEYIEEVYAAYEQHKLETMQDSLRGGGGGGKWNNGAEMTEEEALAEQQRMFAEARARMNGGAIASKQPDADQSLDS

SEQ ID NO: 54449 - DNA, 1446 bp, Glycine max
  misc_feature (1)..(1446): Ceres Seq. ID no. 14313034
agaagcatttttttgcattgctttcatctgtctggaaagtggcatcacacgttgaccacaggcgaaatccatcaccctcctgtaatggtctctatttcgatcagagtttctatacttccattggccagccttcacaaaattccttgaagaaatcctctgaaaggatggcatttgcaaatttggccccgagcaagaatttagtagcagctgcacttgatgatatcacaactaggcaagtgaatgacaaagtcattctgtctaaccaaggggaagacatgccagtgagtgcagatcagctggatataacactggagtttgcaaaagaggatagcgacgtcctatcttcatttccatctgttataaatttatcaatacatgggactgaaccaacaccatctttaaataagctaacaggagaagatgatcttaaagttggtttgttcattgctgagaatcgtttcagggaggctgcaagagtttgtggagaagacagctctggatgggcatcatctgcattcccaaccaacgatacaaggtctcgacctggatccaggttacaatcctccggaaagcggaagtcttctgtatctgactcttctaagccttctaggtcaaagtccaaaaaagcttcaatggatcgtagtgaaatgcatccctatcaggctgactcaatgttccagtcaatgccatcacttaaagatctgagaattgatctcacttcattaactactgatgaagttggaattgatggtatggatagcattttctcctttgacttgaatggggaaagttcattggaaatggagagtgttggaatgatcccacatgattatgttgctggtttaatctcagaccttgatgatagtacagcattccctgaatatactgacattagataaggatgaaatcaagcctgaaatgcagttttgaaatgacctttggcttaccaagtggcatactcttggcaagttagtcttgatcagttcatgaattgctgttggcttacaattggaaatgcattcttgcagttcgctccttggcatgccatttttggatatacagacaaaacatttcaaaggctagcctgctgaaggtttcgatatgaaaatatagagatgtagaacgctgtcaatgatttaatttcttacttggaattatgtattggcttggtggttcagctcgaattttgacagcgccattcttccatagatcagtgctgattggtaagaagcccttcattttctcttccctctaatggtgcacatggatttgccttggatgttttgcatgctcacgtacatatgtttttagctgaggcatgcctagggtttagttctttaacttgcaacattttgttatgccaacagaacaatttagtcctttagtggctagttcattagtcccattcatttagaacaacacttcacatgatttaacatgagtttc

SEQ ID NO: 54450 - protein, 298 aa, Glycine max
  peptide (1)..(298): Ceres Seq. ID no. 14313035
  misc_feature (1)..(215): Homolog of NCBI NO: 30984019 NR Description: photoperiod independent early flowering1
  misc_feature (1)..(215): Homolog of NCBI NO: 22331035 NR Description: SNF2 domain/helicase domain-containing protein
  misc_feature (1)..(215): Homolog of NCBI NO: 11994423 NR Description: helicase-like protein [Arabidopsis thaliana]
KHFFALLSSVWKVASHVDHRRNPSPSCNGLYFDQSFYTSIGQPSQNSLKKSSERMAFANLAPSKNLVAAALDDITTRQVNDKVILSNQGEDMPVSADQLDITLEFAKEDSDVLSSFPSVINLSIHGTEPTPSLNKLTGEDDLKVGLFIAENRFREAARVCGEDSSGWASSAFPTNDTRSRPGSRLQSSGKRKSSVSDSSKPSRSKSKKASMDRSEMHPYQADSMFQSMPSLKDLRIDLTSLTTDEVGIDGMDSIFSFDLNGESSLEMESVGMIPHDYVAGLISDLDDSTAFPEYTDIR

SEQ ID NO: 54451 - protein, 244 aa, Glycine max
  peptide (1)..(244): Ceres Seq. ID no. 14313036
  misc_feature (1)..(161): Homolog of NCBI NO: 30984019 NR Description: photoperiod independent early flowering1
  misc_feature (1)..(161): Homolog of NCBI NO: 22331035 NR Description: SNF2 domain/helicase domain-containing protein
  misc_feature (1)..(161): Homolog of NCBI NO: 11994423 NR Description: helicase-like protein [Arabidopsis thaliana]
MAFANLAPSKNLVAAALDDITTRQVNDKVILSNQGEDMPVSADQLDITLEFAKEDSDVLSSFPSVINLSIHGTEPTPSLNKLTGEDDLKVGLFIAENRFREAARVCGEDSSGWASSAFPTNDTRSRPGSRLQSSGKRKSSVSDSSKPSRSKSKKASMDRSEMHPYQADSMFQSMPSLKDLRIDLTSLTTDEVGIDGMDSIFSFDLNGESSLEMESVGMIPHDYVAGLISDLDDSTAFPEYTDIR

SEQ ID NO: 54452 - protein, 207 aa, Glycine max
  peptide (1)..(207): Ceres Seq. ID no. 14313037
  misc_feature (1)..(124): Homolog of NCBI NO: 30984019 NR Description: photoperiod independent early flowering1
  misc_feature (1)..(124): Homolog of NCBI NO: 22331035 NR Description: SNF2 domain/helicase domain-containing protein
  misc_feature (1)..(124): Homolog of NCBI NO: 11994423 NR Description: helicase-like protein [Arabidopsis thaliana]
MPVSADQLDITLEFAKEDSDVLSSFPSVINLSIHGTEPTPSLNKLTGEDDLKVGLFIAENRFREAARVCGEDSSGWASSAFPTNDTRSRPGSRLQSSGKRKSSVSDSSKPSRSKSKKASMDRSEMHPYQADSMFQSMPSLKDLRIDLTSLTTDEVGIDGMDSIFSFDLNGESSLEMESVGMIPHDYVAGLISDLDDSTAFPEYTDIR

SEQ ID NO: 54453 - DNA, 1490 bp, Glycine max
  misc_feature (1)..(1490): Ceres Seq. ID no. 15176795
gaatgcctagtgaattagctatgaacaatgatgagctacatgtggttatgttcccattccttgcatttggccacattagtccatttgttcagctctccaacaagttgttctctcatggtgttcatgtcactttcttgtcagctgcatccaacattcccagaatcagatcaactcttaatctcaatccagccatcaatgttatctcactaaagttcccaaatggtataaccaacactgctgaattgccacctcacttagctggaaatctcatacacgcccttgacctcactcaagatcaggtgaagtcccttttgttggaactcaaaccccactatgttttctttgactttgcacaacattggctcccaaaattagcttctgaagttggcatcaagtctgttcatttctcagtctactctgccatttctgatgcttacattaccgtgccttctagatttgctgatgttgaaggaagaaacatcacttttgaggatcttaaaaagcctccacctgggtatcctcaaaactctaatatttccctcaaggcctttgaggccatggactttatgttcctcttcacaagatttggtgaaaaaaaccttactggttatgagcgagttttgcaaagccttggtgagtgttcattcatagtgttcaaaacgtgcaaggaaatagaaggaccctacttagactacatagaaacgcaatttcgaaaaccagttttgctatctggtccactagtccccgagccatcaaccgatgtgcttgaggaaaagtggtccaaatggttagatggtttccctgccaaatctgtcatattatgctcctttggcagtgagacatttctgagtgattatcaaatcaaagaactagccagtgggttagaactcactggcttacctttcattttggttctgaatttcccatccaatctctctgccaaagctgagttggagagagcattgccaaaagggtatttggaaagagtgaagaataggggagtggtgcacagtggttggtttcagcagcagcttgtgctgaaacactcaagtgtggggtgctatgtatgccatggtggctttagttcagtgattgaagctatggtcaatgagtgtcaactggtgctgttgcctttcaagggtgaccagtttttcaactctaaactcattgccaatgatttaaaggcaggggtagaggtgaataggagtgatgaagatgggttctttcacaaagaggatatactggaggcattgaaaactgtcatgttggaggataacaaagagcaagggaagcaaataagagaaaaccacatgcaatggagcaagtttttatcaaataaggaaattcagaacaaattcatcacagatctggttgcccagttaaagtctatggcttagtcttgtctcttccaatggaaaataaagtctaccaagactagaaagtataaactataattcaaaatgatcatattatcatatatcaattgagat

SEQ ID NO: 54454 - protein, 464 aa, Glycine max
  peptide (1)..(464): Ceres Seq. ID no. 15176796
  misc_feature (7)..(464): Homolog of NCBI NO: 15982889 NR Description: AT4g27560/T29A15_50 [Arabidopsis thaliana]
  misc_feature (7)..(463): Homolog of NCBI NO: 15234195 NR Description: glycosyltransferase family [Arabidopsis thaliana]
  misc_feature (7)..(463): Homolog of NCBI NO: 15234196 NR Description: glycosyltransferase family [Arabidopsis thaliana]
  misc_feature (9)..(462): Homolog of NCBI NO: 15239543 NR Description: glycosyltransferase family [Arabidopsis thaliana]
  misc_feature (11)..(463): Homolog of NCBI NO: 15239525 NR Description: glycosyltransferase family [Arabidopsis thaliana]
  misc_feature (8)..(463): Homolog of NCBI NO: 23955910 NR Description: UDP-glucosyltransferase [Stevia rebaudiana]
  misc_feature (1)..(464): Homolog of NCBI NO: 7433907 NR Description: anthocyanin rhamnosyltransferase - garden petunia
  misc_feature (7)..(464): Homolog of NCBI NO: 22759895 NR Description: rhamnosyl transferase [Nierembergia sp. NB17]
  misc_feature (3)..(464): Homolog of NCBI NO: 480314 NR Description: UDP rhamnose-anthocyanidin-3-glucoside
  misc_feature (1)..(464): Homolog of NCBI NO: 2501497 NR Description: FLAVONOL 3-O-GLUCOSYLTRANSFERASE (UDP-GLUCOSE
MPSELAMNNDELHVVMFPFLAFGHISPFVQLSNKLFSHGVHVTFLSAASNIPRIRSTLNLNPAINVISLKFPNGITNTAELPPHLAGNLIHALDLTQDQVKSLLLELKPHYVFFDFAQHWLPKLASEVGIKSVHFSVYSAISDAYITVPSRFADVEGRNITFEDLKKPPPGYPQNSNISLKAFEAMDFMFLFTRFGEKNLTGYERVLQSLGECSFIVFKTCKEIEGPYLDYIETQFRKPVLLSGPLVPEPSTDVLEEKWSKWLDGFPAKSVILCSFGSETFLSDYQIKELASGLELTGLPFILVLNFPSNLSAKAELERALPKGYLERVKNRGVVHSGWFQQQLVLKHSSVGCYVCHGGFSSVIEAMVNECQLVLLPFKGDQFFNSKLIANDLKAGVEVNRSDEDGFFHKEDILEALKTVMLEDNKEQGKQIRENHMQWSKFLSNKEIQNKFITDLVAQLKSMA

SEQ ID NO: 54455 - protein, 458 aa, Glycine max
  peptide (1)..(458): Ceres Seq. ID no. 15176797
  misc_feature (1)..(458): Homolog of NCBI NO: 15982889 NR Description: AT4g27560/T29A15_50 [Arabidopsis thaliana]
  misc_feature (1)..(457): Homolog of NCBI NO: 15234195 NR Description: glycosyltransferase family [Arabidopsis thaliana]
  misc_feature (1)..(457): Homolog of NCBI NO: 15234196 NR Description: glycosyltransferase family [Arabidopsis thaliana]
  misc_feature (3)..(456): Homolog of NCBI NO: 15239543 NR Description: glycosyltransferase family [Arabidopsis thaliana]
  misc_feature (5)..(457): Homolog of NCBI NO: 15239525 NR Description: glycosyltransferase family [Arabidopsis thaliana]
  misc_feature (2)..(457): Homolog of NCBI NO: 23955910 NR Description: UDP-glucosyltransferase [Stevia rebaudiana]
  misc_feature (1)..(458): Homolog of NCBI NO: 7433907 NR Description: anthocyanin rhamnosyltransferase - garden petunia
  misc_feature (1)..(458): Homolog of NCBI NO: 22759895 NR Description: rhamnosyl transferase [Nierembergia sp. NB17]
  misc_feature (1)..(458): Homolog of NCBI NO: 480314 NR Description: UDP rhamnose-anthocyanidin-3-glucoside
  misc_feature (1)..(458): Homolog of NCBI NO: 2501497 NR Description: FLAVONOL 3-O-GLUCOSYLTRANSFERASE (UDP-GLUCOSE
MNNDELHVVMFPFLAFGHISPFVQLSNKLFSHGVHVTFLSAASNIPRIRSTLNLNPAINVISLKFPNGITNTAELPPHLAGNLIHALDLTQDQVKSLLLELKPHYVFFDFAQHWLPKLASEVGIKSVHFSVYSAISDAYITVPSRFADVEGRNITFEDLKKPPPGYPQNSNISLKAFEAMDFMFLFTRFGEKNLTGYERVLQSLGECSFIVFKTCKEIEGPYLDYIETQFRKPVLLSGPLVPEPSTDVLEEKWSKWLDGFPAKSVILCSFGSETFLSDYQIKELASGLELTGLPFILVLNFPSNLSAKAELERALPKGYLERVKNRGVVHSGWFQQQLVLKHSSVGCYVCHGGFSSVIEAMVNECQLVLLPFKGDQFFNSKLIANDLKAGVEVNRSDEDGFFHKEDILEALKTVMLEDNKEQGKQIRENHMQWSKFLSNKEIQNKFITDLVAQLKSMA

SEQ ID NO: 54456 - protein, 449 aa, Glycine max
  peptide (1)..(449): Ceres Seq. ID no. 15176798
  misc_feature (1)..(449): Homolog of NCBI NO: 15982889 NR Description: AT4g27560/T29A15_50 [Arabidopsis thaliana]
  misc_feature (1)..(448): Homolog of NCBI NO: 15234195 NR Description: glycosyltransferase family [Arabidopsis thaliana]
  misc_feature (1)..(448): Homolog of NCBI NO: 15234196 NR Description: glycosyltransferase family [Arabidopsis thaliana]
  misc_feature (1)..(447): Homolog of NCBI NO: 15239543 NR Description: glycosyltransferase family [Arabidopsis thaliana]
  misc_feature (1)..(448): Homolog of NCBI NO: 15239525 NR Description: glycosyltransferase family [Arabidopsis thaliana]
  misc_feature (1)..(448): Homolog of NCBI NO: 23955910 NR Description: UDP-glucosyltransferase [Stevia rebaudiana]
  misc_feature (1)..(449): Homolog of NCBI NO: 7433907 NR Description: anthocyanin rhamnosyltransferase - garden petunia
  misc_feature (1)..(449): Homolog of NCBI NO: 22759895 NR Description: rhamnosyl transferase [Nierembergia sp. NB17]
  misc_feature (1)..(449): Homolog of NCBI NO: 480314 NR Description: UDP rhamnose-anthocyanidin-3-glucoside
  misc_feature (1)..(449): Homolog of NCBI NO: 2501497 NR Description: FLAVONOL 3-O-GLUCOSYLTRANSFERASE (UDP-GLUCOSE
MFPFLAFGHISPFVQLSNKLFSHGVHVTFLSAASNIPRIRSTLNLNPAINVISLKFPNGITNTAELPPHLAGNLIHALDLTQDQVKSLLLELKPHYVFFDFAQHWLPKLASEVGIKSVHFSVYSAISDAYITVPSRFADVEGRNITFEDLKKPPPGYPQNSNISLKAFEAMDFMFLFTRFGEKNLTGYERVLQSLGECSFIVFKTCKEIEGPYLDYIETQFRKPVLLSGPLVPEPSTDVLEEKWSKWLDGFPAKSVILCSFGSETFLSDYQIKELASGLELTGLPFILVLNFPSNLSAKAELERALPKGYLERVKNRGVVHSGWFQQQLVLKHSSVGCYVCHGGFSSVIEAMVNECQLVLLPFKGDQFFNSKLIANDLKAGVEVNRSDEDGFFHKEDILEALKTVMLEDNKEQGKQIRENHMQWSKFLSNKEIQNKFITDLVAQLKSMA

SEQ ID NO: 54457 - DNA, 1135 bp, Glycine max
  misc_feature (1)..(1135): Ceres Seq. ID no. 15178717
acgaacaagaagaagaagaagaaatcgtttgcttagacgcgtcgttcttcgtcgatgacaactgacgaaattcacgttcggttcgcaagacattcagctcttctgtctgcattctgcttccactgattttgatttgacagggcagctggtttggcctggagccatgttgctgaatgagtatctttcaaaaaatgttaacctgcttcagggttgcactgccattgaattaggttctggtgttggtattaccggaatactttgcagcagattctgccataaagttgtgatgacagatcataatgaagaagtgatcaagatcttaaagaaaaacatagagctgcattcatgtcctgagaatattacttctatttctcatggattagtagcagagaaactagaatgggggaacactgatcagataaatgaaatattacaaaaacatcctggaggtttcgacttcatacttggagctgatatatgctttcagcagtcaagcatacctatgctttttgatagtgttaaacagctcctgcaggctagggaggacagaaagtgcaaattcattctagcctatatatcaagagctaagaccatggattcaatgattcttattgaagcttctaagctacagatgcagatgaaagaagtgcctggaactcggtgcacagttaagaatcttgaaggagtcatctttgtagttactcttgagtagaaacactaaatatagttgagtttccagaaacagacattgcatgtgaaaaggaaaactgatgggggttagcaatagttggaatttctatttccattcaaagctactcccttgctgacaacatggtgttgatgactcaggaaacccatgggggaagataaagaacatgcaagaatgagaacctatcttgtggagtttatcttccaaaacataattctctatttaaagcatacatgaccaaccacagaagattttctagatagatttggttggactgagtggagtctatcatcccaaaggtagtctttgggaactttgagggtcaagaagagaaatcaggaattcattttgttaatcataaagtattaatcacacattttccaccttatgattttctcaatgaaataattaatgtcttacggtgtg

SEQ ID NO: 54458 - protein, 182 aa, Glycine max
  peptide (1)..(182): Ceres Seq. ID no. 15178718
  misc_feature (53)..(142): Homolog of NCBI NO: 7460191 NR Description: hypothetical protein At2g26810 [imported] -
  misc_feature (1)..(122): Homolog of NCBI NO: 20071260 NR Description: RIKEN cDNA 2310038H17 [Mus musculus]
  misc_feature (1)..(122): Homolog of NCBI NO: 13385458 NR Description: RIKEN cDNA 2310038H17 [Mus musculus]
  misc_feature (1)..(161): Homolog of NCBI NO: 30683042 NR Description: expressed protein [Arabidopsis thaliana]
  misc_feature (1)..(122): Homolog of NCBI NO: 34877084 NR Description: similar to RIKEN cDNA 2310038H17 [Rattus
  misc_feature (1)..(26): Homolog of NCBI NO: 30683273 NR Description: expressed protein [Arabidopsis thaliana]
  misc_feature (1)..(26): Homolog of NCBI NO: 7460191 NR Description: hypothetical protein At2g26810 [imported] -
  misc_feature (53)..(182): Homolog of NCBI NO: 30683273 NR Description: expressed protein [Arabidopsis thaliana]
  misc_feature (1)..(182): Homolog of NCBI NO: 26449997 NR Description: unknown protein [Arabidopsis thaliana]
  misc_feature (1)..(182): Homolog of NCBI NO: 33146643 NR Description: unknown protein [Oryza sativa (japonica
MLLNEYLSKNVNLLQGCTAIELGSGVGITGILCSRFCHKVVMTDHNEEVIKILKKNIELHSCPENITSISHGLVAEKLEWGNTDQINEILQKHPGGFDFILGADICFQQSSIPMLFDSVKQLLQAREDRKCKFILAYISRAKTMDSMILIEASKLQMQMKEVPGTRCTVKNLEGVIFVVTLE

SEQ ID NO: 54459 - protein, 141 aa, Glycine max
  peptide (1)..(141): Ceres Seq. ID no. 15178719
  misc_feature (1)..(120): Homolog of NCBI NO: 25407826 NR Description: hypothetical protein At2g26200 [imported] -
  misc_feature (1)..(120): Homolog of NCBI NO: 20197178 NR Description: hypothetical protein [Arabidopsis thaliana]
  misc_feature (12)..(101): Homolog of NCBI NO: 7460191 NR Description: hypothetical protein At2g26810 [imported] -
  misc_feature (1)..(81): Homolog of NCBI NO: 20071260 NR Description: RIKEN cDNA 2310038H17 [Mus musculus]
  misc_feature (1)..(81): Homolog of NCBI NO: 13385458 NR Description: RIKEN cDNA 2310038H17 [Mus musculus]
  misc_feature (1)..(120): Homolog of NCBI NO: 30683042 NR Description: expressed protein [Arabidopsis thaliana]
  misc_feature (1)..(81): Homolog of NCBI NO: 34877084 NR Description: similar to RIKEN cDNA 2310038H17 [Rattus
  misc_feature (12)..(141): Homolog of NCBI NO: 30683273 NR Description: expressed protein [Arabidopsis thaliana]
  misc_feature (1)..(141): Homolog of NCBI NO: 26449997 NR Description: unknown protein [Arabidopsis thaliana]
  misc_feature (1)..(141): Homolog of NCBI NO: 33146643 NR Description: unknown protein [Oryza sativa (japonica
MTDHNEEVIKILKKNIELHSCPENITSISHGLVAEKLEWGNTDQINEILQKHPGGFDFILGADICFQQSSIPMLFDSVKQLLQAREDRKCKFILAYISRAKTMDSMILIEASKLQMQMKEVPGTRCTVKNLEGVIFVVTLE

SEQ ID NO: 54460 - DNA, 1175 bp, Glycine max
  misc_feature (1)..(1175): Ceres Seq. ID no. 15174606
attttttatctacttattttttgcatgagttgcgccaaaagtacttagataattagattgatggctaatgtttatttattttgttaggtataactttaacaaggattgcttagttgttcaatggtcaggagacaatccgaatagtgtggcaggtttgaccctaaatattccaggagatctcgccatcagccttggcactagtgatactgtatttatgatcactaaagatcctaatccaggattagagggacatgtcttccccaatccagttgatgcagaaggttacatggtaatgctggtatacaaaaatggatcccttacccgagaagatgtgcgcaactgttatgcaaacaaatcttgggatgttttcaataaatttttgcagcaaacacagcctttaaatggtggaaagttaggtttctactacaaggagcatgaaattctacctcctcttccagttggtttccaccgctatatcatagaaaatttctcagacacaccagatggactgaaggaacaggaaatggaggagtttgatcctccatctgaggtccgggcattaattgagggtcaatttctctcaatgcgggctcatgctgaaagatttggaatgccttctcccccaaagagaattatagctactggtggagcatcagcgaatcattgcatccttagtgcaatagcttcaatttttggctgtgatgtctatacagttcaaagacctgattcagcttcacttggagctgcattgagagctgctcatggctggctctgcaacaagaagggcgggtttttaccgatatctgatatgtacgtggacaaattggagaaaacgtccctgagctgcaaactttcagtgagtgctggagatcatgaattggtttccaagtatgccaccctcatgaaaaagagaattgaaatagagaatcggctcgttcaaaagcttggacgcttttgaaacatctaacctgctgtttctctctgaattcttacattgagttggctgtgaaatgtgaataaaataaagtgaatcagagaagattaagcattactttcaagtttgagttagaaatttttttttactaatattgctgccagaagggacggatcaatgacacatgccctcctaaaatccaatctttttttaagactaaaatatgtgtttttattccagc

SEQ ID NO: 54461 - protein, 296 aa, Glycine max
  peptide (1)..(296): Ceres Seq. ID no. 15174607
  misc_feature (34)..(235): Pfam Name: FGGY family of carbohydrate kinases, C-terminal domain Pfam Description: FGGY family of carbohydrate kinases, C-terminal
  misc_feature (4)..(232): Homolog of NCBI NO: 31203931 NR Description: ENSANGP00000012758 [Anopheles gambiae]
  misc_feature (4)..(208): Homolog of NCBI NO: 31544965 NR Description: XYLB protein [Homo sapiens]
  misc_feature (7)..(233): Homolog of NCBI NO: 3298502 NR Description: xylulokinase [Homo sapiens]
  misc_feature (4)..(288): Homolog of NCBI NO: 19343554 NR Description: Similar to xylulokinase homolog (H. influenzae)
  misc_feature (4)..(233): Homolog of NCBI NO: 31418939 NR Description: Xylulokinase homolog [Danio rerio]
  misc_feature (4)..(283): Homolog of NCBI NO: 34866669 NR Description: similar to xylulokinase homolog
  misc_feature (4)..(288): Homolog of NCBI NO: 18860918 NR Description: xylulokinase homolog; xylulokinase (H.
  misc_feature (4)..(296): Homolog of NCBI NO: 8809688 NR Description: xylulose kinase [Arabidopsis thaliana]
  misc_feature (4)..(295): Homolog of NCBI NO: 23237892 NR Description: putative xylulose kinase [Oryza sativa (japonica
  misc_feature (4)..(296): Homolog of NCBI NO: 15240526 NR Description: xylulose kinase [Arabidopsis thaliana]
MFIYFVRYNFNKDCLVVQWSGDNPNSVAGLTLNIPGDLAISLGTSDTVFMITKDPNPGLEGHVFPNPVDAEGYMVMLVYKNGSLTREDVRNCYANKSWDVFNKFLQQTQPLNGGKLGFYYKEHEILPPLPVGFHRYIIENFSDTPDGLKEQEMEEFDPPSEVRALIEGQFLSMRAHAERFGMPSPPKRIIATGGASANHCILSAIASIFGCDVYTVQRPDSASLGAALRAAHGWLCNKKGGFLPISDMYVDKLEKTSLSCKLSVSAGDHELVSKYATLMKKRIEIENRLVQKLGRF

SEQ ID NO: 54462 - protein, 247 aa, Glycine max
  peptide (1)..(247): Ceres Seq. ID no. 15174608
  misc_feature (1)..(186): Pfam Name: FGGY family of carbohydrate kinases, C-terminal domain Pfam Description: FGGY family of carbohydrate kinases, C-terminal
  misc_feature (1)..(183): Homolog of NCBI NO: 31203931 NR Description: ENSANGP00000012758 [Anopheles gambiae]
  misc_feature (1)..(159): Homolog of NCBI NO: 31544965 NR Description: XYLB protein [Homo sapiens]
  misc_feature (1)..(184): Homolog of NCBI NO: 3298502 NR Description: xylulokinase [Homo sapiens]
  misc_feature (1)..(239): Homolog of NCBI NO: 19343554 NR Description: Similar to xylulokinase homolog (H. influenzae)
  misc_feature (1)..(184): Homolog of NCBI NO: 31418939 NR Description: Xylulokinase homolog [Danio rerio]
  misc_feature (1)..(234): Homolog of NCBI NO: 34866669 NR Description: similar to xylulokinase homolog
  misc_feature (1)..(239): Homolog of NCBI NO: 18860918 NR Description: xylulokinase homolog; xylulokinase (H.
  misc_feature (1)..(247): Homolog of NCBI NO: 8809688 NR Description: xylulose kinase [Arabidopsis thaliana]
  misc_feature (1)..(246): Homolog of NCBI NO: 23237892 NR Description: putative xylulose kinase [Oryza sativa (japonica
  misc_feature (1)..(247): Homolog of NCBI NO: 15240526 NR Description: xylulose kinase [Arabidopsis thaliana]
MITKDPNPGLEGHVFPNPVDAEGYMVMLVYKNGSLTREDVRNCYANKSWDVFNKFLQQTQPLNGGKLGFYYKEHEILPPLPVGFHRYIIENFSDTPDGLKEQEMEEFDPPSEVRALIEGQFLSMRAHAERFGMPSPPKRIIATGGASANHCILSAIASIFGCDVYTVQRPDSASLGAALRAAHGWLCNKKGGFLPISDMYVDKLEKTSLSCKLSVSAGDHELVSKYATLMKKRIEIENRLVQKLGRF

SEQ ID NO: 54463 - protein, 223 aa, Glycine max
  peptide (1)..(223): Ceres Seq. ID no. 15174609
  misc_feature (1)..(162): Pfam Name: FGGY family of carbohydrate kinases, C-terminal domain Pfam Description: FGGY family of carbohydrate kinases, C-terminal
  misc_feature (1)..(159): Homolog of NCBI NO: 31203931 NR Description: ENSANGP00000012758 [Anopheles gambiae]
  misc_feature (1)..(135): Homolog of NCBI NO: 31544965 NR Description: XYLB protein [Homo sapiens]
  misc_feature (1)..(160): Homolog of NCBI NO: 3298502 NR Description: xylulokinase [Homo sapiens]
  misc_feature (1)..(215): Homolog of NCBI NO: 19343554 NR Description: Similar to xylulokinase homolog (H. influenzae)
  misc_feature (1)..(160): Homolog of NCBI NO: 31418939 NR Description: Xylulokinase homolog [Danio rerio]
  misc_feature (1)..(210): Homolog of NCBI NO: 34866669 NR Description: similar to xylulokinase homolog
  misc_feature (1)..(215): Homolog of NCBI NO: 18860918 NR Description: xylulokinase homolog; xylulokinase (H.
  misc_feature (1)..(223): Homolog of NCBI NO: 8809688 NR Description: xylulose kinase [Arabidopsis thaliana]
  misc_feature (1)..(222): Homolog of NCBI NO: 23237892 NR Description: putative xylulose kinase [Oryza sativa (japonica
  misc_feature (1)..(223): Homolog of NCBI NO: 15240526 NR Description: xylulose kinase [Arabidopsis thaliana]
MVMLVYKNGSLTREDVRNCYANKSWDVFNKFLQQTQPLNGGKLGFYYKEHEILPPLPVGFHRYIIENFSDTPDGLKEQEMEEFDPPSEVRALIEGQFLSMRAHAERFGMPSPPKRIIATGGASANHCILSAIASIFGCDVYTVQRPDSASLGAALRAAHGWLCNKKGGFLPISDMYVDKLEKTSLSCKLSVSAGDHELVSKYATLMKKRIEIENRLVQKLGRF

SEQ ID NO: 54464 - DNA, 1839 bp, Glycine max
  misc_feature (1)..(1839): Ceres Seq. ID no. 14311028
gaaaacaatctgaagcagatggttataatttcaaaagctcaagagtggagttattcatgttaaagtgaattgctgaaggcttgaagcttaattcttaacaaattcactatcagtgaccacaccagaattgaaaatattaaggaatggacggagcttcatcagtgattccagaatattcggagataggcagcacaagtagttcagagagtcaagctcaggctcagtatttggagacacaattaaccaacatgcttcgaaaagtggatccagaaattacagaactcaatgagaaatgcatttatagagtaccagaaaaatttcgccgtgttaatccaaaagcctatactcctcgggttgtttcaattggcccgtttcacaatccacggtactctaacggaggtgacaatttgaaactaatggaagaacgaaagctgaaatatcttgagaaatttctaaatagaaacaagcacttgagcatgaagggtttatttctcagacttattgagaaggaaaagcagataagaggttattatgcagagcctgtcagttatagcagcgacgatttcttaacgatgattctagttgatgcttgttttataattgagcattttcttagatactatacaggcttaactttaacagaaagagacaccttatcagaaccatgcttgttaagtgatatttatcatgatatgattctgcttgaaaatcaacttccttttttcgttcttgaagacatattcaactctgctcacccgggtatgattgttgaatttccctacaaggatgttaaaggcataaacgacgactacgctggccctattacagatgttgagtctctctcctttattgctattactttccactattttcgaaaatacaaccactatatcatagaacctgcccatattgatcgtccatatcatttcattgatcttctaagaatcttttggcttccaattccaattcctcctgaaagtctaaaatcaggttttatggataaacttataccaagtgcaagccaactatcagaggtaggtctgatattcaaagctagtttaactccaggcttgtttgacataaaatatgatcatcatatgggtgttatggaaattccatgcatacttataaatcacaagacggagacggagttgagaaatatactggcattagagcaatgtcgctacatactttcacccaacatgactcagtacttgttcatcctagattgtcttgtcaacaccgacaaagacgcaagcatactaattgataacaaaatttttatcaattggttgggtgatgccaatgctgtggctaaaatgtttaacagtctttgttcaaatgttggtctgccatttatcagtgaagagtgtttttctctctgtgataacttggttaaattctatgaaaatcctcgcaacaagtacaaggctatcttttatcatgagtacttcaacactccatggaaaaaagcatctacatctgctgcagttctactccttttgctcactctgattcagactatatgttccgtcatctcgtttttttgaaggtaatggtaatgattcagttgatcaccctcaagctactatcatctgaagaagatcatggaaatcattctagttgtattgtttttataaaacttttaactattatgtgtttgatgtccaactttggaacataaaatttgtatgactttttttaaatgttttttttaataatttcttaacaaggttgcaccgctagcaataattaggacaaatggtgacagttggaacacatcatcaatttcattaaattaatccataaaggacaatgtcgattactaatagtctaaag

SEQ ID NO: 54465 - protein, 468 aa, Glycine max
  peptide (1)..(468): Ceres Seq. ID no. 14311029
  misc_feature (51)..(200): Pfam Name: Plant protein of unknown function Pfam Description: Plant protein of unknown function
  misc_feature (45)..(468): Homolog of NCBI NO: 15229681 NR Description: hypothetical protein [Arabidopsis thaliana]
  misc_feature (51)..(465): Homolog of NCBI NO: 15226899 NR Description: hypothetical protein [Arabidopsis thaliana]
  misc_feature (41)..(197): Homolog of NCBI NO: 15229687 NR Description: hypothetical protein [Arabidopsis thaliana]
  misc_feature (287)..(468): Homolog of NCBI NO: 15229687 NR Description: hypothetical protein [Arabidopsis thaliana]
  misc_feature (51)..(465): Homolog of NCBI NO: 18406666 NR Description: expressed protein [Arabidopsis thaliana]
  misc_feature (51)..(465): Homolog of NCBI NO: 7486946 NR Description: hypothetical protein At2g44930 [imported] -
  misc_feature (51)..(212): Homolog of NCBI NO: 15239004 NR Description: hypothetical protein [Arabidopsis thaliana]
  misc_feature (261)..(466): Homolog of NCBI NO: 15239004 NR Description: hypothetical protein [Arabidopsis thaliana]
  misc_feature (44)..(200): Homolog of NCBI NO: 15236618 NR Description: expressed protein [Arabidopsis thaliana]
  misc_feature (234)..(466): Homolog of NCBI NO: 15236618 NR Description: expressed protein [Arabidopsis thaliana]
MDGASSVIPEYSEIGSTSSSESQAQAQYLETQLTNMLRKVDPEITELNEKCIYRVPEKFRRVNPKAYTPRVVSIGPFHNPRYSNGGDNLKLMEERKLKYLEKFLNRNKHLSMKGLFLRLIEKEKQIRGYYAEPVSYSSDDFLTMILVDACFIIEHFLRYYTGLTLTERDTLSEPCLLSDIYHDMILLENQLPFFVLEDIFNSAHPGMIVEFPYKDVKGINDDYAGPITDVESLSFIAITFHYFRKYNHYIIEPAHIDRPYHFIDLLRIFWLPIPIPPESLKSGFMDKLIPSASQLSEVGLIFKASLTPGLFDIKYDHHMGVMEIPCILINHKTETELRNILALEQCRYILSPNMTQYLFILDCLVNTDKDASILIDNKIFINWLGDANAVAKMFNSLCSNVGLPFISEECFSLCDNLVKFYENPRNKYKAIFYHEYFNTPWKKASTSAAVLLLLLTLIQTICSVISFF

SEQ ID NO: 54466 - protein, 433 aa, Glycine max
  peptide (1)..(433): Ceres Seq. ID no. 14311030
  misc_feature (16)..(165): Pfam Name: Plant protein of unknown function Pfam Description: Plant protein of unknown function
  misc_feature (10)..(433): Homolog of NCBI NO: 15229681 NR Description: hypothetical protein [Arabidopsis thaliana]
  misc_feature (16)..(430): Homolog of NCBI NO: 15226899 NR Description: hypothetical protein [Arabidopsis thaliana]
  misc_feature (6)..(162): Homolog of NCBI NO: 15229687 NR Description: hypothetical protein [Arabidopsis thaliana]
  misc_feature (252)..(433): Homolog of NCBI NO: 15229687 NR Description: hypothetical protein [Arabidopsis thaliana]
  misc_feature (16)..(430): Homolog of NCBI NO: 18406666 NR Description: expressed protein [Arabidopsis thaliana]
  misc_feature (16)..(430): Homolog of NCBI NO: 7486946 NR Description: hypothetical protein At2g44930 [imported] -
  misc_feature (16)..(177): Homolog of NCBI NO: 15239004 NR Description: hypothetical protein [Arabidopsis thaliana]
  misc_feature (226)..(431): Homolog of NCBI NO: 15239004 NR Description: hypothetical protein [Arabidopsis thaliana]
  misc_feature (9)..(165): Homolog of NCBI NO: 15236618 NR Description: expressed protein [Arabidopsis thaliana]
  misc_feature (199)..(431): Homolog of NCBI NO: 15236618 NR Description: expressed protein [Arabidopsis thaliana]
MLRKVDPEITELNEKCIYRVPEKFRRVNPKAYTPRVVSIGPFHNPRYSNGGDNLKLMEERKLKYLEKFLNRNKHLSMKGLFLRLIEKEKQIRGYYAEPVSYSSDDFLTMILVDACFIIEHFLRYYTGLTLTERDTLSEPCLLSDIYHDMILLENQLPFFVLEDIFNSAHPGMIVEFPYKDVKGINDDYAGPITDVESLSFIAITFHYFRKYNHYIIEPAHIDRPYHFIDLLRIFWLPIPIPPESLKSGFMDKLIPSASQLSEVGLIFKASLTPGLFDIKYDHHMGVMEIPCILINHKTETELRNILALEQCRYILSPNMTQYLFILDCLVNTDKDASILIDNKIFINWLGDANAVAKMFNSLCSNVGLPFISEECFSLCDNLVKFYENPRNKYKAIFYHEYFNTPWKKASTSAAVLLLLLTLIQTICSVISFF

SEQ ID NO: 54467 - protein, 377 aa, Glycine max
  peptide (1)..(377): Ceres Seq. ID no. 14311031
  misc_feature (1)..(109): Pfam Name: Plant protein of unknown function Pfam Description: Plant protein of unknown function
  misc_feature (1)..(377): Homolog of NCBI NO: 15229681 NR Description: hypothetical protein [Arabidopsis thaliana]
  misc_feature (1)..(374): Homolog of NCBI NO: 15226899 NR Description: hypothetical protein [Arabidopsis thaliana]
  misc_feature (1)..(106): Homolog of NCBI NO: 15229687 NR Description: hypothetical protein [Arabidopsis thaliana]
  misc_feature (196)..(377): Homolog of NCBI NO: 15229687 NR Description: hypothetical protein [Arabidopsis thaliana]
  misc_feature (1)..(374): Homolog of NCBI NO: 18406666 NR Description: expressed protein [Arabidopsis thaliana]
  misc_feature (1)..(374): Homolog of NCBI NO: 7486946 NR Description: hypothetical protein At2g44930 [imported] -
  misc_feature (1)..(121): Homolog of NCBI NO: 15239004 NR Description: hypothetical protein [Arabidopsis thaliana]
  misc_feature (170)..(375): Homolog of NCBI NO: 15239004 NR Description: hypothetical protein [Arabidopsis thaliana]
  misc_feature (1)..(109): Homolog of NCBI NO: 15236618 NR Description: expressed protein [Arabidopsis thaliana]
  misc_feature (143)..(375): Homolog of NCBI NO: 15236618 NR Description: expressed protein [Arabidopsis thaliana]
MEERKLKYLEKFLNRNKHLSMKGLFLRLIEKEKQIRGYYAEPVSYSSDDFLTMILVDACFIIEHFLRYYTGLTLTERDTLSEPCLLSDIYHDMILLENQLPFFVLEDIFNSAHPGMIVEFPYKDVKGINDDYAGPITDVESLSFIAITFHYFRKYNHYIIEPAHIDRPYHFIDLLRIFWLPIPIPPESLKSGFMDKLIPSASQLSEVGLIFKASLTPGLFDIKYDHHMGVMEIPCILINHKTETELRNILALEQCRYILSPNMTQYLFILDCLVNTDKDASILIDNKIFINWLGDANAVAKMFNSLCSNVGLPFISEECFSLCDNLVKFYENPRNKYKAIFYHEYFNTPWKKASTSAAVLLLLLTLIQTICSVISFF

SEQ ID NO: 54468 - DNA, 1784 bp, Glycine max
  misc_feature (1)..(1784): Ceres Seq. ID no. 15176411
gatactgtgaaaaacacatacacacaataatagctctctctgattaagttgtcactcacgcacagaaacacagaaagaagatgatggcgaacaaattgcaaggggcaattgttagctgccattccagaacaaggcagttgtcgatagatgagaaagggcgcgccatctccgctgtgctcactactcatcaggaaccctttaagactaaggttcctgagttgacaattagccatgtgcccccacctacaccctccatcaagaacaaagacttcatcatcccctccaccactagtggaaagtttggtaggtttggtggcaagtttgtacctgagacacttgtagcttctttgacccagctcgaagcagagttcaaaaacgccctccgtgatcatgcttttcaggcagagctagcggaggcattaagagactatgcggggagagagacacctctgtatcatgcaaagcgattgccggagtattacaagagcgtgaataatgggaaggggcctgacatatacttaaagagagaggatctcaaccacagtggctctcacaagatgaacaacgctcttgctcaagccatgattgctaagcgcatgggctgcaaaagcgtcgtcaccgccactggctctggacaacatggccttgcaacagctgcagcttgcgcaaaacttgctttggactgcaccgtcttcatggccgacaaagacatccacagacaatattcaaatgtgaggttgatcaagttgttgggagctcaggttgaagcagtagatggagggttcacagatgcagcatcagaggcgtttcggtattgggtaggggatttggaaaacaggtaccacttgagtggctcagcggtgggaccacacccgtgtccaaccatggttcgggagtttcagtcagtgatagggaaagaaacgaggatgcaagcattggaaaaatggggtgggaagccagatgttcttgttgccagcgtagggactgggtcaaacgctttgggtctgtttcatgagtttatagcagacaaagatgtgaggttcgttggagttgaggctgggggtttgggcttggagagtggaaagcattcttcaacgttgaccacaggagaagtgggtgcgtaccatggagccatcagctatttactgcaggaccaagatggtcaaattattcatccacattccatcgctgctgggatggagtatccaggagttggtccagagttaagcttccttaaagaaagcgggcgtgcggaattctgcgttgcaaatgatgaagaggctcttgatgcgtaccaaagactatgcaaattagagggcatatttccctctttggaggccgcacatgcattggctatcttagataaattggtccctactctatgcaatggtactaaggttgttgtgaattgtagtgggcgaggagataaggatgcagcaatagtcttcaatcggggaatatatatttgacaaggaataacaaagatggatgaagacctgtgttaaataacgatttgacctagcttacgatgaatactataaatgctatatataaataaaaactacacgattcatacgttgttaaaggctaggaagtggcctcggtaaataattattttcaccgtcattaactatcatcagatatttattcatgttactgtgaaaaagggattaaaggaaagtattaaactctttagagagatttgtgtaagaagatattcagtgacaaatctttatcttgtaaaaagaaagaaatgataatgaaaatattcaattaaaaaaaat

SEQ ID NO: 54469 - protein, 462 aa, Glycine max
  peptide (1)..(462): Ceres Seq. ID no. 15176412
  misc_feature (115)..(447): Pfam Name: Pyridoxal-phosphate dependent enzyme Pfam Description: Pyridoxal-phosphate dependent enzyme
  misc_feature (63)..(451): Homolog of NCBI NO: 7437011 NR Description: tryptophan synthase (EC 4.2.1.20) beta chain -
  misc_feature (75)..(451): Homolog of NCBI NO: 1174778 NR Description: Tryptophan synthase beta chain 1 (Orange pericarp
  misc_feature (72)..(451): Homolog of NCBI NO: 81661 NR Description: tryptophan synthase (EC 4.2.1.20) beta-2 chain
  misc_feature (72)..(451): Homolog of NCBI NO: 1174780 NR Description: Tryptophan synthase beta chain 2, chloroplast
  misc_feature (72)..(451): Homolog of NCBI NO: 18481702 NR Description: tryptophan synthase beta-subunit [Sorghum bicolor]
  misc_feature (72)..(451): Homolog of NCBI NO: 15236977 NR Description: tryptophan synthase, beta subunit 2 (TSB2)
  misc_feature (72)..(455): Homolog of NCBI NO: 15239755 NR Description: tryptophan synthase, beta subunit 1 (TSB1)
  misc_feature (72)..(451): Homolog of NCBI NO: 38636821 NR Description: putative tryptophan synthase beta-subunit
  misc_feature (43)..(451): Homolog of NCBI NO: 3915165 NR Description: Tryptophan synthase beta chain 2, chloroplast
  misc_feature (57)..(460): Homolog of NCBI NO: 26452400 NR Description: unknown protein [Arabidopsis thaliana]
MMANKLQGAIVSCHSRTRQLSIDEKGRAISAVLTTHQEPFKTKVPELTISHVPPPTPSIKNKDFIIPSTTSGKFGRFGGKFVPETLVASLTQLEAEFKNALRDHAFQAELAEALRDYAGRETPLYHAKRLPEYYKSVNNGKGPDIYLKREDLNHSGSHKMNNALAQAMIAKRMGCKSVVTATGSGQHGLATAAACAKLALDCTVFMADKDIHRQYSNVRLIKLLGAQVEAVDGGFTDAASEAFRYWVGDLENRYHLSGSAVGPHPCPTMVREFQSVIGKETRMQALEKWGGKPDVLVASVGTGSNALGLFHEFIADKDVRFVGVEAGGLGLESGKHSSTLTTGEVGAYHGAISYLLQDQDGQIIHPHSIAAGMEYPGVGPELSFLKESGRAEFCVANDEEALDAYQRLCKLEGIFPSLEAAHALAILDKLVPTLCNGTKVVVNCSGRGDKDAAIVFNRGIYI

SEQ ID NO: 54470 - protein, 461 aa, Glycine max
  peptide (1)..(461): Ceres Seq. ID no. 15176413
  misc_feature (114)..(446): Pfam Name: Pyridoxal-phosphate dependent enzyme Pfam Description: Pyridoxal-phosphate dependent enzyme
  misc_feature (62)..(450): Homolog of NCBI NO: 7437011 NR Description: tryptophan synthase (EC 4.2.1.20) beta chain -
  misc_feature (74)..(450): Homolog of NCBI NO: 1174778 NR Description: Tryptophan synthase beta chain 1 (Orange pericarp
  misc_feature (71)..(450): Homolog of NCBI NO: 81661 NR Description: tryptophan synthase (EC 4.2.1.20) beta-2 chain
  misc_feature (71)..(450): Homolog of NCBI NO: 1174780 NR Description: Tryptophan synthase beta chain 2, chloroplast
  misc_feature (71)..(450): Homolog of NCBI NO: 18481702 NR Description: tryptophan synthase beta-subunit [Sorghum bicolor]
  misc_feature (71)..(450): Homolog of NCBI NO: 15236977 NR Description: tryptophan synthase, beta subunit 2 (TSB2)
  misc_feature (71)..(454): Homolog of NCBI NO: 15239755 NR Description: tryptophan synthase, beta subunit 1 (TSB1)
  misc_feature (71)..(450): Homolog of NCBI NO: 38636821 NR Description: putative tryptophan synthase beta-subunit
  misc_feature (42)..(450): Homolog of NCBI NO: 3915165 NR Description: Tryptophan synthase beta chain 2, chloroplast
  misc_feature (56)..(459): Homolog of NCBI NO: 26452400 NR Description: unknown protein [Arabidopsis thaliana]
MANKLQGAIVSCHSRTRQLSIDEKGRAISAVLTTHQEPFKTKVPELTISHVPPPTPSIKNKDFIIPSTTSGKFGRFGGKFVPETLVASLTQLEAEFKNALRDHAFQAELAEALRDYAGRETPLYHAKRLPEYYKSVNNGKGPDIYLKREDLNHSGSHKMNNALAQAMIAKRMGCKSVVTATGSGQHGLATAAACAKLALDCTVFMADKDIHRQYSNVRLIKLLGAQVEAVDGGFTDAASEAFRYWVGDLENRYHLSGSAVGPHPCPTMVREFQSVIGKETRMQALEKWGGKPDVLVASVGTGSNALGLFHEFIADKDVRFVGVEAGGLGLESGKHSSTLTTGEVGAYHGAISYLLQDQDGQIIHPHSIAAGMEYPGVGPELSFLKESGRAEFCVANDEEALDAYQRLCKLEGIFPSLEAAHALAILDKLVPTLCNGTKVVVNCSGRGDKDAAIVFNRGIYI

SEQ ID NO: 54471 - protein, 303 aa, Glycine max
  peptide (1)..(303): Ceres Seq. ID no. 15176414
  misc_feature (1)..(288): Pfam Name: Pyridoxal-phosphate dependent enzyme Pfam Description: Pyridoxal-phosphate dependent enzyme
  misc_feature (1)..(292): Homolog of NCBI NO: 7437011 NR Description: tryptophan synthase (EC 4.2.1.20) beta chain -
  misc_feature (1)..(292): Homolog of NCBI NO: 1174778 NR Description: Tryptophan synthase beta chain 1 (Orange pericarp
  misc_feature (1)..(292): Homolog of NCBI NO: 81661 NR Description: tryptophan synthase (EC 4.2.1.20) beta-2 chain
  misc_feature (1)..(292): Homolog of NCBI NO: 1174780 NR Description: Tryptophan synthase beta chain 2, chloroplast
  misc_feature (1)..(292): Homolog of NCBI NO: 18481702 NR Description: tryptophan synthase beta-subunit [Sorghum bicolor]
  misc_feature (1)..(292): Homolog of NCBI NO: 15236977 NR Description: tryptophan synthase, beta subunit 2 (TSB2)
  misc_feature (1)..(296): Homolog of NCBI NO: 15239755 NR Description: tryptophan synthase, beta subunit 1 (TSB1)
  misc_feature (1)..(292): Homolog of NCBI NO: 38636821 NR Description: putative tryptophan synthase beta-subunit
  misc_feature (1)..(292): Homolog of NCBI NO: 3915165 NR Description: Tryptophan synthase beta chain 2, chloroplast
  misc_feature (1)..(301): Homolog of NCBI NO: 26452400 NR Description: unknown protein [Arabidopsis thaliana]
MNNALAQAMIAKRMGCKSVVTATGSGQHGLATAAACAKLALDCTVFMADKDIHRQYSNVRLIKLLGAQVEAVDGGFTDAASEAFRYWVGDLENRYHLSGSAVGPHPCPTMVREFQSVIGKETRMQALEKWGGKPDVLVASVGTGSNALGLFHEFIADKDVRFVGVEAGGLGLESGKHSSTLTTGEVGAYHGAISYLLQDQDGQIIHPHSIAAGMEYPGVGPELSFLKESGRAEFCVANDEEALDAYQRLCKLEGIFPSLEAAHALAILDKLVPTLCNGTKVVVNCSGRGDKDAAIVFNRGIYI

SEQ ID NO: 54472 - DNA, 1481 bp, Glycine max
  misc_feature (1)..(1481): Ceres Seq. ID no. 14316239
aaataaaaacgtgataaaaaagtgattctgctcacagtcgtttcggggtagcattcttgcgcactcagttattctctctctctctctagagcgtcgtcgtttagttagggcagaaaaccccttttcggatcggtggagcgaagcctcgccggcgagacccccgaggctgttcaatcggcgatcgagcaacggcgaaaagcgacgaagatgaaggttttcgtgaagactctcaagggcacgcacttcgaaattgaagtgaacccttcggacacgctttctgaagtgaagaaaaatatagaaactgttcagggtgcagatgtctatcctgctgcacagcaaatgcttattcatcaaggaaaagttctaaaagatggtactactttggaggaaaataaagtagctgaaagtagttttattgtaattatgctatcaaagccaagtgcaactcctacttcaacttctgtgtctactgcacctcaagctcctgcttcaactggagcatcggctacacctgttactgccccaacagctgctcctgcacctgcacctgcaccagctgctccagctccagctcctgctcctatattttcaggctcttctgtgccagagtctgatatatatgggcaggcagcatccaatcttgttgctggaagtaacttggagggaacaattcagcaaatccttgacatgggtggaggaagctgggacagggatactgttgttcgcacccttcgtgctgcttataacaaccccgagagagctgttgaatatttgtattctggcataccagagcaagccgaagctccaccagttaccggagtgcctgcaagtgctcaaccttcaaatcctccagctgatactccacaggcagcacaaccagcatctgttccttctagtggacctaatgctaatcctttagacctctttccccagggccttcctaatgttgggtctggtgctgctggtgctggttccttagactttcttcgcaacagtcaacagttccaagccttacgcgctatggtacaggctaatccacaaatattgcagcctatgctacaagagcttggcaaacaaaatcctcatcttatgcgattgattcaagagcatcaagttgacttccttcgcctaattaatgaacctgttgaagggggtgagggaaatatactgggacagctggctggtgccatgccgcaagcagtgactgtcacccctgaggagcggcaagcaattgagcgtctcgaagcaatgggttttgatcgtgcaactgtattggaggtgtactttgcttgtaacaaaaatgaggagctggctgccaactaccttttagatcacatgcatgagtttgatgaataattagatctcctttacaatttgtcaaaatatttgttttatgtttccttttgaatggtctttgttatgtaatgaaggtaatatttgataatgacaagtctcgaatggacaaggaatattttaatcag

SEQ ID NO: 54473 - protein, 382 aa, Glycine max
  peptide (1)..(382): Ceres Seq. ID no. 14316240
  misc_feature (1)..(76): Pfam Name: Ubiquitin family Pfam Description: Ubiquitin family
  misc_feature (1)..(382): Homolog of NCBI NO: 22330746 NR Description: DNA repair protein RAD23 -related [Arabidopsis
  misc_feature (1)..(382): Homolog of NCBI NO: 30409718 NR Description: RAD23-like protein [Arabidopsis thaliana]
  misc_feature (1)..(382): Homolog of NCBI NO: 30699439 NR Description: DNA repair protein RAD23 -related [Arabidopsis
  misc_feature (103)..(382): Homolog of NCBI NO: 30409726 NR Description: RAD23-like protein [Arabidopsis thaliana]
  misc_feature (75)..(382): Homolog of NCBI NO: 15232924 NR Description: RAD23 -related [Arabidopsis thaliana]
  misc_feature (1)..(382): Homolog of NCBI NO: 7446462 NR Description: RAD23 protein homolog - rice
  misc_feature (1)..(382): Homolog of NCBI NO: 14335004 NR Description: unknown protein [Arabidopsis thaliana]
  misc_feature (1)..(382): Homolog of NCBI NO: 15240922 NR Description: DNA repair protein RAD23, putative [Arabidopsis
  misc_feature (1)..(381): Homolog of NCBI NO: 7446459 NR Description: RAD23 protein, isoform I - carrot
  misc_feature (1)..(382): Homolog of NCBI NO: 5640111 NR Description: RAD23 protein [Lycopersicon esculentum]
MKVFVKTLKGTHFEIEVNPSDTLSEVKKNIETVQGADVYPAAQQMLIHQGKVLKDGTTLEENKVAESSFIVIMLSKPSATPTSTSVSTAPQAPASTGASATPVTAPTAAPAPAPAPAAPAPAPAPIFSGSSVPESDIYGQAASNLVAGSNLEGTIQQILDMGGGSWDRDTVVRTLRAAYNNPERAVEYLYSGIPEQAEAPPVTGVPASAQPSNPPADTPQAAQPASVPSSGPNANPLDLFPQGLPNVGSGAAGAGSLDFLRNSQQFQALRAMVQANPQILQPMLQELGKQNPHLMRLIQEHQVDFLRLINEPVEGGEGNILGQLAGAMPQAVTVTPEERQAIERLEAMGFDRATVLEVYFACNKNEELAANYLLDHMHEFDE

SEQ ID NO: 54474 - protein, 338 aa, Glycine max
  peptide (1)..(338): Ceres Seq. ID no. 14316241
  misc_feature (106)..(148): Pfam Name: UBA/TS-N domain Pfam Description: UBA/TS-N domain
  misc_feature (1)..(338): Homolog of NCBI NO: 22330746 NR Description: DNA repair protein RAD23 -related [Arabidopsis
  misc_feature (1)..(338): Homolog of NCBI NO: 30409718 NR Description: RAD23-like protein [Arabidopsis thaliana]
  misc_feature (1)..(338): Homolog of NCBI NO: 30699439 NR Description: DNA repair protein RAD23 -related [Arabidopsis
  misc_feature (59)..(338): Homolog of NCBI NO: 30409726 NR Description: RAD23-like protein [Arabidopsis thaliana]
  misc_feature (31)..(338): Homolog of NCBI NO: 15232924 NR Description: RAD23 -related [Arabidopsis thaliana]
  misc_feature (1)..(338): Homolog of NCBI NO: 7446462 NR Description: RAD23 protein homolog - rice
  misc_feature (1)..(338): Homolog of NCBI NO: 14335004 NR Description: unknown protein [Arabidopsis thaliana]
  misc_feature (1)..(338): Homolog of NCBI NO: 15240922 NR Description: DNA repair protein RAD23, putative [Arabidopsis
  misc_feature (1)..(337): Homolog of NCBI NO: 7446459 NR Description: RAD23 protein, isoform I - carrot
  misc_feature (1)..(338): Homolog of NCBI NO: 5640111 NR Description: RAD23 protein [Lycopersicon esculentum]
MLIHQGKVLKDGTTLEENKVAESSFIVIMLSKPSATPTSTSVSTAPQAPASTGASATPVTAPTAAPAPAPAPAAPAPAPAPIFSGSSVPESDIYGQAASNLVAGSNLEGTIQQILDMGGGSWDRDTVVRTLRAAYNNPERAVEYLYSGIPEQAEAPPVTGVPASAQPSNPPADTPQAAQPASVPSSGPNANPLDLFPQGLPNVGSGAAGAGSLDFLRNSQQFQALRAMVQANPQILQPMLQELGKQNPHLMRLIQEHQVDFLRLINEPVEGGEGNILGQLAGAMPQAVTVTPEERQAIERLEAMGFDRATVLEVYFACNKNEELAANYLLDHMHEFDE

SEQ ID NO: 54475 - protein, 310 aa, Glycine max
  peptide (1)..(310): Ceres Seq. ID no. 14316242
  misc_feature (78)..(120): Pfam Name: UBA/TS-N domain Pfam Description: UBA/TS-N domain
  misc_feature (1)..(310): Homolog of NCBI NO: 22330746 NR Description: DNA repair protein RAD23 -related [Arabidopsis
  misc_feature (1)..(310): Homolog of NCBI NO: 30409718 NR Description: RAD23-like protein [Arabidopsis thaliana]
  misc_feature (1)..(310): Homolog of NCBI NO: 30699439 NR Description: DNA repair protein RAD23 -related [Arabidopsis
  misc_feature (31)..(310): Homolog of NCBI NO: 30409726 NR Description: RAD23-like protein [Arabidopsis thaliana]
  misc_feature (3)..(310): Homolog of NCBI NO: 15232924 NR Description: RAD23 -related [Arabidopsis thaliana]
  misc_feature (1)..(310): Homolog of NCBI NO: 7446462 NR Description: RAD23 protein homolog - rice
  misc_feature (1)..(310): Homolog of NCBI NO: 14335004 NR Description: unknown protein [Arabidopsis thaliana]
  misc_feature (1)..(310): Homolog of NCBI NO: 15240922 NR Description: DNA repair protein RAD23, putative [Arabidopsis
  misc_feature (1)..(309): Homolog of NCBI NO: 7446459 NR Description: RAD23 protein, isoform I - carrot
  misc_feature (1)..(310): Homolog of NCBI NO: 5640111 NR Description: RAD23 protein [Lycopersicon esculentum]
MLSKPSATPTSTSVSTAPQAPASTGASATPVTAPTAAPAPAPAPAAPAPAPAPIFSGSSVPESDIYGQAASNLVAGSNLEGTIQQILDMGGGSWDRDTVVRTLRAAYNNPERAVEYLYSGIPEQAEAPPVTGVPASAQPSNPPADTPQAAQPASVPSSGPNANPLDLFPQGLPNVGSGAAGAGSLDFLRNSQQFQALRAMVQANPQILQPMLQELGKQNPHLMRLIQEHQVDFLRLINEPVEGGEGNILGQLAGAMPQAVTVTPEERQAIERLEAMGFDRATVLEVYFACNKNEELAANYLLDHMHEFDE

SEQ ID NO: 54476 - DNA, 1132 bp, Glycine max
  misc_feature (1)..(1132): Ceres Seq. ID no. 14307388
aaagtgatctagagtcaatggattatgctggaatgtttacaaatacccaatggacttccaatgtgtcttcacatcacaagagacaagcttttgtgatgtatttgcagacgaatccaggaggaatcactatatttggatggacagttgaccggtctctggtcaacaccatatttttccttgaattaagtctggttacctttgttctcggtcagaccctaatctaaggataaaatttgcaaaatgacataaaaaaaaaaaccctttggctttaggtcttcctggttaccaccatcaatttgattgaaagtcctccgcatgccgagccagaatgtcgcatgcacacagtagccatgcagagaagtagagaaacagtgtgtattgtccacccagggactggaccaggcacactactgttaaatgcgaggcctcttcctcaatccccagcaacacagatgtctccaaaattctattcgtcattctcattcctcagtcagcatacttatctccgtggatcttgtgacttctaatttgcacaatatgcaatcaaacaacataccttaaactaataccaccttaaaagatacttgggagttttctgcctactagggctcctcgaagcagtcgttctcaaattgtttcaattcataacctaaggtttgcatcatctcatttgtaatcgaaggatcatagctatagtcatgtctccccctgcgttgaagattccagcctctggacatttgtgacctttataagagcgttcgcatgttgaactcgtatgtgttttgctttggagtagttggaagcaagaaagggtgttgggcactaggaaggacataaaggtttaaattttcaactaggaatatggagagaacctaaggaccaatcgtgttgggtgtgcaagtgccggtggatagtcatattaccgagtaatgttgcttgcaaattctgatctagttagattacagtgattgtttttattattattatttgagatatgcctaaggctgatttcaattgtataatagacaataatagagttgcgtatttcgaatgacaagtttataattattggttggtcgtgcaccaaccctcttttattttcttcacgaaatttataaatttctttttaaac

SEQ ID NO: 54477 - protein, 73 aa, Glycine max
  peptide (1)..(73): Ceres Seq. ID no. 14307389
  misc_feature (1)..(72): Pfam Name: 7tm Odorant receptor Pfam Description: 7tm Odorant receptor
  misc_feature (1)..(73): Homolog of NCBI NO: 25404677 NR Description: hypothetical protein F12B7.12 [imported] -
  misc_feature (1)..(73): Homolog of NCBI NO: 21536729 NR Description: unknown [Arabidopsis thaliana]
  misc_feature (1)..(73): Homolog of NCBI NO: 18408800 NR Description: expressed protein [Arabidopsis thaliana]
SDLESMDYAGMFTNTQWTSNVSSHHKRQAFVMYLQTNPGGITIFGWTVDRSLVNTIFFLELSLVTFVLGQTLI

SEQ ID NO: 54478 - protein, 68 aa, Glycine max
  peptide (1)..(68): Ceres Seq. ID no. 14307390
  misc_feature (1)..(67): Pfam Name: 7tm Odorant receptor Pfam Description: 7tm Odorant receptor
  misc_feature (1)..(68): Homolog of NCBI NO: 25404677 NR Description: hypothetical protein F12B7.12 [imported] -
  misc_feature (1)..(68): Homolog of NCBI NO: 21536729 NR Description: unknown [Arabidopsis thaliana]
  misc_feature (1)..(68): Homolog of NCBI NO: 18408800 NR Description: expressed protein [Arabidopsis thaliana]
MDYAGMFTNTQWTSNVSSHHKRQAFVMYLQTNPGGITIFGWTVDRSLVNTIFFLELSLVTFVLGQTLI

SEQ ID NO: 54479 - protein, 63 aa, Glycine max
  peptide (1)..(63): Ceres Seq. ID no. 14307391
  misc_feature (1)..(62): Pfam Name: 7tm Odorant receptor Pfam Description: 7tm Odorant receptor
  misc_feature (1)..(63): Homolog of NCBI NO: 25404677 NR Description: hypothetical protein F12B7.12 [imported] -
  misc_feature (1)..(63): Homolog of NCBI NO: 21536729 NR Description: unknown [Arabidopsis thaliana]
  misc_feature (1)..(63): Homolog of NCBI NO: 18408800 NR Description: expressed protein [Arabidopsis thaliana]
MFTNTQWTSNVSSHHKRQAFVMYLQTNPGGITIFGWTVDRSLVNTIFFLELSLVTFVLGQTLI

SEQ ID NO: 54480 - DNA, 1208 bp, Glycine max
  misc_feature (1)..(1208): Ceres Seq. ID no. 14307456
gggcaaaatcattcttcacttagttaggaaccgaaccatggctataacgttcggtttagtgactcctaactccaacactttgtgtctcactctcaccacaccacccctcatcgccaatcatcgtactactaatgttgtgttctctggtcaaagtgtcttcagctatggacacactaatctttcttattcacaccaaagggcttcttcctttgccactattgtctgttctgctgctaataaaccatcctcttcttctgaaattagctctacagccaagataaggagcgaggttctctctccctttcgttcagttaggatgttcttttatattgcttttgttgcaagtggtgctcttgggggattcatagcaaccacacaactaattggtgcactggctaactcatcaagagcatctgaagtccctgagattctgaagggccttggcatcgaccttgcagcagtgtctttatttgctttcttgtatttcagagagaacaaagcaaagaatgcacaagtggctcgcctatcaagagaggaaagcttatcaaatcttaagctccgtgtggatgagaagaagatcattcctgtgaactcattgagagggattgctcgacttgtcatctgtgctggccctgcatcctttgtaaccgagtcttttaagcgcagtgagcctttcaccgatagtcttttggatagaggggtgcttgttgtgccctttgtaacagatggaaattcacctgctttggagtttgaggagactgaggaacttgccactagaaggaagagactctggcaactggctccagtttacatcaatgagtggtctgagtggttagatgagcaaaagaagttagctggtgtaccttctgattctccagtgtacctatccctacgcttggatggtcgtgttcgtggcagtggtgttggttatcctccttggaatgctttggttgcacaattaccacaggtaaagggaatgtggactggcctactagatggctttgatggtagagtttagaagagcaagtgtttttttctacttctgaaggttgaactctcatacttaccccctcccccacaaaacaaaaagttcttcagcccgttttcttcatattctctttctggttttgtttctaatagtggagattccattaaacttttatgatttgattttaattgtatttattatttattatttattttatttc

SEQ ID NO: 54481 - protein, 338 aa, Glycine max
  peptide (1)..(338): Ceres Seq. ID no. 14307457
  misc_feature (273)..(321): Homolog of NCBI NO: 15218638 NR Description: tetratricopeptide repeat (TPR)-containing protein
  misc_feature (92)..(249): Homolog of NCBI NO: 15218638 NR Description: tetratricopeptide repeat (TPR)-containing protein
  misc_feature (75)..(338): Homolog of NCBI NO: 32489514 NR Description: OSJNBa0043L24.5 [Oryza sativa (japonica
  misc_feature (53)..(338): Homolog of NCBI NO: 15081662 NR Description: AT4g28740/F16A16_150 [Arabidopsis thaliana]
  misc_feature (53)..(338): Homolog of NCBI NO: 18417257 NR Description: expressed protein [Arabidopsis thaliana]
  misc_feature (53)..(338): Homolog of NCBI NO: 7485530 NR Description: hypothetical protein F16A16.150 - Arabidopsis
GKIILHLVRNRTMAITFGLVTPNSNTLCLTLTTPPLIANHRTTNVVFSGQSVFSYGHTNLSYSHQRASSFATIVCSAANKPSSSSEISSTAKIRSEVLSPFRSVRMFFYIAFVASGALGGFIATTQLIGALANSSRASEVPEILKGLGIDLAAVSLFAFLYFRENKAKNAQVARLSREESLSNLKLRVDEKKIIPVNSLRGIARLVICAGPASFVTESFKRSEPFTDSLLDRGVLVVPFVTDGNSPALEFEETEELATRRKRLWQLAPVYINEWSEWLDEQKKLAGVPSDSPVYLSLRLDGRVRGSGVGYPPWNALVAQLPQVKGMWTGLLDGFDGRV

SEQ ID NO: 54482 - protein, 326 aa, Glycine max
  peptide (1)..(326): Ceres Seq. ID no. 14307458
  misc_feature (261)..(309): Homolog of NCBI NO: 15218638 NR Description: tetratricopeptide repeat (TPR)-containing protein
  misc_feature (80)..(237): Homolog of NCBI NO: 15218638 NR Description: tetratricopeptide repeat (TPR)-containing protein
  misc_feature (63)..(326): Homolog of NCBI NO: 32489514 NR Description: OSJNBa0043L24.5 [Oryza sativa (japonica
  misc_feature (41)..(326): Homolog of NCBI NO: 15081662 NR Description: AT4g28740/F16A16_150 [Arabidopsis thaliana]
  misc_feature (41)..(326): Homolog of NCBI NO: 18417257 NR Description: expressed protein [Arabidopsis thaliana]
  misc_feature (41)..(326): Homolog of NCBI NO: 7485530 NR Description: hypothetical protein F16A16.150 - Arabidopsis
MAITFGLVTPNSNTLCLTLTTPPLIANHRTTNVVFSGQSVFSYGHTNLSYSHQRASSFATIVCSAANKPSSSSEISSTAKIRSEVLSPFRSVRMFFYIAFVASGALGGFIATTQLIGALANSSRASEVPEILKGLGIDLAAVSLFAFLYFRENKAKNAQVARLSREESLSNLKLRVDEKKIIPVNSLRGIARLVICAGPASFVTESFKRSEPFTDSLLDRGVLVVPFVTDGNSPALEFEETEELATRRKRLWQLAPVYINEWSEWLDEQKKLAGVPSDSPVYLSLRLDGRVRGSGVGYPPWNALVAQLPQVKGMWTGLLDGFDGRV

SEQ ID NO: 54483 - protein, 233 aa, Glycine max
  peptide (1)..(233): Ceres Seq. ID no. 14307459
  misc_feature (168)..(216): Homolog of NCBI NO: 15218638 NR Description: tetratricopeptide repeat (TPR)-containing protein
  misc_feature (1)..(144): Homolog of NCBI NO: 15218638 NR Description: tetratricopeptide repeat (TPR)-containing protein
  misc_feature (1)..(233): Homolog of NCBI NO: 32489514 NR Description: OSJNBa0043L24.5 [Oryza sativa (japonica
  misc_feature (1)..(233): Homolog of NCBI NO: 15081662 NR Description: AT4g28740/F16A16_150 [Arabidopsis thaliana]
  misc_feature (1)..(233): Homolog of NCBI NO: 18417257 NR Description: expressed protein [Arabidopsis thaliana]
  misc_feature (1)..(233): Homolog of NCBI NO: 7485530 NR Description: hypothetical protein F16A16.150 - Arabidopsis
MFFYIAFVASGALGGFIATTQLIGALANSSRASEVPEILKGLGIDLAAVSLFAFLYFRENKAKNAQVARLSREESLSNLKLRVDEKKIIPVNSLRGIARLVICAGPASFVTESFKRSEPFTDSLLDRGVLVVPFVTDGNSPALEFEETEELATRRKRLWQLAPVYINEWSEWLDEQKKLAGVPSDSPVYLSLRLDGRVRGSGVGYPPWNALVAQLPQVKGMWTGLLDGFDGRV

SEQ ID NO: 54484 - DNA, 1235 bp, Glycine max
  misc_feature (1)..(1235): Ceres Seq. ID no. 14303493
actgagtgaaaaaccacaacctagaaagaaatgaagaaaatacagcactctgaacaaaaagcaacggaaccaaccaaaaaggattcaaagggcaacaaacaagaaggcacagactcagagtcagagcaataccaaaacgaagaaaatcaactccacacgctttcggaaccatcaccatccttctctctccgttcccgcaaatccccttcgccaccactccactccctctctgactcccccatctccgatgcccacctctcccctgcgccgcagaagccgccgcccgattcctcgccggactcctcgatctccgacggccacttcacgatcggtgaacagcgcctctccccggcgccgccgaccgtggtgacggctcatcggttgaaggtggagcccgcggtgttgaccagggtcgatcccggcgccgaagagggtttcgtgaaagacgtcgaacaagccaccggcagcgccggtagtcgacgcctcagaccggatatgaccggtttgttgaggtcgaaaaaaatcgccacgtggagcaagctcttgctgggtcttcgagtaaccgcttttgttttctgcttggcgtctttctcggtgttggccactgataagaaacagggctgggctatcgactctttctatttatacaaggaattcaggtatagtttgtcagtgaatgttattgggtttgtgcattccgcgttgcagatatgtgatcttgggcggtactttgcaacgggaaagcacttggtggagcaccagctaaggggttatttcactttcgcgctggatcagatcttgacataccttctaatgtcagcatcatcatcagctgccactagagcttatgattgggtttccaattggggtgaggacaagttcccctacatggcaaatgcatctgtggctttgtccttggttgcttttgtggcctttgccttagcctctcttgtctctggttctattgttgtaaggttcacataatttatacaagtactatgtgtgaggtgtgcaaactcttatctgagatactggattaagctttatcctttctcgattgaaaatcgtcccatattttcagaaggcagactgactcactttgtacagaagggaaactcactttatttctctgtcaactttaatttgtatagatgcaggtggatttacagcttgctgaactggcttgtatatgaacttttgcattattgagatggtattaagcttacttttttatc

SEQ ID NO: 54485 - protein, 317 aa, Glycine max
  peptide (1)..(317): Ceres Seq. ID no. 14303494
  misc_feature (170)..(301): Pfam Name: Domain of unknown function (DUF588) Pfam Description: Domain of unknown function (DUF588)
  misc_feature (226)..(309): Homolog of NCBI NO: 10177460 NR Description: gene_id:MQB2.14~unknown protein [Arabidopsis
  misc_feature (43)..(255): Homolog of NCBI NO: 15227628 NR Description: expressed protein [Arabidopsis thaliana]
  misc_feature (224)..(310): Homolog of NCBI NO: 15227628 NR Description: expressed protein [Arabidopsis thaliana]
  misc_feature (231)..(309): Homolog of NCBI NO: 34911616 NR Description: P0039G05.10 [Oryza sativa (japonica
  misc_feature (3)..(226): Homolog of NCBI NO: 34911616 NR Description: P0039G05.10 [Oryza sativa (japonica
  misc_feature (173)..(309): Homolog of NCBI NO: 15241975 NR Description: hypothetical protein [Arabidopsis thaliana]
  misc_feature (156)..(196): Homolog of NCBI NO: 2598569 NR Description: MtN24 [Medicago truncatula]
  misc_feature (203)..(317): Homolog of NCBI NO: 2598569 NR Description: MtN24 [Medicago truncatula]
  misc_feature (43)..(310): Homolog of NCBI NO: 27754604 NR Description: unknown protein [Arabidopsis thaliana]
  misc_feature (54)..(310): Homolog of NCBI NO: 15242642 NR Description: expressed protein [Arabidopsis thaliana]
MKKIQHSEQKATEPTKKDSKGNKQEGTDSESEQYQNEENQLHTLSEPSPSFSLRSRKSPSPPLHSLSDSPISDAHLSPAPQKPPPDSSPDSSISDGHFTIGEQRLSPAPPTVVTAHRLKVEPAVLTRVDPGAEEGFVKDVEQATGSAGSRRLRPDMTGLLRSKKIATWSKLLLGLRVTAFVFCLASFSVLATDKKQGWAIDSFYLYKEFRYSLSVNVIGFVHSALQICDLGRYFATGKHLVEHQLRGYFTFALDQILTYLLMSASSSAATRAYDWVSNWGEDKFPYMANASVALSLVAFVAFALASLVSGSIVVRFT

SEQ ID NO: 54486 - protein, 162 aa, Glycine max
  peptide (1)..(162): Ceres Seq. ID no. 14303495
  misc_feature (15)..(146): Pfam Name: Domain of unknown function (DUF588) Pfam Description: Domain of unknown function (DUF588)
  misc_feature (71)..(154): Homolog of NCBI NO: 10177460 NR Description: gene_id:MQB2.14~unknown protein [Arabidopsis
  misc_feature (1)..(100): Homolog of NCBI NO: 15227628 NR Description: expressed protein [Arabidopsis thaliana]
  misc_feature (69)..(155): Homolog of NCBI NO: 15227628 NR Description: expressed protein [Arabidopsis thaliana]
  misc_feature (76)..(154): Homolog of NCBI NO: 34911616 NR Description: P0039G05.10 [Oryza sativa (japonica
  misc_feature (1)..(71): Homolog of NCBI NO: 34911616 NR Description: P0039G05.10 [Oryza sativa (japonica
  misc_feature (18)..(154): Homolog of NCBI NO: 15241975 NR Description: hypothetical protein [Arabidopsis thaliana]
  misc_feature (1)..(41): Homolog of NCBI NO: 2598569 NR Description: MtN24 [Medicago truncatula]
  misc_feature (48)..(162): Homolog of NCBI NO: 2598569 NR Description: MtN24 [Medicago truncatula]
  misc_feature (1)..(155): Homolog of NCBI NO: 27754604 NR Description: unknown protein [Arabidopsis thaliana]
  misc_feature (1)..(155): Homolog of NCBI NO: 15242642 NR Description: expressed protein [Arabidopsis thaliana]
MTGLLRSKKIATWSKLLLGLRVTAFVFCLASFSVLATDKKQGWAIDSFYLYKEFRYSLSVNVIGFVHSALQICDLGRYFATGKHLVEHQLRGYFTFALDQILTYLLMSASSSAATRAYDWVSNWGEDKFPYMANASVALSLVAFVAFALASLVSGSIVVRFT

SEQ ID NO: 54487 - DNA, 997 bp, Glycine max
  misc_feature (1)..(997): Ceres Seq. ID no. 14307377
aataaagccactcgccgctctctgcaccctcctctctctctctttggtgctggacaaggacaagtaaccaaaattccaagaagggttcattaatacatggccttagagcactacctttcgcaggaatggaaaaccagccccagcccgagcccgagccccatgacagtgacagaaaaccttgatgggtgttttgattgcaacatctgcttagattttgcacatgaaccagtggtcaccctttgtggccacctatactgctggccctgcatctacaagtggctccatgtccaaagtgcttctcttgcaccagatgagcaccctcaatgccctgtttgcaaggatgacatatgccacaccacaatggttcctctctatggccgtggccagggcatagctcatagtgaccgtgatggaaaggcatcatcctatagaggcagttttataccaccaagaccacctgctttgggtgctcaatctctcatgtcaacatcatctcaaagtgctcaacaacttccatatcgcaacccttatcagaatcagcatttcaaccctcctttgtaccaagatgaggatgaatcatcatcacaaatgctgaatcctggtgccaacatggtggcaccaggattcccccaccttgtggttgggatgtttggagagatgctttatgccagagtctttggcaactcagaaaatttatacaactatccaaattcttatcacctggggggaagtaataataatagccccaggttgagaaggcaagagatgcaagcaaacaaatcattgaacagaatctcaatttttctgttttgttgcttccttctgtgtcttattgtcttctaagcaagtaattggattgttattatctattgtcccattgtataatttgtaaagaaacacgggtgtaagctctgagaacgagatagattgagcaatgttagggtaaaataactggtgttcttcaacatttactgcaatatatcagagctcatttttc

SEQ ID NO: 54488 - protein, 248 aa, Glycine max
  peptide (1)..(248): Ceres Seq. ID no. 14307378
  misc_feature (34)..(80): Pfam Name: Zinc finger, C3HC4 type (RING finger) Pfam Description: Zinc finger, C3HC4 type (RING finger)
  misc_feature (29)..(236): Homolog of NCBI NO: 22331846 NR Description: zinc finger (C3HC4-type RING finger) protein
  misc_feature (29)..(236): Homolog of NCBI NO: 11357958 NR Description: hypothetical protein T10K17.240 - Arabidopsis
  misc_feature (14)..(120): Homolog of NCBI NO: 18394721 NR Description: zinc finger (C3HC4-type RING finger) protein
  misc_feature (22)..(248): Homolog of NCBI NO: 38346627 NR Description: OSJNBa0074L08.21 [Oryza sativa (japonica
  misc_feature (178)..(248): Homolog of NCBI NO: 15235242 NR Description: zinc finger (C3HC4-type RING finger) protein
  misc_feature (30)..(144): Homolog of NCBI NO: 15235242 NR Description: zinc finger (C3HC4-type RING finger) protein
  misc_feature (12)..(239): Homolog of NCBI NO: 7488309 NR Description: RING zinc finger protein F27G19.70 - Arabidopsis
  misc_feature (16)..(248): Homolog of NCBI NO: 15236326 NR Description: E3 ubiquitin ligase, RMA1 [Arabidopsis thaliana]
  misc_feature (12)..(248): Homolog of NCBI NO: 30687607 NR Description: zinc finger (C3HC4-type RING finger) protein
  misc_feature (1)..(248): Homolog of NCBI NO: 22795037 NR Description: putative RING protein [Populus x canescens]
MALEHYLSQEWKTSPSPSPSPMTVTENLDGCFDCNICLDFAHEPVVTLCGHLYCWPCIYKWLHVQSASLAPDEHPQCPVCKDDICHTTMVPLYGRGQGIAHSDRDGKASSYRGSFIPPRPPALGAQSLMSTSSQSAQQLPYRNPYQNQHFNPPLYQDEDESSSQMLNPGANMVAPGFPHLVVGMFGEMLYARVFGNSENLYNYPNSYHLGGSNNNSPRLRRQEMQANKSLNRISIFLFCCFLLCLIVF

SEQ ID NO: 54489 - protein, 227 aa, Glycine max
  peptide (1)..(227): Ceres Seq. ID no. 14307379
  misc_feature (13)..(59): Pfam Name: Zinc finger, C3HC4 type (RING finger) Pfam Description: Zinc finger, C3HC4 type (RING finger)
  misc_feature (8)..(215): Homolog of NCBI NO: 22331846 NR Description: zinc finger (C3HC4-type RING finger) protein
  misc_feature (8)..(215): Homolog of NCBI NO: 11357958 NR Description: hypothetical protein T10K17.240 - Arabidopsis
  misc_feature (1)..(99): Homolog of NCBI NO: 18394721 NR Description: zinc finger (C3HC4-type RING finger) protein
  misc_feature (1)..(227): Homolog of NCBI NO: 38346627 NR Description: OSJNBa0074L08.21 [Oryza sativa (japonica
  misc_feature (157)..(227): Homolog of NCBI NO: 15235242 NR Description: zinc finger (C3HC4-type RING finger) protein
  misc_feature (9)..(123): Homolog of NCBI NO: 15235242 NR Description: zinc finger (C3HC4-type RING finger) protein
  misc_feature (1)..(218): Homolog of NCBI NO: 7488309 NR Description: RING zinc finger protein F27G19.70 - Arabidopsis
  misc_feature (1)..(227): Homolog of NCBI NO: 15236326 NR Description: E3 ubiquitin ligase, RMA1 [Arabidopsis thaliana]
  misc_feature (1)..(227): Homolog of NCBI NO: 30687607 NR Description: zinc finger (C3HC4-type RING finger) protein
  misc_feature (1)..(227): Homolog of NCBI NO: 22795037 NR Description: putative RING protein [Populus x canescens]
MTVTENLDGCFDCNICLDFAHEPVVTLCGHLYCWPCIYKWLHVQSASLAPDEHPQCPVCKDDICHTTMVPLYGRGQGIAHSDRDGKASSYRGSFIPPRPPALGAQSLMSTSSQSAQQLPYRNPYQNQHFNPPLYQDEDESSSQMLNPGANMVAPGFPHLVVGMFGEMLYARVFGNSENLYNYPNSYHLGGSNNNSPRLRRQEMQANKSLNRISIFLFCCFLLCLIVF

SEQ ID NO: 54490 - protein, 160 aa, Glycine max
  peptide (1)..(160): Ceres Seq. ID no. 14307380
  misc_feature (1)..(148): Homolog of NCBI NO: 22331846 NR Description: zinc finger (C3HC4-type RING finger) protein
  misc_feature (1)..(148): Homolog of NCBI NO: 11357958 NR Description: hypothetical protein T10K17.240 - Arabidopsis
  misc_feature (1)..(32): Homolog of NCBI NO: 18394721 NR Description: zinc finger (C3HC4-type RING finger) protein
  misc_feature (1)..(160): Homolog of NCBI NO: 38346627 NR Description: OSJNBa0074L08.21 [Oryza sativa (japonica
  misc_feature (90)..(160): Homolog of NCBI NO: 15235242 NR Description: zinc finger (C3HC4-type RING finger) protein
  misc_feature (1)..(56): Homolog of NCBI NO: 15235242 NR Description: zinc finger (C3HC4-type RING finger) protein
  misc_feature (1)..(151): Homolog of NCBI NO: 7488309 NR Description: RING zinc finger protein F27G19.70 - Arabidopsis
  misc_feature (1)..(160): Homolog of NCBI NO: 15236326 NR Description: E3 ubiquitin ligase, RMA1 [Arabidopsis thaliana]
  misc_feature (1)..(160): Homolog of NCBI NO: 30687607 NR Description: zinc finger (C3HC4-type RING finger) protein
  misc_feature (1)..(160): Homolog of NCBI NO: 22795037 NR Description: putative RING protein [Populus x canescens]
MVPLYGRGQGIAHSDRDGKASSYRGSFIPPRPPALGAQSLMSTSSQSAQQLPYRNPYQNQHFNPPLYQDEDESSSQMLNPGANMVAPGFPHLVVGMFGEMLYARVFGNSENLYNYPNSYHLGGSNNNSPRLRRQEMQANKSLNRISIFLFCCFLLCLIVF

SEQ ID NO: 54491 - DNA, 2089 bp, Glycine max
  misc_feature (1)..(2089): Ceres Seq. ID no. 14313670
ggtataccaaattgcttgaggccttcaatttcacccttcacacgtggtggtggtgttgttcttcttctcttcccctttctttttcttcttctgagcttgtttaagctctttctatttgattccattaacatatattatcacaatgtgtggtattcttgctgttcttggttgttctgatgactctcgagccaaaagggtccgcgtgcttgagctctctcgcagattgaagcaccgtggccctgactggagtgggctccatcaacatggtgactgctttttagcacatcaacggttagccatagttgatcctgcttctggggatcaacctctctttaacgaggacaaatccgtcattgtcacggtgaatggagagatttacaaccatgaagagctcaggaaacagctgcctaatcacaagttccgtactggatgtgattgtgatgttattgcacacctgtacgaggaacatggagaagactttgtggacatgctggatggtatcttctcatttgttctactggacacccgtgacaacagttttatagtggctcgggatgctattggggtcacttccttgtacattggatggggattagatggctctgtttggatttcatcagaaatgaaaggcctgaatgatgattgtgaacactttgagtgttttccacctggtcacttgtactctagcaaagaaagagggtttcgcagatggtacaatcctccttggttctctgaggctactccatccaccccttatgatcctctcgttttaagacacacctttgagcaggcagtcataaaaagattgatgactgatgtgccttttggtgttctactctctggaggtttggactcttcattggttgcatccgtcacttctcgctacttggccaacacaaaggctgctgagcagtggggatcaaagttacattcattctgtgtaggccttgagggctcaccagatttgaaggctgcaaaagaagttgctgactatctaggcactgtccaccatgagtttaccttcactgttcaggatggaatagatgccattgaagatgttatctaccatgttgaaacatatgatgtgactacaattagagctagcacacccatgtttctcatgtctcggaagattaaatcacttggtgtcaaatgggttatctccggagaaggatctgatgagatctttggagggtatctgtacttccacaaggcacccaacaaggaggagtttcacagagaaacatgccgcaagatcaaagcactccaccaatatgattgcttgcgagccaataaatcaacatttgcttggggtctagaagcccgtgtaccatttttggacaaggcatttatcaatactgcaatgagtattgaccctgagtcgaaaatgataaaaagagatgaaggacgaattgagaagtggattctgaggagagcctttgatgatgaagagcatccttatctgccaaagcacattttatacaggcagaaagagcaattcagtgatggagttggctatagctggattgatggccttaaggcccatgctgcaaaacatgtgactgacaaaatgatgcttaatgctggtaacatctaccctcacaacaccccaacaaccaaggaagcatattactacagaatgatctttgagaggttcttccctcagaactcagctaggctcaccgttcctggaggagcaagtgttgcatgtagcacagccaaagctgttgagtgggatgctgcttggtctaacaaccttgatccttctggtagagcagcacttggagtgcacatttcagcctatgaaaaccagaacaacaacaagggtgtagaaattgagaagattatacctatggatgctgctcctcttggtgttgcaatccagggataatataaagctgtgacaaagaataattgggggagaatgaactatgctaaacgtgtatgaaaaatttgcctgcagtgtacttttatcttggcaaagctttgtagtgtatagatatagatataaggctttctaaaagtgtagcgtattgtattatcttgaatgctgtgatttgaagtcttaataaaagtgtttctattatcg

SEQ ID NO: 54492 - protein, 582 aa, Glycine max
  peptide (1)..(582): Ceres Seq. ID no. 14313671
  misc_feature (193)..(516): Pfam Name: Asparagine synthase Pfam Description: Asparagine synthase
MCGILAVLGCSDDSRAKRVRVLELSRRLKHRGPDWSGLHQHGDCFLAHQRLAIVDPASGDQPLFNEDKSVIVTVNGEIYNHEELRKQLPNHKFRTGCDCDVIAHLYEEHGEDFVDMLDGIFSFVLLDTRDNSFIVARDAIGVTSLYIGWGLDGSVWISSEMKGLNDDCEHFECFPPGHLYSSKERGFRRWYNPPWFSEATPSTPYDPLVLRHTFEQAVIKRLMTDVPFGVLLSGGLDSSLVASVTSRYLANTKAAEQWGSKLHSFCVGLEGSPDLKAAKEVADYLGTVHHEFTFTVQDGIDAIEDVIYHVETYDVTTIRASTPMFLMSRKIKSLGVKWVISGEGSDEIFGGYLYFHKAPNKEEFHRETCRKIKALHQYDCLRANKSTFAWGLEARVPFLDKAFINTAMSIDPESKMIKRDEGRIEKWILRRAFDDEEHPYLPKHILYRQKEQFSDGVGYSWIDGLKAHAAKHVTDKMMLNAGNIYPHNTPTTKEAYYYRMIFERFFPQNSARLTVPGGASVACSTAKAVEWDAAWSNNLDPSGRAALGVHISAYENQNNNKGVEIEKIIPMDAAPLGVAIQG

SEQ ID NO: 54493 - protein, 467 aa, Glycine max
  peptide (1)..(467): Ceres Seq. ID no. 14313672
  misc_feature (78)..(401): Pfam Name: Asparagine synthase Pfam Description: Asparagine synthase
MLDGIFSFVLLDTRDNSFIVARDAIGVTSLYIGWGLDGSVWISSEMKGLNDDCEHFECFPPGHLYSSKERGFRRWYNPPWFSEATPSTPYDPLVLRHTFEQAVIKRLMTDVPFGVLLSGGLDSSLVASVTSRYLANTKAAEQWGSKLHSFCVGLEGSPDLKAAKEVADYLGTVHHEFTFTVQDGIDAIEDVIYHVETYDVTTIRASTPMFLMSRKIKSLGVKWVISGEGSDEIFGGYLYFHKAPNKEEFHRETCRKIKALHQYDCLRANKSTFAWGLEARVPFLDKAFINTAMSIDPESKMIKRDEGRIEKWILRRAFDDEEHPYLPKHILYRQKEQFSDGVGYSWIDGLKAHAAKHVTDKMMLNAGNIYPHNTPTTKEAYYYRMIFERFFPQNSARLTVPGGASVACSTAKAVEWDAAWSNNLDPSGRAALGVHISAYENQNNNKGVEIEKIIPMDAAPLGVAIQG

SEQ ID NO: 54494 - protein, 422 aa, Glycine max
  peptide (1)..(422): Ceres Seq. ID no. 14313673
  misc_feature (33)..(356): Pfam Name: Asparagine synthase Pfam Description: Asparagine synthase
MKGLNDDCEHFECFPPGHLYSSKERGFRRWYNPPWFSEATPSTPYDPLVLRHTFEQAVIKRLMTDVPFGVLLSGGLDSSLVASVTSRYLANTKAAEQWGSKLHSFCVGLEGSPDLKAAKEVADYLGTVHHEFTFTVQDGIDAIEDVIYHVETYDVTTIRASTPMFLMSRKIKSLGVKWVISGEGSDEIFGGYLYFHKAPNKEEFHRETCRKIKALHQYDCLRANKSTFAWGLEARVPFLDKAFINTAMSIDPESKMIKRDEGRIEKWILRRAFDDEEHPYLPKHILYRQKEQFSDGVGYSWIDGLKAHAAKHVTDKMMLNAGNIYPHNTPTTKEAYYYRMIFERFFPQNSARLTVPGGASVACSTAKAVEWDAAWSNNLDPSGRAALGVHISAYENQNNNKGVEIEKIIPMDAAPLGVAIQG

SEQ ID NO: 54495 - DNA, 1435 bp, Glycine max
  misc_feature (1)..(1435): Ceres Seq. ID no. 15176525
gattgtaaagttacttgtgttcttaagtatgagaatcatttatttagcgaaaaaaatacttatttgattttttctacaaaattttcttgagccagcaagagtcacacatcataagaccgtgatctttaagcaggacaaaacaaaatctatcaaggaagccatatattggtatccaaattccaaacttgtgttgggtttggttccttgagttgagaggagtgaaaaaatggatcacagtgcggatgctcaacgcacggacctgatgaccatcacccgtttcgtgctgaacgaacagtcgaagcacccagagtctcgtggcgatttctcaatcctgctcagtcacattgttctcggctgcaagttcgtctgctctgctgttaacaaggcgggtcttgctaagcttattggacttgcaggagagacaaatgttcagggtgaagagcaaaagaaattggatgtcctatccaatgatgtcttcatcaaggcattgatcagcagtggacgaacatgcatcttggtgtctgaagaagatgaggaagcaacatttgtggaaccttctaagcgtggaaaatactgtgttgtttttgacccgctggatggttcctctaacattgattgtggtgtttcaattggcacaatctttgggatttatttgataaaagaagaccatgaaccaaccgtagaagatgttttgcaacctgggaagaacatgttggcagctggttattgcatgtatggaagctcttgcacgcttgtgttaagcactggaagtggtgttaatggtttcacccttgatccatctcttggggagttcattctaactcaccctgacatcaagatcccaaagaaaggcaagatctattcagtgaatgaaggaaatgctaaaaactgggatggccctactaccatgtatgtggaaaactgcaagtatccaaaagatggttcatcaccaaagtccctaagatatattggaagcatggttgctgatgttcaccgcacactgctttatggaggtatctttctgtacccggctgataaaaagagtccaaatgggaaacttcgtgtactctatgaagtcttcccaatgtcattcttgatggaacaagcaggaggacaggctttcaccggcaaccaaagggcacttgatttggttccaaagaagttgcacgagcgatctcccatattccttggtagctatgaagatgtagaggaaatcaaggctctttactctgctgatgaaaaataggaatgaagctggaagaaagctatctttgtctttcgctactcacaagcaattgttatctaattgttacacatgtcatgtatatgttaagaaaagttattaatgttttgtgatttagaaaaattattttattccttatatctaaatattttaaaatttaataataattataatttatgcagatagttttat

SEQ ID NO: 54496 - protein, 339 aa, Glycine max
  peptide (1)..(339): Ceres Seq. ID no. 15176526
  misc_feature (13)..(337): Pfam Name: Fructose-1-6-bisphosphatase Pfam Description: Fructose-1-6-bisphosphatase
  misc_feature (13)..(339): Homolog of NCBI NO: 2494416 NR Description: FRUCTOSE-1,6-BISPHOSPHATASE, CYTOSOLIC
  misc_feature (1)..(339): Homolog of NCBI NO: 3913640 NR Description: FRUCTOSE-1,6-BISPHOSPHATASE, CYTOSOLIC
  misc_feature (1)..(339): Homolog of NCBI NO: 6684169 NR Description: fructose-1,6-bisphosphatase [Porteresia coarctata]
  misc_feature (1)..(339): Homolog of NCBI NO: 15218438 NR Description: fructose 1,6-bisphosphatase -related [Arabidopsis
  misc_feature (1)..(339): Homolog of NCBI NO: 20278691 NR Description: cytoplasmic fructose-1,6-bisphosphatase [Pisum
  misc_feature (1)..(338): Homolog of NCBI NO: 4741918 NR Description: cytosolic fructose-1,6-bisphosphatase [Musa
  misc_feature (13)..(339): Homolog of NCBI NO: 5305145 NR Description: fructose-1,6-bisphosphatase [Pisum sativum]
  misc_feature (1)..(339): Homolog of NCBI NO: 119748 NR Description: FRUCTOSE-1,6-BISPHOSPHATASE, CYTOSOLIC
  misc_feature (1)..(339): Homolog of NCBI NO: 11139718 NR Description: cytosolic fructose-1,6-bisphosphatase [Beta
  misc_feature (1)..(339): Homolog of NCBI NO: 1169586 NR Description: FRUCTOSE-1,6-BISPHOSPHATASE, CYTOSOLIC
MDHSADAQRTDLMTITRFVLNEQSKHPESRGDFSILLSHIVLGCKFVCSAVNKAGLAKLIGLAGETNVQGEEQKKLDVLSNDVFIKALISSGRTCILVSEEDEEATFVEPSKRGKYCVVFDPLDGSSNIDCGVSIGTIFGIYLIKEDHEPTVEDVLQPGKNMLAAGYCMYGSSCTLVLSTGSGVNGFTLDPSLGEFILTHPDIKIPKKGKIYSVNEGNAKNWDGPTTMYVENCKYPKDGSSPKSLRYIGSMVADVHRTLLYGGIFLYPADKKSPNGKLRVLYEVFPMSFLMEQAGGQAFTGNQRALDLVPKKLHERSPIFLGSYEDVEEIKALYSADEK

SEQ ID NO: 54497 - protein, 327 aa, Glycine max
  peptide (1)..(327): Ceres Seq. ID no. 15176527
  misc_feature (1)..(325): Pfam Name: Fructose-1-6-bisphosphatase Pfam Description: Fructose-1-6-bisphosphatase
  misc_feature (1)..(327): Homolog of NCBI NO: 2494416 NR Description: FRUCTOSE-1,6-BISPHOSPHATASE, CYTOSOLIC
  misc_feature (1)..(327): Homolog of NCBI NO: 3913640 NR Description: FRUCTOSE-1,6-BISPHOSPHATASE, CYTOSOLIC
  misc_feature (1)..(327): Homolog of NCBI NO: 6684169 NR Description: fructose-1,6-bisphosphatase [Porteresia coarctata]
  misc_feature (1)..(327): Homolog of NCBI NO: 15218438 NR Description: fructose 1,6-bisphosphatase -related [Arabidopsis
  misc_feature (1)..(327): Homolog of NCBI NO: 20278691 NR Description: cytoplasmic fructose-1,6-bisphosphatase [Pisum
  misc_feature (1)..(326): Homolog of NCBI NO: 4741918 NR Description: cytosolic fructose-1,6-bisphosphatase [Musa
  misc_feature (1)..(327): Homolog of NCBI NO: 5305145 NR Description: fructose-1,6-bisphosphatase [Pisum sativum]
  misc_feature (1)..(327): Homolog of NCBI NO: 119748 NR Description: FRUCTOSE-1,6-BISPHOSPHATASE, CYTOSOLIC
  misc_feature (1)..(327): Homolog of NCBI NO: 11139718 NR Description: cytosolic fructose-1,6-bisphosphatase [Beta
  misc_feature (1)..(327): Homolog of NCBI NO: 1169586 NR Description: FRUCTOSE-1,6-BISPHOSPHATASE, CYTOSOLIC
MTITRFVLNEQSKHPESRGDFSILLSHIVLGCKFVCSAVNKAGLAKLIGLAGETNVQGEEQKKLDVLSNDVFIKALISSGRTCILVSEEDEEATFVEPSKRGKYCVVFDPLDGSSNIDCGVSIGTIFGIYLIKEDHEPTVEDVLQPGKNMLAAGYCMYGSSCTLVLSTGSGVNGFTLDPSLGEFILTHPDIKIPKKGKIYSVNEGNAKNWDGPTTMYVENCKYPKDGSSPKSLRYIGSMVADVHRTLLYGGIFLYPADKKSPNGKLRVLYEVFPMSFLMEQAGGQAFTGNQRALDLVPKKLHERSPIFLGSYEDVEEIKALYSADEK

SEQ ID NO: 54498 - protein, 178 aa, Glycine max
  peptide (1)..(178): Ceres Seq. ID no. 15176528
  misc_feature (1)..(176): Pfam Name: Fructose-1-6-bisphosphatase Pfam Description: Fructose-1-6-bisphosphatase
  misc_feature (1)..(178): Homolog of NCBI NO: 2494416 NR Description: FRUCTOSE-1,6-BISPHOSPHATASE, CYTOSOLIC
  misc_feature (1)..(178): Homolog of NCBI NO: 3913640 NR Description: FRUCTOSE-1,6-BISPHOSPHATASE, CYTOSOLIC
  misc_feature (1)..(178): Homolog of NCBI NO: 6684169 NR Description: fructose-1,6-bisphosphatase [Porteresia coarctata]
  misc_feature (1)..(178): Homolog of NCBI NO: 15218438 NR Description: fructose 1,6-bisphosphatase -related [Arabidopsis
  misc_feature (1)..(178): Homolog of NCBI NO: 20278691 NR Description: cytoplasmic fructose-1,6-bisphosphatase [Pisum
  misc_feature (1)..(177): Homolog of NCBI NO: 4741918 NR Description: cytosolic fructose-1,6-bisphosphatase [Musa
  misc_feature (1)..(178): Homolog of NCBI NO: 5305145 NR Description: fructose-1,6-bisphosphatase [Pisum sativum]
  misc_feature (1)..(178): Homolog of NCBI NO: 119748 NR Description: FRUCTOSE-1,6-BISPHOSPHATASE, CYTOSOLIC
  misc_feature (1)..(178): Homolog of NCBI NO: 11139718 NR Description: cytosolic fructose-1,6-bisphosphatase [Beta
  misc_feature (1)..(178): Homolog of NCBI NO: 1169586 NR Description: FRUCTOSE-1,6-BISPHOSPHATASE, CYTOSOLIC
MLAAGYCMYGSSCTLVLSTGSGVNGFTLDPSLGEFILTHPDIKIPKKGKIYSVNEGNAKNWDGPTTMYVENCKYPKDGSSPKSLRYIGSMVADVHRTLLYGGIFLYPADKKSPNGKLRVLYEVFPMSFLMEQAGGQAFTGNQRALDLVPKKLHERSPIFLGSYEDVEEIKALYSADEK

SEQ ID NO: 54499 - DNA, 1747 bp, Glycine max
  misc_feature (1)..(1747): Ceres Seq. ID no. 15174646
ttgtgtctgcctcttctgaaacgccactatttctgctttctctctcattaataataatattattgccttacactttttccacaatggagttgggaagcatactccattttcttcaggacaagaacattttgatcactggagccactggctttcttgccaaagttttgttggagaagatattgagggtccaaccaaatgttaagaagctttaccttcttctaagagctgcagatgccaaatctgccactcatcgcttgaacaatgagatcatagggaaggatttgtttagggtactaaaggagaaattgggtgcaaattttaattcctttgtctcgaaaaagttgactctggtacccggggacatctctcgtgaagacttgggattggaggattccattctaagggaagagatttatgatcaaacagatgtcattattaacttagctgcaacaactaactttgatgaaaggtatgatatatcgttgggtctaaatacctttggtgttaagtatgtcatcaacttcgccaaaaaatgtaccaaactcgaggttcttgtgcatgtatcaacagcctatgtatgtggtgagggaggccgagaagggctcatattagagaaaccatatcatttgggtgattcactgaatggagtgtctggattagacattaatgcagaagagaaagttgtgcgtgacaaattaagtgagttacaacaactgggggccacagaaaaggaaattaaagaggttatgaaggacttgggcattagcagggcaaagttatatggatggccaaacacatatgtattcaccaaggcaatgggagagatgcttgtggagcaactaaaaggaaacttatccgttgtgaccattcgtcccaccattgttaccagcacattcaaagaacctttccctggttgggctgaaggtgtaagaaccattgacagtttagctgtaacttatgggaaaggaaaattaacatgcttccttggagatctcaaagcaattgttgatgcgataccagctgacatggtggtgaatgcaatacttgtggccatggtggctcatgcaaatcatcctagtgatgatgttatatatcatgttggttcctctgttagaagaccactaagatatggcaatcttcaagagtatggctttagatatttcacagcaaaaccatgcataaacaaggatggaaggccagttaaggttggaaaagttacagtgttgagcaacatggatagcttcagaagatatatgttcattcgctacctgcttgtgttaaagggacttgagctggccaatactgcattttgccagtatttccaaggaacatatcttaatctcaataggaagattcagattgtgatgcggttggtggacctttacaagccttacttgttctttaaagctgcatttgatgatatgaacacagagaagttgagaatggcagcaagacaaggtggggtggagacagatttgttttattttgaccccgaactgattgattgggaagattactttttgaacatccatcttcctggtgtggtgaagtacattttgaagtgatatatagagctttgaaactagtaattttattatgttcaaatttgtactagctagaagagtcacattatagttatgttatttgtttctcaagggcagtataattgtgttagctagctgccaaatgtgtttcaaaactttgatcaagtgtacccaatatcatatattttaattttaatttgctc

SEQ ID NO: 54500 - protein, 520 aa, Glycine max
  peptide (1)..(520): Ceres Seq. ID no. 15174647
  misc_feature (316)..(518): Pfam Name: Male sterility protein Pfam Description: Male sterility protein
  misc_feature (27)..(519): Homolog of NCBI NO: 22003090 NR Description: fatty acyl coA reductase [Triticum aestivum]
  misc_feature (27)..(520): Homolog of NCBI NO: 22003082 NR Description: fatty acyl coA reductase [Triticum aestivum]
  misc_feature (28)..(518): Homolog of NCBI NO: 35215152 NR Description: putative fatty acyl coA reductase
  misc_feature (140)..(518): Homolog of NCBI NO: 30689818 NR Description: male sterility 2-related protein [Arabidopsis
  misc_feature (34)..(520): Homolog of NCBI NO: 11357157 NR Description: acyl CoA reductase-protein - Arabidopsis thaliana
  misc_feature (28)..(520): Homolog of NCBI NO: 15242260 NR Description: male sterility 2-related protein (emb|CAA68191.1)
  misc_feature (54)..(518): Homolog of NCBI NO: 7487952 NR Description: male sterility protein 2 homolog T16L1.280 -
  misc_feature (28)..(518): Homolog of NCBI NO: 25354587 NR Description: male sterility 2-like protein [imported] -
  misc_feature (28)..(518): Homolog of NCBI NO: 16323107 NR Description: AT4g33790/T16L1_280 [Arabidopsis thaliana]
  misc_feature (29)..(519): Homolog of NCBI NO: 5020215 NR Description: acyl CoA reductase [Simmondsia chinensis]
VSASSETPLFLLSLSLIIILLPYTFSTMELGSILHFLQDKNILITGATGFLAKVLLEKILRVQPNVKKLYLLLRAADAKSATHRLNNEIIGKDLFRVLKEKLGANFNSFVSKKLTLVPGDISREDLGLEDSILREEIYDQTDVIINLAATTNFDERYDISLGLNTFGVKYVINFAKKCTKLEVLVHVSTAYVCGEGGREGLILEKPYHLGDSLNGVSGLDINAEEKVVRDKLSELQQLGATEKEIKEVMKDLGISRAKLYGWPNTYVFTKAMGEMLVEQLKGNLSVVTIRPTIVTSTFKEPFPGWAEGVRTIDSLAVTYGKGKLTCFLGDLKAIVDAIPADMVVNAILVAMVAHANHPSDDVIYHVGSSVRRPLRYGNLQEYGFRYFTAKPCINKDGRPVKVGKVTVLSNMDSFRRYMFIRYLLVLKGLELANTAFCQYFQGTYLNLNRKIQIVMRLVDLYKPYLFFKAAFDDMNTEKLRMAARQGGVETDLFYFDPELIDWEDYFLNIHLPGVVKYILK

SEQ ID NO: 54501 - protein, 493 aa, Glycine max
  peptide (1)..(493): Ceres Seq. ID no. 15174648
  misc_feature (289)..(491): Pfam Name: Male sterility protein Pfam Description: Male sterility protein
  misc_feature (1)..(492): Homolog of NCBI NO: 22003090 NR Description: fatty acyl coA reductase [Triticum aestivum]
  misc_feature (1)..(493): Homolog of NCBI NO: 22003082 NR Description: fatty acyl coA reductase [Triticum aestivum]
  misc_feature (1)..(491): Homolog of NCBI NO: 35215152 NR Description: putative fatty acyl coA reductase
  misc_feature (113)..(491): Homolog of NCBI NO: 30689818 NR Description: male sterility 2-related protein [Arabidopsis
  misc_feature (7)..(493): Homolog of NCBI NO: 11357157 NR Description: acyl CoA reductase-protein - Arabidopsis thaliana
  misc_feature (1)..(493): Homolog of NCBI NO: 15242260 NR Description: male sterility 2-related protein (emb|CAA68191.1)
  misc_feature (27)..(491): Homolog of NCBI NO: 7487952 NR Description: male sterility protein 2 homolog T16L1.280 -
  misc_feature (1)..(491): Homolog of NCBI NO: 25354587 NR Description: male sterility 2-like protein [imported] -
  misc_feature (1)..(491): Homolog of NCBI NO: 16323107 NR Description: AT4g33790/T16L1_280 [Arabidopsis thaliana]
  misc_feature (2)..(492): Homolog of NCBI NO: 5020215 NR Description: acyl CoA reductase [Simmondsia chinensis]
MELGSILHFLQDKNILITGATGFLAKVLLEKILRVQPNVKKLYLLLRAADAKSATHRLNNEIIGKDLFRVLKEKLGANFNSFVSKKLTLVPGDISREDLGLEDSILREEIYDQTDVIINLAATTNFDERYDISLGLNTFGVKYVINFAKKCTKLEVLVHVSTAYVCGEGGREGLILEKPYHLGDSLNGVSGLDINAEEKVVRDKLSELQQLGATEKEIKEVMKDLGISRAKLYGWPNTYVFTKAMGEMLVEQLKGNLSVVTIRPTIVTSTFKEPFPGWAEGVRTIDSLAVTYGKGKLTCFLGDLKAIVDAIPADMVVNAILVAMVAHANHPSDDVIYHVGSSVRRPLRYGNLQEYGFRYFTAKPCINKDGRPVKVGKVTVLSNMDSFRRYMFIRYLLVLKGLELANTAFCQYFQGTYLNLNRKIQIVMRLVDLYKPYLFFKAAFDDMNTEKLRMAARQGGVETDLFYFDPELIDWEDYFLNIHLPGVVKYILK

SEQ ID NO: 54502 - protein, 272 aa, Glycine max
  peptide (1)..(272): Ceres Seq. ID no. 15174649
  misc_feature (68)..(270): Pfam Name: Male sterility protein Pfam Description: Male sterility protein
  misc_feature (1)..(271): Homolog of NCBI NO: 22003090 NR Description: fatty acyl coA reductase [Triticum aestivum]
  misc_feature (1)..(272): Homolog of NCBI NO: 22003082 NR Description: fatty acyl coA reductase [Triticum aestivum]
  misc_feature (1)..(270): Homolog of NCBI NO: 35215152 NR Description: putative fatty acyl coA reductase
  misc_feature (1)..(270): Homolog of NCBI NO: 30689818 NR Description: male sterility 2-related protein [Arabidopsis
  misc_feature (1)..(272): Homolog of NCBI NO: 11357157 NR Description: acyl CoA reductase-protein - Arabidopsis thaliana
  misc_feature (1)..(272): Homolog of NCBI NO: 15242260 NR Description: male sterility 2-related protein (emb|CAA68191.1)
  misc_feature (1)..(270): Homolog of NCBI NO: 7487952 NR Description: male sterility protein 2 homolog T16L1.280 -
  misc_feature (1)..(270): Homolog of NCBI NO: 25354587 NR Description: male sterility 2-like protein [imported] -
  misc_feature (1)..(270): Homolog of NCBI NO: 16323107 NR Description: AT4g33790/T16L1_280 [Arabidopsis thaliana]
  misc_feature (1)..(271): Homolog of NCBI NO: 5020215 NR Description: acyl CoA reductase [Simmondsia chinensis]
MKDLGISRAKLYGWPNTYVFTKAMGEMLVEQLKGNLSVVTIRPTIVTSTFKEPFPGWAEGVRTIDSLAVTYGKGKLTCFLGDLKAIVDAIPADMVVNAILVAMVAHANHPSDDVIYHVGSSVRRPLRYGNLQEYGFRYFTAKPCINKDGRPVKVGKVTVLSNMDSFRRYMFIRYLLVLKGLELANTAFCQYFQGTYLNLNRKIQIVMRLVDLYKPYLFFKAAFDDMNTEKLRMAARQGGVETDLFYFDPELIDWEDYFLNIHLPGVVKYILK

SEQ ID NO: 54503 - DNA, 769 bp, Glycine max
  misc_feature (1)..(769): Ceres Seq. ID no. 15169720
atatatacatttagacttggaaagtatcaaattgacttgtaaacaaacgcatgcaattaatctattttgactagttccttctaaaatctttacggtttttttttcccacacaaatttgaaatttcttcttatttataatctttttttaatgacaaaatgattcaaatattatgttctgtggtgtcctaaaagtttgaaaatccaattgttttcatggtattcagagaatcctccagaaggaaaagcaaagaatggaaaattcacataatgcaaatacaaagttgctgcatgagtgtgcaatccttcagaagaggcttcgggagtgtagtgtaaatttccttgttgaagaggaagataaactaaatatcgacactttgccatctgatgctctggatttattagcaacatcagataatcggattggtctcttgcttgcagaggcacagctcttggcacaagatgtagaagatactgttgttgctgttgaagagacccgggatataaccacagacaatactgggaaaactcatgatgaattgagaaagatgctggcacatatgtttgttgacaatgccagtttaaggaaacaaatcaattctgttattcgttgtgctctaaatgcaaatatcaattccgaagaggacggtgaagaaatccatttgcaaaaaactgtcctaagcaagttcttagaaagatagcttgttcaatactacaccgtgtatctattattgagttacttctctgttaattatggtctataaatttttgc

SEQ ID NO: 54504 - protein, 148 aa, Glycine max
  peptide (1)..(148): Ceres Seq. ID no. 15169721
  misc_feature (41)..(134): Homolog of NCBI NO: 2864627 NR Description: hypothetical protein [Arabidopsis thaliana]
  misc_feature (1)..(134): Homolog of NCBI NO: 7485370 NR Description: hypothetical protein F10N7.30 - Arabidopsis
  misc_feature (1)..(134): Homolog of NCBI NO: 18417953 NR Description: expressed protein [Arabidopsis thaliana]
  misc_feature (1)..(134): Homolog of NCBI NO: 16604601 NR Description: unknown protein [Arabidopsis thaliana]
  misc_feature (1)..(148): Homolog of NCBI NO: 15233233 NR Description: expressed protein [Arabidopsis thaliana]
MENSHNANTKLLHECAILQKRLRECSVNFLVEEEDKLNIDTLPSDALDLLATSDNRIGLLLAEAQLLAQDVEDTVVAVEETRDITTDNTGKTHDELRKMLAHMFVDNASLRKQINSVIRCALNANINSEEDGEEIHLQKTVLSKFLER

SEQ ID NO: 54505 - DNA, 1344 bp, Glycine max
  misc_feature (1)..(1344): Ceres Seq. ID no. 15171884
acacttcaaattcaccgccacttctgccgccctccataagctccatcgcgcctcttttcctctccgtctccgacctccgatcctccctcgccgagacatcctccgacggtggcagaatcgtaattttccgcggcaccgtcgacacacctcgaaaaccttgagacccggtgtcttggtttctcgcaagtccagcgataacagcgtcgttcttcaaagaactcaaacgtgtttgtccactgttttctgcttcctatttggcagagtttttatctgatctctggagaaatatggctgccaatttctggacatcatctcattacaagcatcttctggatcaggaagatgtggatgtggtgaatacactcgacaaggaaaagggtattacactggaggattttaagcttattaagatgcacatggctaattatattttgaaattggctcaacaagtaaaagtgaggcagagggttgtggccacagcagttacatacatgaggcgtgtttacaccaggaagagtatggctgaatatgatccacgcttggtagctccaacatgcttgtacctggcatcaaaagcagaagaaagcacagtgcaggctcggcttcttgtattttacattaaaaaattatacagtgatgacaagtatagatatgaaatcaaggacatacttgaaatggaaatgaagattttagaagctcttaattattacctggttgtataccatccataccgttcactagttccgttgcttcaggatgcaggtctgaatgatctaaacatgactcaactaacttgggggcttgtaaatgacacatacaagatggacctaattcttgtacatcctccgcatttgattgctttagcttgcatatacattgctagtgtgctcagggagaaagacaccactgcttggtttgaagaacttcgtgttgatatgaatgtggttaaaaacatatcaatggagatacttgatttttatgaaagcaatagaatgttcactgatgagagaatcaatgctgctcttcagaagctgagcctgagaccctagaacttactgtagatgactcaacgctgaatatgtggaatgaagttaatgctatggtgatttgtctgaatgatttttctgggtcaatgacatgttttacggtagaacactatctaaatgtatccaaaagtaagggcacgtaatattgggggtcaattcaaagtgtcctattaaagagcaaaaggaggatgaaaaaaggtgattctcggtgaggaccagatagactcccacctgattcatagaatcttttgtttttatctatttattgtcataaatcaaagtgtctacaatttttttg

SEQ ID NO: 54506 - protein, 253 aa, Glycine max
  peptide (1)..(253): Ceres Seq. ID no. 15171885
  misc_feature (4)..(143): Pfam Name: Cyclin, N-terminal domain Pfam Description: Cyclin, N-terminal domain
  misc_feature (1)..(206): Homolog of NCBI NO: 13560304 NR Description: C-type cyclin-like Fic1p [Gibberella moniliformis]
  misc_feature (1)..(241): Homolog of NCBI NO: 11042056 NR Description: dJ199J3.4 (cyclin C) [Homo sapiens]
  misc_feature (1)..(241): Homolog of NCBI NO: 1705767 NR Description: Cyclin C
  misc_feature (1)..(241): Homolog of NCBI NO: 38382739 NR Description: Unknown (protein for IMAGE:6391891) [Mus musculus]
  misc_feature (1)..(241): Homolog of NCBI NO: 34783612 NR Description: Unknown (protein for IMAGE:6165083) [Homo sapiens]
  misc_feature (1)..(241): Homolog of NCBI NO: 4885119 NR Description: cyclin C [Homo sapiens]
  misc_feature (1)..(252): Homolog of NCBI NO: 28828497 NR Description: similar to Mus musculus (Mouse). 16 days neonate cDNA, RIKEN full-length enriched library, clone:A130067E11
  misc_feature (1)..(249): Homolog of NCBI NO: 3334144 NR Description: G1/S-SPECIFIC CYCLIN C-TYPE
  misc_feature (1)..(252): Homolog of NCBI NO: 15239665 NR Description: cyclin family [Arabidopsis thaliana]
  misc_feature (1)..(253): Homolog of NCBI NO: 15239664 NR Description: cyclin family [Arabidopsis thaliana]
MAANFWTSSHYKHLLDQEDVDVVNTLDKEKGITLEDFKLIKMHMANYILKLAQQVKVRQRVVATAVTYMRRVYTRKSMAEYDPRLVAPTCLYLASKAEESTVQARLLVFYIKKLYSDDKYRYEIKDILEMEMKILEALNYYLVVYHPYRSLVPLLQDAGLNDLNMTQLTWGLVNDTYKMDLILVHPPHLIALACIYIASVLREKDTTAWFEELRVDMNVVKNISMEILDFYESNRMFTDERINAALQKLSLRP

SEQ ID NO: 54507 - protein, 212 aa, Glycine max
  peptide (1)..(212): Ceres Seq. ID no. 15171886
  misc_feature (1)..(102): Pfam Name: Cyclin, N-terminal domain Pfam Description: Cyclin, N-terminal domain
  misc_feature (1)..(165): Homolog of NCBI NO: 13560304 NR Description: C-type cyclin-like Fic1p [Gibberella moniliformis]
  misc_feature (1)..(200): Homolog of NCBI NO: 11042056 NR Description: dJ199J3.4 (cyclin C) [Homo sapiens]
  misc_feature (1)..(200): Homolog of NCBI NO: 1705767 NR Description: Cyclin C
  misc_feature (1)..(200): Homolog of NCBI NO: 38382739 NR Description: Unknown (protein for IMAGE:6391891) [Mus musculus]
  misc_feature (1)..(200): Homolog of NCBI NO: 34783612 NR Description: Unknown (protein for IMAGE:6165083) [Homo sapiens]
  misc_feature (1)..(200): Homolog of NCBI NO: 4885119 NR Description: cyclin C [Homo sapiens]
  misc_feature (1)..(211): Homolog of NCBI NO: 28828497 NR Description: similar to Mus musculus (Mouse). 16 days neonate cDNA, RIKEN full-length enriched library, clone:A130067E11
  misc_feature (1)..(208): Homolog of NCBI NO: 3334144 NR Description: G1/S-SPECIFIC CYCLIN C-TYPE
  misc_feature (1)..(211): Homolog of NCBI NO: 15239665 NR Description: cyclin family [Arabidopsis thaliana]
  misc_feature (1)..(212): Homolog of NCBI NO: 15239664 NR Description: cyclin family [Arabidopsis thaliana]
MHMANYILKLAQQVKVRQRVVATAVTYMRRVYTRKSMAEYDPRLVAPTCLYLASKAEESTVQARLLVFYIKKLYSDDKYRYEIKDILEMEMKILEALNYYLVVYHPYRSLVPLLQDAGLNDLNMTQLTWGLVNDTYKMDLILVHPPHLIALACIYIASVLREKDTTAWFEELRVDMNVVKNISMEILDFYESNRMFTDERINAALQKLSLRP

SEQ ID NO: 54508 - protein, 210 aa, Glycine max
  peptide (1)..(210): Ceres Seq. ID no. 15171887
  misc_feature (1)..(100): Pfam Name: Cyclin, N-terminal domain Pfam Description: Cyclin, N-terminal domain
  misc_feature (1)..(163): Homolog of NCBI NO: 13560304 NR Description: C-type cyclin-like Fic1p [Gibberella moniliformis]
  misc_feature (1)..(198): Homolog of NCBI NO: 11042056 NR Description: dJ199J3.4 (cyclin C) [Homo sapiens]
  misc_feature (1)..(198): Homolog of NCBI NO: 1705767 NR Description: Cyclin C
  misc_feature (1)..(198): Homolog of NCBI NO: 38382739 NR Description: Unknown (protein for IMAGE:6391891) [Mus musculus]
  misc_feature (1)..(198): Homolog of NCBI NO: 34783612 NR Description: Unknown (protein for IMAGE:6165083) [Homo sapiens]
  misc_feature (1)..(198): Homolog of NCBI NO: 4885119 NR Description: cyclin C [Homo sapiens]
  misc_feature (1)..(209): Homolog of NCBI NO: 28828497 NR Description: similar to Mus musculus (Mouse). 16 days neonate cDNA, RIKEN full-length enriched library, clone:A130067E11
  misc_feature (1)..(206): Homolog of NCBI NO: 3334144 NR Description: G1/S-SPECIFIC CYCLIN C-TYPE
  misc_feature (1)..(209): Homolog of NCBI NO: 15239665 NR Description: cyclin family [Arabidopsis thaliana]
  misc_feature (1)..(210): Homolog of NCBI NO: 15239664 NR Description: cyclin family [Arabidopsis thaliana]
MANYILKLAQQVKVRQRVVATAVTYMRRVYTRKSMAEYDPRLVAPTCLYLASKAEESTVQARLLVFYIKKLYSDDKYRYEIKDILEMEMKILEALNYYLVVYHPYRSLVPLLQDAGLNDLNMTQLTWGLVNDTYKMDLILVHPPHLIALACIYIASVLREKDTTAWFEELRVDMNVVKNISMEILDFYESNRMFTDERINAALQKLSLRP

SEQ ID NO: 54509 - DNA, 1418 bp, Glycine max
  misc_feature (1)..(1418): Ceres Seq. ID no. 15176353
atttgaaaaataaacaagaagagcaagagagtaaagcagcagaaggggtgaagatagggatggcgggcatgtctggatgtagttgccgttggcagtgggcggaggcgaaatccatgggagtgggctgttggttcccttcctcaactaccaaaaggagtttccggcctgtgattgtttctgtttctgctatctccgataataactctcactcttacactagcagcggaagaaagctagaagaagaaggcatcaaagggtcaggaactaccgccagagatcgcaggttgcttagaattcgccaagagaaacgacagcgggaatacgacctccttaacaactaccctgcttgggcaaaagtcctggaaaacgcttgcaaagacgatgctgaactccgtgccgttctcggagatagcattggcaaccccgaactcatgaggaaacgagtcgaagatagggtgagaaagaagggtagagactttcaaaagtctaaaacaggatccgtccttgctttcaaagtcaccttcagagacttcaatccacttgattcatatatctggtttgaattgtttggatcaccatcagatcgggatgttaatctaattggtaatgttattcaatcatggtatgtcatgggtcgtcttggtgcctttaattcttcaaatttgcagctggcaaattcatcagtggagtatgatcctctatatgatgcagataaaggtttcaaagtgatgccgtcatctttccatgatatcagtgatattgagttccaggaaaactggggacgtgtttggtattagctctagaactcgactctttaaaactaaaataaaaaacttgttttatgaccttaaaatgcacggaggttaaaaatattgactgataaagataaatttaaactataataagattttttaaaataagtttatgcaataaaaattcaatattaaaagtattaaattcgctgtaaaactcgtctaattagatatcgaaaagttgagaagttttctttaatctcacgaagcttttagtatctaaaaggccgtggcatcttttaaagaagagtatagacttaataagtttctatacggacaatcactaactaataaacaatgccatttacttaaatacatgaatgtagaagaatatgaaatcataatagggtatatatttttttaaataaaagttctctactaatttgatatattgtagaatattcaccgtataatttataagctgtcattaaaaaatggttaatttctcatgttgagaattatgataaattcacaaaaaataatacgaatttgcataaactctaaacaatccaaatgttttccagcaaaatttctatcaaaagacaaagttcaaaattagttacataatcttttattgacaaaaaaaaaggtaatgtatactcaaac

SEQ ID NO: 54510 - protein, 264 aa, Glycine max
  peptide (1)..(264): Ceres Seq. ID no. 15176354
  misc_feature (171)..(264): Homolog of NCBI NO: 16329966 NR Description: unknown protein [Synechocystis sp. PCC 6803]
  misc_feature (172)..(263): Homolog of NCBI NO: 33865689 NR Description: conserved hypothetical protein [Synechococcus sp.
  misc_feature (55)..(263): Homolog of NCBI NO: 34914062 NR Description: B1144D11.25 [Oryza sativa (japonica
  misc_feature (127)..(263): Homolog of NCBI NO: 15233566 NR Description: hypothetical protein [Arabidopsis thaliana]
  misc_feature (23)..(120): Homolog of NCBI NO: 22326661 NR Description: expressed protein [Arabidopsis thaliana]
  misc_feature (118)..(263): Homolog of NCBI NO: 22326661 NR Description: expressed protein [Arabidopsis thaliana]
  misc_feature (45)..(263): Homolog of NCBI NO: 10178282 NR Description: putative protein [Arabidopsis thaliana]
LKNKQEEQESKAAEGVKIGMAGMSGCSCRWQWAEAKSMGVGCWFPSSTTKRSFRPVIVSVSAISDNNSHSYTSSGRKLEEEGIKGSGTTARDRRLLRIRQEKRQREYDLLNNYPAWAKVLENACKDDAELRAVLGDSIGNPELMRKRVEDRVRKKGRDFQKSKTGSVLAFKVTFRDFNPLDSYIWFELFGSPSDRDVNLIGNVIQSWYVMGRLGAFNSSNLQLANSSVEYDPLYDADKGFKVMPSSFHDISDIEFQENWGRVWY

SEQ ID NO: 54511 - protein, 245 aa, Glycine max
  peptide (1)..(245): Ceres Seq. ID no. 15176355
  misc_feature (152)..(245): Homolog of NCBI NO: 16329966 NR Description: unknown protein [Synechocystis sp. PCC 6803]
  misc_feature (153)..(244): Homolog of NCBI NO: 33865689 NR Description: conserved hypothetical protein [Synechococcus sp.
  misc_feature (36)..(244): Homolog of NCBI NO: 34914062 NR Description: B1144D11.25 [Oryza sativa (japonica
  misc_feature (108)..(244): Homolog of NCBI NO: 15233566 NR Description: hypothetical protein [Arabidopsis thaliana]
  misc_feature (4)..(101): Homolog of NCBI NO: 22326661 NR Description: expressed protein [Arabidopsis thaliana]
  misc_feature (99)..(244): Homolog of NCBI NO: 22326661 NR Description: expressed protein [Arabidopsis thaliana]
  misc_feature (26)..(244): Homolog of NCBI NO: 10178282 NR Description: putative protein [Arabidopsis thaliana]
MAGMSGCSCRWQWAEAKSMGVGCWFPSSTTKRSFRPVIVSVSAISDNNSHSYTSSGRKLEEEGIKGSGTTARDRRLLRIRQEKRQREYDLLNNYPAWAKVLENACKDDAELRAVLGDSIGNPELMRKRVEDRVRKKGRDFQKSKTGSVLAFKVTFRDFNPLDSYIWFELFGSPSDRDVNLIGNVIQSWYVMGRLGAFNSSNLQLANSSVEYDPLYDADKGFKVMPSSFHDISDIEFQENWGRVWY

SEQ ID NO: 54512 - protein, 242 aa, Glycine max
  peptide (1)..(242): Ceres Seq. ID no. 15176356
  misc_feature (149)..(242): Homolog of NCBI NO: 16329966 NR Description: unknown protein [Synechocystis sp. PCC 6803]
  misc_feature (150)..(241): Homolog of NCBI NO: 33865689 NR Description: conserved hypothetical protein [Synechococcus sp.
  misc_feature (33)..(241): Homolog of NCBI NO: 34914062 NR Description: B1144D11.25 [Oryza sativa (japonica
  misc_feature (105)..(241): Homolog of NCBI NO: 15233566 NR Description: hypothetical protein [Arabidopsis thaliana]
  misc_feature (1)..(98): Homolog of NCBI NO: 22326661 NR Description: expressed protein [Arabidopsis thaliana]
  misc_feature (96)..(241): Homolog of NCBI NO: 22326661 NR Description: expressed protein [Arabidopsis thaliana]
  misc_feature (23)..(241): Homolog of NCBI NO: 10178282 NR Description: putative protein [Arabidopsis thaliana]
MSGCSCRWQWAEAKSMGVGCWFPSSTTKRSFRPVIVSVSAISDNNSHSYTSSGRKLEEEGIKGSGTTARDRRLLRIRQEKRQREYDLLNNYPAWAKVLENACKDDAELRAVLGDSIGNPELMRKRVEDRVRKKGRDFQKSKTGSVLAFKVTFRDFNPLDSYIWFELFGSPSDRDVNLIGNVIQSWYVMGRLGAFNSSNLQLANSSVEYDPLYDADKGFKVMPSSFHDISDIEFQENWGRVWY

SEQ ID NO: 54513 - DNA, 1630 bp, Glycine max
  misc_feature (1)..(1630): Ceres Seq. ID no. 15176579
gaaatttatactgactttagatgctcttcaatcattgttatttctatcagcagcagcatctgttagtgggttgaaaacgttagagaggaactttgcaacaagcatggagacagcctcagactatggagcattcacagagaaattcactttaccaccaaattctgcaccagctcttcctctcaaatcactcacctttgcagtgaaagagattttcgacacggaaggatacgtgaccggcttcgggaatcctgactgggcaaggactcatccggtggctacctctactgctccaacagctctggctctcctcagagcaggtgccacttgtgttggtaaaactgtcatggatgaaatggcttacagtataaatggagagaatatacattatggcacacctagaaatccttgtgcaccagaccgggttcctggaggatcttctagtggctctgctgttgcagttggtgcaaagcttgtggatttctcattaggaactgatactggaggaagtgtaagagtacctgcatcatactgtgggatttttggttttcgtccttctcatggtgctgtctcagaatcaggagtaatccctatgtcgcaaagttttgataccgtgggatggtttgccagggatccaatgattttgagcagagtaggaggtgtaattctacagttaccagatgtagctccaccaattagacctacttccattatcattgcagaggactgtttccagctttcaagcactccatttgatgtagttacaggaactgtcatcaaagcggtagagaagttatatggaggggatgtattgaagcctgaaatccttggagactatgtgaaaaccaatgttccaagtttgaaacatttcatgagtaaagataatacagaccaaatatataacattccatcactggctgcactttcaagtgccatgcggttgcttcaaaggtttgaattcaagaataaccatggtgaatggatcagtgcagttaaacctgatttaggtcctggaatatcagaacgtgtatcagatgccctaaggacaacgggggagaacattgatatctgttattctataaaaagggaactacacgatgctctttcggctcttcttggggactttggtgttctaatgatccccacagttccaggtcctcccccaaaactacaaacaaatacatccgacttagaaatttttcgtgcaagggcttttagcctgctgtccattgctggagtatcaggattttgtcaggtaagcataccgctagggatgtataataaccttcccctatcaatttctctggtggccagacatggtgcagataaatttttgcttcaccttgttgagagtctttatgacagcattgaagatagaaagcagcatatcatagagcacaaactttaatctgactgcaaggatgtagatatgctttgagtatgcctactatgccaaaagctgggagagaagcgaattatggacataaatcaaagaagggatattgtataaaggaaatttttgctgatctatatcctgtttctttcagatattatgagttcaattattcattaaatcatatcattttgattgtgctagcttgggtacgaaagcaaaaaagccacattggaattc

SEQ ID NO: 54514 - protein, 467 aa, Glycine max
  peptide (1)..(467): Ceres Seq. ID no. 15176580
  misc_feature (43)..(445): Pfam Name: Amidase Pfam Description: Amidase
  misc_feature (62)..(236): Homolog of NCBI NO: 23109442 NR Description: hypothetical protein [Novosphingobium
  misc_feature (35)..(301): Homolog of NCBI NO: 25402505 NR Description: hypothetical protein [imported] - Arabidopsis
  misc_feature (38)..(371): Homolog of NCBI NO: 38344119 NR Description: OSJNBb0050O03.16 [Oryza sativa (japonica
  misc_feature (40)..(458): Homolog of NCBI NO: 13937285 NR Description: chloroplast protein-translocon-like protein
  misc_feature (15)..(458): Homolog of NCBI NO: 30682691 NR Description: subunit of TOC complex -related [Arabidopsis
  misc_feature (15)..(458): Homolog of NCBI NO: 9955529 NR Description: putative subunit of TOC complex [Arabidopsis
  misc_feature (13)..(466): Homolog of NCBI NO: 30684733 NR Description: chloroplast outer membrane translocon subunit,
  misc_feature (11)..(458): Homolog of NCBI NO: 7453538 NR Description: Toc64 [Pisum sativum]
  misc_feature (40)..(457): Homolog of NCBI NO: 32451277 NR Description: OSJNBa0020P07.1 [Oryza sativa (japonica
  misc_feature (35)..(451): Homolog of NCBI NO: 18390964 NR Description: amidase [Arabidopsis thaliana]
KFILTLDALQSLLFLSAAASVSGLKTLERNFATSMETASDYGAFTEKFTLPPNSAPALPLKSLTFAVKEIFDTEGYVTGFGNPDWARTHPVATSTAPTALALLRAGATCVGKTVMDEMAYSINGENIHYGTPRNPCAPDRVPGGSSSGSAVAVGAKLVDFSLGTDTGGSVRVPASYCGIFGFRPSHGAVSESGVIPMSQSFDTVGWFARDPMILSRVGGVILQLPDVAPPIRPTSIIIAEDCFQLSSTPFDVVTGTVIKAVEKLYGGDVLKPEILGDYVKTNVPSLKHFMSKDNTDQIYNIPSLAALSSAMRLLQRFEFKNNHGEWISAVKPDLGPGISERVSDALRTTGENIDICYSIKRELHDALSALLGDFGVLMIPTVPGPPPKLQTNTSDLEIFRARAFSLLSIAGVSGFCQVSIPLGMYNNLPLSISLVARHGADKFLLHLVESLYDSIEDRKQHIIEHKL

SEQ ID NO: 54515 - protein, 433 aa, Glycine max
  peptide (1)..(433): Ceres Seq. ID no. 15176581
  misc_feature (9)..(411): Pfam Name: Amidase Pfam Description: Amidase
  misc_feature (28)..(202): Homolog of NCBI NO: 23109442 NR Description: hypothetical protein [Novosphingobium
  misc_feature (1)..(267): Homolog of NCBI NO: 25402505 NR Description: hypothetical protein [imported] - Arabidopsis
  misc_feature (4)..(337): Homolog of NCBI NO: 38344119 NR Description: OSJNBb0050O03.16 [Oryza sativa (japonica
  misc_feature (6)..(424): Homolog of NCBI NO: 13937285 NR Description: chloroplast protein-translocon-like protein
  misc_feature (1)..(424): Homolog of NCBI NO: 30682691 NR Description: subunit of TOC complex -related [Arabidopsis
  misc_feature (1)..(424): Homolog of NCBI NO: 9955529 NR Description: putative subunit of TOC complex [Arabidopsis
  misc_feature (1)..(432): Homolog of NCBI NO: 30684733 NR Description: chloroplast outer membrane translocon subunit,
  misc_feature (1)..(424): Homolog of NCBI NO: 7453538 NR Description: Toc64 [Pisum sativum]
  misc_feature (6)..(423): Homolog of NCBI NO: 32451277 NR Description: OSJNBa0020P07.1 [Oryza sativa (japonica
  misc_feature (1)..(417): Homolog of NCBI NO: 18390964 NR Description: amidase [Arabidopsis thaliana]
METASDYGAFTEKFTLPPNSAPALPLKSLTFAVKEIFDTEGYVTGFGNPDWARTHPVATSTAPTALALLRAGATCVGKTVMDEMAYSINGENIHYGTPRNPCAPDRVPGGSSSGSAVAVGAKLVDFSLGTDTGGSVRVPASYCGIFGFRPSHGAVSESGVIPMSQSFDTVGWFARDPMILSRVGGVILQLPDVAPPIRPTSIIIAEDCFQLSSTPFDVVTGTVIKAVEKLYGGDVLKPEILGDYVKTNVPSLKHFMSKDNTDQIYNIPSLAALSSAMRLLQRFEFKNNHGEWISAVKPDLGPGISERVSDALRTTGENIDICYSIKRELHDALSALLGDFGVLMIPTVPGPPPKLQTNTSDLEIFRARAFSLLSIAGVSGFCQVSIPLGMYNNLPLSISLVARHGADKFLLHLVESLYDSIEDRKQHIIEHKL

SEQ ID NO: 54516 - protein, 353 aa, Glycine max
  peptide (1)..(353): Ceres Seq. ID no. 15176582
  misc_feature (1)..(331): Pfam Name: Amidase Pfam Description: Amidase
  misc_feature (1)..(122): Homolog of NCBI NO: 23109442 NR Description: hypothetical protein [Novosphingobium
  misc_feature (1)..(187): Homolog of NCBI NO: 25402505 NR Description: hypothetical protein [imported] - Arabidopsis
  misc_feature (1)..(257): Homolog of NCBI NO: 38344119 NR Description: OSJNBb0050O03.16 [Oryza sativa (japonica
  misc_feature (1)..(344): Homolog of NCBI NO: 13937285 NR Description: chloroplast protein-translocon-like protein
  misc_feature (1)..(344): Homolog of NCBI NO: 30682691 NR Description: subunit of TOC complex -related [Arabidopsis
  misc_feature (1)..(344): Homolog of NCBI NO: 9955529 NR Description: putative subunit of TOC complex [Arabidopsis
  misc_feature (1)..(352): Homolog of NCBI NO: 30684733 NR Description: chloroplast outer membrane translocon subunit,
  misc_feature (1)..(344): Homolog of NCBI NO: 7453538 NR Description: Toc64 [Pisum sativum]
  misc_feature (1)..(343): Homolog of NCBI NO: 32451277 NR Description: OSJNBa0020P07.1 [Oryza sativa (japonica
  misc_feature (1)..(337): Homolog of NCBI NO: 18390964 NR Description: amidase [Arabidopsis thaliana]
MDEMAYSINGENIHYGTPRNPCAPDRVPGGSSSGSAVAVGAKLVDFSLGTDTGGSVRVPASYCGIFGFRPSHGAVSESGVIPMSQSFDTVGWFARDPMILSRVGGVILQLPDVAPPIRPTSIIIAEDCFQLSSTPFDVVTGTVIKAVEKLYGGDVLKPEILGDYVKTNVPSLKHFMSKDNTDQIYNIPSLAALSSAMRLLQRFEFKNNHGEWISAVKPDLGPGISERVSDALRTTGENIDICYSIKRELHDALSALLGDFGVLMIPTVPGPPPKLQTNTSDLEIFRARAFSLLSIAGVSGFCQVSIPLGMYNNLPLSISLVARHGADKFLLHLVESLYDSIEDRKQHIIEHKL

SEQ ID NO: 54517 - DNA, 1590 bp, Glycine max
  misc_feature (1)..(1590): Ceres Seq. ID no. 14316184
ttttttaccatggagtgctcagatactaagcctgtgaaacccaactcgaataatatatcggaaatggtgtgcaagtttgccaaagtttgtaaattgaagtctattggggtgttctcttccgaaatccccaatctccctcacttgcaaagatccatttacaatgagacccttctgagtgaagacagcagtgaagagagcagatgctatgaccagaaagtgcatccccaccccactgaagttcctgccaaagaaaatgcttgtgctggtttggaggtcatgaggaagctgtttgatgctgtttcggcgctgaaattggcataccttcagcttcagcaggctcatatcccttatgaccctcagaagattgttgcagctgatgaccttgttgttgctgagcttgagaagctttgcaagttcaagcgcgaatatgtgcagaaacattgcaagaaaacaaggttcaatgccgctcgttcttctctcttgatggctgaaattgtggccaaagaggcacttttggggaagctgaagtctcagaacagtgccaaagattctgatattcttcagttgtggcgggagctgcaagatttggagatggggaatagaaatctgagtgagaagatcaagcagataagtttggagaaaaggagagtaggtgttttgagtgttactaagtttcaggatgtcttcaaggctgcttcaaagtccattcatgattttgcaaaaccgttgattagcttgatgaaagcttcgggttgggaccttgatagggctgcaaactccattgagaatggtgctgtttattccaaaaggtgtgacaagaagtatgcttttgaggcctacattgcgcgcagaatgtttcatgggatcgctttaacatcttatgatgtgagtgatattatgaagtttgatgacccttttgatgcactgatggagaatccacattctgattttgccaaattttgtcaagcaaagtaccttcttgttgtgcatccgaaaattgaagagtcattctttggcaatttggatcacagaacattcgtaatgagtggcaagcaccctagaaccaagttctatcagttgtttgctaaaatggcaaaatgggtttgggttttacttggatctgctgtgtcaatagatcctgaagcaaccttgttttcggtgagcagaggaagtgtgttttccagcttgtacatggaatctgttgaggaagaaaaggagagtgcaatactttcagatgaagaaagagtgacatataaagttcagttcatgatcatgccagggtttcaaattggaaagatggtggtgaagtctcgagtttatgtctcgaaacattctttaagctaaatggtggaccttttaactggtaattcagctaacagaaccacataatttttgtactagagttcttttaatggtaccttagctagtcaagataaccatggctactaggttatgctagaacctcaatccaccatctctatatttgtaatctttcctattaatgtgagacctgggatatgtagtcgttacagtggtcttatatttctttctttctgcactgtatttatttttaacctttcaaaaaaaaat

SEQ ID NO: 54518 - protein, 447 aa, Glycine max
  peptide (1)..(447): Ceres Seq. ID no. 14316185
  misc_feature (95)..(207): Pfam Name: Plant protein of unknown function (DUF641) Pfam Description: Plant protein of unknown function (DUF641)
  misc_feature (89)..(297): Homolog of NCBI NO: 15219282 NR Description: expressed protein [Arabidopsis thaliana]
  misc_feature (305)..(443): Homolog of NCBI NO: 15231944 NR Description: expressed protein [Arabidopsis thaliana]
  misc_feature (10)..(291): Homolog of NCBI NO: 15231944 NR Description: expressed protein [Arabidopsis thaliana]
  misc_feature (305)..(443): Homolog of NCBI NO: 8777470 NR Description: gb|AAB82637.1~gene_id:K15M2.1~similar to unknown
  misc_feature (4)..(291): Homolog of NCBI NO: 8777470 NR Description: gb|AAB82637.1~gene_id:K15M2.1~similar to unknown
  misc_feature (79)..(401): Homolog of NCBI NO: 15235221 NR Description: expressed protein [Arabidopsis thaliana]
  misc_feature (49)..(350): Homolog of NCBI NO: 15227741 NR Description: MYB family transcription factor -related
  misc_feature (4)..(442): Homolog of NCBI NO: 34907852 NR Description: P0031D02.13 [Oryza sativa (japonica
  misc_feature (300)..(442): Homolog of NCBI NO: 15225441 NR Description: expressed protein [Arabidopsis thaliana]
  misc_feature (58)..(297): Homolog of NCBI NO: 15225441 NR Description: expressed protein [Arabidopsis thaliana]
FFTMECSDTKPVKPNSNNISEMVCKFAKVCKLKSIGVFSSEIPNLPHLQRSIYNETLLSEDSSEESRCYDQKVHPHPTEVPAKENACAGLEVMRKLFDAVSALKLAYLQLQQAHIPYDPQKIVAADDLVVAELEKLCKFKREYVQKHCKKTRFNAARSSLLMAEIVAKEALLGKLKSQNSAKDSDILQLWRELQDLEMGNRNLSEKIKQISLEKRRVGVLSVTKFQDVFKAASKSIHDFAKPLISLMKASGWDLDRAANSIENGAVYSKRCDKKYAFEAYIARRMFHGIALTSYDVSDIMKFDDPFDALMENPHSDFAKFCQAKYLLVVHPKIEESFFGNLDHRTFVMSGKHPRTKFYQLFAKMAKWVWVLLGSAVSIDPEATLFSVSRGSVFSSLYMESVEEEKESAILSDEERVTYKVQFMIMPGFQIGKMVVKSRVYVSKHSLS

SEQ ID NO: 54519 - protein, 444 aa, Glycine max
  peptide (1)..(444): Ceres Seq. ID no. 14316186
  misc_feature (92)..(204): Pfam Name: Plant protein of unknown function (DUF641) Pfam Description: Plant protein of unknown function (DUF641)
  misc_feature (86)..(294): Homolog of NCBI NO: 15219282 NR Description: expressed protein [Arabidopsis thaliana]
  misc_feature (302)..(440): Homolog of NCBI NO: 15231944 NR Description: expressed protein [Arabidopsis thaliana]
  misc_feature (7)..(288): Homolog of NCBI NO: 15231944 NR Description: expressed protein [Arabidopsis thaliana]
  misc_feature (302)..(440): Homolog of NCBI NO: 8777470 NR Description: gb|AAB82637.1~gene_id:K15M2.1~similar to unknown
  misc_feature (1)..(288): Homolog of NCBI NO: 8777470 NR Description: gb|AAB82637.1~gene_id:K15M2.1~similar to unknown
  misc_feature (76)..(398): Homolog of NCBI NO: 15235221 NR Description: expressed protein [Arabidopsis thaliana]
  misc_feature (46)..(347): Homolog of NCBI NO: 15227741 NR Description: MYB family transcription factor -related
  misc_feature (1)..(439): Homolog of NCBI NO: 34907852 NR Description: P0031D02.13 [Oryza sativa (japonica
  misc_feature (297)..(439): Homolog of NCBI NO: 15225441 NR Description: expressed protein [Arabidopsis thaliana]
  misc_feature (55)..(294): Homolog of NCBI NO: 15225441 NR Description: expressed protein [Arabidopsis thaliana]
MECSDTKPVKPNSNNISEMVCKFAKVCKLKSIGVFSSEIPNLPHLQRSIYNETLLSEDSSEESRCYDQKVHPHPTEVPAKENACAGLEVMRKLFDAVSALKLAYLQLQQAHIPYDPQKIVAADDLVVAELEKLCKFKREYVQKHCKKTRFNAARSSLLMAEIVAKEALLGKLKSQNSAKDSDILQLWRELQDLEMGNRNLSEKIKQISLEKRRVGVLSVTKFQDVFKAASKSIHDFAKPLISLMKASGWDLDRAANSIENGAVYSKRCDKKYAFEAYIARRMFHGIALTSYDVSDIMKFDDPFDALMENPHSDFAKFCQAKYLLVVHPKIEESFFGNLDHRTFVMSGKHPRTKFYQLFAKMAKWVWVLLGSAVSIDPEATLFSVSRGSVFSSLYMESVEEEKESAILSDEERVTYKVQFMIMPGFQIGKMVVKSRVYVSKHSLS

SEQ ID NO: 54520 - protein, 426 aa, Glycine max
  peptide (1)..(426): Ceres Seq. ID no. 14316187
  misc_feature (74)..(186): Pfam Name: Plant protein of unknown function (DUF641) Pfam Description: Plant protein of unknown function (DUF641)
  misc_feature (68)..(276): Homolog of NCBI NO: 15219282 NR Description: expressed protein [Arabidopsis thaliana]
  misc_feature (284)..(422): Homolog of NCBI NO: 15231944 NR Description: expressed protein [Arabidopsis thaliana]
  misc_feature (1)..(270): Homolog of NCBI NO: 15231944 NR Description: expressed protein [Arabidopsis thaliana]
  misc_feature (284)..(422): Homolog of NCBI NO: 8777470 NR Description: gb|AAB82637.1~gene_id:K15M2.1~similar to unknown
  misc_feature (1)..(270): Homolog of NCBI NO: 8777470 NR Description: gb|AAB82637.1~gene_id:K15M2.1~similar to unknown
  misc_feature (58)..(380): Homolog of NCBI NO: 15235221 NR Description: expressed protein [Arabidopsis thaliana]
  misc_feature (28)..(329): Homolog of NCBI NO: 15227741 NR Description: MYB family transcription factor -related
  misc_feature (1)..(421): Homolog of NCBI NO: 34907852 NR Description: P0031D02.13 [Oryza sativa (japonica
  misc_feature (279)..(421): Homolog of NCBI NO: 15225441 NR Description: expressed protein [Arabidopsis thaliana]
  misc_feature (37)..(276): Homolog of NCBI NO: 15225441 NR Description: expressed protein [Arabidopsis thaliana]
MVCKFAKVCKLKSIGVFSSEIPNLPHLQRSIYNETLLSEDSSEESRCYDQKVHPHPTEVPAKENACAGLEVMRKLFDAVSALKLAYLQLQQAHIPYDPQKIVAADDLVVAELEKLCKFKREYVQKHCKKTRFNAARSSLLMAEIVAKEALLGKLKSQNSAKDSDILQLWRELQDLEMGNRNLSEKIKQISLEKRRVGVLSVTKFQDVFKAASKSIHDFAKPLISLMKASGWDLDRAANSIENGAVYSKRCDKKYAFEAYIARRMFHGIALTSYDVSDIMKFDDPFDALMENPHSDFAKFCQAKYLLVVHPKIEESFFGNLDHRTFVMSGKHPRTKFYQLFAKMAKWVWVLLGSAVSIDPEATLFSVSRGSVFSSLYMESVEEEKESAILSDEERVTYKVQFMIMPGFQIGKMVVKSRVYVSKHSLS

SEQ ID NO: 54521 - DNA, 1995 bp, Glycine max
  misc_feature (1)..(1995): Ceres Seq. ID no. 14303487
aatttgtctttgttcatcctctactgtgggaaaatgctttggaaccagttttgatgttgttaaagcttaatgtgggatatcccttttgtattattcacaggaaatatccatttgtttctttgccagtttatgttcagtgaaaaggctggcttgatgccactcccattggtagatgtcacatgaatactcagtactatcagtgccaacatttccatctttcttcttccagcctttgctttgtcttggttggtatagaagtgacaatccagccgcactcttaacgtggataatgatttcatttttgaatattgataacctagtcccctggagtagtgttaatattctttttggcagtgaacacacagtccactgtcaagttacctagttaatgaagtgaagggttataatttgatccaaaggaatctgccaaggtgcagatgatgtggagtttttatgttcttccttttggtaagtttcagttcttggaggagtcaaatgctgaactgcgttttaaggttggagtgtctattgattggatcagtatagttggatttggttcagagagttcttcaaggattcaagtgaccattcaatgctattggtttctatttactgcttgaggctgtcaagtaccccagtgccaccttatagtaatatgtggaattcttgtatatacactagttttgatgtgttctcctcttggagtagtgctgattggagctgcattaatcgattttgttgttgctgatttcaattggtctgcggcagtatagaagaaatcaacgatgcattggtgtttacctggcttgatggggtgactgaatatgcctttagaagttttaggattatttctaaatgtgttcctacatgcaggtccctaaagcttacttcctgcttctagatagttggtaatcttatctgagggtagctagtaccatgggagaagtggcagtaatgcactctgagcctctgcagttcgagtgcaatgacattactgtgaatatgactgagaaggaagtgtatcctccagaatcaaatgtggatcacttgcctggagaagaatcgagtcaatcaacagaccacaaaaatatcaattacttgcaagagaaaggatttatggaatatggatgtcagcattaccggagaagatgccgtattagggccccctgttgcaatgagatttttgattgccgccattgtcacaatgaggcaaaaaatgatatcaacattgatctgaagcttagacatgatattccacgacacgaagtcaaacaggtgatttgttcactttgtgggactgaacaagaggttcagcaaaactgtataaattgtggtgtttgtatgggaaaatacttctgtggaacatgcaagctttttgatgatgatatatctaagcagcagtaccattgctgtggctgtggaatttgcagaactggaggaagcgaaaatttcttccattgctacaagtgtggttgttgctactcaactcttctgaaaaacagtcacccttgtgtagaaggagcaatgcatcatgattgccctgtttgttttgagtatttgtttgaatcaagaaacgatgtcactgttatgccatgtggacatacgatccataagagctgcctgaatgaaatgagagaacatttccagtatgcatgccctctctgctcaaagtcagtctgtgacatgtcaaaggtttgggagaaatttgaccttgagattgctgctacacgaatgcctgagcaatatcaaaataaaatggtttggatcctgtgcaatgactgtggtaaaacttctcacgttcagttccattttgtggctcaaaagtgtccgaactgcaaatcctacaacacacgacaaacatgaggcggagcaggtggccacgattattcattggcttcatcaaaagccttcactcgagagctctcttgatgttgtcgtgacttgtgaaggcagtgaaaatagatgtgcatccattgggtacgtggatgtgcacgt

SEQ ID NO: 54522 - protein, 308 aa, Glycine max
  peptide (1)..(308): Ceres Seq. ID no. 14303488
  misc_feature (65)..(148): Pfam Name: CHY zinc finger Pfam Description: CHY zinc finger
  misc_feature (64)..(308): Homolog of NCBI NO: 13386058 NR Description: androgen receptor N-terminal-interacting protein
  misc_feature (42)..(307): Homolog of NCBI NO: 11358168 NR Description: hypothetical protein T20O10.70 - Arabidopsis
  misc_feature (42)..(307): Homolog of NCBI NO: 30695702 NR Description: expressed protein [Arabidopsis thaliana]
  misc_feature (42)..(307): Homolog of NCBI NO: 30102616 NR Description: At3g62970 [Arabidopsis thaliana]
  misc_feature (59)..(306): Homolog of NCBI NO: 15238890 NR Description: expressed protein [Arabidopsis thaliana]
  misc_feature (62)..(308): Homolog of NCBI NO: 37535002 NR Description: putative PGPD14 protein (pollen germination
  misc_feature (57)..(308): Homolog of NCBI NO: 21593716 NR Description: PGPD14 protein [Arabidopsis thaliana]
  misc_feature (42)..(308): Homolog of NCBI NO: 15237169 NR Description: PGPD14 protein [Arabidopsis thaliana]
  misc_feature (41)..(308): Homolog of NCBI NO: 4105798 NR Description: PGPD14 [Petunia x hybrida]
  misc_feature (42)..(307): Homolog of NCBI NO: 34910658 NR Description: putative PGPD14 protein (pollen germination
MGEVAVMHSEPLQFECNDITVNMTEKEVYPPESNVDHLPGEESSQSTDHKNINYLQEKGFMEYGCQHYRRRCRIRAPCCNEIFDCRHCHNEAKNDINIDLKLRHDIPRHEVKQVICSLCGTEQEVQQNCINCGVCMGKYFCGTCKLFDDDISKQQYHCCGCGICRTGGSENFFHCYKCGCCYSTLLKNSHPCVEGAMHHDCPVCFEYLFESRNDVTVMPCGHTIHKSCLNEMREHFQYACPLCSKSVCDMSKVWEKFDLEIAATRMPEQYQNKMVWILCNDCGKTSHVQFHFVAQKCPNCKSYNTRQT

SEQ ID NO: 54523 - protein, 302 aa, Glycine max
  peptide (1)..(302): Ceres Seq. ID no. 14303489
  misc_feature (59)..(142): Pfam Name: CHY zinc finger Pfam Description: CHY zinc finger
  misc_feature (58)..(302): Homolog of NCBI NO: 13386058 NR Description: androgen receptor N-terminal-interacting protein
  misc_feature (36)..(301): Homolog of NCBI NO: 11358168 NR Description: hypothetical protein T20O10.70 - Arabidopsis
  misc_feature (36)..(301): Homolog of NCBI NO: 30695702 NR Description: expressed protein [Arabidopsis thaliana]
  misc_feature (36)..(301): Homolog of NCBI NO: 30102616 NR Description: At3g62970 [Arabidopsis thaliana]
  misc_feature (53)..(300): Homolog of NCBI NO: 15238890 NR Description: expressed protein [Arabidopsis thaliana]
  misc_feature (56)..(302): Homolog of NCBI NO: 37535002 NR Description: putative PGPD14 protein (pollen germination
  misc_feature (51)..(302): Homolog of NCBI NO: 21593716 NR Description: PGPD14 protein [Arabidopsis thaliana]
  misc_feature (36)..(302): Homolog of NCBI NO: 15237169 NR Description: PGPD14 protein [Arabidopsis thaliana]
  misc_feature (35)..(302): Homolog of NCBI NO: 4105798 NR Description: PGPD14 [Petunia x hybrida]
  misc_feature (36)..(301): Homolog of NCBI NO: 34910658 NR Description: putative PGPD14 protein (pollen germination
MHSEPLQFECNDITVNMTEKEVYPPESNVDHLPGEESSQSTDHKNINYLQEKGFMEYGCQHYRRRCRIRAPCCNEIFDCRHCHNEAKNDINIDLKLRHDIPRHEVKQVICSLCGTEQEVQQNCINCGVCMGKYFCGTCKLFDDDISKQQYHCCGCGICRTGGSENFFHCYKCGCCYSTLLKNSHPCVEGAMHHDCPVCFEYLFESRNDVTVMPCGHTIHKSCLNEMREHFQYACPLCSKSVCDMSKVWEKFDLEIAATRMPEQYQNKMVWILCNDCGKTSHVQFHFVAQKCPNCKSYNTRQT

SEQ ID NO: 54524 - protein, 286 aa, Glycine max
  peptide (1)..(286): Ceres Seq. ID no. 14303490
  misc_feature (43)..(126): Pfam Name: CHY zinc finger Pfam Description: CHY zinc finger
  misc_feature (42)..(286): Homolog of NCBI NO: 13386058 NR Description: androgen receptor N-terminal-interacting protein
  misc_feature (20)..(285): Homolog of NCBI NO: 11358168 NR Description: hypothetical protein T20O10.70 - Arabidopsis
  misc_feature (20)..(285): Homolog of NCBI NO: 30695702 NR Description: expressed protein [Arabidopsis thaliana]
  misc_feature (20)..(285): Homolog of NCBI NO: 30102616 NR Description: At3g62970 [Arabidopsis thaliana]
  misc_feature (37)..(284): Homolog of NCBI NO: 15238890 NR Description: expressed protein [Arabidopsis thaliana]
  misc_feature (40)..(286): Homolog of NCBI NO: 37535002 NR Description: putative PGPD14 protein (pollen germination
  misc_feature (35)..(286): Homolog of NCBI NO: 21593716 NR Description: PGPD14 protein [Arabidopsis thaliana]
  misc_feature (20)..(286): Homolog of NCBI NO: 15237169 NR Description: PGPD14 protein [Arabidopsis thaliana]
  misc_feature (19)..(286): Homolog of NCBI NO: 4105798 NR Description: PGPD14 [Petunia x hybrida]
  misc_feature (20)..(285): Homolog of NCBI NO: 34910658 NR Description: putative PGPD14 protein (pollen germination
MTEKEVYPPESNVDHLPGEESSQSTDHKNINYLQEKGFMEYGCQHYRRRCRIRAPCCNEIFDCRHCHNEAKNDINIDLKLRHDIPRHEVKQVICSLCGTEQEVQQNCINCGVCMGKYFCGTCKLFDDDISKQQYHCCGCGICRTGGSENFFHCYKCGCCYSTLLKNSHPCVEGAMHHDCPVCFEYLFESRNDVTVMPCGHTIHKSCLNEMREHFQYACPLCSKSVCDMSKVWEKFDLEIAATRMPEQYQNKMVWILCNDCGKTSHVQFHFVAQKCPNCKSYNTRQT

SEQ ID NO: 54525 - DNA, 1359 bp, Glycine max
  misc_feature (1)..(1359): Ceres Seq. ID no. 14313947
acattgccacataacacaacatcgaaaccctctctccctctccctctcttcctctccctctcttccaaccattccgaatgtgaacaagttgttgttgttgaacggtattatatatagtgtgtagtgtggtggtttttttttctcttcttgaaggtgcaaaaatgaatgatggtagacaaatgggggtgcattacgtagacgctgggttcccttatgctgttaatgataacttcgtggattttttccaaggattcactcatgtgcccgtcaattatgcctttgctggctcaattcctgatcaggaaagtgtctactggtcaatgaacatgaatccctataagtttggattgtctggtcctgggagtacatcttactatagttcttatgaggtaaatggtcatttgccgagaatggagatagatagggctgagtgggaatacccttcgacaattaccactgtggaagaaccagctacaacagattctccacctagaagagatggagtcacgagcatgcagaccatccctgaagaatgcagtccaaatcatcatgagtccaacagtagtagccaggtcatatggcaagacaacatctatcctgatgatatgacttatgaggaactactggacctgggggaggcagttgggactcaaagccgaggtctttcccaagaacttattgatatgcttccaacctcaaagtacaaatttggtagtttattcaagagaaaaaattctgggaaaaggtgtgtaatttgtcagatgacatacagaagaggtgaccagcaaatgaaattgccatgcagccatgtctatcatggtgaatgcatcaccaagtggcttagcattaacaagaaatgtcctgtttgcaacactgaggtttttggcgaggaatcaacgcattagcatcaaggtggcaaaagaggatcctttttgctctattaatttttgcttctcatccaactcaccctctccctcccattctcttttttaagttttaattttttacacgtaggtaggtgtagtatgaagaactatggcagctctcacacaatatatgttttgtttactagaaacaacctattggagtcgcatcttcttgtggttaatgtgtgattttgtgtgtattcatgcaatatatattctcttagcttttgtgccccttcctttggtatttgggattgaaaaatctgcttctcagccattgaccaacatagaagtgttgagattttggagtaacaatctcatgagcatgctaaatggattgaaaaaggaaatgtgtggaatgctcggggatatggagatcttaatttgagaaaagtgcatgtttcgatatccagtgaaaaattacttgaagcat

SEQ ID NO: 54526 - protein, 247 aa, Glycine max
  peptide (1)..(247): Ceres Seq. ID no. 14313948
  misc_feature (196)..(236): Pfam Name: Zinc finger, C3HC4 type (RING finger) Pfam Description: Zinc finger, C3HC4 type (RING finger)
  misc_feature (147)..(245): Homolog of NCBI NO: 10129643 NR Description: Pspzf zinc finger protein-like [Arabidopsis
  misc_feature (147)..(238): Homolog of NCBI NO: 11358785 NR Description: RING-H2 finger protein RHG1a
  misc_feature (124)..(240): Homolog of NCBI NO: 15240204 NR Description: zinc finger (C3HC4-type RING finger) protein
  misc_feature (141)..(239): Homolog of NCBI NO: 15232746 NR Description: zinc-finger protein-related protein [Arabidopsis
  misc_feature (131)..(240): Homolog of NCBI NO: 21536693 NR Description: unknown [Arabidopsis thaliana]
  misc_feature (131)..(240): Homolog of NCBI NO: 18402411 NR Description: zinc finger (C3HC4-type RING finger) protein
  misc_feature (5)..(242): Homolog of NCBI NO: 34898016 NR Description: ESTs C26000(C11448),AU082130(C11448) correspond a region of the predicted gene.~Similar to mRNA for zinc-finger
  misc_feature (114)..(240): Homolog of NCBI NO: 10334499 NR Description: hypothetical protein [Cicer arietinum]
  misc_feature (1)..(242): Homolog of NCBI NO: 38567912 NR Description: OSJNBa0088I22.8 [Oryza sativa (japonica
  misc_feature (1)..(247): Homolog of NCBI NO: 22331928 NR Description: zinc finger (C3HC4-type RING finger) protein
MNDGRQMGVHYVDAGFPYAVNDNFVDFFQGFTHVPVNYAFAGSIPDQESVYWSMNMNPYKFGLSGPGSTSYYSSYEVNGHLPRMEIDRAEWEYPSTITTVEEPATTDSPPRRDGVTSMQTIPEECSPNHHESNSSSQVIWQDNIYPDDMTYEELLDLGEAVGTQSRGLSQELIDMLPTSKYKFGSLFKRKNSGKRCVICQMTYRRGDQQMKLPCSHVYHGECITKWLSINKKCPVCNTEVFGEESTH

SEQ ID NO: 54527 - protein, 241 aa, Glycine max
  peptide (1)..(241): Ceres Seq. ID no. 14313949
  misc_feature (190)..(230): Pfam Name: Zinc finger, C3HC4 type (RING finger) Pfam Description: Zinc finger, C3HC4 type (RING finger)
  misc_feature (141)..(239): Homolog of NCBI NO: 10129643 NR Description: Pspzf zinc finger protein-like [Arabidopsis
  misc_feature (141)..(232): Homolog of NCBI NO: 11358785 NR Description: RING-H2 finger protein RHG1a
  misc_feature (118)..(234): Homolog of NCBI NO: 15240204 NR Description: zinc finger (C3HC4-type RING finger) protein
  misc_feature (135)..(233): Homolog of NCBI NO: 15232746 NR Description: zinc-finger protein-related protein [Arabidopsis
  misc_feature (125)..(234): Homolog of NCBI NO: 21536693 NR Description: unknown [Arabidopsis thaliana]
  misc_feature (125)..(234): Homolog of NCBI NO: 18402411 NR Description: zinc finger (C3HC4-type RING finger) protein
  misc_feature (1)..(236): Homolog of NCBI NO: 34898016 NR Description: ESTs C26000(C11448),AU082130(C11448) correspond a region of the predicted gene.~Similar to mRNA for zinc-finger
  misc_feature (108)..(234): Homolog of NCBI NO: 10334499 NR Description: hypothetical protein [Cicer arietinum]
  misc_feature (1)..(236): Homolog of NCBI NO: 38567912 NR Description: OSJNBa0088I22.8 [Oryza sativa (japonica
  misc_feature (1)..(241): Homolog of NCBI NO: 22331928 NR Description: zinc finger (C3HC4-type RING finger) protein
MGVHYVDAGFPYAVNDNFVDFFQGFTHVPVNYAFAGSIPDQESVYWSMNMNPYKFGLSGPGSTSYYSSYEVNGHLPRMEIDRAEWEYPSTITTVEEPATTDSPPRRDGVTSMQTIPEECSPNHHESNSSSQVIWQDNIYPDDMTYEELLDLGEAVGTQSRGLSQELIDMLPTSKYKFGSLFKRKNSGKRCVICQMTYRRGDQQMKLPCSHVYHGECITKWLSINKKCPVCNTEVFGEESTH

SEQ ID NO: 54528 - protein, 194 aa, Glycine max
  peptide (1)..(194): Ceres Seq. ID no. 14313950
  misc_feature (143)..(183): Pfam Name: Zinc finger, C3HC4 type (RING finger) Pfam Description: Zinc finger, C3HC4 type (RING finger)
  misc_feature (94)..(192): Homolog of NCBI NO: 10129643 NR Description: Pspzf zinc finger protein-like [Arabidopsis
  misc_feature (94)..(185): Homolog of NCBI NO: 11358785 NR Description: RING-H2 finger protein RHG1a
  misc_feature (71)..(187): Homolog of NCBI NO: 15240204 NR Description: zinc finger (C3HC4-type RING finger) protein
  misc_feature (88)..(186): Homolog of NCBI NO: 15232746 NR Description: zinc-finger protein-related protein [Arabidopsis
  misc_feature (78)..(187): Homolog of NCBI NO: 21536693 NR Description: unknown [Arabidopsis thaliana]
  misc_feature (78)..(187): Homolog of NCBI NO: 18402411 NR Description: zinc finger (C3HC4-type RING finger) protein
  misc_feature (1)..(189): Homolog of NCBI NO: 34898016 NR Description: ESTs C26000(C11448),AU082130(C11448) correspond a region of the predicted gene.~Similar to mRNA for zinc-finger
  misc_feature (61)..(187): Homolog of NCBI NO: 10334499 NR Description: hypothetical protein [Cicer arietinum]
  misc_feature (1)..(189): Homolog of NCBI NO: 38567912 NR Description: OSJNBa0088I22.8 [Oryza sativa (japonica
  misc_feature (1)..(194): Homolog of NCBI NO: 22331928 NR Description: zinc finger (C3HC4-type RING finger) protein
MNMNPYKFGLSGPGSTSYYSSYEVNGHLPRMEIDRAEWEYPSTITTVEEPATTDSPPRRDGVTSMQTIPEECSPNHHESNSSSQVIWQDNIYPDDMTYEELLDLGEAVGTQSRGLSQELIDMLPTSKYKFGSLFKRKNSGKRCVICQMTYRRGDQQMKLPCSHVYHGECITKWLSINKKCPVCNTEVFGEESTH

SEQ ID NO: 54529 - DNA, 2150 bp, Glycine max
  misc_feature (1)..(2150): Ceres Seq. ID no. 14307682
gagaacccatttttcattttctctctcatcttgtagtgctagttgttcttttgagaatagtgggtgtttttgtgcttaaaactataatgtctgtcttaaagtacagaaatctttttctttgtctggtttcatggttgtgctgttgttgtgtggctgtggcttcgagtgagagtagtattggttccaaagaccttgatcagacaccaacatgggctgtggctggtgtctgcactgttttcatcttgatatccataactctggagaaaagccttcacaaagtgggaacgtggctaagggaaaaacacaagaaagctttgcttgaggctttggaaaaggtcaaagctgagttgatggttcttggtttcctttcactgcttctgactttcgggcagagttacattgttagaatatgcattcctatggatgtggcagacaaattgttgccatgtccttatgttggtaacgacaagggatcaagtagtgaagaggaacaccgtaggaaacttctttcttatgaacgcagatatttgtcagatgatgctaccccttaccaatgtaaggagagacatcagccacttatatctggcaatggattgcaccagttacacatcctcgtatttttcttagcagtcctacatgtgttttacagtgccattacaatgcttcttgggagattaaagattcgtggatggaaggcatgggaggcggagacttcatctcatgggtacgagttcgccaatgatccttcaagattccggttgacacatgaaacatcatttgtgaaagctcacgcttctttttggacaagatattcaatcttcttctatataggatgcttctttagacaattttataggtctgtaggcaaggctgactacttggctttgcgcaatggatttatcacggttcacctggctcctggaagtaaatttaacttccaaaagtatatcaaaagatccttggaggatgacttcaaggtagttgttggagtcagtcctgtcctctgggcatcgtttgttgtttttctgctcctaaatgttaacggatggcatgctatgttttgggcatccttaattcctgttgtgataattttggctgttggaacaaaacttcaagctgcactggcaaacatggctattgaaattacagaaagacatgctgttgtccaagggattcctcttgttcaaggctcagacagatatttttggtttggtcggcctcaattagttcttcatcttatccattttgctttgttccagaatgcgttccaaataacatatttcttgtggatatggtattcttttgggctgagaaattgtttccatgctgactacaagcttgcagtagtgaaagtagctttagggcttggggtgctatgtctctgcagctacatcacccttccattatatgctcttgttactcagatgggctcaagaatgaaaaaatcaatatttgacgaacaaacatcgaaggcgttgaagaaatggcacatggctgtgaaaaagaagcaaggagtgaaacttggaaattccaaggtgcgagccatggatggaagcagcactgattcaacaatacactcttctggccccacactacaccgttacaaaactaccggtcactcaactcacttcgtatcaaactacgatgaccaagatgattaccattctgataccgagttgtcttccatttcaccaacaccaaacttgatagtaagagtggaccatgatgaggaagaagcaaaagaaaatgaacaccacccaacagccaacaatcaagaggcccctttacatttgtcaagcctggaaagaagcatgaaatagcatcagaagttactccattcaaccattctttgttcttttacagctttctagatattgttatacttgatcatgatatagtcagttttgtacattcttgttcttaaaaacacttgccgggcattggaaacttttaagcttgctcaaaatcatgcttatagccttattatattgctttgattcgtgtgcttgagcaaaaggatcgttaggaacaattagaggacagaattgttaggtatattatgtgttatatgttgaagggtatatgtaaatcccaattataatataagctttttggccaagtagagcatatagaagaatatacattcagtc

SEQ ID NO: 54530 - protein, 605 aa, Glycine max
  peptide (1)..(605): Ceres Seq. ID no. 14307683
  misc_feature (55)..(502): Homolog of NCBI NO: 14091580 NR Description: membrane protein Mlo5 [Arabidopsis thaliana]
  misc_feature (51)..(93): Homolog of NCBI NO: 25346299 NR Description: similar to Mlo proteins from H. vulgare
  misc_feature (78)..(558): Homolog of NCBI NO: 25346299 NR Description: similar to Mlo proteins from H. vulgare
  misc_feature (51)..(93): Homolog of NCBI NO: 30679982 NR Description: seven transmembrane MLO protein family (MLO7)
  misc_feature (78)..(558): Homolog of NCBI NO: 30679982 NR Description: seven transmembrane MLO protein family (MLO7)
  misc_feature (51)..(558): Homolog of NCBI NO: 33112635 NR Description: MLO-like protein 7 (AtMlo7)
  misc_feature (346)..(602): Homolog of NCBI NO: 25346302 NR Description: similar to Mlo proteins from H. vulgare
  misc_feature (39)..(348): Homolog of NCBI NO: 25346302 NR Description: similar to Mlo proteins from H. vulgare
  misc_feature (38)..(577): Homolog of NCBI NO: 15239213 NR Description: seven transmembrane MLO protein family (MLO10)
  misc_feature (39)..(602): Homolog of NCBI NO: 18398444 NR Description: seven transmembrane MLO protein family (MLO8)
EPIFHFLSHLVVLVVLLRIVGVFVLKTIMSVLKYRNLFLCLVSWLCCCCVAVASSESSIGSKDLDQTPTWAVAGVCTVFILISITLEKSLHKVGTWLREKHKKALLEALEKVKAELMVLGFLSLLLTFGQSYIVRICIPMDVADKLLPCPYVGNDKGSSSEEEHRRKLLSYERRYLSDDATPYQCKERHQPLISGNGLHQLHILVFFLAVLHVFYSAITMLLGRLKIRGWKAWEAETSSHGYEFANDPSRFRLTHETSFVKAHASFWTRYSIFFYIGCFFRQFYRSVGKADYLALRNGFITVHLAPGSKFNFQKYIKRSLEDDFKVVVGVSPVLWASFVVFLLLNVNGWHAMFWASLIPVVIILAVGTKLQAALANMAIEITERHAVVQGIPLVQGSDRYFWFGRPQLVLHLIHFALFQNAFQITYFLWIWYSFGLRNCFHADYKLAVVKVALGLGVLCLCSYITLPLYALVTQMGSRMKKSIFDEQTSKALKKWHMAVKKKQGVKLGNSKVRAMDGSSTDSTIHSSGPTLHRYKTTGHSTHFVSNYDDQDDYHSDTELSSISPTPNLIVRVDHDEEEAKENEHHPTANNQEAPLHLSSLERSMK

SEQ ID NO: 54531 - protein, 577 aa, Glycine max
  peptide (1)..(577): Ceres Seq. ID no. 14307684
  misc_feature (27)..(474): Homolog of NCBI NO: 14091580 NR Description: membrane protein Mlo5 [Arabidopsis thaliana]
  misc_feature (23)..(65): Homolog of NCBI NO: 25346299 NR Description: similar to Mlo proteins from H. vulgare
  misc_feature (50)..(530): Homolog of NCBI NO: 25346299 NR Description: similar to Mlo proteins from H. vulgare
  misc_feature (23)..(65): Homolog of NCBI NO: 30679982 NR Description: seven transmembrane MLO protein family (MLO7)
  misc_feature (50)..(530): Homolog of NCBI NO: 30679982 NR Description: seven transmembrane MLO protein family (MLO7)
  misc_feature (23)..(530): Homolog of NCBI NO: 33112635 NR Description: MLO-like protein 7 (AtMlo7)
  misc_feature (318)..(574): Homolog of NCBI NO: 25346302 NR Description: similar to Mlo proteins from H. vulgare
  misc_feature (11)..(320): Homolog of NCBI NO: 25346302 NR Description: similar to Mlo proteins from H. vulgare
  misc_feature (10)..(549): Homolog of NCBI NO: 15239213 NR Description: seven transmembrane MLO protein family (MLO10)
  misc_feature (11)..(574): Homolog of NCBI NO: 18398444 NR Description: seven transmembrane MLO protein family (MLO8)
MSVLKYRNLFLCLVSWLCCCCVAVASSESSIGSKDLDQTPTWAVAGVCTVFILISITLEKSLHKVGTWLREKHKKALLEALEKVKAELMVLGFLSLLLTFGQSYIVRICIPMDVADKLLPCPYVGNDKGSSSEEEHRRKLLSYERRYLSDDATPYQCKERHQPLISGNGLHQLHILVFFLAVLHVFYSAITMLLGRLKIRGWKAWEAETSSHGYEFANDPSRFRLTHETSFVKAHASFWTRYSIFFYIGCFFRQFYRSVGKADYLALRNGFITVHLAPGSKFNFQKYIKRSLEDDFKVVVGVSPVLWASFVVFLLLNVNGWHAMFWASLIPVVIILAVGTKLQAALANMAIEITERHAVVQGIPLVQGSDRYFWFGRPQLVLHLIHFALFQNAFQITYFLWIWYSFGLRNCFHADYKLAVVKVALGLGVLCLCSYITLPLYALVTQMGSRMKKSIFDEQTSKALKKWHMAVKKKQGVKLGNSKVRAMDGSSTDSTIHSSGPTLHRYKTTGHSTHFVSNYDDQDDYHSDTELSSISPTPNLIVRVDHDEEEAKENEHHPTANNQEAPLHLSSLERSMK

SEQ ID NO: 54532 - protein, 489 aa, Glycine max
  peptide (1)..(489): Ceres Seq. ID no. 14307685
  misc_feature (1)..(442): Homolog of NCBI NO: 13784977 NR Description: seven transmembrane protein Mlo2 [Zea mays]
  misc_feature (1)..(386): Homolog of NCBI NO: 15226140 NR Description: seven transmembrane MLO protein family (MLO5)
  misc_feature (1)..(386): Homolog of NCBI NO: 14091580 NR Description: membrane protein Mlo5 [Arabidopsis thaliana]
  misc_feature (1)..(442): Homolog of NCBI NO: 25346299 NR Description: similar to Mlo proteins from H. vulgare
  misc_feature (1)..(442): Homolog of NCBI NO: 30679982 NR Description: seven transmembrane MLO protein family (MLO7)
  misc_feature (1)..(442): Homolog of NCBI NO: 33112635 NR Description: MLO-like protein 7 (AtMlo7)
  misc_feature (230)..(486): Homolog of NCBI NO: 25346302 NR Description: similar to Mlo proteins from H. vulgare
  misc_feature (1)..(232): Homolog of NCBI NO: 25346302 NR Description: similar to Mlo proteins from H. vulgare
  misc_feature (1)..(461): Homolog of NCBI NO: 15239213 NR Description: seven transmembrane MLO protein family (MLO10)
  misc_feature (1)..(486): Homolog of NCBI NO: 18398444 NR Description: seven transmembrane MLO protein family (MLO8)
MVLGFLSLLLTFGQSYIVRICIPMDVADKLLPCPYVGNDKGSSSEEEHRRKLLSYERRYLSDDATPYQCKERHQPLISGNGLHQLHILVFFLAVLHVFYSAITMLLGRLKIRGWKAWEAETSSHGYEFANDPSRFRLTHETSFVKAHASFWTRYSIFFYIGCFFRQFYRSVGKADYLALRNGFITVHLAPGSKFNFQKYIKRSLEDDFKVVVGVSPVLWASFVVFLLLNVNGWHAMFWASLIPVVIILAVGTKLQAALANMAIEITERHAVVQGIPLVQGSDRYFWFGRPQLVLHLIHFALFQNAFQITYFLWIWYSFGLRNCFHADYKLAVVKVALGLGVLCLCSYITLPLYALVTQMGSRMKKSIFDEQTSKALKKWHMAVKKKQGVKLGNSKVRAMDGSSTDSTIHSSGPTLHRYKTTGHSTHFVSNYDDQDDYHSDTELSSISPTPNLIVRVDHDEEEAKENEHHPTANNQEAPLHLSSLERSMK

SEQ ID NO: 54533 - DNA, 1704 bp, Glycine max
  misc_feature (1)..(1704): Ceres Seq. ID no. 14307076
tctgcgcgatgttaaggagaagaatgaaggatcttcaaacatgtttgggaatgtagtgttctctgatggcaatgtgatccatggttcaagttcggattctagatatgcacttggatctggttttgttgttgggactgattctgagaatagcgaggatcagagtagcaagtcttctacagcggctagtgagcccaagttgaggcaagagaaaagccgtagcaagaatgtgaattccaagcatttagctaactcggctcaacgagttcaaccaggaaagggacgaactgaaggcagtaagaaaccaggaggaggtggaagagtgaaaattgagaaggaaaattctttttctagtttggaatctgattcaagaagctccaactttaagcaaggtgttttttcggttactagtaatggaaagcatactagtaggccaaatgtttacgatggagttaatagtggtgaagcacacactaatgaacatttcactgagggtgttgaggctggttatggtaacgaaaatgttgttgaggatgaatatcttttacaagagaatttgggtacaaatttgtcttgggatgttacagaagaaaaaagtgtgaacaaccaatcttcagccgttgaagatcctataattgaatcggttagttgccttcaggctgtccaggaggcccttcaagaagaactccagaaattcagggagattgggattgaagctatttcaccagatgatgactcagctaagtgtagcagtgcatctgctggtactactattgatcttggacttaataaatcaagccaatctggtcagtctggtgcagaagaaattagacaaactgcttcaagttcctcagatcctcaggtattgagcctgacacaaaatataaatattttggaaagcaagttggaggatttacagggtgtgcttgctctgaaggactctaggattgctgaactcgaagcatccttgagtagtgttaagatttctagggaagaatctgcaagcaccatagatttgtccgagaaaaaatgtgaaggggttgagtcggagctcgagggccttttcaagctaaggattgaagctgaggttgaatacctagccatctcaaaggtaatgcagaacatgaagggtggggcaggtatccaacagacattattggaagaacaagagaaactgtctgaaaatcaagcgcagattctcgacaaagttgtagatgcagagagtaaggcttcagtgctgaagaacaaaacagaagagttggaaaaatattgtggtgatagtgtagtagttgaggagtcttttgtgctgcagagaagggtatgtaagatgtcattttatcttttcatacagtttatgtttttagttttgatcttttggctttacatgtcacagttatcgcacaattctgggatggttgtgcccacttaggcctgcaaaattaggttcattttgtgcaatcttaatagttttttccttttctttttttctcttttcttttcctgatctttgaatgtaaaatttcgttgttatagaaaactgacccttctttctctgggtagggggagagcgtgtatttgctctcgttgttttaatatcattttgtgcacagccccttgtaatttgggcttggcaaaacaattgttattgttactttttttgttcttcttgagtttaattttaataacatagatttgtatattgtgaac

SEQ ID NO: 54534 - protein, 474 aa, Glycine max
  peptide (1)..(474): Ceres Seq. ID no. 14307077
  misc_feature (104)..(474): Homolog of NCBI NO: 15241152 NR Description: hypothetical protein [Arabidopsis thaliana]
  misc_feature (3)..(256): Homolog of NCBI NO: 26451720 NR Description: unknown protein [Arabidopsis thaliana]
  misc_feature (297)..(474): Homolog of NCBI NO: 26451720 NR Description: unknown protein [Arabidopsis thaliana]
  misc_feature (3)..(395): Homolog of NCBI NO: 15236196 NR Description: expressed protein [Arabidopsis thaliana]
  misc_feature (38)..(399): Homolog of NCBI NO: 15241152 NR Description: hypothetical protein [Arabidopsis thaliana]
LRDVKEKNEGSSNMFGNVVFSDGNVIHGSSSDSRYALGSGFVVGTDSENSEDQSSKSSTAASEPKLRQEKSRSKNVNSKHLANSAQRVQPGKGRTEGSKKPGGGGRVKIEKENSFSSLESDSRSSNFKQGVFSVTSNGKHTSRPNVYDGVNSGEAHTNEHFTEGVEAGYGNENVVEDEYLLQENLGTNLSWDVTEEKSVNNQSSAVEDPIIESVSCLQAVQEALQEELQKFREIGIEAISPDDDSAKCSSASAGTTIDLGLNKSSQSGQSGAEEIRQTASSSSDPQVLSLTQNINILESKLEDLQGVLALKDSRIAELEASLSSVKISREESASTIDLSEKKCEGVESELEGLFKLRIEAEVEYLAISKVMQNMKGGAGIQQTLLEEQEKLSENQAQILDKVVDAESKASVLKNKTEELEKYCGDSVVVEESFVLQRRVCKMSFYLFIQFMFLVLIFWLYMSQLSHNSGMVVPT

SEQ ID NO: 54535 - protein, 461 aa, Glycine max
  peptide (1)..(461): Ceres Seq. ID no. 14307078
  misc_feature (91)..(461): Homolog of NCBI NO: 15241152 NR Description: hypothetical protein [Arabidopsis thaliana]
  misc_feature (1)..(243): Homolog of NCBI NO: 26451720 NR Description: unknown protein [Arabidopsis thaliana]
  misc_feature (284)..(461): Homolog of NCBI NO: 26451720 NR Description: unknown protein [Arabidopsis thaliana]
  misc_feature (1)..(382): Homolog of NCBI NO: 15236196 NR Description: expressed protein [Arabidopsis thaliana]
  misc_feature (25)..(386): Homolog of NCBI NO: 15241152 NR Description: hypothetical protein [Arabidopsis thaliana]
MFGNVVFSDGNVIHGSSSDSRYALGSGFVVGTDSENSEDQSSKSSTAASEPKLRQEKSRSKNVNSKHLANSAQRVQPGKGRTEGSKKPGGGGRVKIEKENSFSSLESDSRSSNFKQGVFSVTSNGKHTSRPNVYDGVNSGEAHTNEHFTEGVEAGYGNENVVEDEYLLQENLGTNLSWDVTEEKSVNNQSSAVEDPIIESVSCLQAVQEALQEELQKFREIGIEAISPDDDSAKCSSASAGTTIDLGLNKSSQSGQSGAEEIRQTASSSSDPQVLSLTQNINILESKLEDLQGVLALKDSRIAELEASLSSVKISREESASTIDLSEKKCEGVESELEGLFKLRIEAEVEYLAISKVMQNMKGGAGIQQTLLEEQEKLSENQAQILDKVVDAESKASVLKNKTEELEKYCGDSVVVEESFVLQRRVCKMSFYLFIQFMFLVLIFWLYMSQLSHNSGMVVPT

SEQ ID NO: 54536 - DNA, 1176 bp, Glycine max
  misc_feature (1)..(1176): Ceres Seq. ID no. 14310886
tgaatgaagcatattcattttctagtaccattcctatgtacagtgatcgcagtggcatgaacttctcatctcatggagttgaaaagatcaaaaactcagcaggccaaatcatgaaacaagagaaacttgaaagggacaagtctcagcttgaaaaactacaagttcctggaaatcatgattcaccactgtgctcaatagatttaaatgatgtagtcaactatgaggagtttatgagaaacttgacaaatgaagagcagcagcaattactgaagtatctcccggtggttgatactgctaaatttcctgatagccttagaaacatgttcaatagcttccaattcaaggagaacttaatctattttcagcaacttcttggggaaggagtctttgacatctctttgttgggggcaaaacctgaagaatggaagacattaaaaaggcttgcgttatctaatctgtcaaagtcaaaatgggtagaacactataatttcctgaagaaatgtgaaaacaaatctggaaaatctattggtttgggatctactgctatggaatctagttatgttacaactgccaagagaatgcgtgagcatgacagccaaaatcaaaattttccagaattgaagacaacaatgagaagccccaaaagggtgttcataaagcctagctgtgaggtcaaagaagttgtagaagaaggctctagcttcagtccaaaaagcctatttgctttaccccatggtgttggtagcttgcacatgttggattctttcaactttgttggtgagagttctgaagatctgctgttagaggtgccttctaacagttcttttccacaggcagagcttctgcacccatctttaagctatggtgctcaggtcagcaccactagtagctcagtacactctcttgttactcatccttaactaatctttactaggttacttggatgggtatggacacaatatttagtcataatagggttcacatgttttgcatctgaaacaccaaaattcctgtacaagagatatcatggttgtgtttttgtttccttgcaaccttgagcttggatttacaaaggatggaagttgaatgggcttttttttttttttttttgtatagattggtaatagattgtaacatatagcatgaaattcggagtgatcatctccggagttttgt

SEQ ID NO: 54537 - protein, 305 aa, Glycine max
  peptide (1)..(305): Ceres Seq. ID no. 14310887
  misc_feature (2)..(165): Homolog of NCBI NO: 7485111 NR Description: hypothetical protein - Arabidopsis thaliana
  misc_feature (23)..(282): Homolog of NCBI NO: 22327632 NR Description: GATA zinc finger protein [Arabidopsis thaliana]
  misc_feature (23)..(282): Homolog of NCBI NO: 8978081 NR Description: gene_id:K14A3.9~pir||D71445~similar to unknown
  misc_feature (2)..(282): Homolog of NCBI NO: 30684095 NR Description: GATA zinc finger protein [Arabidopsis thaliana]
NEAYSFSSTIPMYSDRSGMNFSSHGVEKIKNSAGQIMKQEKLERDKSQLEKLQVPGNHDSPLCSIDLNDVVNYEEFMRNLTNEEQQQLLKYLPVVDTAKFPDSLRNMFNSFQFKENLIYFQQLLGEGVFDISLLGAKPEEWKTLKRLALSNLSKSKWVEHYNFLKKCENKSGKSIGLGSTAMESSYVTTAKRMREHDSQNQNFPELKTTMRSPKRVFIKPSCEVKEVVEEGSSFSPKSLFALPHGVGSLHMLDSFNFVGESSEDLLLEVPSNSSFPQAELLHPSLSYGAQVSTTSSSVHSLVTHP

SEQ ID NO: 54538 - protein, 294 aa, Glycine max
  peptide (1)..(294): Ceres Seq. ID no. 14310888
  misc_feature (1)..(154): Homolog of NCBI NO: 7485111 NR Description: hypothetical protein - Arabidopsis thaliana
  misc_feature (12)..(271): Homolog of NCBI NO: 22327632 NR Description: GATA zinc finger protein [Arabidopsis thaliana]
  misc_feature (12)..(271): Homolog of NCBI NO: 8978081 NR Description: gene_id:K14A3.9~pir||D71445~similar to unknown
  misc_feature (1)..(271): Homolog of NCBI NO: 30684095 NR Description: GATA zinc finger protein [Arabidopsis thaliana]
MYSDRSGMNFSSHGVEKIKNSAGQIMKQEKLERDKSQLEKLQVPGNHDSPLCSIDLNDVVNYEEFMRNLTNEEQQQLLKYLPVVDTAKFPDSLRNMFNSFQFKENLIYFQQLLGEGVFDISLLGAKPEEWKTLKRLALSNLSKSKWVEHYNFLKKCENKSGKSIGLGSTAMESSYVTTAKRMREHDSQNQNFPELKTTMRSPKRVFIKPSCEVKEVVEEGSSFSPKSLFALPHGVGSLHMLDSFNFVGESSEDLLLEVPSNSSFPQAELLHPSLSYGAQVSTTSSSVHSLVTHP

SEQ ID NO: 54539 - protein, 287 aa, Glycine max
  peptide (1)..(287): Ceres Seq. ID no. 14310889
  misc_feature (1)..(147): Homolog of NCBI NO: 7485111 NR Description: hypothetical protein - Arabidopsis thaliana
  misc_feature (5)..(264): Homolog of NCBI NO: 22327632 NR Description: GATA zinc finger protein [Arabidopsis thaliana]
  misc_feature (5)..(264): Homolog of NCBI NO: 8978081 NR Description: gene_id:K14A3.9~pir||D71445~similar to unknown
  misc_feature (1)..(264): Homolog of NCBI NO: 30684095 NR Description: GATA zinc finger protein [Arabidopsis thaliana]
MNFSSHGVEKIKNSAGQIMKQEKLERDKSQLEKLQVPGNHDSPLCSIDLNDVVNYEEFMRNLTNEEQQQLLKYLPVVDTAKFPDSLRNMFNSFQFKENLIYFQQLLGEGVFDISLLGAKPEEWKTLKRLALSNLSKSKWVEHYNFLKKCENKSGKSIGLGSTAMESSYVTTAKRMREHDSQNQNFPELKTTMRSPKRVFIKPSCEVKEVVEEGSSFSPKSLFALPHGVGSLHMLDSFNFVGESSEDLLLEVPSNSSFPQAELLHPSLSYGAQVSTTSSSVHSLVTHP

SEQ ID NO: 54540 - DNA, 1441 bp, Glycine max
  misc_feature (1)..(1441): Ceres Seq. ID no. 14313803
aactaaactgagaaaaagaagagagagaatcatccttccttttccgagaaagaggaagaaaacgccgagaaaacacagaaaccgatttcgccatcatccatcaaagatccacaaattcattcattcattcagcaatcccaattcattaatctgcaaaatgggttttggatgttgaagcgggggaggattgacaatttgcgatggaaagggaaaattggagagaacacatcaacagcaatagcaatgggaattattacgataggtttgtgtgtgattacgacaacggagaacgaagccctgcaaagccttcttcgcctcccagacttggctacatcgaacaccatgtttccaaattcgataccttggccggtgtcgctatcaagtacggtgttgaggtggcagacataagaaagatgaatagccttgttacagaccatcaaatgtttgcacttaaaactctccacattccgctacctgcaaggcatcctccatctccttatttgtcaaatggttccagtactccaggacatggtaactcggatcacagtccacctaatcaggcacaccatgatctgcttgattcattccaatccctgagaataaagtcatcagagcggaaggtctccccagccatgaactcattacagggctactatggacttaaggggaccccaagtccctcagaagatggtccattccccagaaacttacctatgtctgaccgacctctgagtcatcaccggaaatccagaagtttggtcaatgtaattttggaagaaattatggaaaaatcagatgatgcactggctgcagaaaccagggaagttggctccaataaatggaatgacaaacttggcctgagacatcagaaatctgtagctgactttattaggataccggagttgcttttgagggaggataatagcagcagtggtgttcttccatcaagaacaggaaagggcttagctctgagacagaaagcagctaaccgaaccacagcaacaactgattctgaaccaattggtttgaatcctgcggcgttgggcatgggggatgcttctctaattgatggttcatccggggtcaggaaatcatcaagcacttcttgtttacaggatcaagataacagtggctcctcgtccatttggccaaccaaaatgtggaatttgaaaccagacttacaagccctctcaactgcagccattggaaaaccaatctttgatggctttcccaagccaataactggtcggaaaaataaagctgctcttgattaatgtatagaaaatttatgaacacagttttgaccccgtttgtcaggttatggaatcattagccgctacaccagtgggtagattggaggaagtaagacaatgtagaagggacataaaaaatcaaacatcatattttatttctctttgaataggggcattatttttatgcc

SEQ ID NO: 54541 - protein, 357 aa, Glycine max
  peptide (1)..(357): Ceres Seq. ID no. 14313804
  misc_feature (47)..(90): Pfam Name: LysM domain Pfam Description: LysM domain
  misc_feature (32)..(92): Homolog of NCBI NO: 24431595 NR Description: Hypothetical protein [Oryza sativa (japonica
  misc_feature (221)..(357): Homolog of NCBI NO: 24431595 NR Description: Hypothetical protein [Oryza sativa (japonica
  misc_feature (33)..(164): Homolog of NCBI NO: 30682281 NR Description: expressed protein [Arabidopsis thaliana]
  misc_feature (33)..(164): Homolog of NCBI NO: 11291586 NR Description: hypothetical protein T22D6.140 - Arabidopsis
  misc_feature (32)..(357): Homolog of NCBI NO: 37535512 NR Description: unknown protein [Oryza sativa (japonica
  misc_feature (88)..(357): Homolog of NCBI NO: 30682281 NR Description: expressed protein [Arabidopsis thaliana]
  misc_feature (88)..(357): Homolog of NCBI NO: 11291586 NR Description: hypothetical protein T22D6.140 - Arabidopsis
  misc_feature (37)..(357): Homolog of NCBI NO: 9759371 NR Description: gene_id:MYJ24.12~unknown protein [Arabidopsis
  misc_feature (37)..(357): Homolog of NCBI NO: 22327003 NR Description: expressed protein [Arabidopsis thaliana]
MERENWREHINSNSNGNYYDRFVCDYDNGERSPAKPSSPPRLGYIEHHVSKFDTLAGVAIKYGVEVADIRKMNSLVTDHQMFALKTLHIPLPARHPPSPYLSNGSSTPGHGNSDHSPPNQAHHDLLDSFQSLRIKSSERKVSPAMNSLQGYYGLKGTPSPSEDGPFPRNLPMSDRPLSHHRKSRSLVNVILEEIMEKSDDALAAETREVGSNKWNDKLGLRHQKSVADFIRIPELLLREDNSSSGVLPSRTGKGLALRQKAANRTTATTDSEPIGLNPAALGMGDASLIDGSSGVRKSSSTSCLQDQDNSGSSSIWPTKMWNLKPDLQALSTAAIGKPIFDGFPKPITGRKNKAALD

SEQ ID NO: 54542 - protein, 286 aa, Glycine max
  peptide (1)..(286): Ceres Seq. ID no. 14313805
  misc_feature (1)..(21): Homolog of NCBI NO: 24431595 NR Description: Hypothetical protein [Oryza sativa (japonica
  misc_feature (150)..(286): Homolog of NCBI NO: 24431595 NR Description: Hypothetical protein [Oryza sativa (japonica
  misc_feature (1)..(93): Homolog of NCBI NO: 30682281 NR Description: expressed protein [Arabidopsis thaliana]
  misc_feature (1)..(93): Homolog of NCBI NO: 11291586 NR Description: hypothetical protein T22D6.140 - Arabidopsis
  misc_feature (1)..(286): Homolog of NCBI NO: 37535512 NR Description: unknown protein [Oryza sativa (japonica
  misc_feature (17)..(286): Homolog of NCBI NO: 30682281 NR Description: expressed protein [Arabidopsis thaliana]
  misc_feature (17)..(286): Homolog of NCBI NO: 11291586 NR Description: hypothetical protein T22D6.140 - Arabidopsis
  misc_feature (1)..(286): Homolog of NCBI NO: 9759371 NR Description: gene_id:MYJ24.12~unknown protein [Arabidopsis
  misc_feature (1)..(286): Homolog of NCBI NO: 22327003 NR Description: expressed protein [Arabidopsis thaliana]
MNSLVTDHQMFALKTLHIPLPARHPPSPYLSNGSSTPGHGNSDHSPPNQAHHDLLDSFQSLRIKSSERKVSPAMNSLQGYYGLKGTPSPSEDGPFPRNLPMSDRPLSHHRKSRSLVNVILEEIMEKSDDALAAETREVGSNKWNDKLGLRHQKSVADFIRIPELLLREDNSSSGVLPSRTGKGLALRQKAANRTTATTDSEPIGLNPAALGMGDASLIDGSSGVRKSSSTSCLQDQDNSGSSSIWPTKMWNLKPDLQALSTAAIGKPIFDGFPKPITGRKNKAALD

SEQ ID NO: 54543 - protein, 277 aa, Glycine max
  peptide (1)..(277): Ceres Seq. ID no. 14313806
  misc_feature (1)..(12): Homolog of NCBI NO: 24431595 NR Description: Hypothetical protein [Oryza sativa (japonica
  misc_feature (141)..(277): Homolog of NCBI NO: 24431595 NR Description: Hypothetical protein [Oryza sativa (japonica
  misc_feature (1)..(84): Homolog of NCBI NO: 30682281 NR Description: expressed protein [Arabidopsis thaliana]
  misc_feature (1)..(84): Homolog of NCBI NO: 11291586 NR Description: hypothetical protein T22D6.140 - Arabidopsis
  misc_feature (1)..(277): Homolog of NCBI NO: 37535512 NR Description: unknown protein [Oryza sativa (japonica
  misc_feature (8)..(277): Homolog of NCBI NO: 30682281 NR Description: expressed protein [Arabidopsis thaliana]
  misc_feature (8)..(277): Homolog of NCBI NO: 11291586 NR Description: hypothetical protein T22D6.140 - Arabidopsis
  misc_feature (1)..(277): Homolog of NCBI NO: 9759371 NR Description: gene_id:MYJ24.12~unknown protein [Arabidopsis
  misc_feature (1)..(277): Homolog of NCBI NO: 22327003 NR Description: expressed protein [Arabidopsis thaliana]
MFALKTLHIPLPARHPPSPYLSNGSSTPGHGNSDHSPPNQAHHDLLDSFQSLRIKSSERKVSPAMNSLQGYYGLKGTPSPSEDGPFPRNLPMSDRPLSHHRKSRSLVNVILEEIMEKSDDALAAETREVGSNKWNDKLGLRHQKSVADFIRIPELLLREDNSSSGVLPSRTGKGLALRQKAANRTTATTDSEPIGLNPAALGMGDASLIDGSSGVRKSSSTSCLQDQDNSGSSSIWPTKMWNLKPDLQALSTAAIGKPIFDGFPKPITGRKNKAALD

SEQ ID NO: 54544 - DNA, 1246 bp, Glycine max
  misc_feature (1)..(1246): Ceres Seq. ID no. 14313796
attcttgtattttgttgcgctgaacaagacaagaaaactacaaagctatgggcaccatcatcgactcccatttcttggccttcactgcccttgtcactattgcctatcagtttttgtttttcgtcgtcactgcgctcctcaaattcgacaaagtcactgattttgctggaagtacgaatttcattataattgctgcattgaccctggtcatcaaaggctcctggtattttcgacagataatcctcactttgtttgttgggatatggggaattcgcctcggccttttcctcctattcagaattttgcagtggggagaggaccgacgctttgatgaaatgcgcagtaatttgggtagactggccatattttggatatttcaggctgtctgggtgtgggctgtgagtttacctgttacagtggttaatgcaagcgacagaaatcccttcctacaggttgttgatatagtagggtggattttgtgggctgtgggttttattgtggaaggtacagcagatcaacaaaagctgcatttcaaaagatcttcagaaaatagagggaagtggtgtaatgttggactttggaaatattctcgtcatcctaactattttggtgaaatattgctttggtggggaatttttgtggcatctacacctgtactgaagggtgctgaatggctggtgatcattggaccaatctttctcacattattgcttctttttgtcagtggcattccacttcttgaggattcagcggataaaaagtttggcaatgtagatggatataggatatacaaaaagagaaccagccctttaatcccgttgccacgatcaatctatgggaacttatccgcatggttcaaaacaacttttctcttcgagtttccattctacagtcgtaatctaccacaagaagagaactggtgaaatggtattaaattttttagtatctgctcaaggtgcagtgcaaacagtgggaaaatcagtgatgctctgaaaattggctagcacttggttctttgaatttgtttggttcctgtcttacgtcagactgaagttgcagctggtatcatcatccgccatggttagggatgtggctttgtaatgctattgcagctttccttctagatttaatctttctaatttgcttgttctctcttagatatgtataaatttacgtactatatatgttgtgtgcaagtactatggcttgtgcaggtaactaatggatcaatcatgtttttcatctt

SEQ ID NO: 54545 - protein, 291 aa, Glycine max
  peptide (1)..(291): Ceres Seq. ID no. 14313797
  misc_feature (253)..(291): Homolog of NCBI NO: 9719732 NR Description: T10F20.18 [Arabidopsis thaliana]
  misc_feature (1)..(64): Homolog of NCBI NO: 9719732 NR Description: T10F20.18 [Arabidopsis thaliana]
  misc_feature (82)..(252): Homolog of NCBI NO: 9719732 NR Description: T10F20.18 [Arabidopsis thaliana]
  misc_feature (253)..(291): Homolog of NCBI NO: 25402844 NR Description: protein T10O22.15 [imported] - Arabidopsis
  misc_feature (1)..(252): Homolog of NCBI NO: 25402844 NR Description: protein T10O22.15 [imported] - Arabidopsis
  misc_feature (1)..(291): Homolog of NCBI NO: 15221003 NR Description: hypothetical protein [Arabidopsis thaliana]
  misc_feature (1)..(289): Homolog of NCBI NO: 13937298 NR Description: unknown protein [Oryza sativa]
  misc_feature (1)..(288): Homolog of NCBI NO: 21537359 NR Description: unknown [Arabidopsis thaliana]
  misc_feature (1)..(288): Homolog of NCBI NO: 30698953 NR Description: expressed protein [Arabidopsis thaliana]
  misc_feature (1)..(288): Homolog of NCBI NO: 18410409 NR Description: expressed protein [Arabidopsis thaliana]
MGTIIDSHFLAFTALVTIAYQFLFFVVTALLKFDKVTDFAGSTNFIIIAALTLVIKGSWYFRQIILTLFVGIWGIRLGLFLLFRILQWGEDRRFDEMRSNLGRLAIFWIFQAVWVWAVSLPVTVVNASDRNPFLQVVDIVGWILWAVGFIVEGTADQQKLHFKRSSENRGKWCNVGLWKYSRHPNYFGEILLWWGIFVASTPVLKGAEWLVIIGPIFLTLLLLFVSGIPLLEDSADKKFGNVDGYRIYKKRTSPLIPLPRSIYGNLSAWFKTTFLFEFPFYSRNLPQEENW

SEQ ID NO: 54546 - protein, 195 aa, Glycine max
  peptide (1)..(195): Ceres Seq. ID no. 14313798
  misc_feature (1)..(136): Homolog of NCBI NO: 25406281 NR Description: unknown protein F25P22.7 [imported] - Arabidopsis
  misc_feature (157)..(195): Homolog of NCBI NO: 9719732 NR Description: T10F20.18 [Arabidopsis thaliana]
  misc_feature (1)..(156): Homolog of NCBI NO: 9719732 NR Description: T10F20.18 [Arabidopsis thaliana]
  misc_feature (157)..(195): Homolog of NCBI NO: 25402844 NR Description: protein T10O22.15 [imported] - Arabidopsis
  misc_feature (1)..(156): Homolog of NCBI NO: 25402844 NR Description: protein T10O22.15 [imported] - Arabidopsis
  misc_feature (1)..(195): Homolog of NCBI NO: 15221003 NR Description: hypothetical protein [Arabidopsis thaliana]
  misc_feature (1)..(193): Homolog of NCBI NO: 13937298 NR Description: unknown protein [Oryza sativa]
  misc_feature (1)..(192): Homolog of NCBI NO: 21537359 NR Description: unknown [Arabidopsis thaliana]
  misc_feature (1)..(192): Homolog of NCBI NO: 30698953 NR Description: expressed protein [Arabidopsis thaliana]
  misc_feature (1)..(192): Homolog of NCBI NO: 18410409 NR Description: expressed protein [Arabidopsis thaliana]
MRSNLGRLAIFWIFQAVWVWAVSLPVTVVNASDRNPFLQVVDIVGWILWAVGFIVEGTADQQKLHFKRSSENRGKWCNVGLWKYSRHPNYFGEILLWWGIFVASTPVLKGAEWLVIIGPIFLTLLLLFVSGIPLLEDSADKKFGNVDGYRIYKKRTSPLIPLPRSIYGNLSAWFKTTFLFEFPFYSRNLPQEENW

SEQ ID NO: 54547 - DNA, 1554 bp, Glycine max
  misc_feature (1)..(1554): Ceres Seq. ID no. 14312204
aacagccggcggcggccacagaggcgagcagagcagagcagagtgggcaacaagcgaagaatggcgacggagatggaagaactcgtctcctttctttcttccccatcgccacagatcagaaaagccgccgttgacatagttcgcggcttaaccggctccgtcgagggcttgcagtccctcgccaattactcaaacgccctcttacccgccttgtctcgcctcttaacgttacccaaggaggtttcggaggctgctgcggaggcgctggtgaacctgtcgcagaactcgagcctcgcggaggtgatggttcgaatgggactggtcaaaacggcgatggatgttctgtacaagcccgactgcggcattgctcgcttgcttgtcatgcttttggtcaacctcactcaactcgaagctggtgctgcttccttgcttcagactgaagatgagaaggtgcttggattatatgttattaagcttgtgagatcattttgtagaaccacccatgagaataatgttttctctttgggctgaagcacctgtattggagagttcagattcaaagatgatgcttttgaacatgttggttcaatacttgttaacatctcaaaacagcggaaagggagggagcttctacttgacccaaaacggggtctcttaaagcagataatcagacagtttgattccaacagttcattgagaaagaaaggggtctctggaactattcgcaactgttgttttgaagctgagaatcagctacaaaatttgcttttggtatcagagtttctctggcccgcattacttcttcctgtagctggcaacaagatctacagtgagcaagacagatcgaaaatgccacttgaacttgggactgcactctcgattgaacgtgaactagttaatgatccagaaattcgtattcaggcattggaagccatatacttgatcatattgcaggaggcaggtcgaagagccttttggtctgtaaatggacctagaatagtacaaattggctacgaagatgaggaagatccaaaggtgatggaagcatatgaacaattgggatctttgttggttcacagcagcagtgcggaggaaccatccagtcagaccacaaagtagttattttatattaccatcagttgacccttcaatatctctccataagaactttaataattatgaaggtaattccaagtcaattttccattttgaggttagaattaccaattttagaaatatgtaaattatgcggctcagagtagttagtcaaaattatttatacacatggcagaatgagtgaagatgctcccttgatgcaaaatttcagtttgcttcttcagtttctgtatttggaattttgaattctctaaactgcaggtacaatatttcactttggaagatattatgtagcctgttttctttggattattagtaatcattcatttggctggtaaacgccactgataattcctagcacctatgtcattagtgtgcatttggttgtagtatttgagaatttcaaataatttaacatttaagaattttaattgcttc

SEQ ID NO: 54548 - protein, 176 aa, Glycine max
  peptide (1)..(176): Ceres Seq. ID no. 14312205
  misc_feature (112)..(176): Pfam Name: Domain of unknown function (DUF383) Pfam Description: Domain of unknown function (DUF383)
  misc_feature (21)..(176): Homolog of NCBI NO: 32417104 NR Description: hypothetical protein [Neurospora crassa]
  misc_feature (24)..(176): Homolog of NCBI NO: 19569883 NR Description: SIMILAR TO HYPOTHETICAL PROTEIN [Dictyostelium
  misc_feature (23)..(176): Homolog of NCBI NO: 10946998 NR Description: brain protein 16; DNA segment, Chr 15, ERATO Doi
  misc_feature (24)..(176): Homolog of NCBI NO: 13124773 NR Description: brain protein 16 [Homo sapiens]
  misc_feature (23)..(176): Homolog of NCBI NO: 26351805 NR Description: unnamed protein product [Mus musculus]
  misc_feature (11)..(176): Homolog of NCBI NO: 27662250 NR Description: similar to brain protein 16 [Mus musculus]
  misc_feature (21)..(145): Homolog of NCBI NO: 37534210 NR Description: unknown protein [Oryza sativa (japonica
  misc_feature (84)..(176): Homolog of NCBI NO: 37534210 NR Description: unknown protein [Oryza sativa (japonica
  misc_feature (21)..(176): Homolog of NCBI NO: 26449855 NR Description: unknown protein [Arabidopsis thaliana]
  misc_feature (21)..(176): Homolog of NCBI NO: 15223707 NR Description: expressed protein [Arabidopsis thaliana]
NSRRRPQRRAEQSRVGNKRRMATEMEELVSFLSSPSPQIRKAAVDIVRGLTGSVEGLQSLANYSNALLPALSRLLTLPKEVSEAAAEALVNLSQNSSLAEVMVRMGLVKTAMDVLYKPDCGIARLLVMLLVNLTQLEAGAASLLQTEDEKVLGLYVIKLVRSFCRTTHENNVFSLG

SEQ ID NO: 54549 - protein, 156 aa, Glycine max
  peptide (1)..(156): Ceres Seq. ID no. 14312206
  misc_feature (92)..(156): Pfam Name: Domain of unknown function (DUF383) Pfam Description: Domain of unknown function (DUF383)
  misc_feature (1)..(156): Homolog of NCBI NO: 32417104 NR Description: hypothetical protein [Neurospora crassa]
  misc_feature (4)..(156): Homolog of NCBI NO: 19569883 NR Description: SIMILAR TO HYPOTHETICAL PROTEIN [Dictyostelium
  misc_feature (3)..(156): Homolog of NCBI NO: 10946998 NR Description: brain protein 16; DNA segment, Chr 15, ERATO Doi
  misc_feature (4)..(156): Homolog of NCBI NO: 13124773 NR Description: brain protein 16 [Homo sapiens]
  misc_feature (3)..(156): Homolog of NCBI NO: 26351805 NR Description: unnamed protein product [Mus musculus]
  misc_feature (1)..(156): Homolog of NCBI NO: 27662250 NR Description: similar to brain protein 16 [Mus musculus]
  misc_feature (1)..(125): Homolog of NCBI NO: 37534210 NR Description: unknown protein [Oryza sativa (japonica
  misc_feature (64)..(156): Homolog of NCBI NO: 37534210 NR Description: unknown protein [Oryza sativa (japonica
  misc_feature (1)..(156): Homolog of NCBI NO: 26449855 NR Description: unknown protein [Arabidopsis thaliana]
  misc_feature (1)..(156): Homolog of NCBI NO: 15223707 NR Description: expressed protein [Arabidopsis thaliana]
MATEMEELVSFLSSPSPQIRKAAVDIVRGLTGSVEGLQSLANYSNALLPALSRLLTLPKEVSEAAAEALVNLSQNSSLAEVMVRMGLVKTAMDVLYKPDCGIARLLVMLLVNLTQLEAGAASLLQTEDEKVLGLYVIKLVRSFCRTTHENNVFSLG

SEQ ID NO: 54550 - protein, 152 aa, Glycine max
  peptide (1)..(152): Ceres Seq. ID no. 14312207
  misc_feature (88)..(152): Pfam Name: Domain of unknown function (DUF383) Pfam Description: Domain of unknown function (DUF383)
  misc_feature (1)..(152): Homolog of NCBI NO: 32417104 NR Description: hypothetical protein [Neurospora crassa]
  misc_feature (1)..(152): Homolog of NCBI NO: 19569883 NR Description: SIMILAR TO HYPOTHETICAL PROTEIN [Dictyostelium
  misc_feature (1)..(152): Homolog of NCBI NO: 10946998 NR Description: brain protein 16; DNA segment, Chr 15, ERATO Doi
  misc_feature (1)..(152): Homolog of NCBI NO: 13124773 NR Description: brain protein 16 [Homo sapiens]
  misc_feature (1)..(152): Homolog of NCBI NO: 26351805 NR Description: unnamed protein product [Mus musculus]
  misc_feature (1)..(152): Homolog of NCBI NO: 27662250 NR Description: similar to brain protein 16 [Mus musculus]
  misc_feature (1)..(121): Homolog of NCBI NO: 37534210 NR Description: unknown protein [Oryza sativa (japonica
  misc_feature (60)..(152): Homolog of NCBI NO: 37534210 NR Description: unknown protein [Oryza sativa (japonica
  misc_feature (1)..(152): Homolog of NCBI NO: 26449855 NR Description: unknown protein [Arabidopsis thaliana]
  misc_feature (1)..(152): Homolog of NCBI NO: 15223707 NR Description: expressed protein [Arabidopsis thaliana]
MEELVSFLSSPSPQIRKAAVDIVRGLTGSVEGLQSLANYSNALLPALSRLLTLPKEVSEAAAEALVNLSQNSSLAEVMVRMGLVKTAMDVLYKPDCGIARLLVMLLVNLTQLEAGAASLLQTEDEKVLGLYVIKLVRSFCRTTHENNVFSLG

SEQ ID NO: 54551 - DNA, 649 bp, Glycine max
  misc_feature (1)..(649): Ceres Seq. ID no. 13581273
acaatmaaccaaacacaacacttcactctcaagnttcaagcatgactcctttttacytcctcctatttgccttcatccttttcctctccataaacttcttgatccaaacaagaaggttcaaaaaccttcctccgggaccattttctttccctataatcggaaacctccaccaactcaagcaacccctccaccgcacgttccatgccttatcacaaaaatatggccctattttctccctctggttcggctcccgttttgtcgtcgtcgtttcgtcgccgctcgcggtgcaagaatgcttcaccaagaacgacatcgtcttggccaaccgccctcacttcctcaccggcaagtatatagggtacaacaacaccaccgtcgccgtttccccctacggcgaccactggcgcaacctccgccgcatcatggcgctcgaggttctctccacccaccggataaactccttcttggaaaatcggagggacgagatcatgaggctcgtgcaaaagcttgctcgggactcgcgcaatggcttcaccaaagtagaacttaaatccaggttttcggagatgacatttaacactataatgaggatggtgtcagggaagavgtactatggtgaagactgkgatgtgagtgatgtacavgaagc

SEQ ID NO: 54552 - protein, 215 aa, Glycine max
  peptide (1)..(215): Ceres Seq. ID no. 13581274
  misc_feature (18)..(214): Homolog of NCBI NO: 4894170 NR Description: cytochrome P450 [Cicer arietinum]
  misc_feature (14)..(214): Homolog of NCBI NO: 37726104 NR Description: cytochrome P450 [Pisum sativum]
  misc_feature (21)..(214): Homolog of NCBI NO: 3850630 NR Description: cytochrome P450 [Cicer arietinum]
  misc_feature (18)..(214): Homolog of NCBI NO: 4688640 NR Description: cytochrome P450 monooxygenase [Cicer arietinum]
  misc_feature (18)..(214): Homolog of NCBI NO: 33521517 NR Description: isoflavone 2'-hydroxylase [Medicago truncatula]
  misc_feature (21)..(214): Homolog of NCBI NO: 4200044 NR Description: cytochrome P450 [Glycyrrhiza echinata]
  misc_feature (21)..(214): Homolog of NCBI NO: 5915842 NR Description: Cytochrome P450 81E1 (Isoflavone 2'-hydroxylase)
  misc_feature (17)..(214): Homolog of NCBI NO: 33521519 NR Description: isoflavone 3'-hydroxylase [Medicago truncatula]
  misc_feature (18)..(214): Homolog of NCBI NO: 7415996 NR Description: cytochrome P450 [Lotus japonicus]
  misc_feature (14)..(214): Homolog of NCBI NO: 33521521 NR Description: CYP81E8 [Medicago truncatula]
  misc_feature (2)..(2): Xaa is any aa, unknown or other
  misc_feature (11)..(11): Xaa is any aa, unknown or other
  misc_feature (19)..(19): Xaa is any aa, unknown or other
  misc_feature (202)..(202): Xaa is any aa, unknown or other
  misc_feature (208)..(208): Xaa is any aa, unknown or other
  misc_feature (214)..(214): Xaa is any aa, unknown or other
NXPNTTLHSQXSSMTPFYXLLFAFILFLSINFLIQTRRFKNLPPGPFSFPIIGNLHQLKQPLHRTFHALSQKYGPIFSLWFGSRFVVVVSSPLAVQECFTKNDIVLANRPHFLTGKYIGYNNTTVAVSPYGDHWRNLRRIMALEVLSTHRINSFLENRRDEIMRLVQKLARDSRNGFTKVELKSRFSEMTFNTIMRMVSGKXYYGEDXDVSDVXE

SEQ ID NO: 54553 - protein, 202 aa, Glycine max
  peptide (1)..(202): Ceres Seq. ID no. 13581275
  misc_feature (5)..(201): Homolog of NCBI NO: 4894170 NR Description: cytochrome P450 [Cicer arietinum]
  misc_feature (1)..(201): Homolog of NCBI NO: 37726104 NR Description: cytochrome P450 [Pisum sativum]
  misc_feature (8)..(201): Homolog of NCBI NO: 3850630 NR Description: cytochrome P450 [Cicer arietinum]
  misc_feature (5)..(201): Homolog of NCBI NO: 4688640 NR Description: cytochrome P450 monooxygenase [Cicer arietinum]
  misc_feature (5)..(201): Homolog of NCBI NO: 33521517 NR Description: isoflavone 2'-hydroxylase [Medicago truncatula]
  misc_feature (8)..(201): Homolog of NCBI NO: 4200044 NR Description: cytochrome P450 [Glycyrrhiza echinata]
  misc_feature (8)..(201): Homolog of NCBI NO: 5915842 NR Description: Cytochrome P450 81E1 (Isoflavone 2'-hydroxylase)
  misc_feature (4)..(201): Homolog of NCBI NO: 33521519 NR Description: isoflavone 3'-hydroxylase [Medicago truncatula]
  misc_feature (5)..(201): Homolog of NCBI NO: 7415996 NR Description: cytochrome P450 [Lotus japonicus]
  misc_feature (1)..(201): Homolog of NCBI NO: 33521521 NR Description: CYP81E8 [Medicago truncatula]
  misc_feature (6)..(6): Xaa is any aa, unknown or other
  misc_feature (189)..(189): Xaa is any aa, unknown or other
  misc_feature (195)..(195): Xaa is any aa, unknown or other
  misc_feature (201)..(201): Xaa is any aa, unknown or other
MTPFYXLLFAFILFLSINFLIQTRRFKNLPPGPFSFPIIGNLHQLKQPLHRTFHALSQKYGPIFSLWFGSRFVVVVSSPLAVQECFTKNDIVLANRPHFLTGKYIGYNNTTVAVSPYGDHWRNLRRIMALEVLSTHRINSFLENRRDEIMRLVQKLARDSRNGFTKVELKSRFSEMTFNTIMRMVSGKXYYGEDXDVSDVXE

SEQ ID NO: 54554 - protein, 182 aa, Glycine max
  peptide (1)..(182): Ceres Seq. ID no. 13581276
  misc_feature (2)..(2): Xaa is any aa, unknown or other
  misc_feature (11)..(11): Xaa is any aa, unknown or other
  misc_feature (19)..(19): Xaa is any aa, unknown or other
QXTKHNTSLSXFKHDSFLXPPICLHPFPLHKLLDPNKKVQKPSSGTIFFPYNRKPPPTQATPPPHVPCLITKIWPYFLPLVRLPFCRRRFVAARGARMLHQERHRLGQPPSLPHRQVYRVQQHHRRRFPLRRPLAQPPPHHGARGSLHPPDKLLLGKSEGRDHEARAKACSGLAQWLHQSRT

SEQ ID NO: 54555 - DNA, 1157 bp, Glycine max
  misc_feature (1)..(1157): Ceres Seq. ID no. 14303405
aatttctcatggaagatggctacagttttgaaggtttttgggaaaaaccacattttggtcaggctacttggatcttctttggaatttcaagtgagcaaatttgacattcgggtgagacagtcttggcaagatgacaagtggattatagttggaaagggttcttccagccatgaaaacagaaaacgttctagcgcccaacttcagaagatgtatacaaagacaaaactgtcaggttccgcttactatcgtcctgaaaagaaaaaactgagtattctggaatccaaactcgtttcttttaaaacattgaaacgaggaagcaattcacaagttgacgcatatgctaagcctcccccaaagtttagagcacgtgaaaatgaaggcagatgtcacagagcaagacttagaaatccacccacaccactcaaacaggtacagggtgtcagttttccaagagaagtgatcgctgaagaatgcatacctgcttctgtaaacaacagaaaaactgggatttctaatatggttgacatggagaggaggaaacagacaggagaaaacttagaatcaaatcatgcttatagtgttacatgctctgttggtagttgtagtatcactagcaggaattcctataaatcgcaatttcctgtatatgcaggtccttttgatgatgtagacagttcatttagtgatgctgagtctgtctgccagaggagtgatgaggaagggaattgttcccctcctacacaagaggaattggcggcagaaattcataggttagagttgcatgcctatcattgtacaattgaggcattgcatgcatcaggacccttaagttgggaacaggaagcattaatgacaaacctccgtctttcgctccacatatcaaacgatgaacacttaatggagctaagaaatttgatttcttctgaaaacagcattcctttcagatgacaggaatttttttcctcttcaatttaatactttttccctaggatagagtttcggaatagtttgatctcagcctcattcaactgtaagaagaaagatgaaatatttcggtccttcatttatgttttatgacttagtgatatagtttgatgtgaatgtacatgctaaacttcgtaaataagtgatcatttctgaactcttgttaatcaaag

SEQ ID NO: 54556 - protein, 315 aa, Glycine max
  peptide (1)..(315): Ceres Seq. ID no. 14303406
  misc_feature (1)..(55): Homolog of NCBI NO: 15224760 NR Description: hypothetical protein [Arabidopsis thaliana]
  misc_feature (245)..(313): Homolog of NCBI NO: 34912578 NR Description: P0410E03.27 [Oryza sativa (japonica
  misc_feature (1)..(128): Homolog of NCBI NO: 15236804 NR Description: expressed protein [Arabidopsis thaliana]
  misc_feature (3)..(308): Homolog of NCBI NO: 34393474 NR Description: hypothetical protein [Oryza sativa (japonica
  misc_feature (76)..(308): Homolog of NCBI NO: 15236804 NR Description: expressed protein [Arabidopsis thaliana]
  misc_feature (3)..(126): Homolog of NCBI NO: 15241247 NR Description: expressed protein [Arabidopsis thaliana]
  misc_feature (179)..(315): Homolog of NCBI NO: 15241247 NR Description: expressed protein [Arabidopsis thaliana]
NFSWKMATVLKVFGKNHILVRLLGSSLEFQVSKFDIRVRQSWQDDKWIIVGKGSSSHENRKRSSAQLQKMYTKTKLSGSAYYRPEKKKLSILESKLVSFKTLKRGSNSQVDAYAKPPPKFRARENEGRCHRARLRNPPTPLKQVQGVSFPREVIAEECIPASVNNRKTGISNMVDMERRKQTGENLESNHAYSVTCSVGSCSITSRNSYKSQFPVYAGPFDDVDSSFSDAESVCQRSDEEGNCSPPTQEELAAEIHRLELHAYHCTIEALHASGPLSWEQEALMTNLRLSLHISNDEHLMELRNLISSENSIPFR

SEQ ID NO: 54557 - protein, 310 aa, Glycine max
  peptide (1)..(310): Ceres Seq. ID no. 14303407
  misc_feature (1)..(50): Homolog of NCBI NO: 15224760 NR Description: hypothetical protein [Arabidopsis thaliana]
  misc_feature (240)..(308): Homolog of NCBI NO: 34912578 NR Description: P0410E03.27 [Oryza sativa (japonica
  misc_feature (1)..(123): Homolog of NCBI NO: 15236804 NR Description: expressed protein [Arabidopsis thaliana]
  misc_feature (1)..(303): Homolog of NCBI NO: 34393474 NR Description: hypothetical protein [Oryza sativa (japonica
  misc_feature (71)..(303): Homolog of NCBI NO: 15236804 NR Description: expressed protein [Arabidopsis thaliana]
  misc_feature (1)..(121): Homolog of NCBI NO: 15241247 NR Description: expressed protein [Arabidopsis thaliana]
  misc_feature (174)..(310): Homolog of NCBI NO: 15241247 NR Description: expressed protein [Arabidopsis thaliana]
MATVLKVFGKNHILVRLLGSSLEFQVSKFDIRVRQSWQDDKWIIVGKGSSSHENRKRSSAQLQKMYTKTKLSGSAYYRPEKKKLSILESKLVSFKTLKRGSNSQVDAYAKPPPKFRARENEGRCHRARLRNPPTPLKQVQGVSFPREVIAEECIPASVNNRKTGISNMVDMERRKQTGENLESNHAYSVTCSVGSCSITSRNSYKSQFPVYAGPFDDVDSSFSDAESVCQRSDEEGNCSPPTQEELAAEIHRLELHAYHCTIEALHASGPLSWEQEALMTNLRLSLHISNDEHLMELRNLISSENSIPFR

SEQ ID NO: 54558 - protein, 246 aa, Glycine max
  peptide (1)..(246): Ceres Seq. ID no. 14303408
  misc_feature (176)..(244): Homolog of NCBI NO: 34912578 NR Description: P0410E03.27 [Oryza sativa (japonica
  misc_feature (1)..(59): Homolog of NCBI NO: 15236804 NR Description: expressed protein [Arabidopsis thaliana]
  misc_feature (1)..(239): Homolog of NCBI NO: 34393474 NR Description: hypothetical protein [Oryza sativa (japonica
  misc_feature (7)..(239): Homolog of NCBI NO: 15236804 NR Description: expressed protein [Arabidopsis thaliana]
  misc_feature (1)..(57): Homolog of NCBI NO: 15241247 NR Description: expressed protein [Arabidopsis thaliana]
  misc_feature (110)..(246): Homolog of NCBI NO: 15241247 NR Description: expressed protein [Arabidopsis thaliana]
MYTKTKLSGSAYYRPEKKKLSILESKLVSFKTLKRGSNSQVDAYAKPPPKFRARENEGRCHRARLRNPPTPLKQVQGVSFPREVIAEECIPASVNNRKTGISNMVDMERRKQTGENLESNHAYSVTCSVGSCSITSRNSYKSQFPVYAGPFDDVDSSFSDAESVCQRSDEEGNCSPPTQEELAAEIHRLELHAYHCTIEALHASGPLSWEQEALMTNLRLSLHISNDEHLMELRNLISSENSIPFR

SEQ ID NO: 54559 - DNA, 1086 bp, Glycine max
  misc_feature (1)..(1086): Ceres Seq. ID no. 14307472
atagagagaaggattcagactctggaagcttcctttggccggagaagaagacggtgtcgtttgagacttgggggagaggagaatgacagagttgagcagcagagaggtggaatacataaggagacaccacagcaaggcagcagaggacaatcagtgtgcctctgctctcgttaagcacataagggccccacttcctctcgtaattccctttgcatcattaagtaattaagtaattattatattattaattactttatgatttgtaggtgtggtcgttggtgaggagatttgatgagccgcagaagtataaaccgtttgtgagcaggtgcgtggtgaggggaaaccttgagattgggagtttgagagaggttgatgttaagtccggccttccagcgactactagtactgaaagattagagattcttgatgacaatcatcatatacttagcgtcaggattattggcggtgatcatagacttaggaactactcgtctatcatgtccctccacccagaaattgttgatggaaggccaggtaccctggtaattgaatcatttgtggtggacatacctgaaggcaacaccaaggatgagacctgctacttcgttgaagcattgatcaaatgcaatctcaaatcacttgctgatgtctcagaaggccttactttgcaggaccacactgaaccaattgatcgaaaatacgagttattgatcacaagaggctgagaatttggctgccatggatgaagctttcccaactttggaggcatagaagacggaatgccaaatggcaatggtgctttattctctgttatatatgattgcttttgctcgtttctctctttagtggtagttaaaaagaatagaatgttttagacaaatgtctgaatcagtgcaggaaaaggtgactgcatgttatgttctttctgtatataggtgttggtcaaagttggtccgtaaaattgtttccattggtcagtactcagttgtaatttctggttgcagtaaatttttagcaaataacagaggtttcttcttaaatgagtactattatattataaataatatctcgacagcttatgtaaag

SEQ ID NO: 54560 - protein, 75 aa, Glycine max
  peptide (1)..(75): Ceres Seq. ID no. 14307473
  misc_feature (1)..(53): Homolog of NCBI NO: 18404709 NR Description: expressed protein [Arabidopsis thaliana]
  misc_feature (1)..(64): Homolog of NCBI NO: 7486358 NR Description: hypothetical protein F3I3.40 - Arabidopsis
  misc_feature (1)..(64): Homolog of NCBI NO: 21593105 NR Description: unknown [Arabidopsis thaliana]
  misc_feature (1)..(64): Homolog of NCBI NO: 18411513 NR Description: expressed protein [Arabidopsis thaliana]
  misc_feature (1)..(64): Homolog of NCBI NO: 7486961 NR Description: hypothetical protein T13J8.30 - Arabidopsis
  misc_feature (1)..(64): Homolog of NCBI NO: 30687786 NR Description: expressed protein [Arabidopsis thaliana]
  misc_feature (1)..(62): Homolog of NCBI NO: 21593547 NR Description: unknown [Arabidopsis thaliana]
  misc_feature (1)..(62): Homolog of NCBI NO: 25348264 NR Description: hypothetical protein F6F3.16 - Arabidopsis
  misc_feature (1)..(62): Homolog of NCBI NO: 18378830 NR Description: expressed protein [Arabidopsis thaliana]
  misc_feature (1)..(62): Homolog of NCBI NO: 15238661 NR Description: expressed protein [Arabidopsis thaliana]
MSLHPEIVDGRPGTLVIESFVVDIPEGNTKDETCYFVEALIKCNLKSLADVSEGLTLQDHTEPIDRKYELLITRG

SEQ ID NO: 54561 - protein, 69 aa, Glycine max
  peptide (1)..(69): Ceres Seq. ID no. 14307474
MSESVQEKVTACYVLSVYRCWSKLVRKIVSIGQYSVVISGCSKFLANNRGFFLNEYYYIINNISTAYVK

SEQ ID NO: 54562 - protein, 57 aa, Glycine max
  peptide (1)..(57): Ceres Seq. ID no. 14307475
IERRIQTLEASFGRRRRRCRLRLGGEENDRVEQQRGGIHKETPQQGSRGQSVCLCSR

SEQ ID NO: 54563 - DNA, 1101 bp, Glycine max
  misc_feature (1)..(1101): Ceres Seq. ID no. 14303324
gaacataatgatacacaatatttttctcctttcaactttaaatccttcccaatttatgtcatacccacttcgaggcttcaagtgctagctagcaacgtgcaaggaaactcactcttgaagtttgtgaatgtcctttgttggtaaggatgggaaggaagccatgttgtgacaagatggggttgaagaagggttcttggactgctgaagaggatgagattcttgttaattatatcaacaagaatggtggtcatggaagttggcgttctctccctaagttagcaggtcttcttcgttgtggcaagagttgccggctaagatggacaaactacctcagaccagatattaaacgtggttcctttacacttgaggaagaaaaactaatcatacagcttcatggtatccttggaaataggtgggctgctatagcctctcagctaccaggaagaacagacaatgagatcaagaacttatggaacacccacttaaagaaacgtctcatttgcatgggcctggacccacaaacccaccaaccactagcctctcctcataacctaaacgacaaggcccatgcatcatccacttcaacccgccacatggcccagtgggagactgcaaggcttgaagcagaggccaggctctcaagggagccacatttcaacaacaaaactgactctgactacttcctccgcatttggaactctgaagttggagaatcttttcgtgatgtccacaaatcagaatcttcaatcaaatgtgagtcattgtctgccaccactactactaccactacagatttggcttcctcaaccccagcaagcattgtcaaaaaggagtttttgtggggtgttaagaaaattgtctcttattcatcatcaagctctagtgaactagaacatgactcttgtgacacttcattgcagttcttgttggactttcctataaacaatgacatgagcttcttagaattatgagacaccaacccttccttacccttaattagtgcacgtatgatgttgttgatatgctgacatgtatccttctgttggctattttgtagacttatatcatgtttggataactataaaaattgattctgaaacc

SEQ ID NO: 54564 - protein, 274 aa, Glycine max
  peptide (1)..(274): Ceres Seq. ID no. 14303325
  misc_feature (14)..(62): Pfam Name: Myb-like DNA-binding domain Pfam Description: Myb-like DNA-binding domain
  misc_feature (177)..(222): Homolog of NCBI NO: 32489829 NR Description: OSJNBb0039L24.12 [Oryza sativa (japonica
  misc_feature (1)..(165): Homolog of NCBI NO: 32489829 NR Description: OSJNBb0039L24.12 [Oryza sativa (japonica
  misc_feature (1)..(182): Homolog of NCBI NO: 13346188 NR Description: GHMYB25 [Gossypium hirsutum]
  misc_feature (1)..(167): Homolog of NCBI NO: 15232045 NR Description: myb family transcription factor [Arabidopsis
  misc_feature (1)..(167): Homolog of NCBI NO: 282964 NR Description: myb-related protein 1 - garden petunia
  misc_feature (1)..(224): Homolog of NCBI NO: 27125807 NR Description: MYB27 protein [Oryza sativa (japonica
  misc_feature (1)..(225): Homolog of NCBI NO: 15242272 NR Description: myb family transcription factor [Arabidopsis
  misc_feature (1)..(186): Homolog of NCBI NO: 28628947 NR Description: MYB1 [Dendrobium sp. XMW-2002-1]
  misc_feature (36)..(272): Homolog of NCBI NO: 4115565 NR Description: MYB homologue [Perilla frutescens]
  misc_feature (1)..(273): Homolog of NCBI NO: 15233066 NR Description: myb DNA-binding protein (MYB17) [Arabidopsis
MGRKPCCDKMGLKKGSWTAEEDEILVNYINKNGGHGSWRSLPKLAGLLRCGKSCRLRWTNYLRPDIKRGSFTLEEEKLIIQLHGILGNRWAAIASQLPGRTDNEIKNLWNTHLKKRLICMGLDPQTHQPLASPHNLNDKAHASSTSTRHMAQWETARLEAEARLSREPHFNNKTDSDYFLRIWNSEVGESFRDVHKSESSIKCESLSATTTTTTTDLASSTPASIVKKEFLWGVKKIVSYSSSSSSELEHDSCDTSLQFLLDFPINNDMSFLEL

SEQ ID NO: 54565 - protein, 265 aa, Glycine max
  peptide (1)..(265): Ceres Seq. ID no. 14303326
  misc_feature (5)..(53): Pfam Name: Myb-like DNA-binding domain Pfam Description: Myb-like DNA-binding domain
  misc_feature (168)..(213): Homolog of NCBI NO: 32489829 NR Description: OSJNBb0039L24.12 [Oryza sativa (japonica
  misc_feature (1)..(156): Homolog of NCBI NO: 32489829 NR Description: OSJNBb0039L24.12 [Oryza sativa (japonica
  misc_feature (1)..(173): Homolog of NCBI NO: 13346188 NR Description: GHMYB25 [Gossypium hirsutum]
  misc_feature (1)..(158): Homolog of NCBI NO: 15232045 NR Description: myb family transcription factor [Arabidopsis
  misc_feature (1)..(158): Homolog of NCBI NO: 282964 NR Description: myb-related protein 1 - garden petunia
  misc_feature (1)..(215): Homolog of NCBI NO: 27125807 NR Description: MYB27 protein [Oryza sativa (japonica
  misc_feature (1)..(216): Homolog of NCBI NO: 15242272 NR Description: myb family transcription factor [Arabidopsis
  misc_feature (1)..(177): Homolog of NCBI NO: 28628947 NR Description: MYB1 [Dendrobium sp. XMW-2002-1]
  misc_feature (27)..(263): Homolog of NCBI NO: 4115565 NR Description: MYB homologue [Perilla frutescens]
  misc_feature (1)..(264): Homolog of NCBI NO: 15233066 NR Description: myb DNA-binding protein (MYB17) [Arabidopsis
MGLKKGSWTAEEDEILVNYINKNGGHGSWRSLPKLAGLLRCGKSCRLRWTNYLRPDIKRGSFTLEEEKLIIQLHGILGNRWAAIASQLPGRTDNEIKNLWNTHLKKRLICMGLDPQTHQPLASPHNLNDKAHASSTSTRHMAQWETARLEAEARLSREPHFNNKTDSDYFLRIWNSEVGESFRDVHKSESSIKCESLSATTTTTTTDLASSTPASIVKKEFLWGVKKIVSYSSSSSSELEHDSCDTSLQFLLDFPINNDMSFLEL

SEQ ID NO: 54566 - protein, 155 aa, Glycine max
  peptide (1)..(155): Ceres Seq. ID no. 14303327
  misc_feature (58)..(103): Homolog of NCBI NO: 32489829 NR Description: OSJNBb0039L24.12 [Oryza sativa (japonica
  misc_feature (1)..(46): Homolog of NCBI NO: 32489829 NR Description: OSJNBb0039L24.12 [Oryza sativa (japonica
  misc_feature (1)..(63): Homolog of NCBI NO: 13346188 NR Description: GHMYB25 [Gossypium hirsutum]
  misc_feature (1)..(48): Homolog of NCBI NO: 15232045 NR Description: myb family transcription factor [Arabidopsis
  misc_feature (1)..(48): Homolog of NCBI NO: 282964 NR Description: myb-related protein 1 - garden petunia
  misc_feature (1)..(105): Homolog of NCBI NO: 27125807 NR Description: MYB27 protein [Oryza sativa (japonica
  misc_feature (1)..(106): Homolog of NCBI NO: 15242272 NR Description: myb family transcription factor [Arabidopsis
  misc_feature (1)..(67): Homolog of NCBI NO: 28628947 NR Description: MYB1 [Dendrobium sp. XMW-2002-1]
  misc_feature (1)..(153): Homolog of NCBI NO: 4115565 NR Description: MYB homologue [Perilla frutescens]
  misc_feature (1)..(154): Homolog of NCBI NO: 15233066 NR Description: myb DNA-binding protein (MYB17) [Arabidopsis
MGLDPQTHQPLASPHNLNDKAHASSTSTRHMAQWETARLEAEARLSREPHFNNKTDSDYFLRIWNSEVGESFRDVHKSESSIKCESLSATTTTTTTDLASSTPASIVKKEFLWGVKKIVSYSSSSSSELEHDSCDTSLQFLLDFPINNDMSFLEL

SEQ ID NO: 54567 - DNA, 1017 bp, Glycine max
  misc_feature (1)..(1017): Ceres Seq. ID no. 14303336
atatttacttatttctcttccgtcttctgtaaatggttgatgatcatgttcacttttctttcagccaagtgattctcttccccccttgatctgcctataaatccactaagcacacactcaaaggacacagtcacatttagatataaacaaaagaagaaaagaaagaaaataatgtcaatggaaatgatggcaaccgaacgtgtttgttatgttcactgcaacttctgcaacaccattttggcggttagtgttccatacagcagtttgctaaccatagtgacggttagatgtggacattgtgccaatttgctatcagttaacatgggagcgtcacttcaagcatttccccctcaagaccctcagtcacagaaacagcttctaagctttgaagaaccaagcagctgcaaggaactgggatcatcatcttcaaaatgtaacaaaatagcgccatttcacgaggcagtagagcatgaacaacctaggattcctcccattcgtcctacagagaagagacatcgtgttccttctgcttataatcgcttcattaaggaggaaattcaaaggattaaggctagtaatccagatatcagccacagggaggctttcagctcagcagccaaaaactgggcacatttccctcacattcactttgggttaaagaacttaaagctggatggcaacaagcaagaaaagttggaccagggggaaggagctgaaaagtctaatggattctactgatgatataaatggaagcctgtgagtatgagcttgtttttgttatgcttgacctaaatcagtgaaaaatatgaggttgatcaaatttcttcccaatatatcgtacaactggatgggagactcctgcaagttaacctcagcctctcacaccaatgtttaatagtactacatatatatgtattgcccttttctatatatcgttgttatgaaatgattgctattcttgtgattgcatttattgtgttgaatttgagcacttaagtaaacaacacgttcctctat

SEQ ID NO: 54568 - protein, 188 aa, Glycine max
  peptide (1)..(188): Ceres Seq. ID no. 14303337
  misc_feature (1)..(162): Pfam Name: YABBY protein Pfam Description: YABBY protein
  misc_feature (109)..(162): Homolog of NCBI NO: 32330681 NR Description: yabby10 protein [Zea mays]
  misc_feature (8)..(162): Homolog of NCBI NO: 27804377 NR Description: MADS-box transcription factor CDM51
  misc_feature (8)..(188): Homolog of NCBI NO: 18406725 NR Description: abnormal floral organs protein (AFO) (FIL) YABBY1
  misc_feature (8)..(69): Homolog of NCBI NO: 32330677 NR Description: yabby15 protein [Zea mays]
  misc_feature (99)..(182): Homolog of NCBI NO: 32330677 NR Description: yabby15 protein [Zea mays]
  misc_feature (1)..(57): Homolog of NCBI NO: 38605890 NR Description: OSJNBb0020O11.2 [Oryza sativa (japonica
  misc_feature (64)..(181): Homolog of NCBI NO: 38605890 NR Description: OSJNBb0020O11.2 [Oryza sativa (japonica
  misc_feature (1)..(175): Homolog of NCBI NO: 30683176 NR Description: expressed protein [Arabidopsis thaliana]
  misc_feature (1)..(181): Homolog of NCBI NO: 11280864 NR Description: hypothetical protein 2 [imported] - rice
  misc_feature (1)..(188): Homolog of NCBI NO: 4928751 NR Description: YABBY2 [Arabidopsis thaliana]
MSMEMMATERVCYVHCNFCNTILAVSVPYSSLLTIVTVRCGHCANLLSVNMGASLQAFPPQDPQSQKQLLSFEEPSSCKELGSSSSKCNKIAPFHEAVEHEQPRIPPIRPTEKRHRVPSAYNRFIKEEIQRIKASNPDISHREAFSSAAKNWAHFPHIHFGLKNLKLDGNKQEKLDQGEGAEKSNGFY

SEQ ID NO: 54569 - protein, 186 aa, Glycine max
  peptide (1)..(186): Ceres Seq. ID no. 14303338
  misc_feature (1)..(160): Pfam Name: YABBY protein Pfam Description: YABBY protein
  misc_feature (107)..(160): Homolog of NCBI NO: 32330681 NR Description: yabby10 protein [Zea mays]
  misc_feature (6)..(160): Homolog of NCBI NO: 27804377 NR Description: MADS-box transcription factor CDM51
  misc_feature (6)..(186): Homolog of NCBI NO: 18406725 NR Description: abnormal floral organs protein (AFO) (FIL) YABBY1
  misc_feature (6)..(67): Homolog of NCBI NO: 32330677 NR Description: yabby15 protein [Zea mays]
  misc_feature (97)..(180): Homolog of NCBI NO: 32330677 NR Description: yabby15 protein [Zea mays]
  misc_feature (1)..(55): Homolog of NCBI NO: 38605890 NR Description: OSJNBb0020O11.2 [Oryza sativa (japonica
  misc_feature (62)..(179): Homolog of NCBI NO: 38605890 NR Description: OSJNBb0020O11.2 [Oryza sativa (japonica
  misc_feature (1)..(173): Homolog of NCBI NO: 30683176 NR Description: expressed protein [Arabidopsis thaliana]
  misc_feature (1)..(179): Homolog of NCBI NO: 11280864 NR Description: hypothetical protein 2 [imported] - rice
  misc_feature (1)..(186): Homolog of NCBI NO: 4928751 NR Description: YABBY2 [Arabidopsis thaliana]
MEMMATERVCYVHCNFCNTILAVSVPYSSLLTIVTVRCGHCANLLSVNMGASLQAFPPQDPQSQKQLLSFEEPSSCKELGSSSSKCNKIAPFHEAVEHEQPRIPPIRPTEKRHRVPSAYNRFIKEEIQRIKASNPDISHREAFSSAAKNWAHFPHIHFGLKNLKLDGNKQEKLDQGEGAEKSNGFY

SEQ ID NO: 54570 - protein, 184 aa, Glycine max
  peptide (1)..(184): Ceres Seq. ID no. 14303339
  misc_feature (1)..(158): Pfam Name: YABBY protein Pfam Description: YABBY protein
  misc_feature (105)..(158): Homolog of NCBI NO: 32330681 NR Description: yabby10 protein [Zea mays]
  misc_feature (4)..(158): Homolog of NCBI NO: 27804377 NR Description: MADS-box transcription factor CDM51
  misc_feature (4)..(184): Homolog of NCBI NO: 18406725 NR Description: abnormal floral organs protein (AFO) (FIL) YABBY1
  misc_feature (4)..(65): Homolog of NCBI NO: 32330677 NR Description: yabby15 protein [Zea mays]
  misc_feature (95)..(178): Homolog of NCBI NO: 32330677 NR Description: yabby15 protein [Zea mays]
  misc_feature (1)..(53): Homolog of NCBI NO: 38605890 NR Description: OSJNBb0020O11.2 [Oryza sativa (japonica
  misc_feature (60)..(177): Homolog of NCBI NO: 38605890 NR Description: OSJNBb0020O11.2 [Oryza sativa (japonica
  misc_feature (1)..(171): Homolog of NCBI NO: 30683176 NR Description: expressed protein [Arabidopsis thaliana]
  misc_feature (1)..(177): Homolog of NCBI NO: 11280864 NR Description: hypothetical protein 2 [imported] - rice
  misc_feature (1)..(184): Homolog of NCBI NO: 4928751 NR Description: YABBY2 [Arabidopsis thaliana]
MMATERVCYVHCNFCNTILAVSVPYSSLLTIVTVRCGHCANLLSVNMGASLQAFPPQDPQSQKQLLSFEEPSSCKELGSSSSKCNKIAPFHEAVEHEQPRIPPIRPTEKRHRVPSAYNRFIKEEIQRIKASNPDISHREAFSSAAKNWAHFPHIHFGLKNLKLDGNKQEKLDQGEGAEKSNGFY

SEQ ID NO: 54571 - DNA, 1491 bp, Glycine max
  misc_feature (1)..(1491): Ceres Seq. ID no. 15171594
agagatgcagccttgtgtatctaatgtcttcccaaatagatttcctattaaaaagaacattgctgcaaagcttgacaagtgcaggaaacaaataaaatatgctaagaaatcgttggacaatgggataccctattatggaattgatgcatgtaatgaggttttgaatggctatagccatattattgggcctgcactgaaacatgaatgcttgtgtactcgtgctgcactattggtcaagaggaagtggaaaaacgatgctcatatggctataagagactgctatgctgctaggataattgataattcctcttacaaagcactatactatatgtcagaagcattgtcacagttgggtagacatgaagatgctttggagtttgctgttgcttcccattctttggccccatccaaatctgaagttgcagaaagagtagcgaatgtgaagagggacattgctttagctgaagctgaaaaaaatagtcagaccaatgatggggcatcaaggtttgatagtaggggtggaagaatattatcattaagcgacatactctattgtcctgagtctaatagtgatgatccacatgatggttcaagatcagagagggatgattctgattacgatgacgaattggagttggactttgaaacatcaatatctggtgatgagggacatgatcttgaatcaaatattcttcatggaaatttaaatcttagaattcatgggagaggtgactccagagacaatgctgatgcaagtggctcatgtgaatcaccttcatcatcgtcacagaacagtagaacttcttatcagcctgaaccagctgttgatatgaaacagagatttgttggccactgcaatattgggactgacataaaacaagccagttttcttggtcaaagaggtgaatatgttgctagtggaagtgatgatggcagatggtttatttgggaaaagtgtacgggcagactaataaaaatgctgagtggtgatgaatctgttgtaaattgtgtacaatgccatccatttgattttgttgttgcaaccagtgggattgatagcacaataaagatctggactccaactgctcctgttccatcttctgtagctggtggttcagcaggaccagaaactggtgatgtgttggttgctatggagagcaatcaacaaaaactatcccgtagccataattctatcttgcccttattggaatcatttaggaggcaggattttcctgaagggtcgttacgcttgcatccatttgaatgtgctcaaagctaaaggtttgctaattgtcttctggtgggtgctctattcggttgtgcatatgaatctggactgattagtgatgacattgatggggaggagccactatcgatgggtatgaggtatatgagctttttcactatggaaggcattgggacgcgcagaataatttggagcggtgaaaataaaatcctgggtgttatcctggatttctttccaggattgac

SEQ ID NO: 54572 - protein, 425 aa, Glycine max
  peptide (1)..(425): Ceres Seq. ID no. 15171595
  misc_feature (276)..(317): Pfam Name: WD domain, G-beta repeat Pfam Description: WD domain, G-beta repeat
  misc_feature (52)..(123): Homolog of NCBI NO: 31210559 NR Description: ENSANGP00000000953 [Anopheles gambiae]
  misc_feature (264)..(368): Homolog of NCBI NO: 31210559 NR Description: ENSANGP00000000953 [Anopheles gambiae]
  misc_feature (11)..(123): Homolog of NCBI NO: 24654819 NR Description: CG5124-PA [Drosophila melanogaster]
  misc_feature (274)..(391): Homolog of NCBI NO: 24654819 NR Description: CG5124-PA [Drosophila melanogaster]
  misc_feature (73)..(125): Homolog of NCBI NO: 10435814 NR Description: unnamed protein product [Homo sapiens]
  misc_feature (213)..(406): Homolog of NCBI NO: 10435814 NR Description: unnamed protein product [Homo sapiens]
  misc_feature (38)..(123): Homolog of NCBI NO: 16076860 NR Description: SD07783p [Drosophila melanogaster]
  misc_feature (274)..(391): Homolog of NCBI NO: 16076860 NR Description: SD07783p [Drosophila melanogaster]
  misc_feature (1)..(425): Homolog of NCBI NO: 18416416 NR Description: transducin / WD-40 repeat protein family
  misc_feature (1)..(425): Homolog of NCBI NO: 11358295 NR Description: hypothetical protein T30N20_210 - Arabidopsis
EMQPCVSNVFPNRFPIKKNIAAKLDKCRKQIKYAKKSLDNGIPYYGIDACNEVLNGYSHIIGPALKHECLCTRAALLVKRKWKNDAHMAIRDCYAARIIDNSSYKALYYMSEALSQLGRHEDALEFAVASHSLAPSKSEVAERVANVKRDIALAEAEKNSQTNDGASRFDSRGGRILSLSDILYCPESNSDDPHDGSRSERDDSDYDDELELDFETSISGDEGHDLESNILHGNLNLRIHGRGDSRDNADASGSCESPSSSSQNSRTSYQPEPAVDMKQRFVGHCNIGTDIKQASFLGQRGEYVASGSDDGRWFIWEKCTGRLIKMLSGDESVVNCVQCHPFDFVVATSGIDSTIKIWTPTAPVPSSVAGGSAGPETGDVLVAMESNQQKLSRSHNSILPLLESFRRQDFPEGSLRLHPFECAQS

SEQ ID NO: 54573 - protein, 424 aa, Glycine max
  peptide (1)..(424): Ceres Seq. ID no. 15171596
  misc_feature (275)..(316): Pfam Name: WD domain, G-beta repeat Pfam Description: WD domain, G-beta repeat
  misc_feature (51)..(122): Homolog of NCBI NO: 31210559 NR Description: ENSANGP00000000953 [Anopheles gambiae]
  misc_feature (263)..(367): Homolog of NCBI NO: 31210559 NR Description: ENSANGP00000000953 [Anopheles gambiae]
  misc_feature (10)..(122): Homolog of NCBI NO: 24654819 NR Description: CG5124-PA [Drosophila melanogaster]
  misc_feature (273)..(390): Homolog of NCBI NO: 24654819 NR Description: CG5124-PA [Drosophila melanogaster]
  misc_feature (72)..(124): Homolog of NCBI NO: 10435814 NR Description: unnamed protein product [Homo sapiens]
  misc_feature (212)..(405): Homolog of NCBI NO: 10435814 NR Description: unnamed protein product [Homo sapiens]
  misc_feature (37)..(122): Homolog of NCBI NO: 16076860 NR Description: SD07783p [Drosophila melanogaster]
  misc_feature (273)..(390): Homolog of NCBI NO: 16076860 NR Description: SD07783p [Drosophila melanogaster]
  misc_feature (1)..(424): Homolog of NCBI NO: 18416416 NR Description: transducin / WD-40 repeat protein family
  misc_feature (1)..(424): Homolog of NCBI NO: 11358295 NR Description: hypothetical protein T30N20_210 - Arabidopsis
MQPCVSNVFPNRFPIKKNIAAKLDKCRKQIKYAKKSLDNGIPYYGIDACNEVLNGYSHIIGPALKHECLCTRAALLVKRKWKNDAHMAIRDCYAARIIDNSSYKALYYMSEALSQLGRHEDALEFAVASHSLAPSKSEVAERVANVKRDIALAEAEKNSQTNDGASRFDSRGGRILSLSDILYCPESNSDDPHDGSRSERDDSDYDDELELDFETSISGDEGHDLESNILHGNLNLRIHGRGDSRDNADASGSCESPSSSSQNSRTSYQPEPAVDMKQRFVGHCNIGTDIKQASFLGQRGEYVASGSDDGRWFIWEKCTGRLIKMLSGDESVVNCVQCHPFDFVVATSGIDSTIKIWTPTAPVPSSVAGGSAGPETGDVLVAMESNQQKLSRSHNSILPLLESFRRQDFPEGSLRLHPFECAQS

SEQ ID NO: 54574 - protein, 338 aa, Glycine max
  peptide (1)..(338): Ceres Seq. ID no. 15171597
  misc_feature (189)..(230): Pfam Name: WD domain, G-beta repeat Pfam Description: WD domain, G-beta repeat
  misc_feature (1)..(36): Homolog of NCBI NO: 31210559 NR Description: ENSANGP00000000953 [Anopheles gambiae]
  misc_feature (177)..(281): Homolog of NCBI NO: 31210559 NR Description: ENSANGP00000000953 [Anopheles gambiae]
  misc_feature (1)..(36): Homolog of NCBI NO: 24654819 NR Description: CG5124-PA [Drosophila melanogaster]
  misc_feature (187)..(304): Homolog of NCBI NO: 24654819 NR Description: CG5124-PA [Drosophila melanogaster]
  misc_feature (1)..(38): Homolog of NCBI NO: 10435814 NR Description: unnamed protein product [Homo sapiens]
  misc_feature (126)..(319): Homolog of NCBI NO: 10435814 NR Description: unnamed protein product [Homo sapiens]
  misc_feature (1)..(36): Homolog of NCBI NO: 16076860 NR Description: SD07783p [Drosophila melanogaster]
  misc_feature (187)..(304): Homolog of NCBI NO: 16076860 NR Description: SD07783p [Drosophila melanogaster]
  misc_feature (1)..(338): Homolog of NCBI NO: 18416416 NR Description: transducin / WD-40 repeat protein family
  misc_feature (1)..(338): Homolog of NCBI NO: 11358295 NR Description: hypothetical protein T30N20_210 - Arabidopsis
MAIRDCYAARIIDNSSYKALYYMSEALSQLGRHEDALEFAVASHSLAPSKSEVAERVANVKRDIALAEAEKNSQTNDGASRFDSRGGRILSLSDILYCPESNSDDPHDGSRSERDDSDYDDELELDFETSISGDEGHDLESNILHGNLNLRIHGRGDSRDNADASGSCESPSSSSQNSRTSYQPEPAVDMKQRFVGHCNIGTDIKQASFLGQRGEYVASGSDDGRWFIWEKCTGRLIKMLSGDESVVNCVQCHPFDFVVATSGIDSTIKIWTPTAPVPSSVAGGSAGPETGDVLVAMESNQQKLSRSHNSILPLLESFRRQDFPEGSLRLHPFECAQS

SEQ ID NO: 54575 - DNA, 1135 bp, Glycine max
  misc_feature (1)..(1135): Ceres Seq. ID no. 14304848
ggaaacgcggctttctactgccacgtcttctctcgctccttaaccttaaaccctaaccctctgctcctcgtttccccgtttcggaaacccgaaacgtttcgcctcgcttcacccgtttcgtgcttatcctcctcctcaatggcggtgcctccgtcttcgctggagaagcaattcgatgactttagggttcagctggaagaatctggaaccttgcgcgaacgaattcgaagcgtcgtttcggagattgagtcctccactaggctcatctatgccacacttcttctcgttcaccagtctcgtcccactcccgagcttttagagaaggccaagtctcatgttaatgtgttaaagaagcagtataagcaacttgctgaagttgttggaggatgccctgggcaatactataggtaccatggtgattggaagagtgagacacagtctgtagtttcaatgcttacatttatgcactggcttgaaacaggaagccttctcgagcacaaagaggctgaggaaaaacttgggttgaatagttcagaatttggcctagacgttgaagattacttaataggtgtctgttttatgtctaatgaattgccaaggtatgtggtgaatcaagtgacagctggggactatgattgtccaaggaaggtcttaaagttcttaacagatctccatgctgcattccgcatgcttaatctacgaaatgattttttgcgaaagaagtttgatggcatgaagtatgacttaagaaaagtcgaagaagtttactatgatgttaagattcggggtttgacaccgaatggtgagccagttggagacttggagatcaaggaatcgcaggacaatcttaatcttaagttgtgatacctgtagacccaaagtacatggagctttactagcttcttaacaaactatggaccttaaaaattgataggcttagctttttgttagctgtaacgggagttctatttctaatggttgatgaaagcaagattcatgagtaaggaaatacaattgccagtatgtgctgctgactttcaaccatcgtgagaactaagaaccctgtactcaatgcttgtgggttgaacggggattttcaattcaatccacagcggacaatttgaagtttttcttt

SEQ ID NO: 54576 - protein, 287 aa, Glycine max
  peptide (1)..(287): Ceres Seq. ID no. 14304849
  misc_feature (71)..(264): Pfam Name: Translin family Pfam Description: Translin family
  misc_feature (53)..(263): Homolog of NCBI NO: 21730459 NR Description: Chain A, Crystal Structure Of Mouse TestisBRAIN
  misc_feature (53)..(263): Homolog of NCBI NO: 6755899 NR Description: translin; testis/brain-RNA-binding protein [Mus
  misc_feature (53)..(272): Homolog of NCBI NO: 6136058 NR Description: Translin
  misc_feature (53)..(270): Homolog of NCBI NO: 7648677 NR Description: translin [Xenopus laevis]
  misc_feature (58)..(265): Homolog of NCBI NO: 20129859 NR Description: CG11761-PA [Drosophila melanogaster]
  misc_feature (41)..(264): Homolog of NCBI NO: 31213187 NR Description: ENSANGP00000021806 [Anopheles gambiae]
  misc_feature (11)..(269): Homolog of NCBI NO: 37534782 NR Description: translin-like protein [Oryza sativa (japonica
  misc_feature (182)..(272): Homolog of NCBI NO: 25408524 NR Description: translin-like protein [imported] - Arabidopsis
  misc_feature (53)..(196): Homolog of NCBI NO: 25408524 NR Description: translin-like protein [imported] - Arabidopsis
  misc_feature (53)..(272): Homolog of NCBI NO: 18404301 NR Description: translin-related protein [Arabidopsis thaliana]
GNAAFYCHVFSRSLTLNPNPLLLVSPFRKPETFRLASPVSCLSSSSMAVPPSSLEKQFDDFRVQLEESGTLRERIRSVVSEIESSTRLIYATLLLVHQSRPTPELLEKAKSHVNVLKKQYKQLAEVVGGCPGQYYRYHGDWKSETQSVVSMLTFMHWLETGSLLEHKEAEEKLGLNSSEFGLDVEDYLIGVCFMSNELPRYVVNQVTAGDYDCPRKVLKFLTDLHAAFRMLNLRNDFLRKKFDGMKYDLRKVEEVYYDVKIRGLTPNGEPVGDLEIKESQDNLNLKL

SEQ ID NO: 54577 - protein, 241 aa, Glycine max
  peptide (1)..(241): Ceres Seq. ID no. 14304850
  misc_feature (25)..(218): Pfam Name: Translin family Pfam Description: Translin family
  misc_feature (7)..(217): Homolog of NCBI NO: 21730459 NR Description: Chain A, Crystal Structure Of Mouse TestisBRAIN
  misc_feature (7)..(217): Homolog of NCBI NO: 6755899 NR Description: translin; testis/brain-RNA-binding protein [Mus
  misc_feature (7)..(226): Homolog of NCBI NO: 6136058 NR Description: Translin
  misc_feature (7)..(224): Homolog of NCBI NO: 7648677 NR Description: translin [Xenopus laevis]
  misc_feature (12)..(219): Homolog of NCBI NO: 20129859 NR Description: CG11761-PA [Drosophila melanogaster]
  misc_feature (1)..(218): Homolog of NCBI NO: 31213187 NR Description: ENSANGP00000021806 [Anopheles gambiae]
  misc_feature (1)..(223): Homolog of NCBI NO: 37534782 NR Description: translin-like protein [Oryza sativa (japonica
  misc_feature (136)..(226): Homolog of NCBI NO: 25408524 NR Description: translin-like protein [imported] - Arabidopsis
  misc_feature (7)..(150): Homolog of NCBI NO: 25408524 NR Description: translin-like protein [imported] - Arabidopsis
  misc_feature (7)..(226): Homolog of NCBI NO: 18404301 NR Description: translin-related protein [Arabidopsis thaliana]
MAVPPSSLEKQFDDFRVQLEESGTLRERIRSVVSEIESSTRLIYATLLLVHQSRPTPELLEKAKSHVNVLKKQYKQLAEVVGGCPGQYYRYHGDWKSETQSVVSMLTFMHWLETGSLLEHKEAEEKLGLNSSEFGLDVEDYLIGVCFMSNELPRYVVNQVTAGDYDCPRKVLKFLTDLHAAFRMLNLRNDFLRKKFDGMKYDLRKVEEVYYDVKIRGLTPNGEPVGDLEIKESQDNLNLKL

SEQ ID NO: 54578 - DNA, 1613 bp, Glycine max
  misc_feature (1)..(1613): Ceres Seq. ID no. 14313811
ggtcagccactgcaaccaagccaacggcatcatggaagacagtttcagagtacgagcagagagagcctttggttctcttccaatcccttcttcttctctcaacactctctggtctctcaccgaagacgaaatcaataactccccttccaatcgcacccccaaacctaaacccaaaccctacccctcttcaagctcccgggttcagctccagaagggcctccacgatctcgacgacgacgacgacgacgacgacgaagaagaagaagagcctcgtggagtctctaaaccccctgattacgacgatgaacagtggcagattagggctggtattggccgagattgcaccctcgattacgaggaagaggaggatcaatatgacaagcaggctataggcaaagagaattcgggtgatcgtgtgtatatgaaggatctaaacgacgatggagttgagattagttcttgcaatgttttccccacttcattcagagattttgtcagagacccgcgtgcaaatcatttggcggcaaggattaggctgaagcaggatgacgaagcagcagccaaaaaaattgatgctctgcatgtctctgagaaatctgcaccagacattggtggtggtagtggcagtgatgttattaaccccaagtcaatcttgaagagtaaggataatctttcggagcccagggatgttcgcaaacgtgttcggtttgattctgaatgtgatgatagtggtaacgatgatgatgggcttgaaggaagaaccagggatgttcgcatgaagacctcttcaatggaagaggctacagcttctgaccagttgtcaaagtcaaaagaatttgattcagctgttccagattacattcgtaatccttcaagatacacccgttacacttttgatgattctccaagtgacatggatgacaaatcaaataaggaagcatgcatgagcttccttttgcagttgaaggggtcaaatgctgccaagagaactggacctcaagaagatgaagctttggaagatcttccatcagtaacatttatatcgaagaagaaatctggtgatgccaatatgtgcgacagcgagatggtgtcaaagccgaagcttgatgctggcacggaggccatgaataaaagagccttccctgttggcatagctgccagtgactctgaaaacagtgacgcttgtgcaatggaggaagatgaaccagaagttaaagacattaaaaagagctcacagaaggtgaaccgccagtacaggaagaaagctcaggagaatttggaggagcctgtgtaatgtaatggcgcagttagttcctagacttgcataatttgacatgatcagacttgtaccttttccccccattgtttccctcagactaatgctcccttttcgtaaatttgtgaaactacatcatgtgccaagatctgcctatggccaagttcgttagtttctttctagaagtagaactgctataggtataagcttcaactcaagcataatgatcagagattcagagctaagatgagatgtgttaaaaatgtatttttcatcataaaatatcaaattgtgagcagttgcccataatagcaattttcacctggtttatatttcg

SEQ ID NO: 54579 - protein, 430 aa, Glycine max
  peptide (1)..(430): Ceres Seq. ID no. 14313812
  misc_feature (7)..(137): Homolog of NCBI NO: 15240598 NR Description: expressed protein [Arabidopsis thaliana]
  misc_feature (165)..(309): Homolog of NCBI NO: 15240598 NR Description: expressed protein [Arabidopsis thaliana]
  misc_feature (75)..(125): Homolog of NCBI NO: 38347160 NR Description: OSJNBa0039C07.6 [Oryza sativa (japonica
  misc_feature (119)..(425): Homolog of NCBI NO: 38347160 NR Description: OSJNBa0039C07.6 [Oryza sativa (japonica
  misc_feature (11)..(428): Homolog of NCBI NO: 15240759 NR Description: expressed protein [Arabidopsis thaliana]
VSHCNQANGIMEDSFRVRAERAFGSLPIPSSSLNTLWSLTEDEINNSPSNRTPKPKPKPYPSSSSRVQLQKGLHDLDDDDDDDDEEEEEPRGVSKPPDYDDEQWQIRAGIGRDCTLDYEEEEDQYDKQAIGKENSGDRVYMKDLNDDGVEISSCNVFPTSFRDFVRDPRANHLAARIRLKQDDEAAAKKIDALHVSEKSAPDIGGGSGSDVINPKSILKSKDNLSEPRDVRKRVRFDSECDDSGNDDDGLEGRTRDVRMKTSSMEEATASDQLSKSKEFDSAVPDYIRNPSRYTRYTFDDSPSDMDDKSNKEACMSFLLQLKGSNAAKRTGPQEDEALEDLPSVTFISKKKSGDANMCDSEMVSKPKLDAGTEAMNKRAFPVGIAASDSENSDACAMEEDEPEVKDIKKSSQKVNRQYRKKAQENLEEPV

SEQ ID NO: 54580 - protein, 420 aa, Glycine max
  peptide (1)..(420): Ceres Seq. ID no. 14313813
  misc_feature (1)..(127): Homolog of NCBI NO: 15240598 NR Description: expressed protein [Arabidopsis thaliana]
  misc_feature (155)..(299): Homolog of NCBI NO: 15240598 NR Description: expressed protein [Arabidopsis thaliana]
  misc_feature (65)..(115): Homolog of NCBI NO: 38347160 NR Description: OSJNBa0039C07.6 [Oryza sativa (japonica
  misc_feature (109)..(415): Homolog of NCBI NO: 38347160 NR Description: OSJNBa0039C07.6 [Oryza sativa (japonica
  misc_feature (1)..(418): Homolog of NCBI NO: 15240759 NR Description: expressed protein [Arabidopsis thaliana]
MEDSFRVRAERAFGSLPIPSSSLNTLWSLTEDEINNSPSNRTPKPKPKPYPSSSSRVQLQKGLHDLDDDDDDDDEEEEEPRGVSKPPDYDDEQWQIRAGIGRDCTLDYEEEEDQYDKQAIGKENSGDRVYMKDLNDDGVEISSCNVFPTSFRDFVRDPRANHLAARIRLKQDDEAAAKKIDALHVSEKSAPDIGGGSGSDVINPKSILKSKDNLSEPRDVRKRVRFDSECDDSGNDDDGLEGRTRDVRMKTSSMEEATASDQLSKSKEFDSAVPDYIRNPSRYTRYTFDDSPSDMDDKSNKEACMSFLLQLKGSNAAKRTGPQEDEALEDLPSVTFISKKKSGDANMCDSEMVSKPKLDAGTEAMNKRAFPVGIAASDSENSDACAMEEDEPEVKDIKKSSQKVNRQYRKKAQENLEEPV

SEQ ID NO: 54581 - protein, 290 aa, Glycine max
  peptide (1)..(290): Ceres Seq. ID no. 14313814
  misc_feature (25)..(169): Homolog of NCBI NO: 15240598 NR Description: expressed protein [Arabidopsis thaliana]
  misc_feature (1)..(285): Homolog of NCBI NO: 38347160 NR Description: OSJNBa0039C07.6 [Oryza sativa (japonica
  misc_feature (1)..(288): Homolog of NCBI NO: 15240759 NR Description: expressed protein [Arabidopsis thaliana]
MKDLNDDGVEISSCNVFPTSFRDFVRDPRANHLAARIRLKQDDEAAAKKIDALHVSEKSAPDIGGGSGSDVINPKSILKSKDNLSEPRDVRKRVRFDSECDDSGNDDDGLEGRTRDVRMKTSSMEEATASDQLSKSKEFDSAVPDYIRNPSRYTRYTFDDSPSDMDDKSNKEACMSFLLQLKGSNAAKRTGPQEDEALEDLPSVTFISKKKSGDANMCDSEMVSKPKLDAGTEAMNKRAFPVGIAASDSENSDACAMEEDEPEVKDIKKSSQKVNRQYRKKAQENLEEPV

SEQ ID NO: 54582 - DNA, 1302 bp, Glycine max
  misc_feature (1)..(1302): Ceres Seq. ID no. 14310358
aggggactatcaaacattttggcccccttccgtgcccaactttctctcagacccgaaaatgaaagacatcttctaatggcagaagaagcacagaacagcaactccatgaatgccttgccaaaggttctcgttctgggtccccctacgtgcttcataaccctccaacctctctactctcacaagttccatttcctcaacccccacacctcaagcctttcactgcaacacttcctccaccaccaccaccaccaccacccttcctccatctccgccgttctctgcggtgcatcctactccgtcaccgccaacgtcctctgcctcctgcccgcgctccgcctcatcgtcaccaccagcgccggaaccgaccacatcgacctcgccgagtgccgccgccgcggaatccaggtcgccggcgccggagagctgttctccgaggacgtcgccgatatggccgtcgccctgctcgctgacgttatgaggaaaatttcggcggcggatcggtatttgaggactcagcagaatcacgacactacgccttgggattttttcacattcggctccaagttagcaggtaagcgagttgagattattggactgggaagcattggcatggaagtggccaagaggttggagtcttttggttgcattatcttatacaactctaagcataaaaaagcttcagtttcgtatcctttctattctagcatggtggatcttgcaactacttgcgacgctcttgtgttatgttgcgcactaaatgagcaaacaaagcacataattaacagggaagtcatgttggcattgggaaaacaaggatttattgtcaatgttggaagagggggtcttattgatgaaaaggaattggtcaagtgtttgatggaaggtgaaattggaggtgctggtttggatgtgtttgagaacgagcctcatgttcccaaagaactccttgcaatgaataatgtggttttatctccacattctgctgcttttactgtggaatctatgatgaatttgtgtgaacttatgggaggcaatttagaagccttcttcttaaataagcccctaattactcctgtaatgttgcctcaataacttgttcttttgataacctagtatcgtacgtgtggtacaattttatgacattcctgcaatgattctgattaagttttaaatgaatttgttctattccaaaaaccatctctgcaaagtgccttggcaagtgtatttcaaactctgttgtgccgttactctgtttgatcagtttttaagctcatttttatatggaaactctattgtgccgtt

SEQ ID NO: 54583 - protein, 363 aa, Glycine max
  peptide (1)..(363): Ceres Seq. ID no. 14310359
  misc_feature (147)..(326): Pfam Name: D-isomer specific 2-hydroxyacid dehydrogenase, Pfam Description: D-isomer specific 2-hydroxyacid dehydrogenase,
  misc_feature (87)..(360): Homolog of NCBI NO: 15890302 NR Description: AGR_L_379p [Agrobacterium tumefaciens]
  misc_feature (85)..(360): Homolog of NCBI NO: 34904262 NR Description: putative Caulobacter crescentus D-isomer specific
  misc_feature (85)..(360): Homolog of NCBI NO: 15220005 NR Description: oxidoreductase family [Arabidopsis thaliana]
  misc_feature (61)..(361): Homolog of NCBI NO: 21636166 NR Description: unknown [Aegilops tauschii]
  misc_feature (86)..(362): Homolog of NCBI NO: 38345306 NR Description: OSJNBb0085F13.6 [Oryza sativa (japonica
  misc_feature (91)..(361): Homolog of NCBI NO: 38345308 NR Description: OSJNBb0085F13.13 [Oryza sativa (japonica
  misc_feature (59)..(359): Homolog of NCBI NO: 32488422 NR Description: OSJNBb0085F13.12 [Oryza sativa (japonica
  misc_feature (61)..(363): Homolog of NCBI NO: 32488421 NR Description: OSJNBb0085F13.11 [Oryza sativa (japonica
  misc_feature (40)..(361): Homolog of NCBI NO: 15222015 NR Description: oxidoreductase family [Arabidopsis thaliana]
  misc_feature (33)..(360): Homolog of NCBI NO: 7485630 NR Description: probable glycerate dehydrogenase [imported] -
RGLSNILAPFRAQLSLRPENERHLLMAEEAQNSNSMNALPKVLVLGPPTCFITLQPLYSHKFHFLNPHTSSLSLQHFLHHHHHHHPSSISAVLCGASYSVTANVLCLLPALRLIVTTSAGTDHIDLAECRRRGIQVAGAGELFSEDVADMAVALLADVMRKISAADRYLRTQQNHDTTPWDFFTFGSKLAGKRVEIIGLGSIGMEVAKRLESFGCIILYNSKHKKASVSYPFYSSMVDLATTCDALVLCCALNEQTKHIINREVMLALGKQGFIVNVGRGGLIDEKELVKCLMEGEIGGAGLDVFENEPHVPKELLAMNNVVLSPHSAAFTVESMMNLCELMGGNLEAFFLNKPLITPVMLPQ

SEQ ID NO: 54584 - protein, 338 aa, Glycine max
  peptide (1)..(338): Ceres Seq. ID no. 14310360
  misc_feature (122)..(301): Pfam Name: D-isomer specific 2-hydroxyacid dehydrogenase, Pfam Description: D-isomer specific 2-hydroxyacid dehydrogenase,
  misc_feature (62)..(335): Homolog of NCBI NO: 15890302 NR Description: AGR_L_379p [Agrobacterium tumefaciens]
  misc_feature (60)..(335): Homolog of NCBI NO: 34904262 NR Description: putative Caulobacter crescentus D-isomer specific
  misc_feature (60)..(335): Homolog of NCBI NO: 15220005 NR Description: oxidoreductase family [Arabidopsis thaliana]
  misc_feature (36)..(336): Homolog of NCBI NO: 21636166 NR Description: unknown [Aegilops tauschii]
  misc_feature (61)..(337): Homolog of NCBI NO: 38345306 NR Description: OSJNBb0085F13.6 [Oryza sativa (japonica
  misc_feature (66)..(336): Homolog of NCBI NO: 38345308 NR Description: OSJNBb0085F13.13 [Oryza sativa (japonica
  misc_feature (34)..(334): Homolog of NCBI NO: 32488422 NR Description: OSJNBb0085F13.12 [Oryza sativa (japonica
  misc_feature (36)..(338): Homolog of NCBI NO: 32488421 NR Description: OSJNBb0085F13.11 [Oryza sativa (japonica
  misc_feature (15)..(336): Homolog of NCBI NO: 15222015 NR Description: oxidoreductase family [Arabidopsis thaliana]
  misc_feature (8)..(335): Homolog of NCBI NO: 7485630 NR Description: probable glycerate dehydrogenase [imported] -
MAEEAQNSNSMNALPKVLVLGPPTCFITLQPLYSHKFHFLNPHTSSLSLQHFLHHHHHHHPSSISAVLCGASYSVTANVLCLLPALRLIVTTSAGTDHIDLAECRRRGIQVAGAGELFSEDVADMAVALLADVMRKISAADRYLRTQQNHDTTPWDFFTFGSKLAGKRVEIIGLGSIGMEVAKRLESFGCIILYNSKHKKASVSYPFYSSMVDLATTCDALVLCCALNEQTKHIINREVMLALGKQGFIVNVGRGGLIDEKELVKCLMEGEIGGAGLDVFENEPHVPKELLAMNNVVLSPHSAAFTVESMMNLCELMGGNLEAFFLNKPLITPVMLPQ

SEQ ID NO: 54585 - protein, 328 aa, Glycine max
  peptide (1)..(328): Ceres Seq. ID no. 14310361
  misc_feature (112)..(291): Pfam Name: D-isomer specific 2-hydroxyacid dehydrogenase, Pfam Description: D-isomer specific 2-hydroxyacid dehydrogenase,
  misc_feature (52)..(325): Homolog of NCBI NO: 15890302 NR Description: AGR_L_379p [Agrobacterium tumefaciens]
  misc_feature (50)..(325): Homolog of NCBI NO: 34904262 NR Description: putative Caulobacter crescentus D-isomer specific
  misc_feature (50)..(325): Homolog of NCBI NO: 15220005 NR Description: oxidoreductase family [Arabidopsis thaliana]
  misc_feature (26)..(326): Homolog of NCBI NO: 21636166 NR Description: unknown [Aegilops tauschii]
  misc_feature (51)..(327): Homolog of NCBI NO: 38345306 NR Description: OSJNBb0085F13.6 [Oryza sativa (japonica
  misc_feature (56)..(326): Homolog of NCBI NO: 38345308 NR Description: OSJNBb0085F13.13 [Oryza sativa (japonica
  misc_feature (24)..(324): Homolog of NCBI NO: 32488422 NR Description: OSJNBb0085F13.12 [Oryza sativa (japonica
  misc_feature (26)..(328): Homolog of NCBI NO: 32488421 NR Description: OSJNBb0085F13.11 [Oryza sativa (japonica
  misc_feature (5)..(326): Homolog of NCBI NO: 15222015 NR Description: oxidoreductase family [Arabidopsis thaliana]
  misc_feature (1)..(325): Homolog of NCBI NO: 7485630 NR Description: probable glycerate dehydrogenase [imported] -
MNALPKVLVLGPPTCFITLQPLYSHKFHFLNPHTSSLSLQHFLHHHHHHHPSSISAVLCGASYSVTANVLCLLPALRLIVTTSAGTDHIDLAECRRRGIQVAGAGELFSEDVADMAVALLADVMRKISAADRYLRTQQNHDTTPWDFFTFGSKLAGKRVEIIGLGSIGMEVAKRLESFGCIILYNSKHKKASVSYPFYSSMVDLATTCDALVLCCALNEQTKHIINREVMLALGKQGFIVNVGRGGLIDEKELVKCLMEGEIGGAGLDVFENEPHVPKELLAMNNVVLSPHSAAFTVESMMNLCELMGGNLEAFFLNKPLITPVMLPQ

SEQ ID NO: 54586 - DNA, 1207 bp, Glycine max
  misc_feature (1)..(1207): Ceres Seq. ID no. 14307111
gcgccaaagcaaagatgaatgaagcggaggagcaactttgcgaggcggccagaaaaggtgacacggagaaagtgaggtctctcatagactccggcgctgacgtcagccacttcgacggcgagggcctcaatcctctgatgcacgccgcaaagcacggccatgcacccgtcctcaccctcctcctctccgccggcgctccctggaacgctctttccccctccaacctctccgccggcgactacgccatgcaagaaggccacaacgaagccttcgagcttctcgtcaacgccgggattcaagccgaactgatcctgggaacaattgcgaggaaggaaaacaagaacggcgattccggtcacgattacttggaagacagggtgagttttagcgaagacaagcttatggactctgaaagcaaggctgtgatgatggcgtgggagaatccgttgatggaggctcatgccaaagctgtttgttcgggaggtggccacgtactcaatattgggtttggaatggggctggtggattcggccattcagcgatatgcacctgcttcacacaccattgttgaggctcatcctgaggtttatgaacgcatgcttagctccggttggggtcagaaggaaagtgtcaagattgtttttggacgatggcaagatgttctgcctcagcttgaaacatatgatggaatattctttgacacctatggggagtactacgaagatctgagggagttccatcagcatctccccgcattgttgaagcctggtggtatctactcattcttcaacggtctttgtggcagtaatgcatttttccatgttgtttactgcaatttggtatcccttgagcttgagaatttggggtattccacacaattaattccattgccggttaaggattgtttgggagaacaagtttgggaaggtgtgaaacaaagatattggcagctcgatacgtactatcttcctgtctgtcaggccgtagaggaccctgagtgaggcaggaaatggatttcctgcagcttagaaagaactgcaccatgtgcagttaaaatttcaccgtccatgcaagttttttctcttctttatatattaaaattaaaggaataattgaaatctcatgcagttttttttttaactgtagagaatcttaatcccagtgatgtatgattttatttttaatcacatcgtcaaaatattctaac

SEQ ID NO: 54587 - protein, 332 aa, Glycine max
  peptide (1)..(332): Ceres Seq. ID no. 14307112
  misc_feature (41)..(72): Pfam Name: Ankyrin repeat Pfam Description: Ankyrin repeat
  misc_feature (10)..(152): Homolog of NCBI NO: 32416678 NR Description: hypothetical protein [Neurospora crassa]
  misc_feature (75)..(298): Homolog of NCBI NO: 32416678 NR Description: hypothetical protein [Neurospora crassa]
  misc_feature (121)..(323): Homolog of NCBI NO: 6320673 NR Description: Protein Arginine Methyltransferase
  misc_feature (60)..(324): Homolog of NCBI NO: 19115072 NR Description: hypothetical protein [Schizosaccharomyces pombe]
  misc_feature (59)..(144): Homolog of NCBI NO: 40738857 NR Description: hypothetical protein AN6072.2 [Aspergillus
  misc_feature (121)..(329): Homolog of NCBI NO: 40738857 NR Description: hypothetical protein AN6072.2 [Aspergillus
  misc_feature (12)..(324): Homolog of NCBI NO: 25777560 NR Description: hypothetical protein SPAC26A3.17c - fission yeast
  misc_feature (12)..(324): Homolog of NCBI NO: 12644401 NR Description: Hypothetical protein C26A3.17c in chromosome I
  misc_feature (1)..(332): Homolog of NCBI NO: 14488376 NR Description: putative methyltransferase
  misc_feature (5)..(326): Homolog of NCBI NO: 15239183 NR Description: hypothetical protein [Arabidopsis thaliana]
AKAKMNEAEEQLCEAARKGDTEKVRSLIDSGADVSHFDGEGLNPLMHAAKHGHAPVLTLLLSAGAPWNALSPSNLSAGDYAMQEGHNEAFELLVNAGIQAELILGTIARKENKNGDSGHDYLEDRVSFSEDKLMDSESKAVMMAWENPLMEAHAKAVCSGGGHVLNIGFGMGLVDSAIQRYAPASHTIVEAHPEVYERMLSSGWGQKESVKIVFGRWQDVLPQLETYDGIFFDTYGEYYEDLREFHQHLPALLKPGGIYSFFNGLCGSNAFFHVVYCNLVSLELENLGYSTQLIPLPVKDCLGEQVWEGVKQRYWQLDTYYLPVCQAVEDPE

SEQ ID NO: 54588 - protein, 328 aa, Glycine max
  peptide (1)..(328): Ceres Seq. ID no. 14307113
  misc_feature (37)..(68): Pfam Name: Ankyrin repeat Pfam Description: Ankyrin repeat
  misc_feature (6)..(148): Homolog of NCBI NO: 32416678 NR Description: hypothetical protein [Neurospora crassa]
  misc_feature (71)..(294): Homolog of NCBI NO: 32416678 NR Description: hypothetical protein [Neurospora crassa]
  misc_feature (117)..(319): Homolog of NCBI NO: 6320673 NR Description: Protein Arginine Methyltransferase
  misc_feature (56)..(320): Homolog of NCBI NO: 19115072 NR Description: hypothetical protein [Schizosaccharomyces pombe]
  misc_feature (55)..(140): Homolog of NCBI NO: 40738857 NR Description: hypothetical protein AN6072.2 [Aspergillus
  misc_feature (117)..(325): Homolog of NCBI NO: 40738857 NR Description: hypothetical protein AN6072.2 [Aspergillus
  misc_feature (8)..(320): Homolog of NCBI NO: 25777560 NR Description: hypothetical protein SPAC26A3.17c - fission yeast
  misc_feature (8)..(320): Homolog of NCBI NO: 12644401 NR Description: Hypothetical protein C26A3.17c in chromosome I
  misc_feature (1)..(328): Homolog of NCBI NO: 14488376 NR Description: putative methyltransferase
  misc_feature (1)..(322): Homolog of NCBI NO: 15239183 NR Description: hypothetical protein [Arabidopsis thaliana]
MNEAEEQLCEAARKGDTEKVRSLIDSGADVSHFDGEGLNPLMHAAKHGHAPVLTLLLSAGAPWNALSPSNLSAGDYAMQEGHNEAFELLVNAGIQAELILGTIARKENKNGDSGHDYLEDRVSFSEDKLMDSESKAVMMAWENPLMEAHAKAVCSGGGHVLNIGFGMGLVDSAIQRYAPASHTIVEAHPEVYERMLSSGWGQKESVKIVFGRWQDVLPQLETYDGIFFDTYGEYYEDLREFHQHLPALLKPGGIYSFFNGLCGSNAFFHVVYCNLVSLELENLGYSTQLIPLPVKDCLGEQVWEGVKQRYWQLDTYYLPVCQAVEDPE

SEQ ID NO: 54589 - protein, 287 aa, Glycine max
  peptide (1)..(287): Ceres Seq. ID no. 14307114
  misc_feature (1)..(27): Pfam Name: Ankyrin repeat Pfam Description: Ankyrin repeat
  misc_feature (1)..(107): Homolog of NCBI NO: 32416678 NR Description: hypothetical protein [Neurospora crassa]
  misc_feature (30)..(253): Homolog of NCBI NO: 32416678 NR Description: hypothetical protein [Neurospora crassa]
  misc_feature (76)..(278): Homolog of NCBI NO: 6320673 NR Description: Protein Arginine Methyltransferase
  misc_feature (15)..(279): Homolog of NCBI NO: 19115072 NR Description: hypothetical protein [Schizosaccharomyces pombe]
  misc_feature (14)..(99): Homolog of NCBI NO: 40738857 NR Description: hypothetical protein AN6072.2 [Aspergillus
  misc_feature (76)..(284): Homolog of NCBI NO: 40738857 NR Description: hypothetical protein AN6072.2 [Aspergillus
  misc_feature (1)..(279): Homolog of NCBI NO: 25777560 NR Description: hypothetical protein SPAC26A3.17c - fission yeast
  misc_feature (1)..(279): Homolog of NCBI NO: 12644401 NR Description: Hypothetical protein C26A3.17c in chromosome I
  misc_feature (1)..(287): Homolog of NCBI NO: 14488376 NR Description: putative methyltransferase
  misc_feature (1)..(281): Homolog of NCBI NO: 15239183 NR Description: hypothetical protein [Arabidopsis thaliana]
MHAAKHGHAPVLTLLLSAGAPWNALSPSNLSAGDYAMQEGHNEAFELLVNAGIQAELILGTIARKENKNGDSGHDYLEDRVSFSEDKLMDSESKAVMMAWENPLMEAHAKAVCSGGGHVLNIGFGMGLVDSAIQRYAPASHTIVEAHPEVYERMLSSGWGQKESVKIVFGRWQDVLPQLETYDGIFFDTYGEYYEDLREFHQHLPALLKPGGIYSFFNGLCGSNAFFHVVYCNLVSLELENLGYSTQLIPLPVKDCLGEQVWEGVKQRYWQLDTYYLPVCQAVEDPE

SEQ ID NO: 54590 - DNA, 1299 bp, Glycine max
  misc_feature (1)..(1299): Ceres Seq. ID no. 14311032
gaaaagtacgtgtcccattcttgtcaacaaacgtggcgcgcttcttaacataagcacttgcaatggcggattcagagcgaatccaaaattcgtggatggcttcggatcaaactgcaattgaaatgagcggcgagggcacaggttccagggaatgctcttctctccctccgccgccgcaaaaaccattcaattctgatcaattgggaatcggagaacgagctttctccgccgccggcgccgccttcctctccgccatcattgtcaatcccctcgacgttgccaagacaaggttgcaagcacaagcggcaggggtcgcatattctcatccactcagtaatatgaccagtagaatggcttgttttgggccaaatatgatatttgctgatttaaaatgttctccatcatgccaccgggctggattccagggcacagtgtccatttgtcctcccgagtgttttcgctacaaaggaacactagatgttatctacaaaattataaaacaggagggaatttctaggctatggagaggcacaaatgctggcctggctcttgcagtaccaactgtgggaatataccttccttgctatgacatactccgcaattggttggaggaattcacagctaaaaaggcaccaaccacaactacttatgtacctctagtagctggttcattggcacgctctctagcttgcactacttgctaccctattgaacttgctaaaactcgtatgcaggcatttaaagagactcaaattggtaaaaagcctcctggagtgatccagactctgctaggtgttgtttcaaatgtcaagagcacaaacactccacagaacagcttgcaaggttatcgtgttttgtggactggcatgggagctcaacttgcccgtgatgtacccttctctgctatttgttggtcgacacttgaaccgactagaagaaaacttcttggtttgattggaggtgatgatgccaatgcattgagtgttcttggggcaaattttggagctgggtttgttgcaggaaccttagcagctggagccacatgtccgctagatgttgtaaaaactcgaaggcagatagagagggatcctgttagggcattgaaaatgactacaagacagacactgatggaggtgtggagagatggaggcttgaaaggattgtttacaggtgttggtccacgagttggtcgagcaggcccctctgttggaattgtgatttcattttatgaagttgtaaagtttgttctacatcatcagtacacataatcatgattttctgcacactttttttgctgcc

SEQ ID NO: 54591 - protein, 401 aa, Glycine max
  peptide (1)..(401): Ceres Seq. ID no. 14311033
  misc_feature (44)..(395): Homolog of NCBI NO: 6321696 NR Description: Hypothetical ORF; Ygr257cp [Saccharomyces
  misc_feature (20)..(150): Homolog of NCBI NO: 7486963 NR Description: hypothetical protein T13J8.50 - Arabidopsis
  misc_feature (88)..(340): Homolog of NCBI NO: 7486963 NR Description: hypothetical protein T13J8.50 - Arabidopsis
  misc_feature (147)..(399): Homolog of NCBI NO: 30690327 NR Description: mitochondrial carrier protein family [Arabidopsis
  misc_feature (127)..(400): Homolog of NCBI NO: 34904154 NR Description: P0417G05.20 [Oryza sativa (japonica
  misc_feature (37)..(399): Homolog of NCBI NO: 25408981 NR Description: hypothetical protein At2g46320 [imported] -
  misc_feature (37)..(399): Homolog of NCBI NO: 19310377 NR Description: At2g46320/F11C10.1 [Arabidopsis thaliana]
  misc_feature (37)..(399): Homolog of NCBI NO: 30690323 NR Description: mitochondrial carrier protein family [Arabidopsis
  misc_feature (23)..(400): Homolog of NCBI NO: 40253478 NR Description: putative mitochondrial carrier protein
  misc_feature (1)..(397): Homolog of NCBI NO: 18417093 NR Description: mitochondrial carrier protein family [Arabidopsis
MADSERIQNSWMASDQTAIEMSGEGTGSRECSSLPPPPQKPFNSDQLGIGERAFSAAGAAFLSAIIVNPLDVAKTRLQAQAAGVAYSHPLSNMTSRMACFGPNMIFADLKCSPSCHRAGFQGTVSICPPECFRYKGTLDVIYKIIKQEGISRLWRGTNAGLALAVPTVGIYLPCYDILRNWLEEFTAKKAPTTTTYVPLVAGSLARSLACTTCYPIELAKTRMQAFKETQIGKKPPGVIQTLLGVVSNVKSTNTPQNSLQGYRVLWTGMGAQLARDVPFSAICWSTLEPTRRKLLGLIGGDDANALSVLGANFGAGFVAGTLAAGATCPLDVVKTRRQIERDPVRALKMTTRQTLMEVWRDGGLKGLFTGVGPRVGRAGPSVGIVISFYEVVKFVLHHQYT

SEQ ID NO: 54592 - protein, 390 aa, Glycine max
  peptide (1)..(390): Ceres Seq. ID no. 14311034
  misc_feature (33)..(384): Homolog of NCBI NO: 6321696 NR Description: Hypothetical ORF; Ygr257cp [Saccharomyces
  misc_feature (9)..(139): Homolog of NCBI NO: 7486963 NR Description: hypothetical protein T13J8.50 - Arabidopsis
  misc_feature (77)..(329): Homolog of NCBI NO: 7486963 NR Description: hypothetical protein T13J8.50 - Arabidopsis
  misc_feature (136)..(388): Homolog of NCBI NO: 30690327 NR Description: mitochondrial carrier protein family [Arabidopsis
  misc_feature (116)..(389): Homolog of NCBI NO: 34904154 NR Description: P0417G05.20 [Oryza sativa (japonica
  misc_feature (26)..(388): Homolog of NCBI NO: 25408981 NR Description: hypothetical protein At2g46320 [imported] -
  misc_feature (26)..(388): Homolog of NCBI NO: 19310377 NR Description: At2g46320/F11C10.1 [Arabidopsis thaliana]
  misc_feature (26)..(388): Homolog of NCBI NO: 30690323 NR Description: mitochondrial carrier protein family [Arabidopsis
  misc_feature (12)..(389): Homolog of NCBI NO: 40253478 NR Description: putative mitochondrial carrier protein
  misc_feature (1)..(386): Homolog of NCBI NO: 18417093 NR Description: mitochondrial carrier protein family [Arabidopsis
MASDQTAIEMSGEGTGSRECSSLPPPPQKPFNSDQLGIGERAFSAAGAAFLSAIIVNPLDVAKTRLQAQAAGVAYSHPLSNMTSRMACFGPNMIFADLKCSPSCHRAGFQGTVSICPPECFRYKGTLDVIYKIIKQEGISRLWRGTNAGLALAVPTVGIYLPCYDILRNWLEEFTAKKAPTTTTYVPLVAGSLARSLACTTCYPIELAKTRMQAFKETQIGKKPPGVIQTLLGVVSNVKSTNTPQNSLQGYRVLWTGMGAQLARDVPFSAICWSTLEPTRRKLLGLIGGDDANALSVLGANFGAGFVAGTLAAGATCPLDVVKTRRQIERDPVRALKMTTRQTLMEVWRDGGLKGLFTGVGPRVGRAGPSVGIVISFYEVVKFVLHHQYT

SEQ ID NO: 54593 - protein, 381 aa, Glycine max
  peptide (1)..(381): Ceres Seq. ID no. 14311035
  misc_feature (24)..(375): Homolog of NCBI NO: 6321696 NR Description: Hypothetical ORF; Ygr257cp [Saccharomyces
  misc_feature (1)..(130): Homolog of NCBI NO: 7486963 NR Description: hypothetical protein T13J8.50 - Arabidopsis
  misc_feature (68)..(320): Homolog of NCBI NO: 7486963 NR Description: hypothetical protein T13J8.50 - Arabidopsis
  misc_feature (127)..(379): Homolog of NCBI NO: 30690327 NR Description: mitochondrial carrier protein family [Arabidopsis
  misc_feature (107)..(380): Homolog of NCBI NO: 34904154 NR Description: P0417G05.20 [Oryza sativa (japonica
  misc_feature (17)..(379): Homolog of NCBI NO: 25408981 NR Description: hypothetical protein At2g46320 [imported] -
  misc_feature (17)..(379): Homolog of NCBI NO: 19310377 NR Description: At2g46320/F11C10.1 [Arabidopsis thaliana]
  misc_feature (17)..(379): Homolog of NCBI NO: 30690323 NR Description: mitochondrial carrier protein family [Arabidopsis
  misc_feature (3)..(380): Homolog of NCBI NO: 40253478 NR Description: putative mitochondrial carrier protein
  misc_feature (1)..(377): Homolog of NCBI NO: 18417093 NR Description: mitochondrial carrier protein family [Arabidopsis
MSGEGTGSRECSSLPPPPQKPFNSDQLGIGERAFSAAGAAFLSAIIVNPLDVAKTRLQAQAAGVAYSHPLSNMTSRMACFGPNMIFADLKCSPSCHRAGFQGTVSICPPECFRYKGTLDVIYKIIKQEGISRLWRGTNAGLALAVPTVGIYLPCYDILRNWLEEFTAKKAPTTTTYVPLVAGSLARSLACTTCYPIELAKTRMQAFKETQIGKKPPGVIQTLLGVVSNVKSTNTPQNSLQGYRVLWTGMGAQLARDVPFSAICWSTLEPTRRKLLGLIGGDDANALSVLGANFGAGFVAGTLAAGATCPLDVVKTRRQIERDPVRALKMTTRQTLMEVWRDGGLKGLFTGVGPRVGRAGPSVGIVISFYEVVKFVLHHQYT

SEQ ID NO: 54594 - DNA, 1219 bp, Glycine max
  misc_feature (1)..(1219): Ceres Seq. ID no. 14303955
gttcaacacgttacaataatggcccatttttctctctcccctctctcctgtgcaccttctcctctaccaccacgccgccgaatctttctctctcctcctcgagccgccgcatcttccgccaccgacgtcgtttccacttccacttccacttcattttctgcttcgaatttcgcgcccaaagtcgttgtcaccagagagcgcggcaagaacgccaagcttatcgctgctctggctaaacatgaaatcaattgtttggagcttccactcattgagcacatgcaaggacctgatttagataggcttccttctgtattaggtgacaatgcatttgattgggttgtgataacgtctcctgaggcaggctcagtctttctagaggcatggagagcttctgggatgcctcatgtcaaaataggtgttgttggggctggcactgcaagcattttcaaggaagctttgcagtcttccaaccgatcccttgatattgcctttgtgccatcaaaagcaacaggaaaggttttggctactgagcttcctaagattggaagtaaatgcacggttctctatcctgcttctgcaaaggctagtaatgagattgaggaaggactttcaaatcgtggatttgaggttactaggatgaatacatatacaacggtgccagttcaacatgttgaccatacggttctaaagatagcacttgctgcccctgttgttacagtagcttcaccatcttctattcgggcctggaagaatcttctttcagattcagagtggaacaattctgttgcgtgcattggtgagacaactgctacaatggcaagaagtttaggtttcacaaatgtgtacttcccaacacaaccaggcatcgaaggctgggtcgagagcattcttgaagcattagggttcctatgatgaattattgaggtaggtctcaggctctcagccctctgtagcaacctggagatgttttcaactttttctcatgctgcaagattaatataatgatttggcaccgtggatgtatatactttctctgttctgtagtatttttaaggataaatttagcttcaataaattaaggagagtgtagtgtatattaggaaataaagtgcacttatagtcattgattaaaatatcaatagttgagattgtaattaattcccaattttgttatacgggcacttgttttttaatcacaaactctaatcattaacttttt

SEQ ID NO: 54595 - protein, 303 aa, Glycine max
  peptide (1)..(303): Ceres Seq. ID no. 14303956
  misc_feature (68)..(295): Pfam Name: Uroporphyrinogen-III synthase HemD Pfam Description: Uroporphyrinogen-III synthase HemD
  misc_feature (68)..(300): Homolog of NCBI NO: 15805812 NR Description: uroporphyrinogen-III synthase, putative
  misc_feature (153)..(301): Homolog of NCBI NO: 7487883 NR Description: hypothetical protein At2g26540 [imported] -
  misc_feature (124)..(301): Homolog of NCBI NO: 22045244 NR Description: unknown protein [Arabidopsis thaliana]
  misc_feature (28)..(301): Homolog of NCBI NO: 21592861 NR Description: uroporphyrinogen III synthase [Arabidopsis
  misc_feature (28)..(301): Homolog of NCBI NO: 18694346 NR Description: uroporphyrinogen III synthase [Arabidopsis
  misc_feature (28)..(301): Homolog of NCBI NO: 18401160 NR Description: expressed protein [Arabidopsis thaliana]
VQHVTIMAHFSLSPLSCAPSPLPPRRRIFLSPPRAAASSATDVVSTSTSTSFSASNFAPKVVVTRERGKNAKLIAALAKHEINCLELPLIEHMQGPDLDRLPSVLGDNAFDWVVITSPEAGSVFLEAWRASGMPHVKIGVVGAGTASIFKEALQSSNRSLDIAFVPSKATGKVLATELPKIGSKCTVLYPASAKASNEIEEGLSNRGFEVTRMNTYTTVPVQHVDHTVLKIALAAPVVTVASPSSIRAWKNLLSDSEWNNSVACIGETTATMARSLGFTNVYFPTQPGIEGWVESILEALGFL

SEQ ID NO: 54596 - protein, 297 aa, Glycine max
  peptide (1)..(297): Ceres Seq. ID no. 14303957
  misc_feature (62)..(289): Pfam Name: Uroporphyrinogen-III synthase HemD Pfam Description: Uroporphyrinogen-III synthase HemD
  misc_feature (62)..(294): Homolog of NCBI NO: 15805812 NR Description: uroporphyrinogen-III synthase, putative
  misc_feature (147)..(295): Homolog of NCBI NO: 7487883 NR Description: hypothetical protein At2g26540 [imported] -
  misc_feature (118)..(295): Homolog of NCBI NO: 22045244 NR Description: unknown protein [Arabidopsis thaliana]
  misc_feature (22)..(295): Homolog of NCBI NO: 21592861 NR Description: uroporphyrinogen III synthase [Arabidopsis
  misc_feature (22)..(295): Homolog of NCBI NO: 18694346 NR Description: uroporphyrinogen III synthase [Arabidopsis
  misc_feature (22)..(295): Homolog of NCBI NO: 18401160 NR Description: expressed protein [Arabidopsis thaliana]
MAHFSLSPLSCAPSPLPPRRRIFLSPPRAAASSATDVVSTSTSTSFSASNFAPKVVVTRERGKNAKLIAALAKHEINCLELPLIEHMQGPDLDRLPSVLGDNAFDWVVITSPEAGSVFLEAWRASGMPHVKIGVVGAGTASIFKEALQSSNRSLDIAFVPSKATGKVLATELPKIGSKCTVLYPASAKASNEIEEGLSNRGFEVTRMNTYTTVPVQHVDHTVLKIALAAPVVTVASPSSIRAWKNLLSDSEWNNSVACIGETTATMARSLGFTNVYFPTQPGIEGWVESILEALGFL

SEQ ID NO: 54597 - protein, 211 aa, Glycine max
  peptide (1)..(211): Ceres Seq. ID no. 14303958
  misc_feature (1)..(203): Pfam Name: Uroporphyrinogen-III synthase HemD Pfam Description: Uroporphyrinogen-III synthase HemD
  misc_feature (1)..(208): Homolog of NCBI NO: 15805812 NR Description: uroporphyrinogen-III synthase, putative
  misc_feature (61)..(209): Homolog of NCBI NO: 7487883 NR Description: hypothetical protein At2g26540 [imported] -
  misc_feature (32)..(209): Homolog of NCBI NO: 22045244 NR Description: unknown protein [Arabidopsis thaliana]
  misc_feature (1)..(209): Homolog of NCBI NO: 21592861 NR Description: uroporphyrinogen III synthase [Arabidopsis
  misc_feature (1)..(209): Homolog of NCBI NO: 18694346 NR Description: uroporphyrinogen III synthase [Arabidopsis
  misc_feature (1)..(209): Homolog of NCBI NO: 18401160 NR Description: expressed protein [Arabidopsis thaliana]
MQGPDLDRLPSVLGDNAFDWVVITSPEAGSVFLEAWRASGMPHVKIGVVGAGTASIFKEALQSSNRSLDIAFVPSKATGKVLATELPKIGSKCTVLYPASAKASNEIEEGLSNRGFEVTRMNTYTTVPVQHVDHTVLKIALAAPVVTVASPSSIRAWKNLLSDSEWNNSVACIGETTATMARSLGFTNVYFPTQPGIEGWVESILEALGFL

SEQ ID NO: 54598 - DNA, 1623 bp, Glycine max
  misc_feature (1)..(1623): Ceres Seq. ID no. 15170288
aataattaaatctttaatccgagcatttcattttgatatttcatcattcccatggctaaacatgatgattgcggtcgtatgattgacactaagggtggacaatccttcgaaattgaaatgaaaggaagccctgctactcctactcctgctgctacacaagatagtttcaaaggtggagtcaaaatccaacaatcttccaacgtacaagcttcctttactcttttcaaaagtttccttggtaccggagtcctagcactcccttatgcttataaaactgccggccttggtctctctttgattgttctcataatcgtttctgcaatgactactcgttgcttctctttacttctcgatgtagcagctcaaagaatcggaactggcaaaatctcactccagaaactcactcaagatgtcttgggaaccaagggaaaatatgcagtccaagcttcaatcatgatcatgcaattgggatgttgtattggtattttgatctttactagagatttcttgaaccatatcctttgtgaatttggtatcagctctctctgtaacaatacccttttcaatgtcctcttttgcttggctctgactgtccctttgactttgatcaacaatatgcattatttctacatcccaagtcttgctgccaacttctttatcttggtcggacttgccgctcaaatgttttacaacactcaagtcttacaagataaccctgaactcagatcaactttaggcactcatcttaaagaattcaactggaaagatttacctctcttctttggtattgctacatatgcctttgaaggtgttggtattatcttcagtatcagaagctcaatggaaaagccccaagactttaaattcctcttaaagaatcaaatgttgatccttactttgatctatgtcatcttccctactttctgctatattgctttggatgacagattaacagatattattttctttactctccctactgatgatcctttctaccttttaatccaaatcttttatgctatctctgctcttttatcattccccgttcagttcttccctgctattcgtatcatggaaaactccaaaattatgagatatagactctttaatgaaagaggaaaatgcaataataaacccctcagatatggaatgagaatggctgttattggtgtggtctttcttgttgcttataccgcgaccagtttccatcttttcttaaacttgctgggatcttgtgtattcacttttgttggatttatcttgccagtctggatctattctgtccatttcaagggaaagaccggcatcgcgaaaagacttatcaattatacaatgcttactgttgctgtcgtctttggagcagctggttttgttatgtcaatcatggaaatggttaacaaaagctctgaagatgttgcaactctctaaagtaaaattttttcttaactgactcattctatgaaaactctgtacttttttaactgtagtcaaagttgtaaattatatttgtgtaattgattgtatgtctttttaataaaaaacctctccttggatatgtctataatctgatccccgtatctaaataacttacaaaaataatgccatatcatttaaaatttactc

SEQ ID NO: 54599 - protein, 458 aa, Glycine max
  peptide (1)..(458): Ceres Seq. ID no. 15170289
  misc_feature (53)..(362): Pfam Name: Transmembrane amino acid transporter protein Pfam Description: Transmembrane amino acid transporter protein
  misc_feature (8)..(450): Homolog of NCBI NO: 24642715 NR Description: CG4991-PA [Drosophila melanogaster]
  misc_feature (48)..(343): Homolog of NCBI NO: 6324228 NR Description: related to the neuronal gamma -aminobutyric
  misc_feature (55)..(434): Homolog of NCBI NO: 32410299 NR Description: hypothetical protein [Neurospora crassa]
  misc_feature (48)..(449): Homolog of NCBI NO: 31220680 NR Description: ENSANGP00000019274 [Anopheles gambiae]
  misc_feature (41)..(431): Homolog of NCBI NO: 19114463 NR Description: putative amino acid transpoter
  misc_feature (43)..(362): Homolog of NCBI NO: 18913080 NR Description: Tap1p [Tetrahymena thermophila]
  misc_feature (29)..(436): Homolog of NCBI NO: 32404942 NR Description: hypothetical protein ( (AL513466) conserved
  misc_feature (48)..(415): Homolog of NCBI NO: 40742375 NR Description: hypothetical protein AN7777.2 [Aspergillus
  misc_feature (53)..(431): Homolog of NCBI NO: 40741630 NR Description: hypothetical protein AN4477.2 [Aspergillus
  misc_feature (47)..(438): Homolog of NCBI NO: 6322702 NR Description: related to the neuronal gamma -aminobutyric
MAKHDDCGRMIDTKGGQSFEIEMKGSPATPTPAATQDSFKGGVKIQQSSNVQASFTLFKSFLGTGVLALPYAYKTAGLGLSLIVLIIVSAMTTRCFSLLLDVAAQRIGTGKISLQKLTQDVLGTKGKYAVQASIMIMQLGCCIGILIFTRDFLNHILCEFGISSLCNNTLFNVLFCLALTVPLTLINNMHYFYIPSLAANFFILVGLAAQMFYNTQVLQDNPELRSTLGTHLKEFNWKDLPLFFGIATYAFEGVGIIFSIRSSMEKPQDFKFLLKNQMLILTLIYVIFPTFCYIALDDRLTDIIFFTLPTDDPFYLLIQIFYAISALLSFPVQFFPAIRIMENSKIMRYRLFNERGKCNNKPLRYGMRMAVIGVVFLVAYTATSFHLFLNLLGSCVFTFVGFILPVWIYSVHFKGKTGIAKRLINYTMLTVAVVFGAAGFVMSIMEMVNKSSEDVATL

SEQ ID NO: 54600 - protein, 449 aa, Glycine max
  peptide (1)..(449): Ceres Seq. ID no. 15170290
  misc_feature (44)..(353): Pfam Name: Transmembrane amino acid transporter protein Pfam Description: Transmembrane amino acid transporter protein
  misc_feature (1)..(441): Homolog of NCBI NO: 24642715 NR Description: CG4991-PA [Drosophila melanogaster]
  misc_feature (39)..(334): Homolog of NCBI NO: 6324228 NR Description: related to the neuronal gamma -aminobutyric
  misc_feature (46)..(425): Homolog of NCBI NO: 32410299 NR Description: hypothetical protein [Neurospora crassa]
  misc_feature (39)..(440): Homolog of NCBI NO: 31220680 NR Description: ENSANGP00000019274 [Anopheles gambiae]
  misc_feature (32)..(422): Homolog of NCBI NO: 19114463 NR Description: putative amino acid transpoter
  misc_feature (34)..(353): Homolog of NCBI NO: 18913080 NR Description: Tap1p [Tetrahymena thermophila]
  misc_feature (20)..(427): Homolog of NCBI NO: 32404942 NR Description: hypothetical protein ( (AL513466) conserved
  misc_feature (39)..(406): Homolog of NCBI NO: 40742375 NR Description: hypothetical protein AN7777.2 [Aspergillus
  misc_feature (44)..(422): Homolog of NCBI NO: 40741630 NR Description: hypothetical protein AN4477.2 [Aspergillus
  misc_feature (38)..(429): Homolog of NCBI NO: 6322702 NR Description: related to the neuronal gamma -aminobutyric
MIDTKGGQSFEIEMKGSPATPTPAATQDSFKGGVKIQQSSNVQASFTLFKSFLGTGVLALPYAYKTAGLGLSLIVLIIVSAMTTRCFSLLLDVAAQRIGTGKISLQKLTQDVLGTKGKYAVQASIMIMQLGCCIGILIFTRDFLNHILCEFGISSLCNNTLFNVLFCLALTVPLTLINNMHYFYIPSLAANFFILVGLAAQMFYNTQVLQDNPELRSTLGTHLKEFNWKDLPLFFGIATYAFEGVGIIFSIRSSMEKPQDFKFLLKNQMLILTLIYVIFPTFCYIALDDRLTDIIFFTLPTDDPFYLLIQIFYAISALLSFPVQFFPAIRIMENSKIMRYRLFNERGKCNNKPLRYGMRMAVIGVVFLVAYTATSFHLFLNLLGSCVFTFVGFILPVWIYSVHFKGKTGIAKRLINYTMLTVAVVFGAAGFVMSIMEMVNKSSEDVATL

SEQ ID NO: 54601 - protein, 436 aa, Glycine max
  peptide (1)..(436): Ceres Seq. ID no. 15170291
  misc_feature (31)..(340): Pfam Name: Transmembrane amino acid transporter protein Pfam Description: Transmembrane amino acid transporter protein
  misc_feature (1)..(428): Homolog of NCBI NO: 24642715 NR Description: CG4991-PA [Drosophila melanogaster]
  misc_feature (26)..(321): Homolog of NCBI NO: 6324228 NR Description: related to the neuronal gamma -aminobutyric
  misc_feature (33)..(412): Homolog of NCBI NO: 32410299 NR Description: hypothetical protein [Neurospora crassa]
  misc_feature (26)..(427): Homolog of NCBI NO: 31220680 NR Description: ENSANGP00000019274 [Anopheles gambiae]
  misc_feature (19)..(409): Homolog of NCBI NO: 19114463 NR Description: putative amino acid transpoter
  misc_feature (21)..(340): Homolog of NCBI NO: 18913080 NR Description: Tap1p [Tetrahymena thermophila]
  misc_feature (7)..(414): Homolog of NCBI NO: 32404942 NR Description: hypothetical protein ( (AL513466) conserved
  misc_feature (26)..(393): Homolog of NCBI NO: 40742375 NR Description: hypothetical protein AN7777.2 [Aspergillus
  misc_feature (31)..(409): Homolog of NCBI NO: 40741630 NR Description: hypothetical protein AN4477.2 [Aspergillus
  misc_feature (25)..(416): Homolog of NCBI NO: 6322702 NR Description: related to the neuronal gamma -aminobutyric
MKGSPATPTPAATQDSFKGGVKIQQSSNVQASFTLFKSFLGTGVLALPYAYKTAGLGLSLIVLIIVSAMTTRCFSLLLDVAAQRIGTGKISLQKLTQDVLGTKGKYAVQASIMIMQLGCCIGILIFTRDFLNHILCEFGISSLCNNTLFNVLFCLALTVPLTLINNMHYFYIPSLAANFFILVGLAAQMFYNTQVLQDNPELRSTLGTHLKEFNWKDLPLFFGIATYAFEGVGIIFSIRSSMEKPQDFKFLLKNQMLILTLIYVIFPTFCYIALDDRLTDIIFFTLPTDDPFYLLIQIFYAISALLSFPVQFFPAIRIMENSKIMRYRLFNERGKCNNKPLRYGMRMAVIGVVFLVAYTATSFHLFLNLLGSCVFTFVGFILPVWIYSVHFKGKTGIAKRLINYTMLTVAVVFGAAGFVMSIMEMVNKSSEDVATL

SEQ ID NO: 54602 - DNA, 1464 bp, Glycine max
  misc_feature (1)..(1464): Ceres Seq. ID no. 14313123
ttctctctcgcacacgcaaacacttgttccggtgtccctctctctttcgcttcatcttcaacattaggtcttctctgactctgtggttgtcactgttcaacgtctttgagagtttatgctgagtagttcggctttacctcaaaagtcctgatcaattgaattcagtttccattggtaggatttattgccgggccttgaggtaatcagcttaccaacatgggaacacaaccccagcaaacatttcgggaggaagaggaggaggagatgcaaggccatggaactacgatgtcaggtcaatcaatgtcaacaagcagaagtgtcgggtctccatccagccggagtgagcagacaatggcaacacctgctagtgatagcacttttcttaggttaaaccatcttgacatacatggtgatgatgctggatcacagggcaccgttgccaagaagaaaaagaggggccaacgggctgttggaggtgataagagtggaagaggtctccgtcaattcagtatgaaagtgtgtgagaaggtagaaagcaagggcagaacaacttacaatgaggtagctgatgaacttgtggccgaatttgctgatccaatcaatggtgtttcaactcctgatcagcaacaatatgatgagaaaaacattcgtcgaagggtgtatgatgctttgaatgttctcatggcaatggatattatttctaaggataaaaaggaaattcaatggaagggtctccctcgtactagtctaagcgatattgaagagctaaagtcggagcgtcttgggctaaggaatagaattgaaaagaaagcagcctatttgcaagagctggaggagcaatacataggtcttcagaaacttatacaacgaaatgagcaactatatagctcaggaaatgctcccaatggaggtgtatctttgcccttcattctggtgcagacacggccccatgcaactgttgaagtggaaatatcagaagatatgcagcttgtgcattttgatttcaatagcactccctttgagctgcatgatgataactatgttctcaaggcaatgaaattttgtgagagatctcagaatgataatacaacagataattctacagatggcggtgaaggttctagcatatatgcacaggttcctacttcagtttcaaaccctccaaataggcctccttcatctccaccactccctggaatattaaaggcaagagttaagaacgagcattgatatgcaattttgtactgcatcgccttatttaagcatgtttgtatatttttgtaaagtaatttgtcagtaattaattgtccttcataatagttaatcagtacagccaattcactcagtaggttagaagcgaaccagtgtgcttgagtctatattcttctgggttgattttggcaaattctttgctaaccatatccattatttactaccttaagaccttaactgatttttttcccc

SEQ ID NO: 54603 - protein, 337 aa, Glycine max
  peptide (1)..(337): Ceres Seq. ID no. 14313124
  misc_feature (93)..(326): Pfam Name: Transcription factor E2F/dimerisation partner (TDP) Pfam Description: Transcription factor E2F/dimerisation partner
  misc_feature (78)..(319): Homolog of NCBI NO: 22326573 NR Description: DPA transcription factor [Arabidopsis thaliana]
  misc_feature (78)..(319): Homolog of NCBI NO: 11357273 NR Description: DP-2 transcription factor-like - Arabidopsis
  misc_feature (18)..(241): Homolog of NCBI NO: 37534748 NR Description: putative DP-like protein [Oryza sativa (japonica
  misc_feature (18)..(337): Homolog of NCBI NO: 29367654 NR Description: DP TF [Oryza sativa (japonica cultivar-group)]
  misc_feature (21)..(100): Homolog of NCBI NO: 11358893 NR Description: transcription factor-like protein - Arabidopsis
  misc_feature (99)..(326): Homolog of NCBI NO: 11358893 NR Description: transcription factor-like protein - Arabidopsis
  misc_feature (47)..(337): Homolog of NCBI NO: 29371983 NR Description: E2F dimerization factor [Oryza sativa (japonica
  misc_feature (21)..(326): Homolog of NCBI NO: 30680032 NR Description: DPB transcription factor [Arabidopsis thaliana]
  misc_feature (21)..(326): Homolog of NCBI NO: 21554147 NR Description: unknown [Arabidopsis thaliana]
  misc_feature (21)..(337): Homolog of NCBI NO: 32187097 NR Description: DP1 [Populus tremula x Populus tremuloides]
MGTQPQQTFREEEEEEMQGHGTTMSGQSMSTSRSVGSPSSRSEQTMATPASDSTFLRLNHLDIHGDDAGSQGTVAKKKKRGQRAVGGDKSGRGLRQFSMKVCEKVESKGRTTYNEVADELVAEFADPINGVSTPDQQQYDEKNIRRRVYDALNVLMAMDIISKDKKEIQWKGLPRTSLSDIEELKSERLGLRNRIEKKAAYLQELEEQYIGLQKLIQRNEQLYSSGNAPNGGVSLPFILVQTRPHATVEVEISEDMQLVHFDFNSTPFELHDDNYVLKAMKFCERSQNDNTTDNSTDGGEGSSIYAQVPTSVSNPPNRPPSSPPLPGILKARVKNEH

SEQ ID NO: 54604 - protein, 321 aa, Glycine max
  peptide (1)..(321): Ceres Seq. ID no. 14313125
  misc_feature (77)..(310): Pfam Name: Transcription factor E2F/dimerisation partner (TDP) Pfam Description: Transcription factor E2F/dimerisation partner
  misc_feature (62)..(303): Homolog of NCBI NO: 22326573 NR Description: DPA transcription factor [Arabidopsis thaliana]
  misc_feature (62)..(303): Homolog of NCBI NO: 11357273 NR Description: DP-2 transcription factor-like - Arabidopsis
  misc_feature (2)..(225): Homolog of NCBI NO: 37534748 NR Description: putative DP-like protein [Oryza sativa (japonica
  misc_feature (2)..(321): Homolog of NCBI NO: 29367654 NR Description: DP TF [Oryza sativa (japonica cultivar-group)]
  misc_feature (5)..(84): Homolog of NCBI NO: 11358893 NR Description: transcription factor-like protein - Arabidopsis
  misc_feature (83)..(310): Homolog of NCBI NO: 11358893 NR Description: transcription factor-like protein - Arabidopsis
  misc_feature (31)..(321): Homolog of NCBI NO: 29371983 NR Description: E2F dimerization factor [Oryza sativa (japonica
  misc_feature (5)..(310): Homolog of NCBI NO: 30680032 NR Description: DPB transcription factor [Arabidopsis thaliana]
  misc_feature (5)..(310): Homolog of NCBI NO: 21554147 NR Description: unknown [Arabidopsis thaliana]
  misc_feature (5)..(321): Homolog of NCBI NO: 32187097 NR Description: DP1 [Populus tremula x Populus tremuloides]
MQGHGTTMSGQSMSTSRSVGSPSSRSEQTMATPASDSTFLRLNHLDIHGDDAGSQGTVAKKKKRGQRAVGGDKSGRGLRQFSMKVCEKVESKGRTTYNEVADELVAEFADPINGVSTPDQQQYDEKNIRRRVYDALNVLMAMDIISKDKKEIQWKGLPRTSLSDIEELKSERLGLRNRIEKKAAYLQELEEQYIGLQKLIQRNEQLYSSGNAPNGGVSLPFILVQTRPHATVEVEISEDMQLVHFDFNSTPFELHDDNYVLKAMKFCERSQNDNTTDNSTDGGEGSSIYAQVPTSVSNPPNRPPSSPPLPGILKARVKNEH

SEQ ID NO: 54605 - protein, 314 aa, Glycine max
  peptide (1)..(314): Ceres Seq. ID no. 14313126
  misc_feature (70)..(303): Pfam Name: Transcription factor E2F/dimerisation partner (TDP) Pfam Description: Transcription factor E2F/dimerisation partner
  misc_feature (55)..(296): Homolog of NCBI NO: 22326573 NR Description: DPA transcription factor [Arabidopsis thaliana]
  misc_feature (55)..(296): Homolog of NCBI NO: 11357273 NR Description: DP-2 transcription factor-like - Arabidopsis
  misc_feature (1)..(218): Homolog of NCBI NO: 37534748 NR Description: putative DP-like protein [Oryza sativa (japonica
  misc_feature (1)..(314): Homolog of NCBI NO: 29367654 NR Description: DP TF [Oryza sativa (japonica cultivar-group)]
  misc_feature (1)..(77): Homolog of NCBI NO: 11358893 NR Description: transcription factor-like protein - Arabidopsis
  misc_feature (76)..(303): Homolog of NCBI NO: 11358893 NR Description: transcription factor-like protein - Arabidopsis
  misc_feature (24)..(314): Homolog of NCBI NO: 29371983 NR Description: E2F dimerization factor [Oryza sativa (japonica
  misc_feature (1)..(303): Homolog of NCBI NO: 30680032 NR Description: DPB transcription factor [Arabidopsis thaliana]
  misc_feature (1)..(303): Homolog of NCBI NO: 21554147 NR Description: unknown [Arabidopsis thaliana]
  misc_feature (1)..(314): Homolog of NCBI NO: 32187097 NR Description: DP1 [Populus tremula x Populus tremuloides]
MSGQSMSTSRSVGSPSSRSEQTMATPASDSTFLRLNHLDIHGDDAGSQGTVAKKKKRGQRAVGGDKSGRGLRQFSMKVCEKVESKGRTTYNEVADELVAEFADPINGVSTPDQQQYDEKNIRRRVYDALNVLMAMDIISKDKKEIQWKGLPRTSLSDIEELKSERLGLRNRIEKKAAYLQELEEQYIGLQKLIQRNEQLYSSGNAPNGGVSLPFILVQTRPHATVEVEISEDMQLVHFDFNSTPFELHDDNYVLKAMKFCERSQNDNTTDNSTDGGEGSSIYAQVPTSVSNPPNRPPSSPPLPGILKARVKNEH

SEQ ID NO: 54606 - DNA, 1014 bp, Glycine max
  misc_feature (1)..(1014): Ceres Seq. ID no. 14307654
gcatcgcagtgtatctgagtaatatcactgtccctttccctctccctttcatcagaaacacaaacaaaacaccgattcgctatattaccagatcggactcaattcctgaaccgatgaagttgaagccgcagtgaaccaaaccatcatcatcgcgttaccggaataatcgacccatcatcaattagatcgaaatgaaggatgaggacgggcttccgacgacgaccgcggttacaaagaaggaaaacttggattcgagtctgtttggaaaaggcaggtacaaattctgggcgttagcggccatcttgcttctggcgttctggtccatgttcaccggtaccgtctcgctccgctggtccggcactctcaattccctttccaacgacatcgacactcccatccacgacgacctagatgttcttgaaatggaggagagggagaaggttgtgaggcacatgtgggatgtgtacaccaacagtcgcagtgtgaggttgccgcggttctggcaagaggccttcgaggctgcctatgaggatttgacgagcgatgtcgctgaggtcagagacgctgccgtcgccgagatcgccaagatgtctgttcgctccattcattttgatccacctcctcttcaatccacgagtgcccgagaattcagcaagagccttaagcaagccgagaaaggaaaagatgcaacaacctcaaggcgtgcttaaaggttagtgtgtggagcattcaagcgtctgcggtgtacttgaaaaatgctcgagtggtaccggaagattgtgaagagatagtaatggacgaactcatactcggatttcatgtttccatcacagggataatgatgtattttaataggctgtggttcttgcaaattttgcagtcaaaattcgtagtcttcacgaagtgaggagtagtaaatcgaaacacgaacttttgaacagacaaattcaattgagcatgttctgtttagctttattccacaacatctaaattataaaactctcatgtttctac

SEQ ID NO: 54607 - protein, 172 aa, Glycine max
  peptide (1)..(172): Ceres Seq. ID no. 14307655
  misc_feature (29)..(151): Homolog of NCBI NO: 15222008 NR Description: expressed protein [Arabidopsis thaliana]
  misc_feature (24)..(151): Homolog of NCBI NO: 28209490 NR Description: unknown protein [Oryza sativa (japonica
  misc_feature (1)..(148): Homolog of NCBI NO: 9858772 NR Description: BAC19.4 [Lycopersicon esculentum]
  misc_feature (1)..(147): Homolog of NCBI NO: 15234477 NR Description: expressed protein [Arabidopsis thaliana]
  misc_feature (1)..(170): Homolog of NCBI NO: 18424975 NR Description: expressed protein [Arabidopsis thaliana]
MKDEDGLPTTTAVTKKENLDSSLFGKGRYKFWALAAILLLAFWSMFTGTVSLRWSGTLNSLSNDIDTPIHDDLDVLEMEEREKVVRHMWDVYTNSRSVRLPRFWQEAFEAAYEDLTSDVAEVRDAAVAEIAKMSVRSIHFDPPPLQSTSAREFSKSLKQAEKGKDATTSRRA

SEQ ID NO: 54608 - protein, 128 aa, Glycine max
  peptide (1)..(128): Ceres Seq. ID no. 14307656
  misc_feature (1)..(107): Homolog of NCBI NO: 15222008 NR Description: expressed protein [Arabidopsis thaliana]
  misc_feature (1)..(107): Homolog of NCBI NO: 28209490 NR Description: unknown protein [Oryza sativa (japonica
  misc_feature (1)..(104): Homolog of NCBI NO: 9858772 NR Description: BAC19.4 [Lycopersicon esculentum]
  misc_feature (1)..(103): Homolog of NCBI NO: 15234477 NR Description: expressed protein [Arabidopsis thaliana]
  misc_feature (1)..(126): Homolog of NCBI NO: 18424975 NR Description: expressed protein [Arabidopsis thaliana]
MFTGTVSLRWSGTLNSLSNDIDTPIHDDLDVLEMEEREKVVRHMWDVYTNSRSVRLPRFWQEAFEAAYEDLTSDVAEVRDAAVAEIAKMSVRSIHFDPPPLQSTSAREFSKSLKQAEKGKDATTSRRA

SEQ ID NO: 54609 - protein, 95 aa, Glycine max
  peptide (1)..(95): Ceres Seq. ID no. 14307657
  misc_feature (1)..(74): Homolog of NCBI NO: 15222008 NR Description: expressed protein [Arabidopsis thaliana]
  misc_feature (1)..(74): Homolog of NCBI NO: 28209490 NR Description: unknown protein [Oryza sativa (japonica
  misc_feature (1)..(71): Homolog of NCBI NO: 9858772 NR Description: BAC19.4 [Lycopersicon esculentum]
  misc_feature (1)..(70): Homolog of NCBI NO: 15234477 NR Description: expressed protein [Arabidopsis thaliana]
  misc_feature (1)..(93): Homolog of NCBI NO: 18424975 NR Description: expressed protein [Arabidopsis thaliana]
MEEREKVVRHMWDVYTNSRSVRLPRFWQEAFEAAYEDLTSDVAEVRDAAVAEIAKMSVRSIHFDPPPLQSTSAREFSKSLKQAEKGKDATTSRRA

SEQ ID NO: 54610 - DNA, 1091 bp, Glycine max
  misc_feature (1)..(1091): Ceres Seq. ID no. 14307355
atcaattaattgtgcacgaaataccaattctgtcccaaatattatactaacatattagaagctgtccaattccaatggttccttgtgttaaagcaatggttgcgcttgtcctagcgtttctaatctctttgccttctatggttgcctatgctggcaacatgtaccaagatgttgatgtcacgtggggagatggcagaggcaagattctgaacaatggtcagcttcttactctgtctcttgacagagcctctggctctggctttcagtccaagaatcagtatctatttggcaaaattgacatgcaaatcaaacttgtgcctgcaaattccgctggcacggtcaccgctttttacttacgttcagaagggtcatcttgggatgagatagattttgagttcctgggaaatctgagtggtgatccttacatagttcatactaatgtgtacacacaaggcaagggtaatagggagcaacaattttatctttggtttgacccaactgcagattttcacacctattcctttctctggaatcctacacatgttgtattctatgttgatggaagaccaattagggagttcaagaacttggagggagtgggtgttgaatacccaaagaagcagcctatgaggttatatgccagtctatggaacgctgatgactgggcaacgagaggagggctagtgaagacagattggagtcaagcaccattcactgcttctttcaggaacttcaaagccaatggttgcgtttggtccaatggggtttcttcatgcaactccacctcctcttctgaaaaagcttggctatattctcaacggcttgattccacaaaccagaagaagctaaaatgggtgcacaagaattacatgatttatgattactgcacagaccttaagcgattccctcagggtctccctctcgaatgcacagtccgcaccaagtcataacaaaaatatatgcaaactgctattgtatttgcatgtgtgtgcattccattttcccattacactgcatcgcttctcaatctcattctttatgcaattaatttggatacaaagggcatcgtaatgtaacaattaatgtttatt

SEQ ID NO: 54611 - protein, 291 aa, Glycine max
  peptide (1)..(291): Ceres Seq. ID no. 14307356
  misc_feature (30)..(210): Pfam Name: Glycosyl hydrolases family 16 Pfam Description: Glycosyl hydrolases family 16
  misc_feature (11)..(285): Homolog of NCBI NO: 29500893 NR Description: putative xyloglucan endotransglycosylase [Cucumis
  misc_feature (9)..(289): Homolog of NCBI NO: 29691676 NR Description: putative xyloglucan endotransglycosylase [Cucumis
MVPCVKAMVALVLAFLISLPSMVAYAGNMYQDVDVTWGDGRGKILNNGQLLTLSLDRASGSGFQSKNQYLFGKIDMQIKLVPANSAGTVTAFYLRSEGSSWDEIDFEFLGNLSGDPYIVHTNVYTQGKGNREQQFYLWFDPTADFHTYSFLWNPTHVVFYVDGRPIREFKNLEGVGVEYPKKQPMRLYASLWNADDWATRGGLVKTDWSQAPFTASFRNFKANGCVWSNGVSSCNSTSSSEKAWLYSQRLDSTNQKKLKWVHKNYMIYDYCTDLKRFPQGLPLECTVRTKS

SEQ ID NO: 54612 - protein, 284 aa, Glycine max
  peptide (1)..(284): Ceres Seq. ID no. 14307357
  misc_feature (23)..(203): Pfam Name: Glycosyl hydrolases family 16 Pfam Description: Glycosyl hydrolases family 16
  misc_feature (4)..(278): Homolog of NCBI NO: 29500893 NR Description: putative xyloglucan endotransglycosylase [Cucumis
  misc_feature (2)..(282): Homolog of NCBI NO: 29691676 NR Description: putative xyloglucan endotransglycosylase [Cucumis
MVALVLAFLISLPSMVAYAGNMYQDVDVTWGDGRGKILNNGQLLTLSLDRASGSGFQSKNQYLFGKIDMQIKLVPANSAGTVTAFYLRSEGSSWDEIDFEFLGNLSGDPYIVHTNVYTQGKGNREQQFYLWFDPTADFHTYSFLWNPTHVVFYVDGRPIREFKNLEGVGVEYPKKQPMRLYASLWNADDWATRGGLVKTDWSQAPFTASFRNFKANGCVWSNGVSSCNSTSSSEKAWLYSQRLDSTNQKKLKWVHKNYMIYDYCTDLKRFPQGLPLECTVRTKS

SEQ ID NO: 54613 - protein, 270 aa, Glycine max
  peptide (1)..(270): Ceres Seq. ID no. 14307358
  misc_feature (9)..(189): Pfam Name: Glycosyl hydrolases family 16 Pfam Description: Glycosyl hydrolases family 16
  misc_feature (1)..(264): Homolog of NCBI NO: 29500893 NR Description: putative xyloglucan endotransglycosylase [Cucumis
  misc_feature (1)..(268): Homolog of NCBI NO: 29691676 NR Description: putative xyloglucan endotransglycosylase [Cucumis
MVAYAGNMYQDVDVTWGDGRGKILNNGQLLTLSLDRASGSGFQSKNQYLFGKIDMQIKLVPANSAGTVTAFYLRSEGSSWDEIDFEFLGNLSGDPYIVHTNVYTQGKGNREQQFYLWFDPTADFHTYSFLWNPTHVVFYVDGRPIREFKNLEGVGVEYPKKQPMRLYASLWNADDWATRGGLVKTDWSQAPFTASFRNFKANGCVWSNGVSSCNSTSSSEKAWLYSQRLDSTNQKKLKWVHKNYMIYDYCTDLKRFPQGLPLECTVRTKS

SEQ ID NO: 54614 - DNA, 1210 bp, Glycine max
  misc_feature (1)..(1210): Ceres Seq. ID no. 14303397
aaaaaataagaagatatacataaaaataaaacacaccctctacgtgtccacactctctgatcacaacacacccgcttaattaaatctctatatataaaccccttcaggcactccactatgacgggcaaagaaatttttcataagatgaaggaaaaagttttgggatcatctgatcccgattcaggtaaaggaaagagcaagatgaagaagcacataactcatggctttcacttggtaaagggaagatcaggtcatgccatggaagactatcttgttgctcaatttaagcaagttgacaacaaagagttgggtttatttgcaatatttgatggccactctggtcacagtgtacctgattacttgaagtctcatttgtttgataatatcttgaaagagcctaacttctggacagaacctgctgaggctgttaagagagcatatagtataactgattctactattttagacaaatcaggtgaattgggtagagggggttcaactgcggttacagcaatattgatcaactgttacaagctactagtggccaatattggggattcccgggctgtcttatgtaagaatggcgtagccaaacaactatcggtggatcatgaaccaagcatagaaagtgaagatataaaaaacagaggtggttttgtgtcaaacttcccaggggatgtgccacgtgtcgatggtcagttggcagtgtcaagggcatttggtgacaaaagcctgaagatacatttgagctcagaaccatatgtaactgtggagatgatagaagatgatgcagagtttcttatactagccagtgatgggttatggaaggtaatgtcaaatcaagaagcagttagtgctatcagagatgttaaggatgctagatctgcagcaaaggtgcttactgaagaagcaaagaacaggaaaagctcagatgatatctcttgcgttgttgtgaaatttcagtgatcagtaaactcacatagtatatttttatctacgaacttgaaagtgtaacatatactttagtgtaatgttgataccttttaggtgttattatgtcatgccattcagtgtgtgatatttaatcttctttaatttcatacaaatgaaactgctgagaacgtgttgtttgatgtaccaatgttcaaaaggatttagttttggattgtgtagaccaaaataattcgtatgaatgcaaggaagtttggtc

SEQ ID NO: 54615 - protein, 282 aa, Glycine max
  peptide (1)..(282): Ceres Seq. ID no. 14303398
  misc_feature (15)..(274): Pfam Name: Protein phosphatase 2C Pfam Description: Protein phosphatase 2C
  misc_feature (7)..(282): Homolog of NCBI NO: 18395099 NR Description: protein phosphatase 2C (PP2C), putative
  misc_feature (15)..(282): Homolog of NCBI NO: 32488822 NR Description: OSJNBa0085I10.2 [Oryza sativa (japonica
  misc_feature (29)..(281): Homolog of NCBI NO: 7488280 NR Description: protein phosphatase 2C homolog F20O9.80 -
  misc_feature (1)..(282): Homolog of NCBI NO: 25411985 NR Description: probable protein phosphatase 2C [imported] -
  misc_feature (1)..(282): Homolog of NCBI NO: 18399423 NR Description: protein phosphatase 2C (PP2C), putative
  misc_feature (1)..(281): Homolog of NCBI NO: 18417190 NR Description: protein phosphatase 2C (PP2C), putative
  misc_feature (1)..(281): Homolog of NCBI NO: 23307574 NR Description: putative protein phosphatase 2C homolog
  misc_feature (1)..(282): Homolog of NCBI NO: 21539551 NR Description: putative protein phosphatase type 2C [Arabidopsis
  misc_feature (1)..(282): Homolog of NCBI NO: 15232538 NR Description: protein phosphatase 2C (PP2C), putative
  misc_feature (1)..(282): Homolog of NCBI NO: 4336436 NR Description: protein phosphatase type 2C [Lotus japonicus]
MTGKEIFHKMKEKVLGSSDPDSGKGKSKMKKHITHGFHLVKGRSGHAMEDYLVAQFKQVDNKELGLFAIFDGHSGHSVPDYLKSHLFDNILKEPNFWTEPAEAVKRAYSITDSTILDKSGELGRGGSTAVTAILINCYKLLVANIGDSRAVLCKNGVAKQLSVDHEPSIESEDIKNRGGFVSNFPGDVPRVDGQLAVSRAFGDKSLKIHLSSEPYVTVEMIEDDAEFLILASDGLWKVMSNQEAVSAIRDVKDARSAAKVLTEEAKNRKSSDDISCVVVKFQ

SEQ ID NO: 54616 - protein, 273 aa, Glycine max
  peptide (1)..(273): Ceres Seq. ID no. 14303399
  misc_feature (6)..(265): Pfam Name: Protein phosphatase 2C Pfam Description: Protein phosphatase 2C
  misc_feature (1)..(273): Homolog of NCBI NO: 18395099 NR Description: protein phosphatase 2C (PP2C), putative
  misc_feature (6)..(273): Homolog of NCBI NO: 32488822 NR Description: OSJNBa0085I10.2 [Oryza sativa (japonica
  misc_feature (20)..(272): Homolog of NCBI NO: 7488280 NR Description: protein phosphatase 2C homolog F20O9.80 -
  misc_feature (1)..(273): Homolog of NCBI NO: 25411985 NR Description: probable protein phosphatase 2C [imported] -
  misc_feature (1)..(273): Homolog of NCBI NO: 18399423 NR Description: protein phosphatase 2C (PP2C), putative
  misc_feature (1)..(272): Homolog of NCBI NO: 18417190 NR Description: protein phosphatase 2C (PP2C), putative
  misc_feature (1)..(272): Homolog of NCBI NO: 23307574 NR Description: putative protein phosphatase 2C homolog
  misc_feature (1)..(273): Homolog of NCBI NO: 21539551 NR Description: putative protein phosphatase type 2C [Arabidopsis
  misc_feature (1)..(273): Homolog of NCBI NO: 15232538 NR Description: protein phosphatase 2C (PP2C), putative
  misc_feature (1)..(273): Homolog of NCBI NO: 4336436 NR Description: protein phosphatase type 2C [Lotus japonicus]
MKEKVLGSSDPDSGKGKSKMKKHITHGFHLVKGRSGHAMEDYLVAQFKQVDNKELGLFAIFDGHSGHSVPDYLKSHLFDNILKEPNFWTEPAEAVKRAYSITDSTILDKSGELGRGGSTAVTAILINCYKLLVANIGDSRAVLCKNGVAKQLSVDHEPSIESEDIKNRGGFVSNFPGDVPRVDGQLAVSRAFGDKSLKIHLSSEPYVTVEMIEDDAEFLILASDGLWKVMSNQEAVSAIRDVKDARSAAKVLTEEAKNRKSSDDISCVVVKFQ

SEQ ID NO: 54617 - protein, 254 aa, Glycine max
  peptide (1)..(254): Ceres Seq. ID no. 14303400
  misc_feature (1)..(246): Pfam Name: Protein phosphatase 2C Pfam Description: Protein phosphatase 2C
  misc_feature (1)..(254): Homolog of NCBI NO: 18395099 NR Description: protein phosphatase 2C (PP2C), putative
  misc_feature (1)..(254): Homolog of NCBI NO: 32488822 NR Description: OSJNBa0085I10.2 [Oryza sativa (japonica
  misc_feature (1)..(253): Homolog of NCBI NO: 7488280 NR Description: protein phosphatase 2C homolog F20O9.80 -
  misc_feature (1)..(254): Homolog of NCBI NO: 25411985 NR Description: probable protein phosphatase 2C [imported] -
  misc_feature (1)..(254): Homolog of NCBI NO: 18399423 NR Description: protein phosphatase 2C (PP2C), putative
  misc_feature (1)..(253): Homolog of NCBI NO: 18417190 NR Description: protein phosphatase 2C (PP2C), putative
  misc_feature (1)..(253): Homolog of NCBI NO: 23307574 NR Description: putative protein phosphatase 2C homolog
  misc_feature (1)..(254): Homolog of NCBI NO: 21539551 NR Description: putative protein phosphatase type 2C [Arabidopsis
  misc_feature (1)..(254): Homolog of NCBI NO: 15232538 NR Description: protein phosphatase 2C (PP2C), putative
  misc_feature (1)..(254): Homolog of NCBI NO: 4336436 NR Description: protein phosphatase type 2C [Lotus japonicus]
MKKHITHGFHLVKGRSGHAMEDYLVAQFKQVDNKELGLFAIFDGHSGHSVPDYLKSHLFDNILKEPNFWTEPAEAVKRAYSITDSTILDKSGELGRGGSTAVTAILINCYKLLVANIGDSRAVLCKNGVAKQLSVDHEPSIESEDIKNRGGFVSNFPGDVPRVDGQLAVSRAFGDKSLKIHLSSEPYVTVEMIEDDAEFLILASDGLWKVMSNQEAVSAIRDVKDARSAAKVLTEEAKNRKSSDDISCVVVKFQ

SEQ ID NO: 54618 - DNA, 1424 bp, Glycine max
  misc_feature (1)..(1424): Ceres Seq. ID no. 14313666
gcagagagaaggtttcaaagaaatggccacatgggtgaatggttggggcaaattactaccatttctggggatgttgatggctatgctaactcaaagtggaagcatggtggtaatcaaatttgctatgactgatgggatgaacaagtatgttatggttgtatattcaatggcactctccagctccatacttctcccctttgtcttgtttctacatagcaggtcagagcttcctcttctcacagttcctgcacttggaagcttctttttgcttgcactctttgcgagttcagcacatataatggcttatgttggcatagaactcagctctcctactcttgcatcagctatacttaatgtcattccagctttcacttttgtacttgctctcattttcaggatggaagaagtacattggagatattttagcagccaagctaaagtcttgggaacaatagtgtcaattggtggagcatttgttgtgatactgtacaagggtccacccatctttaggacacattcatcatacacttcaaacaaacttcaattttcggcacaaccaaactggatcttgggagggatatttttggttgctgattctttccttagttccatgtggtacatatatcaggcttcggttgcaaagaaataccctgctgtaacagtcatagtattcttccaattcttattttcaaccattcagtgtggagtatttgccttaattgcagttagagatccaacggaatgggagctgaagttcgatagagggttgagtgtcattttatatcaggcaatagttgcaacaatgttacgttacaccctaaccacatggtgcgtccatagagcaggacctctgttttgtgctatgttcaagccagtgggaatcatcttcaccgtttctatgagtgcaatctttctgggggagaatttcggccttggaagtttgattggtgcggttataatcgtgataggattttatgctgtactatggggaaattccagagaggagaacaagattgagaatttggagtcatcgagccataatgctcctttattgcaagataggtcgtaacaggtaggttgaaatcatcgtaccataatttggcgtatcagaaacaggtgaatgaatcgtatcatgctaaccattgatatgcacttccttgttggatatattttccgtgagtggaatacttgtgtaaaaattttagtcactcatggcacccgtgaatagcttttgttggtgggattttaatccacaaattatagcttcttcttttgtaaatgataggcaaactatacctaattacaggtttaggtagtttacttttggttttgattcacagtttggcctctgtcccccatgtttgttttgtaatcttgcttcctttttttaatatattctggatgtgctgcttttcgtggttaag

SEQ ID NO: 54619 - protein, 355 aa, Glycine max
  peptide (1)..(355): Ceres Seq. ID no. 14313667
  misc_feature (33)..(161): Pfam Name: Integral membrane protein DUF6 Pfam Description: Integral membrane protein DUF6
  misc_feature (33)..(351): Homolog of NCBI NO: 10177510 NR Description: nodulin-like protein [Arabidopsis thaliana]
  misc_feature (8)..(351): Homolog of NCBI NO: 21618226 NR Description: contains similarity to integral membrane protein
  misc_feature (2)..(351): Homolog of NCBI NO: 15242614 NR Description: nodulin MtN21 family protein [Arabidopsis
  misc_feature (30)..(336): Homolog of NCBI NO: 19347832 NR Description: unknown protein [Arabidopsis thaliana]
  misc_feature (7)..(351): Homolog of NCBI NO: 15242612 NR Description: nodulin MtN21-related [Arabidopsis thaliana]
  misc_feature (8)..(354): Homolog of NCBI NO: 22331380 NR Description: nodulin MtN21 family protein [Arabidopsis
  misc_feature (17)..(346): Homolog of NCBI NO: 21594034 NR Description: nodulin MtN21-like protein [Arabidopsis thaliana]
  misc_feature (8)..(351): Homolog of NCBI NO: 11994130 NR Description: contains similarity to integral membrane protein
  misc_feature (17)..(346): Homolog of NCBI NO: 18405635 NR Description: nodulin MtN21 family protein [Arabidopsis
  misc_feature (2)..(351): Homolog of NCBI NO: 10177511 NR Description: nodulin-like protein [Arabidopsis thaliana]
QREGFKEMATWVNGWGKLLPFLGMLMAMLTQSGSMVVIKFAMTDGMNKYVMVVYSMALSSSILLPFVLFLHSRSELPLLTVPALGSFFLLALFASSAHIMAYVGIELSSPTLASAILNVIPAFTFVLALIFRMEEVHWRYFSSQAKVLGTIVSIGGAFVVILYKGPPIFRTHSSYTSNKLQFSAQPNWILGGIFLVADSFLSSMWYIYQASVAKKYPAVTVIVFFQFLFSTIQCGVFALIAVRDPTEWELKFDRGLSVILYQAIVATMLRYTLTTWCVHRAGPLFCAMFKPVGIIFTVSMSAIFLGENFGLGSLIGAVIIVIGFYAVLWGNSREENKIENLESSSHNAPLLQDRS

SEQ ID NO: 54620 - protein, 348 aa, Glycine max
  peptide (1)..(348): Ceres Seq. ID no. 14313668
  misc_feature (26)..(154): Pfam Name: Integral membrane protein DUF6 Pfam Description: Integral membrane protein DUF6
  misc_feature (26)..(344): Homolog of NCBI NO: 10177510 NR Description: nodulin-like protein [Arabidopsis thaliana]
  misc_feature (1)..(344): Homolog of NCBI NO: 21618226 NR Description: contains similarity to integral membrane protein
  misc_feature (1)..(344): Homolog of NCBI NO: 15242614 NR Description: nodulin MtN21 family protein [Arabidopsis
  misc_feature (23)..(329): Homolog of NCBI NO: 19347832 NR Description: unknown protein [Arabidopsis thaliana]
  misc_feature (1)..(344): Homolog of NCBI NO: 15242612 NR Description: nodulin MtN21-related [Arabidopsis thaliana]
  misc_feature (1)..(347): Homolog of NCBI NO: 22331380 NR Description: nodulin MtN21 family protein [Arabidopsis
  misc_feature (10)..(339): Homolog of NCBI NO: 21594034 NR Description: nodulin MtN21-like protein [Arabidopsis thaliana]
  misc_feature (1)..(344): Homolog of NCBI NO: 11994130 NR Description: contains similarity to integral membrane protein
  misc_feature (10)..(339): Homolog of NCBI NO: 18405635 NR Description: nodulin MtN21 family protein [Arabidopsis
  misc_feature (1)..(344): Homolog of NCBI NO: 10177511 NR Description: nodulin-like protein [Arabidopsis thaliana]
MATWVNGWGKLLPFLGMLMAMLTQSGSMVVIKFAMTDGMNKYVMVVYSMALSSSILLPFVLFLHSRSELPLLTVPALGSFFLLALFASSAHIMAYVGIELSSPTLASAILNVIPAFTFVLALIFRMEEVHWRYFSSQAKVLGTIVSIGGAFVVILYKGPPIFRTHSSYTSNKLQFSAQPNWILGGIFLVADSFLSSMWYIYQASVAKKYPAVTVIVFFQFLFSTIQCGVFALIAVRDPTEWELKFDRGLSVILYQAIVATMLRYTLTTWCVHRAGPLFCAMFKPVGIIFTVSMSAIFLGENFGLGSLIGAVIIVIGFYAVLWGNSREENKIENLESSSHNAPLLQDRS

SEQ ID NO: 54621 - protein, 332 aa, Glycine max
  peptide (1)..(332): Ceres Seq. ID no. 14313669
  misc_feature (10)..(138): Pfam Name: Integral membrane protein DUF6 Pfam Description: Integral membrane protein DUF6
  misc_feature (10)..(328): Homolog of NCBI NO: 10177510 NR Description: nodulin-like protein [Arabidopsis thaliana]
  misc_feature (1)..(328): Homolog of NCBI NO: 21618226 NR Description: contains similarity to integral membrane protein
  misc_feature (1)..(328): Homolog of NCBI NO: 15242614 NR Description: nodulin MtN21 family protein [Arabidopsis
  misc_feature (7)..(313): Homolog of NCBI NO: 19347832 NR Description: unknown protein [Arabidopsis thaliana]
  misc_feature (1)..(328): Homolog of NCBI NO: 15242612 NR Description: nodulin MtN21-related [Arabidopsis thaliana]
  misc_feature (1)..(331): Homolog of NCBI NO: 22331380 NR Description: nodulin MtN21 family protein [Arabidopsis
  misc_feature (1)..(323): Homolog of NCBI NO: 21594034 NR Description: nodulin MtN21-like protein [Arabidopsis thaliana]
  misc_feature (1)..(328): Homolog of NCBI NO: 11994130 NR Description: contains similarity to integral membrane protein
  misc_feature (1)..(323): Homolog of NCBI NO: 18405635 NR Description: nodulin MtN21 family protein [Arabidopsis
  misc_feature (1)..(328): Homolog of NCBI NO: 10177511 NR Description: nodulin-like protein [Arabidopsis thaliana]
MLMAMLTQSGSMVVIKFAMTDGMNKYVMVVYSMALSSSILLPFVLFLHSRSELPLLTVPALGSFFLLALFASSAHIMAYVGIELSSPTLASAILNVIPAFTFVLALIFRMEEVHWRYFSSQAKVLGTIVSIGGAFVVILYKGPPIFRTHSSYTSNKLQFSAQPNWILGGIFLVADSFLSSMWYIYQASVAKKYPAVTVIVFFQFLFSTIQCGVFALIAVRDPTEWELKFDRGLSVILYQAIVATMLRYTLTTWCVHRAGPLFCAMFKPVGIIFTVSMSAIFLGENFGLGSLIGAVIIVIGFYAVLWGNSREENKIENLESSSHNAPLLQDRS

SEQ ID NO: 54622 - DNA, 1591 bp, Glycine max
  misc_feature (1)..(1591): Ceres Seq. ID no. 14310920
aagaaagaagtgagaatacgaaagaaggggttttattgccaaatgaagaaggctcacgagacacgcatggggtcagccacatgctatccctcctcctcctccttctctctccggtggtggtgactcgccggaaaacacccactgccacctctaacgccgccgccggcgaacacccttctcaaaatctcacccgacccaattcacctttctcctctctcttctcaattccccatctgggtatccctgtttccctcaaagttctcttctttttcgtgattcagaagtgctcagtgatacccttttcttagaacaatgagagcggggaaagggagtcaggaagaggatgagtacgaggaagaagagtttggttcttccaagaaacagggcacttcctctgcccctaacaccaataaagcagatggaaaagccatcgataaggctagtgcgataagatcgaaacattctgtgactgagcagcggagaaggagcaagataaatgagagattccagatattgagggatctcatacctcatagtgatcaaaagagggacacggcatcatttttattagaggtgatagagtatgttcagtacttacaggagaaggtacaaaagtatgaaggttcatatcaaggttggggtcaagaaccctcgaagttgatgccatggagaaatagtcattggcgtgtccagagctttgccggtcaacccacggctgtaaagaatggtttgggtccagtatcaccttttcctggaaagtttgatgaaagcaatgttagtatctctccaactatgcttaatggctcccagaatacaatagatcctgatcagagcagggatattgtcaacaaaacggctgagaggcaacctgatttagtaagcaagggaatacctcttccccttgctatgcatgcaaacatgtctgttcctgtcagaagtgatggcgtacttgcacatcctcttcagggaactgtttctaatgcacaatcaactgaatgcccaacaactagtgaaccacagaatcaacaggatgaactctcggttgaaggagggacaattagcatctcaagtgcatactcccaagggttgttgaataatctaactcaagcgctacaaagtgctggtttagatctgtctcaggctagcatatcagttcagattaatcttgggaaacgggcaaacaaaggactgaattgtgggacctcttctctcaagcatcatgacaacccttcttcaaacaatcaaacaattgcacattttagagatgcaggcagtggagaagactctgatcaagcacaaaaaagaatgaaaacatataagtgatatatatgtggcattttcatgagaatccacttgcatccagatttctcacttattcttggtgcagcatataacttgtggttactgtacatccttccccatttgtttgacttttaatggttattttaaaactatttaaaccttgaacacgatcatttgtggagatattgaggcttctactgtagggagcatgtcatctatttcgcttgtatgatacatattataattataattattcagtattattgagcttttggatggcaattttatg

SEQ ID NO: 54623 - protein, 336 aa, Glycine max
  peptide (1)..(336): Ceres Seq. ID no. 14310921
  misc_feature (46)..(96): Pfam Name: Helix-loop-helix DNA-binding domain Pfam Description: Helix-loop-helix DNA-binding domain
  misc_feature (258)..(333): Homolog of NCBI NO: 15241563 NR Description: bHLH protein family [Arabidopsis thaliana]
  misc_feature (27)..(186): Homolog of NCBI NO: 15241563 NR Description: bHLH protein family [Arabidopsis thaliana]
  misc_feature (227)..(333): Homolog of NCBI NO: 9758063 NR Description: DNA-binding protein-like [Arabidopsis thaliana]
  misc_feature (27)..(186): Homolog of NCBI NO: 9758063 NR Description: DNA-binding protein-like [Arabidopsis thaliana]
  misc_feature (194)..(304): Homolog of NCBI NO: 11358566 NR Description: myc-like protein - Arabidopsis thaliana
  misc_feature (1)..(144): Homolog of NCBI NO: 11358566 NR Description: myc-like protein - Arabidopsis thaliana
  misc_feature (194)..(304): Homolog of NCBI NO: 30682248 NR Description: bHLH protein family [Arabidopsis thaliana]
  misc_feature (1)..(144): Homolog of NCBI NO: 30682248 NR Description: bHLH protein family [Arabidopsis thaliana]
  misc_feature (1)..(282): Homolog of NCBI NO: 21555388 NR Description: putative DNA-binding protein [Arabidopsis
  misc_feature (1)..(282): Homolog of NCBI NO: 15221582 NR Description: bHLH protein family [Arabidopsis thaliana]
MRAGKGSQEEDEYEEEEFGSSKKQGTSSAPNTNKADGKAIDKASAIRSKHSVTEQRRRSKINERFQILRDLIPHSDQKRDTASFLLEVIEYVQYLQEKVQKYEGSYQGWGQEPSKLMPWRNSHWRVQSFAGQPTAVKNGLGPVSPFPGKFDESNVSISPTMLNGSQNTIDPDQSRDIVNKTAERQPDLVSKGIPLPLAMHANMSVPVRSDGVLAHPLQGTVSNAQSTECPTTSEPQNQQDELSVEGGTISISSAYSQGLLNNLTQALQSAGLDLSQASISVQINLGKRANKGLNCGTSSLKHHDNPSSNNQTIAHFRDAGSGEDSDQAQKRMKTYK

SEQ ID NO: 54624 - protein, 220 aa, Glycine max
  peptide (1)..(220): Ceres Seq. ID no. 14310922
  misc_feature (142)..(217): Homolog of NCBI NO: 15241563 NR Description: bHLH protein family [Arabidopsis thaliana]
  misc_feature (1)..(70): Homolog of NCBI NO: 15241563 NR Description: bHLH protein family [Arabidopsis thaliana]
  misc_feature (111)..(217): Homolog of NCBI NO: 9758063 NR Description: DNA-binding protein-like [Arabidopsis thaliana]
  misc_feature (1)..(70): Homolog of NCBI NO: 9758063 NR Description: DNA-binding protein-like [Arabidopsis thaliana]
  misc_feature (78)..(188): Homolog of NCBI NO: 11358566 NR Description: myc-like protein - Arabidopsis thaliana
  misc_feature (1)..(28): Homolog of NCBI NO: 11358566 NR Description: myc-like protein - Arabidopsis thaliana
  misc_feature (78)..(188): Homolog of NCBI NO: 30682248 NR Description: bHLH protein family [Arabidopsis thaliana]
  misc_feature (1)..(28): Homolog of NCBI NO: 30682248 NR Description: bHLH protein family [Arabidopsis thaliana]
  misc_feature (1)..(166): Homolog of NCBI NO: 21555388 NR Description: putative DNA-binding protein [Arabidopsis
  misc_feature (1)..(166): Homolog of NCBI NO: 15221582 NR Description: bHLH protein family [Arabidopsis thaliana]
MPWRNSHWRVQSFAGQPTAVKNGLGPVSPFPGKFDESNVSISPTMLNGSQNTIDPDQSRDIVNKTAERQPDLVSKGIPLPLAMHANMSVPVRSDGVLAHPLQGTVSNAQSTECPTTSEPQNQQDELSVEGGTISISSAYSQGLLNNLTQALQSAGLDLSQASISVQINLGKRANKGLNCGTSSLKHHDNPSSNNQTIAHFRDAGSGEDSDQAQKRMKTYK

SEQ ID NO: 54625 - protein, 176 aa, Glycine max
  peptide (1)..(176): Ceres Seq. ID no. 14310923
  misc_feature (56)..(174): Homolog of NCBI NO: 15221582 NR Description: bHLH protein family [Arabidopsis thaliana]
  misc_feature (1)..(122): Homolog of NCBI NO: 19310568 NR Description: putative DNA-binding protein [Arabidopsis
  misc_feature (98)..(173): Homolog of NCBI NO: 15241563 NR Description: bHLH protein family [Arabidopsis thaliana]
  misc_feature (1)..(26): Homolog of NCBI NO: 15241563 NR Description: bHLH protein family [Arabidopsis thaliana]
  misc_feature (67)..(173): Homolog of NCBI NO: 9758063 NR Description: DNA-binding protein-like [Arabidopsis thaliana]
  misc_feature (1)..(26): Homolog of NCBI NO: 9758063 NR Description: DNA-binding protein-like [Arabidopsis thaliana]
  misc_feature (34)..(144): Homolog of NCBI NO: 11358566 NR Description: myc-like protein - Arabidopsis thaliana
  misc_feature (34)..(144): Homolog of NCBI NO: 30682248 NR Description: bHLH protein family [Arabidopsis thaliana]
  misc_feature (1)..(122): Homolog of NCBI NO: 21555388 NR Description: putative DNA-binding protein [Arabidopsis
  misc_feature (1)..(122): Homolog of NCBI NO: 15221582 NR Description: bHLH protein family [Arabidopsis thaliana]
MLNGSQNTIDPDQSRDIVNKTAERQPDLVSKGIPLPLAMHANMSVPVRSDGVLAHPLQGTVSNAQSTECPTTSEPQNQQDELSVEGGTISISSAYSQGLLNNLTQALQSAGLDLSQASISVQINLGKRANKGLNCGTSSLKHHDNPSSNNQTIAHFRDAGSGEDSDQAQKRMKTYK

SEQ ID NO: 54626 - DNA, 1121 bp, Glycine max
  misc_feature (1)..(1121): Ceres Seq. ID no. 13593968
atcacagctgcaatcaacaagacttagaatgcgatgagcaaaaatagacctcaattccgaattcagagatagcacgcaccaggagaagccatggctactcaatccccttcacctcagaacctaggtggtgaaattgagcaaacagaaaatgtagatcagcataataggggagaagagcttggtaaacagagttcagacacatcggtgtttgtgaactcagagccattgcgtgaggaacaaattcagaatgctgtgaaatttctgtcgcacccgaaagttagaggttctcctgtcatccacagacgatcgtttctggagaagaagggccttacgaaggaggagattgatgaagcctttcggcgtgtgcctgattcacctccaagtgtgcagacagctggcataaatcaagatggacaattgaagccatcatcaaacattcagcagcaaggccaaccacaggctttgcagctgactgtaccagcttctactggtgttactactacgcttggaaccttatctcgccgcagttttcactggtcacatgcccttattgcagttggattactggctgcttcaggtgctggtacagttatagtaattaagaattctattctccctcggttaaaatcctggatacgcaatgttgtcctagaagaggatcatgaccaatcaaagagaacaggctcaaaaccaacattggcagaagaagctgcacaggctgcaaaagcagctgcagttgcagctgctgatattgcaaaagcaagccaagaattactgagttcaaaaattgaagagaagagatattttgtagaagttgtgaaccttttggataagcaagtgcaggaaatgaagttgatgactaatgcaataggaagattggaagcttctggtggactctctgtctcaaagcaagaagaccgcttagtcactcaaacaggttcaaagacacagcaactgatcgtgaatgggaagtcagactatgagtcccgatcagtgagatcttcatcccctcctgtatctgntgaaccatctagtgctcctcatcctaaatcatatatggagataatggccatgatccaaagaggggagaagccttctaacattagggaaattgatgattc

SEQ ID NO: 54627 - protein, 343 aa, Glycine max
  peptide (1)..(343): Ceres Seq. ID no. 13593969
  misc_feature (46)..(177): Pfam Name: Peroxisomal membrane anchor protein (Pex14p) Pfam Description: Peroxisomal membrane anchor protein (Pex14p)
  misc_feature (253)..(342): Homolog of NCBI NO: 21593914 NR Description: unknown [Arabidopsis thaliana]
  misc_feature (32)..(93): Homolog of NCBI NO: 9945056 NR Description: rice EST D22333 corresponds to a region of the
  misc_feature (127)..(342): Homolog of NCBI NO: 20466350 NR Description: putative protein [Arabidopsis thaliana]
  misc_feature (33)..(342): Homolog of NCBI NO: 11121113 NR Description: peroxin Pex14 [Arabidopsis thaliana]
  misc_feature (33)..(342): Homolog of NCBI NO: 30697742 NR Description: (PEX14) protein [Arabidopsis thaliana]
  misc_feature (33)..(342): Homolog of NCBI NO: 11094252 NR Description: PEX14 [Arabidopsis thaliana]
  misc_feature (311)..(311): Xaa is any aa, unknown or other
MATQSPSPQNLGGEIEQTENVDQHNRGEELGKQSSDTSVFVNSEPLREEQIQNAVKFLSHPKVRGSPVIHRRSFLEKKGLTKEEIDEAFRRVPDSPPSVQTAGINQDGQLKPSSNIQQQGQPQALQLTVPASTGVTTTLGTLSRRSFHWSHALIAVGLLAASGAGTVIVIKNSILPRLKSWIRNVVLEEDHDQSKRTGSKPTLAEEAAQAAKAAAVAAADIAKASQELLSSKIEEKRYFVEVVNLLDKQVQEMKLMTNAIGRLEASGGLSVSKQEDRLVTQTGSKTQQLIVNGKSDYESRSVRSSSPPVSXEPSSAPHPKSYMEIMAMIQRGEKPSNIREIDD

SEQ ID NO: 54628 - DNA, 749 bp, Glycine max
  misc_feature (1)..(749): Ceres Seq. ID no. 14307257
tatttttcatgattttaataatcatcgaccaatgtagtctatcaaaatcaacattatcagtcaatttgatttctggcgttaccaaatcagttaactaaattatgaatttgcactttgtgtgtatacaggtattcacacaaccagttttccagcttgtggaaacttgggttgcgaagcgttggcctgaaagcaacttcatgggaaaagaatatcgtgttggcaagttcagattcaatggattcaggatgatatggaggacagtgtacgtgattttcacagcagtggttgctatgatacttcccttcttcaacagcattgtgggtttgcttggagctatttccttctttcctttgacagtgtattttccaacagagatgtatctggtgcaggctaaagtgcccaagttttctctggtctggattggggtcaaaattctaagtggcttctgcttgattgtcactcttgttgctgcagctggatcaatccaaggaatcatcgcagaccttaaaatctatgagcccttcaagtaaatatcctttgtgtagtttagctctttggatgaacaatggtttgtggctaagtttgtggtcattattgatcagttgtttggataaactttctttcaagtgttttcataatatatacttttataatggatcgataagaatgcttttagatcctagaaaaattttaaattgctttttgtcctcaacttctataatcaataatagttttcgtttctgtatttc

SEQ ID NO: 54629 - protein, 142 aa, Glycine max
  peptide (1)..(142): Ceres Seq. ID no. 14307258
  misc_feature (3)..(142): Homolog of NCBI NO: 15240523 NR Description: amino acid permease 6 (AAP6) [Arabidopsis
  misc_feature (3)..(142): Homolog of NCBI NO: 15216030 NR Description: amino acid permease AAP4 [Vicia faba var. minor]
  misc_feature (3)..(142): Homolog of NCBI NO: 27447655 NR Description: amino acid transporter [Lycopersicon esculentum]
MNLHFVCIQVFTQPVFQLVETWVAKRWPESNFMGKEYRVGKFRFNGFRMIWRTVYVIFTAVVAMILPFFNSIVGLLGAISFFPLTVYFPTEMYLVQAKVPKFSLVWIGVKILSGFCLIVTLVAAAGSIQGIIADLKIYEPFK

SEQ ID NO: 54630 - protein, 110 aa, Glycine max
  peptide (1)..(110): Ceres Seq. ID no. 14307259
  misc_feature (1)..(110): Homolog of NCBI NO: 15240523 NR Description: amino acid permease 6 (AAP6) [Arabidopsis
  misc_feature (1)..(110): Homolog of NCBI NO: 15216030 NR Description: amino acid permease AAP4 [Vicia faba var. minor]
  misc_feature (1)..(110): Homolog of NCBI NO: 27447655 NR Description: amino acid transporter [Lycopersicon esculentum]
MGKEYRVGKFRFNGFRMIWRTVYVIFTAVVAMILPFFNSIVGLLGAISFFPLTVYFPTEMYLVQAKVPKFSLVWIGVKILSGFCLIVTLVAAAGSIQGIIADLKIYEPFK

SEQ ID NO: 54631 - protein, 94 aa, Glycine max
  peptide (1)..(94): Ceres Seq. ID no. 14307260
  misc_feature (1)..(94): Homolog of NCBI NO: 15240523 NR Description: amino acid permease 6 (AAP6) [Arabidopsis
  misc_feature (1)..(94): Homolog of NCBI NO: 15216030 NR Description: amino acid permease AAP4 [Vicia faba var. minor]
  misc_feature (1)..(94): Homolog of NCBI NO: 27447655 NR Description: amino acid transporter [Lycopersicon esculentum]
MIWRTVYVIFTAVVAMILPFFNSIVGLLGAISFFPLTVYFPTEMYLVQAKVPKFSLVWIGVKILSGFCLIVTLVAAAGSIQGIIADLKIYEPFK

SEQ ID NO: 54632 - DNA, 1388 bp, Glycine max
  misc_feature (1)..(1388): Ceres Seq. ID no. 14313758
gaaccatcattgcgccttgcagcagctacgccttctacttaaatcgtaagaaggaactctctctccaccgtcccatcctctttccactcaacttctgccaatgcgtccgtttgcacctcaagtcgcacgcttcacgaacagatcaacttcatcctcaccagcactacagtccgcagcaagttattttacatccggttaccgcagcactccttctcccacacaacaacaaaccagaatgtcttcctccaccgagactggcgagcttaagctcgagagcaccgtcaagaccgccactggtgtcgagctcagcaacgagcagaggactatcgtgtcttcagtgctggacctcttcgctggcaggccctcccttgccaagctacagctctggaaggacgatgccgtcttcagcgaccccatcactgtcgcaaagggcaggaaggagtttgagcctcaatggtacggcctccaaaccgccttctccgaaatcgagcgcaaagaccacagcgtcacctcctccggcaaccccatcgagctagacatgaccacaatgtacaaggtcaagggtatcggcaaggagacgaccatcaccagcaaggtcaacatcttccacgagaacggcaagatcacccgcgtcgaggacaagtggaacggcaacctccccgactctggcatcgcaaatgcattccgacgactcaacgccgttagtgtccccaagatggtcggcgtgcccaagaacgcagaggaggatgccaagcgcggcaattagaagcgctgctacattgtagcctcccactgctttcgtttcggctttctactcggtggttttcgttctgttgtcaaggagtcggacgttcaacctgcgacagcgcctggcattatgaggaatcctggtcctcagggtggacaagatcgaccgcgcgattctgcaacggctgtgcatttcgagcctgctttgagcgacattccggaagaggctgcttctactggggcttcaccacctccggctgcatcgtcctcggtctcagatccttcagcttcatcttcttctcaacctcgcgatcccgcgccaactgttcactttgatcctaacttgaagaaaccgaagaagggtcgtccctctactgcgactgctttaccttcagacgggtcacctcctccaccaattcggccctatcttaagcagcctccgcaatcgctaccgccgactcccgagtcagagccacctgaggcgtcgaatgctcctccggcagttgctgaagccgaagcgagttcggggaagcgggtgtcgcctctacgtttgctgggttttcgttgattaagatacttttacggttggacagtacacacagcattattcttagcaggatgtatcactattcattatgatg

SEQ ID NO: 54633 - protein, 221 aa, Glycine max
  peptide (1)..(221): Ceres Seq. ID no. 14313759
  misc_feature (54)..(205): Homolog of NCBI NO: 32409371 NR Description: predicted protein [Neurospora crassa]
MRPFAPQVARFTNRSTSSSPALQSAASYFTSGYRSTPSPTQQQTRMSSSTETGELKLESTVKTATGVELSNEQRTIVSSVLDLFAGRPSLAKLQLWKDDAVFSDPITVAKGRKEFEPQWYGLQTAFSEIERKDHSVTSSGNPIELDMTTMYKVKGIGKETTITSKVNIFHENGKITRVEDKWNGNLPDSGIANAFRRLNAVSVPKMVGVPKNAEEDAKRGN

SEQ ID NO: 54634 - protein, 177 aa, Glycine max
  peptide (1)..(177): Ceres Seq. ID no. 14313760
  misc_feature (46)..(176): Pfam Name: Extensin-like region Pfam Description: Extensin-like region
  misc_feature (80)..(177): Homolog of NCBI NO: 15233976 NR Description: leucine-rich repeat extensin family [Arabidopsis
  misc_feature (53)..(177): Homolog of NCBI NO: 20138131 NR Description: Vegetative cell wall protein gp1 precursor
  misc_feature (79)..(177): Homolog of NCBI NO: 13592175 NR Description: ppg3 [Leishmania major]
  misc_feature (89)..(177): Homolog of NCBI NO: 13592175 NR Description: ppg3 [Leishmania major]
  misc_feature (81)..(177): Homolog of NCBI NO: 13592175 NR Description: ppg3 [Leishmania major]
  misc_feature (81)..(177): Homolog of NCBI NO: 13592175 NR Description: ppg3 [Leishmania major]
  misc_feature (82)..(177): Homolog of NCBI NO: 13592175 NR Description: ppg3 [Leishmania major]
  misc_feature (82)..(177): Homolog of NCBI NO: 13592175 NR Description: ppg3 [Leishmania major]
  misc_feature (82)..(177): Homolog of NCBI NO: 13592175 NR Description: ppg3 [Leishmania major]
  misc_feature (72)..(177): Homolog of NCBI NO: 13592175 NR Description: ppg3 [Leishmania major]
TIIAPCSSYAFYLNRKKELSLHRPILFPLNFCQCVRLHLKSHASRTDQLHPHQHYSPQQVILHPVTAALLLPHNNKPECLPPPRLASLSSRAPSRPPLVSSSATSRGLSCLQCWTSSLAGPPLPSYSSGRTMPSSATPSLSQRAGRSLSLNGTASKPPSPKSSAKTTASPPPATPSS

SEQ ID NO: 54635 - protein, 176 aa, Glycine max
  peptide (1)..(176): Ceres Seq. ID no. 14313761
  misc_feature (9)..(160): Homolog of NCBI NO: 32409371 NR Description: predicted protein [Neurospora crassa]
MSSSTETGELKLESTVKTATGVELSNEQRTIVSSVLDLFAGRPSLAKLQLWKDDAVFSDPITVAKGRKEFEPQWYGLQTAFSEIERKDHSVTSSGNPIELDMTTMYKVKGIGKETTITSKVNIFHENGKITRVEDKWNGNLPDSGIANAFRRLNAVSVPKMVGVPKNAEEDAKRGN

SEQ ID NO: 54636 - DNA, 1484 bp, Glycine max
  misc_feature (1)..(1484): Ceres Seq. ID no. 14310387
ggtaaaaatgaacatgatagtcctgatgctcaatgcatggaaaggctcattgtgagtgatacttcattgcctaaatctgctaccagtcattttgaaagcccagctatttcagagtcttcagacattgtggatgatgggcctgtgaacaagtcaaatggtacagagtgcagaaatacaaatccactaccaggtgcccagaaagacataaaagaagatgaagtctatattaatatcaaactaaatgaagaatataacaagtctgttgatgttgatactcctaccgagtcacatcaagcagaagatgctggactattagtgaaggctgcagaagaccttgctagggagtatacatctcctttaactactgaaccttctgctcagcctgacagggaagtgtccggacttactgctgtgcctgttcaagatcaagctggtaataacttgggtaaacttggttcatccagagttgatgcttcagttgagtcaggtagccggtgtgacagtttggaaggcatctggggctctgtttcagttctgtcaattcaatccgatgcaccagctgttattgatgctgaaaccttgccatcaactggcttgctggcatcaacagaagcagggaaatcaaacttcaacgactcaaaagctacacctgacagacagcagtctggaaaatcagaaatgtttgaagcaccatctttcatgacattggttgatcctggtcaggttagcccaaaagccaatgcttctgaagtccagaagggacagaacacacaacagccagattccacttcacaggctgcttggtttcccactcttacacaagttgtcaatgagtctcaagggagaaagaagaatgaagaaataatagccaaggtgacaaactggagcactagtaaggagcacactcctcttaagagcctcttaggtgaggctgcccatagcagcaagccaagatctccaaaaatggaagaaaaatcagtgagtcagaagagtggtaaagttccggaaaagaatggttctgggttgacaactgttaactccattctgggtcctgaatcccctgtggctcaagtggtaaaaggagaggttgcaaaagaatggaactctccagcaagatatcctgctgatatcaagagagaaaaaaggaaagttaagagcagaccatactggatacaattggtatgctgcacatctgtcagtcctcagcgaaggtagaaaatcactaggttctgataatgcttccactctgatggattctggtcatagacatgctatttgcagtatttttctgtttttagtttgtctttgggtgcatattttgatcatgtgtcttctgttcattttggtagcctcctaggagtttggttgtatatgttgaccatcttcagttattatttatccctgcggtcatacatttttaccatacatagtaacgtatcattattttggcctggacccatattttagtccggtcttagttcttg

SEQ ID NO: 54637 - protein, 404 aa, Glycine max
  peptide (1)..(404): Ceres Seq. ID no. 14310388
  misc_feature (345)..(385): Homolog of NCBI NO: 16973320 NR Description: salt inducible-like protein [Gossypium hirsutum]
  misc_feature (272)..(398): Homolog of NCBI NO: 7488181 NR Description: probable salt-inducible protein - Arabidopsis
  misc_feature (272)..(399): Homolog of NCBI NO: 22328620 NR Description: expressed protein [Arabidopsis thaliana]
  misc_feature (272)..(399): Homolog of NCBI NO: 17064874 NR Description: Unknown protein [Arabidopsis thaliana]
GKNEHDSPDAQCMERLIVSDTSLPKSATSHFESPAISESSDIVDDGPVNKSNGTECRNTNPLPGAQKDIKEDEVYINIKLNEEYNKSVDVDTPTESHQAEDAGLLVKAAEDLAREYTSPLTTEPSAQPDREVSGLTAVPVQDQAGNNLGKLGSSRVDASVESGSRCDSLEGIWGSVSVLSIQSDAPAVIDAETLPSTGLLASTEAGKSNFNDSKATPDRQQSGKSEMFEAPSFMTLVDPGQVSPKANASEVQKGQNTQQPDSTSQAAWFPTLTQVVNESQGRKKNEEIIAKVTNWSTSKEHTPLKSLLGEAAHSSKPRSPKMEEKSVSQKSGKVPEKNGSGLTTVNSILGPESPVAQVVKGEVAKEWNSPARYPADIKREKRKVKSRPYWIQLVCCTSVSPQRR

SEQ ID NO: 54638 - protein, 392 aa, Glycine max
  peptide (1)..(392): Ceres Seq. ID no. 14310389
  misc_feature (333)..(373): Homolog of NCBI NO: 16973320 NR Description: salt inducible-like protein [Gossypium hirsutum]
  misc_feature (260)..(386): Homolog of NCBI NO: 7488181 NR Description: probable salt-inducible protein - Arabidopsis
  misc_feature (260)..(387): Homolog of NCBI NO: 22328620 NR Description: expressed protein [Arabidopsis thaliana]
  misc_feature (260)..(387): Homolog of NCBI NO: 17064874 NR Description: Unknown protein [Arabidopsis thaliana]
MERLIVSDTSLPKSATSHFESPAISESSDIVDDGPVNKSNGTECRNTNPLPGAQKDIKEDEVYINIKLNEEYNKSVDVDTPTESHQAEDAGLLVKAAEDLAREYTSPLTTEPSAQPDREVSGLTAVPVQDQAGNNLGKLGSSRVDASVESGSRCDSLEGIWGSVSVLSIQSDAPAVIDAETLPSTGLLASTEAGKSNFNDSKATPDRQQSGKSEMFEAPSFMTLVDPGQVSPKANASEVQKGQNTQQPDSTSQAAWFPTLTQVVNESQGRKKNEEIIAKVTNWSTSKEHTPLKSLLGEAAHSSKPRSPKMEEKSVSQKSGKVPEKNGSGLTTVNSILGPESPVAQVVKGEVAKEWNSPARYPADIKREKRKVKSRPYWIQLVCCTSVSPQRR

SEQ ID NO: 54639 - DNA, 1003 bp, Glycine max
  misc_feature (1)..(1003): Ceres Seq. ID no. 14303321
gaagacaccgagcgacaaagatcgacgatgacggacgaaaccgaagaattggaaccgttgtttgattacagccgggttcagcctctgaaccccatcgacctcgatgatgattttgatgattacgaggatgtgatttgcgttgatagtaaaaagaggaagaattcccaggctgttgggaatgagaagactaatgggaaaggagtaacagtggtggacattgaggatgatgattggttgcctcctccaccaaagatcgcaagtaatgcacagaagaccacggacgaggactcaactttgaaaaaattgagattaaagaagcaggaacttgcctggtttgctgaatcagcaaaagaattgttaaaagatgttgaagagtcatcaaaattggaaattaataattcgttgcagtcttctgtggttggtgtagatgagaaaagtacagagcattctgaaagagcaaagattgtcatttccgttcaggacaaggatggaacaaagcagattcgtatgttcatggatgacaagtttgaaaggattgtcaaaatatatgcagagaaaatcaaatgtgacatgaaactgatagtattgtcctttgatggtgataaaataagtttgtctgaaacccctgcaagccttgggatggaagacgatgatattattgaagttcacttgaaatcaagttgatcgaggtcttcagtcatggattcatgaagctcaaactgacattttggggccacatttgggagttacgtaccctagaaggttgtttgtttttagcatctttagtacaagaaaaacagtgccagttcggccgaactgtatagcacattatttttttatgtaattgtctagtatcgctccttttggtggatgtttctttgtttatggtataggtttctgataatgcagaaaccctcctgtttttggatgtgcattattgcttttggttttctgcaatcagtttgcttgattgttcaaatagatgtaagtcaagatgaagctc

SEQ ID NO: 54640 - protein, 227 aa, Glycine max
  peptide (1)..(227): Ceres Seq. ID no. 14303322
  misc_feature (155)..(227): Pfam Name: Ubiquitin family Pfam Description: Ubiquitin family
  misc_feature (3)..(175): Homolog of NCBI NO: 34912494 NR Description: putative amino acid or GABA permease
  misc_feature (59)..(222): Homolog of NCBI NO: 34912494 NR Description: putative amino acid or GABA permease
  misc_feature (10)..(227): Homolog of NCBI NO: 18408968 NR Description: ubiquitin family [Arabidopsis thaliana]
EDTERQRSTMTDETEELEPLFDYSRVQPLNPIDLDDDFDDYEDVICVDSKKRKNSQAVGNEKTNGKGVTVVDIEDDDWLPPPPKIASNAQKTTDEDSTLKKLRLKKQELAWFAESAKELLKDVEESSKLEINNSLQSSVVGVDEKSTEHSERAKIVISVQDKDGTKQIRMFMDDKFERIVKIYAEKIKCDMKLIVLSFDGDKISLSETPASLGMEDDDIIEVHLKSS

SEQ ID NO: 54641 - protein, 218 aa, Glycine max
  peptide (1)..(218): Ceres Seq. ID no. 14303323
  misc_feature (146)..(218): Pfam Name: Ubiquitin family Pfam Description: Ubiquitin family
  misc_feature (1)..(166): Homolog of NCBI NO: 34912494 NR Description: putative amino acid or GABA permease
  misc_feature (50)..(213): Homolog of NCBI NO: 34912494 NR Description: putative amino acid or GABA permease
  misc_feature (1)..(218): Homolog of NCBI NO: 18408968 NR Description: ubiquitin family [Arabidopsis thaliana]
MTDETEELEPLFDYSRVQPLNPIDLDDDFDDYEDVICVDSKKRKNSQAVGNEKTNGKGVTVVDIEDDDWLPPPPKIASNAQKTTDEDSTLKKLRLKKQELAWFAESAKELLKDVEESSKLEINNSLQSSVVGVDEKSTEHSERAKIVISVQDKDGTKQIRMFMDDKFERIVKIYAEKIKCDMKLIVLSFDGDKISLSETPASLGMEDDDIIEVHLKSS

SEQ ID NO: 54642 - DNA, 1212 bp, Glycine max
  misc_feature (1)..(1212): Ceres Seq. ID no. 14303340
gaaacaatggaaaagaaatcacctgaaccacccgaagaagcatcacagtcacgagactcatcgcgagataaccagacctggataactgcacaaaacattctgagagaaaaactgatcacagaggactgtttcgcatggaaattacaagctggttccaaagaggaagaagcattgagatacgttggtggggttgacataagcttctcaaaggatgacccatcaagggcatgtggcacccttgtagtcttggacttccacactcttcaagttctctatcaagatttctctttggtcactcttcaagtcccttatgtgcctggctttctagcatttagagaggccccagttcttctgcagcttctagagaaaatgaaaaggagcaataatcctttctaccctcagctattaatggttgatggaaacggaatacttcatccccgaggttttgggctggcctgtcatattggagttgaggccaatctcccaacaattgggattggaaagaatttgcatcatgtggatggtcttactcattctagagtgagagaacttcttggagctgaagaaaactgttctgaagattttattaatttggtgggttgttctgggcatatatggggagtggccatgagatctacccagggttccataaaaccaatatttatatcaattggtcacaagatatcacttcagactgccattatgattgttcaaatgacatgcaagtaccgtgtgcctgagccaattaggcaggctgacataagatctagagactacattcggaaacttgaagcaaatgccaaagtaaagtaatttcactcatatggtttaagtttttatcctgttaaattatgaaatagctagccatgtgagatgacaataacaagtttggctgcaaggggctcaaatgaacttgatagaaccatcacaattcgtcaagtggttagaaacaatgccagtgccagtggatttgcttatagcttcattgaatgatccatttcacctcacaggattacataaggactcagcattccatccattagcataattatatctaaaccactcatgtaaaagagtgatgatatatgcacaaccaaatcactctcaaaatagaactatttgcgagctagcattctgtgtagtgtagaagcagaatttttatttctggttgctttgattgtctgatgagaagtgctagcaacattctttaat

SEQ ID NO: 54643 - protein, 270 aa, Glycine max
  peptide (1)..(270): Ceres Seq. ID no. 14303341
  misc_feature (132)..(262): Homolog of NCBI NO: 21751158 NR Description: unnamed protein product [Homo sapiens]
  misc_feature (27)..(94): Homolog of NCBI NO: 40555767 NR Description: Unknown (protein for MGC:74455) [Homo sapiens]
  misc_feature (132)..(262): Homolog of NCBI NO: 40555767 NR Description: Unknown (protein for MGC:74455) [Homo sapiens]
  misc_feature (97)..(262): Homolog of NCBI NO: 28893575 NR Description: RIKEN cDNA A730011L01 gene [Mus musculus]
  misc_feature (134)..(262): Homolog of NCBI NO: 7486498 NR Description: hypothetical protein F6E21.70 - Arabidopsis
  misc_feature (34)..(262): Homolog of NCBI NO: 34875599 NR Description: similar to chromosome 17 open reading frame 27
  misc_feature (27)..(262): Homolog of NCBI NO: 31542775 NR Description: hypothetical protein FLJ35220 [Homo sapiens]
  misc_feature (190)..(261): Homolog of NCBI NO: 28828773 NR Description: similar to Arabidopsis thaliana (Mouse-ear
  misc_feature (11)..(188): Homolog of NCBI NO: 28828773 NR Description: similar to Arabidopsis thaliana (Mouse-ear
  misc_feature (12)..(262): Homolog of NCBI NO: 18417747 NR Description: expressed protein [Arabidopsis thaliana]
ETMEKKSPEPPEEASQSRDSSRDNQTWITAQNILREKLITEDCFAWKLQAGSKEEEALRYVGGVDISFSKDDPSRACGTLVVLDFHTLQVLYQDFSLVTLQVPYVPGFLAFREAPVLLQLLEKMKRSNNPFYPQLLMVDGNGILHPRGFGLACHIGVEANLPTIGIGKNLHHVDGLTHSRVRELLGAEENCSEDFINLVGCSGHIWGVAMRSTQGSIKPIFISIGHKISLQTAIMIVQMTCKYRVPEPIRQADIRSRDYIRKLEANAKVK

SEQ ID NO: 54644 - protein, 268 aa, Glycine max
  peptide (1)..(268): Ceres Seq. ID no. 14303342
  misc_feature (130)..(260): Homolog of NCBI NO: 21751158 NR Description: unnamed protein product [Homo sapiens]
  misc_feature (25)..(92): Homolog of NCBI NO: 40555767 NR Description: Unknown (protein for MGC:74455) [Homo sapiens]
  misc_feature (130)..(260): Homolog of NCBI NO: 40555767 NR Description: Unknown (protein for MGC:74455) [Homo sapiens]
  misc_feature (95)..(260): Homolog of NCBI NO: 28893575 NR Description: RIKEN cDNA A730011L01 gene [Mus musculus]
  misc_feature (132)..(260): Homolog of NCBI NO: 7486498 NR Description: hypothetical protein F6E21.70 - Arabidopsis
  misc_feature (32)..(260): Homolog of NCBI NO: 34875599 NR Description: similar to chromosome 17 open reading frame 27
  misc_feature (25)..(260): Homolog of NCBI NO: 31542775 NR Description: hypothetical protein FLJ35220 [Homo sapiens]
  misc_feature (188)..(259): Homolog of NCBI NO: 28828773 NR Description: similar to Arabidopsis thaliana (Mouse-ear
  misc_feature (9)..(186): Homolog of NCBI NO: 28828773 NR Description: similar to Arabidopsis thaliana (Mouse-ear
  misc_feature (10)..(260): Homolog of NCBI NO: 18417747 NR Description: expressed protein [Arabidopsis thaliana]
MEKKSPEPPEEASQSRDSSRDNQTWITAQNILREKLITEDCFAWKLQAGSKEEEALRYVGGVDISFSKDDPSRACGTLVVLDFHTLQVLYQDFSLVTLQVPYVPGFLAFREAPVLLQLLEKMKRSNNPFYPQLLMVDGNGILHPRGFGLACHIGVEANLPTIGIGKNLHHVDGLTHSRVRELLGAEENCSEDFINLVGCSGHIWGVAMRSTQGSIKPIFISIGHKISLQTAIMIVQMTCKYRVPEPIRQADIRSRDYIRKLEANAKVK

SEQ ID NO: 54645 - protein, 147 aa, Glycine max
  peptide (1)..(147): Ceres Seq. ID no. 14303343
  misc_feature (1)..(145): Homolog of NCBI NO: 19115244 NR Description: putative endonuclease [Schizosaccharomyces pombe]
  misc_feature (9)..(139): Homolog of NCBI NO: 21751158 NR Description: unnamed protein product [Homo sapiens]
  misc_feature (9)..(139): Homolog of NCBI NO: 40555767 NR Description: Unknown (protein for MGC:74455) [Homo sapiens]
  misc_feature (1)..(139): Homolog of NCBI NO: 28893575 NR Description: RIKEN cDNA A730011L01 gene [Mus musculus]
  misc_feature (11)..(139): Homolog of NCBI NO: 7486498 NR Description: hypothetical protein F6E21.70 - Arabidopsis
  misc_feature (1)..(139): Homolog of NCBI NO: 34875599 NR Description: similar to chromosome 17 open reading frame 27
  misc_feature (1)..(139): Homolog of NCBI NO: 31542775 NR Description: hypothetical protein FLJ35220 [Homo sapiens]
  misc_feature (67)..(138): Homolog of NCBI NO: 28828773 NR Description: similar to Arabidopsis thaliana (Mouse-ear
  misc_feature (1)..(65): Homolog of NCBI NO: 28828773 NR Description: similar to Arabidopsis thaliana (Mouse-ear
  misc_feature (1)..(139): Homolog of NCBI NO: 18417747 NR Description: expressed protein [Arabidopsis thaliana]
MKRSNNPFYPQLLMVDGNGILHPRGFGLACHIGVEANLPTIGIGKNLHHVDGLTHSRVRELLGAEENCSEDFINLVGCSGHIWGVAMRSTQGSIKPIFISIGHKISLQTAIMIVQMTCKYRVPEPIRQADIRSRDYIRKLEANAKVK

SEQ ID NO: 54646 - DNA, 1523 bp, Glycine max
  misc_feature (1)..(1523): Ceres Seq. ID no. 14313893
aatgcagtcaaacaataacatatcgtaaaaagtactactatagttgctgttttgttgaagaagaaaacaaagtagaagcaaagttctttaagagtgaaagagaccatttttgcaaccccaattgatcagctcttgaaacaaacatgaagaagaacacctctgcgatggagaatgccggtggcatcaaggcatggagtttccgtcgccaccagcttttggttagaagggtgatgcaattaaccatgttcattgctggacttcctgtgttgtgggtgtttctctctaactctgcctcttccattgaattccataccttctcacattacttcactgctcagtcaacaaaggctggttatgaatcaaagctagagagtgtttttagaactgcgtctatgaaggataagacagtgataatcacaactttaaacgatgcatgggcaaagccaggttcggtatttgacctctttcttgagagttttcgcctagggaatgagacacaatggcttttaaatcacttggtggtaataacttgggaccaaaagacaaatgcttattgccttgctttgcacaaacattgttaccaagttgaaactaaaggtgccaatttcaccggtgaagtattattcatgaccccgacatacctacacatgatgtgtagaagaactgaattcctcacttctgttcttgagatgggatataactttgtgttcacggatactgatataatgtggcttagagatcccttcaaacaattttatgaagatgcagatttccaaatagcttgtgatgctttcaatggcaactcctctgacatatacaactatccaaatggagggtttaaatacataaaatcgaataaccgaactatttggtttaacaagttctggttcaactctagcaaagagtacccagggttgggtgagcaggctgtgttcaataagatcaaaatgcaccccttaatttcccacatgaagctgaagattaggttccttagcactagctattttggagggttttgtgagcctagcaaggacttcaacaaggtctcaacaatgcatgccaattgttgtgttggcatagacaacaaagtcaatgatcttaaaattttgcttgaggattggaagaagtatatggcattgtctgaaattgacaaaaaacagtcaaatcttacttggagcgtaccacaaagttgcagtaagtcctttgaacatgccaaagaaaggaagaataaagggaggttgcgacgggctttggttgaaactgtttgatgcatttataaagaggtttgagaatgattgactcaaattttggatcaaagcaaaaggtttactttgccaagccaattcttttgcaatggaaaagaaatgtgtggaagtggtacacccattgaaaatgtaggaaacagagaaaagtttgttcaaagttttattatgagatgtaatatatgcagtatgtacaataatttatataacagtttgtataacattttttttgggtttatatctatcattataaaatgtaac

SEQ ID NO: 54647 - protein, 374 aa, Glycine max
  peptide (1)..(374): Ceres Seq. ID no. 14313894
  misc_feature (75)..(350): Homolog of NCBI NO: 34897442 NR Description: putative regulatory protein
  misc_feature (74)..(354): Homolog of NCBI NO: 18414558 NR Description: hypothetical protein common family [Arabidopsis
  misc_feature (84)..(350): Homolog of NCBI NO: 6063544 NR Description: similar to Arabidopsis thaliana chromosome 2, BAC
  misc_feature (73)..(349): Homolog of NCBI NO: 15235236 NR Description: hypothetical protein common family [Arabidopsis
  misc_feature (68)..(351): Homolog of NCBI NO: 23306127 NR Description: Putataive InsB from Escherichia coli
  misc_feature (59)..(350): Homolog of NCBI NO: 21536907 NR Description: regulatory protein [Arabidopsis thaliana]
  misc_feature (1)..(351): Homolog of NCBI NO: 15235236 NR Description: hypothetical protein common family [Arabidopsis
  misc_feature (74)..(356): Homolog of NCBI NO: 38344278 NR Description: OSJNBa0013K16.10 [Oryza sativa (japonica
  misc_feature (1)..(351): Homolog of NCBI NO: 15223826 NR Description: expressed protein [Arabidopsis thaliana]
  misc_feature (72)..(351): Homolog of NCBI NO: 18395292 NR Description: hypothetical protein [Arabidopsis thaliana]
MKKNTSAMENAGGIKAWSFRRHQLLVRRVMQLTMFIAGLPVLWVFLSNSASSIEFHTFSHYFTAQSTKAGYESKLESVFRTASMKDKTVIITTLNDAWAKPGSVFDLFLESFRLGNETQWLLNHLVVITWDQKTNAYCLALHKHCYQVETKGANFTGEVLFMTPTYLHMMCRRTEFLTSVLEMGYNFVFTDTDIMWLRDPFKQFYEDADFQIACDAFNGNSSDIYNYPNGGFKYIKSNNRTIWFNKFWFNSSKEYPGLGEQAVFNKIKMHPLISHMKLKIRFLSTSYFGGFCEPSKDFNKVSTMHANCCVGIDNKVNDLKILLEDWKKYMALSEIDKKQSNLTWSVPQSCSKSFEHAKERKNKGRLRRALVETV

SEQ ID NO: 54648 - protein, 367 aa, Glycine max
  peptide (1)..(367): Ceres Seq. ID no. 14313895
  misc_feature (68)..(343): Homolog of NCBI NO: 34897442 NR Description: putative regulatory protein
  misc_feature (67)..(347): Homolog of NCBI NO: 18414558 NR Description: hypothetical protein common family [Arabidopsis
  misc_feature (77)..(343): Homolog of NCBI NO: 6063544 NR Description: similar to Arabidopsis thaliana chromosome 2, BAC
  misc_feature (66)..(342): Homolog of NCBI NO: 15235236 NR Description: hypothetical protein common family [Arabidopsis
  misc_feature (61)..(344): Homolog of NCBI NO: 23306127 NR Description: Putataive InsB from Escherichia coli
  misc_feature (52)..(343): Homolog of NCBI NO: 21536907 NR Description: regulatory protein [Arabidopsis thaliana]
  misc_feature (1)..(344): Homolog of NCBI NO: 15235236 NR Description: hypothetical protein common family [Arabidopsis
  misc_feature (67)..(349): Homolog of NCBI NO: 38344278 NR Description: OSJNBa0013K16.10 [Oryza sativa (japonica
  misc_feature (1)..(344): Homolog of NCBI NO: 15223826 NR Description: expressed protein [Arabidopsis thaliana]
  misc_feature (65)..(344): Homolog of NCBI NO: 18395292 NR Description: hypothetical protein [Arabidopsis thaliana]
MENAGGIKAWSFRRHQLLVRRVMQLTMFIAGLPVLWVFLSNSASSIEFHTFSHYFTAQSTKAGYESKLESVFRTASMKDKTVIITTLNDAWAKPGSVFDLFLESFRLGNETQWLLNHLVVITWDQKTNAYCLALHKHCYQVETKGANFTGEVLFMTPTYLHMMCRRTEFLTSVLEMGYNFVFTDTDIMWLRDPFKQFYEDADFQIACDAFNGNSSDIYNYPNGGFKYIKSNNRTIWFNKFWFNSSKEYPGLGEQAVFNKIKMHPLISHMKLKIRFLSTSYFGGFCEPSKDFNKVSTMHANCCVGIDNKVNDLKILLEDWKKYMALSEIDKKQSNLTWSVPQSCSKSFEHAKERKNKGRLRRALVETV

SEQ ID NO: 54649 - protein, 345 aa, Glycine max
  peptide (1)..(345): Ceres Seq. ID no. 14313896
  misc_feature (46)..(321): Homolog of NCBI NO: 34897442 NR Description: putative regulatory protein
  misc_feature (45)..(325): Homolog of NCBI NO: 18414558 NR Description: hypothetical protein common family [Arabidopsis
  misc_feature (55)..(321): Homolog of NCBI NO: 6063544 NR Description: similar to Arabidopsis thaliana chromosome 2, BAC
  misc_feature (44)..(320): Homolog of NCBI NO: 15235236 NR Description: hypothetical protein common family [Arabidopsis
  misc_feature (39)..(322): Homolog of NCBI NO: 23306127 NR Description: Putataive InsB from Escherichia coli
  misc_feature (30)..(321): Homolog of NCBI NO: 21536907 NR Description: regulatory protein [Arabidopsis thaliana]
  misc_feature (1)..(322): Homolog of NCBI NO: 15235236 NR Description: hypothetical protein common family [Arabidopsis
  misc_feature (45)..(327): Homolog of NCBI NO: 38344278 NR Description: OSJNBa0013K16.10 [Oryza sativa (japonica
  misc_feature (1)..(322): Homolog of NCBI NO: 15223826 NR Description: expressed protein [Arabidopsis thaliana]
  misc_feature (43)..(322): Homolog of NCBI NO: 18395292 NR Description: hypothetical protein [Arabidopsis thaliana]
MQLTMFIAGLPVLWVFLSNSASSIEFHTFSHYFTAQSTKAGYESKLESVFRTASMKDKTVIITTLNDAWAKPGSVFDLFLESFRLGNETQWLLNHLVVITWDQKTNAYCLALHKHCYQVETKGANFTGEVLFMTPTYLHMMCRRTEFLTSVLEMGYNFVFTDTDIMWLRDPFKQFYEDADFQIACDAFNGNSSDIYNYPNGGFKYIKSNNRTIWFNKFWFNSSKEYPGLGEQAVFNKIKMHPLISHMKLKIRFLSTSYFGGFCEPSKDFNKVSTMHANCCVGIDNKVNDLKILLEDWKKYMALSEIDKKQSNLTWSVPQSCSKSFEHAKERKNKGRLRRALVETV

SEQ ID NO: 54650 - DNA, 1492 bp, Glycine max
  misc_feature (1)..(1492): Ceres Seq. ID no. 13637842
gacaagtgagtttgttgatcgagataactagaaacagtgtgatgaaaatgaaggtccttgttttcttcgttgctacaattttggtagcatggcaatgccatgcgtacgatatgttccctctccgaatgaacactggctatggtgcccgtactccggaggtgaaatgcgcaagttggaggcttgctgtggaagcacacaacatctttggctttgagaccattcctgaagagtgcgttgaagcaacaaaggaatacatccatggcgaacaatatagatcagactccaaaacagttaaccaacaagcttacttttatgccagagacctcgaagtccatcccaaggacacatttgtgttcagtatagatggcaccgtactctctaatattccatactacaaaaaacatggatatgggtattatgctcttagttaattttcttctaatactctctttttccgtttttgctattactaggttactcccttatatgcgcatcatttattttcaactatttttggtattgatcgagtttcggtgtttggcccgactaacaacattaaggtttctcatcacatgcatgtagatttgaaaccttcattatatatgacattttatgattagatataatataaagaaaaagtttcattgtgagtgcataaatatatatatatacagacacaggcacatacatgctttcaggatcgtgttcattgttcttaatgcaatattttatgtgatagggtggagaaatttaactcgaccttgtatgatgaatgggttaacaagggcaatgcaccggcactgcccgagactcttaagaattacaacaagctggtgtctcttggcttcaagattatattcttgtcaggaagaacactggacaaacaggccgtaacagaagcaaacttaaagaaggctggctaccacacatgggaaaaattaattctcaagtcagttttcttttttctctatactatattctcaagtcaattaattctcaacgttgcaccaaatctgccaggaaggaacagtttatagataatcagaaattatataattattttaagtacatggtgcgatatgagtttgaaatactagtagctaattggatctatttttggttggtgcagggatccacaagatccttccactccaaatgcagtttcatacaaaacagcagcgagagagaaactgataaggcagggatacaacattgttgggatcattggagaccaatggagcgatctcctcggaggccacagaggcgaaagcaggacctttaagcttcctaatcccctgtactacattcagtagttccttcacctctcaacaatctagcttgctcctatctatctatatgtaataagatgcgttcaaataggggcactagcttcactttatgttgtttcagctgtgtgtcaacaagtcatgtaagagacttcactatgttgttttctctttcgtggctttaataaattatgcgcccttgttcc

SEQ ID NO: 54651 - protein, 142 aa, Glycine max
  peptide (1)..(142): Ceres Seq. ID no. 15220387
  misc_feature (41)..(137): Pfam Name: HAD superfamily, subfamily IIIB (Acid phosphatase) Pfam Description: HAD superfamily, subfamily IIIB (Acid
  misc_feature (17)..(137): Homolog of NCBI NO: 1351033 NR Description: STEM 31 KD GLYCOPROTEIN PRECURSOR (VEGETATIVE
QVSLLIEITRNSVMKMKVLVFFVATILVAWQCHAYDMFPLRMNTGYGARTPEVKCASWRLAVEAHNIFGFETIPEECVEATKEYIHGEQYRSDSKTVNQQAYFYARDLEVHPKDTFVFSIDGTVLSNIPYYKKHGYGYYALS

SEQ ID NO: 54652 - protein, 129 aa, Glycine max
  peptide (1)..(129): Ceres Seq. ID no. 15220388
  misc_feature (28)..(124): Pfam Name: HAD superfamily, subfamily IIIB (Acid phosphatase) Pfam Description: HAD superfamily, subfamily IIIB (Acid
  misc_feature (4)..(124): Homolog of NCBI NO: 1351033 NR Description: STEM 31 KD GLYCOPROTEIN PRECURSOR (VEGETATIVE
MKMKVLVFFVATILVAWQCHAYDMFPLRMNTGYGARTPEVKCASWRLAVEAHNIFGFETIPEECVEATKEYIHGEQYRSDSKTVNQQAYFYARDLEVHPKDTFVFSIDGTVLSNIPYYKKHGYGYYALS

SEQ ID NO: 54653 - protein, 127 aa, Glycine max
  peptide (1)..(127): Ceres Seq. ID no. 15220389
  misc_feature (26)..(122): Pfam Name: HAD superfamily, subfamily IIIB (Acid phosphatase) Pfam Description: HAD superfamily, subfamily IIIB (Acid
  misc_feature (2)..(122): Homolog of NCBI NO: 1351033 NR Description: STEM 31 KD GLYCOPROTEIN PRECURSOR (VEGETATIVE
MKVLVFFVATILVAWQCHAYDMFPLRMNTGYGARTPEVKCASWRLAVEAHNIFGFETIPEECVEATKEYIHGEQYRSDSKTVNQQAYFYARDLEVHPKDTFVFSIDGTVLSNIPYYKKHGYGYYALS

SEQ ID NO: 54654 - DNA, 1410 bp, Glycine max
  misc_feature (1)..(1410): Ceres Seq. ID no. 15170881
ggacgctgctgctataaaaaagctcgaatactcggataaggagagtaagggcggtgcagtgcttcaaacccctttttctcttctcatttcctttcatcactctcttgcttcttttcttcttctcgcaattttccattttcacacttttagcgtaagaacatcttttaatggcgtcccaaatccgtgagtggtctggaatcaatacattcgcacctgctacccagactaagttgcttgaactcttgggaaatcttaaacaagagaatgtgaactccttgactatacttgtgatgggaaaaggaggtgttggaaaatcttcaactgtgaactccatcattggggaaagagtggtttcgattagtcctttccagtcggaagggccaagacctgtgatggtgtcacgatcaagggctggttttacattgaacattattgacactcctggtctcattgaaggggggtacatcaatgatatggcacttgatataataaaacgtttccttctgaacaagaccatagatgtgctgctttacgtggatcgcttggatgtgtacagagtggacaacttggataagttagtcgccaaagctataacagatagttttggcaaaggaatatggaacaaggccattgtaacactcacacatgcccagttctctccaccagatggattgccctatgatgaattcttttcacaaagatctgagtctctcttgaaggttcttaggtcaggtgccaggataaagaaagaagcctttcaggctgcttcaattcctgttgttttggtcgagaacagtgggagatgcaacaaaaatgacagtgatgaaaaggttcttccaaatgggactgcttggattcctaatctagtccagacaatcacagaaatcgcattgaacaaaagtgagtctattcatgttgacaagaatttgattgaagggccaaatccgaatcagagaggaaaattatggattcctctcgtgttcgctctccaatacttccttatcatgaagccaataaaaggactgatcgagaaggacattgcaaatgagagaaagccaacatgggagagacgcgatgctgcttttcggaagagagatttatattagttgtgcatttctgtgcccatgaaattccattgatgttttagcttcctttgctgacacattttagtttttgtctgttctatgagtgaaacttggatgattttccttatactgtaattgctagtagtctggcataggaatttgtttgtgcctgagaggattgcatgtatgctggtaagtttttggcttttgcatgattcagtttgttaatgttagtatttagttgtcttgtaaacatagctctagatgtggctactatcgataatagcttgatattctaataaaattagcccgaagtatcgatatc

SEQ ID NO: 54655 - protein, 312 aa, Glycine max
  peptide (1)..(312): Ceres Seq. ID no. 15170882
  misc_feature (37)..(233): Pfam Name: AIG1 family Pfam Description: AIG1 family
  misc_feature (1)..(297): Homolog of NCBI NO: 33391904 NR Description: TOC33 [Brassica napus]
  misc_feature (1)..(297): Homolog of NCBI NO: 15217705 NR Description: GTP-binding protein -related [Arabidopsis
  misc_feature (1)..(302): Homolog of NCBI NO: 6689637 NR Description: Toc34-1 protein [Zea mays]
  misc_feature (1)..(302): Homolog of NCBI NO: 7259224 NR Description: Toc34-2 protein [Zea mays]
  misc_feature (5)..(309): Homolog of NCBI NO: 25091410 NR Description: Translocase of chloroplast 34 (34 kDa chloroplast
  misc_feature (5)..(309): Homolog of NCBI NO: 21594231 NR Description: GTP-binding protein [Arabidopsis thaliana]
  misc_feature (5)..(309): Homolog of NCBI NO: 15238381 NR Description: GTP-binding protein (gb|AAD09203.1) [Arabidopsis
  misc_feature (5)..(256): Homolog of NCBI NO: 18655563 NR Description: Chain A, Crystal Structure Of Pea Toc34 - A Novel
  misc_feature (1)..(308): Homolog of NCBI NO: 1076522 NR Description: chloroplast import-associated protein IAP36,
  misc_feature (1)..(308): Homolog of NCBI NO: 25091388 NR Description: Translocase of chloroplast 34 (34 kDa chloroplast envelope protein) (GTP-binding protein OEP34) (GTP-binding
MASQIREWSGINTFAPATQTKLLELLGNLKQENVNSLTILVMGKGGVGKSSTVNSIIGERVVSISPFQSEGPRPVMVSRSRAGFTLNIIDTPGLIEGGYINDMALDIIKRFLLNKTIDVLLYVDRLDVYRVDNLDKLVAKAITDSFGKGIWNKAIVTLTHAQFSPPDGLPYDEFFSQRSESLLKVLRSGARIKKEAFQAASIPVVLVENSGRCNKNDSDEKVLPNGTAWIPNLVQTITEIALNKSESIHVDKNLIEGPNPNQRGKLWIPLVFALQYFLIMKPIKGLIEKDIANERKPTWERRDAAFRKRDLY

SEQ ID NO: 54656 - protein, 271 aa, Glycine max
  peptide (1)..(271): Ceres Seq. ID no. 15170883
  misc_feature (1)..(192): Pfam Name: AIG1 family Pfam Description: AIG1 family
  misc_feature (1)..(256): Homolog of NCBI NO: 33391904 NR Description: TOC33 [Brassica napus]
  misc_feature (1)..(256): Homolog of NCBI NO: 15217705 NR Description: GTP-binding protein -related [Arabidopsis
  misc_feature (1)..(261): Homolog of NCBI NO: 6689637 NR Description: Toc34-1 protein [Zea mays]
  misc_feature (1)..(261): Homolog of NCBI NO: 7259224 NR Description: Toc34-2 protein [Zea mays]
  misc_feature (1)..(268): Homolog of NCBI NO: 25091410 NR Description: Translocase of chloroplast 34 (34 kDa chloroplast
  misc_feature (1)..(268): Homolog of NCBI NO: 21594231 NR Description: GTP-binding protein [Arabidopsis thaliana]
  misc_feature (1)..(268): Homolog of NCBI NO: 15238381 NR Description: GTP-binding protein (gb|AAD09203.1) [Arabidopsis
  misc_feature (1)..(215): Homolog of NCBI NO: 18655563 NR Description: Chain A, Crystal Structure Of Pea Toc34 - A Novel
  misc_feature (1)..(267): Homolog of NCBI NO: 1076522 NR Description: chloroplast import-associated protein IAP36,
  misc_feature (1)..(267): Homolog of NCBI NO: 25091388 NR Description: Translocase of chloroplast 34 (34 kDa chloroplast envelope protein) (GTP-binding protein OEP34) (GTP-binding
MGKGGVGKSSTVNSIIGERVVSISPFQSEGPRPVMVSRSRAGFTLNIIDTPGLIEGGYINDMALDIIKRFLLNKTIDVLLYVDRLDVYRVDNLDKLVAKAITDSFGKGIWNKAIVTLTHAQFSPPDGLPYDEFFSQRSESLLKVLRSGARIKKEAFQAASIPVVLVENSGRCNKNDSDEKVLPNGTAWIPNLVQTITEIALNKSESIHVDKNLIEGPNPNQRGKLWIPLVFALQYFLIMKPIKGLIEKDIANERKPTWERRDAAFRKRDLY

SEQ ID NO: 54657 - protein, 237 aa, Glycine max
  peptide (1)..(237): Ceres Seq. ID no. 15170884
  misc_feature (1)..(158): Pfam Name: AIG1 family Pfam Description: AIG1 family
  misc_feature (1)..(222): Homolog of NCBI NO: 33391904 NR Description: TOC33 [Brassica napus]
  misc_feature (1)..(222): Homolog of NCBI NO: 15217705 NR Description: GTP-binding protein -related [Arabidopsis
  misc_feature (1)..(227): Homolog of NCBI NO: 6689637 NR Description: Toc34-1 protein [Zea mays]
  misc_feature (1)..(227): Homolog of NCBI NO: 7259224 NR Description: Toc34-2 protein [Zea mays]
  misc_feature (1)..(234): Homolog of NCBI NO: 25091410 NR Description: Translocase of chloroplast 34 (34 kDa chloroplast
  misc_feature (1)..(234): Homolog of NCBI NO: 21594231 NR Description: GTP-binding protein [Arabidopsis thaliana]
  misc_feature (1)..(234): Homolog of NCBI NO: 15238381 NR Description: GTP-binding protein (gb|AAD09203.1) [Arabidopsis
  misc_feature (1)..(181): Homolog of NCBI NO: 18655563 NR Description: Chain A, Crystal Structure Of Pea Toc34 - A Novel
  misc_feature (1)..(233): Homolog of NCBI NO: 1076522 NR Description: chloroplast import-associated protein IAP36,
  misc_feature (1)..(233): Homolog of NCBI NO: 25091388 NR Description: Translocase of chloroplast 34 (34 kDa chloroplast envelope protein) (GTP-binding protein OEP34) (GTP-binding
MVSRSRAGFTLNIIDTPGLIEGGYINDMALDIIKRFLLNKTIDVLLYVDRLDVYRVDNLDKLVAKAITDSFGKGIWNKAIVTLTHAQFSPPDGLPYDEFFSQRSESLLKVLRSGARIKKEAFQAASIPVVLVENSGRCNKNDSDEKVLPNGTAWIPNLVQTITEIALNKSESIHVDKNLIEGPNPNQRGKLWIPLVFALQYFLIMKPIKGLIEKDIANERKPTWERRDAAFRKRDLY

SEQ ID NO: 54658 - DNA, 1218 bp, Glycine max
  misc_feature (1)..(1218): Ceres Seq. ID no. 15170857
gaaagccattttccgatttctaagaaggaaccagtttttgttcccactttcctaagtttccttctcgctcccgtctctgaaatttcgagggtttcatcgttgctgaatcaacaattcggaaccagttagcaatgttcagattctggggatcacaagagcaacaatcacaggatggttcttcgcagtcacagtcgtggtatccgccgtcggtggtgagttcaccaacttcgtcgaggcctgttacaccgactgcatcttcttcttcattatcacagaggccttcgtctcatgttccaccttctgaagctgctgcagttattgccgttttgaaggacaagagtgttgatgagttgcggaagcttttatctgacaaagatgcgtatcaacagtttttgcattcacttgatcaggtcaagattcaaactaatctgaaagatgaactttgcaaggagaatttacagcttgcagaggaaaatcttcaaaaggaacctcgtatcatggaacttaggaatcaatgtagaataattcggacaaccgagttagctgctgctaaggagaaactaaatgagcttgagaagcagaaagaagacatgttgaaattgaattccgcagcatcccttctccaaaggattcaagagtctgtgaataagaccgacgaggaatctgaaaacttgcaccacaatctccttgacagagagattgaccttggtgcttttttgcaaaagtacaagaagctacgtaccacttaccacaggaagactctcgtacatcttgctgccaaaacatcaacagtatgagcactgacatgaaatattaagaaattaaaactggttttggcaagtatgtatttgatttttggttcattattgtcaatagttatcattggtcaaagatacttgccaccaaattacatagagtcacagtcgttgggatagaaccatctactacaaattagattgttcatatatgtgcagcctgagattgttcattgtggtgacattgtcgagtggtttcatgccacttggaatgaggtatggacttgcatttacttttctagtttgccatcggctatcttcaactttatttgtatgaactctgaagtgtgctgtagcttatgagatcatcatcgccgatataggatttactgttgtgttgtaaaatgtaaaaaatgctgactttcttttctttgggagcaactacaagtttttcagaacccag

SEQ ID NO: 54659 - protein, 221 aa, Glycine max
  peptide (1)..(221): Ceres Seq. ID no. 15170858
  misc_feature (70)..(207): Homolog of NCBI NO: 38014518 NR Description: Unknown (protein for MGC:68472) [Xenopus laevis]
  misc_feature (36)..(207): Homolog of NCBI NO: 34878493 NR Description: similar to D8Ertd531e protein [Rattus norvegicus]
  misc_feature (36)..(209): Homolog of NCBI NO: 37590372 NR Description: Unknown (protein for MGC:73244) [Danio rerio]
  misc_feature (36)..(209): Homolog of NCBI NO: 39645505 NR Description: Unknown (protein for MGC:77637) [Danio rerio]
  misc_feature (66)..(207): Homolog of NCBI NO: 18490855 NR Description: Similar to RIKEN cDNA 4930592A21 gene [Homo
  misc_feature (66)..(211): Homolog of NCBI NO: 31197371 NR Description: ENSANGP00000016351 [Anopheles gambiae]
  misc_feature (1)..(137): Homolog of NCBI NO: 25408498 NR Description: hypothetical protein At2g36680 [imported] -
  misc_feature (1)..(128): Homolog of NCBI NO: 30686868 NR Description: expressed protein [Arabidopsis thaliana]
  misc_feature (1)..(137): Homolog of NCBI NO: 30686871 NR Description: expressed protein [Arabidopsis thaliana]
  misc_feature (1)..(221): Homolog of NCBI NO: 15231750 NR Description: expressed protein [Arabidopsis thaliana]
MFRFWGSQEQQSQDGSSQSQSWYPPSVVSSPTSSRPVTPTASSSSLSQRPSSHVPPSEAAAVIAVLKDKSVDELRKLLSDKDAYQQFLHSLDQVKIQTNLKDELCKENLQLAEENLQKEPRIMELRNQCRIIRTTELAAAKEKLNELEKQKEDMLKLNSAASLLQRIQESVNKTDEESENLHHNLLDREIDLGAFLQKYKKLRTTYHRKTLVHLAAKTSTV

SEQ ID NO: 54660 - DNA, 1344 bp, Glycine max
  misc_feature (1)..(1344): Ceres Seq. ID no. 14307091
attggaagaatgcatcaccgcgttgtgttgtgattgaaaatggagagcgatgttgaagaatctatgcggaagaggcccagaaaatatcctttctccgccgattcatcctctcgcaagcaatttgaacaatattctggacggacatttgcaattatgggggaagtgaattttatgcaagatgatgataatcgtttggagattacccgaactaaatttggaagtttgcttaaaagacatggagatttgacagagcggcttgctagggattctgacaagataatatttgagcgtctacagaaggagtttgaagctgcacgagcttctcaaactgaagagatatgtttagacggggaagagtggaatgatggtctactagctacaataagagagcgggtgcatatggaggcggacagaaaagcaatgcaaggggatgcggacatattagcatgtcccctggaaaaaattacatataaaattggaaacaaggtaatttgctgtttggaaggggcaagaatcggcgtacaatatgagacatcgtttgctggtgaaccttgtgagttttaccattgtgtgctggaaagcaagtcatttcttgaaaagatgactgtccttgaacacacagttccatttttcctgccaatacgagaaatagaaaatgatctccattcatccaatgcaatgaaactcatagatcatgttggagatctattgcaggcttttgtggatagacgggaacaggtcagacttataaaggagctgtatggaaatcagattagagagctgtatcatagccttccctaccatatggtcgaatttgtattagatgattctgattgcaaggtgacagtcagccttagatatgcagatctcatttcggtgcttccaactcgaatttcagtgctagcctggcctatgttcaataaaaatactatgagtaggaaggaagatggactctcgggaagtcattcttccccaattcgcctaacatatgcagaagatgccttacgaaccatgagtttacccgaagcatatgcagagattgtattaaacttaccacaggcgattcggcagacgtatcatcaaaaagccaccgcttagagctttgccctttcagtagcctagatgcatctgtaaaaattcttggtagagatgttaaatattagaaaaacaacttcagaattattacctatttacctagtcaaattgctcaggttgagttcattttgctgtaatattgtcatatagcatttagcatttgtacttcggcctctctggcctcgttattccttcaatacctactccggtgtcttgtatcattaatacaacagggctaggtttacatct

SEQ ID NO: 54661 - protein, 352 aa, Glycine max
  peptide (1)..(352): Ceres Seq. ID no. 14307092
  misc_feature (121)..(346): Homolog of NCBI NO: 10129649 NR Description: putative protein [Arabidopsis thaliana]
  misc_feature (39)..(346): Homolog of NCBI NO: 13430738 NR Description: unknown protein [Arabidopsis thaliana]
  misc_feature (42)..(344): Homolog of NCBI NO: 38346430 NR Description: OSJNBa0019J05.15 [Oryza sativa (japonica
  misc_feature (39)..(346): Homolog of NCBI NO: 18416357 NR Description: expressed protein [Arabidopsis thaliana]
MESDVEESMRKRPRKYPFSADSSSRKQFEQYSGRTFAIMGEVNFMQDDDNRLEITRTKFGSLLKRHGDLTERLARDSDKIIFERLQKEFEAARASQTEEICLDGEEWNDGLLATIRERVHMEADRKAMQGDADILACPLEKITYKIGNKVICCLEGARIGVQYETSFAGEPCEFYHCVLESKSFLEKMTVLEHTVPFFLPIREIENDLHSSNAMKLIDHVGDLLQAFVDRREQVRLIKELYGNQIRELYHSLPYHMVEFVLDDSDCKVTVSLRYADLISVLPTRISVLAWPMFNKNTMSRKEDGLSGSHSSPIRLTYAEDALRTMSLPEAYAEIVLNLPQAIRQTYHQKATA

SEQ ID NO: 54662 - protein, 344 aa, Glycine max
  peptide (1)..(344): Ceres Seq. ID no. 14307093
  misc_feature (113)..(338): Homolog of NCBI NO: 10129649 NR Description: putative protein [Arabidopsis thaliana]
  misc_feature (31)..(338): Homolog of NCBI NO: 13430738 NR Description: unknown protein [Arabidopsis thaliana]
  misc_feature (34)..(336): Homolog of NCBI NO: 38346430 NR Description: OSJNBa0019J05.15 [Oryza sativa (japonica
  misc_feature (31)..(338): Homolog of NCBI NO: 18416357 NR Description: expressed protein [Arabidopsis thaliana]
MRKRPRKYPFSADSSSRKQFEQYSGRTFAIMGEVNFMQDDDNRLEITRTKFGSLLKRHGDLTERLARDSDKIIFERLQKEFEAARASQTEEICLDGEEWNDGLLATIRERVHMEADRKAMQGDADILACPLEKITYKIGNKVICCLEGARIGVQYETSFAGEPCEFYHCVLESKSFLEKMTVLEHTVPFFLPIREIENDLHSSNAMKLIDHVGDLLQAFVDRREQVRLIKELYGNQIRELYHSLPYHMVEFVLDDSDCKVTVSLRYADLISVLPTRISVLAWPMFNKNTMSRKEDGLSGSHSSPIRLTYAEDALRTMSLPEAYAEIVLNLPQAIRQTYHQKATA

SEQ ID NO: 54663 - protein, 314 aa, Glycine max
  peptide (1)..(314): Ceres Seq. ID no. 14307094
  misc_feature (83)..(308): Homolog of NCBI NO: 10129649 NR Description: putative protein [Arabidopsis thaliana]
  misc_feature (1)..(308): Homolog of NCBI NO: 13430738 NR Description: unknown protein [Arabidopsis thaliana]
  misc_feature (4)..(306): Homolog of NCBI NO: 38346430 NR Description: OSJNBa0019J05.15 [Oryza sativa (japonica
  misc_feature (1)..(308): Homolog of NCBI NO: 18416357 NR Description: expressed protein [Arabidopsis thaliana]
MGEVNFMQDDDNRLEITRTKFGSLLKRHGDLTERLARDSDKIIFERLQKEFEAARASQTEEICLDGEEWNDGLLATIRERVHMEADRKAMQGDADILACPLEKITYKIGNKVICCLEGARIGVQYETSFAGEPCEFYHCVLESKSFLEKMTVLEHTVPFFLPIREIENDLHSSNAMKLIDHVGDLLQAFVDRREQVRLIKELYGNQIRELYHSLPYHMVEFVLDDSDCKVTVSLRYADLISVLPTRISVLAWPMFNKNTMSRKEDGLSGSHSSPIRLTYAEDALRTMSLPEAYAEIVLNLPQAIRQTYHQKATA

SEQ ID NO: 54664 - DNA, 2061 bp, Glycine max
  misc_feature (1)..(2061): Ceres Seq. ID no. 14313151
tttatgttcaaagcatttcttttgggcttctgacccaaataattcctcctaacgattcaacccatttcaaacaatctgtaatagtgttataggatagatgaatcagaagacaacgttgcatggaaagcaattggatactgcggacctgatccagaattcaaagctcggttgaagagccactttttagatggaacatctaaaggaggacaagaggataaggaagatgaagatgctgaagaggtgataggaccactttacaaaggtctagtccatctcaattacccacgagacatcactgcagatgctctaaaacgactcggattccctgtatcggtcatccgtcagaagcataaagctgctgcaaacttatcatctccttctttggtgatacaatgtgatgcagtggtggttggttctggctcaggaggtggagtgatagctggtgttcttgcaaaagctggttacaaagtgttggtgttggagaaaggaggttattctgctaggaacaatctttctcttcttgaaggaccaaccatggatcaaatgtacctcaatggtggtctggttgcaagtgatgatatgggtgtgttcattctatcaggatccactgttggtggagggtcagcaatcaactggtctgcgtgcattaaaacccctcagcatgtgtgcaaggagtggagtgataaacatggtctagagctgtttgagagtgaactgtatagagaagccttgaatgctgtttgtgagaagatggaagttcaatctgagattgaagatgaaggattcaacaatgcaatactaagaaaagggtgtcaagaaatggggtatcctgttagtaacattcctaggaattctgcggcagatcactactgtggctggtgttgcatgggttgtaaggatgggaggaagaagggtacctcagaaacatggttagtggacttggtgaaatctggcaatggagcaattcttccaggttgtgaggcaataaaagtcttgcacaagaaaaaggaagggagggatagaaagattgcgcgtggagtggcttttgaatttgaatataaagggactaaagacatttgtgtggtggagtccaaggtcacaattgtagcatgtggagcactgagtactccagcattgcttaaaaaaagtggcttgaggaatcagaacatagggaggaacttgcatcttcatccagtggcgatggcttggggatacttcccagatgcacctgaatctgaggtgtggccagaggcatataagaagagctatgaaggagggataatgacagcaatgtcaactgttgttgcagagtttgaacaatctggatatggtgcagtgatccaaacaccttcattgcatcctggtatgttctcaattgtcacaccatggacttctggaatcgatataagagaccgaatgcgaaagttttcaagaacagctcatatatttgcactggcaagggatcaaggatcagggactgtaaaagccccagatcgtatcagttataagccggcaggtgtagatgaagagaatttaaagaaaggaattgagaaggtgctgagaattctggcagcagctggtgctgaagaaattgggacacatcataataagggaaggaccttaaatgtaaagcaggtaagatatcatgagtttgagaaatttgttaaagaggaaagttcaaggtcattgacagaccttacaacaccattgtgctcggcacatcaaatggggagttgccggatgggttctaatccaaagcaatcagcggtgaatcagacaggggagacatgggaagtggagggcctttatgtggcagatacaagtgtcttcccaacagcattgggtgtgaatccaatggttactgttcaagctattgcttattgcacagcacaatctgttgttgaagtacttagaaggaaaagaactaaatgagaaaaataaaataaaatcttttgctgcttctgttgctccaatggtactgaatattcatggcattgggcagaaaactttgttcaaataataattgtttggtgagaaaagcaatggttgaaattttaacat

SEQ ID NO: 54665 - protein, 465 aa, Glycine max
  peptide (1)..(465): Ceres Seq. ID no. 14313152
  misc_feature (1)..(228): Pfam Name: GMC oxidoreductase Pfam Description: GMC oxidoreductase
  misc_feature (1)..(465): Homolog of NCBI NO: 14532706 NR Description: unknown protein [Arabidopsis thaliana]
  misc_feature (1)..(463): Homolog of NCBI NO: 15219612 NR Description: alcohol oxidase-related [Arabidopsis thaliana]
  misc_feature (1)..(463): Homolog of NCBI NO: 25367436 NR Description: hypothetical protein [imported] - Arabidopsis
  misc_feature (1)..(465): Homolog of NCBI NO: 37535318 NR Description: putative alcohol oxidase [Oryza sativa (japonica
  misc_feature (1)..(457): Homolog of NCBI NO: 37535334 NR Description: putative oxidase [Oryza sativa (japonica
  misc_feature (1)..(457): Homolog of NCBI NO: 16905151 NR Description: putative alcohol oxidase [Oryza sativa]
  misc_feature (1)..(457): Homolog of NCBI NO: 22798796 NR Description: alcohol oxidase [Arabidopsis thaliana]
  misc_feature (1)..(457): Homolog of NCBI NO: 18403753 NR Description: alcohol oxidase-related [Arabidopsis thaliana]
  misc_feature (1)..(459): Homolog of NCBI NO: 37535330 NR Description: putative alcohol oxidase [Oryza sativa (japonica
  misc_feature (1)..(463): Homolog of NCBI NO: 15234998 NR Description: alcohol oxidase-related [Arabidopsis thaliana]
MDQMYLNGGLVASDDMGVFILSGSTVGGGSAINWSACIKTPQHVCKEWSDKHGLELFESELYREALNAVCEKMEVQSEIEDEGFNNAILRKGCQEMGYPVSNIPRNSAADHYCGWCCMGCKDGRKKGTSETWLVDLVKSGNGAILPGCEAIKVLHKKKEGRDRKIARGVAFEFEYKGTKDICVVESKVTIVACGALSTPALLKKSGLRNQNIGRNLHLHPVAMAWGYFPDAPESEVWPEAYKKSYEGGIMTAMSTVVAEFEQSGYGAVIQTPSLHPGMFSIVTPWTSGIDIRDRMRKFSRTAHIFALARDQGSGTVKAPDRISYKPAGVDEENLKKGIEKVLRILAAAGAEEIGTHHNKGRTLNVKQVRYHEFEKFVKEESSRSLTDLTTPLCSAHQMGSCRMGSNPKQSAVNQTGETWEVEGLYVADTSVFPTALGVNPMVTVQAIAYCTAQSVVEVLRRKRTK

SEQ ID NO: 54666 - protein, 462 aa, Glycine max
  peptide (1)..(462): Ceres Seq. ID no. 14313153
  misc_feature (1)..(225): Pfam Name: GMC oxidoreductase Pfam Description: GMC oxidoreductase
  misc_feature (1)..(462): Homolog of NCBI NO: 14532706 NR Description: unknown protein [Arabidopsis thaliana]
  misc_feature (1)..(460): Homolog of NCBI NO: 15219612 NR Description: alcohol oxidase-related [Arabidopsis thaliana]
  misc_feature (1)..(460): Homolog of NCBI NO: 25367436 NR Description: hypothetical protein [imported] - Arabidopsis
  misc_feature (1)..(462): Homolog of NCBI NO: 37535318 NR Description: putative alcohol oxidase [Oryza sativa (japonica
  misc_feature (1)..(454): Homolog of NCBI NO: 37535334 NR Description: putative oxidase [Oryza sativa (japonica
  misc_feature (1)..(454): Homolog of NCBI NO: 16905151 NR Description: putative alcohol oxidase [Oryza sativa]
  misc_feature (1)..(454): Homolog of NCBI NO: 22798796 NR Description: alcohol oxidase [Arabidopsis thaliana]
  misc_feature (1)..(454): Homolog of NCBI NO: 18403753 NR Description: alcohol oxidase-related [Arabidopsis thaliana]
  misc_feature (1)..(456): Homolog of NCBI NO: 37535330 NR Description: putative alcohol oxidase [Oryza sativa (japonica
  misc_feature (1)..(460): Homolog of NCBI NO: 15234998 NR Description: alcohol oxidase-related [Arabidopsis thaliana]
MYLNGGLVASDDMGVFILSGSTVGGGSAINWSACIKTPQHVCKEWSDKHGLELFESELYREALNAVCEKMEVQSEIEDEGFNNAILRKGCQEMGYPVSNIPRNSAADHYCGWCCMGCKDGRKKGTSETWLVDLVKSGNGAILPGCEAIKVLHKKKEGRDRKIARGVAFEFEYKGTKDICVVESKVTIVACGALSTPALLKKSGLRNQNIGRNLHLHPVAMAWGYFPDAPESEVWPEAYKKSYEGGIMTAMSTVVAEFEQSGYGAVIQTPSLHPGMFSIVTPWTSGIDIRDRMRKFSRTAHIFALARDQGSGTVKAPDRISYKPAGVDEENLKKGIEKVLRILAAAGAEEIGTHHNKGRTLNVKQVRYHEFEKFVKEESSRSLTDLTTPLCSAHQMGSCRMGSNPKQSAVNQTGETWEVEGLYVADTSVFPTALGVNPMVTVQAIAYCTAQSVVEVLRRKRTK

SEQ ID NO: 54667 - protein, 450 aa, Glycine max
  peptide (1)..(450): Ceres Seq. ID no. 14313154
  misc_feature (1)..(213): Pfam Name: GMC oxidoreductase Pfam Description: GMC oxidoreductase
  misc_feature (1)..(450): Homolog of NCBI NO: 14532706 NR Description: unknown protein [Arabidopsis thaliana]
  misc_feature (1)..(448): Homolog of NCBI NO: 15219612 NR Description: alcohol oxidase-related [Arabidopsis thaliana]
  misc_feature (1)..(448): Homolog of NCBI NO: 25367436 NR Description: hypothetical protein [imported] - Arabidopsis
  misc_feature (1)..(450): Homolog of NCBI NO: 37535318 NR Description: putative alcohol oxidase [Oryza sativa (japonica
  misc_feature (1)..(442): Homolog of NCBI NO: 37535334 NR Description: putative oxidase [Oryza sativa (japonica
  misc_feature (1)..(442): Homolog of NCBI NO: 16905151 NR Description: putative alcohol oxidase [Oryza sativa]
  misc_feature (1)..(442): Homolog of NCBI NO: 22798796 NR Description: alcohol oxidase [Arabidopsis thaliana]
  misc_feature (1)..(442): Homolog of NCBI NO: 18403753 NR Description: alcohol oxidase-related [Arabidopsis thaliana]
  misc_feature (1)..(444): Homolog of NCBI NO: 37535330 NR Description: putative alcohol oxidase [Oryza sativa (japonica
  misc_feature (1)..(448): Homolog of NCBI NO: 15234998 NR Description: alcohol oxidase-related [Arabidopsis thaliana]
MGVFILSGSTVGGGSAINWSACIKTPQHVCKEWSDKHGLELFESELYREALNAVCEKMEVQSEIEDEGFNNAILRKGCQEMGYPVSNIPRNSAADHYCGWCCMGCKDGRKKGTSETWLVDLVKSGNGAILPGCEAIKVLHKKKEGRDRKIARGVAFEFEYKGTKDICVVESKVTIVACGALSTPALLKKSGLRNQNIGRNLHLHPVAMAWGYFPDAPESEVWPEAYKKSYEGGIMTAMSTVVAEFEQSGYGAVIQTPSLHPGMFSIVTPWTSGIDIRDRMRKFSRTAHIFALARDQGSGTVKAPDRISYKPAGVDEENLKKGIEKVLRILAAAGAEEIGTHHNKGRTLNVKQVRYHEFEKFVKEESSRSLTDLTTPLCSAHQMGSCRMGSNPKQSAVNQTGETWEVEGLYVADTSVFPTALGVNPMVTVQAIAYCTAQSVVEVLRRKRTK

SEQ ID NO: 54668 - DNA, 1474 bp, Glycine max
  misc_feature (1)..(1474): Ceres Seq. ID no. 15172325
ggatgggcgtccctcactttcttctaattccatatccaacactaggacatgtgaacccccttatgcagttgtctcaggttcttgccagacatggctgcaagatcacttttctgaacacagaattcaaccacaaaggagcaaatacagcagcaggtgttgggatagacaacgcccatataaagtttgtgacactcccagatggtttggtccctgaagatgacagaagtgaccacaaaaaagttattttctcaatcaaaagccacatgcctcctatgcttcccaaactcattcaagatatcgatgctttggatgctaacaataacatcacttgcattgttgtcacagtgaatatgggttgggccttggaagttggccacaaattgggaattaaaggagctcttctgtggcctgcatctgcaacttcgttggccacgtgtgattgtatcccatggttgattcatgatggaattatagattcagatggaaaccccatcaaaaaacaagaaattcaactctccacaaatctgccaatgatggacacagaaaacttgccatggtgtagcctaggtaagatgctctttcatcatattgcacaagagatgcaaactattaagttaggagactggtggctttgcaacacaacatatgatcttgagtctgccgcattttccatatcacgacggttcctaccaattggtccattgattgcaagtgacagcaacaaaagttcactctggcaaggagacacaactttcttagactggttagatcagcagccacctcaatcagttatatatgttgcctttggtagtttggcagtaattgatcacaaccaacttaaggaattagctctaggactcaatttccttgacaagccttttctttgggttgtacggccgagtaatgataatgaggcaaacaatgcatgctctgatgaattccatggaagtaaaggcagaattgtaagttgggcaccacagaagaagatattgaaccaccctgccatagcttgtttcattagtcactgtggttggaattctaccatagaaggtgtatgtggtggcgtacctttcttgtgttggccattagccaaggatcagtttgttaacaagtcatatatttgtgatgtgtggaaggttggactgggattagacaaggctgagaatggattaatatcaaagggagagataaggaagaaggtagagcaattacttggcgatgaaggcataaaagcaaggtcgttgaaactgaaggaattgaccttgaataacatagtagaaggtggtcactcttcaaagaatctcaaaaactttatcagctgggcagagtaataatgctttggtatagtttggaaatcgttgtaaacttgcaatgtagttagtaaaattgttcattccgttatgtagtattttgaggacattgaatattataaatatcatcatttccattccatgataaaggattagagaccttt

SEQ ID NO: 54669 - protein, 442 aa, Glycine max
  peptide (1)..(442): Ceres Seq. ID no. 15172326
  misc_feature (59)..(438): Pfam Name: UDP-glucoronosyl and UDP-glucosyl transferase Pfam Description: UDP-glucoronosyl and UDP-glucosyl transferase
  misc_feature (4)..(439): Homolog of NCBI NO: 13236653 NR Description: putative glucosyltransferase [Oryza sativa]
  misc_feature (1)..(438): Homolog of NCBI NO: 13236656 NR Description: putative glucosyltransferase [Oryza sativa]
  misc_feature (2)..(438): Homolog of NCBI NO: 13236658 NR Description: putative glucosyltransferase [Oryza sativa]
  misc_feature (1)..(438): Homolog of NCBI NO: 21326125 NR Description: putative glucosyl transferase [Sorghum bicolor]
  misc_feature (1)..(439): Homolog of NCBI NO: 21326123 NR Description: putative glucosyl transferase [Sorghum bicolor]
  misc_feature (4)..(439): Homolog of NCBI NO: 13236650 NR Description: putative glucosyltransferase [Oryza sativa]
  misc_feature (1)..(440): Homolog of NCBI NO: 15232846 NR Description: glycosyltransferase family [Arabidopsis thaliana]
  misc_feature (4)..(439): Homolog of NCBI NO: 21326127 NR Description: putative glucosyl transferase [Sorghum bicolor]
  misc_feature (1)..(438): Homolog of NCBI NO: 21326124 NR Description: putative glucosyl transferase [Sorghum bicolor]
  misc_feature (59)..(438): Homolog of NCBI NO: 10953887 NR Description: UDP-glucosyltransferase HRA25 [Phaseolus vulgaris]
MGVPHFLLIPYPTLGHVNPLMQLSQVLARHGCKITFLNTEFNHKGANTAAGVGIDNAHIKFVTLPDGLVPEDDRSDHKKVIFSIKSHMPPMLPKLIQDIDALDANNNITCIVVTVNMGWALEVGHKLGIKGALLWPASATSLATCDCIPWLIHDGIIDSDGNPIKKQEIQLSTNLPMMDTENLPWCSLGKMLFHHIAQEMQTIKLGDWWLCNTTYDLESAAFSISRRFLPIGPLIASDSNKSSLWQGDTTFLDWLDQQPPQSVIYVAFGSLAVIDHNQLKELALGLNFLDKPFLWVVRPSNDNEANNACSDEFHGSKGRIVSWAPQKKILNHPAIACFISHCGWNSTIEGVCGGVPFLCWPLAKDQFVNKSYICDVWKVGLGLDKAENGLISKGEIRKKVEQLLGDEGIKARSLKLKELTLNNIVEGGHSSKNLKNFISWAE

SEQ ID NO: 54670 - protein, 422 aa, Glycine max
  peptide (1)..(422): Ceres Seq. ID no. 15172327
  misc_feature (39)..(418): Pfam Name: UDP-glucoronosyl and UDP-glucosyl transferase Pfam Description: UDP-glucoronosyl and UDP-glucosyl transferase
  misc_feature (1)..(419): Homolog of NCBI NO: 13236653 NR Description: putative glucosyltransferase [Oryza sativa]
  misc_feature (1)..(418): Homolog of NCBI NO: 13236656 NR Description: putative glucosyltransferase [Oryza sativa]
  misc_feature (1)..(418): Homolog of NCBI NO: 13236658 NR Description: putative glucosyltransferase [Oryza sativa]
  misc_feature (1)..(418): Homolog of NCBI NO: 21326125 NR Description: putative glucosyl transferase [Sorghum bicolor]
  misc_feature (1)..(419): Homolog of NCBI NO: 21326123 NR Description: putative glucosyl transferase [Sorghum bicolor]
  misc_feature (1)..(419): Homolog of NCBI NO: 13236650 NR Description: putative glucosyltransferase [Oryza sativa]
  misc_feature (1)..(420): Homolog of NCBI NO: 15232846 NR Description: glycosyltransferase family [Arabidopsis thaliana]
  misc_feature (1)..(419): Homolog of NCBI NO: 21326127 NR Description: putative glucosyl transferase [Sorghum bicolor]
  misc_feature (1)..(418): Homolog of NCBI NO: 21326124 NR Description: putative glucosyl transferase [Sorghum bicolor]
  misc_feature (39)..(418): Homolog of NCBI NO: 10953887 NR Description: UDP-glucosyltransferase HRA25 [Phaseolus vulgaris]
MQLSQVLARHGCKITFLNTEFNHKGANTAAGVGIDNAHIKFVTLPDGLVPEDDRSDHKKVIFSIKSHMPPMLPKLIQDIDALDANNNITCIVVTVNMGWALEVGHKLGIKGALLWPASATSLATCDCIPWLIHDGIIDSDGNPIKKQEIQLSTNLPMMDTENLPWCSLGKMLFHHIAQEMQTIKLGDWWLCNTTYDLESAAFSISRRFLPIGPLIASDSNKSSLWQGDTTFLDWLDQQPPQSVIYVAFGSLAVIDHNQLKELALGLNFLDKPFLWVVRPSNDNEANNACSDEFHGSKGRIVSWAPQKKILNHPAIACFISHCGWNSTIEGVCGGVPFLCWPLAKDQFVNKSYICDVWKVGLGLDKAENGLISKGEIRKKVEQLLGDEGIKARSLKLKELTLNNIVEGGHSSKNLKNFISWAE

SEQ ID NO: 54671 - protein, 355 aa, Glycine max
  peptide (1)..(355): Ceres Seq. ID no. 15172328
  misc_feature (1)..(351): Pfam Name: UDP-glucoronosyl and UDP-glucosyl transferase Pfam Description: UDP-glucoronosyl and UDP-glucosyl transferase
  misc_feature (1)..(352): Homolog of NCBI NO: 13236653 NR Description: putative glucosyltransferase [Oryza sativa]
  misc_feature (1)..(351): Homolog of NCBI NO: 13236656 NR Description: putative glucosyltransferase [Oryza sativa]
  misc_feature (1)..(351): Homolog of NCBI NO: 13236658 NR Description: putative glucosyltransferase [Oryza sativa]
  misc_feature (1)..(351): Homolog of NCBI NO: 21326125 NR Description: putative glucosyl transferase [Sorghum bicolor]
  misc_feature (1)..(352): Homolog of NCBI NO: 21326123 NR Description: putative glucosyl transferase [Sorghum bicolor]
  misc_feature (1)..(352): Homolog of NCBI NO: 13236650 NR Description: putative glucosyltransferase [Oryza sativa]
  misc_feature (1)..(353): Homolog of NCBI NO: 15232846 NR Description: glycosyltransferase family [Arabidopsis thaliana]
  misc_feature (1)..(352): Homolog of NCBI NO: 21326127 NR Description: putative glucosyl transferase [Sorghum bicolor]
  misc_feature (1)..(351): Homolog of NCBI NO: 21326124 NR Description: putative glucosyl transferase [Sorghum bicolor]
  misc_feature (1)..(351): Homolog of NCBI NO: 10953887 NR Description: UDP-glucosyltransferase HRA25 [Phaseolus vulgaris]
MPPMLPKLIQDIDALDANNNITCIVVTVNMGWALEVGHKLGIKGALLWPASATSLATCDCIPWLIHDGIIDSDGNPIKKQEIQLSTNLPMMDTENLPWCSLGKMLFHHIAQEMQTIKLGDWWLCNTTYDLESAAFSISRRFLPIGPLIASDSNKSSLWQGDTTFLDWLDQQPPQSVIYVAFGSLAVIDHNQLKELALGLNFLDKPFLWVVRPSNDNEANNACSDEFHGSKGRIVSWAPQKKILNHPAIACFISHCGWNSTIEGVCGGVPFLCWPLAKDQFVNKSYICDVWKVGLGLDKAENGLISKGEIRKKVEQLLGDEGIKARSLKLKELTLNNIVEGGHSSKNLKNFISWAE

SEQ ID NO: 54672 - DNA, 1220 bp, Glycine max
  misc_feature (1)..(1220): Ceres Seq. ID no. 14307041
aaaaacataagaatgcattcaacgcgttgagttgttgtctggaagagcttatgctgtttgttcgcaattcgcatggaaccatcagtttcagctccaccaaaaccttgggagaaagcagcatcatcatctgggccagcaccttttaaacccccatcagcaggtagcacaagtgatgtagttgaggcttcagggactgcaaaacctggcgaaatagttccagcttccgataagactgcaactgtcaataggaatgctcttgggagaccccttcccacaaggccatgggagcagaataatggaagtaccagctatggaggttatggttccacaatgaattataattctggatatggatcttatggtggagtgggagggttgtatggcggaggaatgtatggcagcagtatgtacaggggaggatatgggggcctctatggttcctctgggatgtatggagggggaatgtataatggtggctttggtggtccaatgggtggttatggtatgggtggtggtggtccttatggagctgaagatcccaataatccgtacggagttccttcatcgcccccaggattttggatttcttttatgcgtgtgatgcaaggtgtggttaacttttttggccggatttcaatgctcatagaccagaacacgcaggctttccatatgttcatgactgcacttcttcagctttttgatcgttctggtgtactgtatggagagctagctagatttgtgttgcggttgcttggaatcagaactaaaccaaagaagattaaccctccaggtccagatggacttccactacctgggcaacacaattcctctgtaaatcagaacttcattgagggaacaaagcctgctccaagtggttcttgggacaatgtatgggaaaatgacgccaaaaaatgatgatgcaaatttgttttgctgatagagcaagtccaaatacaaaccaaggaattgaggaacagatgaagcaatacaagtgaatatactgaagctgtgaaatcgatgcttaatctggaagtttaagttcattattgctttgcttagattgctctgataagagagaacaaactagcaatacagttgccttctaagcatttgttctgaatcttgtaggatgctatttgtatagatagttgtattactttgtatttcaaatgtttcttaatcttttgggggcgacaaattgaaagaagtaaattgagtgg

SEQ ID NO: 54673 - protein, 280 aa, Glycine max
  peptide (1)..(280): Ceres Seq. ID no. 14307042
  misc_feature (74)..(153): Pfam Name: Keratin Pfam Description: Keratin
  misc_feature (76)..(168): Homolog of NCBI NO: 17555156 NR Description: predicted CDS, putative protein (3D984)
  misc_feature (62)..(161): Homolog of NCBI NO: 33864553 NR Description: RNA-binding region RNP-1 (RNA recognition motif)
  misc_feature (32)..(161): Homolog of NCBI NO: 17555156 NR Description: predicted CDS, putative protein (3D984)
  misc_feature (46)..(152): Homolog of NCBI NO: 33239465 NR Description: RNA-binding protein, RRM domain
  misc_feature (66)..(231): Homolog of NCBI NO: 2498763 NR Description: Peroxisomal membrane protein PEX13 (Peroxin-13)
  misc_feature (4)..(269): Homolog of NCBI NO: 40744668 NR Description: hypothetical protein AN1511.2 [Aspergillus
  misc_feature (5)..(255): Homolog of NCBI NO: 32422747 NR Description: hypothetical protein [Neurospora crassa]
  misc_feature (2)..(166): Homolog of NCBI NO: 15231481 NR Description: glycine-rich protein [Arabidopsis thaliana]
  misc_feature (9)..(276): Homolog of NCBI NO: 15231481 NR Description: glycine-rich protein [Arabidopsis thaliana]
  misc_feature (7)..(276): Homolog of NCBI NO: 34395055 NR Description: putative glycine-rich protein
MEPSVSAPPKPWEKAASSSGPAPFKPPSAGSTSDVVEASGTAKPGEIVPASDKTATVNRNALGRPLPTRPWEQNNGSTSYGGYGSTMNYNSGYGSYGGVGGLYGGGMYGSSMYRGGYGGLYGSSGMYGGGMYNGGFGGPMGGYGMGGGGPYGAEDPNNPYGVPSSPPGFWISFMRVMQGVVNFFGRISMLIDQNTQAFHMFMTALLQLFDRSGVLYGELARFVLRLLGIRTKPKKINPPGPDGLPLPGQHNSSVNQNFIEGTKPAPSGSWDNVWENDAKK

SEQ ID NO: 54674 - protein, 194 aa, Glycine max
  peptide (1)..(194): Ceres Seq. ID no. 14307043
  misc_feature (1)..(67): Pfam Name: Keratin Pfam Description: Keratin
  misc_feature (1)..(82): Homolog of NCBI NO: 17555156 NR Description: predicted CDS, putative protein (3D984)
  misc_feature (1)..(75): Homolog of NCBI NO: 33864553 NR Description: RNA-binding region RNP-1 (RNA recognition motif)
  misc_feature (1)..(75): Homolog of NCBI NO: 17555156 NR Description: predicted CDS, putative protein (3D984)
  misc_feature (1)..(66): Homolog of NCBI NO: 33239465 NR Description: RNA-binding protein, RRM domain
  misc_feature (1)..(145): Homolog of NCBI NO: 2498763 NR Description: Peroxisomal membrane protein PEX13 (Peroxin-13)
  misc_feature (1)..(183): Homolog of NCBI NO: 40744668 NR Description: hypothetical protein AN1511.2 [Aspergillus
  misc_feature (1)..(169): Homolog of NCBI NO: 32422747 NR Description: hypothetical protein [Neurospora crassa]
  misc_feature (1)..(80): Homolog of NCBI NO: 15231481 NR Description: glycine-rich protein [Arabidopsis thaliana]
  misc_feature (1)..(190): Homolog of NCBI NO: 15231481 NR Description: glycine-rich protein [Arabidopsis thaliana]
  misc_feature (1)..(190): Homolog of NCBI NO: 34395055 NR Description: putative glycine-rich protein
MNYNSGYGSYGGVGGLYGGGMYGSSMYRGGYGGLYGSSGMYGGGMYNGGFGGPMGGYGMGGGGPYGAEDPNNPYGVPSSPPGFWISFMRVMQGVVNFFGRISMLIDQNTQAFHMFMTALLQLFDRSGVLYGELARFVLRLLGIRTKPKKINPPGPDGLPLPGQHNSSVNQNFIEGTKPAPSGSWDNVWENDAKK

SEQ ID NO: 54675 - protein, 174 aa, Glycine max
  peptide (1)..(174): Ceres Seq. ID no. 14307044
  misc_feature (1)..(62): Pfam Name: Herpesvirus latent membrane protein 1 (LMP1) Pfam Description: Herpesvirus latent membrane protein 1 (LMP1)
  misc_feature (1)..(62): Homolog of NCBI NO: 17555156 NR Description: predicted CDS, putative protein (3D984)
  misc_feature (1)..(55): Homolog of NCBI NO: 33864553 NR Description: RNA-binding region RNP-1 (RNA recognition motif)
  misc_feature (1)..(55): Homolog of NCBI NO: 17555156 NR Description: predicted CDS, putative protein (3D984)
  misc_feature (1)..(46): Homolog of NCBI NO: 33239465 NR Description: RNA-binding protein, RRM domain
  misc_feature (1)..(125): Homolog of NCBI NO: 2498763 NR Description: Peroxisomal membrane protein PEX13 (Peroxin-13)
  misc_feature (1)..(163): Homolog of NCBI NO: 40744668 NR Description: hypothetical protein AN1511.2 [Aspergillus
  misc_feature (1)..(149): Homolog of NCBI NO: 32422747 NR Description: hypothetical protein [Neurospora crassa]
  misc_feature (1)..(60): Homolog of NCBI NO: 15231481 NR Description: glycine-rich protein [Arabidopsis thaliana]
  misc_feature (1)..(170): Homolog of NCBI NO: 15231481 NR Description: glycine-rich protein [Arabidopsis thaliana]
  misc_feature (1)..(170): Homolog of NCBI NO: 34395055 NR Description: putative glycine-rich protein
MYGSSMYRGGYGGLYGSSGMYGGGMYNGGFGGPMGGYGMGGGGPYGAEDPNNPYGVPSSPPGFWISFMRVMQGVVNFFGRISMLIDQNTQAFHMFMTALLQLFDRSGVLYGELARFVLRLLGIRTKPKKINPPGPDGLPLPGQHNSSVNQNFIEGTKPAPSGSWDNVWENDAKK

SEQ ID NO: 54676 - DNA, 1264 bp, Glycine max
  misc_feature (1)..(1264): Ceres Seq. ID no. 14313159
agtagttttaggcacatagggtttggactttggaaaggcttattctccgctctcgtctgaaacctgaaaccctttgttcttcgtcggcggaagcatgtcatcgtcatcatcaagcaacgcctacgacgtgccatgggtagaaaagtaccgtcccagcaaggtcgccgacatcgtcggcaacgaggacgccgtctccaggctccaagtcatcgctcgcgacggcaacatgcccaatctcattttatccggtcctcccggaaccggcaaaaccactagcattctcgccctcgcgcacgagcttctcggaggaccaaattgcaaggaagctgttctcgaactaaacgcttcggatgatagaggaattgatgttgtgaggaacaagatcaagatgtttgctcagaagaaagtcacactgaccccggggaggcacaagatagtgatactggatgaagctgatagcatgaccacaggggcacaacaagcattgagaaggacgatggagatatattcaaacaccactcggtttgcccttgcttgcaatacctcagctaagattattgagcccattcagagtagatgtgccattgtgcgattttcacggttgtctgatcaagagatacttggtcgtctcatggttgtggttcaagctgagaaggttccctatgttcctgaaggacttgaagccatcattttcacagctgacggtgatatgagacaggcattgaataacttgcaagcaacatacagtgggttccaatttgttaaccaagcaaatgttttcaaggtttgtgaccagccacatccactgcatgtgaagaatatggtgcgtaatgtgattgaagggaattttgatgaagcttgttcaggcctcaagcaactgtacgacttgggatattcccccacagatatcatcacgacactctttcgtataataaaaaattatgatatggccgagtacctgaaattggaattcatgaaggaaactggttttgctcatatgagaatttgtgatggagttggttcttatcttcagttgtgtggtctattggctaagctttctctagttcgtgagacagctaaagctgtatgagctggtcctaagtgcaactgagatgtcattatttttaagttttccgatagtgaaatgttctgctgatgtagccttatattttttatgtccagatgctaactgatacatcaatatttcggcttctataaatatgttgtgttttagcttggatcaataactcccacttttgaaaat

SEQ ID NO: 54677 - protein, 331 aa, Glycine max
  peptide (1)..(331): Ceres Seq. ID no. 14313160
  misc_feature (47)..(220): Pfam Name: ATPase family associated with various cellular Pfam Description: ATPase family associated with various cellular
  misc_feature (3)..(331): Homolog of NCBI NO: 28950096 NR Description: probable REPLICATION FACTOR C (40 KDA SUBUNIT)
  misc_feature (6)..(321): Homolog of NCBI NO: 539678 NR Description: replication factor C - human
  misc_feature (4)..(321): Homolog of NCBI NO: 12847419 NR Description: unnamed protein product [Mus musculus]
  misc_feature (6)..(321): Homolog of NCBI NO: 31563534 NR Description: replication factor C 2 (40kD) isoform 1
  misc_feature (4)..(321): Homolog of NCBI NO: 11177922 NR Description: replication factor C (activator 1) 2
  misc_feature (4)..(321): Homolog of NCBI NO: 34871892 NR Description: replication factor C 2 (40kD) [Rattus norvegicus]
  misc_feature (1)..(321): Homolog of NCBI NO: 1703053 NR Description: Activator 1 40 kDa subunit (Replication factor C
  misc_feature (1)..(330): Homolog of NCBI NO: 38344372 NR Description: OSJNBb0032E06.6 [Oryza sativa (japonica
  misc_feature (1)..(330): Homolog of NCBI NO: 15991286 NR Description: replication factor C 40kDa subunit
  misc_feature (1)..(330): Homolog of NCBI NO: 15221697 NR Description: replication factor -related [Arabidopsis
MSSSSSSNAYDVPWVEKYRPSKVADIVGNEDAVSRLQVIARDGNMPNLILSGPPGTGKTTSILALAHELLGGPNCKEAVLELNASDDRGIDVVRNKIKMFAQKKVTLTPGRHKIVILDEADSMTTGAQQALRRTMEIYSNTTRFALACNTSAKIIEPIQSRCAIVRFSRLSDQEILGRLMVVVQAEKVPYVPEGLEAIIFTADGDMRQALNNLQATYSGFQFVNQANVFKVCDQPHPLHVKNMVRNVIEGNFDEACSGLKQLYDLGYSPTDIITTLFRIIKNYDMAEYLKLEFMKETGFAHMRICDGVGSYLQLCGLLAKLSLVRETAKAV

SEQ ID NO: 54678 - protein, 287 aa, Glycine max
  peptide (1)..(287): Ceres Seq. ID no. 14313161
  misc_feature (3)..(176): Pfam Name: ATPase family associated with various cellular Pfam Description: ATPase family associated with various cellular
  misc_feature (1)..(287): Homolog of NCBI NO: 28950096 NR Description: probable REPLICATION FACTOR C (40 KDA SUBUNIT)
  misc_feature (1)..(277): Homolog of NCBI NO: 539678 NR Description: replication factor C - human
  misc_feature (1)..(277): Homolog of NCBI NO: 12847419 NR Description: unnamed protein product [Mus musculus]
  misc_feature (1)..(277): Homolog of NCBI NO: 31563534 NR Description: replication factor C 2 (40kD) isoform 1
  misc_feature (1)..(277): Homolog of NCBI NO: 11177922 NR Description: replication factor C (activator 1) 2
  misc_feature (1)..(277): Homolog of NCBI NO: 34871892 NR Description: replication factor C 2 (40kD) [Rattus norvegicus]
  misc_feature (1)..(277): Homolog of NCBI NO: 1703053 NR Description: Activator 1 40 kDa subunit (Replication factor C
  misc_feature (1)..(286): Homolog of NCBI NO: 38344372 NR Description: OSJNBb0032E06.6 [Oryza sativa (japonica
  misc_feature (1)..(286): Homolog of NCBI NO: 15991286 NR Description: replication factor C 40kDa subunit
  misc_feature (1)..(286): Homolog of NCBI NO: 15221697 NR Description: replication factor -related [Arabidopsis
MPNLILSGPPGTGKTTSILALAHELLGGPNCKEAVLELNASDDRGIDVVRNKIKMFAQKKVTLTPGRHKIVILDEADSMTTGAQQALRRTMEIYSNTTRFALACNTSAKIIEPIQSRCAIVRFSRLSDQEILGRLMVVVQAEKVPYVPEGLEAIIFTADGDMRQALNNLQATYSGFQFVNQANVFKVCDQPHPLHVKNMVRNVIEGNFDEACSGLKQLYDLGYSPTDIITTLFRIIKNYDMAEYLKLEFMKETGFAHMRICDGVGSYLQLCGLLAKLSLVRETAKAV

SEQ ID NO: 54679 - protein, 233 aa, Glycine max
  peptide (1)..(233): Ceres Seq. ID no. 14313162
  misc_feature (1)..(122): Pfam Name: ATPase family associated with various cellular Pfam Description: ATPase family associated with various cellular
  misc_feature (1)..(233): Homolog of NCBI NO: 28950096 NR Description: probable REPLICATION FACTOR C (40 KDA SUBUNIT)
  misc_feature (1)..(223): Homolog of NCBI NO: 539678 NR Description: replication factor C - human
  misc_feature (1)..(223): Homolog of NCBI NO: 12847419 NR Description: unnamed protein product [Mus musculus]
  misc_feature (1)..(223): Homolog of NCBI NO: 31563534 NR Description: replication factor C 2 (40kD) isoform 1
  misc_feature (1)..(223): Homolog of NCBI NO: 11177922 NR Description: replication factor C (activator 1) 2
  misc_feature (1)..(223): Homolog of NCBI NO: 34871892 NR Description: replication factor C 2 (40kD) [Rattus norvegicus]
  misc_feature (1)..(223): Homolog of NCBI NO: 1703053 NR Description: Activator 1 40 kDa subunit (Replication factor C
  misc_feature (1)..(232): Homolog of NCBI NO: 38344372 NR Description: OSJNBb0032E06.6 [Oryza sativa (japonica
  misc_feature (1)..(232): Homolog of NCBI NO: 15991286 NR Description: replication factor C 40kDa subunit
  misc_feature (1)..(232): Homolog of NCBI NO: 15221697 NR Description: replication factor -related [Arabidopsis
MFAQKKVTLTPGRHKIVILDEADSMTTGAQQALRRTMEIYSNTTRFALACNTSAKIIEPIQSRCAIVRFSRLSDQEILGRLMVVVQAEKVPYVPEGLEAIIFTADGDMRQALNNLQATYSGFQFVNQANVFKVCDQPHPLHVKNMVRNVIEGNFDEACSGLKQLYDLGYSPTDIITTLFRIIKNYDMAEYLKLEFMKETGFAHMRICDGVGSYLQLCGLLAKLSLVRETAKAV

SEQ ID NO: 54680 - DNA, 1374 bp, Glycine max
  misc_feature (1)..(1374): Ceres Seq. ID no. 15226103
gcagctacgtaggcccccccccatgtgtgttgagcgttcccctgatgaaataaggccctggtgcaaggtttcttgagatattttcagctgaaacagttgctaaactttctacttgcatctccaatactgtctctggcacttcgctcagagttgtccattatgctaagtcaaggcctcagaactttttctctctgggttttttaactcctatggaagaagagagccgtggagttgtgtttttatcagatgaactctcaaggtccaaagaagctggaagtgtggaaaaatcctctgtttgattagaagaacactccaatcttaggaggagcaagaatgtgagcaagggagacattgctaatgttcccatggaatctgagccagcagcaatttggccgggatacttgtctgcttctgttctcccattcgtgctacacttgggattcatggtgtcaactcgtttcttgtctgccagccctcctctttattggtttgcttcatatataatggcgaatctttattggtttgcttcatatataatggcgaatcctgcaaaatactttagatggggatacgtgatatgggcatactctatggcatacatttttcttggcagtctgctgttttcaaacttctaccctttcacctaacgagaagaaaggtagatggttcttgaaagctgttagtctttttatttcatgcaaatgcaatgcacaaaggcatatagctatcatgaagtgttcaccacaaaaaaaaataaaaaaaaaccaggatttagcgtcggttatatatgacacttttctggcggttcaaaccaggatttaacgttgctgctgaatttcatatttatgttggcttcttcagtgcttttgcccatttggtggttgctgtttgatcttaaacgcctgtgatttactagtagtggagaaaatgcccccttccctctctcaaattagcacgttttgttttggtcagtgtgtattcagtataatatctagatgagtaaactaatagaattcctttttcctttgttgtaattttcttttttgactattatttttctttttattcgatgatagcttttgttgaagtccaataccactttattttcaatgagtggcaaagtgatctatcttagaaacatggtcatagatgaaaaaaaaaaaaaaaaaaaaaaaaaaaaaaaaaaaaaaaaaaaaaaaaaaaaaaaaaaaaaaaaggaaaaaaaaaaaaaaaaargatttcctgcaccccggggaatccacwakttcaaaaggggccgccmccgcggrggagccccagtttttgttcccttaagggaagggtaaatttcaagtttggcgaaacaagggccaaaattgtttcctggggaaaatt

SEQ ID NO: 54681 - protein, 93 aa, Glycine max
  peptide (1)..(93): Ceres Seq. ID no. 15226104
  misc_feature (1)..(93): Pfam Name: Protein of unknown function (DUF409) Pfam Description: Protein of unknown function (DUF409)
  misc_feature (1)..(93): Homolog of NCBI NO: 15221122 NR Description: hypothetical protein [Arabidopsis thaliana]
MESEPAAIWPGYLSASVLPFVLHLGFMVSTRFLSASPPLYWFASYIMANLYWFASYIMANPAKYFRWGYVIWAYSMAYIFLGSLLFSNFYPFT

SEQ ID NO: 54682 - protein, 71 aa, Glycine max
  peptide (1)..(71): Ceres Seq. ID no. 15226105
  misc_feature (15)..(42): Homolog of NCBI NO: 16416102 NR Description: hypothetical protein [Neurospora crassa]
  misc_feature (15)..(42): Homolog of NCBI NO: 10439524 NR Description: unnamed protein product [Homo sapiens]
  misc_feature (14)..(42): Homolog of NCBI NO: 39592010 NR Description: Hypothetical protein CBG23181 [Caenorhabditis
  misc_feature (14)..(42): Homolog of NCBI NO: 39595494 NR Description: Hypothetical protein CBG04159 [Caenorhabditis
  misc_feature (14)..(42): Homolog of NCBI NO: 16416102 NR Description: hypothetical protein [Neurospora crassa]
  misc_feature (8)..(42): Homolog of NCBI NO: 39597582 NR Description: Hypothetical protein CBG03276 [Caenorhabditis
  misc_feature (15)..(42): Homolog of NCBI NO: 32416700 NR Description: predicted protein [Neurospora crassa]
  misc_feature (15)..(42): Homolog of NCBI NO: 10439524 NR Description: unnamed protein product [Homo sapiens]
  misc_feature (13)..(42): Homolog of NCBI NO: 39595494 NR Description: Hypothetical protein CBG04159 [Caenorhabditis
  misc_feature (6)..(42): Homolog of NCBI NO: 37536950 NR Description: hypothetical protein [Oryza sativa (japonica
  misc_feature (43)..(43): Xaa is any aa, unknown or other
  misc_feature (52)..(52): Xaa is any aa, unknown or other
  misc_feature (58)..(58): Xaa is any aa, unknown or other
  misc_feature (60)..(60): Xaa is any aa, unknown or other
MSGKVIYLRNMVIDEKKKKKKKKKKKKKKKKKKKKKEKKKKKXFPAPRGIHXFKRGRXRXGAPVFVPLREG

SEQ ID NO: 54683 - protein, 67 aa, Glycine max
  peptide (1)..(67): Ceres Seq. ID no. 15226106
  misc_feature (1)..(67): Pfam Name: Protein of unknown function (DUF409) Pfam Description: Protein of unknown function (DUF409)
  misc_feature (1)..(67): Homolog of NCBI NO: 15221122 NR Description: hypothetical protein [Arabidopsis thaliana]
MVSTRFLSASPPLYWFASYIMANLYWFASYIMANPAKYFRWGYVIWAYSMAYIFLGSLLFSNFYPFT

SEQ ID NO: 54684 - DNA, 517 bp, Glycine max
  misc_feature (1)..(517): Ceres Seq. ID no. 15225715
ccctcgagtcagctacgtaggcccccccccattttttttctgggaaaaactgcaggtttatgcctttcctgatcttatctggacaactttgtcctccaggaattgaagggactttatttgcacttttcatgtcaataaacaacttgggatccacagtggggtcttttgtgggtgctggcttggcttctatattgaacattgattcaggatcatttgacaatcttctcttgggcatcattgttcatgccttgtgcaatttcatcccaattgcttttctgtttctgataccaaaggaagctacaggttcttcaacatagattatgactactacacagggattggctttgcttcattaggttcttctaggcctaccatagttgtaattttacacttgtagatgggaatattttggagcaaatgaggaacatattaatctgatttatgcgaactcggatcatagtaattgtatatactattttactgacaattttggtcagcaagtctattttcttgcatg

SEQ ID NO: 54685 - protein, 85 aa, Glycine max
  peptide (1)..(85): Ceres Seq. ID no. 15225716
  misc_feature (1)..(84): Pfam Name: BT1 family Pfam Description: BT1 family
  misc_feature (1)..(77): Homolog of NCBI NO: 16331564 NR Description: integral membrane protein [Synechocystis sp. PCC
  misc_feature (1)..(85): Homolog of NCBI NO: 18402856 NR Description: expressed protein [Arabidopsis thaliana]
  misc_feature (1)..(85): Homolog of NCBI NO: 25408206 NR Description: hypothetical protein At2g32040 [imported] -
  misc_feature (1)..(78): Homolog of NCBI NO: 28973640 NR Description: putative membrane protein [Arabidopsis thaliana]
  misc_feature (1)..(84): Homolog of NCBI NO: 15219976 NR Description: hypothetical protein [Arabidopsis thaliana]
  misc_feature (1)..(78): Homolog of NCBI NO: 15238691 NR Description: membrane protein -related [Arabidopsis thaliana]
  misc_feature (1)..(80): Homolog of NCBI NO: 34394451 NR Description: putative integral membrane protein
  misc_feature (1)..(82): Homolog of NCBI NO: 34904540 NR Description: B1066G12.15 [Oryza sativa (japonica
  misc_feature (1)..(84): Homolog of NCBI NO: 22327842 NR Description: expressed protein [Arabidopsis thaliana]
  misc_feature (1)..(84): Homolog of NCBI NO: 9758266 NR Description: contains similarity to integral membrane
MPFLILSGQLCPPGIEGTLFALFMSINNLGSTVGSFVGAGLASILNIDSGSFDNLLLGIIVHALCNFIPIAFLFLIPKEATGSST

SEQ ID NO: 54686 - protein, 62 aa, Glycine max
  peptide (1)..(62): Ceres Seq. ID no. 15225717
  misc_feature (1)..(61): Pfam Name: BT1 family Pfam Description: BT1 family
  misc_feature (1)..(54): Homolog of NCBI NO: 16331564 NR Description: integral membrane protein [Synechocystis sp. PCC
  misc_feature (1)..(62): Homolog of NCBI NO: 18402856 NR Description: expressed protein [Arabidopsis thaliana]
  misc_feature (1)..(62): Homolog of NCBI NO: 25408206 NR Description: hypothetical protein At2g32040 [imported] -
  misc_feature (1)..(55): Homolog of NCBI NO: 28973640 NR Description: putative membrane protein [Arabidopsis thaliana]
  misc_feature (1)..(61): Homolog of NCBI NO: 15219976 NR Description: hypothetical protein [Arabidopsis thaliana]
  misc_feature (1)..(55): Homolog of NCBI NO: 15238691 NR Description: membrane protein -related [Arabidopsis thaliana]
  misc_feature (1)..(57): Homolog of NCBI NO: 34394451 NR Description: putative integral membrane protein
  misc_feature (1)..(59): Homolog of NCBI NO: 34904540 NR Description: B1066G12.15 [Oryza sativa (japonica
  misc_feature (1)..(61): Homolog of NCBI NO: 22327842 NR Description: expressed protein [Arabidopsis thaliana]
  misc_feature (1)..(61): Homolog of NCBI NO: 9758266 NR Description: contains similarity to integral membrane
MSINNLGSTVGSFVGAGLASILNIDSGSFDNLLLGIIVHALCNFIPIAFLFLIPKEATGSST

SEQ ID NO: 54687 - DNA, 1897 bp, Glycine max
  misc_feature (1)..(1897): Ceres Seq. ID no. 14307510
gattacatattgaaaagtcaatctaacaagtactccaccctaaaggaaaagctttctagttgcttgtcatctaatatggttcgcagatggtttgtttttgaatggttttatagtgcaattgattatccatggtttgccaaaagggaattcatggagtacttaaatcatgttggactagggaatatcccaaggttaactcgtgtcgagtggagtgtcataaaaagttcccttggcaaaccccgcaggttttctgaacactttctatgtgaagaaaggcaaaaacttgaacagtatcgggaatcagtgaggaaacattacactgaactgcggactggtattagggatggacttccaacagatttagccaaaccattatatgttggacaacatgtaattgctcttcatccaaaaacaagagagattcatgatggtagtgtgcttaccgttgactatgacaagtgcaggattcagtttgaccgtcctgaattaggtgttgaatttgtaatggacattgattgcatgcctttgaattcatcagataatatgccagaagctctgaggaggcatattggttccccaatatcctctttcatgaataaagagccacaaattagtggaaattcaaattttggggggtgcgaaatgaatcattcctcacccgtgaaggcaaaggttgctaccgttgataatctctgtgcacaagcaggttgtgctcaaccatgtaaagtaacacaccatcaagctaaggaagctgacatacaggcagtttctgaactaaagcatgctctagataaaaaggagacattgttgatggagcttcgaagtgcaaatagcgacatattggaaaacaaaaatggcatagactgcttaaaagattctgaggttttcaagaagcattatgcgacggtttctgatgctatgctacaactgaggcaacgcaatacttacagaggaaactctctgccatcctggatgaagccacaagcaagtttcaatgttcatgatgatcttcccagtatgttggatagttctctgacacaagagttagggtcaactgttgttcaagttattaaaggatccaggctaagggcacatgcaatggtagatgctgcatttcaggcattgtctttggcaaaggaaggtgaagatgctttcataaagattgggcaagcattggattctataaatcatcagcagttagcctcccagtctaggttacccgtgatcaggtctcaagagcaagtgaacgcgaatggcagtttttatcatcttaatcattcaactagcggtgtatcagaacctatacttaatgatccatcgcttccaaaaccacataattgttctgacaaatttgatactgaacttccatcagatcttatcacttcgtgtgttgctacattaatcatgattcagacttgtactgaacggcaataccctccagctgatgtggctcagatattagattctgccgttaccagtctgcatccatgctgttctcaaaaccttcctatttatagagaaattcaaatgtgcatgggaagaatcaaaacgcagatgttagctctcatccctacttgacttacatcttttcttctgcagatctctctctaatgtagctgctgctgtacatatgatgctgaagctgaactattagttcagaacttcagatcacatacgggctcgtcgcctaccttgtaatgtctttattgagaggtacaataatttatttcttttactccacaccgatagggtcaaacggtggtattagaaatcatgtaattcactaccgtgtctttttttatctttggtgtcaaatggtggtacttaataaaaatgattatttaatattttgatgattcaaaaattaataaaaagcactaaaggttattttttgttt

SEQ ID NO: 54688 - protein, 525 aa, Glycine max
  peptide (1)..(525): Ceres Seq. ID no. 14307511
  misc_feature (343)..(525): Homolog of NCBI NO: 15240995 NR Description: expressed protein [Arabidopsis thaliana]
  misc_feature (9)..(190): Homolog of NCBI NO: 15240995 NR Description: expressed protein [Arabidopsis thaliana]
  misc_feature (347)..(525): Homolog of NCBI NO: 19347724 NR Description: unknown protein [Arabidopsis thaliana]
  misc_feature (347)..(525): Homolog of NCBI NO: 15229976 NR Description: expressed protein [Arabidopsis thaliana]
  misc_feature (5)..(267): Homolog of NCBI NO: 19347724 NR Description: unknown protein [Arabidopsis thaliana]
  misc_feature (5)..(267): Homolog of NCBI NO: 15229976 NR Description: expressed protein [Arabidopsis thaliana]
  misc_feature (4)..(220): Homolog of NCBI NO: 9294690 NR Description: gene_id:MHC9.11~unknown protein [Arabidopsis
  misc_feature (214)..(525): Homolog of NCBI NO: 9294690 NR Description: gene_id:MHC9.11~unknown protein [Arabidopsis
  misc_feature (16)..(220): Homolog of NCBI NO: 15233065 NR Description: expressed protein [Arabidopsis thaliana]
  misc_feature (214)..(525): Homolog of NCBI NO: 15233065 NR Description: expressed protein [Arabidopsis thaliana]
DYILKSQSNKYSTLKEKLSSCLSSNMVRRWFVFEWFYSAIDYPWFAKREFMEYLNHVGLGNIPRLTRVEWSVIKSSLGKPRRFSEHFLCEERQKLEQYRESVRKHYTELRTGIRDGLPTDLAKPLYVGQHVIALHPKTREIHDGSVLTVDYDKCRIQFDRPELGVEFVMDIDCMPLNSSDNMPEALRRHIGSPISSFMNKEPQISGNSNFGGCEMNHSSPVKAKVATVDNLCAQAGCAQPCKVTHHQAKEADIQAVSELKHALDKKETLLMELRSANSDILENKNGIDCLKDSEVFKKHYATVSDAMLQLRQRNTYRGNSLPSWMKPQASFNVHDDLPSMLDSSLTQELGSTVVQVIKGSRLRAHAMVDAAFQALSLAKEGEDAFIKIGQALDSINHQQLASQSRLPVIRSQEQVNANGSFYHLNHSTSGVSEPILNDPSLPKPHNCSDKFDTELPSDLITSCVATLIMIQTCTERQYPPADVAQILDSAVTSLHPCCSQNLPIYREIQMCMGRIKTQMLALIPT

SEQ ID NO: 54689 - protein, 500 aa, Glycine max
  peptide (1)..(500): Ceres Seq. ID no. 14307512
  misc_feature (318)..(500): Homolog of NCBI NO: 15240995 NR Description: expressed protein [Arabidopsis thaliana]
  misc_feature (1)..(165): Homolog of NCBI NO: 15240995 NR Description: expressed protein [Arabidopsis thaliana]
  misc_feature (322)..(500): Homolog of NCBI NO: 19347724 NR Description: unknown protein [Arabidopsis thaliana]
  misc_feature (322)..(500): Homolog of NCBI NO: 15229976 NR Description: expressed protein [Arabidopsis thaliana]
  misc_feature (1)..(242): Homolog of NCBI NO: 19347724 NR Description: unknown protein [Arabidopsis thaliana]
  misc_feature (1)..(242): Homolog of NCBI NO: 15229976 NR Description: expressed protein [Arabidopsis thaliana]
  misc_feature (1)..(195): Homolog of NCBI NO: 9294690 NR Description: gene_id:MHC9.11~unknown protein [Arabidopsis
  misc_feature (189)..(500): Homolog of NCBI NO: 9294690 NR Description: gene_id:MHC9.11~unknown protein [Arabidopsis
  misc_feature (1)..(195): Homolog of NCBI NO: 15233065 NR Description: expressed protein [Arabidopsis thaliana]
  misc_feature (189)..(500): Homolog of NCBI NO: 15233065 NR Description: expressed protein [Arabidopsis thaliana]
MVRRWFVFEWFYSAIDYPWFAKREFMEYLNHVGLGNIPRLTRVEWSVIKSSLGKPRRFSEHFLCEERQKLEQYRESVRKHYTELRTGIRDGLPTDLAKPLYVGQHVIALHPKTREIHDGSVLTVDYDKCRIQFDRPELGVEFVMDIDCMPLNSSDNMPEALRRHIGSPISSFMNKEPQISGNSNFGGCEMNHSSPVKAKVATVDNLCAQAGCAQPCKVTHHQAKEADIQAVSELKHALDKKETLLMELRSANSDILENKNGIDCLKDSEVFKKHYATVSDAMLQLRQRNTYRGNSLPSWMKPQASFNVHDDLPSMLDSSLTQELGSTVVQVIKGSRLRAHAMVDAAFQALSLAKEGEDAFIKIGQALDSINHQQLASQSRLPVIRSQEQVNANGSFYHLNHSTSGVSEPILNDPSLPKPHNCSDKFDTELPSDLITSCVATLIMIQTCTERQYPPADVAQILDSAVTSLHPCCSQNLPIYREIQMCMGRIKTQMLALIPT

SEQ ID NO: 54690 - protein, 475 aa, Glycine max
  peptide (1)..(475): Ceres Seq. ID no. 14307513
  misc_feature (293)..(475): Homolog of NCBI NO: 15240995 NR Description: expressed protein [Arabidopsis thaliana]
  misc_feature (1)..(140): Homolog of NCBI NO: 15240995 NR Description: expressed protein [Arabidopsis thaliana]
  misc_feature (297)..(475): Homolog of NCBI NO: 19347724 NR Description: unknown protein [Arabidopsis thaliana]
  misc_feature (297)..(475): Homolog of NCBI NO: 15229976 NR Description: expressed protein [Arabidopsis thaliana]
  misc_feature (1)..(217): Homolog of NCBI NO: 19347724 NR Description: unknown protein [Arabidopsis thaliana]
  misc_feature (1)..(217): Homolog of NCBI NO: 15229976 NR Description: expressed protein [Arabidopsis thaliana]
  misc_feature (1)..(170): Homolog of NCBI NO: 9294690 NR Description: gene_id:MHC9.11~unknown protein [Arabidopsis
  misc_feature (164)..(475): Homolog of NCBI NO: 9294690 NR Description: gene_id:MHC9.11~unknown protein [Arabidopsis
  misc_feature (1)..(170): Homolog of NCBI NO: 15233065 NR Description: expressed protein [Arabidopsis thaliana]
  misc_feature (164)..(475): Homolog of NCBI NO: 15233065 NR Description: expressed protein [Arabidopsis thaliana]
MEYLNHVGLGNIPRLTRVEWSVIKSSLGKPRRFSEHFLCEERQKLEQYRESVRKHYTELRTGIRDGLPTDLAKPLYVGQHVIALHPKTREIHDGSVLTVDYDKCRIQFDRPELGVEFVMDIDCMPLNSSDNMPEALRRHIGSPISSFMNKEPQISGNSNFGGCEMNHSSPVKAKVATVDNLCAQAGCAQPCKVTHHQAKEADIQAVSELKHALDKKETLLMELRSANSDILENKNGIDCLKDSEVFKKHYATVSDAMLQLRQRNTYRGNSLPSWMKPQASFNVHDDLPSMLDSSLTQELGSTVVQVIKGSRLRAHAMVDAAFQALSLAKEGEDAFIKIGQALDSINHQQLASQSRLPVIRSQEQVNANGSFYHLNHSTSGVSEPILNDPSLPKPHNCSDKFDTELPSDLITSCVATLIMIQTCTERQYPPADVAQILDSAVTSLHPCCSQNLPIYREIQMCMGRIKTQMLALIPT

SEQ ID NO: 54691 - DNA, 1674 bp, Glycine max
  misc_feature (1)..(1674): Ceres Seq. ID no. 15227226
cagctaagtaggccccccccccccgaagactcgctacatcttctttccaaatcccaactactactcacactcactgcagatctcaatccatggctaccattgttagcatcaaggcccgccagatctttgacagtcgtggcaatccaaccgtcgaggtggatttgacatgctccgatggtacttttgctagagctgctgttccaagtggtgcatccactgggatttatgaggcccttgaattgagagatggaggatctgactaccttggaaagggtgtatcaaaggctgttgacaatgtgaacaccattattgcccctgctttggttggcaaggacccaactcagcagactgctattgacaacttaatggttcaacaacttgatggaactgttaacgaatggggttggtgcaagcaaaagcttggagcaaatgccatattggcagtgtctcttgcagtctgcaaagctggtgctgctgtcctgaaagttcctctttacaagcatattgcaaatattgcgggtaacaaaaagttggttttgcctgttcctgctttcaatgtcattaatggtggatcacatgctggaaacaaacttgctatgcaggagtttatggttcttcccgtgggagcttcctctttcaaggaagccatgaagatgggtgtagaagtatatcacaatttgaagtctgtgattaagaagaaatatggtcaagatgcagtaaatgttggtgacgaaggtggctttgcccctaacatccaggaaaacaaggaaggtttggaattgctgaaaactgccattgccaaagctggttacacaggcaaagttgtcattggaatggatgttgcagcttctgaattctacaaggaagataaaacatacgatttgaacttcaaggaagataacaatgatggctcacagaagatctctggagatgctttgaaagatctatacaagtcatttgtgacagagtatccaattgtttcaattgaggatccttttgaccaggatgactgggagcactatgctaagcttactgctgaggttggaaccaatgtacaaattgttggtgatgatctcttggttaccaaccccaagagggttcagaaggcaattgatacaaaagcatgcaatgctcttctccttaaggtcaaccaaattggttctgtgactgagagtattgaagctgtcaggatgtccaaaaaagctggatggggtgtcatggcgagtcacagaagtggagagactgaggataccttcattgctgacctttctgttggtttggcaacgggtcaaattaagactggagctccatgcaggtcagagcgtcttgctaaatataaccagctcttgagaattgaggaggagcttggtgcggaagcagtgtatgctggagctaacttccgtacccctgttgagccctactaaagttttcaagtggaaaaaacctggagatccccacgagtttgagcaatgagatttggatgcgcggttttagttgtgatcaataagtcgatagttagaacaatagtcttggtataaggaccttgccaataattttttagttctgattcacagagctaagacagttccgtcttagactttaaaagttttgatatttagctttaatacttgaagtttacttccaattttatggggtatccccaaaacatttcat

SEQ ID NO: 54692 - protein, 444 aa, Glycine max
  peptide (1)..(444): Ceres Seq. ID no. 15227227
  misc_feature (148)..(441): Pfam Name: Enolase, C-terminal TIM barrel domain Pfam Description: Enolase, C-terminal TIM barrel domain
  misc_feature (1)..(444): Homolog of NCBI NO: 8919731 NR Description: enolase [Spinacia oleracea]
  misc_feature (2)..(444): Homolog of NCBI NO: 33415263 NR Description: enolase [Gossypium barbadense]
  misc_feature (3)..(444): Homolog of NCBI NO: 14423688 NR Description: Enolase 1 (2-phosphoglycerate dehydratase 1)
  misc_feature (1)..(444): Homolog of NCBI NO: 3023714 NR Description: Enolase (2-phosphoglycerate dehydratase)
  misc_feature (1)..(444): Homolog of NCBI NO: 7436883 NR Description: phosphopyruvate hydratase (EC 4.2.1.11) - common
  misc_feature (2)..(444): Homolog of NCBI NO: 3023713 NR Description: Enolase (2-phosphoglycerate dehydratase)
  misc_feature (2)..(444): Homolog of NCBI NO: 33113259 NR Description: enolase [Oryza sativa (japonica cultivar-group)]
  misc_feature (3)..(444): Homolog of NCBI NO: 14423687 NR Description: Enolase 2 (2-phosphoglycerate dehydratase 2)
  misc_feature (3)..(444): Homolog of NCBI NO: 1169534 NR Description: Enolase (2-phosphoglycerate dehydratase)
  misc_feature (1)..(444): Homolog of NCBI NO: 6996529 NR Description: enolase [Lupinus luteus]
MATIVSIKARQIFDSRGNPTVEVDLTCSDGTFARAAVPSGASTGIYEALELRDGGSDYLGKGVSKAVDNVNTIIAPALVGKDPTQQTAIDNLMVQQLDGTVNEWGWCKQKLGANAILAVSLAVCKAGAAVLKVPLYKHIANIAGNKKLVLPVPAFNVINGGSHAGNKLAMQEFMVLPVGASSFKEAMKMGVEVYHNLKSVIKKKYGQDAVNVGDEGGFAPNIQENKEGLELLKTAIAKAGYTGKVVIGMDVAASEFYKEDKTYDLNFKEDNNDGSQKISGDALKDLYKSFVTEYPIVSIEDPFDQDDWEHYAKLTAEVGTNVQIVGDDLLVTNPKRVQKAIDTKACNALLLKVNQIGSVTESIEAVRMSKKAGWGVMASHRSGETEDTFIADLSVGLATGQIKTGAPCRSERLAKYNQLLRIEEELGAEAVYAGANFRTPVEPY

SEQ ID NO: 54693 - protein, 352 aa, Glycine max
  peptide (1)..(352): Ceres Seq. ID no. 15227228
  misc_feature (56)..(349): Pfam Name: Enolase, C-terminal TIM barrel domain Pfam Description: Enolase, C-terminal TIM barrel domain
  misc_feature (1)..(352): Homolog of NCBI NO: 8919731 NR Description: enolase [Spinacia oleracea]
  misc_feature (1)..(352): Homolog of NCBI NO: 33415263 NR Description: enolase [Gossypium barbadense]
  misc_feature (1)..(352): Homolog of NCBI NO: 14423688 NR Description: Enolase 1 (2-phosphoglycerate dehydratase 1)
  misc_feature (1)..(352): Homolog of NCBI NO: 3023714 NR Description: Enolase (2-phosphoglycerate dehydratase)
  misc_feature (1)..(352): Homolog of NCBI NO: 7436883 NR Description: phosphopyruvate hydratase (EC 4.2.1.11) - common
  misc_feature (1)..(352): Homolog of NCBI NO: 3023713 NR Description: Enolase (2-phosphoglycerate dehydratase)
  misc_feature (1)..(352): Homolog of NCBI NO: 33113259 NR Description: enolase [Oryza sativa (japonica cultivar-group)]
  misc_feature (1)..(352): Homolog of NCBI NO: 14423687 NR Description: Enolase 2 (2-phosphoglycerate dehydratase 2)
  misc_feature (1)..(352): Homolog of NCBI NO: 1169534 NR Description: Enolase (2-phosphoglycerate dehydratase)
  misc_feature (1)..(352): Homolog of NCBI NO: 6996529 NR Description: enolase [Lupinus luteus]
MVQQLDGTVNEWGWCKQKLGANAILAVSLAVCKAGAAVLKVPLYKHIANIAGNKKLVLPVPAFNVINGGSHAGNKLAMQEFMVLPVGASSFKEAMKMGVEVYHNLKSVIKKKYGQDAVNVGDEGGFAPNIQENKEGLELLKTAIAKAGYTGKVVIGMDVAASEFYKEDKTYDLNFKEDNNDGSQKISGDALKDLYKSFVTEYPIVSIEDPFDQDDWEHYAKLTAEVGTNVQIVGDDLLVTNPKRVQKAIDTKACNALLLKVNQIGSVTESIEAVRMSKKAGWGVMASHRSGETEDTFIADLSVGLATGQIKTGAPCRSERLAKYNQLLRIEEELGAEAVYAGANFRTPVEPY

SEQ ID NO: 54694 - protein, 275 aa, Glycine max
  peptide (1)..(275): Ceres Seq. ID no. 15227229
  misc_feature (1)..(272): Pfam Name: Enolase, C-terminal TIM barrel domain Pfam Description: Enolase, C-terminal TIM barrel domain
  misc_feature (1)..(275): Homolog of NCBI NO: 8919731 NR Description: enolase [Spinacia oleracea]
  misc_feature (1)..(275): Homolog of NCBI NO: 33415263 NR Description: enolase [Gossypium barbadense]
  misc_feature (1)..(275): Homolog of NCBI NO: 14423688 NR Description: Enolase 1 (2-phosphoglycerate dehydratase 1)
  misc_feature (1)..(275): Homolog of NCBI NO: 3023714 NR Description: Enolase (2-phosphoglycerate dehydratase)
  misc_feature (1)..(275): Homolog of NCBI NO: 7436883 NR Description: phosphopyruvate hydratase (EC 4.2.1.11) - common
  misc_feature (1)..(275): Homolog of NCBI NO: 3023713 NR Description: Enolase (2-phosphoglycerate dehydratase)
  misc_feature (1)..(275): Homolog of NCBI NO: 33113259 NR Description: enolase [Oryza sativa (japonica cultivar-group)]
  misc_feature (1)..(275): Homolog of NCBI NO: 14423687 NR Description: Enolase 2 (2-phosphoglycerate dehydratase 2)
  misc_feature (1)..(275): Homolog of NCBI NO: 1169534 NR Description: Enolase (2-phosphoglycerate dehydratase)
  misc_feature (1)..(275): Homolog of NCBI NO: 6996529 NR Description: enolase [Lupinus luteus]
MQEFMVLPVGASSFKEAMKMGVEVYHNLKSVIKKKYGQDAVNVGDEGGFAPNIQENKEGLELLKTAIAKAGYTGKVVIGMDVAASEFYKEDKTYDLNFKEDNNDGSQKISGDALKDLYKSFVTEYPIVSIEDPFDQDDWEHYAKLTAEVGTNVQIVGDDLLVTNPKRVQKAIDTKACNALLLKVNQIGSVTESIEAVRMSKKAGWGVMASHRSGETEDTFIADLSVGLATGQIKTGAPCRSERLAKYNQLLRIEEELGAEAVYAGANFRTPVEPY

SEQ ID NO: 54695 - DNA, 1409 bp, Glycine max
  misc_feature (1)..(1409): Ceres Seq. ID no. 14310443
aaaaagactctgtgaagtgtgcgtgagaaaggaacagagagaagaaaaagaaaaaagatggaaggagagaaagagaatcccgattgtaacgccactttggtgaactccttctgcgaaatcacttcctcttccaaagaagaagcccttttctttttggagagccacaatttcgacctagacgccgccgtttccactttcctcgacaacgccaacaaccctctcatccctcaaaacgacgacgtcgttgtcgccgcaaacccaaaccccaactccgtttcccctccctccgattctcactccccggacttcaacccttccaggtctccttcgccgtctccgtcgccgactcgcacgccctacgagctccgatcccgcaggtctctcggcaagaaaccctccaccagccgccaaggcaaaattcgcactctcggcgatctcaaacgctcctcccgcgatgatgattccgattccgatcccgatttcgaacccgacgagtactacaccggcggcgaaaagagtgggatgcttgttcgagatcctaccagaggaaacagcaacaacaacaacagtgtggatgatatctttgatcaagcgaggcaggttgctgttgatgcacctccggagaatcctcgaagctcgtcgaggtcgggaagttttagtggcacggcgaggttgctctctggagagagattgccatctgctgctgctgctgctcctgctcctcagcgtgtagaggaagttacccacactgtcactttctggaggaatgggttctctgtcaatgatggtcctctacggaggttggatgatccgcaaaacgcaccgtttctggagagcataaagaagtccgaatgtcccaaagagcttgagccagcagataggaggactgctgtccatgtcaacctcacaaggcgggatgaagactaccctgaaccagtgaagccacgccatcgtgctttccagggtgttggaagaactttaggtagcaccagctccagcaatgatgaacctattcaaacaactggtgcttcaccaagtactgctccattgccaacaatgggtttaattgtagatgaggcacagtcagtgacatcaatccagctgaggttggctgatggcacacgcatggtttctcgcttcaatcaccatcatacaatccgagatgttcgagcattcattgatgcatcaagacccgggggtgtaagaagttaccaactgcagtcaatgggttttcctcccaaacaactcgctaatttggaccagactatagaacaagctggtattgccaactcagttgtcatccaaaagttgtaggttgtttaccagattctattttcagtcgacttgaaattactatttttatgcttaaacattgattgatctacttatattttattagtgaatttgat

SEQ ID NO: 54696 - protein, 418 aa, Glycine max
  peptide (1)..(418): Ceres Seq. ID no. 14310444
  misc_feature (339)..(417): Pfam Name: UBX domain Pfam Description: UBX domain
  misc_feature (185)..(418): Homolog of NCBI NO: 32492162 NR Description: OSJNBb0048E02.1 [Oryza sativa (japonica
  misc_feature (148)..(418): Homolog of NCBI NO: 32489879 NR Description: OSJNBa0060P14.10 [Oryza sativa (japonica
  misc_feature (112)..(417): Homolog of NCBI NO: 15234731 NR Description: expressed protein [Arabidopsis thaliana]
  misc_feature (103)..(417): Homolog of NCBI NO: 7487458 NR Description: hypothetical protein T27D20.10 - Arabidopsis
  misc_feature (103)..(417): Homolog of NCBI NO: 18412499 NR Description: membrane trafficking factor -related [Arabidopsis
  misc_feature (9)..(414): Homolog of NCBI NO: 7485149 NR Description: hypothetical protein - Arabidopsis thaliana
  misc_feature (9)..(417): Homolog of NCBI NO: 15292665 NR Description: putative phosphatase [Arabidopsis thaliana]
  misc_feature (9)..(417): Homolog of NCBI NO: 18414442 NR Description: phosphatase like protein [Arabidopsis thaliana]
  misc_feature (65)..(417): Homolog of NCBI NO: 13123657 NR Description: phosphatase-like protein Mtc923 [Medicago
  misc_feature (63)..(418): Homolog of NCBI NO: 13123659 NR Description: phosphatase-like protein Psc923 [Pisum sativum]
MEGEKENPDCNATLVNSFCEITSSSKEEALFFLESHNFDLDAAVSTFLDNANNPLIPQNDDVVVAANPNPNSVSPPSDSHSPDFNPSRSPSPSPSPTRTPYELRSRRSLGKKPSTSRQGKIRTLGDLKRSSRDDDSDSDPDFEPDEYYTGGEKSGMLVRDPTRGNSNNNNSVDDIFDQARQVAVDAPPENPRSSSRSGSFSGTARLLSGERLPSAAAAAPAPQRVEEVTHTVTFWRNGFSVNDGPLRRLDDPQNAPFLESIKKSECPKELEPADRRTAVHVNLTRRDEDYPEPVKPRHRAFQGVGRTLGSTSSSNDEPIQTTGASPSTAPLPTMGLIVDEAQSVTSIQLRLADGTRMVSRFNHHHTIRDVRAFIDASRPGGVRSYQLQSMGFPPKQLANLDQTIEQAGIANSVVIQKL

SEQ ID NO: 54697 - protein, 263 aa, Glycine max
  peptide (1)..(263): Ceres Seq. ID no. 14310445
  misc_feature (184)..(262): Pfam Name: UBX domain Pfam Description: UBX domain
  misc_feature (30)..(263): Homolog of NCBI NO: 32492162 NR Description: OSJNBb0048E02.1 [Oryza sativa (japonica
  misc_feature (1)..(263): Homolog of NCBI NO: 32489879 NR Description: OSJNBa0060P14.10 [Oryza sativa (japonica
  misc_feature (1)..(262): Homolog of NCBI NO: 15234731 NR Description: expressed protein [Arabidopsis thaliana]
  misc_feature (1)..(262): Homolog of NCBI NO: 7487458 NR Description: hypothetical protein T27D20.10 - Arabidopsis
  misc_feature (1)..(262): Homolog of NCBI NO: 18412499 NR Description: membrane trafficking factor -related [Arabidopsis
  misc_feature (1)..(259): Homolog of NCBI NO: 7485149 NR Description: hypothetical protein - Arabidopsis thaliana
  misc_feature (1)..(262): Homolog of NCBI NO: 15292665 NR Description: putative phosphatase [Arabidopsis thaliana]
  misc_feature (1)..(262): Homolog of NCBI NO: 18414442 NR Description: phosphatase like protein [Arabidopsis thaliana]
  misc_feature (1)..(262): Homolog of NCBI NO: 13123657 NR Description: phosphatase-like protein Mtc923 [Medicago
  misc_feature (1)..(263): Homolog of NCBI NO: 13123659 NR Description: phosphatase-like protein Psc923 [Pisum sativum]
MLVRDPTRGNSNNNNSVDDIFDQARQVAVDAPPENPRSSSRSGSFSGTARLLSGERLPSAAAAAPAPQRVEEVTHTVTFWRNGFSVNDGPLRRLDDPQNAPFLESIKKSECPKELEPADRRTAVHVNLTRRDEDYPEPVKPRHRAFQGVGRTLGSTSSSNDEPIQTTGASPSTAPLPTMGLIVDEAQSVTSIQLRLADGTRMVSRFNHHHTIRDVRAFIDASRPGGVRSYQLQSMGFPPKQLANLDQTIEQAGIANSVVIQKL

SEQ ID NO: 54698 - DNA, 1352 bp, Glycine max
  misc_feature (1)..(1352): Ceres Seq. ID no. 15176919
gagttagttagtttagttgggtgagggaaagaaaagccacttcaaatttcagccccataccatactcattaaagtccacacacacagagcaacactgcactgtgtggaaacgaaacatggcaagagtggtggcactccaacagaaccaactatctttctctaccttagcttcctctctttctgacttcagtggaaccagacttcaaactcaacttcagttcaagagaaagcaatgccatccaaaagggtctttctacgtctccgcatcgagcaccaagaaaatcctaataatgggaggcaccaggtttattggtgtgtttttgtctaggctccttgtcaaagagggtcaccaggtgactttattcacaagaggtaaagcgcctgtcactcaacagttgccaggtgaatcagacagtgattatgctgatttttcttccaagatcttgcatttgaaaggagacaggaaggacttcgactttgtaaaatccagtctctcagcagagggatttgatgttgtttatgacataaatggacgcgaggcagatgaagttgaacccatactggatgctctgcctaatctggagcagtttatttactgctcttctgccggtgtctatctcaaatctgatctattacctcacgcagagactgatgcagttgatcctaagagcagacacaagggaaagcttgagacagagagtttgctacaagcaaggggtgttaattggacatctataaggccagtctacatctatggacccttgaactacaaccctgttgaagagtggttcttccatagattgaaagcgggacgcccaattcctatccccggctcaggaatacagataacccaacttggtcatgttaaggatttggcaaaagcttttatccaggttcttggtaatgagaaggccagcaaggaagtattcaacatctcgggagataagtatgtcacatttgatggattagcaagagcatgtgctaaggctggtgggttcccagagccagagatcattcactacaaccctaaagattttgattttgggaaaaagaaatcatttccattccgtgaccagcatttctttgcatcagttgagaaagcaaagagcgtgcttggattggaacctgaatttggacttgtagagggtctagcagactcgtacaacctggactttggtagaggaacatatcggaaagaggctgatttctcaacagatgacataattcttggcaagagtcttgttagcgtataaacttttctatttcaattttaagtatttcacttgtatttagaaaagctgttcggatttgctacattatgaagtcgtgaaatattcatgagcttttcgttc

SEQ ID NO: 54699 - protein, 378 aa, Glycine max
  peptide (1)..(378): Ceres Seq. ID no. 15176920
  misc_feature (57)..(346): Pfam Name: NAD dependent epimerase/dehydratase family Pfam Description: NAD dependent epimerase/dehydratase family
  misc_feature (10)..(378): Homolog of NCBI NO: 7484674 NR Description: mRNA-binding protein CSP41 precursor, chloroplast
  misc_feature (55)..(371): Homolog of NCBI NO: 23128166 NR Description: hypothetical protein [Nostoc punctiforme]
  misc_feature (55)..(371): Homolog of NCBI NO: 23040971 NR Description: hypothetical protein [Trichodesmium erythraeum
  misc_feature (55)..(371): Homolog of NCBI NO: 17232323 NR Description: mRNA-binding protein [Nostoc sp. PCC 7120]
  misc_feature (24)..(371): Homolog of NCBI NO: 34398360 NR Description: 38 kDa ribosome-associated protein precursor
  misc_feature (7)..(376): Homolog of NCBI NO: 25456171 NR Description: probable RNA binding protein [imported] -
  misc_feature (1)..(376): Homolog of NCBI NO: 25454619 NR Description: hypothetical protein g5bf [imported] -
  misc_feature (1)..(376): Homolog of NCBI NO: 17064988 NR Description: g5bf protein [Arabidopsis thaliana]
  misc_feature (1)..(376): Homolog of NCBI NO: 21593201 NR Description: putative RNA-binding protein [Arabidopsis
  misc_feature (1)..(376): Homolog of NCBI NO: 15217485 NR Description: RNA-binding protein -related [Arabidopsis
MARVVALQQNQLSFSTLASSLSDFSGTRLQTQLQFKRKQCHPKGSFYVSASSTKKILIMGGTRFIGVFLSRLLVKEGHQVTLFTRGKAPVTQQLPGESDSDYADFSSKILHLKGDRKDFDFVKSSLSAEGFDVVYDINGREADEVEPILDALPNLEQFIYCSSAGVYLKSDLLPHAETDAVDPKSRHKGKLETESLLQARGVNWTSIRPVYIYGPLNYNPVEEWFFHRLKAGRPIPIPGSGIQITQLGHVKDLAKAFIQVLGNEKASKEVFNISGDKYVTFDGLARACAKAGGFPEPEIIHYNPKDFDFGKKKSFPFRDQHFFASVEKAKSVLGLEPEFGLVEGLADSYNLDFGRGTYRKEADFSTDDIILGKSLVSV

SEQ ID NO: 54700 - protein, 320 aa, Glycine max
  peptide (1)..(320): Ceres Seq. ID no. 15176921
  misc_feature (1)..(288): Pfam Name: NAD dependent epimerase/dehydratase family Pfam Description: NAD dependent epimerase/dehydratase family
  misc_feature (1)..(320): Homolog of NCBI NO: 7484674 NR Description: mRNA-binding protein CSP41 precursor, chloroplast
  misc_feature (1)..(313): Homolog of NCBI NO: 23128166 NR Description: hypothetical protein [Nostoc punctiforme]
  misc_feature (1)..(313): Homolog of NCBI NO: 23040971 NR Description: hypothetical protein [Trichodesmium erythraeum
  misc_feature (1)..(313): Homolog of NCBI NO: 17232323 NR Description: mRNA-binding protein [Nostoc sp. PCC 7120]
  misc_feature (1)..(313): Homolog of NCBI NO: 34398360 NR Description: 38 kDa ribosome-associated protein precursor
  misc_feature (1)..(318): Homolog of NCBI NO: 25456171 NR Description: probable RNA binding protein [imported] -
  misc_feature (1)..(318): Homolog of NCBI NO: 25454619 NR Description: hypothetical protein g5bf [imported] -
  misc_feature (1)..(318): Homolog of NCBI NO: 17064988 NR Description: g5bf protein [Arabidopsis thaliana]
  misc_feature (1)..(318): Homolog of NCBI NO: 21593201 NR Description: putative RNA-binding protein [Arabidopsis
  misc_feature (1)..(318): Homolog of NCBI NO: 15217485 NR Description: RNA-binding protein -related [Arabidopsis
MGGTRFIGVFLSRLLVKEGHQVTLFTRGKAPVTQQLPGESDSDYADFSSKILHLKGDRKDFDFVKSSLSAEGFDVVYDINGREADEVEPILDALPNLEQFIYCSSAGVYLKSDLLPHAETDAVDPKSRHKGKLETESLLQARGVNWTSIRPVYIYGPLNYNPVEEWFFHRLKAGRPIPIPGSGIQITQLGHVKDLAKAFIQVLGNEKASKEVFNISGDKYVTFDGLARACAKAGGFPEPEIIHYNPKDFDFGKKKSFPFRDQHFFASVEKAKSVLGLEPEFGLVEGLADSYNLDFGRGTYRKEADFSTDDIILGKSLVSV

SEQ ID NO: 54701 - DNA, 1492 bp, Glycine max
  misc_feature (1)..(1492): Ceres Seq. ID no. 15175931
gatatgtaaacagtaaaccaaactggactgaggcgagaaggagtagagcatagtatggagcacacagtctcaaactcaagcagtgtcgagcagattctgaatcttctctacgcagccggctacgtcgacgccacaaatcccgatgcgccgccgtctcagaaaatcgccgccggcctctcctggtgcatcgccgccataacaggcgacgacaacacacgtgacatcgaggaatcgtttggattagttggatgcccgcaccctctgcgatcctctcacattcaggatcttgataccgatgctctttttcctgtaattcagtggcttgcgtcacacattcggcaaaatcaagaacactgtgtcaatgaggttcatcatgctgaaaataccattgaagtggatgagtgtagaacttcgattcaggcattaagtggcaacttggatgaactgaatcagcggaagatgaatgttgtgaagcaattatatattctacaagagagaatcaataaggagggtgctgattctgcagtacagaagttgctttctttactgacatctttgaagaatcttgaaaagcaggaaaaatactttcagtccaatcgtgatgctaaacactcagaacttcaagatgatattagtgaattagagaggaaaataacaaatgacagtgataatgagaaccttcctgatgaactacatcattcatttggtgaattagttgaaaaagtcaatttgatgaaaaagcaacttgctgctagactgagggatattgtggtattaagacgacagattgatgacctaccgtgccaatcagaagtcatccagtacgaacgccggctctcagaactgtatgcacaaatttaggttcatgaattgttttgatgaaaaagagtttattattaagaaaagaggaaaagttaagttagtgggaggctaatacttttttttgtttatcaaatcatactcactctggttctcacttaacttctaattgttatgcatgtctttggttttgcctatgcacagggaaaacatcgacaaactcgtaaatactatgctacctacaatgctctcttggaaataaaagaattgatgctaaaggaaacatctttattgaattcgatcatttcccagtttcaagaggcctttagtagcactgatggacgtataaaacttgttcattccatggaaggaattgtcaagggaagtcaacagaagctagaaagggttcatgtaggacttcaagaagaagagagaattcgtaatgatctgaaggataggtatgctgcagcaaccggtgagcacaagcactgctattctctgttgaaagcttttcaggcccaatgtgcgaagaattagaggtttcgatgacaagacaactttgaggttgagttgcacaaagtactgtatcgcgtcaaagcgtagaggtttctctgtaactgtagacgatcccagtaagggtggagaattctccaattgaaatttactttaacgt

SEQ ID NO: 54702 - protein, 268 aa, Glycine max
  peptide (1)..(268): Ceres Seq. ID no. 15175932
  misc_feature (128)..(268): Homolog of NCBI NO: 10438181 NR Description: unnamed protein product [Homo sapiens]
  misc_feature (66)..(98): Homolog of NCBI NO: 17647427 NR Description: fidipidine CG7773-PA [Drosophila melanogaster]
  misc_feature (96)..(268): Homolog of NCBI NO: 17647427 NR Description: fidipidine CG7773-PA [Drosophila melanogaster]
  misc_feature (66)..(99): Homolog of NCBI NO: 26351751 NR Description: unnamed protein product [Mus musculus]
  misc_feature (128)..(268): Homolog of NCBI NO: 26351751 NR Description: unnamed protein product [Mus musculus]
  misc_feature (66)..(99): Homolog of NCBI NO: 32450714 NR Description: 4633402D15Rik protein [Mus musculus]
  misc_feature (13)..(51): Homolog of NCBI NO: 32450714 NR Description: 4633402D15Rik protein [Mus musculus]
  misc_feature (128)..(268): Homolog of NCBI NO: 32450714 NR Description: 4633402D15Rik protein [Mus musculus]
  misc_feature (102)..(264): Homolog of NCBI NO: 7486769 NR Description: hypothetical protein L23H3.40 - Arabidopsis
  misc_feature (102)..(264): Homolog of NCBI NO: 18418036 NR Description: expressed protein [Arabidopsis thaliana]
MEHTVSNSSSVEQILNLLYAAGYVDATNPDAPPSQKIAAGLSWCIAAITGDDNTRDIEESFGLVGCPHPLRSSHIQDLDTDALFPVIQWLASHIRQNQEHCVNEVHHAENTIEVDECRTSIQALSGNLDELNQRKMNVVKQLYILQERINKEGADSAVQKLLSLLTSLKNLEKQEKYFQSNRDAKHSELQDDISELERKITNDSDNENLPDELHHSFGELVEKVNLMKKQLAARLRDIVVLRRQIDDLPCQSEVIQYERRLSELYAQI

SEQ ID NO: 54703 - DNA, 1445 bp, Glycine max
  misc_feature (1)..(1445): Ceres Seq. ID no. 14307702
atatcctctctctctctctctctctctctctgaacaagagcctgcagccagagttagagggaaatcaagcacggctcaatcatcgaatcatagagaacacatacagaagaaggaaaagtggaaccctggaagctgatattgtaggaaggtttgcaagaaaacggattttgttttgagatatatgcatgtgcaagtgcatagggaaattaacaaaaaataagatgacatggtgcaatgactctgacgagaatagggttattgaatcaatcacgccaagaataactattactcctaacactgatgacaaaaagctcacccaagaaattagaaccacagcatgcccctcgtgcggccataacattgcattcaaagataagggtggaatccatgacttgccggggttaccagctggagttaagtttgacccaaatgaccaagaaatattagaacatttggaggcaaaagttgcgtctgatgcatgcaagcttcatcccctaattgatgagttcataccaacgctcgaaggcgagaatgggatctgttatacacacccagaaaaactaccaggagttagcaaagatgggcagatccgccatttctttcacaggccctcaaaagcatacacgactggaacaaggaaaagaagaaaggttcacactgatgatgaaggaattgaaacaagatggcacaaaacgggaaaaactagagcagtttttgcatctggtggtgcagtgaaaggttttaagaaaatactagtactctacaccaactatggaaggcaaaagaagcctgagaaaacttactgggtgatgcatcaataccatcttggcaatactgaagaagagaaagatggagaactagttgtttcaaaagtcttctaccaaacacaacctagacaatgtgttaatcccattatcataaaggacccgtacgaaaaaatgttgaatggtggaagtgtccaagacagcacaaatacatcaataactaaaactactgcaactcttttggattgctacaatgctccttacatagattatgatcatgcccatgcgagtcataatagggaaagttcctcacaactaataattcccagctcggttgttcaggttgatggctcttatattcgctcaacaatggatgcaaagaaagcaagatttgaaagtaacactgggaagagcttctaggtagacaagcagtgacaatgatttacagcatgtcctccatattgtttccattactaattgagtaatagtatttatatgtgaaattagactgaaggaattccaagggttggaaaaatataggtttttccttgaattattgagatcaatatggcgcaggcatgatggactttcccataattgaccctggttgaagttgagagacaagcaagaaggtatatatatttgcggtactgtagtttgattttaattttagggtacatg

SEQ ID NO: 54704 - protein, 332 aa, Glycine max
  peptide (1)..(332): Ceres Seq. ID no. 14307703
  misc_feature (73)..(215): Pfam Name: No apical meristem (NAM) protein Pfam Description: No apical meristem (NAM) protein
  misc_feature (14)..(240): Homolog of NCBI NO: 30689293 NR Description: No apical meristem (NAM) protein family
  misc_feature (12)..(240): Homolog of NCBI NO: 12320749 NR Description: unknown protein [Arabidopsis thaliana]
  misc_feature (76)..(239): Homolog of NCBI NO: 34906416 NR Description: P0710E05.22 [Oryza sativa (japonica
  misc_feature (52)..(273): Homolog of NCBI NO: 15241889 NR Description: No apical meristem (NAM) protein family
  misc_feature (52)..(239): Homolog of NCBI NO: 15233497 NR Description: No apical meristem (NAM) protein family
  misc_feature (63)..(239): Homolog of NCBI NO: 6560767 NR Description: F3M18.9 [Arabidopsis thaliana]
  misc_feature (13)..(239): Homolog of NCBI NO: 34911014 NR Description: OJ1125_C04.12 [Oryza sativa (japonica
  misc_feature (13)..(239): Homolog of NCBI NO: 18396807 NR Description: No apical meristem (NAM) protein family
  misc_feature (13)..(239): Homolog of NCBI NO: 21554371 NR Description: NAM protein, putative [Arabidopsis thaliana]
  misc_feature (13)..(256): Homolog of NCBI NO: 15235314 NR Description: No apical meristem (NAM) protein family
MCKCIGKLTKNKMTWCNDSDENRVIESITPRITITPNTDDKKLTQEIRTTACPSCGHNIAFKDKGGIHDLPGLPAGVKFDPNDQEILEHLEAKVASDACKLHPLIDEFIPTLEGENGICYTHPEKLPGVSKDGQIRHFFHRPSKAYTTGTRKRRKVHTDDEGIETRWHKTGKTRAVFASGGAVKGFKKILVLYTNYGRQKKPEKTYWVMHQYHLGNTEEEKDGELVVSKVFYQTQPRQCVNPIIIKDPYEKMLNGGSVQDSTNTSITKTTATLLDCYNAPYIDYDHAHASHNRESSSQLIIPSSVVQVDGSYIRSTMDAKKARFESNTGKSF

SEQ ID NO: 54705 - protein, 320 aa, Glycine max
  peptide (1)..(320): Ceres Seq. ID no. 14307704
  misc_feature (61)..(203): Pfam Name: No apical meristem (NAM) protein Pfam Description: No apical meristem (NAM) protein
  misc_feature (2)..(228): Homolog of NCBI NO: 30689293 NR Description: No apical meristem (NAM) protein family
  misc_feature (1)..(228): Homolog of NCBI NO: 12320749 NR Description: unknown protein [Arabidopsis thaliana]
  misc_feature (64)..(227): Homolog of NCBI NO: 34906416 NR Description: P0710E05.22 [Oryza sativa (japonica
  misc_feature (40)..(261): Homolog of NCBI NO: 15241889 NR Description: No apical meristem (NAM) protein family
  misc_feature (40)..(227): Homolog of NCBI NO: 15233497 NR Description: No apical meristem (NAM) protein family
  misc_feature (51)..(227): Homolog of NCBI NO: 6560767 NR Description: F3M18.9 [Arabidopsis thaliana]
  misc_feature (1)..(227): Homolog of NCBI NO: 34911014 NR Description: OJ1125_C04.12 [Oryza sativa (japonica
  misc_feature (1)..(227): Homolog of NCBI NO: 18396807 NR Description: No apical meristem (NAM) protein family
  misc_feature (1)..(227): Homolog of NCBI NO: 21554371 NR Description: NAM protein, putative [Arabidopsis thaliana]
  misc_feature (1)..(244): Homolog of NCBI NO: 15235314 NR Description: No apical meristem (NAM) protein family
MTWCNDSDENRVIESITPRITITPNTDDKKLTQEIRTTACPSCGHNIAFKDKGGIHDLPGLPAGVKFDPNDQEILEHLEAKVASDACKLHPLIDEFIPTLEGENGICYTHPEKLPGVSKDGQIRHFFHRPSKAYTTGTRKRRKVHTDDEGIETRWHKTGKTRAVFASGGAVKGFKKILVLYTNYGRQKKPEKTYWVMHQYHLGNTEEEKDGELVVSKVFYQTQPRQCVNPIIIKDPYEKMLNGGSVQDSTNTSITKTTATLLDCYNAPYIDYDHAHASHNRESSSQLIIPSSVVQVDGSYIRSTMDAKKARFESNTGKSF

SEQ ID NO: 54706 - DNA, 1776 bp, Glycine max
  misc_feature (1)..(1776): Ceres Seq. ID no. 14313155
agaaaaaaaaaaagaaggaaaaaggggctagacggcatgttggactgatttgaccttgaagaaggggtcattcatatgatcccgtgtttgtttgggtctttcttcattcttcaaccaacccattccttcccccacgcgccattctccggccaccgtcgacgacggaacgccgttcaccgcttcatattctcccaaaggcttcggcgaccgcccgtgatggataaagtcttcaacaagctccgcaatttggacgcttacccaaaagtcaatgaagatttttacaaccgcacgctcgccggcggcgttgtcaccgtcgtttccgccgccgtcatgctctttctcttcttttccgagctaagtttatacctctacacagttacggagagtaagcttttggtggatacttcaaggggagataccttgcacatcaattttgatgtcacttttcctgctgttcgatgttcaatactcagcttagatgcaatggatattagtggcgagcagcatcttgacatacgacataatatagtgaagaaaagaattgatgctaatggtaatgtgatagaagagaggaaggatggaattggtgcaccaaagattgagagacccttacagaaacatggtggcagacttggacatgatgaaaagtattgtggttcatgttttggtgcagaagagtcagatgaacactgttgtaattcttgtgaagaagtgcgtgaagcatataggaaaaagggctgggcaatgacaaatatggatttgattgatcagtgtcaaagagagggttatgtgcaaagggtaaaggatgaagaaggtgaaggatgcaatcttcaaggatctcttgaagttaataaagtagcaggaaattttcattttgcaactgggaaaagctttcttcagtctgctatatttctggctgatctgcttgctctacaggataatcattataatattagccatcggatcaacaaattaagttttggtcaccatttccctggattggtaaatcctcttgacggggtaaagtgggtgcaaggacctgctcatggcatgtaccagtatttcataaaggtggtccctacaatatacacagacattagaggccgtgttatccattcaaatcagtattctgtgactgagcatttcaagagttcagagctgggtgttgcagttcctggagttttcttcttttatgacatatctccaatcaaggtcaactttaaagaggaacatattccatttttacatttcctgaccaatatttgtgcaattattggaggtgtatttactgttgcgggaataatagattcatcgatatattatggtcagagaacaatcaagaggaagatggagcttggaaaatttacatgatgtggtcaaattctgcatgagtgctctaatatcctaattgatttgacgtatttggttggctggtgcattgagtatcgtttataatgtggtagcatatgcacataatgccaagggtaagcagagccgtaggttcggttgatgcatgaagtgtattttttggatcatgatttttcctttaatgtgtagcaatttctattaagttgctactttggtgggtttttaatatatggatgaagatgaggaatgcaaagagttgttgggaactttttagatatttttgctgcataatacatgacatggttgattatgcataacatacagttcttgtgttgctgttccccgtgctgtaatctagccaatgttttcattgaacttgaagaatttgaagctgctaagttaggattt

SEQ ID NO: 54707 - protein, 431 aa, Glycine max
  peptide (1)..(431): Ceres Seq. ID no. 14313156
  misc_feature (50)..(431): Homolog of NCBI NO: 7706278 NR Description: serologically defined breast cancer antigen 84
  misc_feature (48)..(429): Homolog of NCBI NO: 28278376 NR Description: Similar to serologically defined breast cancer
  misc_feature (50)..(431): Homolog of NCBI NO: 13384938 NR Description: serologically defined breast cancer antigen 84
  misc_feature (22)..(431): Homolog of NCBI NO: 34860248 NR Description: similar to serologically defined breast cancer
  misc_feature (403)..(431): Homolog of NCBI NO: 6598578 NR Description: F5J5.4 [Arabidopsis thaliana]
  misc_feature (48)..(200): Homolog of NCBI NO: 6598578 NR Description: F5J5.4 [Arabidopsis thaliana]
  misc_feature (196)..(407): Homolog of NCBI NO: 6598578 NR Description: F5J5.4 [Arabidopsis thaliana]
  misc_feature (51)..(430): Homolog of NCBI NO: 18395087 NR Description: expressed protein [Arabidopsis thaliana]
  misc_feature (48)..(430): Homolog of NCBI NO: 38347102 NR Description: OSJNBa0006M15.17 [Oryza sativa (japonica
  misc_feature (48)..(431): Homolog of NCBI NO: 30693281 NR Description: expressed protein [Arabidopsis thaliana]
MIPCLFGSFFILQPTHSFPHAPFSGHRRRRNAVHRFIFSQRLRRPPVMDKVFNKLRNLDAYPKVNEDFYNRTLAGGVVTVVSAAVMLFLFFSELSLYLYTVTESKLLVDTSRGDTLHINFDVTFPAVRCSILSLDAMDISGEQHLDIRHNIVKKRIDANGNVIEERKDGIGAPKIERPLQKHGGRLGHDEKYCGSCFGAEESDEHCCNSCEEVREAYRKKGWAMTNMDLIDQCQREGYVQRVKDEEGEGCNLQGSLEVNKVAGNFHFATGKSFLQSAIFLADLLALQDNHYNISHRINKLSFGHHFPGLVNPLDGVKWVQGPAHGMYQYFIKVVPTIYTDIRGRVIHSNQYSVTEHFKSSELGVAVPGVFFFYDISPIKVNFKEEHIPFLHFLTNICAIIGGVFTVAGIIDSSIYYGQRTIKRKMELGKFT

SEQ ID NO: 54708 - protein, 384 aa, Glycine max
  peptide (1)..(384): Ceres Seq. ID no. 14313157
  misc_feature (3)..(384): Homolog of NCBI NO: 7706278 NR Description: serologically defined breast cancer antigen 84
  misc_feature (1)..(382): Homolog of NCBI NO: 28278376 NR Description: Similar to serologically defined breast cancer
  misc_feature (3)..(384): Homolog of NCBI NO: 13384938 NR Description: serologically defined breast cancer antigen 84
  misc_feature (1)..(384): Homolog of NCBI NO: 34860248 NR Description: similar to serologically defined breast cancer
  misc_feature (356)..(384): Homolog of NCBI NO: 6598578 NR Description: F5J5.4 [Arabidopsis thaliana]
  misc_feature (1)..(153): Homolog of NCBI NO: 6598578 NR Description: F5J5.4 [Arabidopsis thaliana]
  misc_feature (149)..(360): Homolog of NCBI NO: 6598578 NR Description: F5J5.4 [Arabidopsis thaliana]
  misc_feature (4)..(383): Homolog of NCBI NO: 18395087 NR Description: expressed protein [Arabidopsis thaliana]
  misc_feature (1)..(383): Homolog of NCBI NO: 38347102 NR Description: OSJNBa0006M15.17 [Oryza sativa (japonica
  misc_feature (1)..(384): Homolog of NCBI NO: 30693281 NR Description: expressed protein [Arabidopsis thaliana]
MDKVFNKLRNLDAYPKVNEDFYNRTLAGGVVTVVSAAVMLFLFFSELSLYLYTVTESKLLVDTSRGDTLHINFDVTFPAVRCSILSLDAMDISGEQHLDIRHNIVKKRIDANGNVIEERKDGIGAPKIERPLQKHGGRLGHDEKYCGSCFGAEESDEHCCNSCEEVREAYRKKGWAMTNMDLIDQCQREGYVQRVKDEEGEGCNLQGSLEVNKVAGNFHFATGKSFLQSAIFLADLLALQDNHYNISHRINKLSFGHHFPGLVNPLDGVKWVQGPAHGMYQYFIKVVPTIYTDIRGRVIHSNQYSVTEHFKSSELGVAVPGVFFFYDISPIKVNFKEEHIPFLHFLTNICAIIGGVFTVAGIIDSSIYYGQRTIKRKMELGKFT

SEQ ID NO: 54709 - protein, 346 aa, Glycine max
  peptide (1)..(346): Ceres Seq. ID no. 14313158
  misc_feature (1)..(346): Homolog of NCBI NO: 7706278 NR Description: serologically defined breast cancer antigen 84
  misc_feature (1)..(344): Homolog of NCBI NO: 28278376 NR Description: Similar to serologically defined breast cancer
  misc_feature (1)..(346): Homolog of NCBI NO: 13384938 NR Description: serologically defined breast cancer antigen 84
  misc_feature (1)..(346): Homolog of NCBI NO: 34860248 NR Description: similar to serologically defined breast cancer
  misc_feature (318)..(346): Homolog of NCBI NO: 6598578 NR Description: F5J5.4 [Arabidopsis thaliana]
  misc_feature (1)..(115): Homolog of NCBI NO: 6598578 NR Description: F5J5.4 [Arabidopsis thaliana]
  misc_feature (111)..(322): Homolog of NCBI NO: 6598578 NR Description: F5J5.4 [Arabidopsis thaliana]
  misc_feature (1)..(345): Homolog of NCBI NO: 18395087 NR Description: expressed protein [Arabidopsis thaliana]
  misc_feature (1)..(345): Homolog of NCBI NO: 38347102 NR Description: OSJNBa0006M15.17 [Oryza sativa (japonica
  misc_feature (1)..(346): Homolog of NCBI NO: 30693281 NR Description: expressed protein [Arabidopsis thaliana]
MLFLFFSELSLYLYTVTESKLLVDTSRGDTLHINFDVTFPAVRCSILSLDAMDISGEQHLDIRHNIVKKRIDANGNVIEERKDGIGAPKIERPLQKHGGRLGHDEKYCGSCFGAEESDEHCCNSCEEVREAYRKKGWAMTNMDLIDQCQREGYVQRVKDEEGEGCNLQGSLEVNKVAGNFHFATGKSFLQSAIFLADLLALQDNHYNISHRINKLSFGHHFPGLVNPLDGVKWVQGPAHGMYQYFIKVVPTIYTDIRGRVIHSNQYSVTEHFKSSELGVAVPGVFFFYDISPIKVNFKEEHIPFLHFLTNICAIIGGVFTVAGIIDSSIYYGQRTIKRKMELGKFT

SEQ ID NO: 54710 - DNA, 1352 bp, Glycine max
  misc_feature (1)..(1352): Ceres Seq. ID no. 14307728
atcatgtttttaagttttaagcttctctctcttaatttcatcagtagtgtgtgtttgaatgcaaagaagcacatgtgccaatgtgcatttgtgtgtcatgcagtaatgccaggcttatacttgcatatgcttggtaattatattcttgtaattatctagctagttgccacaaaaggtgtgattagatttgtttctagttggactatgaaataggaagaattaacattgagttaaatacaaagattttaatattcataattgttggttatatattcccccaatgaccaaattgttgatctcttgttagttcttgagcttatttcctagcaacttgatcttttgtgtaacttcatttctctccaccagttttaccaatataccaattttaaattataaatatttgtgtaggagcatgccaacctctgctgccctggatgttgttgccaaacatctgaatttgaaattttttgaggtccccacgggttggaagttctttggtaatttaatggatgctggattatgttcagtctgtggtgaagaaagttttgggactggttctgaccatattcgtgagaaagatggaatctgggcagttttggcctggctatctatacttgcatataaaaataaagataaacttgaagacaagcttgtcactgttgaagacatagttcgccagcattgggctacttatgggcgccattattatactcgatatgactatgaaaacgtggatgcaggtgcagcaaaggaactgatggcatatttggtcaagctgcagtcctcactttcagaagtcaatcagattgttaaggggataaggtcagatgtttcgaatgttgtccacggtgatgaatttgagtacaatgatcctgtggatggttccatctcatcacatcagggaatccgatatttgtttgaggatggatcacgattgattttccgcctatctggaactggatcagaaggtgcaacaattcgattatacattgagcaatatgagaaggatccatcaaagattgggagactttcaaacgaagcacttgctcctcttgtggaagttgcgttgaaactttcgaagatggaagaattcactggtcgatccgctccaacagtcattacatgaacacattcaagtggaaggtggttagatcctgaagcttctcccagtcatttcatttcttctttgtccagtatcttacggatagccgaacagtagatttggttgtttgcagcctttgctatgggaaattgagtggaatttgagtttctttatctaaattttgatatgctgaataatttgcaacagccgagtgctaattatatagtcttaatataatggtttctcttgc

SEQ ID NO: 54711 - protein, 237 aa, Glycine max
  peptide (1)..(237): Ceres Seq. ID no. 14307729
  misc_feature (1)..(94): Pfam Name: Phosphoglucomutase/phosphomannomutase, Pfam Description: Phosphoglucomutase/phosphomannomutase,
  misc_feature (1)..(237): Homolog of NCBI NO: 12585309 NR Description: Phosphoglucomutase, cytoplasmic 1 (Glucose
  misc_feature (1)..(237): Homolog of NCBI NO: 13324798 NR Description: phosphoglucomutase [Oryza sativa]
  misc_feature (1)..(237): Homolog of NCBI NO: 12585310 NR Description: Phosphoglucomutase, cytoplasmic 2 (Glucose
  misc_feature (1)..(237): Homolog of NCBI NO: 12585308 NR Description: Phosphoglucomutase, cytoplasmic (Glucose
  misc_feature (1)..(237): Homolog of NCBI NO: 26185954 NR Description: cytosolic phosphoglucomutase [Arabidopsis
  misc_feature (1)..(237): Homolog of NCBI NO: 15220668 NR Description: phosphoglucomutase -related [Arabidopsis
  misc_feature (1)..(237): Homolog of NCBI NO: 40233152 NR Description: cytosolic phosphoglucomutase [Populus tomentosa]
  misc_feature (1)..(237): Homolog of NCBI NO: 12585330 NR Description: Phosphoglucomutase, cytoplasmic (Glucose
  misc_feature (1)..(237): Homolog of NCBI NO: 12585316 NR Description: Phosphoglucomutase, cytoplasmic (Glucose
  misc_feature (1)..(237): Homolog of NCBI NO: 12585296 NR Description: Phosphoglucomutase, cytoplasmic (Glucose
MPTSAALDVVAKHLNLKFFEVPTGWKFFGNLMDAGLCSVCGEESFGTGSDHIREKDGIWAVLAWLSILAYKNKDKLEDKLVTVEDIVRQHWATYGRHYYTRYDYENVDAGAAKELMAYLVKLQSSLSEVNQIVKGIRSDVSNVVHGDEFEYNDPVDGSISSHQGIRYLFEDGSRLIFRLSGTGSEGATIRLYIEQYEKDPSKIGRLSNEALAPLVEVALKLSKMEEFTGRSAPTVIT

SEQ ID NO: 54712 - protein, 206 aa, Glycine max
  peptide (1)..(206): Ceres Seq. ID no. 14307730
  misc_feature (1)..(63): Pfam Name: Phosphoglucomutase/phosphomannomutase, Pfam Description: Phosphoglucomutase/phosphomannomutase,
  misc_feature (1)..(206): Homolog of NCBI NO: 12585309 NR Description: Phosphoglucomutase, cytoplasmic 1 (Glucose
  misc_feature (1)..(206): Homolog of NCBI NO: 13324798 NR Description: phosphoglucomutase [Oryza sativa]
  misc_feature (1)..(206): Homolog of NCBI NO: 12585310 NR Description: Phosphoglucomutase, cytoplasmic 2 (Glucose
  misc_feature (1)..(206): Homolog of NCBI NO: 12585308 NR Description: Phosphoglucomutase, cytoplasmic (Glucose
  misc_feature (1)..(206): Homolog of NCBI NO: 26185954 NR Description: cytosolic phosphoglucomutase [Arabidopsis
  misc_feature (1)..(206): Homolog of NCBI NO: 15220668 NR Description: phosphoglucomutase -related [Arabidopsis
  misc_feature (1)..(206): Homolog of NCBI NO: 40233152 NR Description: cytosolic phosphoglucomutase [Populus tomentosa]
  misc_feature (1)..(206): Homolog of NCBI NO: 12585330 NR Description: Phosphoglucomutase, cytoplasmic (Glucose
  misc_feature (1)..(206): Homolog of NCBI NO: 12585316 NR Description: Phosphoglucomutase, cytoplasmic (Glucose
  misc_feature (1)..(206): Homolog of NCBI NO: 12585296 NR Description: Phosphoglucomutase, cytoplasmic (Glucose
MDAGLCSVCGEESFGTGSDHIREKDGIWAVLAWLSILAYKNKDKLEDKLVTVEDIVRQHWATYGRHYYTRYDYENVDAGAAKELMAYLVKLQSSLSEVNQIVKGIRSDVSNVVHGDEFEYNDPVDGSISSHQGIRYLFEDGSRLIFRLSGTGSEGATIRLYIEQYEKDPSKIGRLSNEALAPLVEVALKLSKMEEFTGRSAPTVIT

SEQ ID NO: 54713 - protein, 122 aa, Glycine max
  peptide (1)..(122): Ceres Seq. ID no. 14307731
  misc_feature (13)..(111): Pfam Name: Phosphoglucomutase/phosphomannomutase, Pfam Description: Phosphoglucomutase/phosphomannomutase,
  misc_feature (1)..(122): Homolog of NCBI NO: 12585309 NR Description: Phosphoglucomutase, cytoplasmic 1 (Glucose
  misc_feature (1)..(122): Homolog of NCBI NO: 13324798 NR Description: phosphoglucomutase [Oryza sativa]
  misc_feature (1)..(122): Homolog of NCBI NO: 12585310 NR Description: Phosphoglucomutase, cytoplasmic 2 (Glucose
  misc_feature (1)..(122): Homolog of NCBI NO: 12585308 NR Description: Phosphoglucomutase, cytoplasmic (Glucose
  misc_feature (1)..(122): Homolog of NCBI NO: 26185954 NR Description: cytosolic phosphoglucomutase [Arabidopsis
  misc_feature (1)..(122): Homolog of NCBI NO: 15220668 NR Description: phosphoglucomutase -related [Arabidopsis
  misc_feature (1)..(122): Homolog of NCBI NO: 40233152 NR Description: cytosolic phosphoglucomutase [Populus tomentosa]
  misc_feature (1)..(122): Homolog of NCBI NO: 12585330 NR Description: Phosphoglucomutase, cytoplasmic (Glucose
  misc_feature (1)..(122): Homolog of NCBI NO: 12585316 NR Description: Phosphoglucomutase, cytoplasmic (Glucose
  misc_feature (1)..(122): Homolog of NCBI NO: 12585296 NR Description: Phosphoglucomutase, cytoplasmic (Glucose
MAYLVKLQSSLSEVNQIVKGIRSDVSNVVHGDEFEYNDPVDGSISSHQGIRYLFEDGSRLIFRLSGTGSEGATIRLYIEQYEKDPSKIGRLSNEALAPLVEVALKLSKMEEFTGRSAPTVIT

SEQ ID NO: 54714 - DNA, 1478 bp, Glycine max
  misc_feature (1)..(1478): Ceres Seq. ID no. 15176895
tattcgcacactccctgaggagtgaagagaatctctctcctttttataaacccataaatttagggcgcgctttttcccggcctcccctcgccaccgcatctccatccatctccgccacgtcgcctcctctctctctcgcttttcgtagttatacttcttctctcgttcctagaaatgagcttctcaacatgcgcagagctgtcgcgttgtttcgccgcagcatcggcgaaacctaattccggtcagtcaaacggcacttccacaacaagcctcagttttctcactccaatcggtcgttacggcgccgtttcatcagtatcgaggtcgaataagaccaacagaatagtcgcggaagctactcaaggtcttacttacagggacgccggcgtggacatcgacgccggctccgaactcgtgcgcaggatagcgaagatggcgccagggattgtaggcttcggtggtttattccctctcggtgactcgtacctcgttgctggtaccgatggcgtgggaacgaaggtgatgcttgccttcgaaactggaatccacgatactattgggattgacctggttgcgatgagtgtgaatgacattgttacttcgggggcgaagcctttgtttttccttgattactttgccactgggcaccttgacgtggacgttgctgaaaaggttataaaaggcattgttgatggttgtaagcaatctgattgtgttcttttaggaggagagactgcagagatgcctggtctctataaagaaggtgagtatgatcttagtggctgtgcagttggcattgtgaagaaagattctgtaatcaatgggtcaaacattgttgctggtgatgttattattggtcttccatctagtggagttcactctaatggtttctctcttgtaagaagagtgcttgctcaaagtggtctgtcactgaaagatcaacttcctggcagtgatgttacaattgcagaggcattgatggccccaactgttatctatgttaaacaggtacttgacttagttagtaagggaggggtgaaaggaattgcccacatcaccggtggtggtttcacagataacataccccgagtttttccagaaggccttggagctgtaatatacgacggttcatgggaagtgcctgcagtgtttaagtggcttcaggaggctgggaagatagaagactctgagatgagacggacttttaatatgggcatagggatgatcctggtagttagtccggaggcagctaatagaatactcgagaacagaggcgaaacagagaaattctatcgcattggtgaaattataagcggcaagggagtgacctttagctaattttaattgagtttaatcatgtagtacccttttaatactttcatggaaaatttctgggaatatgagatttgaatggtcagtttatttggagcctaataattttccatacataaatgatgaaatttgcaacaattttgagg

SEQ ID NO: 54715 - protein, 387 aa, Glycine max
  peptide (1)..(387): Ceres Seq. ID no. 15176896
  misc_feature (221)..(387): Pfam Name: AIR synthase related protein, C-terminal domain Pfam Description: AIR synthase related protein, C-terminal domain
  misc_feature (53)..(380): Homolog of NCBI NO: 15888478 NR Description: AGR_C_2111p [Agrobacterium tumefaciens]
  misc_feature (63)..(378): Homolog of NCBI NO: 39996857 NR Description: phosphoribosylformylglycinamidine cyclo-ligase
  misc_feature (60)..(382): Homolog of NCBI NO: 23013851 NR Description: hypothetical protein [Magnetospirillum
  misc_feature (62)..(383): Homolog of NCBI NO: 34499070 NR Description: phosphoribosylformylglycinamidine cyclo-ligase
  misc_feature (59)..(378): Homolog of NCBI NO: 17547342 NR Description: PROBABLE PHOSPHORIBOSYLFORMYLGLYCINAMIDINE
  misc_feature (65)..(383): Homolog of NCBI NO: 23029993 NR Description: hypothetical protein [Microbulbifer degradans
  misc_feature (10)..(343): Homolog of NCBI NO: 541885 NR Description: phosphoribosylformylglycinamidine cyclo-ligase
  misc_feature (63)..(386): Homolog of NCBI NO: 34897250 NR Description: putative 5'-phosphoribosyl-5-aminoimidazole
  misc_feature (10)..(386): Homolog of NCBI NO: 15233161 NR Description: phosphoribosylformylglycinamidine cyclo-ligase
  misc_feature (1)..(387): Homolog of NCBI NO: 1709925 NR Description: Phosphoribosylformylglycinamidine cyclo-ligase, precursor (AIRS) (Phosphoribosyl-aminoimidazole synthetase) (AIR
MSFSTCAELSRCFAAASAKPNSGQSNGTSTTSLSFLTPIGRYGAVSSVSRSNKTNRIVAEATQGLTYRDAGVDIDAGSELVRRIAKMAPGIVGFGGLFPLGDSYLVAGTDGVGTKVMLAFETGIHDTIGIDLVAMSVNDIVTSGAKPLFFLDYFATGHLDVDVAEKVIKGIVDGCKQSDCVLLGGETAEMPGLYKEGEYDLSGCAVGIVKKDSVINGSNIVAGDVIIGLPSSGVHSNGFSLVRRVLAQSGLSLKDQLPGSDVTIAEALMAPTVIYVKQVLDLVSKGGVKGIAHITGGGFTDNIPRVFPEGLGAVIYDGSWEVPAVFKWLQEAGKIEDSEMRRTFNMGIGMILVVSPEAANRILENRGETEKFYRIGEIISGKGVTFS

SEQ ID NO: 54716 - protein, 301 aa, Glycine max
  peptide (1)..(301): Ceres Seq. ID no. 15176897
  misc_feature (135)..(301): Pfam Name: AIR synthase related protein, C-terminal domain Pfam Description: AIR synthase related protein, C-terminal domain
  misc_feature (1)..(294): Homolog of NCBI NO: 15888478 NR Description: AGR_C_2111p [Agrobacterium tumefaciens]
  misc_feature (1)..(292): Homolog of NCBI NO: 39996857 NR Description: phosphoribosylformylglycinamidine cyclo-ligase
  misc_feature (1)..(296): Homolog of NCBI NO: 23013851 NR Description: hypothetical protein [Magnetospirillum
  misc_feature (1)..(297): Homolog of NCBI NO: 34499070 NR Description: phosphoribosylformylglycinamidine cyclo-ligase
  misc_feature (1)..(292): Homolog of NCBI NO: 17547342 NR Description: PROBABLE PHOSPHORIBOSYLFORMYLGLYCINAMIDINE
  misc_feature (1)..(297): Homolog of NCBI NO: 23029993 NR Description: hypothetical protein [Microbulbifer degradans
  misc_feature (1)..(257): Homolog of NCBI NO: 541885 NR Description: phosphoribosylformylglycinamidine cyclo-ligase
  misc_feature (1)..(300): Homolog of NCBI NO: 34897250 NR Description: putative 5'-phosphoribosyl-5-aminoimidazole
  misc_feature (1)..(300): Homolog of NCBI NO: 15233161 NR Description: phosphoribosylformylglycinamidine cyclo-ligase
  misc_feature (1)..(301): Homolog of NCBI NO: 1709925 NR Description: Phosphoribosylformylglycinamidine cyclo-ligase, precursor (AIRS) (Phosphoribosyl-aminoimidazole synthetase) (AIR
MAPGIVGFGGLFPLGDSYLVAGTDGVGTKVMLAFETGIHDTIGIDLVAMSVNDIVTSGAKPLFFLDYFATGHLDVDVAEKVIKGIVDGCKQSDCVLLGGETAEMPGLYKEGEYDLSGCAVGIVKKDSVINGSNIVAGDVIIGLPSSGVHSNGFSLVRRVLAQSGLSLKDQLPGSDVTIAEALMAPTVIYVKQVLDLVSKGGVKGIAHITGGGFTDNIPRVFPEGLGAVIYDGSWEVPAVFKWLQEAGKIEDSEMRRTFNMGIGMILVVSPEAANRILENRGETEKFYRIGEIISGKGVTFS

SEQ ID NO: 54717 - protein, 271 aa, Glycine max
  peptide (1)..(271): Ceres Seq. ID no. 15176898
  misc_feature (105)..(271): Pfam Name: AIR synthase related protein, C-terminal domain Pfam Description: AIR synthase related protein, C-terminal domain
  misc_feature (1)..(264): Homolog of NCBI NO: 15888478 NR Description: AGR_C_2111p [Agrobacterium tumefaciens]
  misc_feature (1)..(262): Homolog of NCBI NO: 39996857 NR Description: phosphoribosylformylglycinamidine cyclo-ligase
  misc_feature (1)..(266): Homolog of NCBI NO: 23013851 NR Description: hypothetical protein [Magnetospirillum
  misc_feature (1)..(267): Homolog of NCBI NO: 34499070 NR Description: phosphoribosylformylglycinamidine cyclo-ligase
  misc_feature (1)..(262): Homolog of NCBI NO: 17547342 NR Description: PROBABLE PHOSPHORIBOSYLFORMYLGLYCINAMIDINE
  misc_feature (1)..(267): Homolog of NCBI NO: 23029993 NR Description: hypothetical protein [Microbulbifer degradans
  misc_feature (1)..(227): Homolog of NCBI NO: 541885 NR Description: phosphoribosylformylglycinamidine cyclo-ligase
  misc_feature (1)..(270): Homolog of NCBI NO: 34897250 NR Description: putative 5'-phosphoribosyl-5-aminoimidazole
  misc_feature (1)..(270): Homolog of NCBI NO: 15233161 NR Description: phosphoribosylformylglycinamidine cyclo-ligase
  misc_feature (1)..(271): Homolog of NCBI NO: 1709925 NR Description: Phosphoribosylformylglycinamidine cyclo-ligase, precursor (AIRS) (Phosphoribosyl-aminoimidazole synthetase) (AIR
MLAFETGIHDTIGIDLVAMSVNDIVTSGAKPLFFLDYFATGHLDVDVAEKVIKGIVDGCKQSDCVLLGGETAEMPGLYKEGEYDLSGCAVGIVKKDSVINGSNIVAGDVIIGLPSSGVHSNGFSLVRRVLAQSGLSLKDQLPGSDVTIAEALMAPTVIYVKQVLDLVSKGGVKGIAHITGGGFTDNIPRVFPEGLGAVIYDGSWEVPAVFKWLQEAGKIEDSEMRRTFNMGIGMILVVSPEAANRILENRGETEKFYRIGEIISGKGVTFS

SEQ ID NO: 54718 - DNA, 1572 bp, Glycine max
  misc_feature (1)..(1572): Ceres Seq. ID no. 15175651
gaacaatatggcccaaaacggcgacactgaggcccaaagcccatcaacccccgaggcccggcccgtcggcggcaccgagttcagctggtgcaaggctgttcccatcggcactggcgtaacggttctgagcctcctcctctcaaaaccgccgcaaatcgctgttgtccaaaatgccctccacaaactccaaaattcccaccctattctccgctccaagatccatctcgatccctccaacaacactttccacttcctcacccctcccactcccaccgtccaaatccaccccttcgatctcgcttcaacggctcacatcatccaatgccaatccgacggccacgatcccttccacgtgctcctcgagcacgagatgaaccaggaggacacgtggcgcaattacgccgccgacgtcgacgtactccacgccgccgtgtatagcatcagccacgaccgcttcgccgtgttcctccgcctccacaccgcttcgtgcgaccgcgcctccgccgtggcgctgctcaacgagctcctccgcttcgtcgccggcggcgacgaggcgagcggggagaaggtaaattctccgatcgaggatctgattcctgaggggaagacgaacaagccgttctgggcgcgtggactggacgtgctcgggtacacgctcaacgcgttcaggttcgcgaatttgagtttcgtcgacgctggctcgccccggagttcgaggataataaggttgcaactgaacgtagctgaaaccgagaacttattagctggatgcaaatcaagagggatcaaactttgtggggcacttgctgcagctggaatgattgctgcatggacctctagatgccttcctgattatcaaagagaaaagtatgctgtagtaacacttgttgattgccgctcacttcttgatccagtccttcccagcaaccatgctggattttaccattctgccgtcctgaacacacatgacgtgtgtggggaaacagaaaccttatgggagttggcaaagaaaagctacacagcctttgtaaatgctatgaactgcaacaagcatttcacagacatgtctgacctgaactacctcatgtgcaaggctattgagaaccccggtttgacgccatcgtcatcacttaggacagccttgatctctgtgtttgaagatcctgtcttcgacgactcggccgaaatgcatggagagattggattggaagactatgtaggttgtgcttctgctcatggtgttggtccatccattgccgtattcgacaccatacggaatggaaagttggattgtgcttgtatatatccatcaccccttcattcaagagagcagattcaaggactagttgatcatatgaagagaatacttgtggaaggttgtaacagtgaaaatcaacaaattgaaccataatccgcttctgaggctgggcaattggttataatttcataatcaaattcataaacttcgttgcctcttcaatttcagtctgtgactctgtgattctccttgctctgttgaatttcccagggccaggtattttaatatgaaggtagaaataaatatattgcatg

SEQ ID NO: 54719 - protein, 469 aa, Glycine max
  peptide (1)..(469): Ceres Seq. ID no. 15175652
  misc_feature (7)..(196): Homolog of NCBI NO: 34908510 NR Description: P0679C12.25 [Oryza sativa (japonica
  misc_feature (92)..(232): Homolog of NCBI NO: 7485998 NR Description: hypothetical protein F22O6.10 - Arabidopsis
  misc_feature (20)..(202): Homolog of NCBI NO: 14334448 NR Description: unknown protein [Arabidopsis thaliana]
  misc_feature (20)..(202): Homolog of NCBI NO: 18409645 NR Description: expressed protein [Arabidopsis thaliana]
  misc_feature (20)..(202): Homolog of NCBI NO: 11357759 NR Description: hypothetical protein F3C22.10 - Arabidopsis
  misc_feature (20)..(202): Homolog of NCBI NO: 7485998 NR Description: hypothetical protein F22O6.10 - Arabidopsis
  misc_feature (36)..(468): Homolog of NCBI NO: 34908510 NR Description: P0679C12.25 [Oryza sativa (japonica
  misc_feature (92)..(462): Homolog of NCBI NO: 14334448 NR Description: unknown protein [Arabidopsis thaliana]
  misc_feature (92)..(462): Homolog of NCBI NO: 18409645 NR Description: expressed protein [Arabidopsis thaliana]
  misc_feature (92)..(462): Homolog of NCBI NO: 11357759 NR Description: hypothetical protein F3C22.10 - Arabidopsis
NNMAQNGDTEAQSPSTPEARPVGGTEFSWCKAVPIGTGVTVLSLLLSKPPQIAVVQNALHKLQNSHPILRSKIHLDPSNNTFHFLTPPTPTVQIHPFDLASTAHIIQCQSDGHDPFHVLLEHEMNQEDTWRNYAADVDVLHAAVYSISHDRFAVFLRLHTASCDRASAVALLNELLRFVAGGDEASGEKVNSPIEDLIPEGKTNKPFWARGLDVLGYTLNAFRFANLSFVDAGSPRSSRIIRLQLNVAETENLLAGCKSRGIKLCGALAAAGMIAAWTSRCLPDYQREKYAVVTLVDCRSLLDPVLPSNHAGFYHSAVLNTHDVCGETETLWELAKKSYTAFVNAMNCNKHFTDMSDLNYLMCKAIENPGLTPSSSLRTALISVFEDPVFDDSAEMHGEIGLEDYVGCASAHGVGPSIAVFDTIRNGKLDCACIYPSPLHSREQIQGLVDHMKRILVEGCNSENQQIEP

SEQ ID NO: 54720 - protein, 467 aa, Glycine max
  peptide (1)..(467): Ceres Seq. ID no. 15175653
  misc_feature (5)..(194): Homolog of NCBI NO: 34908510 NR Description: P0679C12.25 [Oryza sativa (japonica
  misc_feature (90)..(230): Homolog of NCBI NO: 7485998 NR Description: hypothetical protein F22O6.10 - Arabidopsis
  misc_feature (18)..(200): Homolog of NCBI NO: 14334448 NR Description: unknown protein [Arabidopsis thaliana]
  misc_feature (18)..(200): Homolog of NCBI NO: 18409645 NR Description: expressed protein [Arabidopsis thaliana]
  misc_feature (18)..(200): Homolog of NCBI NO: 11357759 NR Description: hypothetical protein F3C22.10 - Arabidopsis
  misc_feature (18)..(200): Homolog of NCBI NO: 7485998 NR Description: hypothetical protein F22O6.10 - Arabidopsis
  misc_feature (34)..(466): Homolog of NCBI NO: 34908510 NR Description: P0679C12.25 [Oryza sativa (japonica
  misc_feature (90)..(460): Homolog of NCBI NO: 14334448 NR Description: unknown protein [Arabidopsis thaliana]
  misc_feature (90)..(460): Homolog of NCBI NO: 18409645 NR Description: expressed protein [Arabidopsis thaliana]
  misc_feature (90)..(460): Homolog of NCBI NO: 11357759 NR Description: hypothetical protein F3C22.10 - Arabidopsis
MAQNGDTEAQSPSTPEARPVGGTEFSWCKAVPIGTGVTVLSLLLSKPPQIAVVQNALHKLQNSHPILRSKIHLDPSNNTFHFLTPPTPTVQIHPFDLASTAHIIQCQSDGHDPFHVLLEHEMNQEDTWRNYAADVDVLHAAVYSISHDRFAVFLRLHTASCDRASAVALLNELLRFVAGGDEASGEKVNSPIEDLIPEGKTNKPFWARGLDVLGYTLNAFRFANLSFVDAGSPRSSRIIRLQLNVAETENLLAGCKSRGIKLCGALAAAGMIAAWTSRCLPDYQREKYAVVTLVDCRSLLDPVLPSNHAGFYHSAVLNTHDVCGETETLWELAKKSYTAFVNAMNCNKHFTDMSDLNYLMCKAIENPGLTPSSSLRTALISVFEDPVFDDSAEMHGEIGLEDYVGCASAHGVGPSIAVFDTIRNGKLDCACIYPSPLHSREQIQGLVDHMKRILVEGCNSENQQIEP

SEQ ID NO: 54721 - protein, 346 aa, Glycine max
  peptide (1)..(346): Ceres Seq. ID no. 15175654
  misc_feature (1)..(73): Homolog of NCBI NO: 34908510 NR Description: P0679C12.25 [Oryza sativa (japonica
  misc_feature (1)..(109): Homolog of NCBI NO: 7485998 NR Description: hypothetical protein F22O6.10 - Arabidopsis
  misc_feature (1)..(79): Homolog of NCBI NO: 14334448 NR Description: unknown protein [Arabidopsis thaliana]
  misc_feature (1)..(79): Homolog of NCBI NO: 18409645 NR Description: expressed protein [Arabidopsis thaliana]
  misc_feature (1)..(79): Homolog of NCBI NO: 11357759 NR Description: hypothetical protein F3C22.10 - Arabidopsis
  misc_feature (1)..(79): Homolog of NCBI NO: 7485998 NR Description: hypothetical protein F22O6.10 - Arabidopsis
  misc_feature (1)..(345): Homolog of NCBI NO: 34908510 NR Description: P0679C12.25 [Oryza sativa (japonica
  misc_feature (1)..(339): Homolog of NCBI NO: 14334448 NR Description: unknown protein [Arabidopsis thaliana]
  misc_feature (1)..(339): Homolog of NCBI NO: 18409645 NR Description: expressed protein [Arabidopsis thaliana]
  misc_feature (1)..(339): Homolog of NCBI NO: 11357759 NR Description: hypothetical protein F3C22.10 - Arabidopsis
MNQEDTWRNYAADVDVLHAAVYSISHDRFAVFLRLHTASCDRASAVALLNELLRFVAGGDEASGEKVNSPIEDLIPEGKTNKPFWARGLDVLGYTLNAFRFANLSFVDAGSPRSSRIIRLQLNVAETENLLAGCKSRGIKLCGALAAAGMIAAWTSRCLPDYQREKYAVVTLVDCRSLLDPVLPSNHAGFYHSAVLNTHDVCGETETLWELAKKSYTAFVNAMNCNKHFTDMSDLNYLMCKAIENPGLTPSSSLRTALISVFEDPVFDDSAEMHGEIGLEDYVGCASAHGVGPSIAVFDTIRNGKLDCACIYPSPLHSREQIQGLVDHMKRILVEGCNSENQQIEP

SEQ ID NO: 54722 - DNA, 1250 bp, Glycine max
  misc_feature (1)..(1250): Ceres Seq. ID no. 14307817
agttatctggaaatggtttctgtgtgaaatataaatttgataaaggcagaatataatgatgttttatttcaagatatgtttcacaaaccgacctaaagaagtgcattgtgcagttagtaaattgaattgagttttcaagttgtttaagaattttgtataaatgaggatctattatttaattacacggattgcatatattatggattcaatgcattttaaattttttcccattcatgtcctctgttaacagaagttctatataaaacttttactgtatcactttcagtcatgcagatcttgtattgagtgctaataaaaagataaccattactggtataaacctttcttattcatgttaattttgcagccttcaatacttccaattcagatcctccgaattgggcagcttatcattcttagtgtaccaggagaattcacaacaatggccgggaggcgtcttcgtgatgcagtgaagacagtgctaactagtgaagaatattttgaatttgatgacattcacattgttatagcagggttaactaatacttattcacagtacatcactacatacgaagagtaccaggtgcaaagatatgagggtgcttctacgctatatggtccacacacactcagtgcatacattcaggagtttaagaaacttgcagaggctctcgtctacggcgaaccagtagaacctggtcctcaacctcctgatctcctggagaagcaaataagcttacttccacctgttgtggtggatgcaaccccccttggtgtaaattttggggatgtttgcactgatgtaccacggaactccaccttcaagagtggtgacttggtgacagcttcgttctggtctgcatgtcctcgtaacgaccttatgactgaaggcacctttgcactggtggaatttctccaagaaaaggatgcttggactcctgcttatgatgatgatgatttctgcctgcgctataagtggtcaaggccttccaaactgagttctaggagcaaagcaaccttggaatggaggataccacagagtgtggctcctggtgtgtacagattaagacactttggagctgcaaagggcttatttggatcaattcatcactttacaggttcatccactgcgtttgtagtagcctaaagggaggcatgttgtttcagccgttactatatttgtgatttgtttttctgaactttagcagaatctattcaatcctaaagaaggatgtttcactatggatcag

SEQ ID NO: 54723 - protein, 264 aa, Glycine max
  peptide (1)..(264): Ceres Seq. ID no. 14307818
  misc_feature (6)..(263): Pfam Name: Neutral/alkaline non-lysosomal ceramidase Pfam Description: Neutral/alkaline non-lysosomal ceramidase
  misc_feature (5)..(242): Homolog of NCBI NO: 16758458 NR Description: N-acylsphingosine amidohydrolase 2 [Rattus
  misc_feature (6)..(263): Homolog of NCBI NO: 2367392 NR Description: random slug cDNA25 protein [Dictyostelium
  misc_feature (5)..(263): Homolog of NCBI NO: 31200435 NR Description: ENSANGP00000018598 [Anopheles gambiae]
  misc_feature (6)..(249): Homolog of NCBI NO: 25333800 NR Description: protein F22G5.28 [imported] - Arabidopsis
  misc_feature (13)..(263): Homolog of NCBI NO: 9759229 NR Description: neutral ceramidase [Arabidopsis thaliana]
  misc_feature (6)..(263): Homolog of NCBI NO: 15982799 NR Description: AT5g58980/k19m22_180 [Arabidopsis thaliana]
  misc_feature (6)..(263): Homolog of NCBI NO: 15237790 NR Description: random slug protein - like [Arabidopsis thaliana]
  misc_feature (13)..(263): Homolog of NCBI NO: 15224424 NR Description: expressed protein [Arabidopsis thaliana]
  misc_feature (6)..(263): Homolog of NCBI NO: 34912830 NR Description: P0501G01.24 [Oryza sativa (japonica
  misc_feature (6)..(263): Homolog of NCBI NO: 15222380 NR Description: hypothetical protein [Arabidopsis thaliana]
MLILQPSILPIQILRIGQLIILSVPGEFTTMAGRRLRDAVKTVLTSEEYFEFDDIHIVIAGLTNTYSQYITTYEEYQVQRYEGASTLYGPHTLSAYIQEFKKLAEALVYGEPVEPGPQPPDLLEKQISLLPPVVVDATPLGVNFGDVCTDVPRNSTFKSGDLVTASFWSACPRNDLMTEGTFALVEFLQEKDAWTPAYDDDDFCLRYKWSRPSKLSSRSKATLEWRIPQSVAPGVYRLRHFGAAKGLFGSIHHFTGSSTAFVVA

SEQ ID NO: 54724 - protein, 234 aa, Glycine max
  peptide (1)..(234): Ceres Seq. ID no. 14307819
  misc_feature (1)..(233): Pfam Name: Neutral/alkaline non-lysosomal ceramidase Pfam Description: Neutral/alkaline non-lysosomal ceramidase
  misc_feature (1)..(212): Homolog of NCBI NO: 16758458 NR Description: N-acylsphingosine amidohydrolase 2 [Rattus
  misc_feature (1)..(233): Homolog of NCBI NO: 2367392 NR Description: random slug cDNA25 protein [Dictyostelium
  misc_feature (1)..(233): Homolog of NCBI NO: 31200435 NR Description: ENSANGP00000018598 [Anopheles gambiae]
  misc_feature (1)..(219): Homolog of NCBI NO: 25333800 NR Description: protein F22G5.28 [imported] - Arabidopsis
  misc_feature (1)..(233): Homolog of NCBI NO: 9759229 NR Description: neutral ceramidase [Arabidopsis thaliana]
  misc_feature (1)..(233): Homolog of NCBI NO: 15982799 NR Description: AT5g58980/k19m22_180 [Arabidopsis thaliana]
  misc_feature (1)..(233): Homolog of NCBI NO: 15237790 NR Description: random slug protein - like [Arabidopsis thaliana]
  misc_feature (1)..(233): Homolog of NCBI NO: 15224424 NR Description: expressed protein [Arabidopsis thaliana]
  misc_feature (1)..(233): Homolog of NCBI NO: 34912830 NR Description: P0501G01.24 [Oryza sativa (japonica
  misc_feature (1)..(233): Homolog of NCBI NO: 15222380 NR Description: hypothetical protein [Arabidopsis thaliana]
MAGRRLRDAVKTVLTSEEYFEFDDIHIVIAGLTNTYSQYITTYEEYQVQRYEGASTLYGPHTLSAYIQEFKKLAEALVYGEPVEPGPQPPDLLEKQISLLPPVVVDATPLGVNFGDVCTDVPRNSTFKSGDLVTASFWSACPRNDLMTEGTFALVEFLQEKDAWTPAYDDDDFCLRYKWSRPSKLSSRSKATLEWRIPQSVAPGVYRLRHFGAAKGLFGSIHHFTGSSTAFVVA

SEQ ID NO: 54725 - DNA, 2311 bp, Glycine max
  misc_feature (1)..(2311): Ceres Seq. ID no. 14313943
aagcgtcgagcctctgttctgttcatttgcatttccatttttcacactctctctgctttcaccatgtggacacttcgtcgagcttctcttcgtctcagtacgagccaaggacttaacgcgggagctacccgtgcttcggctgtcaaattagtgccaatcactgttgaagaaaatgaggctggtatccctcagtctcgtcaaatcactcacagtagatttctgtccgctgacacattttgccgcacgggtcgggtgtccctgaaatttgctgtgggcacgcgtgaactttcctcacaagctggtgctagcagcacgaaagtggatgatgatgatttggagggtgggttgtctgagctggagatacagggaagtaatgatgaatctgatgctgacctgtctgatgaagacgaggatggtggaaaaccagttgatgagatggacttatcagatgctgacccaaccaagaaaaaatcacaaggtagaaggactcaatcggaactattcaaggcaattgcaaatgctcctgggttgtctgttgattctgctctcaataagtgggttgagcatgggaaagaactaagtcggaaggagatcttgttggctgtgcgtgagcttcggagacgtaaaatgtatgggagggctttccagctctttcagtggttagagtcaaacaagaagcttgaatttatggagagtgattatgcttctcaacttgatttgattgccaagttgcgtggcctcccaaaggcagagaaatacattgagagtgttccagaatcttttagaggctagctattataccgaacattactggctaactgtgctagtcagaacaatttgattgcaacagagaaaatattcaacaaaatgaaggacttggatttaccacttacagcatttgcttgtaaccagttgctgcttttgtataagaagctggacaagaagaaaatagctgatgttttactgctgatggaaaaagagaatgtcaaaccttctctttttacttacagaatcttaatagactcaaagggccagtccaatgatattgctggaatggagcaagtgtttgagacaatgaaggaagaaggctttgaaccagacatccaaatacaggcactcttggctaggcattacacctcatctgggcttaaagaaaaagctgaagctatgttgaaggagatggaaggtgaaaacttgaaagagaatcagtgggtatgtgcaactttgctccgcctttatgcaaacctgggaaaggctgatgaagtggagagaatttggaaggtctgtgaatcaaaacctcgagttgaggactgcctggctgcagttgaagcctggggaaagttaaataaaattgaagaagcagaggcagtttttgagatggtgtcaaagaaatggaaacttaattccaagaattactcagttcttctgaagatttatgcaaataataagatgctaacgaagggtaaggaacttgtcaagctaatggctgatagtggggtgaggataggcccattaacatgggatgcacttgtgaaactgtatatccaagctggggaagttgagaaggcagactctattttgcataaggcaatccaacagaatcagctgcagccaatgtttaccacctatttggctattttagagcagtatgcaaagaggggtgacgtccataactcggagaagattttccttaaaatgagacaagcaggttatacgtcccgaataagtcagttccaagttctaatacaggcatatgtaaacgccaaggttccagcgtatggaatcagagagaggattaaagctgataacctatttcccaacaaaacgttggctaaccagttggctctagttgatgcatttaggaaaaatgcagtttccgatttgcttgattgaggcatatttagtattctgcaagggttgtttcctacgctttccatgcaactattattattagttgaatagtagattgcacatttagtttgaatgaatgttgtcttgcactgctatctataagttagatacacttttgccttttaagcgcattatattaatgcttaaatactgcttttatgattttattatgcccgcttgtttttagttgtaaagctttctttttttaaaatttagaggctacaatcttcttcccgataggataacaaaatagtagataaatgttgttttgctccccttccctcttgagtgaaataaaattaatgctttatgtagtatcttagtatctggtcaaaatgaaaagaaaatgtagtatcttttcatcttcaaactaaataaattttactataaagttttcaac

SEQ ID NO: 54726 - protein, 341 aa, Glycine max
  peptide (1)..(341): Ceres Seq. ID no. 14313944
  misc_feature (252)..(286): Pfam Name: PPR repeat Pfam Description: PPR repeat
  misc_feature (1)..(332): Homolog of NCBI NO: 34905294 NR Description: putative DNA-binding protein
  misc_feature (1)..(340): Homolog of NCBI NO: 15235508 NR Description: pentatricopeptide (PPR) repeat-containing protein
  misc_feature (1)..(319): Homolog of NCBI NO: 15219808 NR Description: pentatricopeptide (PPR) repeat-containing protein
  misc_feature (1)..(339): Homolog of NCBI NO: 34394024 NR Description: putative DNA-binding protein
  misc_feature (1)..(339): Homolog of NCBI NO: 34900334 NR Description: P0592C06.16 [Oryza sativa (japonica
  misc_feature (1)..(341): Homolog of NCBI NO: 22331104 NR Description: DNA-binding protein, putative [Arabidopsis
  misc_feature (1)..(341): Homolog of NCBI NO: 34903362 NR Description: unnamed protein product [Oryza sativa (japonica
  misc_feature (1)..(341): Homolog of NCBI NO: 6958202 NR Description: DNA-binding protein [Triticum aestivum]
  misc_feature (1)..(341): Homolog of NCBI NO: 15218196 NR Description: DNA-binding protein, putative [Arabidopsis
  misc_feature (1)..(341): Homolog of NCBI NO: 15220095 NR Description: DNA binding protein, putative [Arabidopsis
MKDLDLPLTAFACNQLLLLYKKLDKKKIADVLLLMEKENVKPSLFTYRILIDSKGQSNDIAGMEQVFETMKEEGFEPDIQIQALLARHYTSSGLKEKAEAMLKEMEGENLKENQWVCATLLRLYANLGKADEVERIWKVCESKPRVEDCLAAVEAWGKLNKIEEAEAVFEMVSKKWKLNSKNYSVLLKIYANNKMLTKGKELVKLMADSGVRIGPLTWDALVKLYIQAGEVEKADSILHKAIQQNQLQPMFTTYLAILEQYAKRGDVHNSEKIFLKMRQAGYTSRISQFQVLIQAYVNAKVPAYGIRERIKADNLFPNKTLANQLALVDAFRKNAVSDLLD

SEQ ID NO: 54727 - protein, 307 aa, Glycine max
  peptide (1)..(307): Ceres Seq. ID no. 14313945
  misc_feature (218)..(252): Pfam Name: PPR repeat Pfam Description: PPR repeat
  misc_feature (1)..(298): Homolog of NCBI NO: 34905294 NR Description: putative DNA-binding protein
  misc_feature (1)..(306): Homolog of NCBI NO: 15235508 NR Description: pentatricopeptide (PPR) repeat-containing protein
  misc_feature (1)..(285): Homolog of NCBI NO: 15219808 NR Description: pentatricopeptide (PPR) repeat-containing protein
  misc_feature (1)..(305): Homolog of NCBI NO: 34394024 NR Description: putative DNA-binding protein
  misc_feature (1)..(305): Homolog of NCBI NO: 34900334 NR Description: P0592C06.16 [Oryza sativa (japonica
  misc_feature (1)..(307): Homolog of NCBI NO: 22331104 NR Description: DNA-binding protein, putative [Arabidopsis
  misc_feature (1)..(307): Homolog of NCBI NO: 34903362 NR Description: unnamed protein product [Oryza sativa (japonica
  misc_feature (1)..(307): Homolog of NCBI NO: 6958202 NR Description: DNA-binding protein [Triticum aestivum]
  misc_feature (1)..(307): Homolog of NCBI NO: 15218196 NR Description: DNA-binding protein, putative [Arabidopsis
  misc_feature (1)..(307): Homolog of NCBI NO: 15220095 NR Description: DNA binding protein, putative [Arabidopsis
MEKENVKPSLFTYRILIDSKGQSNDIAGMEQVFETMKEEGFEPDIQIQALLARHYTSSGLKEKAEAMLKEMEGENLKENQWVCATLLRLYANLGKADEVERIWKVCESKPRVEDCLAAVEAWGKLNKIEEAEAVFEMVSKKWKLNSKNYSVLLKIYANNKMLTKGKELVKLMADSGVRIGPLTWDALVKLYIQAGEVEKADSILHKAIQQNQLQPMFTTYLAILEQYAKRGDVHNSEKIFLKMRQAGYTSRISQFQVLIQAYVNAKVPAYGIRERIKADNLFPNKTLANQLALVDAFRKNAVSDLLD

SEQ ID NO: 54728 - protein, 279 aa, Glycine max
  peptide (1)..(279): Ceres Seq. ID no. 14313946
  misc_feature (190)..(224): Pfam Name: PPR repeat Pfam Description: PPR repeat
  misc_feature (1)..(270): Homolog of NCBI NO: 34905294 NR Description: putative DNA-binding protein
  misc_feature (1)..(278): Homolog of NCBI NO: 15235508 NR Description: pentatricopeptide (PPR) repeat-containing protein
  misc_feature (1)..(257): Homolog of NCBI NO: 15219808 NR Description: pentatricopeptide (PPR) repeat-containing protein
  misc_feature (1)..(277): Homolog of NCBI NO: 34394024 NR Description: putative DNA-binding protein
  misc_feature (1)..(277): Homolog of NCBI NO: 34900334 NR Description: P0592C06.16 [Oryza sativa (japonica
  misc_feature (1)..(279): Homolog of NCBI NO: 22331104 NR Description: DNA-binding protein, putative [Arabidopsis
  misc_feature (1)..(279): Homolog of NCBI NO: 34903362 NR Description: unnamed protein product [Oryza sativa (japonica
  misc_feature (1)..(279): Homolog of NCBI NO: 6958202 NR Description: DNA-binding protein [Triticum aestivum]
  misc_feature (1)..(279): Homolog of NCBI NO: 15218196 NR Description: DNA-binding protein, putative [Arabidopsis
  misc_feature (1)..(279): Homolog of NCBI NO: 15220095 NR Description: DNA binding protein, putative [Arabidopsis
MEQVFETMKEEGFEPDIQIQALLARHYTSSGLKEKAEAMLKEMEGENLKENQWVCATLLRLYANLGKADEVERIWKVCESKPRVEDCLAAVEAWGKLNKIEEAEAVFEMVSKKWKLNSKNYSVLLKIYANNKMLTKGKELVKLMADSGVRIGPLTWDALVKLYIQAGEVEKADSILHKAIQQNQLQPMFTTYLAILEQYAKRGDVHNSEKIFLKMRQAGYTSRISQFQVLIQAYVNAKVPAYGIRERIKADNLFPNKTLANQLALVDAFRKNAVSDLLD

SEQ ID NO: 54729 - DNA, 984 bp, Glycine max
  misc_feature (1)..(984): Ceres Seq. ID no. 12612005
agaccaaacaaaacactgcacctggttaaggatagagtatagcatggcacagtctagttgcaaaactttggtgcagtggttggtagcagcattgctcattgccttgttgggtggtgcacaagctgttgcaatatgtaacatagactcaagtcaattaaacttgtgtcgtgctgcagttactggtcaaaaccctccaccaccggatgagaaatgttgtgcagttgttcgccaagccaatttgcgttgcctctgcagttacaagtctaccctaccttcatttggaataaaccccaaaaatgctttggccttgcctggtaaatgtggtctgcaatggcctcctaattgttgaggtaatcatttgtagcttcaatacactttgaacatattaattactttcaggggtgtttatgaagaagttattaaatggtcctggactaccacttttctttgatatcgattaatctttatgtaacatgtatttaagattttaatttaagagaaaaagaattaataaaacttaattaaacatcttcaataatatatatatatatagactaagttgaacaattcggagcataactcaaactcattttctacatgcattggttctagtttcttaaacccggacctgccaaaagtcctttcaagcagggttgtgttagtgagacaagactcatgtgaacacccctaattacttttgcagttttaattatattaattttacgagataatgtttcatttttacagtgtagtgaagcagtcaatgaaggtcacggactcatggtcattacaagcaccttagtcttcaatattgctttcaggtgtttcattaacactgaagataaattttaagacagcatttgatatctctcgaataacggtgcagtttattttaatcagtatgtaatgtccaaaagtttgctagcagatgtgtacgtgtattagtgttgatgttgcagaggtattgaagatatatcatactct

SEQ ID NO: 54730 - protein, 115 aa, Glycine max
  peptide (1)..(115): Ceres Seq. ID no. 12612006
  misc_feature (45)..(115): Pfam Name: Protease inhibitor/seed storage/LTP family Pfam Description: Protease inhibitor/seed storage/LTP family
  misc_feature (18)..(115): Homolog of NCBI NO: 15238989 NR Description: putative protein
  misc_feature (15)..(115): Homolog of NCBI NO: 34915244 NR Description: P0045F02.11 [Oryza sativa (japonica
  misc_feature (18)..(115): Homolog of NCBI NO: 21553364 NR Description: unknown [Arabidopsis thaliana]
  misc_feature (23)..(115): Homolog of NCBI NO: 18422920 NR Description: Expressed protein
  misc_feature (27)..(115): Homolog of NCBI NO: 30696602 NR Description: protease inhibitor/seed storage/lipid transfer
  misc_feature (27)..(115): Homolog of NCBI NO: 9758178 NR Description: gene_id:MTE17.17~unknown protein [Arabidopsis
  misc_feature (15)..(115): Homolog of NCBI NO: 30696597 NR Description: protease inhibitor/seed storage/lipid transfer
  misc_feature (15)..(115): Homolog of NCBI NO: 9758173 NR Description: gene_id:MTE17.12~unknown protein [Arabidopsis
  misc_feature (15)..(115): Homolog of NCBI NO: 18423748 NR Description: expressed protein
  misc_feature (15)..(115): Homolog of NCBI NO: 2598597 NR Description: MtN5 [Medicago truncatula]
DQTKHCTWLRIEYSMAQSSCKTLVQWLVAALLIALLGGAQAVAICNIDSSQLNLCRAAVTGQNPPPPDEKCCAVVRQANLRCLCSYKSTLPSFGINPKNALALPGKCGLQWPPNC

SEQ ID NO: 54731 - protein, 101 aa, Glycine max
  peptide (1)..(101): Ceres Seq. ID no. 12612007
  misc_feature (31)..(101): Pfam Name: Protease inhibitor/seed storage/LTP family Pfam Description: Protease inhibitor/seed storage/LTP family
  misc_feature (4)..(101): Homolog of NCBI NO: 15238989 NR Description: putative protein
  misc_feature (1)..(101): Homolog of NCBI NO: 34915244 NR Description: P0045F02.11 [Oryza sativa (japonica
  misc_feature (4)..(101): Homolog of NCBI NO: 21553364 NR Description: unknown [Arabidopsis thaliana]
  misc_feature (9)..(101): Homolog of NCBI NO: 18422920 NR Description: Expressed protein
  misc_feature (13)..(101): Homolog of NCBI NO: 30696602 NR Description: protease inhibitor/seed storage/lipid transfer
  misc_feature (13)..(101): Homolog of NCBI NO: 9758178 NR Description: gene_id:MTE17.17~unknown protein [Arabidopsis
  misc_feature (1)..(101): Homolog of NCBI NO: 30696597 NR Description: protease inhibitor/seed storage/lipid transfer
  misc_feature (1)..(101): Homolog of NCBI NO: 9758173 NR Description: gene_id:MTE17.12~unknown protein [Arabidopsis
  misc_feature (1)..(101): Homolog of NCBI NO: 18423748 NR Description: expressed protein
  misc_feature (1)..(101): Homolog of NCBI NO: 2598597 NR Description: MtN5 [Medicago truncatula]
MAQSSCKTLVQWLVAALLIALLGGAQAVAICNIDSSQLNLCRAAVTGQNPPPPDEKCCAVVRQANLRCLCSYKSTLPSFGINPKNALALPGKCGLQWPPNC

SEQ ID NO: 54732 - DNA, 1484 bp, Glycine max
  misc_feature (1)..(1484): Ceres Seq. ID no. 14307831
aaattcttaagcgttcacacaagcttttcacatggaaatcggctcccccgcattccttaccctcgaagactattcttccttcttcttccctgacatggatcccattcccaattccaatgtcaacaagcgtcgtgcaaacaacgaccagttcgacttaaatgactccgcattcagccacctcctcaattccatcatggatcctaaccatttccaacaccaatccaaaccaatccaattcgactcctccccgaccaagagagctcgccgtgacctcctcgttctcgaagacagccacctcaaccccgcctcggccccgcaacagcagcgccgtctctgggtcaaggaccgctccaaggactggtggcagcggtgcaacagcccggacttccccgaagaggaattccggcgccacttccgcatgagcaaggccaccttcgacatgatctgccagcacctggactccgccgtcaccaagaagaacaccatgctccgagaagccatcccggtccggcagcgcgtggcggtgtgcatttggcgcctcgccaccggcgaccccctccgcgaagtttcgaagcgcttcggcttgggaatctccacgtgtcacaagctggttctggaggtctgctccgccatcaaaagcgttctgatgcccaagttcctccactggccaaacgaagccgaaatgaaacccatcaccgaaaaattcgagtctctctccggaatccccaacgtgggaggctcaatgtacaccactcacattcccatcattgcaccaaaatccaacgtcaacgcttacttcaacaagcgccacacagaaagaaaccagaagacatgttactctataaccgtccagggcgtggttgatcccaaaggtatttttagcgatgtttgtataggttggcctgggtctctctcagacgatcaagtgttggagaaaagcgcgttgtatcagagagccactatgggaaatttgaaggacgtgtgggtggtgggaaactcgggacaccctctgatggagggtgttttggttccttacactcatcagaatcttacttggacgcagcacgcgtttaatcagaaggttggggagattcagagcattgctaaggacgctttcgccaggctcaaagggaggtggtcttgcttgcagaagaggactgaagtcaagcttgaggacttgcccgtgcttcttggggcctgctgtgttttgcataatatttgtgagatgagggatgaggaaatgaagcctcagtggaactttgacatctttgatgatcagatgctgccccagaataataacgttcgctctaatgcttccgagcaagccagagatcagatagcgcactacttgttgcaccatggccgtgcagggactaattttttctagacttcttgggatatcacactttctcattaattcttttggctatgccttattattatagtcacttgcattataataacattctcatcatctacttctc

SEQ ID NO: 54733 - protein, 451 aa, Glycine max
  peptide (1)..(451): Ceres Seq. ID no. 14307832
  misc_feature (115)..(406): Homolog of NCBI NO: 25553597 NR Description: OJ1656_E11.28 [Oryza sativa (japonica
  misc_feature (110)..(396): Homolog of NCBI NO: 18412695 NR Description: expressed protein [Arabidopsis thaliana]
  misc_feature (109)..(444): Homolog of NCBI NO: 34908114 NR Description: P0031D11.14 [Oryza sativa (japonica
  misc_feature (106)..(440): Homolog of NCBI NO: 15233248 NR Description: expressed protein [Arabidopsis thaliana]
  misc_feature (99)..(451): Homolog of NCBI NO: 34906342 NR Description: unnamed protein product [Oryza sativa (japonica
  misc_feature (93)..(448): Homolog of NCBI NO: 21592524 NR Description: unknown [Arabidopsis thaliana]
  misc_feature (93)..(448): Homolog of NCBI NO: 30688449 NR Description: expressed protein [Arabidopsis thaliana]
  misc_feature (93)..(448): Homolog of NCBI NO: 7452044 NR Description: hypothetical protein F27B13.20 - Arabidopsis
  misc_feature (94)..(451): Homolog of NCBI NO: 21902022 NR Description: B1097D05.23 [Oryza sativa (japonica
  misc_feature (97)..(450): Homolog of NCBI NO: 15239835 NR Description: expressed protein [Arabidopsis thaliana]
MEIGSPAFLTLEDYSSFFFPDMDPIPNSNVNKRRANNDQFDLNDSAFSHLLNSIMDPNHFQHQSKPIQFDSSPTKRARRDLLVLEDSHLNPASAPQQQRRLWVKDRSKDWWQRCNSPDFPEEEFRRHFRMSKATFDMICQHLDSAVTKKNTMLREAIPVRQRVAVCIWRLATGDPLREVSKRFGLGISTCHKLVLEVCSAIKSVLMPKFLHWPNEAEMKPITEKFESLSGIPNVGGSMYTTHIPIIAPKSNVNAYFNKRHTERNQKTCYSITVQGVVDPKGIFSDVCIGWPGSLSDDQVLEKSALYQRATMGNLKDVWVVGNSGHPLMEGVLVPYTHQNLTWTQHAFNQKVGEIQSIAKDAFARLKGRWSCLQKRTEVKLEDLPVLLGACCVLHNICEMRDEEMKPQWNFDIFDDQMLPQNNNVRSNASEQARDQIAHYLLHHGRAGTNFF

SEQ ID NO: 54734 - protein, 430 aa, Glycine max
  peptide (1)..(430): Ceres Seq. ID no. 14307833
  misc_feature (94)..(385): Homolog of NCBI NO: 25553597 NR Description: OJ1656_E11.28 [Oryza sativa (japonica
  misc_feature (89)..(375): Homolog of NCBI NO: 18412695 NR Description: expressed protein [Arabidopsis thaliana]
  misc_feature (88)..(423): Homolog of NCBI NO: 34908114 NR Description: P0031D11.14 [Oryza sativa (japonica
  misc_feature (85)..(419): Homolog of NCBI NO: 15233248 NR Description: expressed protein [Arabidopsis thaliana]
  misc_feature (78)..(430): Homolog of NCBI NO: 34906342 NR Description: unnamed protein product [Oryza sativa (japonica
  misc_feature (72)..(427): Homolog of NCBI NO: 30688449 NR Description: expressed protein [Arabidopsis thaliana]
  misc_feature (72)..(427): Homolog of NCBI NO: 21592524 NR Description: unknown [Arabidopsis thaliana]
  misc_feature (72)..(427): Homolog of NCBI NO: 7452044 NR Description: hypothetical protein F27B13.20 - Arabidopsis
  misc_feature (73)..(430): Homolog of NCBI NO: 21902022 NR Description: B1097D05.23 [Oryza sativa (japonica
  misc_feature (76)..(429): Homolog of NCBI NO: 15239835 NR Description: expressed protein [Arabidopsis thaliana]
MDPIPNSNVNKRRANNDQFDLNDSAFSHLLNSIMDPNHFQHQSKPIQFDSSPTKRARRDLLVLEDSHLNPASAPQQQRRLWVKDRSKDWWQRCNSPDFPEEEFRRHFRMSKATFDMICQHLDSAVTKKNTMLREAIPVRQRVAVCIWRLATGDPLREVSKRFGLGISTCHKLVLEVCSAIKSVLMPKFLHWPNEAEMKPITEKFESLSGIPNVGGSMYTTHIPIIAPKSNVNAYFNKRHTERNQKTCYSITVQGVVDPKGIFSDVCIGWPGSLSDDQVLEKSALYQRATMGNLKDVWVVGNSGHPLMEGVLVPYTHQNLTWTQHAFNQKVGEIQSIAKDAFARLKGRWSCLQKRTEVKLEDLPVLLGACCVLHNICEMRDEEMKPQWNFDIFDDQMLPQNNNVRSNASEQARDQIAHYLLHHGRAGTNFF

SEQ ID NO: 54735 - protein, 397 aa, Glycine max
  peptide (1)..(397): Ceres Seq. ID no. 14307834
  misc_feature (61)..(352): Homolog of NCBI NO: 25553597 NR Description: OJ1656_E11.28 [Oryza sativa (japonica
  misc_feature (56)..(342): Homolog of NCBI NO: 18412695 NR Description: expressed protein [Arabidopsis thaliana]
  misc_feature (55)..(390): Homolog of NCBI NO: 34908114 NR Description: P0031D11.14 [Oryza sativa (japonica
  misc_feature (52)..(386): Homolog of NCBI NO: 15233248 NR Description: expressed protein [Arabidopsis thaliana]
  misc_feature (45)..(397): Homolog of NCBI NO: 34906342 NR Description: unnamed protein product [Oryza sativa (japonica
  misc_feature (39)..(394): Homolog of NCBI NO: 21592524 NR Description: unknown [Arabidopsis thaliana]
  misc_feature (39)..(394): Homolog of NCBI NO: 30688449 NR Description: expressed protein [Arabidopsis thaliana]
  misc_feature (39)..(394): Homolog of NCBI NO: 7452044 NR Description: hypothetical protein F27B13.20 - Arabidopsis
  misc_feature (40)..(397): Homolog of NCBI NO: 21902022 NR Description: B1097D05.23 [Oryza sativa (japonica
  misc_feature (43)..(396): Homolog of NCBI NO: 15239835 NR Description: expressed protein [Arabidopsis thaliana]
MDPNHFQHQSKPIQFDSSPTKRARRDLLVLEDSHLNPASAPQQQRRLWVKDRSKDWWQRCNSPDFPEEEFRRHFRMSKATFDMICQHLDSAVTKKNTMLREAIPVRQRVAVCIWRLATGDPLREVSKRFGLGISTCHKLVLEVCSAIKSVLMPKFLHWPNEAEMKPITEKFESLSGIPNVGGSMYTTHIPIIAPKSNVNAYFNKRHTERNQKTCYSITVQGVVDPKGIFSDVCIGWPGSLSDDQVLEKSALYQRATMGNLKDVWVVGNSGHPLMEGVLVPYTHQNLTWTQHAFNQKVGEIQSIAKDAFARLKGRWSCLQKRTEVKLEDLPVLLGACCVLHNICEMRDEEMKPQWNFDIFDDQMLPQNNNVRSNASEQARDQIAHYLLHHGRAGTNFF

SEQ ID NO: 54736 - DNA, 1065 bp, Glycine max
  misc_feature (1)..(1065): Ceres Seq. ID no. 15178201
ggtgagtgagagtccgaatcctgaaacgctgaacagttgattgttggtagccatggctgcagcagccaccgcgaaaccgcttctgtcactgtggtttatgcttctgctaccgtcgtttcttcggatcgccgtcgcttaccgacccggcgacatcgttcccatgagctgcatgggtcaataccactcctcgcgaaccgtgtggcaggacctcattggccgccactgccccatcttcgccgtgaatcgcgaggtgttgatgcccatacccaagcccacgggttacactggtgctgatgcttataaaatattgtttcaagttggaagggaaaagtttttaatcccgtggcttcttgtggtgaatcggaaaagtacagaggttccaatgatcgaagtagatctgaggtattcaggaaatgatttgcatggtgtcacagctaaagttgtggatatgcctcatcactatgttgaagttcatcctgagattagtaaacaattctgggattctcagcattggccaaagcatatactcgtccgatatacatggaaagaacattcagagatagatgtaacttcaggattttttgttctgtttggttcagggctcatgttgtctttcatcctttcaatctatgtattgcaatcgtcacgtgacaaattggaaagatttgtaagggaaacagttgtagaaagcagtgtgcctggcgaggtggtagcaaaggttgaatgatgcatctctgatgtcaatgatgcaatgtatacattgtaatattgtattcgtgaattgacaaaatcagttttgttttggaggagggggagaaggggatgttgttcttgcatatacaaagctatgaaccagttgtttcttttcatgatgaaggaagtgacttaggtgggtgagttggagtgcattaatttatcaggaccaactgtggagtgagaagctgtaaaagttgagagattgagtgtattaattcatagggaaggctggatttgtaactacattaggttaaatacttgaaaagctatacaagaagaataaatcaaagtgtagggtattgatttggc

SEQ ID NO: 54737 - protein, 224 aa, Glycine max
  peptide (1)..(224): Ceres Seq. ID no. 15178202
  misc_feature (37)..(214): Homolog of NCBI NO: 11280696 NR Description: hypothetical protein F26O13.250 - Arabidopsis
  misc_feature (1)..(214): Homolog of NCBI NO: 21617957 NR Description: unknown [Arabidopsis thaliana]
  misc_feature (1)..(214): Homolog of NCBI NO: 18409385 NR Description: expressed protein [Arabidopsis thaliana]
MAAAATAKPLLSLWFMLLLPSFLRIAVAYRPGDIVPMSCMGQYHSSRTVWQDLIGRHCPIFAVNREVLMPIPKPTGYTGADAYKILFQVGREKFLIPWLLVVNRKSTEVPMIEVDLRYSGNDLHGVTAKVVDMPHHYVEVHPEISKQFWDSQHWPKHILVRYTWKEHSEIDVTSGFFVLFGSGLMLSFILSIYVLQSSRDKLERFVRETVVESSVPGEVVAKVE

SEQ ID NO: 54738 - protein, 209 aa, Glycine max
  peptide (1)..(209): Ceres Seq. ID no. 15178203
  misc_feature (22)..(199): Homolog of NCBI NO: 11280696 NR Description: hypothetical protein F26O13.250 - Arabidopsis
  misc_feature (1)..(199): Homolog of NCBI NO: 21617957 NR Description: unknown [Arabidopsis thaliana]
  misc_feature (1)..(199): Homolog of NCBI NO: 18409385 NR Description: expressed protein [Arabidopsis thaliana]
MLLLPSFLRIAVAYRPGDIVPMSCMGQYHSSRTVWQDLIGRHCPIFAVNREVLMPIPKPTGYTGADAYKILFQVGREKFLIPWLLVVNRKSTEVPMIEVDLRYSGNDLHGVTAKVVDMPHHYVEVHPEISKQFWDSQHWPKHILVRYTWKEHSEIDVTSGFFVLFGSGLMLSFILSIYVLQSSRDKLERFVRETVVESSVPGEVVAKVE

SEQ ID NO: 54739 - protein, 188 aa, Glycine max
  peptide (1)..(188): Ceres Seq. ID no. 15178204
  misc_feature (1)..(178): Homolog of NCBI NO: 11280696 NR Description: hypothetical protein F26O13.250 - Arabidopsis
  misc_feature (1)..(178): Homolog of NCBI NO: 21617957 NR Description: unknown [Arabidopsis thaliana]
  misc_feature (1)..(178): Homolog of NCBI NO: 18409385 NR Description: expressed protein [Arabidopsis thaliana]
MSCMGQYHSSRTVWQDLIGRHCPIFAVNREVLMPIPKPTGYTGADAYKILFQVGREKFLIPWLLVVNRKSTEVPMIEVDLRYSGNDLHGVTAKVVDMPHHYVEVHPEISKQFWDSQHWPKHILVRYTWKEHSEIDVTSGFFVLFGSGLMLSFILSIYVLQSSRDKLERFVRETVVESSVPGEVVAKVE

SEQ ID NO: 54740 - protein, 185 aa, Glycine max
  peptide (1)..(185): Ceres Seq. ID no. 15178205
  misc_feature (1)..(175): Homolog of NCBI NO: 11280696 NR Description: hypothetical protein F26O13.250 - Arabidopsis
  misc_feature (1)..(175): Homolog of NCBI NO: 21617957 NR Description: unknown [Arabidopsis thaliana]
  misc_feature (1)..(175): Homolog of NCBI NO: 18409385 NR Description: expressed protein [Arabidopsis thaliana]
MGQYHSSRTVWQDLIGRHCPIFAVNREVLMPIPKPTGYTGADAYKILFQVGREKFLIPWLLVVNRKSTEVPMIEVDLRYSGNDLHGVTAKVVDMPHHYVEVHPEISKQFWDSQHWPKHILVRYTWKEHSEIDVTSGFFVLFGSGLMLSFILSIYVLQSSRDKLERFVRETVVESSVPGEVVAKVE

SEQ ID NO: 54741 - DNA, 1130 bp, Glycine max
  misc_feature (1)..(1130): Ceres Seq. ID no. 14307760
gtttagttctctcttctctctctctcaaacctgaattcggttgtgatataaacctgcgttgcgctaaacgacaccgttttcactgtctctgagaatggaggcactaagtcgctttgtggaagaaatattcgaggatttccagggccgaagagccggcatcatcaaagcccttaccaccgatgttgaagatttctacagccaatgtgatcctgagaaggagaatttgtgcttatatggatttcctaatgagcaatgggaggtaaatttacccgttgaagaagttcctccagagcttcctgagcctgtcctaggcattaactttgctagggatggcatgctggaaaaagactggttatcattagttgctgttcatagtgatacatggttacttgcccttgccttttattttggagccagatttggatttgataaaactgacaggaaacgactattcggtatgatcaatgaactaccaacaatatttgaagttgttactggtgaagcaaagaaacaagttaaagagaagtcttcggtttcaaacaacagtggcaacaaatctaagtctaactctcaagcgcaggcttccgaaacccagggcagacagtcaaaggcattacaaacaaaagatgaggatgaagaactagaagagcaagataacgatgaacatggagataccttgtgtggggcatgtggtgagaattatggtactgatgaattctggatttgctgtgacatctgtgagaagtggttccatggcaaatgtgtgaagatcacccctgctagagcagagcttatcaagcaatacaagtgcccatcatgcagtaacaagagagctcgctaagcaaatttccatcagggacaataaaccatttgagtcttaacgaatctgattaatattttttttttctagatgtagctgatggatagtttttatgtttgacacatgtagatttcttgtctttctgtgggatttatgctgtgttggttgtctgggggaagttcattctttttccaagccttgtcctagctatggatccacatcggcataagcttcatatgaatggggttgaaaccataatctcctggccaccttaatactatggaaatgaaagtacttcgacatttgcacc

SEQ ID NO: 54742 - protein, 248 aa, Glycine max
  peptide (1)..(248): Ceres Seq. ID no. 14307761
  misc_feature (195)..(245): Pfam Name: PHD-finger Pfam Description: PHD-finger
  misc_feature (1)..(116): Homolog of NCBI NO: 34896004 NR Description: Similar to Oryza sativa nucleic acid binding
  misc_feature (4)..(248): Homolog of NCBI NO: 15226967 NR Description: PHD-type zinc finger protein -related
  misc_feature (5)..(248): Homolog of NCBI NO: 34907474 NR Description: nucleic acid binding protein
  misc_feature (6)..(243): Homolog of NCBI NO: 34394182 NR Description: putative nucleic acid binding protein
  misc_feature (6)..(243): Homolog of NCBI NO: 14192880 NR Description: Putative nucleic acid binding protein [Oryza
  misc_feature (6)..(248): Homolog of NCBI NO: 7488751 NR Description: probable zinc finger protein - alfalfa (fragment)
  misc_feature (6)..(248): Homolog of NCBI NO: 7486722 NR Description: hypothetical protein F9D12.13 - Arabidopsis
  misc_feature (6)..(248): Homolog of NCBI NO: 30687843 NR Description: zinc finger protein - like [Arabidopsis thaliana]
  misc_feature (6)..(248): Homolog of NCBI NO: 15229157 NR Description: nucleic acid binding protein-related [Arabidopsis
  misc_feature (6)..(248): Homolog of NCBI NO: 15239624 NR Description: nucleic acid binding protein - like [Arabidopsis
MEALSRFVEEIFEDFQGRRAGIIKALTTDVEDFYSQCDPEKENLCLYGFPNEQWEVNLPVEEVPPELPEPVLGINFARDGMLEKDWLSLVAVHSDTWLLALAFYFGARFGFDKTDRKRLFGMINELPTIFEVVTGEAKKQVKEKSSVSNNSGNKSKSNSQAQASETQGRQSKALQTKDEDEELEEQDNDEHGDTLCGACGENYGTDEFWICCDICEKWFHGKCVKITPARAELIKQYKCPSCSNKRAR

SEQ ID NO: 54743 - protein, 168 aa, Glycine max
  peptide (1)..(168): Ceres Seq. ID no. 14307762
  misc_feature (115)..(165): Pfam Name: PHD-finger Pfam Description: PHD-finger
  misc_feature (1)..(36): Homolog of NCBI NO: 34896004 NR Description: Similar to Oryza sativa nucleic acid binding
  misc_feature (1)..(168): Homolog of NCBI NO: 15226967 NR Description: PHD-type zinc finger protein -related
  misc_feature (1)..(168): Homolog of NCBI NO: 34907474 NR Description: nucleic acid binding protein
  misc_feature (1)..(163): Homolog of NCBI NO: 34394182 NR Description: putative nucleic acid binding protein
  misc_feature (1)..(163): Homolog of NCBI NO: 14192880 NR Description: Putative nucleic acid binding protein [Oryza
  misc_feature (1)..(168): Homolog of NCBI NO: 7488751 NR Description: probable zinc finger protein - alfalfa (fragment)
  misc_feature (1)..(168): Homolog of NCBI NO: 7486722 NR Description: hypothetical protein F9D12.13 - Arabidopsis
  misc_feature (1)..(168): Homolog of NCBI NO: 30687843 NR Description: zinc finger protein - like [Arabidopsis thaliana]
  misc_feature (1)..(168): Homolog of NCBI NO: 15229157 NR Description: nucleic acid binding protein-related [Arabidopsis
  misc_feature (1)..(168): Homolog of NCBI NO: 15239624 NR Description: nucleic acid binding protein - like [Arabidopsis
MLEKDWLSLVAVHSDTWLLALAFYFGARFGFDKTDRKRLFGMINELPTIFEVVTGEAKKQVKEKSSVSNNSGNKSKSNSQAQASETQGRQSKALQTKDEDEELEEQDNDEHGDTLCGACGENYGTDEFWICCDICEKWFHGKCVKITPARAELIKQYKCPSCSNKRAR

SEQ ID NO: 54744 - protein, 127 aa, Glycine max
  peptide (1)..(127): Ceres Seq. ID no. 14307763
  misc_feature (74)..(124): Pfam Name: PHD-finger Pfam Description: PHD-finger
  misc_feature (6)..(125): Homolog of NCBI NO: 31210707 NR Description: ENSANGP00000012649 [Anopheles gambiae]
  misc_feature (1)..(127): Homolog of NCBI NO: 15226967 NR Description: PHD-type zinc finger protein -related
  misc_feature (1)..(127): Homolog of NCBI NO: 34907474 NR Description: nucleic acid binding protein
  misc_feature (1)..(122): Homolog of NCBI NO: 34394182 NR Description: putative nucleic acid binding protein
  misc_feature (1)..(122): Homolog of NCBI NO: 14192880 NR Description: Putative nucleic acid binding protein [Oryza
  misc_feature (1)..(127): Homolog of NCBI NO: 7488751 NR Description: probable zinc finger protein - alfalfa (fragment)
  misc_feature (1)..(127): Homolog of NCBI NO: 7486722 NR Description: hypothetical protein F9D12.13 - Arabidopsis
  misc_feature (1)..(127): Homolog of NCBI NO: 30687843 NR Description: zinc finger protein - like [Arabidopsis thaliana]
  misc_feature (1)..(127): Homolog of NCBI NO: 15229157 NR Description: nucleic acid binding protein-related [Arabidopsis
  misc_feature (1)..(127): Homolog of NCBI NO: 15239624 NR Description: nucleic acid binding protein - like [Arabidopsis
MINELPTIFEVVTGEAKKQVKEKSSVSNNSGNKSKSNSQAQASETQGRQSKALQTKDEDEELEEQDNDEHGDTLCGACGENYGTDEFWICCDICEKWFHGKCVKITPARAELIKQYKCPSCSNKRAR

SEQ ID NO: 54745 - DNA, 1101 bp, Glycine max
  misc_feature (1)..(1101): Ceres Seq. ID no. 14307312
attttccattttcaattttaatttcctctcaaaccctaaccctaaccctaaccctccccgtcacaaaagaaaaccctctttgtccgatcatcgtcgtcaagatgttggaactccgtctcgtgcaaggctccctcctgaagaaggttttggaatccgtcaaggagctcgtgaacgacgcgaacttcgactgctcctccaccgggttctccctccaggccatggactccagccacgtcgccctcgtcgctctcctcctccgatccgagggcttcgagcactaccgctgcgaccgcaacatctccatgggcatgaacctcaacaacatggccaagatgcttaagtgtgctggtaatgacgacatcatcaccatcaaggccgacgacggcagcgacactgtcactttcatgttcgaaagccctacacaagacaagatttctgattttgaaatgaagctgatggacattgatagtgaacacctkgggattccggaggcagagtatcatgctatggttaagatgccatcctctgagtttgctaggatctgcaaggatctcagtagtattggtgacactgttgtcatttcggttactaaggagggtgtgaagttttccaccaaaggagatattggaactgccaatatagtttgtaggcagaatacttctgtggacaagcctgaagaagcaactgtcattgagatgaatgagcccgtgtccttgacatttgctttgcgatatatgaactcttttacaaaggcaacgccattgtctaacacagttaccattagtctttcaaatgagttgccagttgttgttgagtacaagattgctgagatgggttatgtgcggttctatttggctcccaagatagaagaggatgaagaagatacgaaacctcaagtttaatctacctattagatggttgggttaggatattaggattttaatgtctttgaacttgtagctttcgtcatacatcttctgttgaagatattttaaccgtgtgagcaatgaattcacattttgtggatttcttagatgtgtattggttacctaccaccttattttccctcgatttgattgttaagaacaattcgaaacaaat

SEQ ID NO: 54746 - protein, 299 aa, Glycine max
  peptide (1)..(299): Ceres Seq. ID no. 14307313
  misc_feature (160)..(287): Pfam Name: Proliferating cell nuclear antigen, C-terminal domain Pfam Description: Proliferating cell nuclear antigen, C-terminal
  misc_feature (34)..(298): Homolog of NCBI NO: 15227564 NR Description: proliferating cell nuclear antigen, PCNA -related
  misc_feature (34)..(294): Homolog of NCBI NO: 129691 NR Description: PROLIFERATING CELL NUCLEAR ANTIGEN (PCNA)
  misc_feature (34)..(297): Homolog of NCBI NO: 100160 NR Description: proliferating cell nuclear antigen (clone 4.10) -
  misc_feature (34)..(297): Homolog of NCBI NO: 129692 NR Description: PROLIFERATING CELL NUCLEAR ANTIGEN (PCNA) (CYCLIN)
  misc_feature (34)..(297): Homolog of NCBI NO: 4406225 NR Description: proliferating cell nuclear antigen II [Nicotiana
  misc_feature (34)..(297): Homolog of NCBI NO: 25005275 NR Description: proliferating cell nuclear antigen [Lycopersicon
  misc_feature (34)..(297): Homolog of NCBI NO: 3947727 NR Description: proliferating cell nuclear antigen [Nicotiana
  misc_feature (34)..(297): Homolog of NCBI NO: 6225836 NR Description: Proliferating cell nuclear antigen (PCNA)
  misc_feature (34)..(297): Homolog of NCBI NO: 10946427 NR Description: proliferating cell nuclear antigen [Nicotiana
  misc_feature (34)..(298): Homolog of NCBI NO: 3608175 NR Description: proliferating cell nuclear antigen [Pisum
  misc_feature (159)..(159): Xaa is any aa, unknown or other
FPFSILISSQTLTLTLTLPVTKENPLCPIIVVKMLELRLVQGSLLKKVLESVKELVNDANFDCSSTGFSLQAMDSSHVALVALLLRSEGFEHYRCDRNISMGMNLNNMAKMLKCAGNDDIITIKADDGSDTVTFMFESPTQDKISDFEMKLMDIDSEHXGIPEAEYHAMVKMPSSEFARICKDLSSIGDTVVISVTKEGVKFSTKGDIGTANIVCRQNTSVDKPEEATVIEMNEPVSLTFALRYMNSFTKATPLSNTVTISLSNELPVVVEYKIAEMGYVRFYLAPKIEEDEEDTKPQV

SEQ ID NO: 54747 - protein, 266 aa, Glycine max
  peptide (1)..(266): Ceres Seq. ID no. 14307314
  misc_feature (127)..(254): Pfam Name: Proliferating cell nuclear antigen, C-terminal domain Pfam Description: Proliferating cell nuclear antigen, C-terminal
  misc_feature (1)..(265): Homolog of NCBI NO: 15227564 NR Description: proliferating cell nuclear antigen, PCNA -related
  misc_feature (1)..(261): Homolog of NCBI NO: 129691 NR Description: PROLIFERATING CELL NUCLEAR ANTIGEN (PCNA)
  misc_feature (1)..(264): Homolog of NCBI NO: 100160 NR Description: proliferating cell nuclear antigen (clone 4.10) -
  misc_feature (1)..(264): Homolog of NCBI NO: 129692 NR Description: PROLIFERATING CELL NUCLEAR ANTIGEN (PCNA) (CYCLIN)
  misc_feature (1)..(264): Homolog of NCBI NO: 4406225 NR Description: proliferating cell nuclear antigen II [Nicotiana
  misc_feature (1)..(264): Homolog of NCBI NO: 25005275 NR Description: proliferating cell nuclear antigen [Lycopersicon
  misc_feature (1)..(264): Homolog of NCBI NO: 3947727 NR Description: proliferating cell nuclear antigen [Nicotiana
  misc_feature (1)..(264): Homolog of NCBI NO: 6225836 NR Description: Proliferating cell nuclear antigen (PCNA)
  misc_feature (1)..(264): Homolog of NCBI NO: 10946427 NR Description: proliferating cell nuclear antigen [Nicotiana
  misc_feature (1)..(265): Homolog of NCBI NO: 3608175 NR Description: proliferating cell nuclear antigen [Pisum
  misc_feature (126)..(126): Xaa is any aa, unknown or other
MLELRLVQGSLLKKVLESVKELVNDANFDCSSTGFSLQAMDSSHVALVALLLRSEGFEHYRCDRNISMGMNLNNMAKMLKCAGNDDIITIKADDGSDTVTFMFESPTQDKISDFEMKLMDIDSEHXGIPEAEYHAMVKMPSSEFARICKDLSSIGDTVVISVTKEGVKFSTKGDIGTANIVCRQNTSVDKPEEATVIEMNEPVSLTFALRYMNSFTKATPLSNTVTISLSNELPVVVEYKIAEMGYVRFYLAPKIEEDEEDTKPQV

SEQ ID NO: 54748 - protein, 227 aa, Glycine max
  peptide (1)..(227): Ceres Seq. ID no. 14307315
  misc_feature (88)..(215): Pfam Name: Proliferating cell nuclear antigen, C-terminal domain Pfam Description: Proliferating cell nuclear antigen, C-terminal
  misc_feature (1)..(226): Homolog of NCBI NO: 15227564 NR Description: proliferating cell nuclear antigen, PCNA -related
  misc_feature (1)..(222): Homolog of NCBI NO: 129691 NR Description: PROLIFERATING CELL NUCLEAR ANTIGEN (PCNA)
  misc_feature (1)..(225): Homolog of NCBI NO: 100160 NR Description: proliferating cell nuclear antigen (clone 4.10) -
  misc_feature (1)..(225): Homolog of NCBI NO: 129692 NR Description: PROLIFERATING CELL NUCLEAR ANTIGEN (PCNA) (CYCLIN)
  misc_feature (1)..(225): Homolog of NCBI NO: 4406225 NR Description: proliferating cell nuclear antigen II [Nicotiana
  misc_feature (1)..(225): Homolog of NCBI NO: 25005275 NR Description: proliferating cell nuclear antigen [Lycopersicon
  misc_feature (1)..(225): Homolog of NCBI NO: 3947727 NR Description: proliferating cell nuclear antigen [Nicotiana
  misc_feature (1)..(225): Homolog of NCBI NO: 6225836 NR Description: Proliferating cell nuclear antigen (PCNA)
  misc_feature (1)..(225): Homolog of NCBI NO: 10946427 NR Description: proliferating cell nuclear antigen [Nicotiana
  misc_feature (1)..(226): Homolog of NCBI NO: 3608175 NR Description: proliferating cell nuclear antigen [Pisum
  misc_feature (87)..(87): Xaa is any aa, unknown or other
MDSSHVALVALLLRSEGFEHYRCDRNISMGMNLNNMAKMLKCAGNDDIITIKADDGSDTVTFMFESPTQDKISDFEMKLMDIDSEHXGIPEAEYHAMVKMPSSEFARICKDLSSIGDTVVISVTKEGVKFSTKGDIGTANIVCRQNTSVDKPEEATVIEMNEPVSLTFALRYMNSFTKATPLSNTVTISLSNELPVVVEYKIAEMGYVRFYLAPKIEEDEEDTKPQV

SEQ ID NO: 54749 - DNA, 1082 bp, Glycine max
  misc_feature (1)..(1082): Ceres Seq. ID no. 14307085
atcttcttctctaagctataagccatatacaccaaatattttttcacttgctctccatcttttttcagttcatcagtggccaggtaggccatgggaagggctccatgttgtgacaaatccaatgtgaaaagagggccttggtctcctgatgaagatgccaccctcaaaaactaccttgagaaacatggcacaggtggtaactggatagctctccccaaaaaagcaggccttaagcgttgtgggaagagctgtcgtctaagatggctaaactatctcaggcctcatattaagcttggaggtttcactgaagaggaagacaaaattatctgcaccctttatgacaccatcggaagcaggtggtcctttatagcagctcaacttcccgggagaacagacaatgatgtgaaaaatcactggaacaccaagctaaagaaaaagttcttggcaggaaacacaagtagtactgctgccacgacaagcaacaacaatgtcactttcagcaatactagttattctgatcaagttaagacccttgtcttggatcatcaaaaactgaactcagctgataattggtttgactactcctacaatgttttggaattggaacaaacaccaattccagttccttttccaatgtctcaggaattagaggcttttaattatactgctgggagtataagttgtagtgcaccaccaccctctaaggaagtttcaatgctttccaatgcagacaatcatacgctatggtttggttatgaccatgcaagtgaagatgatccaaatttgcttgagtttgtgcttgatgatgatctgctgaatcatggatttgtttctcaagacaaaagctgcagccaagttggtccaccatctggctaattaaccaagatcactcattctttctactcgtcaaaaacttgaaaaaaccaaggctacagaaaataaaggtaaaatggaatattgatcaagttattatagtatagtactagtgatgaattatatacctctaaatctaactggtgtttaaatttgtgattaaagtggttggttgaatgtggaattgtgtgagtttctgaattgttttc

SEQ ID NO: 54750 - protein, 261 aa, Glycine max
  peptide (1)..(261): Ceres Seq. ID no. 14307086
  misc_feature (14)..(62): Pfam Name: Myb-like DNA-binding domain Pfam Description: Myb-like DNA-binding domain
  misc_feature (1)..(119): Homolog of NCBI NO: 34911254 NR Description: putative Myb-related transcription factor-l
  misc_feature (1)..(149): Homolog of NCBI NO: 15228049 NR Description: light-regulated myb protein, putative
  misc_feature (1)..(118): Homolog of NCBI NO: 15229192 NR Description: myb family transcription factor(AtMYB84)
  misc_feature (1)..(118): Homolog of NCBI NO: 2832408 NR Description: R2R3-MYB transcription factor [Arabidopsis
  misc_feature (1)..(118): Homolog of NCBI NO: 40253739 NR Description: putative P-type R2R3 Myb protein
  misc_feature (1)..(118): Homolog of NCBI NO: 15239158 NR Description: myb DNA-binding protein (MYB68) [Arabidopsis
  misc_feature (1)..(118): Homolog of NCBI NO: 11273952 NR Description: myb-related transcription factor MYB68
  misc_feature (1)..(133): Homolog of NCBI NO: 18419456 NR Description: blind [Lycopersicon esculentum]
  misc_feature (1)..(167): Homolog of NCBI NO: 15242793 NR Description: myb family transcription factor [Arabidopsis
  misc_feature (1)..(167): Homolog of NCBI NO: 11358686 NR Description: probable transcription factor MYB36
MGRAPCCDKSNVKRGPWSPDEDATLKNYLEKHGTGGNWIALPKKAGLKRCGKSCRLRWLNYLRPHIKLGGFTEEEDKIICTLYDTIGSRWSFIAAQLPGRTDNDVKNHWNTKLKKKFLAGNTSSTAATTSNNNVTFSNTSYSDQVKTLVLDHQKLNSADNWFDYSYNVLELEQTPIPVPFPMSQELEAFNYTAGSISCSAPPPSKEVSMLSNADNHTLWFGYDHASEDDPNLLEFVLDDDLLNHGFVSQDKSCSQVGPPSG

SEQ ID NO: 54751 - DNA, 1590 bp, Glycine max
  misc_feature (1)..(1590): Ceres Seq. ID no. 15176262
aattaatttaaataatttggacaaatggaaaacaagccagaagaagtaaaagcaaaccaagaaggtgaaactgagaccgttgagaatgtcgaggccacaaagcacgttgagctagatgaaggaaaagatgaacaaattgaatgtgatgacaaagaaaacaacactcagctatcttccaacgatttgcaataccttcttgcagataaagaatggaaagatgctattgtaaacttccctgaaaccgaaaagattatcagtagacttattgagctcggttttgcaaagccctccaaaatccaatccaaaactgttccttttgcacttgctaagaaagacgtcggtatcattgctcaatcacataatggttcaggaaagactctcggcttcgtgttaccagctgttctgagaattgatgccacaaagcctttgatgaaaagccagacaactttcttaccacaagcaatccttattgctccaaatgctgaactttgctctcaaattgttaagattgctgaactagtagctcaaccatttaaagatattaaggtatctggtggcagaactccagctcaccttattgttaagacttcccaaagtctagtcagtgcaattagtaaaaaggagattgatttagctaatgcagatgtccttattgttgatgaagctgatgatcaattaaaaggagacactgctcttagactcctccaaattgtatccaaactgccaaaaggagctggtttattcttcttctctgctactttcaccaaagaagccattgattatatgaaccaattctttgcaaagttgagcttaaaattcgtgttaagatatatgcttaagaccgatgagctaaaacttgacggaattgaacaatatagccgaaaatgtgaccctaatggcaaggcagactatattgctaagcttctcgataagttagaagttgatacacaagctatcatattctctaacactaagaattttgctttgagagttagtaatgaattgaaaagtaaaggtcacaatgttggcttgctaatgggtggtcttatgcctcaagaaagaagtgaaatcttgaactcatttagagaatctaagattaaagtcctgattacaaccaatcttttggcaagaggatttgatcaaagatccattggacttgttatcaacttagacgttcctagacactttggagcagaaaataataaagctgattgcgagacttacttatatagagttggaagaacaggaagatttggagacgtcggattagcaattaacttatattcaaaagaagatgaaaaagacttaatcgatcaagttgaaaagttctacaccgtagaaatcaaggatctttcaaaggaaagtggtgataatgaatttgatttaatcaacgataagcttggaaaagttgtcaagattaatagcaaaaagcgtgaagaaaacagggaaaaaatcgttaaatcctaaacctatctataaaatagttatgcgtttatttcataatatacatgcgtttacgtaaactagtttcatgtttcaaaatagcagcaaattagagtttattcatttattaaattagtctaaaatccc

SEQ ID NO: 54752 - protein, 480 aa, Glycine max
  peptide (1)..(480): Ceres Seq. ID no. 15176263
  misc_feature (80)..(283): Pfam Name: DEAD/DEAH box helicase Pfam Description: DEAD/DEAH box helicase
  misc_feature (1)..(449): Homolog of NCBI NO: 8922886 NR Description: hypothetical protein FLJ11126 [Homo sapiens]
  misc_feature (1)..(449): Homolog of NCBI NO: 15030051 NR Description: Ddx19 protein [Mus musculus]
  misc_feature (11)..(452): Homolog of NCBI NO: 15982881 NR Description: AT3g53110/T4D2_40 [Arabidopsis thaliana]
  misc_feature (11)..(452): Homolog of NCBI NO: 15231748 NR Description: DEAD/DEAH box helicase, putative [Arabidopsis
  misc_feature (75)..(449): Homolog of NCBI NO: 31205465 NR Description: ENSANGP00000014950 [Anopheles gambiae]
  misc_feature (2)..(456): Homolog of NCBI NO: 28436904 NR Description: Similar to DEAD/H (Asp-Glu-Ala-Asp/His) box
  misc_feature (1)..(456): Homolog of NCBI NO: 38511935 NR Description: DEAD (Asp-Glu-Ala-As) box polypeptide 19
  misc_feature (2)..(436): Homolog of NCBI NO: 19112808 NR Description: putative ATP-dependent cytosolic RNA helicase,
  misc_feature (4)..(471): Homolog of NCBI NO: 32412346 NR Description: hypothetical protein [Neurospora crassa]
  misc_feature (17)..(455): Homolog of NCBI NO: 40742655 NR Description: hypothetical protein AN7659.2 [Aspergillus
MENKPEEVKANQEGETETVENVEATKHVELDEGKDEQIECDDKENNTQLSSNDLQYLLADKEWKDAIVNFPETEKIISRLIELGFAKPSKIQSKTVPFALAKKDVGIIAQSHNGSGKTLGFVLPAVLRIDATKPLMKSQTTFLPQAILIAPNAELCSQIVKIAELVAQPFKDIKVSGGRTPAHLIVKTSQSLVSAISKKEIDLANADVLIVDEADDQLKGDTALRLLQIVSKLPKGAGLFFFSATFTKEAIDYMNQFFAKLSLKFVLRYMLKTDELKLDGIEQYSRKCDPNGKADYIAKLLDKLEVDTQAIIFSNTKNFALRVSNELKSKGHNVGLLMGGLMPQERSEILNSFRESKIKVLITTNLLARGFDQRSIGLVINLDVPRHFGAENNKADCETYLYRVGRTGRFGDVGLAINLYSKEDEKDLIDQVEKFYTVEIKDLSKESGDNEFDLINDKLGKVVKINSKKREENREKIVKS

SEQ ID NO: 54753 - protein, 345 aa, Glycine max
  peptide (1)..(345): Ceres Seq. ID no. 15176264
  misc_feature (1)..(148): Pfam Name: DEAD/DEAH box helicase Pfam Description: DEAD/DEAH box helicase
  misc_feature (1)..(314): Homolog of NCBI NO: 8922886 NR Description: hypothetical protein FLJ11126 [Homo sapiens]
  misc_feature (1)..(314): Homolog of NCBI NO: 15030051 NR Description: Ddx19 protein [Mus musculus]
  misc_feature (1)..(317): Homolog of NCBI NO: 15982881 NR Description: AT3g53110/T4D2_40 [Arabidopsis thaliana]
  misc_feature (1)..(317): Homolog of NCBI NO: 15231748 NR Description: DEAD/DEAH box helicase, putative [Arabidopsis
  misc_feature (1)..(314): Homolog of NCBI NO: 31205465 NR Description: ENSANGP00000014950 [Anopheles gambiae]
  misc_feature (1)..(321): Homolog of NCBI NO: 28436904 NR Description: Similar to DEAD/H (Asp-Glu-Ala-Asp/His) box
  misc_feature (1)..(321): Homolog of NCBI NO: 38511935 NR Description: DEAD (Asp-Glu-Ala-As) box polypeptide 19
  misc_feature (1)..(301): Homolog of NCBI NO: 19112808 NR Description: putative ATP-dependent cytosolic RNA helicase,
  misc_feature (1)..(336): Homolog of NCBI NO: 32412346 NR Description: hypothetical protein [Neurospora crassa]
  misc_feature (1)..(320): Homolog of NCBI NO: 40742655 NR Description: hypothetical protein AN7659.2 [Aspergillus
MKSQTTFLPQAILIAPNAELCSQIVKIAELVAQPFKDIKVSGGRTPAHLIVKTSQSLVSAISKKEIDLANADVLIVDEADDQLKGDTALRLLQIVSKLPKGAGLFFFSATFTKEAIDYMNQFFAKLSLKFVLRYMLKTDELKLDGIEQYSRKCDPNGKADYIAKLLDKLEVDTQAIIFSNTKNFALRVSNELKSKGHNVGLLMGGLMPQERSEILNSFRESKIKVLITTNLLARGFDQRSIGLVINLDVPRHFGAENNKADCETYLYRVGRTGRFGDVGLAINLYSKEDEKDLIDQVEKFYTVEIKDLSKESGDNEFDLINDKLGKVVKINSKKREENREKIVKS

SEQ ID NO: 54754 - DNA, 974 bp, Glycine max
  misc_feature (1)..(974): Ceres Seq. ID no. 15174694
gatatgtctcattgctggtccttttcaaacaaaattatcctgtgacttttctcctatgtaatgaataatcaaatggaaaatttcccatctttctcttttctataactccattttagtagtagttctagcctttgctcatcgattgaatttgtttaggtaatttttcacaaggcgtgagccaattatagaggaagctgtgcggtatcttattatgttttcttggtaatagtgtcatcatcaaattcaaaatgtacatatattttttgcacttttcatgttgcaggtggtatgaatggttctatagtctatgaacttgaaagacctgaaaatgctggcctgaaaaaatcagtaaaggttctgcaaaaagcaaagactcagatagatgctatccaaccagtatcttgggcggacatgattgctgtggctggagctgaagcagttgaagtatgtggaggtccacctattcaagtttcactgggcagattagatacactggtgcctgatccagaagggagacttcctgaggaatctctcaatgcttctggtttgaagaaatgtttccagagcaaaggcttttcaacacaagaacttgtggctttgtctggagcccacactattggaagtaaaggttttggaagcccaatttcttttgacaattcatattataaggttcttttggagaagccgtggacgtcttcaggtggtatgccgagtatgattgggcttccttcagatcacgctcttgttgaggatgatgaatgcttaagatggattaaaaaatacgcagacagtgagaatctattctttgaagatttcaaaaatgcgtatgtcaagctggtgaattctggtgtgaggcggaatagcttataaattcaggagttgaatgttccaacttccactgaaggggcaacttgcatttttattgactttctaacagtgtttatgcacagttgccatgaagttttgggtgcttt

SEQ ID NO: 54755 - protein, 193 aa, Glycine max
  peptide (1)..(193): Ceres Seq. ID no. 15174695
  misc_feature (1)..(167): Pfam Name: Peroxidase Pfam Description: Peroxidase
  misc_feature (1)..(187): Homolog of NCBI NO: 15080682 NR Description: peroxisome type ascorbate peroxidase
  misc_feature (1)..(187): Homolog of NCBI NO: 14210363 NR Description: ascorbate peroxidase [Zantedeschia aethiopica]
  misc_feature (1)..(187): Homolog of NCBI NO: 30680940 NR Description: ascorbate peroxidase (APX) [Arabidopsis thaliana]
  misc_feature (1)..(187): Homolog of NCBI NO: 6682242 NR Description: putative ascorbate peroxidase [Arabidopsis
  misc_feature (1)..(193): Homolog of NCBI NO: 5442410 NR Description: ascorbate peroxidase [Zantedeschia aethiopica]
  misc_feature (1)..(187): Homolog of NCBI NO: 7489542 NR Description: L-ascorbate peroxidase (EC 1.11.1.11) [validated]
  misc_feature (161)..(193): Homolog of NCBI NO: 7487935 NR Description: L-ascorbate peroxidase homolog F10M6.50 -
  misc_feature (37)..(135): Homolog of NCBI NO: 7487935 NR Description: L-ascorbate peroxidase homolog F10M6.50 -
  misc_feature (1)..(187): Homolog of NCBI NO: 27817866 NR Description: OJ1081_B12.15 [Oryza sativa (japonica
  misc_feature (1)..(193): Homolog of NCBI NO: 30689347 NR Description: ascorbate peroxidase family [Arabidopsis
MNGSIVYELERPENAGLKKSVKVLQKAKTQIDAIQPVSWADMIAVAGAEAVEVCGGPPIQVSLGRLDTLVPDPEGRLPEESLNASGLKKCFQSKGFSTQELVALSGAHTIGSKGFGSPISFDNSYYKVLLEKPWTSSGGMPSMIGLPSDHALVEDDECLRWIKKYADSENLFFEDFKNAYVKLVNSGVRRNSL

SEQ ID NO: 54756 - protein, 152 aa, Glycine max
  peptide (1)..(152): Ceres Seq. ID no. 15174696
  misc_feature (1)..(126): Pfam Name: Peroxidase Pfam Description: Peroxidase
  misc_feature (1)..(146): Homolog of NCBI NO: 15080682 NR Description: peroxisome type ascorbate peroxidase
  misc_feature (1)..(146): Homolog of NCBI NO: 14210363 NR Description: ascorbate peroxidase [Zantedeschia aethiopica]
  misc_feature (1)..(146): Homolog of NCBI NO: 30680940 NR Description: ascorbate peroxidase (APX) [Arabidopsis thaliana]
  misc_feature (1)..(146): Homolog of NCBI NO: 6682242 NR Description: putative ascorbate peroxidase [Arabidopsis
  misc_feature (1)..(152): Homolog of NCBI NO: 5442410 NR Description: ascorbate peroxidase [Zantedeschia aethiopica]
  misc_feature (1)..(146): Homolog of NCBI NO: 7489542 NR Description: L-ascorbate peroxidase (EC 1.11.1.11) [validated]
  misc_feature (120)..(152): Homolog of NCBI NO: 7487935 NR Description: L-ascorbate peroxidase homolog F10M6.50 -
  misc_feature (1)..(94): Homolog of NCBI NO: 7487935 NR Description: L-ascorbate peroxidase homolog F10M6.50 -
  misc_feature (1)..(146): Homolog of NCBI NO: 27817866 NR Description: OJ1081_B12.15 [Oryza sativa (japonica
  misc_feature (1)..(152): Homolog of NCBI NO: 30689347 NR Description: ascorbate peroxidase family [Arabidopsis
MIAVAGAEAVEVCGGPPIQVSLGRLDTLVPDPEGRLPEESLNASGLKKCFQSKGFSTQELVALSGAHTIGSKGFGSPISFDNSYYKVLLEKPWTSSGGMPSMIGLPSDHALVEDDECLRWIKKYADSENLFFEDFKNAYVKLVNSGVRRNSL

SEQ ID NO: 54757 - DNA, 1513 bp, Glycine max
  misc_feature (1)..(1513): Ceres Seq. ID no. 14312333
gagaagaggatgaagggagagaagagttttgggagtggcggtgcgaagagtgggtccaaatttgggagtggaaagaaagggtttggtgggaaggcagggaaggatcatgatggtgaagttaaggagatgtgggatacaattgctgggggagattctgaggatgatcaagagggtctcaggaatgtggatgatgacaactttattgatgacactggagtggaacctgcttattatggtagtgatgaaccacgttctcccggtgatgctccccaggcagaggagggtgaagaggacgaagaaattaaggatcttttcaagataggtaagaaaaagaagaagaatgagagaagtcctgcagaaatagcttatttagttgagactgtcatggctgagcttgaggttacagctgaggaggatgctgaacttaatagacaggggaagcctgccgttaataaactcaagaagttgaatcttcttacagaagtcctctcaaagaaacagcttcaactggagtttttagatcatggagtgctaactttattgaagaattggcttgagccacttcctgatggaagcttgccaaatataaatatacgcacagaagttttgaagatattgaatgattttcctatagatctagagcagtatgatagaagagaacagctgaagaagagtggtcttgggaaggtcattatgtttctatcgaagtctgatgaagaaatcaatgtgaataggaaactagccaaggagctggttgataagtggagccggcctatatttaataagagtacccggtttgaagacatgagaaatgtggaggatgatagggttccttataggagattatcagttaaaaagccggcaaataaagctgcaggaatggaatctagagacagtgatcttgatttagaactttcacagcctaggtctggacagtcctcttctaggcagcatgcatcaaggccggaagcaacacctttggattttgtggtccggccccagtctaaaattgatccagaagaaattagagcacgagcaaaacaagctgcacaagatcagcagcgtatgaagatgaataagaaattgcagcaattgagggcaccaaaaaagaagcagcttcaggctacaaaattgagcgtggaaggtcgtggtatgatcaaatatttataaatgtgaccacgttgatactggatgggtttgtttgtcctgctgcaagcttttcatataatgtgctgcctgcattgatgtggattcttctaaaggtgggctattcgttcagtgatctacatggaaatttgatggagagggatgttatgaaaatacatccgtatgctgcatttgtgtattcatctagtgcagcaggaaatccaaaatacattggacggttatgcattcgtatatatagtcaagcttgtcatcagtttaatgaaaatgtggattttgcattcgtccttggtacaagtaatctttgtagtgcagcgctgcagcagtaataccaaccaaaatacactgg

SEQ ID NO: 54758 - protein, 389 aa, Glycine max
  peptide (1)..(389): Ceres Seq. ID no. 14312334
  misc_feature (124)..(385): Pfam Name: IWS1 C-terminus Pfam Description: IWS1 C-terminus
  misc_feature (115)..(358): Homolog of NCBI NO: 31241925 NR Description: ENSANGP00000012213 [Anopheles gambiae]
  misc_feature (12)..(385): Homolog of NCBI NO: 30352010 NR Description: hypothetical protein 3000008H23 [Mus musculus]
  misc_feature (108)..(385): Homolog of NCBI NO: 7023152 NR Description: unnamed protein product [Homo sapiens]
  misc_feature (1)..(385): Homolog of NCBI NO: 24308177 NR Description: hypothetical protein FLJ10006 [Homo sapiens]
  misc_feature (1)..(385): Homolog of NCBI NO: 21739669 NR Description: hypothetical protein [Homo sapiens]
  misc_feature (1)..(385): Homolog of NCBI NO: 16552402 NR Description: unnamed protein product [Homo sapiens]
  misc_feature (9)..(385): Homolog of NCBI NO: 31203501 NR Description: ENSANGP00000010073 [Anopheles gambiae]
  misc_feature (90)..(389): Homolog of NCBI NO: 15234085 NR Description: hypothetical protein [Arabidopsis thaliana]
  misc_feature (16)..(389): Homolog of NCBI NO: 15222574 NR Description: expressed protein [Arabidopsis thaliana]
  misc_feature (2)..(389): Homolog of NCBI NO: 34895776 NR Description: P0434B04.3 [Oryza sativa (japonica
EKRMKGEKSFGSGGAKSGSKFGSGKKGFGGKAGKDHDGEVKEMWDTIAGGDSEDDQEGLRNVDDDNFIDDTGVEPAYYGSDEPRSPGDAPQAEEGEEDEEIKDLFKIGKKKKKNERSPAEIAYLVETVMAELEVTAEEDAELNRQGKPAVNKLKKLNLLTEVLSKKQLQLEFLDHGVLTLLKNWLEPLPDGSLPNINIRTEVLKILNDFPIDLEQYDRREQLKKSGLGKVIMFLSKSDEEINVNRKLAKELVDKWSRPIFNKSTRFEDMRNVEDDRVPYRRLSVKKPANKAAGMESRDSDLDLELSQPRSGQSSSRQHASRPEATPLDFVVRPQSKIDPEEIRARAKQAAQDQQRMKMNKKLQQLRAPKKKQLQATKLSVEGRGMIKYL

SEQ ID NO: 54759 - protein, 386 aa, Glycine max
  peptide (1)..(386): Ceres Seq. ID no. 14312335
  misc_feature (121)..(382): Pfam Name: IWS1 C-terminus Pfam Description: IWS1 C-terminus
  misc_feature (112)..(355): Homolog of NCBI NO: 31241925 NR Description: ENSANGP00000012213 [Anopheles gambiae]
  misc_feature (9)..(382): Homolog of NCBI NO: 30352010 NR Description: hypothetical protein 3000008H23 [Mus musculus]
  misc_feature (105)..(382): Homolog of NCBI NO: 7023152 NR Description: unnamed protein product [Homo sapiens]
  misc_feature (1)..(382): Homolog of NCBI NO: 24308177 NR Description: hypothetical protein FLJ10006 [Homo sapiens]
  misc_feature (1)..(382): Homolog of NCBI NO: 21739669 NR Description: hypothetical protein [Homo sapiens]
  misc_feature (1)..(382): Homolog of NCBI NO: 16552402 NR Description: unnamed protein product [Homo sapiens]
  misc_feature (6)..(382): Homolog of NCBI NO: 31203501 NR Description: ENSANGP00000010073 [Anopheles gambiae]
  misc_feature (87)..(386): Homolog of NCBI NO: 15234085 NR Description: hypothetical protein [Arabidopsis thaliana]
  misc_feature (13)..(386): Homolog of NCBI NO: 15222574 NR Description: expressed protein [Arabidopsis thaliana]
  misc_feature (1)..(386): Homolog of NCBI NO: 34895776 NR Description: P0434B04.3 [Oryza sativa (japonica
MKGEKSFGSGGAKSGSKFGSGKKGFGGKAGKDHDGEVKEMWDTIAGGDSEDDQEGLRNVDDDNFIDDTGVEPAYYGSDEPRSPGDAPQAEEGEEDEEIKDLFKIGKKKKKNERSPAEIAYLVETVMAELEVTAEEDAELNRQGKPAVNKLKKLNLLTEVLSKKQLQLEFLDHGVLTLLKNWLEPLPDGSLPNINIRTEVLKILNDFPIDLEQYDRREQLKKSGLGKVIMFLSKSDEEINVNRKLAKELVDKWSRPIFNKSTRFEDMRNVEDDRVPYRRLSVKKPANKAAGMESRDSDLDLELSQPRSGQSSSRQHASRPEATPLDFVVRPQSKIDPEEIRARAKQAAQDQQRMKMNKKLQQLRAPKKKQLQATKLSVEGRGMIKYL

SEQ ID NO: 54760 - protein, 347 aa, Glycine max
  peptide (1)..(347): Ceres Seq. ID no. 14312336
  misc_feature (82)..(343): Pfam Name: IWS1 C-terminus Pfam Description: IWS1 C-terminus
  misc_feature (73)..(316): Homolog of NCBI NO: 31241925 NR Description: ENSANGP00000012213 [Anopheles gambiae]
  misc_feature (1)..(343): Homolog of NCBI NO: 30352010 NR Description: hypothetical protein 3000008H23 [Mus musculus]
  misc_feature (66)..(343): Homolog of NCBI NO: 7023152 NR Description: unnamed protein product [Homo sapiens]
  misc_feature (1)..(343): Homolog of NCBI NO: 24308177 NR Description: hypothetical protein FLJ10006 [Homo sapiens]
  misc_feature (1)..(343): Homolog of NCBI NO: 21739669 NR Description: hypothetical protein [Homo sapiens]
  misc_feature (1)..(343): Homolog of NCBI NO: 16552402 NR Description: unnamed protein product [Homo sapiens]
  misc_feature (1)..(343): Homolog of NCBI NO: 31203501 NR Description: ENSANGP00000010073 [Anopheles gambiae]
  misc_feature (48)..(347): Homolog of NCBI NO: 15234085 NR Description: hypothetical protein [Arabidopsis thaliana]
  misc_feature (1)..(347): Homolog of NCBI NO: 15222574 NR Description: expressed protein [Arabidopsis thaliana]
  misc_feature (1)..(347): Homolog of NCBI NO: 34895776 NR Description: P0434B04.3 [Oryza sativa (japonica
MWDTIAGGDSEDDQEGLRNVDDDNFIDDTGVEPAYYGSDEPRSPGDAPQAEEGEEDEEIKDLFKIGKKKKKNERSPAEIAYLVETVMAELEVTAEEDAELNRQGKPAVNKLKKLNLLTEVLSKKQLQLEFLDHGVLTLLKNWLEPLPDGSLPNINIRTEVLKILNDFPIDLEQYDRREQLKKSGLGKVIMFLSKSDEEINVNRKLAKELVDKWSRPIFNKSTRFEDMRNVEDDRVPYRRLSVKKPANKAAGMESRDSDLDLELSQPRSGQSSSRQHASRPEATPLDFVVRPQSKIDPEEIRARAKQAAQDQQRMKMNKKLQQLRAPKKKQLQATKLSVEGRGMIKYL

SEQ ID NO: 54761 - DNA, 733 bp, Glycine max
  misc_feature (1)..(733): Ceres Seq. ID no. 12582039
aaatacaaataaaaactaataattgtttagctcctacaaagtatccaaatgaagaaagtcattatcatcttagctcttcttgcagtagcttttgcaggtttttccgatgattgtctctactctcacaaccaagctagatccgtccttgggcttccaaaaatgacttattcaagcaaattagcctctacagccctcaagtacgctaaagttctggctggaactaatcacttgaaacacagtagcggtagaaataatattggtgaaaatcttgctatgggaacaaagggatcttatgacaccgaaagacttatctctttatggactanggaaaagaagaactatattcccgcaaagaaattccccaacgtatctagaactggaaactggaaggatgtcgcacattacactcagatcgtttggagaaacactaaacaagttggttgtggtaccgctactaatagcaagaacattatcatagtttgtcactacagtggtgccggtaactgggttggttcatatccctattagataatagatgatataattaatgacagctaaacattatcgtgttttttgaacaaaagaacctgattaaaaagctcaacttattttttcatttgaatgcatttacaaagttatatattactaacttctaaacattgtatgtaagtacacacatactctatacttttttaataattcaaacctcaaatgtctttaagacattgagtcc

SEQ ID NO: 54762 - protein, 159 aa, Glycine max
  peptide (1)..(159): Ceres Seq. ID no. 12582040
  misc_feature (26)..(146): Pfam Name: SCP-like extracellular protein Pfam Description: SCP-like extracellular protein
  misc_feature (1)..(159): Homolog of NCBI NO: 2414525 NR Description: pathogenesis-related protein [Lycopersicon
  misc_feature (21)..(159): Homolog of NCBI NO: 15235056 NR Description: pathogenesis-related protein 1 precursor, 19.3K
  misc_feature (8)..(159): Homolog of NCBI NO: 28201315 NR Description: putative pathogenesis-related protein 1
  misc_feature (5)..(159): Homolog of NCBI NO: 548587 NR Description: Pathogenesis-related leaf protein 6 precursor
  misc_feature (5)..(159): Homolog of NCBI NO: 548586 NR Description: Pathogenesis-related leaf protein 4 precursor
  misc_feature (5)..(159): Homolog of NCBI NO: 6066750 NR Description: pathogenesis related protein PR-1 [Solanum
  misc_feature (5)..(159): Homolog of NCBI NO: 15625250 NR Description: pathogenesis-related protein 1b precursor
  misc_feature (1)..(159): Homolog of NCBI NO: 34914926 NR Description: rice pathogenesis-related protein class 1
  misc_feature (5)..(159): Homolog of NCBI NO: 40646968 NR Description: cytoplasmic small heat shock protein class I
  misc_feature (4)..(159): Homolog of NCBI NO: 15222865 NR Description: branched-chain amino acid aminotransferase,
  misc_feature (93)..(93): Xaa is any aa, unknown or other
MKKVIIILALLAVAFAGFSDDCLYSHNQARSVLGLPKMTYSSKLASTALKYAKVLAGTNHLKHSSGRNNIGENLAMGTKGSYDTERLISLWTXEKKNYIPAKKFPNVSRTGNWKDVAHYTQIVWRNTKQVGCGTATNSKNIIIVCHYSGAGNWVGSYPY

SEQ ID NO: 54763 - protein, 122 aa, Glycine max
  peptide (1)..(122): Ceres Seq. ID no. 12582041
  misc_feature (1)..(109): Pfam Name: SCP-like extracellular protein Pfam Description: SCP-like extracellular protein
  misc_feature (1)..(122): Homolog of NCBI NO: 2414525 NR Description: pathogenesis-related protein [Lycopersicon
  misc_feature (1)..(122): Homolog of NCBI NO: 15235056 NR Description: pathogenesis-related protein 1 precursor, 19.3K
  misc_feature (1)..(122): Homolog of NCBI NO: 28201315 NR Description: putative pathogenesis-related protein 1
  misc_feature (1)..(122): Homolog of NCBI NO: 548587 NR Description: Pathogenesis-related leaf protein 6 precursor
  misc_feature (1)..(122): Homolog of NCBI NO: 548586 NR Description: Pathogenesis-related leaf protein 4 precursor
  misc_feature (1)..(122): Homolog of NCBI NO: 6066750 NR Description: pathogenesis related protein PR-1 [Solanum
  misc_feature (1)..(122): Homolog of NCBI NO: 15625250 NR Description: pathogenesis-related protein 1b precursor
  misc_feature (1)..(122): Homolog of NCBI NO: 34914926 NR Description: rice pathogenesis-related protein class 1
  misc_feature (1)..(122): Homolog of NCBI NO: 40646968 NR Description: cytoplasmic small heat shock protein class I
  misc_feature (1)..(122): Homolog of NCBI NO: 15222865 NR Description: branched-chain amino acid aminotransferase,
  misc_feature (56)..(56): Xaa is any aa, unknown or other
MTYSSKLASTALKYAKVLAGTNHLKHSSGRNNIGENLAMGTKGSYDTERLISLWTXEKKNYIPAKKFPNVSRTGNWKDVAHYTQIVWRNTKQVGCGTATNSKNIIIVCHYSGAGNWVGSYPY

SEQ ID NO: 54764 - protein, 84 aa, Glycine max
  peptide (1)..(84): Ceres Seq. ID no. 12582042
  misc_feature (1)..(71): Pfam Name: SCP-like extracellular protein Pfam Description: SCP-like extracellular protein
  misc_feature (1)..(84): Homolog of NCBI NO: 2414525 NR Description: pathogenesis-related protein [Lycopersicon
  misc_feature (1)..(84): Homolog of NCBI NO: 15235056 NR Description: pathogenesis-related protein 1 precursor, 19.3K
  misc_feature (1)..(84): Homolog of NCBI NO: 28201315 NR Description: putative pathogenesis-related protein 1
  misc_feature (1)..(84): Homolog of NCBI NO: 548587 NR Description: Pathogenesis-related leaf protein 6 precursor
  misc_feature (1)..(84): Homolog of NCBI NO: 548586 NR Description: Pathogenesis-related leaf protein 4 precursor
  misc_feature (1)..(84): Homolog of NCBI NO: 6066750 NR Description: pathogenesis related protein PR-1 [Solanum
  misc_feature (1)..(84): Homolog of NCBI NO: 15625250 NR Description: pathogenesis-related protein 1b precursor
  misc_feature (1)..(84): Homolog of NCBI NO: 34914926 NR Description: rice pathogenesis-related protein class 1
  misc_feature (1)..(84): Homolog of NCBI NO: 40646968 NR Description: cytoplasmic small heat shock protein class I
  misc_feature (1)..(84): Homolog of NCBI NO: 15222865 NR Description: branched-chain amino acid aminotransferase,
  misc_feature (18)..(18): Xaa is any aa, unknown or other
MGTKGSYDTERLISLWTXEKKNYIPAKKFPNVSRTGNWKDVAHYTQIVWRNTKQVGCGTATNSKNIIIVCHYSGAGNWVGSYPY

SEQ ID NO: 54765 - DNA, 1229 bp, Glycine max
  misc_feature (1)..(1229): Ceres Seq. ID no. 14310369
acactacagccacttctatagcttcatttaagaatggcactttctcctattcgttcttctactttctcttcatcatcagctattgttacattagctgtgttacttcttcttacaaggacctcttcagctaccctctcaaagaacttctattctaagacatgtccaaacgttttcaacacggtaaaatctgtagtaaaatctgctgtggccaaagaacctcgcattggagcttctattgttcgcctcttcttccatgactgctttgttcaaggttgtgatggaccaatactacttgatgacactccaaccttccagggggagaagactgcagctgctaacaacaattcagtgagaggttatgaattaatcgatgatatcaagtctaaggtcgagaaaatatgccccggtgtggtctcatgtgctgatatcttggacattgcttctcgtgactctgttgttcttcttggaggaccattttggaatgttagacttggaagaagggattctagaagtgccaatttcactgctgcaaacactggtgttattccacctcccacatctaacctcaccaaccttatcacaaggtttcaagatcaaggactctctgctagggacatggttgccttatctggagctcacacatttggcaaagcaaggtgtactagtttcagagatcgcatatacaatcaaaccaacattgacagaacatttgcattggccaggcagaggaggtgccctaggaccaatggcacaggtgacaacaatctagcaaatctagacttcagaactccaaatcattttgacaacaactacttcaaaaaccttctcattaaaaggggactcctcaattctgatcaagtgcttttcaatggtggatccactgattcactggtcagaacatacagccagaataacaaggcctttgattctgactttgttaaagcaatgattaggatgggagatatcaaacccttaactgggtcacaaggggagattaggaagaactgcaggagagtgaattaattagaagtgacacataaatttgtttggtgtacactttgtacccttcaaaagggggaagttgtttggtgtgttgggttgtttaagtgatttctcatgacttggaaattgtgaattgtttgtttagttcagtttaaattgtacttgtgtaaccttataattgtattatggaataaattataaggcattttgccttttgtaccaaaaat

SEQ ID NO: 54766 - protein, 329 aa, Glycine max
  peptide (1)..(329): Ceres Seq. ID no. 14310370
  misc_feature (50)..(293): Pfam Name: Peroxidase Pfam Description: Peroxidase
  misc_feature (29)..(329): Homolog of NCBI NO: 28400796 NR Description: peroxidase [Asparagus officinalis]
  misc_feature (13)..(329): Homolog of NCBI NO: 28400798 NR Description: peroxidase [Asparagus officinalis]
  misc_feature (10)..(329): Homolog of NCBI NO: 5002344 NR Description: peroxidase 3 precursor [Phaseolus vulgaris]
  misc_feature (17)..(329): Homolog of NCBI NO: 21537247 NR Description: peroxidase [Arabidopsis thaliana]
  misc_feature (17)..(329): Homolog of NCBI NO: 15237187 NR Description: peroxidase, putative [Arabidopsis thaliana]
  misc_feature (12)..(329): Homolog of NCBI NO: 19698446 NR Description: class III peroxidase [Gossypium hirsutum]
  misc_feature (15)..(329): Homolog of NCBI NO: 5381253 NR Description: peroxidase [Nicotiana tabacum]
  misc_feature (9)..(329): Homolog of NCBI NO: 32351452 NR Description: class III peroxidase [Gossypium hirsutum]
  misc_feature (7)..(329): Homolog of NCBI NO: 39777532 NR Description: peroxidase precursor [Quercus suber]
  misc_feature (8)..(329): Homolog of NCBI NO: 39777536 NR Description: peroxidase precursor [Quercus suber]
MALSPIRSSTFSSSSAIVTLAVLLLLTRTSSATLSKNFYSKTCPNVFNTVKSVVKSAVAKEPRIGASIVRLFFHDCFVQGCDGPILLDDTPTFQGEKTAAANNNSVRGYELIDDIKSKVEKICPGVVSCADILDIASRDSVVLLGGPFWNVRLGRRDSRSANFTAANTGVIPPPTSNLTNLITRFQDQGLSARDMVALSGAHTFGKARCTSFRDRIYNQTNIDRTFALARQRRCPRTNGTGDNNLANLDFRTPNHFDNNYFKNLLIKRGLLNSDQVLFNGGSTDSLVRTYSQNNKAFDSDFVKAMIRMGDIKPLTGSQGEIRKNCRRVN

SEQ ID NO: 54767 - DNA, 1654 bp, Glycine max
  misc_feature (1)..(1654): Ceres Seq. ID no. 14311156
aattcagaacacagagagacctcgtcaaggctaaatacgagaaaatgcagaaaaatatcgagaaatttggttcagaccctaaaagtcgtcgtattgtgagtgacagacaacctcgtattgagattataaatgaccaaccgggaatgccacttattgtttatgtgtctcgcgaaagaaggccatcccttcctcacaaattcaaaggaggagccgtcaacacattgctcagagtctcaggtttaatcagtaatggaccttatgttctagtaatggactgtgatatgtatagcaatgatccaacctctgccaaacaagccatgtgcttctttcttgatcctgaaacgtccaaatatattgcatttgttcaattccctcaaatgtttcacaaccttagcaaaaaggacatttatgatagtcaagctagaactgcttttaagacaatgtggcaaggcatggatggactaagaggtccaggtctttctggcagcggcaattacttaagtagaagtgctttactatttggaagtccaaaccaaaaagatgactatctgcaagatgcacaaaagtacttcggcaagtctaccgcctacattgaatcactgaaggccatccgtggacagaaaagtagcaaaaagaatatttcaagagatgaaatgttaagagaagctcaagtagtggcctcttgttcctacgaaaataacacaaattggggcacagaggtgggattctcatatggcatattactagagagttctattactggctatattcttcacagcagaggatggaaatcagcatatctttacccgaaaacaccatgtttcttaggttgtgctcccactgacatcaaggaaggcatgcttcagttggttaagtggttgtctgaacttttgttgcttggtgtctcctccaaatacagcccattcacttatggattttcaagaatgtccatacttcacacattcacttattgcttcatcacaatgtcatccctttatgctgttgtcttcatcctctacggcattgtacctcaagtatgcctcctcaaaggaatccctgtgtttccaaaggccacagacccttggtttgccgtgtttgcatttgtgtatgtatctactcagattcaacatttgattgaggttctctctggggatggatctgtgacaatgtggtgggatgaacaaagaatttggattctgaagtcagttaccagcatatttgcaattatagatggaatcaagaagtggttggggttgagcaaggtgaaattcaacttgtcaaacaaagccattgacaaagagaagctcaagaaatatgagcaaggtagattcgatttccaaggtgcagctgtgttcatggctccattggttctattactcacagccaacattgttagcttcttagttggtatatggagactatttaatttcaatgtgaaggattttgaagaaatgtttggtcaacttttcctagttacctatgtaatggttcttagttatccacttcttgaggccatggtaacaatgaaaagcaagagtggatagtgaaatttggtcacaaataattaggctcattcaagagtctaaattgattatgtatcttgagatgaaattgcttaatgcaatcttgttcgttcagtttagattaatctaat

SEQ ID NO: 54768 - protein, 513 aa, Glycine max
  peptide (1)..(513): Ceres Seq. ID no. 14311157
  misc_feature (48)..(176): Pfam Name: Cellulose synthase Pfam Description: Cellulose synthase
  misc_feature (75)..(176): Homolog of NCBI NO: 15233653 NR Description: cellulose synthase - related [Arabidopsis
  misc_feature (197)..(509): Homolog of NCBI NO: 15233653 NR Description: cellulose synthase - related [Arabidopsis
  misc_feature (30)..(180): Homolog of NCBI NO: 16519225 NR Description: cellulose synthase-like protein OsCslE1 [Oryza
  misc_feature (204)..(509): Homolog of NCBI NO: 16519225 NR Description: cellulose synthase-like protein OsCslE1 [Oryza
  misc_feature (48)..(176): Homolog of NCBI NO: 2262114 NR Description: cellulose synthase isolog [Arabidopsis thaliana]
  misc_feature (197)..(509): Homolog of NCBI NO: 2262114 NR Description: cellulose synthase isolog [Arabidopsis thaliana]
  misc_feature (43)..(176): Homolog of NCBI NO: 30686386 NR Description: cellulose synthase - related [Arabidopsis
  misc_feature (43)..(176): Homolog of NCBI NO: 2262115 NR Description: cellulose synthase isolog [Arabidopsis thaliana]
  misc_feature (189)..(506): Homolog of NCBI NO: 30686386 NR Description: cellulose synthase - related [Arabidopsis
  misc_feature (189)..(506): Homolog of NCBI NO: 2262115 NR Description: cellulose synthase isolog [Arabidopsis thaliana]
FRTQRDLVKAKYEKMQKNIEKFGSDPKSRRIVSDRQPRIEIINDQPGMPLIVYVSRERRPSLPHKFKGGAVNTLLRVSGLISNGPYVLVMDCDMYSNDPTSAKQAMCFFLDPETSKYIAFVQFPQMFHNLSKKDIYDSQARTAFKTMWQGMDGLRGPGLSGSGNYLSRSALLFGSPNQKDDYLQDAQKYFGKSTAYIESLKAIRGQKSSKKNISRDEMLREAQVVASCSYENNTNWGTEVGFSYGILLESSITGYILHSRGWKSAYLYPKTPCFLGCAPTDIKEGMLQLVKWLSELLLLGVSSKYSPFTYGFSRMSILHTFTYCFITMSSLYAVVFILYGIVPQVCLLKGIPVFPKATDPWFAVFAFVYVSTQIQHLIEVLSGDGSVTMWWDEQRIWILKSVTSIFAIIDGIKKWLGLSKVKFNLSNKAIDKEKLKKYEQGRFDFQGAAVFMAPLVLLLTANIVSFLVGIWRLFNFNVKDFEEMFGQLFLVTYVMVLSYPLLEAMVTMKSKSG

SEQ ID NO: 54769 - protein, 499 aa, Glycine max
  peptide (1)..(499): Ceres Seq. ID no. 14311158
  misc_feature (34)..(162): Pfam Name: Cellulose synthase Pfam Description: Cellulose synthase
  misc_feature (61)..(162): Homolog of NCBI NO: 15233653 NR Description: cellulose synthase - related [Arabidopsis
  misc_feature (183)..(495): Homolog of NCBI NO: 15233653 NR Description: cellulose synthase - related [Arabidopsis
  misc_feature (16)..(166): Homolog of NCBI NO: 16519225 NR Description: cellulose synthase-like protein OsCslE1 [Oryza
  misc_feature (190)..(495): Homolog of NCBI NO: 16519225 NR Description: cellulose synthase-like protein OsCslE1 [Oryza
  misc_feature (34)..(162): Homolog of NCBI NO: 2262114 NR Description: cellulose synthase isolog [Arabidopsis thaliana]
  misc_feature (183)..(495): Homolog of NCBI NO: 2262114 NR Description: cellulose synthase isolog [Arabidopsis thaliana]
  misc_feature (29)..(162): Homolog of NCBI NO: 30686386 NR Description: cellulose synthase - related [Arabidopsis
  misc_feature (29)..(162): Homolog of NCBI NO: 2262115 NR Description: cellulose synthase isolog [Arabidopsis thaliana]
  misc_feature (175)..(492): Homolog of NCBI NO: 30686386 NR Description: cellulose synthase - related [Arabidopsis
  misc_feature (175)..(492): Homolog of NCBI NO: 2262115 NR Description: cellulose synthase isolog [Arabidopsis thaliana]
MQKNIEKFGSDPKSRRIVSDRQPRIEIINDQPGMPLIVYVSRERRPSLPHKFKGGAVNTLLRVSGLISNGPYVLVMDCDMYSNDPTSAKQAMCFFLDPETSKYIAFVQFPQMFHNLSKKDIYDSQARTAFKTMWQGMDGLRGPGLSGSGNYLSRSALLFGSPNQKDDYLQDAQKYFGKSTAYIESLKAIRGQKSSKKNISRDEMLREAQVVASCSYENNTNWGTEVGFSYGILLESSITGYILHSRGWKSAYLYPKTPCFLGCAPTDIKEGMLQLVKWLSELLLLGVSSKYSPFTYGFSRMSILHTFTYCFITMSSLYAVVFILYGIVPQVCLLKGIPVFPKATDPWFAVFAFVYVSTQIQHLIEVLSGDGSVTMWWDEQRIWILKSVTSIFAIIDGIKKWLGLSKVKFNLSNKAIDKEKLKKYEQGRFDFQGAAVFMAPLVLLLTANIVSFLVGIWRLFNFNVKDFEEMFGQLFLVTYVMVLSYPLLEAMVTMKSKSG

SEQ ID NO: 54770 - protein, 466 aa, Glycine max
  peptide (1)..(466): Ceres Seq. ID no. 14311159
  misc_feature (1)..(129): Pfam Name: Cellulose synthase Pfam Description: Cellulose synthase
  misc_feature (28)..(129): Homolog of NCBI NO: 15233653 NR Description: cellulose synthase - related [Arabidopsis
  misc_feature (150)..(462): Homolog of NCBI NO: 15233653 NR Description: cellulose synthase - related [Arabidopsis
  misc_feature (1)..(133): Homolog of NCBI NO: 16519225 NR Description: cellulose synthase-like protein OsCslE1 [Oryza
  misc_feature (157)..(462): Homolog of NCBI NO: 16519225 NR Description: cellulose synthase-like protein OsCslE1 [Oryza
  misc_feature (1)..(129): Homolog of NCBI NO: 2262114 NR Description: cellulose synthase isolog [Arabidopsis thaliana]
  misc_feature (150)..(462): Homolog of NCBI NO: 2262114 NR Description: cellulose synthase isolog [Arabidopsis thaliana]
  misc_feature (1)..(129): Homolog of NCBI NO: 30686386 NR Description: cellulose synthase - related [Arabidopsis
  misc_feature (1)..(129): Homolog of NCBI NO: 2262115 NR Description: cellulose synthase isolog [Arabidopsis thaliana]
  misc_feature (142)..(459): Homolog of NCBI NO: 30686386 NR Description: cellulose synthase - related [Arabidopsis
  misc_feature (142)..(459): Homolog of NCBI NO: 2262115 NR Description: cellulose synthase isolog [Arabidopsis thaliana]
MPLIVYVSRERRPSLPHKFKGGAVNTLLRVSGLISNGPYVLVMDCDMYSNDPTSAKQAMCFFLDPETSKYIAFVQFPQMFHNLSKKDIYDSQARTAFKTMWQGMDGLRGPGLSGSGNYLSRSALLFGSPNQKDDYLQDAQKYFGKSTAYIESLKAIRGQKSSKKNISRDEMLREAQVVASCSYENNTNWGTEVGFSYGILLESSITGYILHSRGWKSAYLYPKTPCFLGCAPTDIKEGMLQLVKWLSELLLLGVSSKYSPFTYGFSRMSILHTFTYCFITMSSLYAVVFILYGIVPQVCLLKGIPVFPKATDPWFAVFAFVYVSTQIQHLIEVLSGDGSVTMWWDEQRIWILKSVTSIFAIIDGIKKWLGLSKVKFNLSNKAIDKEKLKKYEQGRFDFQGAAVFMAPLVLLLTANIVSFLVGIWRLFNFNVKDFEEMFGQLFLVTYVMVLSYPLLEAMVTMKSKSG

SEQ ID NO: 54771 - DNA, 1080 bp, Glycine max
  misc_feature (1)..(1080): Ceres Seq. ID no. 13581092
cagctacgtaggccccccccccaattgactagagagggaatagtgctgcacaatgggtctgaataaagctgtaaaattgcctgcttttttccctatggtggttgagctatcatagacttgggtttcacaaaaacaaaacccatggaaaaggaaatggaatcttggacaattcatgggtcttcagcataatatgtaggtacatttgtttgtgttaccatgccgatcatttaaattttgcatgcagtacacatcacaagttgcaagactttttaattgtactataaaataaaacttgaatccaaggttttaaatattggactgccgtggcaaacactgtcccaatttgcgttagaaaaccttgatgtcacggtccacgttaagatgcaaactgtttttttaaaaccttatttaaatcaaattcaacacaattgatttgattataatgttgtatatgtttttttttatgtgatcagatttttggtggatgaaacgccaataagggtgcacacgaacatggagcacaagggaattccatttcctaaggaccaacccatgggtgtgtacagttcattatggaatgctgatgattgggccacgcagggtggtcgtgtgaaaacagattggagccacgcacccttcattgccacatacaagaacttcgagataaatgcgtgtgagtgtcccgtgtcagtggctgcaatggataatgctaagaagtgcaccagcagtgaggggaataagtattggtgggatgagcctaatttggctgaactcaacttgcaccagagccaccagcttatgtgggttagggcaaggcacattttctatgactattgcactgacactgctaggttcccagtcacgcctgctgagtgtgtccatcaccgtcacacctgagcagacttagtgattagtctaaactttattttgttataacttatgggaagttatgaaaataggattggggcataagaaaaaaatggtgggtggtgaacaaagttgtggaacatgtccttcatgtttctgattgtaatatatattgccacaacattaatgtgaattgttggtttttcttcttgt

SEQ ID NO: 54772 - protein, 127 aa, Glycine max
  peptide (1)..(127): Ceres Seq. ID no. 13581093
  misc_feature (1)..(125): Homolog of NCBI NO: 541939 NR Description: xyloglucan endo-1,4-beta-D-glucanase (EC 3.2.1.-)
  misc_feature (1)..(126): Homolog of NCBI NO: 21553878 NR Description: putative xyloglucan endotransglycosylase
  misc_feature (1)..(126): Homolog of NCBI NO: 15236265 NR Description: xyloglucan endotransglycosylase, putative
MEHKGIPFPKDQPMGVYSSLWNADDWATQGGRVKTDWSHAPFIATYKNFEINACECPVSVAAMDNAKKCTSSEGNKYWWDEPNLAELNLHQSHQLMWVRARHIFYDYCTDTARFPVTPAECVHHRHT

SEQ ID NO: 54773 - protein, 114 aa, Glycine max
  peptide (1)..(114): Ceres Seq. ID no. 13581094
  misc_feature (1)..(112): Homolog of NCBI NO: 541939 NR Description: xyloglucan endo-1,4-beta-D-glucanase (EC 3.2.1.-)
  misc_feature (1)..(113): Homolog of NCBI NO: 21553878 NR Description: putative xyloglucan endotransglycosylase
  misc_feature (1)..(113): Homolog of NCBI NO: 15236265 NR Description: xyloglucan endotransglycosylase, putative
MGVYSSLWNADDWATQGGRVKTDWSHAPFIATYKNFEINACECPVSVAAMDNAKKCTSSEGNKYWWDEPNLAELNLHQSHQLMWVRARHIFYDYCTDTARFPVTPAECVHHRHT

SEQ ID NO: 54774 - protein, 79 aa, Glycine max
  peptide (1)..(79): Ceres Seq. ID no. 13581095
MRVSVPCQWLQWIMLRSAPAVRGISIGGMSLIWLNSTCTRATSLCGLGQGTFSMTIALTLLGSQSRLLSVSITVTPEQT

SEQ ID NO: 54775 - DNA, 1580 bp, Glycine max
  misc_feature (1)..(1580): Ceres Seq. ID no. 14307164
acttcacttcagttgactctctctctcctccaccagcccgccatttttctctctctaaaacacaaacacatgacatctccttatgctcctcgccggcgatccagctccgaccaccggaccacgcccggaagagcaccgccctcccccagcttcgcctcttccgagctgagcacctcctccaccgtctccacccaccggaaccccgtctccgccgtcgccaagtccttcgccggaatctttgccggctgcttcgctcggccggatttcgacaactccaagagcctcggggattccgaggagttcaagtcttcttcctctgtatcgaatgcttcaagagctggtagtcagagagggcgtggctcaaatcgaggtatcagcatcagttcatacaacatattgccagcgaaagaaccaggcattgtgaagttcaccatggaggaaatcttccgagtcacaaggaacttctccccttctttcaagattggccaaggtggttttggtgctgtctataaggccaaactcctagatgggactgttgttgcagtaaagcgtgctaagaagagtatgtatgagaagcatttgggggtggagttccaaagcgagatccaaacactatcacgggtggaacatttgaacttggtcaagttctttggatatttggagcaagaggatgaaaggatcattgttgtggagcatgttccaaatggaacccttagagaacatttagattgcattcatggaagcgttctggaccttgctgcacgtctagatatagcaattgatgtttctcatgctatcacctatcttcatatgtatatagatcatcctatcatccatagagacataaaatcttcaaacattcttctcactgaaaattttcgagctaaagtagcagactttggttttgctagacaagcccctgacagtgactctggcatgacacatatttccacccaaataaaaggaacagctggctacttggaccctgaatacctgaaaacttatcaactaactgaaaagagtgacgtgtattcatttggagttttgcttgttgaacttgtcacaggcagacgccccattgaaccaaaatttgaactcagggagcgaatcacggcaaaatgggtgggtattggtattgtgtactatctgccttcattttattcttctagtttgctatttagtagtttttcataatttcatgaaaaccaacaatatcttctatgacactccattttgctcagtagttaagcatcttttcttcatgattacacaatctcaatccattttgttccaagctttagttggtaagaatgatggagaaggcatttgaaaagacttacatgatgcttaataatgctcacaaaatgatgacatttctataagctccttttagcttattttagtaagagtttatcatacatgcattttctgtaaaggtttttacaatgtcaatcaataaaaaattattattattacttttaaggtaattattataaaatttggtaaacttataatacatcacagtttgtgattgaatgatgatataaaagaaaatgctaaccaatgcccttgggtcattg

SEQ ID NO: 54776 - protein, 397 aa, Glycine max
  peptide (1)..(397): Ceres Seq. ID no. 14307165
  misc_feature (155)..(359): Pfam Name: Protein kinase domain Pfam Description: Protein kinase domain
  misc_feature (52)..(374): Homolog of NCBI NO: 34897358 NR Description: putative receptor kinase [Oryza sativa]
  misc_feature (197)..(374): Homolog of NCBI NO: 7434312 NR Description: receptor-like protein kinase 5 homolog
  misc_feature (83)..(374): Homolog of NCBI NO: 38345153 NR Description: OSJNBa0014K14.7 [Oryza sativa (japonica
  misc_feature (139)..(374): Homolog of NCBI NO: 25287604 NR Description: probable protein kinase [imported] - Arabidopsis
  misc_feature (126)..(374): Homolog of NCBI NO: 18397027 NR Description: protein kinase family [Arabidopsis thaliana]
  misc_feature (147)..(374): Homolog of NCBI NO: 15237782 NR Description: protein kinase family [Arabidopsis thaliana]
  misc_feature (90)..(374): Homolog of NCBI NO: 9759225 NR Description: contains similarity to protein
  misc_feature (145)..(374): Homolog of NCBI NO: 34908354 NR Description: P0529H11.30 [Oryza sativa (japonica
  misc_feature (44)..(374): Homolog of NCBI NO: 27261468 NR Description: Hypothetical protein [Oryza sativa (japonica
  misc_feature (30)..(374): Homolog of NCBI NO: 22328175 NR Description: protein kinase family [Arabidopsis thaliana]
TSLQLTLSLLHQPAIFLSLKHKHMTSPYAPRRRSSSDHRTTPGRAPPSPSFASSELSTSSTVSTHRNPVSAVAKSFAGIFAGCFARPDFDNSKSLGDSEEFKSSSSVSNASRAGSQRGRGSNRGISISSYNILPAKEPGIVKFTMEEIFRVTRNFSPSFKIGQGGFGAVYKAKLLDGTVVAVKRAKKSMYEKHLGVEFQSEIQTLSRVEHLNLVKFFGYLEQEDERIIVVEHVPNGTLREHLDCIHGSVLDLAARLDIAIDVSHAITYLHMYIDHPIIHRDIKSSNILLTENFRAKVADFGFARQAPDSDSGMTHISTQIKGTAGYLDPEYLKTYQLTEKSDVYSFGVLLVELVTGRRPIEPKFELRERITAKWVGIGIVYYLPSFYSSSLLFSSFS

SEQ ID NO: 54777 - protein, 374 aa, Glycine max
  peptide (1)..(374): Ceres Seq. ID no. 14307166
  misc_feature (132)..(336): Pfam Name: Protein kinase domain Pfam Description: Protein kinase domain
  misc_feature (29)..(351): Homolog of NCBI NO: 34897358 NR Description: putative receptor kinase [Oryza sativa]
  misc_feature (174)..(351): Homolog of NCBI NO: 7434312 NR Description: receptor-like protein kinase 5 homolog
  misc_feature (60)..(351): Homolog of NCBI NO: 38345153 NR Description: OSJNBa0014K14.7 [Oryza sativa (japonica
  misc_feature (116)..(351): Homolog of NCBI NO: 25287604 NR Description: probable protein kinase [imported] - Arabidopsis
  misc_feature (103)..(351): Homolog of NCBI NO: 18397027 NR Description: protein kinase family [Arabidopsis thaliana]
  misc_feature (124)..(351): Homolog of NCBI NO: 15237782 NR Description: protein kinase family [Arabidopsis thaliana]
  misc_feature (67)..(351): Homolog of NCBI NO: 9759225 NR Description: contains similarity to protein
  misc_feature (122)..(351): Homolog of NCBI NO: 34908354 NR Description: P0529H11.30 [Oryza sativa (japonica
  misc_feature (21)..(351): Homolog of NCBI NO: 27261468 NR Description: Hypothetical protein [Oryza sativa (japonica
  misc_feature (7)..(351): Homolog of NCBI NO: 22328175 NR Description: protein kinase family [Arabidopsis thaliana]
MTSPYAPRRRSSSDHRTTPGRAPPSPSFASSELSTSSTVSTHRNPVSAVAKSFAGIFAGCFARPDFDNSKSLGDSEEFKSSSSVSNASRAGSQRGRGSNRGISISSYNILPAKEPGIVKFTMEEIFRVTRNFSPSFKIGQGGFGAVYKAKLLDGTVVAVKRAKKSMYEKHLGVEFQSEIQTLSRVEHLNLVKFFGYLEQEDERIIVVEHVPNGTLREHLDCIHGSVLDLAARLDIAIDVSHAITYLHMYIDHPIIHRDIKSSNILLTENFRAKVADFGFARQAPDSDSGMTHISTQIKGTAGYLDPEYLKTYQLTEKSDVYSFGVLLVELVTGRRPIEPKFELRERITAKWVGIGIVYYLPSFYSSSLLFSSFS

SEQ ID NO: 54778 - protein, 253 aa, Glycine max
  peptide (1)..(253): Ceres Seq. ID no. 14307167
  misc_feature (11)..(215): Pfam Name: Protein kinase domain Pfam Description: Protein kinase domain
  misc_feature (1)..(230): Homolog of NCBI NO: 34897358 NR Description: putative receptor kinase [Oryza sativa]
  misc_feature (53)..(230): Homolog of NCBI NO: 7434312 NR Description: receptor-like protein kinase 5 homolog
  misc_feature (1)..(230): Homolog of NCBI NO: 38345153 NR Description: OSJNBa0014K14.7 [Oryza sativa (japonica
  misc_feature (1)..(230): Homolog of NCBI NO: 25287604 NR Description: probable protein kinase [imported] - Arabidopsis
  misc_feature (1)..(230): Homolog of NCBI NO: 18397027 NR Description: protein kinase family [Arabidopsis thaliana]
  misc_feature (3)..(230): Homolog of NCBI NO: 15237782 NR Description: protein kinase family [Arabidopsis thaliana]
  misc_feature (1)..(230): Homolog of NCBI NO: 9759225 NR Description: contains similarity to protein
  misc_feature (1)..(230): Homolog of NCBI NO: 34908354 NR Description: P0529H11.30 [Oryza sativa (japonica
  misc_feature (1)..(230): Homolog of NCBI NO: 27261468 NR Description: Hypothetical protein [Oryza sativa (japonica
  misc_feature (1)..(230): Homolog of NCBI NO: 22328175 NR Description: protein kinase family [Arabidopsis thaliana]
MEEIFRVTRNFSPSFKIGQGGFGAVYKAKLLDGTVVAVKRAKKSMYEKHLGVEFQSEIQTLSRVEHLNLVKFFGYLEQEDERIIVVEHVPNGTLREHLDCIHGSVLDLAARLDIAIDVSHAITYLHMYIDHPIIHRDIKSSNILLTENFRAKVADFGFARQAPDSDSGMTHISTQIKGTAGYLDPEYLKTYQLTEKSDVYSFGVLLVELVTGRRPIEPKFELRERITAKWVGIGIVYYLPSFYSSSLLFSSFS

SEQ ID NO: 54779 - DNA, 1214 bp, Glycine max
  misc_feature (1)..(1214): Ceres Seq. ID no. 14307639
aaaaaatcatcaaagctcaaacccccctctctctactcaaactaaccactctgtttctcttgctctacttttaccctgtttccagtggaacaaatcttcatccaaattaggttttgttttggagaaatgtatgcagagactggtcttttcttcccatatttgcacaacgtctctcacggccttcatcagcttgaggagtactgcaaaacccagaagtccaatgcttcaatggatgaccttgttcagtcttctgccatgtcagagtatgatttggcagctgagggagatctgttcaaagctcctgaacctattattgaagagccaatcatggacatgtcagcggccatctcaatgatgtcttgtggggaagatgtctcgtcacagggactaaagtccactgatattgatattcttcaaaatgatcagtttctgagtgaggtgttctatgaatgtgaaaaggatctcttagaaaaggcagcaatagagtcaccattctctgagattctggaaatcaaggttccttttctgaacattgatgagaacacaattcaagaaaacaagccatttactgacatgcaattagcaaagagtgtcagctcaggaagtttgagctcaatggactggatgcgtggagctgcaatgaagcctgctttcattgatatctctgcaatagatttcaatgcagattatggcatgcggagatcatttagtgaaggagatataaagactcttggtaatggtaacatgaacatcgtccaatcaccccttgagaggccccttcttatcagcaactgcaccagtgaggaacgcttccaaaagctctccagatacaggaataagaagacaaagaggaattttgggaggaaaatcaagtatgcttgcaggaaggcacttgctgacagtcagccaagaatccgtggaagatttgcaaggactgaagaatctgatgtcaagagggaatgaatgacttaaaactgatttagtaggaagaaaatagagttgagtagctatatctgatcaagctatatggaaaaactcagcagtaatatgtgattagaacttatgtggggagtctctgtttgtttgagcagatatttgctgaataaaccaggcctcaaacttcttaggctagttcatctcttatctattgtattaacgtctctatagacggaaataaccttccagatatgtaaatagttttgttgaataatgga

SEQ ID NO: 54780 - protein, 278 aa, Glycine max
  peptide (1)..(278): Ceres Seq. ID no. 14307640
  misc_feature (233)..(272): Pfam Name: CCT motif Pfam Description: CCT motif
  misc_feature (220)..(272): Homolog of NCBI NO: 15225838 NR Description: hypothetical protein [Arabidopsis thaliana]
  misc_feature (220)..(272): Homolog of NCBI NO: 26451419 NR Description: unknown protein [Arabidopsis thaliana]
  misc_feature (190)..(272): Homolog of NCBI NO: 15238070 NR Description: hypothetical protein [Arabidopsis thaliana]
  misc_feature (155)..(272): Homolog of NCBI NO: 15238589 NR Description: hypothetical protein [Arabidopsis thaliana]
  misc_feature (184)..(272): Homolog of NCBI NO: 15222540 NR Description: hypothetical protein [Arabidopsis thaliana]
  misc_feature (35)..(272): Homolog of NCBI NO: 21593708 NR Description: unknown [Arabidopsis thaliana]
  misc_feature (1)..(272): Homolog of NCBI NO: 15234310 NR Description: expressed protein [Arabidopsis thaliana]
  misc_feature (39)..(272): Homolog of NCBI NO: 21536819 NR Description: unknown [Arabidopsis thaliana]
  misc_feature (1)..(272): Homolog of NCBI NO: 8843771 NR Description: gene_id:MYN8.3~pir||T02891~similar to unknown
  misc_feature (1)..(272): Homolog of NCBI NO: 18423511 NR Description: expressed protein [Arabidopsis thaliana]
MYAETGLFFPYLHNVSHGLHQLEEYCKTQKSNASMDDLVQSSAMSEYDLAAEGDLFKAPEPIIEEPIMDMSAAISMMSCGEDVSSQGLKSTDIDILQNDQFLSEVFYECEKDLLEKAAIESPFSEILEIKVPFLNIDENTIQENKPFTDMQLAKSVSSGSLSSMDWMRGAAMKPAFIDISAIDFNADYGMRRSFSEGDIKTLGNGNMNIVQSPLERPLLISNCTSEERFQKLSRYRNKKTKRNFGRKIKYACRKALADSQPRIRGRFARTEESDVKRE

SEQ ID NO: 54781 - protein, 244 aa, Glycine max
  peptide (1)..(244): Ceres Seq. ID no. 14307641
  misc_feature (199)..(238): Pfam Name: CCT motif Pfam Description: CCT motif
  misc_feature (186)..(238): Homolog of NCBI NO: 15225838 NR Description: hypothetical protein [Arabidopsis thaliana]
  misc_feature (186)..(238): Homolog of NCBI NO: 26451419 NR Description: unknown protein [Arabidopsis thaliana]
  misc_feature (156)..(238): Homolog of NCBI NO: 15238070 NR Description: hypothetical protein [Arabidopsis thaliana]
  misc_feature (121)..(238): Homolog of NCBI NO: 15238589 NR Description: hypothetical protein [Arabidopsis thaliana]
  misc_feature (150)..(238): Homolog of NCBI NO: 15222540 NR Description: hypothetical protein [Arabidopsis thaliana]
  misc_feature (1)..(238): Homolog of NCBI NO: 21593708 NR Description: unknown [Arabidopsis thaliana]
  misc_feature (1)..(238): Homolog of NCBI NO: 15234310 NR Description: expressed protein [Arabidopsis thaliana]
  misc_feature (5)..(238): Homolog of NCBI NO: 21536819 NR Description: unknown [Arabidopsis thaliana]
  misc_feature (1)..(238): Homolog of NCBI NO: 8843771 NR Description: gene_id:MYN8.3~pir||T02891~similar to unknown
  misc_feature (1)..(238): Homolog of NCBI NO: 18423511 NR Description: expressed protein [Arabidopsis thaliana]
MDDLVQSSAMSEYDLAAEGDLFKAPEPIIEEPIMDMSAAISMMSCGEDVSSQGLKSTDIDILQNDQFLSEVFYECEKDLLEKAAIESPFSEILEIKVPFLNIDENTIQENKPFTDMQLAKSVSSGSLSSMDWMRGAAMKPAFIDISAIDFNADYGMRRSFSEGDIKTLGNGNMNIVQSPLERPLLISNCTSEERFQKLSRYRNKKTKRNFGRKIKYACRKALADSQPRIRGRFARTEESDVKRE

SEQ ID NO: 54782 - protein, 235 aa, Glycine max
  peptide (1)..(235): Ceres Seq. ID no. 14307642
  misc_feature (190)..(229): Pfam Name: CCT motif Pfam Description: CCT motif
  misc_feature (177)..(229): Homolog of NCBI NO: 15225838 NR Description: hypothetical protein [Arabidopsis thaliana]
  misc_feature (177)..(229): Homolog of NCBI NO: 26451419 NR Description: unknown protein [Arabidopsis thaliana]
  misc_feature (147)..(229): Homolog of NCBI NO: 15238070 NR Description: hypothetical protein [Arabidopsis thaliana]
  misc_feature (112)..(229): Homolog of NCBI NO: 15238589 NR Description: hypothetical protein [Arabidopsis thaliana]
  misc_feature (141)..(229): Homolog of NCBI NO: 15222540 NR Description: hypothetical protein [Arabidopsis thaliana]
  misc_feature (1)..(229): Homolog of NCBI NO: 21593708 NR Description: unknown [Arabidopsis thaliana]
  misc_feature (1)..(229): Homolog of NCBI NO: 15234310 NR Description: expressed protein [Arabidopsis thaliana]
  misc_feature (1)..(229): Homolog of NCBI NO: 21536819 NR Description: unknown [Arabidopsis thaliana]
  misc_feature (1)..(229): Homolog of NCBI NO: 8843771 NR Description: gene_id:MYN8.3~pir||T02891~similar to unknown
  misc_feature (1)..(229): Homolog of NCBI NO: 18423511 NR Description: expressed protein [Arabidopsis thaliana]
MSEYDLAAEGDLFKAPEPIIEEPIMDMSAAISMMSCGEDVSSQGLKSTDIDILQNDQFLSEVFYECEKDLLEKAAIESPFSEILEIKVPFLNIDENTIQENKPFTDMQLAKSVSSGSLSSMDWMRGAAMKPAFIDISAIDFNADYGMRRSFSEGDIKTLGNGNMNIVQSPLERPLLISNCTSEERFQKLSRYRNKKTKRNFGRKIKYACRKALADSQPRIRGRFARTEESDVKRE

SEQ ID NO: 54783 - DNA, 1531 bp, Glycine max
  misc_feature (1)..(1531): Ceres Seq. ID no. 14307253
gaataaatagtaactctaatctaacacgctttctctgctgtgtctttgcagtgagtttcattgcaaagctacttttctctgtttggggataaataaaatgggttgcttttcatgtttcgattcgagttccaaggaggatcacaatctccgtcctcagcaccaacccaatcaacctctcccttctcagatttccagattgccctctggagcagacaagttacggtccagaagtaatggaggttccaaaagagaactgcaacagcctcctcccaccgtccaaattgctgctcaaacatttactttccgtgaacttgccgctgcaactaaaaactttagaccagagtcctttgttggggaaggtggttttggaagggtctacaaaggcaggcttgaaaccactgctcagattgttgctgtcaaacagttagacaaaaatggtcttcagggtaatcgggaattccttgtagaggttctcatgctcagtcttctacatcaccctaaccttgtcaatctcattggatactgtgcggatggggatcaacgcctcctcgtttatgaatttatgcctttgggatcattggaagatcaccttcatgatcttccccctgataaggaaccactagattggaacactagaatgaaaattgctgttggtgctgcaaaaggattagaataccttcacgataaggcaaatcctcctgtcatctacagagacttcaagtcatctaacatattacttgatgaaggataccacccaaaactttctgactttggtcttgcgaagcttggtcctgttggtgacaaatcacatgtttctacccgtgtcatgggaacttatggttactgtgctcctgagtatgctatgactggacagctgactgtgaagtctgatgtatatagttttggggtggtcttcttagagctgattactggccgtaaagcaattgacagcacccagccgcagggagaacagaaccttgtcacatgggcacgtccactttttaatgaccgcaggaagttttcaaagttggctgatcccaggctgcaggggcgatttcccatgcggggtctttaccaggctcttgctgtggcatcaatgtgcattcaagaatcagctgcaacgcgtcctctaattggagatgtggtgacagccctctcttatctggccaaccaggcatatgaccccaatggttatagggggtctagtgatgataaaaggaacagagatgataaaggtggaagaatatccaaaaatgatgaagctgggggatctggacgcagatgggacttggaaggatccgagaaagatgactccccacgagaaactgcaaggattttaaacagagatctagatagagaacgagctgtggctgaagccaagatgtggggagagaacttgagacaaaaaagaaaacaaagtttgcagcagggcagtcttgatgcttaattttctgccttgaggctatggaagatggaagaaaatatggggagcttatctagagaaacaactcaaacagccagccatttaggc

SEQ ID NO: 54784 - protein, 449 aa, Glycine max
  peptide (1)..(449): Ceres Seq. ID no. 14307254
  misc_feature (62)..(379): Homolog of NCBI NO: 15232294 NR Description: protein kinase family [Arabidopsis thaliana]
  misc_feature (1)..(363): Homolog of NCBI NO: 30679773 NR Description: protein kinase family [Arabidopsis thaliana]
  misc_feature (1)..(364): Homolog of NCBI NO: 34899302 NR Description: putative protein serine/threonine kinase
  misc_feature (61)..(366): Homolog of NCBI NO: 34394036 NR Description: putative protein serine/threonine kinase BNK1
  misc_feature (1)..(364): Homolog of NCBI NO: 34395193 NR Description: putative protein serine/threonine kinase
  misc_feature (31)..(434): Homolog of NCBI NO: 34907210 NR Description: putative serine/threonine kinase PBS1 protein
  misc_feature (298)..(446): Homolog of NCBI NO: 21740745 NR Description: OSJNBa0072K14.3 [Oryza sativa (japonica
  misc_feature (42)..(297): Homolog of NCBI NO: 21740745 NR Description: OSJNBa0072K14.3 [Oryza sativa (japonica
  misc_feature (2)..(446): Homolog of NCBI NO: 15238886 NR Description: protein kinase family [Arabidopsis thaliana]
  misc_feature (1)..(449): Homolog of NCBI NO: 15240038 NR Description: protein kinase family [Arabidopsis thaliana]
MGCFSCFDSSSKEDHNLRPQHQPNQPLPSQISRLPSGADKLRSRSNGGSKRELQQPPPTVQIAAQTFTFRELAAATKNFRPESFVGEGGFGRVYKGRLETTAQIVAVKQLDKNGLQGNREFLVEVLMLSLLHHPNLVNLIGYCADGDQRLLVYEFMPLGSLEDHLHDLPPDKEPLDWNTRMKIAVGAAKGLEYLHDKANPPVIYRDFKSSNILLDEGYHPKLSDFGLAKLGPVGDKSHVSTRVMGTYGYCAPEYAMTGQLTVKSDVYSFGVVFLELITGRKAIDSTQPQGEQNLVTWARPLFNDRRKFSKLADPRLQGRFPMRGLYQALAVASMCIQESAATRPLIGDVVTALSYLANQAYDPNGYRGSSDDKRNRDDKGGRISKNDEAGGSGRRWDLEGSEKDDSPRETARILNRDLDRERAVAEAKMWGENLRQKRKQSLQQGSLDA

SEQ ID NO: 54785 - protein, 323 aa, Glycine max
  peptide (1)..(323): Ceres Seq. ID no. 14307255
  misc_feature (1)..(253): Homolog of NCBI NO: 15232294 NR Description: protein kinase family [Arabidopsis thaliana]
  misc_feature (1)..(237): Homolog of NCBI NO: 30679773 NR Description: protein kinase family [Arabidopsis thaliana]
  misc_feature (1)..(238): Homolog of NCBI NO: 34899302 NR Description: putative protein serine/threonine kinase
  misc_feature (1)..(240): Homolog of NCBI NO: 34394036 NR Description: putative protein serine/threonine kinase BNK1
  misc_feature (1)..(238): Homolog of NCBI NO: 34395193 NR Description: putative protein serine/threonine kinase
  misc_feature (1)..(308): Homolog of NCBI NO: 34907210 NR Description: putative serine/threonine kinase PBS1 protein
  misc_feature (172)..(320): Homolog of NCBI NO: 21740745 NR Description: OSJNBa0072K14.3 [Oryza sativa (japonica
  misc_feature (1)..(171): Homolog of NCBI NO: 21740745 NR Description: OSJNBa0072K14.3 [Oryza sativa (japonica
  misc_feature (1)..(320): Homolog of NCBI NO: 15238886 NR Description: protein kinase family [Arabidopsis thaliana]
  misc_feature (1)..(323): Homolog of NCBI NO: 15240038 NR Description: protein kinase family [Arabidopsis thaliana]
MLSLLHHPNLVNLIGYCADGDQRLLVYEFMPLGSLEDHLHDLPPDKEPLDWNTRMKIAVGAAKGLEYLHDKANPPVIYRDFKSSNILLDEGYHPKLSDFGLAKLGPVGDKSHVSTRVMGTYGYCAPEYAMTGQLTVKSDVYSFGVVFLELITGRKAIDSTQPQGEQNLVTWARPLFNDRRKFSKLADPRLQGRFPMRGLYQALAVASMCIQESAATRPLIGDVVTALSYLANQAYDPNGYRGSSDDKRNRDDKGGRISKNDEAGGSGRRWDLEGSEKDDSPRETARILNRDLDRERAVAEAKMWGENLRQKRKQSLQQGSLDA

SEQ ID NO: 54786 - protein, 294 aa, Glycine max
  peptide (1)..(294): Ceres Seq. ID no. 14307256
  misc_feature (1)..(224): Homolog of NCBI NO: 15232294 NR Description: protein kinase family [Arabidopsis thaliana]
  misc_feature (1)..(208): Homolog of NCBI NO: 30679773 NR Description: protein kinase family [Arabidopsis thaliana]
  misc_feature (1)..(209): Homolog of NCBI NO: 34899302 NR Description: putative protein serine/threonine kinase
  misc_feature (1)..(211): Homolog of NCBI NO: 34394036 NR Description: putative protein serine/threonine kinase BNK1
  misc_feature (1)..(209): Homolog of NCBI NO: 34395193 NR Description: putative protein serine/threonine kinase
  misc_feature (1)..(279): Homolog of NCBI NO: 34907210 NR Description: putative serine/threonine kinase PBS1 protein
  misc_feature (143)..(291): Homolog of NCBI NO: 21740745 NR Description: OSJNBa0072K14.3 [Oryza sativa (japonica
  misc_feature (1)..(142): Homolog of NCBI NO: 21740745 NR Description: OSJNBa0072K14.3 [Oryza sativa (japonica
  misc_feature (1)..(291): Homolog of NCBI NO: 15238886 NR Description: protein kinase family [Arabidopsis thaliana]
  misc_feature (1)..(294): Homolog of NCBI NO: 15240038 NR Description: protein kinase family [Arabidopsis thaliana]
MPLGSLEDHLHDLPPDKEPLDWNTRMKIAVGAAKGLEYLHDKANPPVIYRDFKSSNILLDEGYHPKLSDFGLAKLGPVGDKSHVSTRVMGTYGYCAPEYAMTGQLTVKSDVYSFGVVFLELITGRKAIDSTQPQGEQNLVTWARPLFNDRRKFSKLADPRLQGRFPMRGLYQALAVASMCIQESAATRPLIGDVVTALSYLANQAYDPNGYRGSSDDKRNRDDKGGRISKNDEAGGSGRRWDLEGSEKDDSPRETARILNRDLDRERAVAEAKMWGENLRQKRKQSLQQGSLDA

SEQ ID NO: 54787 - DNA, 1217 bp, Glycine max
  misc_feature (1)..(1217): Ceres Seq. ID no. 15178042
gggaaaagggttttacattttattcgttctccggtgagaaacagaaacacacagaagacagagtgagacgcttctcacgatggagggaggagtatcctacgcgcgcatgcctcgggtcaaaatccgcgagctgaaggacgactacgccaagttcgagctccgcgacaccgacgcgagcatcgccaacgcgctgcggcgcgtgatgatcgcggaggtgccgacggtcgccatcgacctcgtggagatcgaggtcaactcctcggtgctcaatgacgagtttatcgctcacaggctgggcctcatccccctcactagcgagcgcgccatgtccatgcgcttctcacgtgactgcgacgcgtgcgacggtgacggacagtgcgagttttgctccgtcgagtttcatcttagggttaagtgcatgactgatcagaccctcgatgttacgagcaaggacctctacagttctgaccctactgtcagtcccgttgatttctctgacccctctgccactgactccgacaacaacagggggattatcattgtgaagttgcggcgcggacaagagctgaagctgagagcgatagctaggaaggggattgggaaggatcatgctaaatggtcacctgctgcaactgtcactttcatgtatgaaccggagattcatataaatgaggatttgatggaaaccttgactctggaagagaaaagagaatgggttgacagtagtccaacccgtgtctttgaaattgatccagtgacacaacaggtgatggtggttgatgctgaggcatacacatatgatgatgaggtgcttaagaaagcagaagctatgggcaagcctgggcttgtagaaatcattgcgaggcaggatagcttcatattcactgtggagtctactggagcggttaaagcttctcaattggttctaaatgccatagaaattctcaagcagaagctggatgctgtgaggctatctgaagatacagtggaggctgatgatcagtttggcgagcttggtgcacatatgcgaggaggttgattaatttgttagaaggatatcagacttgtttcccacaacttgtttcccggaacttgtttcttacttgtctttaactgaatacctgcagaacgtattaacttgttgagccaaggatgctaattagtaattactgtgattaccatttgaagatagatagttatctttcacattttatttc

SEQ ID NO: 54788 - protein, 319 aa, Glycine max
  peptide (1)..(319): Ceres Seq. ID no. 15178043
  misc_feature (54)..(181): Pfam Name: RNA polymerase Rpb3/RpoA insert domain Pfam Description: RNA polymerase Rpb3/RpoA insert domain
  misc_feature (262)..(302): Homolog of NCBI NO: 31229547 NR Description: ENSANGP00000017124 [Anopheles gambiae]
  misc_feature (7)..(220): Homolog of NCBI NO: 31229547 NR Description: ENSANGP00000017124 [Anopheles gambiae]
  misc_feature (261)..(293): Homolog of NCBI NO: 17137650 NR Description: RNA polymerase II 33kD subunit CG7885-PA
  misc_feature (7)..(220): Homolog of NCBI NO: 17137650 NR Description: RNA polymerase II 33kD subunit CG7885-PA
  misc_feature (261)..(293): Homolog of NCBI NO: 40645083 NR Description: homologue of DNA-directed RNA polymerase II
  misc_feature (7)..(222): Homolog of NCBI NO: 40645083 NR Description: homologue of DNA-directed RNA polymerase II
  misc_feature (4)..(319): Homolog of NCBI NO: 2129725 NR Description: DNA-directed RNA polymerase (EC 2.7.7.6) II 35.5K
  misc_feature (4)..(319): Homolog of NCBI NO: 15226509 NR Description: DNA-directed RNA polymerase II, third largest
  misc_feature (4)..(319): Homolog of NCBI NO: 21593370 NR Description: DNA-directed RNA polymerase II, third largest
  misc_feature (4)..(319): Homolog of NCBI NO: 15226523 NR Description: DNA-directed RNA polymerase II, third largest
MEGGVSYARMPRVKIRELKDDYAKFELRDTDASIANALRRVMIAEVPTVAIDLVEIEVNSSVLNDEFIAHRLGLIPLTSERAMSMRFSRDCDACDGDGQCEFCSVEFHLRVKCMTDQTLDVTSKDLYSSDPTVSPVDFSDPSATDSDNNRGIIIVKLRRGQELKLRAIARKGIGKDHAKWSPAATVTFMYEPEIHINEDLMETLTLEEKREWVDSSPTRVFEIDPVTQQVMVVDAEAYTYDDEVLKKAEAMGKPGLVEIIARQDSFIFTVESTGAVKASQLVLNAIEILKQKLDAVRLSEDTVEADDQFGELGAHMRGG

SEQ ID NO: 54789 - protein, 310 aa, Glycine max
  peptide (1)..(310): Ceres Seq. ID no. 15178044
  misc_feature (45)..(172): Pfam Name: RNA polymerase Rpb3/RpoA insert domain Pfam Description: RNA polymerase Rpb3/RpoA insert domain
  misc_feature (253)..(293): Homolog of NCBI NO: 31229547 NR Description: ENSANGP00000017124 [Anopheles gambiae]
  misc_feature (1)..(211): Homolog of NCBI NO: 31229547 NR Description: ENSANGP00000017124 [Anopheles gambiae]
  misc_feature (252)..(284): Homolog of NCBI NO: 17137650 NR Description: RNA polymerase II 33kD subunit CG7885-PA
  misc_feature (1)..(211): Homolog of NCBI NO: 17137650 NR Description: RNA polymerase II 33kD subunit CG7885-PA
  misc_feature (252)..(284): Homolog of NCBI NO: 40645083 NR Description: homologue of DNA-directed RNA polymerase II
  misc_feature (1)..(213): Homolog of NCBI NO: 40645083 NR Description: homologue of DNA-directed RNA polymerase II
  misc_feature (1)..(310): Homolog of NCBI NO: 2129725 NR Description: DNA-directed RNA polymerase (EC 2.7.7.6) II 35.5K
  misc_feature (1)..(310): Homolog of NCBI NO: 15226509 NR Description: DNA-directed RNA polymerase II, third largest
  misc_feature (1)..(310): Homolog of NCBI NO: 21593370 NR Description: DNA-directed RNA polymerase II, third largest
  misc_feature (1)..(310): Homolog of NCBI NO: 15226523 NR Description: DNA-directed RNA polymerase II, third largest
MPRVKIRELKDDYAKFELRDTDASIANALRRVMIAEVPTVAIDLVEIEVNSSVLNDEFIAHRLGLIPLTSERAMSMRFSRDCDACDGDGQCEFCSVEFHLRVKCMTDQTLDVTSKDLYSSDPTVSPVDFSDPSATDSDNNRGIIIVKLRRGQELKLRAIARKGIGKDHAKWSPAATVTFMYEPEIHINEDLMETLTLEEKREWVDSSPTRVFEIDPVTQQVMVVDAEAYTYDDEVLKKAEAMGKPGLVEIIARQDSFIFTVESTGAVKASQLVLNAIEILKQKLDAVRLSEDTVEADDQFGELGAHMRGG

SEQ ID NO: 54790 - protein, 278 aa, Glycine max
  peptide (1)..(278): Ceres Seq. ID no. 15178045
  misc_feature (13)..(140): Pfam Name: RNA polymerase Rpb3/RpoA insert domain Pfam Description: RNA polymerase Rpb3/RpoA insert domain
  misc_feature (221)..(261): Homolog of NCBI NO: 31229547 NR Description: ENSANGP00000017124 [Anopheles gambiae]
  misc_feature (1)..(179): Homolog of NCBI NO: 31229547 NR Description: ENSANGP00000017124 [Anopheles gambiae]
  misc_feature (220)..(252): Homolog of NCBI NO: 17137650 NR Description: RNA polymerase II 33kD subunit CG7885-PA
  misc_feature (1)..(179): Homolog of NCBI NO: 17137650 NR Description: RNA polymerase II 33kD subunit CG7885-PA
  misc_feature (220)..(252): Homolog of NCBI NO: 40645083 NR Description: homologue of DNA-directed RNA polymerase II
  misc_feature (1)..(181): Homolog of NCBI NO: 40645083 NR Description: homologue of DNA-directed RNA polymerase II
  misc_feature (1)..(278): Homolog of NCBI NO: 2129725 NR Description: DNA-directed RNA polymerase (EC 2.7.7.6) II 35.5K
  misc_feature (1)..(278): Homolog of NCBI NO: 15226509 NR Description: DNA-directed RNA polymerase II, third largest
  misc_feature (1)..(278): Homolog of NCBI NO: 21593370 NR Description: DNA-directed RNA polymerase II, third largest
  misc_feature (1)..(278): Homolog of NCBI NO: 15226523 NR Description: DNA-directed RNA polymerase II, third largest
MIAEVPTVAIDLVEIEVNSSVLNDEFIAHRLGLIPLTSERAMSMRFSRDCDACDGDGQCEFCSVEFHLRVKCMTDQTLDVTSKDLYSSDPTVSPVDFSDPSATDSDNNRGIIIVKLRRGQELKLRAIARKGIGKDHAKWSPAATVTFMYEPEIHINEDLMETLTLEEKREWVDSSPTRVFEIDPVTQQVMVVDAEAYTYDDEVLKKAEAMGKPGLVEIIARQDSFIFTVESTGAVKASQLVLNAIEILKQKLDAVRLSEDTVEADDQFGELGAHMRGG

SEQ ID NO: 54791 - DNA, 1539 bp, Glycine max
  misc_feature (1)..(1539): Ceres Seq. ID no. 14313863
acatacatacactgattcgaatgcatcatctcctagtgcaaacacagctatcttaggattggttgtagttgataatagagacaaggaaaaagtagtagatttgagttcttctctgtcaaaggaagacaaaagattgaacaatatgcaccaagattttgttcttccctctccaaaagaaatttctgtgtgcatgacaggaaacagtacaagtagttctagaaccttgaagttgagccgaagtagaagttgtatagcaagtatcatgaggaatttatcttcagattggtttgaagatgaagacgtaattcagaacactcctccaatagggaatgaaaaagccttccctggaagaccagagggctttccgaagaacatttatgcactaaattacaatgccaatgcagagaggctttcatgtaatggccatgggaattctgtgcaaaattcttctgttcatgatgttcagaatgtgaaatcctccactaacaaggaaagagagggtaatggtcccttggctccaaaaggaaaggaaacagaaaatcttaacaggttgagtttactggctgaccatgaggttccggggacaggattggatcccatcttgtctgcaaagaatgtcaaagatattggcttggatcccatgcaagctgatggagaaactcactcacactcacattggccttcaaaattccagaggctacaaagagagatcattgaattctgggatgcgtgtaatgtttcattggttcacaggacttactttttccttctattcaaaggggaaccatcagattctatttatatggaggtagagttgagaagactatcataccttacgcaaactttttcccaaggcaatcaaactgtggaagatggacgaaccctcacacctgagttaagcatgagatatcttagaaaagagaggcaaatgctgagcaagcaaatgcataagcgactgtctaaatatgatagacagaacctgtacttgaaatggggccttcgtttgagttcaaagcataggagtttgcagttggcccatcaattgtggagtgacacaaaagacatggaccacgttagagacagtgcatcaattgttgcaaagctggttggtttagtagagccagaacaggcatttaaggagatgtttggactcaactttaccccacaacccacgagtagaaaatcttttagttggacagccagtgtgaggcatattttgtgactttggattactttttaggtagtagcttggtatggccatgtgaaaatgtagataattcttttctccccttatcttagaaacaaattgctttctgctgtatgcttctaactctgattgctattgattgtaaagaatgtgcaattctatggttgcagatttgttcatctgtcctaggttggttccaggtagaacatcatgaatagttcaatatggattgttacctgggaaaaaatatgcaatgtgattttttacgtgtgtgctttattgtaacagtccattctttagttaacattaagaatcataaaacctagacgaac

SEQ ID NO: 54792 - protein, 406 aa, Glycine max
  peptide (1)..(406): Ceres Seq. ID no. 14313864
  misc_feature (228)..(401): Homolog of NCBI NO: 18416291 NR Description: hypothetical protein [Arabidopsis thaliana]
  misc_feature (53)..(380): Homolog of NCBI NO: 10177425 NR Description: kinesin heavy chain DNA binding protein-like
  misc_feature (228)..(398): Homolog of NCBI NO: 15238979 NR Description: kinesin heavy chain-related protein [Arabidopsis
  misc_feature (202)..(402): Homolog of NCBI NO: 15234898 NR Description: kinesin like protein [Arabidopsis thaliana]
  misc_feature (53)..(402): Homolog of NCBI NO: 30698217 NR Description: kinesin heavy chain DNA binding protein-related
  misc_feature (91)..(398): Homolog of NCBI NO: 15208447 NR Description: kinesin heavy chain [Zea mays]
  misc_feature (66)..(398): Homolog of NCBI NO: 15208467 NR Description: kinesin heavy chain [Zea mays]
  misc_feature (66)..(398): Homolog of NCBI NO: 38344976 NR Description: OSJNBa0011L07.1 [Oryza sativa (japonica
  misc_feature (66)..(398): Homolog of NCBI NO: 38567877 NR Description: OSJNBa0091D06.23 [Oryza sativa (japonica
  misc_feature (29)..(402): Homolog of NCBI NO: 30693419 NR Description: expressed protein [Arabidopsis thaliana]
HTYTDSNASSPSANTAILGLVVVDNRDKEKVVDLSSSLSKEDKRLNNMHQDFVLPSPKEISVCMTGNSTSSSRTLKLSRSRSCIASIMRNLSSDWFEDEDVIQNTPPIGNEKAFPGRPEGFPKNIYALNYNANAERLSCNGHGNSVQNSSVHDVQNVKSSTNKEREGNGPLAPKGKETENLNRLSLLADHEVPGTGLDPILSAKNVKDIGLDPMQADGETHSHSHWPSKFQRLQREIIEFWDACNVSLVHRTYFFLLFKGEPSDSIYMEVELRRLSYLTQTFSQGNQTVEDGRTLTPELSMRYLRKERQMLSKQMHKRLSKYDRQNLYLKWGLRLSSKHRSLQLAHQLWSDTKDMDHVRDSASIVAKLVGLVEPEQAFKEMFGLNFTPQPTSRKSFSWTASVRHIL

SEQ ID NO: 54793 - protein, 359 aa, Glycine max
  peptide (1)..(359): Ceres Seq. ID no. 14313865
  misc_feature (181)..(354): Homolog of NCBI NO: 18416291 NR Description: hypothetical protein [Arabidopsis thaliana]
  misc_feature (6)..(333): Homolog of NCBI NO: 10177425 NR Description: kinesin heavy chain DNA binding protein-like
  misc_feature (181)..(351): Homolog of NCBI NO: 15238979 NR Description: kinesin heavy chain-related protein [Arabidopsis
  misc_feature (155)..(355): Homolog of NCBI NO: 15234898 NR Description: kinesin like protein [Arabidopsis thaliana]
  misc_feature (6)..(355): Homolog of NCBI NO: 30698217 NR Description: kinesin heavy chain DNA binding protein-related
  misc_feature (44)..(351): Homolog of NCBI NO: 15208447 NR Description: kinesin heavy chain [Zea mays]
  misc_feature (19)..(351): Homolog of NCBI NO: 15208467 NR Description: kinesin heavy chain [Zea mays]
  misc_feature (19)..(351): Homolog of NCBI NO: 38344976 NR Description: OSJNBa0011L07.1 [Oryza sativa (japonica
  misc_feature (19)..(351): Homolog of NCBI NO: 38567877 NR Description: OSJNBa0091D06.23 [Oryza sativa (japonica
  misc_feature (1)..(355): Homolog of NCBI NO: 30693419 NR Description: expressed protein [Arabidopsis thaliana]
MHQDFVLPSPKEISVCMTGNSTSSSRTLKLSRSRSCIASIMRNLSSDWFEDEDVIQNTPPIGNEKAFPGRPEGFPKNIYALNYNANAERLSCNGHGNSVQNSSVHDVQNVKSSTNKEREGNGPLAPKGKETENLNRLSLLADHEVPGTGLDPILSAKNVKDIGLDPMQADGETHSHSHWPSKFQRLQREIIEFWDACNVSLVHRTYFFLLFKGEPSDSIYMEVELRRLSYLTQTFSQGNQTVEDGRTLTPELSMRYLRKERQMLSKQMHKRLSKYDRQNLYLKWGLRLSSKHRSLQLAHQLWSDTKDMDHVRDSASIVAKLVGLVEPEQAFKEMFGLNFTPQPTSRKSFSWTASVRHIL

SEQ ID NO: 54794 - protein, 343 aa, Glycine max
  peptide (1)..(343): Ceres Seq. ID no. 14313866
  misc_feature (165)..(338): Homolog of NCBI NO: 18416291 NR Description: hypothetical protein [Arabidopsis thaliana]
  misc_feature (1)..(317): Homolog of NCBI NO: 10177425 NR Description: kinesin heavy chain DNA binding protein-like
  misc_feature (165)..(335): Homolog of NCBI NO: 15238979 NR Description: kinesin heavy chain-related protein [Arabidopsis
  misc_feature (139)..(339): Homolog of NCBI NO: 15234898 NR Description: kinesin like protein [Arabidopsis thaliana]
  misc_feature (1)..(339): Homolog of NCBI NO: 30698217 NR Description: kinesin heavy chain DNA binding protein-related
  misc_feature (28)..(335): Homolog of NCBI NO: 15208447 NR Description: kinesin heavy chain [Zea mays]
  misc_feature (3)..(335): Homolog of NCBI NO: 15208467 NR Description: kinesin heavy chain [Zea mays]
  misc_feature (3)..(335): Homolog of NCBI NO: 38344976 NR Description: OSJNBa0011L07.1 [Oryza sativa (japonica
  misc_feature (3)..(335): Homolog of NCBI NO: 38567877 NR Description: OSJNBa0091D06.23 [Oryza sativa (japonica
  misc_feature (1)..(339): Homolog of NCBI NO: 30693419 NR Description: expressed protein [Arabidopsis thaliana]
MTGNSTSSSRTLKLSRSRSCIASIMRNLSSDWFEDEDVIQNTPPIGNEKAFPGRPEGFPKNIYALNYNANAERLSCNGHGNSVQNSSVHDVQNVKSSTNKEREGNGPLAPKGKETENLNRLSLLADHEVPGTGLDPILSAKNVKDIGLDPMQADGETHSHSHWPSKFQRLQREIIEFWDACNVSLVHRTYFFLLFKGEPSDSIYMEVELRRLSYLTQTFSQGNQTVEDGRTLTPELSMRYLRKERQMLSKQMHKRLSKYDRQNLYLKWGLRLSSKHRSLQLAHQLWSDTKDMDHVRDSASIVAKLVGLVEPEQAFKEMFGLNFTPQPTSRKSFSWTASVRHIL

SEQ ID NO: 54795 - DNA, 1716 bp, Glycine max
  misc_feature (1)..(1716): Ceres Seq. ID no. 14303430
aaggtcccgagtaagatgtttagatccattaatcataacaaggattttgaagtttcacttgcttatgaaagtgagaatcatttgcctcctggtgttacctctcctgaaattgctcgataccagatatctggtttgacagatgcaagtgagaaatactcatctcggaatctgtcatcccccatcaagacaaacatacatttttctcttagtagaagtggaattctttcactggatcgggctgatgctgttattgaaataacagagtgggtggaagttcctagaaagaatttgaccatagagaattcaaccgtttcatcaaatgtttcagctgaatctgctgcgggtaatagttctgaagaaaacaacgaaagcgtgcaaactgatagtgggattaataagacatccaacattagttcagaggagcaagctgctgctgagcctgctacagagaaaaagctgaaaaagcggacctttagggtaccattaaagattgtagagaagataactggatttggaatgtctctatcacaagattttcttgctgaagccaaaagaaaactacaagtactagataaaaaagatgcagacagaaaaagaacagctgagttaaaaaataatttagaaggatatatatatacaactaaggaaaagattgaaactcttgaggagtttgaaaaagtttctacaagtgaggaacgccagtccttcattgagaagcttgatcaggtgcaagattggttgtatacagatggtgaagatgccaatgccacagagtttcaagagcgtctagatcagttaaaagctgttggagatccaattttcttcaggttaaaagagcttacagctcggccagcagcagttgagcatgctaataaatacattgatgagttgaaacagattgttgaggagtggaaagcaaagaagtcttggcttccacaagaacgagtagacgaggtcataaaaagttctgaaaaattgaagaattggttggatgagaaagaagctgagcaaacaaagacttctggattcagtaagccagcatttacatctgaagaagtatatttgaaggtgcttgatctgcaaaccaaggttgccagtattaatagaattcccaagcccaaacctaaggttcagaagcccgtaaaaaatgaaaccgaaagcagtgagcagaatacagagaattctgattctaactcagctgatagttcctcttcaagtgattcatccgttaacagttcagaaggcacaagcgaagagacggtaactgagcaaactgaaggtcatgatgagctatgattaacctggcatacatgttaggccggtttgaatcatctacctgcaacgtttttatagtcagagatgtagactggtaatggtagaattaataggtgaaaaggaggcagtgtcggttctcggcgagcaggagaatagagttgaggcaacatttgctggttgagttctaaaattttgaggttagatggctactactgtagtagatgatttattacccttttatatttaagggggcaacttgtaatttgcagtcatatgaaagcttgtatttgccgaaacacaatgtgataggggaagaaaaaaaaagaaaaactcacgagatttgatttgctcagaacatataggaattttgcttgagtgactcgtagttctaaacgatttttgtttttaattaatttagcagatacatcttatcttattttt

SEQ ID NO: 54796 - protein, 431 aa, Glycine max
  peptide (1)..(431): Ceres Seq. ID no. 14303431
  misc_feature (1)..(279): Pfam Name: Hsp70 protein Pfam Description: Hsp70 protein
  misc_feature (2)..(417): Homolog of NCBI NO: 17473863 NR Description: putative heat-shock protein [Arabidopsis thaliana]
  misc_feature (16)..(418): Homolog of NCBI NO: 28856138 NR Description: Similar to heat shock protein 4 [Danio rerio]
  misc_feature (16)..(391): Homolog of NCBI NO: 24025637 NR Description: heat shock 70 kDa protein 4 [Rattus norvegicus]
  misc_feature (16)..(412): Homolog of NCBI NO: 31982275 NR Description: heat shock protein 4
  misc_feature (16)..(412): Homolog of NCBI NO: 2495342 NR Description: Heat shock 70-related protein APG-2
  misc_feature (5)..(430): Homolog of NCBI NO: 28828809 NR Description: similar to heat shock protein
  misc_feature (75)..(368): Homolog of NCBI NO: 7488120 NR Description: probable heat shock protein 110 - Arabidopsis
  misc_feature (75)..(407): Homolog of NCBI NO: 25407544 NR Description: HSP like protein [imported] - Arabidopsis
  misc_feature (1)..(407): Homolog of NCBI NO: 15293149 NR Description: putative HSP protein [Arabidopsis thaliana]
  misc_feature (1)..(407): Homolog of NCBI NO: 18414718 NR Description: heat shock protein hsp70, putative [Arabidopsis
KVPSKMFRSINHNKDFEVSLAYESENHLPPGVTSPEIARYQISGLTDASEKYSSRNLSSPIKTNIHFSLSRSGILSLDRADAVIEITEWVEVPRKNLTIENSTVSSNVSAESAAGNSSEENNESVQTDSGINKTSNISSEEQAAAEPATEKKLKKRTFRVPLKIVEKITGFGMSLSQDFLAEAKRKLQVLDKKDADRKRTAELKNNLEGYIYTTKEKIETLEEFEKVSTSEERQSFIEKLDQVQDWLYTDGEDANATEFQERLDQLKAVGDPIFFRLKELTARPAAVEHANKYIDELKQIVEEWKAKKSWLPQERVDEVIKSSEKLKNWLDEKEAEQTKTSGFSKPAFTSEEVYLKVLDLQTKVASINRIPKPKPKVQKPVKNETESSEQNTENSDSNSADSSSSSDSSVNSSEGTSEETVTEQTEGHDEL

SEQ ID NO: 54797 - protein, 426 aa, Glycine max
  peptide (1)..(426): Ceres Seq. ID no. 14303432
  misc_feature (1)..(274): Pfam Name: Hsp70 protein Pfam Description: Hsp70 protein
  misc_feature (1)..(412): Homolog of NCBI NO: 17473863 NR Description: putative heat-shock protein [Arabidopsis thaliana]
  misc_feature (11)..(413): Homolog of NCBI NO: 28856138 NR Description: Similar to heat shock protein 4 [Danio rerio]
  misc_feature (11)..(386): Homolog of NCBI NO: 24025637 NR Description: heat shock 70 kDa protein 4 [Rattus norvegicus]
  misc_feature (11)..(407): Homolog of NCBI NO: 31982275 NR Description: heat shock protein 4
  misc_feature (11)..(407): Homolog of NCBI NO: 2495342 NR Description: Heat shock 70-related protein APG-2
  misc_feature (1)..(425): Homolog of NCBI NO: 28828809 NR Description: similar to heat shock protein
  misc_feature (70)..(363): Homolog of NCBI NO: 7488120 NR Description: probable heat shock protein 110 - Arabidopsis
  misc_feature (70)..(402): Homolog of NCBI NO: 25407544 NR Description: HSP like protein [imported] - Arabidopsis
  misc_feature (1)..(402): Homolog of NCBI NO: 15293149 NR Description: putative HSP protein [Arabidopsis thaliana]
  misc_feature (1)..(402): Homolog of NCBI NO: 18414718 NR Description: heat shock protein hsp70, putative [Arabidopsis
MFRSINHNKDFEVSLAYESENHLPPGVTSPEIARYQISGLTDASEKYSSRNLSSPIKTNIHFSLSRSGILSLDRADAVIEITEWVEVPRKNLTIENSTVSSNVSAESAAGNSSEENNESVQTDSGINKTSNISSEEQAAAEPATEKKLKKRTFRVPLKIVEKITGFGMSLSQDFLAEAKRKLQVLDKKDADRKRTAELKNNLEGYIYTTKEKIETLEEFEKVSTSEERQSFIEKLDQVQDWLYTDGEDANATEFQERLDQLKAVGDPIFFRLKELTARPAAVEHANKYIDELKQIVEEWKAKKSWLPQERVDEVIKSSEKLKNWLDEKEAEQTKTSGFSKPAFTSEEVYLKVLDLQTKVASINRIPKPKPKVQKPVKNETESSEQNTENSDSNSADSSSSSDSSVNSSEGTSEETVTEQTEGHDEL

SEQ ID NO: 54798 - protein, 259 aa, Glycine max
  peptide (1)..(259): Ceres Seq. ID no. 14303433
  misc_feature (1)..(107): Pfam Name: Hsp70 protein Pfam Description: Hsp70 protein
  misc_feature (1)..(245): Homolog of NCBI NO: 17473863 NR Description: putative heat-shock protein [Arabidopsis thaliana]
  misc_feature (1)..(246): Homolog of NCBI NO: 28856138 NR Description: Similar to heat shock protein 4 [Danio rerio]
  misc_feature (1)..(219): Homolog of NCBI NO: 24025637 NR Description: heat shock 70 kDa protein 4 [Rattus norvegicus]
  misc_feature (1)..(240): Homolog of NCBI NO: 31982275 NR Description: heat shock protein 4
  misc_feature (1)..(240): Homolog of NCBI NO: 2495342 NR Description: Heat shock 70-related protein APG-2
  misc_feature (1)..(258): Homolog of NCBI NO: 28828809 NR Description: similar to heat shock protein
  misc_feature (1)..(196): Homolog of NCBI NO: 7488120 NR Description: probable heat shock protein 110 - Arabidopsis
  misc_feature (1)..(235): Homolog of NCBI NO: 25407544 NR Description: HSP like protein [imported] - Arabidopsis
  misc_feature (1)..(235): Homolog of NCBI NO: 15293149 NR Description: putative HSP protein [Arabidopsis thaliana]
  misc_feature (1)..(235): Homolog of NCBI NO: 18414718 NR Description: heat shock protein hsp70, putative [Arabidopsis
MSLSQDFLAEAKRKLQVLDKKDADRKRTAELKNNLEGYIYTTKEKIETLEEFEKVSTSEERQSFIEKLDQVQDWLYTDGEDANATEFQERLDQLKAVGDPIFFRLKELTARPAAVEHANKYIDELKQIVEEWKAKKSWLPQERVDEVIKSSEKLKNWLDEKEAEQTKTSGFSKPAFTSEEVYLKVLDLQTKVASINRIPKPKPKVQKPVKNETESSEQNTENSDSNSADSSSSSDSSVNSSEGTSEETVTEQTEGHDEL

SEQ ID NO: 54799 - DNA, 1371 bp, Glycine max
  misc_feature (1)..(1371): Ceres Seq. ID no. 14303427
gaacaggagaagagaaaatgttgaggaaggaggagtggaggggaacggatctgctgggtgggactagataaagtgaagcaagctgacaagactaagggaagattggatggtggaaatggaatcggcagctgaaaaccctaattacccggcggtggactacaagcgaccttccatcttgtcatttcctcggaggcccgccctcagagttacatccgagttcgatagtgaaagcgcagtcttcttccataagatttcctgcaagttgttggacagccttgccaagttcaagttttcgttcaaccacagcggtaagggcggcgacatctccgaacctcaattcagctttgtctccaagcaccttagcctccactacgacctcgaagaccataatgctctcgttaagacctccatcgatcttgctcccagtttgcaactcactgcttctcatgatctcaaggctcaacaaggagaggttaccgtgcttgcaaacctcgccgatcctgcctattcacttcaactatctactccacttccatccgttggattgccaaaagctaccttcagatttcctctgggtgaactttcgctgcaggagaaacaagaggaggaagtcaataatttgttgtcagtcgatggggttcttaaaggacaattgtttaatgggctctgctctgcccattacaaggacgaagaactgaaattaagatatggctataaggacgatgaaatctcatttcttccaatactttcacttccttcaaatgccctgtcatttgcatttaagcgtcggtttggtccttccgacaaattaagttactggtacaattgcgattccaactattggagtgctgtctacaagcgcacctatggtaaagatttcaaatttaaagctggttatgattcagagattcgccttggctgggcatctctttgggttggagatgaaggtgggaaagccaaaacagctccgatgcagatgaaagttcaattcatgctacaagtgccacaggacgacataaaatcttctgctttgatgtttcggattaagaaaagatgggacttttaaggctctactggtgactttacctgttttttatatataaaaaatgggtatttgactttgggcagttccattgtgttttagtttgttgcatccacagtccactctttgcaaaagggggtattgactatttgacaggttgatatttctccaagtcagctaattgcttcgtggtgtgacaagtaagaacaattttcaatcgtacaaaatttgtaaagatgattttctgatttgtaagttggcagattatggttatcgaatgcagacagtgctgaaattggttatgcatttggctaaaggccattcaactt

SEQ ID NO: 54800 - protein, 319 aa, Glycine max
  peptide (1)..(319): Ceres Seq. ID no. 14303428
  misc_feature (22)..(255): Homolog of NCBI NO: 30689554 NR Description: expressed protein [Arabidopsis thaliana]
  misc_feature (204)..(318): Homolog of NCBI NO: 7486492 NR Description: hypothetical protein At2g43950 [imported] -
  misc_feature (22)..(214): Homolog of NCBI NO: 7486492 NR Description: hypothetical protein At2g43950 [imported] -
  misc_feature (22)..(318): Homolog of NCBI NO: 18406405 NR Description: expressed protein [Arabidopsis thaliana]
MVEMESAAENPNYPAVDYKRPSILSFPRRPALRVTSEFDSESAVFFHKISCKLLDSLAKFKFSFNHSGKGGDISEPQFSFVSKHLSLHYDLEDHNALVKTSIDLAPSLQLTASHDLKAQQGEVTVLANLADPAYSLQLSTPLPSVGLPKATFRFPLGELSLQEKQEEEVNNLLSVDGVLKGQLFNGLCSAHYKDEELKLRYGYKDDEISFLPILSLPSNALSFAFKRRFGPSDKLSYWYNCDSNYWSAVYKRTYGKDFKFKAGYDSEIRLGWASLWVGDEGGKAKTAPMQMKVQFMLQVPQDDIKSSALMFRIKKRWDF

SEQ ID NO: 54801 - protein, 316 aa, Glycine max
  peptide (1)..(316): Ceres Seq. ID no. 14303429
  misc_feature (19)..(252): Homolog of NCBI NO: 30689554 NR Description: expressed protein [Arabidopsis thaliana]
  misc_feature (201)..(315): Homolog of NCBI NO: 7486492 NR Description: hypothetical protein At2g43950 [imported] -
  misc_feature (19)..(211): Homolog of NCBI NO: 7486492 NR Description: hypothetical protein At2g43950 [imported] -
  misc_feature (19)..(315): Homolog of NCBI NO: 18406405 NR Description: expressed protein [Arabidopsis thaliana]
MESAAENPNYPAVDYKRPSILSFPRRPALRVTSEFDSESAVFFHKISCKLLDSLAKFKFSFNHSGKGGDISEPQFSFVSKHLSLHYDLEDHNALVKTSIDLAPSLQLTASHDLKAQQGEVTVLANLADPAYSLQLSTPLPSVGLPKATFRFPLGELSLQEKQEEEVNNLLSVDGVLKGQLFNGLCSAHYKDEELKLRYGYKDDEISFLPILSLPSNALSFAFKRRFGPSDKLSYWYNCDSNYWSAVYKRTYGKDFKFKAGYDSEIRLGWASLWVGDEGGKAKTAPMQMKVQFMLQVPQDDIKSSALMFRIKKRWDF

SEQ ID NO: 54802 - DNA, 1117 bp, Glycine max
  misc_feature (1)..(1117): Ceres Seq. ID no. 14307797
gacacgcatctatacttgtccagaagaagtaagatccatgaactaacattcccacacgctcgcttcaccatatttgccacccttttaacctcacttcttagggttattttgctcccttttccttgtttgggaattgggtttggtttggtttttcttggttgtaaaaggaaacaaagaaagaactaagatgggaagaggtagggtacagctgaagaggatagagaacaagatcaatcgccaggtaactttctccaaaaggagaggtgggttgctcaagaaagctcatgaaatatctgtactctgtgatgctgaggtagctttgattatcttctctcacaaaggaaagctctttgagtatgctactgattcatgcatggagaagatactggaacgccatgaaaggtatgcctatgcagagaggcagctagtagcaaatgattctgagacacaggaaaactggaccattgaatacactagactgaaggcaaaaattgaccttttacagagaaaccacaggcactatatgggagaagatttggcttcaatgagcctcaaagagcttcagagtttggagcagcagttggttactggtatcaaaaacatccgcacaaggaggaatgatctcatgtccgagtccatttctgagcttcagaaaaaggagaaaaggatacaagaggagaataacacccttgcaaagaagatcaaggagaaagagcaggctgtagcacagcaagctgcacaatgggagcagccaaactacagggttgatacatctttcatgccacagcagcaaccccttcccaccagtttgaacatatgtggcaataattactgccaggaagctgcaccagaactaggaaggaacggtctagacctgaccctggaaccactctattcttgcaaccttggatgcttctgaaaagttgtttcttctgagttggattatattatataagtgctggcatatatgaactactataagtagtctgtttgaatgttttatatgtattttggtctatggcttttccctctactttgaagacattattttgaattgcttctgttgtaaacaaattgaatttgaaatctaattgtgtatttttgaaatatgttaaag

SEQ ID NO: 54803 - protein, 243 aa, Glycine max
  peptide (1)..(243): Ceres Seq. ID no. 14307798
  misc_feature (75)..(174): Pfam Name: K-box region Pfam Description: K-box region
  misc_feature (1)..(243): Homolog of NCBI NO: 5070140 NR Description: MADS-box protein MADS5 [Nicotiana tabacum]
  misc_feature (1)..(243): Homolog of NCBI NO: 4102113 NR Description: NAP1-2 [Nicotiana tabacum]
  misc_feature (6)..(243): Homolog of NCBI NO: 32478021 NR Description: euAP1 APETALA1-like MADS-box [Heuchera americana]
  misc_feature (1)..(243): Homolog of NCBI NO: 28381537 NR Description: PTM2 [Populus tremuloides]
  misc_feature (1)..(243): Homolog of NCBI NO: 22091473 NR Description: MADS box transcription factor [Daucus carota
  misc_feature (1)..(243): Homolog of NCBI NO: 37542848 NR Description: AP1-like protein [Malus x domestica]
  misc_feature (1)..(243): Homolog of NCBI NO: 3646320 NR Description: MADS-box protein [Malus x domestica]
  misc_feature (1)..(243): Homolog of NCBI NO: 82313 NR Description: MADS box protein squa - garden snapdragon
  misc_feature (1)..(243): Homolog of NCBI NO: 1483228 NR Description: MADS3 protein [Betula pendula]
  misc_feature (1)..(243): Homolog of NCBI NO: 13446154 NR Description: MADS-box transcription factor [Pisum sativum]
MGRGRVQLKRIENKINRQVTFSKRRGGLLKKAHEISVLCDAEVALIIFSHKGKLFEYATDSCMEKILERHERYAYAERQLVANDSETQENWTIEYTRLKAKIDLLQRNHRHYMGEDLASMSLKELQSLEQQLVTGIKNIRTRRNDLMSESISELQKKEKRIQEENNTLAKKIKEKEQAVAQQAAQWEQPNYRVDTSFMPQQQPLPTSLNICGNNYCQEAAPELGRNGLDLTLEPLYSCNLGCF

SEQ ID NO: 54804 - protein, 181 aa, Glycine max
  peptide (1)..(181): Ceres Seq. ID no. 14307799
  misc_feature (13)..(112): Pfam Name: K-box region Pfam Description: K-box region
  misc_feature (1)..(181): Homolog of NCBI NO: 5070140 NR Description: MADS-box protein MADS5 [Nicotiana tabacum]
  misc_feature (1)..(181): Homolog of NCBI NO: 4102113 NR Description: NAP1-2 [Nicotiana tabacum]
  misc_feature (1)..(181): Homolog of NCBI NO: 32478021 NR Description: euAP1 APETALA1-like MADS-box [Heuchera americana]
  misc_feature (1)..(181): Homolog of NCBI NO: 28381537 NR Description: PTM2 [Populus tremuloides]
  misc_feature (1)..(181): Homolog of NCBI NO: 22091473 NR Description: MADS box transcription factor [Daucus carota
  misc_feature (1)..(181): Homolog of NCBI NO: 37542848 NR Description: AP1-like protein [Malus x domestica]
  misc_feature (1)..(181): Homolog of NCBI NO: 3646320 NR Description: MADS-box protein [Malus x domestica]
  misc_feature (1)..(181): Homolog of NCBI NO: 82313 NR Description: MADS box protein squa - garden snapdragon
  misc_feature (1)..(181): Homolog of NCBI NO: 1483228 NR Description: MADS3 protein [Betula pendula]
  misc_feature (1)..(181): Homolog of NCBI NO: 13446154 NR Description: MADS-box transcription factor [Pisum sativum]
MEKILERHERYAYAERQLVANDSETQENWTIEYTRLKAKIDLLQRNHRHYMGEDLASMSLKELQSLEQQLVTGIKNIRTRRNDLMSESISELQKKEKRIQEENNTLAKKIKEKEQAVAQQAAQWEQPNYRVDTSFMPQQQPLPTSLNICGNNYCQEAAPELGRNGLDLTLEPLYSCNLGCF

SEQ ID NO: 54805 - protein, 131 aa, Glycine max
  peptide (1)..(131): Ceres Seq. ID no. 14307800
  misc_feature (1)..(62): Pfam Name: K-box region Pfam Description: K-box region
  misc_feature (1)..(131): Homolog of NCBI NO: 5070140 NR Description: MADS-box protein MADS5 [Nicotiana tabacum]
  misc_feature (1)..(131): Homolog of NCBI NO: 4102113 NR Description: NAP1-2 [Nicotiana tabacum]
  misc_feature (1)..(131): Homolog of NCBI NO: 32478021 NR Description: euAP1 APETALA1-like MADS-box [Heuchera americana]
  misc_feature (1)..(131): Homolog of NCBI NO: 28381537 NR Description: PTM2 [Populus tremuloides]
  misc_feature (1)..(131): Homolog of NCBI NO: 22091473 NR Description: MADS box transcription factor [Daucus carota
  misc_feature (1)..(131): Homolog of NCBI NO: 37542848 NR Description: AP1-like protein [Malus x domestica]
  misc_feature (1)..(131): Homolog of NCBI NO: 3646320 NR Description: MADS-box protein [Malus x domestica]
  misc_feature (1)..(131): Homolog of NCBI NO: 82313 NR Description: MADS box protein squa - garden snapdragon
  misc_feature (1)..(131): Homolog of NCBI NO: 1483228 NR Description: MADS3 protein [Betula pendula]
  misc_feature (1)..(131): Homolog of NCBI NO: 13446154 NR Description: MADS-box transcription factor [Pisum sativum]
MGEDLASMSLKELQSLEQQLVTGIKNIRTRRNDLMSESISELQKKEKRIQEENNTLAKKIKEKEQAVAQQAAQWEQPNYRVDTSFMPQQQPLPTSLNICGNNYCQEAAPELGRNGLDLTLEPLYSCNLGCF

SEQ ID NO: 54806 - DNA, 1097 bp, Glycine max
  misc_feature (1)..(1097): Ceres Seq. ID no. 14307186
agcctcctcaatttctctctctctctctctctctaacacggagtgatggctgtgcagctgtgggaaaccctgaaggaagccatcgtagcctacactggcttctctccttccaccttcttcacggtgctggcgcttctttttgccgtttactacgtcgtcacgggtctctttggctcctccgacgatcaccatcaccgccaccgccacgtcgaggaggaggaggagatgccgcctctgcgccccccggttcagctcggcgagatcacagcggaggagctcaaggcctacgacggcaccgatcccgagaagcccttgctcatggccatcaaggcccagatctatgatgtctcccagagcaggatgttttatggacctggtggaccttatgccctatttgctggcaaggatgctagcagagccttagcaaagatgtcttttgaagagaaagatctgactggggatatttctggtcttggcccgtttgagcttgatgccttacaagactgggaatataagtttatgagcaagtatgtgaaggttggaactgttaaaagtgaagaagttccagtaactgaaccagagtccattggtgaaccattagaatctacttcccgtgatattgatgctgctgccaagcctactgatactgaagatggcaaattagaaactccagctgttaaaagtgatgaaaccccttcaaatgttgatgccgataaagagtaatggctgagttgtgccacaaatacccctgcagaaaatggagaaaaaaagaacttcatagtaaagactgaccaaatgtaaggcaagttttcgaagatagtctaggccacctcttctgcaccgtgcctttgcttgaatatttagtctcataaataatgaattgccgggtcaatttatgtgtggatccaaaaaaaaggggagtaactttaagttagatcttcttttagaattccgtagtatgtataccatttaaatgcaacagagcaatgacatttggggtcttatcttacttaggctgagtaatgaatgatcttttgtttaattgaataatacgttgctctatggcaagaataaatgaagggtaagtcttttgaacc

SEQ ID NO: 54807 - protein, 225 aa, Glycine max
  peptide (1)..(225): Ceres Seq. ID no. 14307187
  misc_feature (72)..(169): Pfam Name: Cytochrome b5-like Heme/Steroid binding domain Pfam Description: Cytochrome b5-like Heme/Steroid binding domain
  misc_feature (20)..(193): Homolog of NCBI NO: 6647578 NR Description: Membrane associated progesterone receptor
  misc_feature (72)..(170): Homolog of NCBI NO: 40889041 NR Description: Chain A, Solution Structure Of A Putative
  misc_feature (72)..(170): Homolog of NCBI NO: 15224648 NR Description: cytochrome b5 domain-containing protein
  misc_feature (58)..(224): Homolog of NCBI NO: 18859969 NR Description: CG9066-PA [Drosophila melanogaster]
  misc_feature (20)..(191): Homolog of NCBI NO: 37535794 NR Description: putative steroid membrane binding protein
  misc_feature (4)..(222): Homolog of NCBI NO: 37535798 NR Description: putative steroid membrane binding protein
  misc_feature (1)..(202): Homolog of NCBI NO: 4960154 NR Description: putative progesterone-binding protein homolog
  misc_feature (1)..(216): Homolog of NCBI NO: 15229044 NR Description: cytochrome b5 domain-containing protein
  misc_feature (1)..(225): Homolog of NCBI NO: 4960156 NR Description: putative progesterone-binding protein homolog
  misc_feature (1)..(225): Homolog of NCBI NO: 15242943 NR Description: cytochrome b5 domain-containing protein
MAVQLWETLKEAIVAYTGFSPSTFFTVLALLFAVYYVVTGLFGSSDDHHHRHRHVEEEEEMPPLRPPVQLGEITAEELKAYDGTDPEKPLLMAIKAQIYDVSQSRMFYGPGGPYALFAGKDASRALAKMSFEEKDLTGDISGLGPFELDALQDWEYKFMSKYVKVGTVKSEEVPVTEPESIGEPLESTSRDIDAAAKPTDTEDGKLETPAVKSDETPSNVDADKE

SEQ ID NO: 54808 - protein, 165 aa, Glycine max
  peptide (1)..(165): Ceres Seq. ID no. 14307188
  misc_feature (12)..(109): Pfam Name: Cytochrome b5-like Heme/Steroid binding domain Pfam Description: Cytochrome b5-like Heme/Steroid binding domain
  misc_feature (1)..(133): Homolog of NCBI NO: 6647578 NR Description: Membrane associated progesterone receptor
  misc_feature (12)..(110): Homolog of NCBI NO: 40889041 NR Description: Chain A, Solution Structure Of A Putative
  misc_feature (12)..(110): Homolog of NCBI NO: 15224648 NR Description: cytochrome b5 domain-containing protein
  misc_feature (1)..(164): Homolog of NCBI NO: 18859969 NR Description: CG9066-PA [Drosophila melanogaster]
  misc_feature (1)..(131): Homolog of NCBI NO: 37535794 NR Description: putative steroid membrane binding protein
  misc_feature (1)..(162): Homolog of NCBI NO: 37535798 NR Description: putative steroid membrane binding protein
  misc_feature (1)..(142): Homolog of NCBI NO: 4960154 NR Description: putative progesterone-binding protein homolog
  misc_feature (1)..(156): Homolog of NCBI NO: 15229044 NR Description: cytochrome b5 domain-containing protein
  misc_feature (1)..(165): Homolog of NCBI NO: 4960156 NR Description: putative progesterone-binding protein homolog
  misc_feature (1)..(165): Homolog of NCBI NO: 15242943 NR Description: cytochrome b5 domain-containing protein
MPPLRPPVQLGEITAEELKAYDGTDPEKPLLMAIKAQIYDVSQSRMFYGPGGPYALFAGKDASRALAKMSFEEKDLTGDISGLGPFELDALQDWEYKFMSKYVKVGTVKSEEVPVTEPESIGEPLESTSRDIDAAAKPTDTEDGKLETPAVKSDETPSNVDADKE

SEQ ID NO: 54809 - protein, 134 aa, Glycine max
  peptide (1)..(134): Ceres Seq. ID no. 14307189
  misc_feature (1)..(78): Pfam Name: Cytochrome b5-like Heme/Steroid binding domain Pfam Description: Cytochrome b5-like Heme/Steroid binding domain
  misc_feature (1)..(102): Homolog of NCBI NO: 6647578 NR Description: Membrane associated progesterone receptor
  misc_feature (1)..(79): Homolog of NCBI NO: 40889041 NR Description: Chain A, Solution Structure Of A Putative
  misc_feature (1)..(79): Homolog of NCBI NO: 15224648 NR Description: cytochrome b5 domain-containing protein
  misc_feature (1)..(133): Homolog of NCBI NO: 18859969 NR Description: CG9066-PA [Drosophila melanogaster]
  misc_feature (1)..(100): Homolog of NCBI NO: 37535794 NR Description: putative steroid membrane binding protein
  misc_feature (1)..(131): Homolog of NCBI NO: 37535798 NR Description: putative steroid membrane binding protein
  misc_feature (1)..(111): Homolog of NCBI NO: 4960154 NR Description: putative progesterone-binding protein homolog
  misc_feature (1)..(125): Homolog of NCBI NO: 15229044 NR Description: cytochrome b5 domain-containing protein
  misc_feature (1)..(134): Homolog of NCBI NO: 4960156 NR Description: putative progesterone-binding protein homolog
  misc_feature (1)..(134): Homolog of NCBI NO: 15242943 NR Description: cytochrome b5 domain-containing protein
MAIKAQIYDVSQSRMFYGPGGPYALFAGKDASRALAKMSFEEKDLTGDISGLGPFELDALQDWEYKFMSKYVKVGTVKSEEVPVTEPESIGEPLESTSRDIDAAAKPTDTEDGKLETPAVKSDETPSNVDADKE

SEQ ID NO: 54810 - DNA, 1285 bp, Glycine max
  misc_feature (1)..(1285): Ceres Seq. ID no. 15170866
gagagtcagtgtacgcagaagagtaaaatcgattggcgatgatggagttgaaagagattcagagactcgaaggccacaccgataaggtttggagcttggcctggaacccgaccaccggtcacgccggtatcccactcgtcttcgcttcttgcagcggcgacaaaaccgtccgaatctgggagcagaacctctcctctggcctctgggcctgcacggcggttctggatgaaacgcacactcgaactgttcgatcttgtgcttggtcaccgtcgggtaagctattggccactgcaagcttcgatgccaccactgccatttgggaaaatgttggtggtgattttgagtgtgtttctactttggagggacacgaaaatgaagtcaagtgtgtgtcttggaacgcggctgggacgttgcttgcaacttgtagtagagataagtctgtttggatatgggaagtgctgcctgggaatgagtttgagtgtgtgtcagtgctgcaaggacactcgcaggatgtgaaaatggtgaagtggcatcccacagaggatatcttgttttcatgtagctacgataatagtgttaaggtttgggcggatgaaggtgatagtgatgattggcagtgtgttcaaacgcttggggaacccaataacggtcatacttccactgtttgggccctctccttcaatgtgagtggtgacaaaatggttacgtgtagtgatgatcttacactgaaggtatgggaaacagaaagtgtagggacgcaatctggtggtggatttgcaccttggacacatctttgcactctttcagggtatcatgatcggacaatattctcagttcattggtcaagagaaggtatctttgccagtggagccgcagataatgctatacggctttttgtggatgacaatgaaagtcaggttggtggtcctctctacaagttgctgctgaagaaggagaaggcccatgacatggatataaattctgtgcagtggagccctggggagaagccggtactagcctctgcaagcgatgatgggacaatcaaggtgtgggagttgacatcatactagttttccacatttgctgtatgagtagcagatattttatactggaggagcctaatagaagtgctagatgtgcaggcatcctcatagctatttttcttttcttagttatatttactaaaattttacaacagacattgaatattatatttttttaggggagtcagtagtgtgactgtaaattgtaattactgtcacaactaaactttacatttttgctc

SEQ ID NO: 54811 - protein, 343 aa, Glycine max
  peptide (1)..(343): Ceres Seq. ID no. 15170867
  misc_feature (102)..(139): Pfam Name: WD domain, G-beta repeat Pfam Description: WD domain, G-beta repeat
  misc_feature (9)..(339): Homolog of NCBI NO: 4757988 NR Description: WD40 protein Ciao1 [Homo sapiens]
  misc_feature (9)..(339): Homolog of NCBI NO: 31542399 NR Description: WD40 protein Ciao1 [Mus musculus]
  misc_feature (6)..(342): Homolog of NCBI NO: 28279952 NR Description: Similar to WD40 protein Ciao1 [Danio rerio]
  misc_feature (10)..(341): Homolog of NCBI NO: 19922278 NR Description: CG12797-PA [Drosophila melanogaster]
  misc_feature (4)..(58): Homolog of NCBI NO: 22329107 NR Description: transducin / WD-40 repeat protein family
  misc_feature (86)..(320): Homolog of NCBI NO: 22329107 NR Description: transducin / WD-40 repeat protein family
  misc_feature (271)..(342): Homolog of NCBI NO: 7446121 NR Description: hypothetical protein At2g26060 [imported] -
  misc_feature (2)..(263): Homolog of NCBI NO: 7446121 NR Description: hypothetical protein At2g26060 [imported] -
  misc_feature (4)..(340): Homolog of NCBI NO: 34394959 NR Description: putative WD40 protein Ciao1
  misc_feature (2)..(342): Homolog of NCBI NO: 18401018 NR Description: transducin / WD-40 repeat protein family
MMELKEIQRLEGHTDKVWSLAWNPTTGHAGIPLVFASCSGDKTVRIWEQNLSSGLWACTAVLDETHTRTVRSCAWSPSGKLLATASFDATTAIWENVGGDFECVSTLEGHENEVKCVSWNAAGTLLATCSRDKSVWIWEVLPGNEFECVSVLQGHSQDVKMVKWHPTEDILFSCSYDNSVKVWADEGDSDDWQCVQTLGEPNNGHTSTVWALSFNVSGDKMVTCSDDLTLKVWETESVGTQSGGGFAPWTHLCTLSGYHDRTIFSVHWSREGIFASGAADNAIRLFVDDNESQVGGPLYKLLLKKEKAHDMDINSVQWSPGEKPVLASASDDGTIKVWELTSY

SEQ ID NO: 54812 - protein, 342 aa, Glycine max
  peptide (1)..(342): Ceres Seq. ID no. 15170868
  misc_feature (101)..(138): Pfam Name: WD domain, G-beta repeat Pfam Description: WD domain, G-beta repeat
  misc_feature (8)..(338): Homolog of NCBI NO: 4757988 NR Description: WD40 protein Ciao1 [Homo sapiens]
  misc_feature (8)..(338): Homolog of NCBI NO: 31542399 NR Description: WD40 protein Ciao1 [Mus musculus]
  misc_feature (5)..(341): Homolog of NCBI NO: 28279952 NR Description: Similar to WD40 protein Ciao1 [Danio rerio]
  misc_feature (9)..(340): Homolog of NCBI NO: 19922278 NR Description: CG12797-PA [Drosophila melanogaster]
  misc_feature (3)..(57): Homolog of NCBI NO: 22329107 NR Description: transducin / WD-40 repeat protein family
  misc_feature (85)..(319): Homolog of NCBI NO: 22329107 NR Description: transducin / WD-40 repeat protein family
  misc_feature (270)..(341): Homolog of NCBI NO: 7446121 NR Description: hypothetical protein At2g26060 [imported] -
  misc_feature (1)..(262): Homolog of NCBI NO: 7446121 NR Description: hypothetical protein At2g26060 [imported] -
  misc_feature (3)..(339): Homolog of NCBI NO: 34394959 NR Description: putative WD40 protein Ciao1
  misc_feature (1)..(341): Homolog of NCBI NO: 18401018 NR Description: transducin / WD-40 repeat protein family
MELKEIQRLEGHTDKVWSLAWNPTTGHAGIPLVFASCSGDKTVRIWEQNLSSGLWACTAVLDETHTRTVRSCAWSPSGKLLATASFDATTAIWENVGGDFECVSTLEGHENEVKCVSWNAAGTLLATCSRDKSVWIWEVLPGNEFECVSVLQGHSQDVKMVKWHPTEDILFSCSYDNSVKVWADEGDSDDWQCVQTLGEPNNGHTSTVWALSFNVSGDKMVTCSDDLTLKVWETESVGTQSGGGFAPWTHLCTLSGYHDRTIFSVHWSREGIFASGAADNAIRLFVDDNESQVGGPLYKLLLKKEKAHDMDINSVQWSPGEKPVLASASDDGTIKVWELTSY

SEQ ID NO: 54813 - protein, 183 aa, Glycine max
  peptide (1)..(183): Ceres Seq. ID no. 15170869
  misc_feature (1)..(179): Homolog of NCBI NO: 12832206 NR Description: unnamed protein product [Mus musculus]
  misc_feature (1)..(179): Homolog of NCBI NO: 4757988 NR Description: WD40 protein Ciao1 [Homo sapiens]
  misc_feature (1)..(179): Homolog of NCBI NO: 31542399 NR Description: WD40 protein Ciao1 [Mus musculus]
  misc_feature (1)..(182): Homolog of NCBI NO: 28279952 NR Description: Similar to WD40 protein Ciao1 [Danio rerio]
  misc_feature (1)..(181): Homolog of NCBI NO: 19922278 NR Description: CG12797-PA [Drosophila melanogaster]
  misc_feature (1)..(160): Homolog of NCBI NO: 22329107 NR Description: transducin / WD-40 repeat protein family
  misc_feature (111)..(182): Homolog of NCBI NO: 7446121 NR Description: hypothetical protein At2g26060 [imported] -
  misc_feature (1)..(103): Homolog of NCBI NO: 7446121 NR Description: hypothetical protein At2g26060 [imported] -
  misc_feature (1)..(180): Homolog of NCBI NO: 34394959 NR Description: putative WD40 protein Ciao1
  misc_feature (1)..(182): Homolog of NCBI NO: 18401018 NR Description: transducin / WD-40 repeat protein family
MVKWHPTEDILFSCSYDNSVKVWADEGDSDDWQCVQTLGEPNNGHTSTVWALSFNVSGDKMVTCSDDLTLKVWETESVGTQSGGGFAPWTHLCTLSGYHDRTIFSVHWSREGIFASGAADNAIRLFVDDNESQVGGPLYKLLLKKEKAHDMDINSVQWSPGEKPVLASASDDGTIKVWELTSY

SEQ ID NO: 54814 - DNA, 1507 bp, Glycine max
  misc_feature (1)..(1507): Ceres Seq. ID no. 15170420
agaagaatcgtggaatcttcatgcaatgcttcttcccattttcacactttgttaacacttaattttctgatcccaatctcgttaagcttcttagcaacaacacaaaatgagcgccatctctttcagttccatccattttcacacttggaaaaaccccaaggggtttggaaaggtgagaaaacaaccacatgggaagctacttgtaaagtgttccagccagagtgggaacccatcttcttcgcaaaatgcggttcgtgttggtgttgttggagctagtggctacactggttctgaggttctgcgactcttggcaaatcatccacagtttgggattgcactgatgactgcggataggaaagctgggcagccaatctcttctgtgttcccacatttgagcacttgggacttgccagatttgatttcaataaaggatgcaaacttttctgatgtggatgctgtattctgttgtttgcctcatggaactactcaggaaattattaaaggcctaccaaagcacctgaagattgttgatctttctgcagattttcgtctaaaagatctttctgagtatgaagaatggtatggtcagccgcatagagcaccagatttacagaaagaagctatatacggattgacagaggttttaagggaggaaatacagaatgctcgtctagttgctaatcctggttgttatccaacttctgttcaacttcctcttgtcccattgataaaggctagtcttattgagcttaaaaatattatcattgatgctaaatctggtgtgagtggagcaggacgcagtgccaaagaaaatttattgttcactgaagtaactgaaggtctcaattcttatggtgttacccggcatcgccatgttcctgaaattgaacagggacttgctgatgcttcaggttcaaaagtaactgttagttttacaccacacctaattccaatgagccgtggtatgcaatcaactatttatgtggaaatggctccaggagtgagaattgaggacctgtaccagcaactgaagctctcatatgaggacgaagaatttgttgttgtgttggaaaatggagccattcctcgaactcacagcgttaaagggactaattactgtttaatcaatgtttttccagaccgaattcctggaagagcaatcattatatctgttattgataatttagtgaagggagcttcaggtcaagctttacaaaaccttaatttgttaatgggatttccagaaaatttgggacttcattacctgcctctttttccttagagtagttgtcttgtccaactagagctccaaatctgaagccacagttccaccaaaatacttgatggagcagaggaaatattttcaagttatgtattttcattctctagattgtaatgtgagattcttcaagaatttagaagggaattggttatgacattggcagggatattaaagcaatttctgttttttttaaaaaaaaaaaaaaaaaaaaaaaaaaaaaaaaat

SEQ ID NO: 54815 - protein, 391 aa, Glycine max
  peptide (1)..(391): Ceres Seq. ID no. 15170421
  misc_feature (204)..(362): Pfam Name: Semialdehyde dehydrogenase, dimerisation domain Pfam Description: Semialdehyde dehydrogenase, dimerisation domain
  misc_feature (1)..(391): Homolog of NCBI NO: 15805987 NR Description: N-acetyl-gamma-glutamyl-phosphate reductase
  misc_feature (51)..(391): Homolog of NCBI NO: 22956652 NR Description: hypothetical protein [Rhodobacter sphaeroides]
  misc_feature (50)..(391): Homolog of NCBI NO: 28376951 NR Description: N-acetyl-gamma-glutamyl-phosphate reductase (N-acetyl-glutamate semialdehyde dehydrogenase) (NAGSA
  misc_feature (50)..(391): Homolog of NCBI NO: 6714965 NR Description: N-acetyl-gamma-glutamyl-phosphate reductase
  misc_feature (117)..(391): Homolog of NCBI NO: 23013472 NR Description: hypothetical protein [Magnetospirillum
  misc_feature (49)..(391): Homolog of NCBI NO: 22968389 NR Description: hypothetical protein [Rhodospirillum rubrum]
  misc_feature (29)..(391): Homolog of NCBI NO: 25284367 NR Description: hypothetical protein At2g19940 [imported] -
  misc_feature (36)..(391): Homolog of NCBI NO: 37535658 NR Description: putative N-acetyl-gamma-glutamyl-phosphate
  misc_feature (49)..(391): Homolog of NCBI NO: 18399202 NR Description: N-acetyl-gamma-glutamyl-phosphate reductase
  misc_feature (2)..(391): Homolog of NCBI NO: 16604368 NR Description: At2g19940/F6F22.3 [Arabidopsis thaliana]
MSAISFSSIHFHTWKNPKGFGKVRKQPHGKLLVKCSSQSGNPSSSQNAVRVGVVGASGYTGSEVLRLLANHPQFGIALMTADRKAGQPISSVFPHLSTWDLPDLISIKDANFSDVDAVFCCLPHGTTQEIIKGLPKHLKIVDLSADFRLKDLSEYEEWYGQPHRAPDLQKEAIYGLTEVLREEIQNARLVANPGCYPTSVQLPLVPLIKASLIELKNIIIDAKSGVSGAGRSAKENLLFTEVTEGLNSYGVTRHRHVPEIEQGLADASGSKVTVSFTPHLIPMSRGMQSTIYVEMAPGVRIEDLYQQLKLSYEDEEFVVVLENGAIPRTHSVKGTNYCLINVFPDRIPGRAIIISVIDNLVKGASGQALQNLNLLMGFPENLGLHYLPLFP

SEQ ID NO: 54816 - protein, 313 aa, Glycine max
  peptide (1)..(313): Ceres Seq. ID no. 15170422
  misc_feature (126)..(284): Pfam Name: Semialdehyde dehydrogenase, dimerisation domain Pfam Description: Semialdehyde dehydrogenase, dimerisation domain
  misc_feature (1)..(313): Homolog of NCBI NO: 15805987 NR Description: N-acetyl-gamma-glutamyl-phosphate reductase
  misc_feature (1)..(313): Homolog of NCBI NO: 22956652 NR Description: hypothetical protein [Rhodobacter sphaeroides]
  misc_feature (1)..(313): Homolog of NCBI NO: 28376951 NR Description: N-acetyl-gamma-glutamyl-phosphate reductase (N-acetyl-glutamate semialdehyde dehydrogenase) (NAGSA
  misc_feature (1)..(313): Homolog of NCBI NO: 6714965 NR Description: N-acetyl-gamma-glutamyl-phosphate reductase
  misc_feature (39)..(313): Homolog of NCBI NO: 23013472 NR Description: hypothetical protein [Magnetospirillum
  misc_feature (1)..(313): Homolog of NCBI NO: 22968389 NR Description: hypothetical protein [Rhodospirillum rubrum]
  misc_feature (1)..(313): Homolog of NCBI NO: 25284367 NR Description: hypothetical protein At2g19940 [imported] -
  misc_feature (1)..(313): Homolog of NCBI NO: 37535658 NR Description: putative N-acetyl-gamma-glutamyl-phosphate
  misc_feature (1)..(313): Homolog of NCBI NO: 18399202 NR Description: N-acetyl-gamma-glutamyl-phosphate reductase
  misc_feature (1)..(313): Homolog of NCBI NO: 16604368 NR Description: At2g19940/F6F22.3 [Arabidopsis thaliana]
MTADRKAGQPISSVFPHLSTWDLPDLISIKDANFSDVDAVFCCLPHGTTQEIIKGLPKHLKIVDLSADFRLKDLSEYEEWYGQPHRAPDLQKEAIYGLTEVLREEIQNARLVANPGCYPTSVQLPLVPLIKASLIELKNIIIDAKSGVSGAGRSAKENLLFTEVTEGLNSYGVTRHRHVPEIEQGLADASGSKVTVSFTPHLIPMSRGMQSTIYVEMAPGVRIEDLYQQLKLSYEDEEFVVVLENGAIPRTHSVKGTNYCLINVFPDRIPGRAIIISVIDNLVKGASGQALQNLNLLMGFPENLGLHYLPLFP

SEQ ID NO: 54817 - DNA, 1562 bp, Glycine max
  misc_feature (1)..(1562): Ceres Seq. ID no. 14307879
tcctttaagccagcacgccaaaaagaacttctttgcaaaacacgactgaggaccttgcaacaccggcgtctccctccttcctctcctctctctgcctttacctttgattgtaggtttttcattatttggcggcgaaacagggttgaatatttttgttttagcgtctgagctttgaattacagagcaaagtgaagcgtgaacatggtgatgcatctaaacgggacaccgtgcgctctcggattccacatgcctgcggagtgggaaacccacgcgcagtgctggatgggttggcctgaacgtgccgataactggcgtgacggcgccgttcacgcccaacgcgtgtttgcgagggtagcgtcagcaatctcaagattcgagtctgtaacagtttgtgttagttctgcacagtgggagaacgcgcggagtcagctaccggagcatatcagggtcgttgagatgaacatgaacgattcttggttccgtgatattggacctacttttgttatgagaagaagcaccacgccggaatctggtgatgcagtgagcaggattgcagggattgactggaattttaatagttggggaggcttagaagatggatgttactgtgattggagtcttgatttgcttgtggctaagaagattttgggaattgagaagattcctagattttcacattcgatggtgcttgaaggtggaagcatccatgtggatggagaaggaacttgtcttaccacagaagagtgcctcttgaacaagaacaggaaccctcacttgagtaagaaccaaatagaggatgaacttaagacatatcttggaatccggaaggttatatggttgcctcgtggattatatggagatgatgacacaaatggtcatattgataacatgtgctgttttgtgaggcctggtgtggttatgctgtcttggattgatgatgaaactgatcctcagtatgaaagatctgtagaagcatattctttgctttcaaatgaaacagatgctaatggtagaaagtttgaaatcattaaactccatgttcccagtccactctatatgacagaggacgaggctgctggggtttctctggataatgaggctaagccaagacttccaggtactaggcttgctgcttcctatgtaaacttttacattgcaaataaagctatcattgcaccacaatttggagataaaaagtgggatgatgaagctgtccgagtcctatctaaggccttccctcatcatgaagttgtgggaattgaaggtgccagggagattgttttggccggtggaaatatacattgcattactcagcaacaaccagccatttgagcggcggcactctcgatattcgttgataggtgttgtattgttgcttatgggtttccagaataaattgatttggttaaattgcttggttagttagttggtttgctccaattgggcatgtatgctaatttttggagattagcaaaatccaataattgcagcctggatgaaagtgtatgcaaatagatggaaaaccgttgaaaatataaaacctaatttatatttaaattggc

SEQ ID NO: 54818 - protein, 376 aa, Glycine max
  peptide (1)..(376): Ceres Seq. ID no. 14307880
  misc_feature (14)..(374): Pfam Name: Porphyromonas-type peptidyl-arginine deiminase Pfam Description: Porphyromonas-type peptidyl-arginine deiminase
  misc_feature (5)..(375): Homolog of NCBI NO: 26987008 NR Description: conserved hypothetical protein [Pseudomonas
  misc_feature (5)..(375): Homolog of NCBI NO: 23105724 NR Description: hypothetical protein [Azotobacter vinelandii]
  misc_feature (13)..(374): Homolog of NCBI NO: 16802086 NR Description: conserved hypothetical protein [Listeria
  misc_feature (5)..(375): Homolog of NCBI NO: 23472721 NR Description: hypothetical protein [Pseudomonas syringae pv.
  misc_feature (5)..(375): Homolog of NCBI NO: 28872501 NR Description: conserved hypothetical protein
  misc_feature (8)..(375): Homolog of NCBI NO: 15595489 NR Description: conserved hypothetical protein [Pseudomonas
  misc_feature (5)..(351): Homolog of NCBI NO: 38606518 NR Description: OSJNBa0016O02.3 [Oryza sativa (japonica
  misc_feature (8)..(375): Homolog of NCBI NO: 14289303 NR Description: hypothetical protein [Arabidopsis thaliana]
  misc_feature (8)..(375): Homolog of NCBI NO: 26452202 NR Description: unknown protein [Arabidopsis thaliana]
  misc_feature (8)..(375): Homolog of NCBI NO: 15241536 NR Description: expressed protein [Arabidopsis thaliana]
MVMHLNGTPCALGFHMPAEWETHAQCWMGWPERADNWRDGAVHAQRVFARVASAISRFESVTVCVSSAQWENARSQLPEHIRVVEMNMNDSWFRDIGPTFVMRRSTTPESGDAVSRIAGIDWNFNSWGGLEDGCYCDWSLDLLVAKKILGIEKIPRFSHSMVLEGGSIHVDGEGTCLTTEECLLNKNRNPHLSKNQIEDELKTYLGIRKVIWLPRGLYGDDDTNGHIDNMCCFVRPGVVMLSWIDDETDPQYERSVEAYSLLSNETDANGRKFEIIKLHVPSPLYMTEDEAAGVSLDNEAKPRLPGTRLAASYVNFYIANKAIIAPQFGDKKWDDEAVRVLSKAFPHHEVVGIEGAREIVLAGGNIHCITQQQPAI

SEQ ID NO: 54819 - protein, 374 aa, Glycine max
  peptide (1)..(374): Ceres Seq. ID no. 14307881
  misc_feature (12)..(372): Pfam Name: Porphyromonas-type peptidyl-arginine deiminase Pfam Description: Porphyromonas-type peptidyl-arginine deiminase
  misc_feature (3)..(373): Homolog of NCBI NO: 26987008 NR Description: conserved hypothetical protein [Pseudomonas
  misc_feature (3)..(373): Homolog of NCBI NO: 23105724 NR Description: hypothetical protein [Azotobacter vinelandii]
  misc_feature (11)..(372): Homolog of NCBI NO: 16802086 NR Description: conserved hypothetical protein [Listeria
  misc_feature (3)..(373): Homolog of NCBI NO: 23472721 NR Description: hypothetical protein [Pseudomonas syringae pv.
  misc_feature (3)..(373): Homolog of NCBI NO: 28872501 NR Description: conserved hypothetical protein
  misc_feature (6)..(373): Homolog of NCBI NO: 15595489 NR Description: conserved hypothetical protein [Pseudomonas
  misc_feature (3)..(349): Homolog of NCBI NO: 38606518 NR Description: OSJNBa0016O02.3 [Oryza sativa (japonica
  misc_feature (6)..(373): Homolog of NCBI NO: 14289303 NR Description: hypothetical protein [Arabidopsis thaliana]
  misc_feature (6)..(373): Homolog of NCBI NO: 26452202 NR Description: unknown protein [Arabidopsis thaliana]
  misc_feature (6)..(373): Homolog of NCBI NO: 15241536 NR Description: expressed protein [Arabidopsis thaliana]
MHLNGTPCALGFHMPAEWETHAQCWMGWPERADNWRDGAVHAQRVFARVASAISRFESVTVCVSSAQWENARSQLPEHIRVVEMNMNDSWFRDIGPTFVMRRSTTPESGDAVSRIAGIDWNFNSWGGLEDGCYCDWSLDLLVAKKILGIEKIPRFSHSMVLEGGSIHVDGEGTCLTTEECLLNKNRNPHLSKNQIEDELKTYLGIRKVIWLPRGLYGDDDTNGHIDNMCCFVRPGVVMLSWIDDETDPQYERSVEAYSLLSNETDANGRKFEIIKLHVPSPLYMTEDEAAGVSLDNEAKPRLPGTRLAASYVNFYIANKAIIAPQFGDKKWDDEAVRVLSKAFPHHEVVGIEGAREIVLAGGNIHCITQQQPAI

SEQ ID NO: 54820 - protein, 361 aa, Glycine max
  peptide (1)..(361): Ceres Seq. ID no. 14307882
  misc_feature (1)..(359): Pfam Name: Porphyromonas-type peptidyl-arginine deiminase Pfam Description: Porphyromonas-type peptidyl-arginine deiminase
  misc_feature (1)..(360): Homolog of NCBI NO: 26987008 NR Description: conserved hypothetical protein [Pseudomonas
  misc_feature (1)..(360): Homolog of NCBI NO: 23105724 NR Description: hypothetical protein [Azotobacter vinelandii]
  misc_feature (1)..(359): Homolog of NCBI NO: 16802086 NR Description: conserved hypothetical protein [Listeria
  misc_feature (1)..(360): Homolog of NCBI NO: 23472721 NR Description: hypothetical protein [Pseudomonas syringae pv.
  misc_feature (1)..(360): Homolog of NCBI NO: 28872501 NR Description: conserved hypothetical protein
  misc_feature (1)..(360): Homolog of NCBI NO: 15595489 NR Description: conserved hypothetical protein [Pseudomonas
  misc_feature (1)..(336): Homolog of NCBI NO: 38606518 NR Description: OSJNBa0016O02.3 [Oryza sativa (japonica
  misc_feature (1)..(360): Homolog of NCBI NO: 14289303 NR Description: hypothetical protein [Arabidopsis thaliana]
  misc_feature (1)..(360): Homolog of NCBI NO: 26452202 NR Description: unknown protein [Arabidopsis thaliana]
  misc_feature (1)..(360): Homolog of NCBI NO: 15241536 NR Description: expressed protein [Arabidopsis thaliana]
MPAEWETHAQCWMGWPERADNWRDGAVHAQRVFARVASAISRFESVTVCVSSAQWENARSQLPEHIRVVEMNMNDSWFRDIGPTFVMRRSTTPESGDAVSRIAGIDWNFNSWGGLEDGCYCDWSLDLLVAKKILGIEKIPRFSHSMVLEGGSIHVDGEGTCLTTEECLLNKNRNPHLSKNQIEDELKTYLGIRKVIWLPRGLYGDDDTNGHIDNMCCFVRPGVVMLSWIDDETDPQYERSVEAYSLLSNETDANGRKFEIIKLHVPSPLYMTEDEAAGVSLDNEAKPRLPGTRLAASYVNFYIANKAIIAPQFGDKKWDDEAVRVLSKAFPHHEVVGIEGAREIVLAGGNIHCITQQQPAI

SEQ ID NO: 54821 - DNA, 1415 bp, Glycine max
  misc_feature (1)..(1415): Ceres Seq. ID no. 15169316
aaatacttgctattcgggatcatggcgatgtttgtttgaaacaacagcaacggagaggatgagaagagagtgaagtttgtgaaagagatggcactcgtaacaacaaacccaaccatcaatgaggggcctctgttcgccgaagttgacatgggttccgacttcaacgccccaacggttcgagctaccgttgttcaagcctccaccatcttctacgacacaccagccaccttagataaggctgagaggttgttggctgaagctactagctatgggtcccagcttgtggtgtttccagaagcctttgtgggtggctacccgcgtggttcagcttttggtctttcgatcggaaatcgcactgttaagggtagagaggagtttcgcaagtatcattctgcagccattgatgtgcctggtcctgaagttgatagattggcagcaatggcagggaagtataaagtacatttagtgatgggtgtgatagagagggacggctacacactttattgcaccgttctgttctttgattctcagggtcattacctaggaaagcacaggaaaatcatgccaactgcattggagcgggttatctggggatttggggatggatcaaccattccagtgtttgaaactcccgttggaaaaataggtgctgccatttgttgggagaacagaatgccactattaaggacagcaatgtatgccaaaggtgtggagatatattgtgctccaacagctgatgccagggatgtgtggcaggcatcaatgacccatattgcacttgaaggtggatgttttgttttgtcagcaaaccagttttgtcggagaagggattacccaccccctccagagtatgtttttgctggcacagaagtggacctgacaccggattctgttgtgtgcgccggaggtagtgtcattatatcaccattaggggctgttctggctggaccaaattatgacggggaggcgctaatctcagcagaccttgatcttggagaaattgcaagagctaagtttgattttgatgtggttggacactattcaaggcctgaagtgcttagcttaactgtaaaggaccatccaacgaaccccgttacttttacatcaacatcgacaaaaattgaagacaagaccaagtagtttcttcctttcatggcttgcaacttccaaacctccagttctggacctgtccacatagccttatttgaccccttgtatgttaactcttgtgtccatatatgaaaggttatttgggcattttgtcgtggtttatatcaccacattaaaatgacattggaactcatatttgctatttttcacataatttcataagctaaaaattaagcttatgaaagtaaccttgcacgaaagcttaagcaaatcaactggttgttttaattatcgagtttttactg

SEQ ID NO: 54822 - protein, 350 aa, Glycine max
  peptide (1)..(350): Ceres Seq. ID no. 15169317
  misc_feature (30)..(347): Homolog of NCBI NO: 25290267 NR Description: nitrilase (EC 3.5.5.1) 2 [imported] - Arabidopsis
  misc_feature (30)..(347): Homolog of NCBI NO: 15229932 NR Description: nitrilase 2 [Arabidopsis thaliana]
  misc_feature (30)..(347): Homolog of NCBI NO: 25290266 NR Description: nitrilase (EC 3.5.5.1) 2 [imported] - Arabidopsis
  misc_feature (1)..(347): Homolog of NCBI NO: 37654216 NR Description: nitrilase 1 [Zea mays]
  misc_feature (1)..(344): Homolog of NCBI NO: 37654214 NR Description: nitrilase 2 [Zea mays]
  misc_feature (14)..(344): Homolog of NCBI NO: 25290269 NR Description: nitrilase-like protein [imported] - rice
  misc_feature (4)..(349): Homolog of NCBI NO: 21593970 NR Description: Nitrilase 4 (sp P46011) [Arabidopsis thaliana]
  misc_feature (1)..(349): Homolog of NCBI NO: 15242205 NR Description: Nitrilase 4 (sp P46011) [Arabidopsis thaliana]
  misc_feature (1)..(350): Homolog of NCBI NO: 3914163 NR Description: NITRILASE 4
  misc_feature (1)..(350): Homolog of NCBI NO: 7435980 NR Description: nitrilase (EC 3.5.5.1) 4B - common tobacco
MALVTTNPTINEGPLFAEVDMGSDFNAPTVRATVVQASTIFYDTPATLDKAERLLAEATSYGSQLVVFPEAFVGGYPRGSAFGLSIGNRTVKGREEFRKYHSAAIDVPGPEVDRLAAMAGKYKVHLVMGVIERDGYTLYCTVLFFDSQGHYLGKHRKIMPTALERVIWGFGDGSTIPVFETPVGKIGAAICWENRMPLLRTAMYAKGVEIYCAPTADARDVWQASMTHIALEGGCFVLSANQFCRRRDYPPPPEYVFAGTEVDLTPDSVVCAGGSVIISPLGAVLAGPNYDGEALISADLDLGEIARAKFDFDVVGHYSRPEVLSLTVKDHPTNPVTFTSTSTKIEDKTK

SEQ ID NO: 54823 - protein, 330 aa, Glycine max
  peptide (1)..(330): Ceres Seq. ID no. 15169318
  misc_feature (10)..(327): Homolog of NCBI NO: 25290267 NR Description: nitrilase (EC 3.5.5.1) 2 [imported] - Arabidopsis
  misc_feature (10)..(327): Homolog of NCBI NO: 15229932 NR Description: nitrilase 2 [Arabidopsis thaliana]
  misc_feature (10)..(327): Homolog of NCBI NO: 25290266 NR Description: nitrilase (EC 3.5.5.1) 2 [imported] - Arabidopsis
  misc_feature (1)..(327): Homolog of NCBI NO: 37654216 NR Description: nitrilase 1 [Zea mays]
  misc_feature (1)..(324): Homolog of NCBI NO: 37654214 NR Description: nitrilase 2 [Zea mays]
  misc_feature (1)..(324): Homolog of NCBI NO: 25290269 NR Description: nitrilase-like protein [imported] - rice
  misc_feature (1)..(329): Homolog of NCBI NO: 21593970 NR Description: Nitrilase 4 (sp P46011) [Arabidopsis thaliana]
  misc_feature (1)..(329): Homolog of NCBI NO: 15242205 NR Description: Nitrilase 4 (sp P46011) [Arabidopsis thaliana]
  misc_feature (1)..(330): Homolog of NCBI NO: 3914163 NR Description: NITRILASE 4
  misc_feature (1)..(330): Homolog of NCBI NO: 7435980 NR Description: nitrilase (EC 3.5.5.1) 4B - common tobacco
MGSDFNAPTVRATVVQASTIFYDTPATLDKAERLLAEATSYGSQLVVFPEAFVGGYPRGSAFGLSIGNRTVKGREEFRKYHSAAIDVPGPEVDRLAAMAGKYKVHLVMGVIERDGYTLYCTVLFFDSQGHYLGKHRKIMPTALERVIWGFGDGSTIPVFETPVGKIGAAICWENRMPLLRTAMYAKGVEIYCAPTADARDVWQASMTHIALEGGCFVLSANQFCRRRDYPPPPEYVFAGTEVDLTPDSVVCAGGSVIISPLGAVLAGPNYDGEALISADLDLGEIARAKFDFDVVGHYSRPEVLSLTVKDHPTNPVTFTSTSTKIEDKTK

SEQ ID NO: 54824 - protein, 233 aa, Glycine max
  peptide (1)..(233): Ceres Seq. ID no. 15169319
  misc_feature (1)..(230): Homolog of NCBI NO: 25290267 NR Description: nitrilase (EC 3.5.5.1) 2 [imported] - Arabidopsis
  misc_feature (1)..(230): Homolog of NCBI NO: 15229932 NR Description: nitrilase 2 [Arabidopsis thaliana]
  misc_feature (1)..(230): Homolog of NCBI NO: 25290266 NR Description: nitrilase (EC 3.5.5.1) 2 [imported] - Arabidopsis
  misc_feature (1)..(230): Homolog of NCBI NO: 37654216 NR Description: nitrilase 1 [Zea mays]
  misc_feature (1)..(227): Homolog of NCBI NO: 37654214 NR Description: nitrilase 2 [Zea mays]
  misc_feature (1)..(227): Homolog of NCBI NO: 25290269 NR Description: nitrilase-like protein [imported] - rice
  misc_feature (1)..(232): Homolog of NCBI NO: 21593970 NR Description: Nitrilase 4 (sp P46011) [Arabidopsis thaliana]
  misc_feature (1)..(232): Homolog of NCBI NO: 15242205 NR Description: Nitrilase 4 (sp P46011) [Arabidopsis thaliana]
  misc_feature (1)..(233): Homolog of NCBI NO: 3914163 NR Description: NITRILASE 4
  misc_feature (1)..(233): Homolog of NCBI NO: 7435980 NR Description: nitrilase (EC 3.5.5.1) 4B - common tobacco
MAGKYKVHLVMGVIERDGYTLYCTVLFFDSQGHYLGKHRKIMPTALERVIWGFGDGSTIPVFETPVGKIGAAICWENRMPLLRTAMYAKGVEIYCAPTADARDVWQASMTHIALEGGCFVLSANQFCRRRDYPPPPEYVFAGTEVDLTPDSVVCAGGSVIISPLGAVLAGPNYDGEALISADLDLGEIARAKFDFDVVGHYSRPEVLSLTVKDHPTNPVTFTSTSTKIEDKTK

SEQ ID NO: 54825 - DNA, 1440 bp, Glycine max
  misc_feature (1)..(1440): Ceres Seq. ID no. 13639469
agatgtttctataatggaggttggattaggtggaaaatatgatgcaacgaatgtggtcccaacacctattgtgtgtggtataacctcccttgggtatgaccacatggagattcttgggaatactcttggagaaattgctggtgagaaagctggtatcttcaagcatcggattccagcatttactgtgcctcaacctgatgaagcaatgcatgtactcagagagaaggcttctcagttaaatgtacctcttcaagtggtaaccccattagatgccaaattgctaaatggttcaagactagcgcttggaggtgaacaccaatatataaatgctggtcttgctattgcattatgctctacgtggctgaaaatgaatgggcatcttgaagactcgtacttgaaacatatatgactcatctgcctgtatgaagcaacacactttaccagagaagttcataaaagggttaacaactgcaagtttgcaaggaagggctcagattgttcctgatcagttcatcaatgatgaaataccaaatgaacttgtcttctttttagatggggctcatagtcctgaaagcatggaagcatgtgccaggtggttttctcttgctattaaagatcaagaccagattttgtttcatcagaaacttgataattctaacttctcaaaccaagtagtgaagatgcacaatggtgaaactgtacagaagaaatccacacagattttgctgttcaattgtatgtctgagcgaaaccctcagttgcttcttccccacttgatgaaaacatgtgctgatcatggtgtctacttcaagaaggcactctttgtacctggtttatcagtgtatcacaaagttggatcccatgctttaccagcgacagattctgatgttgacctgtcgtggcagcttactctacaaagagtgtgggaaaatctcatgcaagggaacaaagaaggcaagagtaataattctgctcctgaagaattaaacatggaaatgagtgccagcaattgtgaacacagtgccgtgttttcctcattgccactggttctcaaatggcttagggacacggtgcaacaaaaccagtcaactcgttttcaggtccttgttactggttctatacatcttattggtgacatgttgaaattagtcaagaagtgattcgttgggctacttgaaagattggctttcattcagattttttaagtaccactatttgagtccatgaaagtgctgttacacttggttcaaaagctgttgacagaaggttatcaatataataactacattcttgattgtagacattgatgcatccattacattggtttaaatcagcatcactctggctacttcgtgggtctttcaactttcatttcactgtaattgaaaataaaggtggattaagggacatgaataaagaataacatctatcaattttctt

SEQ ID NO: 54826 - protein, 245 aa, Glycine max
  peptide (1)..(245): Ceres Seq. ID no. 13639470
  misc_feature (1)..(68): Homolog of NCBI NO: 30694288 NR Description: folylpolyglutamate-dihydrofolate synthase
  misc_feature (1)..(68): Homolog of NCBI NO: 30694284 NR Description: folylpolyglutamate-dihydrofolate synthase
  misc_feature (1)..(68): Homolog of NCBI NO: 21592378 NR Description: tetrahydrofolylpolyglutamate synthase
  misc_feature (80)..(245): Homolog of NCBI NO: 30694288 NR Description: folylpolyglutamate-dihydrofolate synthase
  misc_feature (80)..(245): Homolog of NCBI NO: 30694284 NR Description: folylpolyglutamate-dihydrofolate synthase
  misc_feature (80)..(245): Homolog of NCBI NO: 21592378 NR Description: tetrahydrofolylpolyglutamate synthase
  misc_feature (6)..(68): Homolog of NCBI NO: 10177571 NR Description: tetrahydrofolylpolyglutamate synthase-like
  misc_feature (100)..(228): Homolog of NCBI NO: 10177571 NR Description: tetrahydrofolylpolyglutamate synthase-like
  misc_feature (6)..(245): Homolog of NCBI NO: 17976705 NR Description: dihydrofolate synthetase /folylpolyglutamate
  misc_feature (6)..(245): Homolog of NCBI NO: 30681208 NR Description: folylpolyglutamate synthase (fpgs2) [Arabidopsis
MKQHTLPEKFIKGLTTASLQGRAQIVPDQFINDEIPNELVFFLDGAHSPESMEACARWFSLAIKDQDQILFHQKLDNSNFSNQVVKMHNGETVQKKSTQILLFNCMSERNPQLLLPHLMKTCADHGVYFKKALFVPGLSVYHKVGSHALPATDSDVDLSWQLTLQRVWENLMQGNKEGKSNNSAPEELNMEMSASNCEHSAVFSSLPLVLKWLRDTVQQNQSTRFQVLVTGSIHLIGDMLKLVKK

SEQ ID NO: 54827 - protein, 194 aa, Glycine max
  peptide (1)..(194): Ceres Seq. ID no. 13639471
  misc_feature (1)..(17): Homolog of NCBI NO: 30694284 NR Description: folylpolyglutamate-dihydrofolate synthase
  misc_feature (1)..(17): Homolog of NCBI NO: 30694288 NR Description: folylpolyglutamate-dihydrofolate synthase
  misc_feature (1)..(17): Homolog of NCBI NO: 21592378 NR Description: tetrahydrofolylpolyglutamate synthase
  misc_feature (29)..(194): Homolog of NCBI NO: 30694288 NR Description: folylpolyglutamate-dihydrofolate synthase
  misc_feature (29)..(194): Homolog of NCBI NO: 30694284 NR Description: folylpolyglutamate-dihydrofolate synthase
  misc_feature (29)..(194): Homolog of NCBI NO: 21592378 NR Description: tetrahydrofolylpolyglutamate synthase
  misc_feature (1)..(17): Homolog of NCBI NO: 10177571 NR Description: tetrahydrofolylpolyglutamate synthase-like
  misc_feature (49)..(177): Homolog of NCBI NO: 10177571 NR Description: tetrahydrofolylpolyglutamate synthase-like
  misc_feature (1)..(194): Homolog of NCBI NO: 17976705 NR Description: dihydrofolate synthetase /folylpolyglutamate
  misc_feature (1)..(194): Homolog of NCBI NO: 30681208 NR Description: folylpolyglutamate synthase (fpgs2) [Arabidopsis
MEACARWFSLAIKDQDQILFHQKLDNSNFSNQVVKMHNGETVQKKSTQILLFNCMSERNPQLLLPHLMKTCADHGVYFKKALFVPGLSVYHKVGSHALPATDSDVDLSWQLTLQRVWENLMQGNKEGKSNNSAPEELNMEMSASNCEHSAVFSSLPLVLKWLRDTVQQNQSTRFQVLVTGSIHLIGDMLKLVKK

SEQ ID NO: 54828 - protein, 159 aa, Glycine max
  peptide (1)..(159): Ceres Seq. ID no. 13639472
  misc_feature (11)..(159): Homolog of NCBI NO: 37535812 NR Description: putative folylpolyglutamate synthetase
  misc_feature (1)..(98): Homolog of NCBI NO: 37535812 NR Description: putative folylpolyglutamate synthetase
  misc_feature (1)..(141): Homolog of NCBI NO: 11358877 NR Description: tetrahydrofolylpolyglutamate synthase-like
  misc_feature (1)..(159): Homolog of NCBI NO: 30694286 NR Description: folylpolyglutamate-dihydrofolate synthase
  misc_feature (1)..(159): Homolog of NCBI NO: 30694284 NR Description: folylpolyglutamate-dihydrofolate synthase
  misc_feature (1)..(159): Homolog of NCBI NO: 30694288 NR Description: folylpolyglutamate-dihydrofolate synthase
  misc_feature (1)..(159): Homolog of NCBI NO: 21592378 NR Description: tetrahydrofolylpolyglutamate synthase
  misc_feature (14)..(142): Homolog of NCBI NO: 10177571 NR Description: tetrahydrofolylpolyglutamate synthase-like
  misc_feature (1)..(159): Homolog of NCBI NO: 17976705 NR Description: dihydrofolate synthetase /folylpolyglutamate
  misc_feature (1)..(159): Homolog of NCBI NO: 30681208 NR Description: folylpolyglutamate synthase (fpgs2) [Arabidopsis
MHNGETVQKKSTQILLFNCMSERNPQLLLPHLMKTCADHGVYFKKALFVPGLSVYHKVGSHALPATDSDVDLSWQLTLQRVWENLMQGNKEGKSNNSAPEELNMEMSASNCEHSAVFSSLPLVLKWLRDTVQQNQSTRFQVLVTGSIHLIGDMLKLVKK

SEQ ID NO: 54829 - DNA, 1111 bp, Glycine max
  misc_feature (1)..(1111): Ceres Seq. ID no. 15169781
gaacaagtaaaataaacaaaagccaaaggaacaaatgaataatgttttatgttacattacatagtattataatattctcacgctattcactactctccatttggcctcagttgatcatacacactcttcttcttcttcttcttctctcttcttgcttgcaatatggacatgaattcctcaggtggtgcctgcggttggctttatgattatggctttgatatccctgttgctggttctgacttcatggcttcagactctggtggtttcagttgggggccccagagttacaacttcaagggtccttcaaatatgagcttggaaatggaatactcactggattcaactgtcatggaaaatggtccttcaaagcggttaaggactgaatcatgtgcatctggctccaaggcatgtcgtgagaaattgcgaagggataaacttaatgagaggtttctggaattgagttcgatcttggagcctggtagacagcccaaaacagacaaagttgcattattaagcgatgcggctcgagtggtaatccaattgagaaatgaagccgagaggctgaaggaaatgaatgatgaattacaggcaaaagttaaagaattgaagggtgagaagaatgagcttcgtgatgagaagaataggctgaaggaagagaaagaaaagttggagaagcaagtgaaactgacaaatatacaacccagcttcctacctcaagccccagatgctaaagggcaagttggtagccacaagctgatacctttcattggataccctggaattgccatgtggcagtttatgtcccctgctgcagttgatacttcaaaggatcatctgcttcgacctccagttgcataaagtggttagcaatagcatccacttctttgttgtatgtgttctttacatgtgttatatttttgtgtttaagttatccatcctgtctaatgtgtgttttctaaagtcactggtagaaagtgtgctcggaaactggttaatagtataagtttgtgctgttgctgtctgaactatgataagaaagtgctacatgtcatggctacaaagtgtgttgcattattaaaaataaaagtgagtttaagtggttctttgctgc

SEQ ID NO: 54830 - protein, 231 aa, Glycine max
  peptide (1)..(231): Ceres Seq. ID no. 15169782
  misc_feature (79)..(128): Pfam Name: Helix-loop-helix DNA-binding domain Pfam Description: Helix-loop-helix DNA-binding domain
  misc_feature (64)..(231): Homolog of NCBI NO: 22331274 NR Description: bHLH protein [Arabidopsis thaliana]
  misc_feature (64)..(231): Homolog of NCBI NO: 20127030 NR Description: putative bHLH transcription factor [Arabidopsis
  misc_feature (69)..(231): Homolog of NCBI NO: 30682847 NR Description: bHLH protein [Arabidopsis thaliana]
  misc_feature (69)..(231): Homolog of NCBI NO: 18414212 NR Description: bHLH protein [Arabidopsis thaliana]
  misc_feature (33)..(231): Homolog of NCBI NO: 29367409 NR Description: helix-loop-helix-like protein
  misc_feature (49)..(231): Homolog of NCBI NO: 32352190 NR Description: hypothetical protein [Oryza sativa (japonica
  misc_feature (7)..(231): Homolog of NCBI NO: 38636768 NR Description: helix-loop-helix-like protein
  misc_feature (12)..(231): Homolog of NCBI NO: 15223710 NR Description: bHLH protein [Arabidopsis thaliana]
  misc_feature (34)..(231): Homolog of NCBI NO: 21592325 NR Description: bHLH transcription factor, putative [Arabidopsis
  misc_feature (34)..(231): Homolog of NCBI NO: 15239706 NR Description: bHLH protein [Arabidopsis thaliana]
MDMNSSGGACGWLYDYGFDIPVAGSDFMASDSGGFSWGPQSYNFKGPSNMSLEMEYSLDSTVMENGPSKRLRTESCASGSKACREKLRRDKLNERFLELSSILEPGRQPKTDKVALLSDAARVVIQLRNEAERLKEMNDELQAKVKELKGEKNELRDEKNRLKEEKEKLEKQVKLTNIQPSFLPQAPDAKGQVGSHKLIPFIGYPGIAMWQFMSPAAVDTSKDHLLRPPVA

SEQ ID NO: 54831 - protein, 229 aa, Glycine max
  peptide (1)..(229): Ceres Seq. ID no. 15169783
  misc_feature (77)..(126): Pfam Name: Helix-loop-helix DNA-binding domain Pfam Description: Helix-loop-helix DNA-binding domain
  misc_feature (62)..(229): Homolog of NCBI NO: 22331274 NR Description: bHLH protein [Arabidopsis thaliana]
  misc_feature (62)..(229): Homolog of NCBI NO: 20127030 NR Description: putative bHLH transcription factor [Arabidopsis
  misc_feature (67)..(229): Homolog of NCBI NO: 30682847 NR Description: bHLH protein [Arabidopsis thaliana]
  misc_feature (67)..(229): Homolog of NCBI NO: 18414212 NR Description: bHLH protein [Arabidopsis thaliana]
  misc_feature (31)..(229): Homolog of NCBI NO: 29367409 NR Description: helix-loop-helix-like protein
  misc_feature (47)..(229): Homolog of NCBI NO: 32352190 NR Description: hypothetical protein [Oryza sativa (japonica
  misc_feature (5)..(229): Homolog of NCBI NO: 38636768 NR Description: helix-loop-helix-like protein
  misc_feature (10)..(229): Homolog of NCBI NO: 15223710 NR Description: bHLH protein [Arabidopsis thaliana]
  misc_feature (32)..(229): Homolog of NCBI NO: 21592325 NR Description: bHLH transcription factor, putative [Arabidopsis
  misc_feature (32)..(229): Homolog of NCBI NO: 15239706 NR Description: bHLH protein [Arabidopsis thaliana]
MNSSGGACGWLYDYGFDIPVAGSDFMASDSGGFSWGPQSYNFKGPSNMSLEMEYSLDSTVMENGPSKRLRTESCASGSKACREKLRRDKLNERFLELSSILEPGRQPKTDKVALLSDAARVVIQLRNEAERLKEMNDELQAKVKELKGEKNELRDEKNRLKEEKEKLEKQVKLTNIQPSFLPQAPDAKGQVGSHKLIPFIGYPGIAMWQFMSPAAVDTSKDHLLRPPVA

SEQ ID NO: 54832 - protein, 204 aa, Glycine max
  peptide (1)..(204): Ceres Seq. ID no. 15169784
  misc_feature (52)..(101): Pfam Name: Helix-loop-helix DNA-binding domain Pfam Description: Helix-loop-helix DNA-binding domain
  misc_feature (37)..(204): Homolog of NCBI NO: 22331274 NR Description: bHLH protein [Arabidopsis thaliana]
  misc_feature (37)..(204): Homolog of NCBI NO: 20127030 NR Description: putative bHLH transcription factor [Arabidopsis
  misc_feature (42)..(204): Homolog of NCBI NO: 30682847 NR Description: bHLH protein [Arabidopsis thaliana]
  misc_feature (42)..(204): Homolog of NCBI NO: 18414212 NR Description: bHLH protein [Arabidopsis thaliana]
  misc_feature (6)..(204): Homolog of NCBI NO: 29367409 NR Description: helix-loop-helix-like protein
  misc_feature (22)..(204): Homolog of NCBI NO: 32352190 NR Description: hypothetical protein [Oryza sativa (japonica
  misc_feature (1)..(204): Homolog of NCBI NO: 38636768 NR Description: helix-loop-helix-like protein
  misc_feature (1)..(204): Homolog of NCBI NO: 15223710 NR Description: bHLH protein [Arabidopsis thaliana]
  misc_feature (7)..(204): Homolog of NCBI NO: 21592325 NR Description: bHLH transcription factor, putative [Arabidopsis
  misc_feature (7)..(204): Homolog of NCBI NO: 15239706 NR Description: bHLH protein [Arabidopsis thaliana]
MASDSGGFSWGPQSYNFKGPSNMSLEMEYSLDSTVMENGPSKRLRTESCASGSKACREKLRRDKLNERFLELSSILEPGRQPKTDKVALLSDAARVVIQLRNEAERLKEMNDELQAKVKELKGEKNELRDEKNRLKEEKEKLEKQVKLTNIQPSFLPQAPDAKGQVGSHKLIPFIGYPGIAMWQFMSPAAVDTSKDHLLRPPVA

SEQ ID NO: 54833 - DNA, 1239 bp, Glycine max
  misc_feature (1)..(1239): Ceres Seq. ID no. 14307210
agccaatcaaatccattgttttctcttctcctcctccttcaatggattctctgacttccatcaacggcgatttcggcttcgccggcggcaccgatcgcagattcgcgttttcgcgccaagcctccttccaacagcctcacacgccgatagacattccggcgcacggccaccactactggtccgcgcgtgacgataaaccctcctccgcctcgctccaaagatcctctctgtcctccttcgttttctccgttttccgaaacgttaggtccggccacaggtacatgaagaggctctttctcttgatctcgctcaatgtcgcgtactccaccgccgaattgctctttggactcttcaccggtcgcgtaggtttggtgtctgatgcggttcacttgacttttggatgtggtcttcttacattttcgttatttgttatggccgcgtctaggaagaaagccgatcgagagtatacttatgggtataaaaggctagaagtcttgtctgcatttacaaatgccctatttcttttgtttatgtcattctccctagcagttgaggcacttcatgcattcatacaagatgaatcagagcacaagcattacttgattgtttctgcagtgaccaatttatttgtgaatcttgttggtgtatggttcttcagaaactatgctcggattaatcttgcttacagaaatgccgaagatatgaatcaccactctgttttcctgcatgttcttgcagattccattcgcagtgcaggtctgatattggcatcctggttattgtcaatcggggttcagaatgcagaagtcttgtgtttaggacttgtttctgttgcagtttttatgcttgttctgcctctctttagggcaactggtggtatcttgctccaaatggcacctcccagcatcccaactactgctttgaacaaatgcttgagacagatttctgctcgggaagatgtaatggaagtctcccaggctcgtttttgggaattagtgcctggttatgtggttggttcacttataatacaggtaaagaaagggacgaacgatcggccaatactagaatttgtgcatggtctataccatgatttgggtgtacaggacctcacggtgcaaactgatgatgcatgagactatcttaacacttttatgctaatagttattaccaaggattgtatacgcattaatgtcattgtttattactggtggaatagatggttaacgtgatttctcattt

SEQ ID NO: 54834 - protein, 376 aa, Glycine max
  peptide (1)..(376): Ceres Seq. ID no. 14307211
  misc_feature (97)..(374): Pfam Name: Cation efflux family Pfam Description: Cation efflux family
  misc_feature (84)..(240): Homolog of NCBI NO: 12963579 NR Description: zinc transporter like 2 [Mus musculus]
  misc_feature (92)..(220): Homolog of NCBI NO: 31209583 NR Description: ENSANGP00000017072 [Anopheles gambiae]
  misc_feature (239)..(374): Homolog of NCBI NO: 31209583 NR Description: ENSANGP00000017072 [Anopheles gambiae]
  misc_feature (239)..(376): Homolog of NCBI NO: 28278399 NR Description: Similar to RIKEN cDNA 1810059J10 gene [Danio
  misc_feature (60)..(240): Homolog of NCBI NO: 28278399 NR Description: Similar to RIKEN cDNA 1810059J10 gene [Danio
  misc_feature (239)..(376): Homolog of NCBI NO: 39645387 NR Description: Unknown (protein for MGC:76189) [Silurana
  misc_feature (60)..(240): Homolog of NCBI NO: 39645387 NR Description: Unknown (protein for MGC:76189) [Silurana
  misc_feature (71)..(264): Homolog of NCBI NO: 9294107 NR Description: contains similarity to cation
  misc_feature (180)..(374): Homolog of NCBI NO: 9294107 NR Description: contains similarity to cation
  misc_feature (21)..(374): Homolog of NCBI NO: 15229954 NR Description: cation efflux family protein/metal tolerance
PIKSIVFSSPPPSMDSLTSINGDFGFAGGTDRRFAFSRQASFQQPHTPIDIPAHGHHYWSARDDKPSSASLQRSSLSSFVFSVFRNVRSGHRYMKRLFLLISLNVAYSTAELLFGLFTGRVGLVSDAVHLTFGCGLLTFSLFVMAASRKKADREYTYGYKRLEVLSAFTNALFLLFMSFSLAVEALHAFIQDESEHKHYLIVSAVTNLFVNLVGVWFFRNYARINLAYRNAEDMNHHSVFLHVLADSIRSAGLILASWLLSIGVQNAEVLCLGLVSVAVFMLVLPLFRATGGILLQMAPPSIPTTALNKCLRQISAREDVMEVSQARFWELVPGYVVGSLIIQVKKGTNDRPILEFVHGLYHDLGVQDLTVQTDDA

SEQ ID NO: 54835 - protein, 363 aa, Glycine max
  peptide (1)..(363): Ceres Seq. ID no. 14307212
  misc_feature (84)..(361): Pfam Name: Cation efflux family Pfam Description: Cation efflux family
  misc_feature (71)..(227): Homolog of NCBI NO: 12963579 NR Description: zinc transporter like 2 [Mus musculus]
  misc_feature (79)..(207): Homolog of NCBI NO: 31209583 NR Description: ENSANGP00000017072 [Anopheles gambiae]
  misc_feature (226)..(361): Homolog of NCBI NO: 31209583 NR Description: ENSANGP00000017072 [Anopheles gambiae]
  misc_feature (226)..(363): Homolog of NCBI NO: 28278399 NR Description: Similar to RIKEN cDNA 1810059J10 gene [Danio
  misc_feature (47)..(227): Homolog of NCBI NO: 28278399 NR Description: Similar to RIKEN cDNA 1810059J10 gene [Danio
  misc_feature (226)..(363): Homolog of NCBI NO: 39645387 NR Description: Unknown (protein for MGC:76189) [Silurana
  misc_feature (47)..(227): Homolog of NCBI NO: 39645387 NR Description: Unknown (protein for MGC:76189) [Silurana
  misc_feature (58)..(251): Homolog of NCBI NO: 9294107 NR Description: contains similarity to cation
  misc_feature (167)..(361): Homolog of NCBI NO: 9294107 NR Description: contains similarity to cation
  misc_feature (8)..(361): Homolog of NCBI NO: 15229954 NR Description: cation efflux family protein/metal tolerance
MDSLTSINGDFGFAGGTDRRFAFSRQASFQQPHTPIDIPAHGHHYWSARDDKPSSASLQRSSLSSFVFSVFRNVRSGHRYMKRLFLLISLNVAYSTAELLFGLFTGRVGLVSDAVHLTFGCGLLTFSLFVMAASRKKADREYTYGYKRLEVLSAFTNALFLLFMSFSLAVEALHAFIQDESEHKHYLIVSAVTNLFVNLVGVWFFRNYARINLAYRNAEDMNHHSVFLHVLADSIRSAGLILASWLLSIGVQNAEVLCLGLVSVAVFMLVLPLFRATGGILLQMAPPSIPTTALNKCLRQISAREDVMEVSQARFWELVPGYVVGSLIIQVKKGTNDRPILEFVHGLYHDLGVQDLTVQTDDA

SEQ ID NO: 54836 - protein, 283 aa, Glycine max
  peptide (1)..(283): Ceres Seq. ID no. 14307213
  misc_feature (4)..(281): Pfam Name: Cation efflux family Pfam Description: Cation efflux family
  misc_feature (1)..(147): Homolog of NCBI NO: 12963579 NR Description: zinc transporter like 2 [Mus musculus]
  misc_feature (1)..(127): Homolog of NCBI NO: 31209583 NR Description: ENSANGP00000017072 [Anopheles gambiae]
  misc_feature (146)..(281): Homolog of NCBI NO: 31209583 NR Description: ENSANGP00000017072 [Anopheles gambiae]
  misc_feature (146)..(283): Homolog of NCBI NO: 28278399 NR Description: Similar to RIKEN cDNA 1810059J10 gene [Danio
  misc_feature (1)..(147): Homolog of NCBI NO: 28278399 NR Description: Similar to RIKEN cDNA 1810059J10 gene [Danio
  misc_feature (146)..(283): Homolog of NCBI NO: 39645387 NR Description: Unknown (protein for MGC:76189) [Silurana
  misc_feature (1)..(147): Homolog of NCBI NO: 39645387 NR Description: Unknown (protein for MGC:76189) [Silurana
  misc_feature (1)..(171): Homolog of NCBI NO: 9294107 NR Description: contains similarity to cation
  misc_feature (87)..(281): Homolog of NCBI NO: 9294107 NR Description: contains similarity to cation
  misc_feature (1)..(281): Homolog of NCBI NO: 15229954 NR Description: cation efflux family protein/metal tolerance
MKRLFLLISLNVAYSTAELLFGLFTGRVGLVSDAVHLTFGCGLLTFSLFVMAASRKKADREYTYGYKRLEVLSAFTNALFLLFMSFSLAVEALHAFIQDESEHKHYLIVSAVTNLFVNLVGVWFFRNYARINLAYRNAEDMNHHSVFLHVLADSIRSAGLILASWLLSIGVQNAEVLCLGLVSVAVFMLVLPLFRATGGILLQMAPPSIPTTALNKCLRQISAREDVMEVSQARFWELVPGYVVGSLIIQVKKGTNDRPILEFVHGLYHDLGVQDLTVQTDDA

SEQ ID NO: 54837 - DNA, 1618 bp, Glycine max
  misc_feature (1)..(1618): Ceres Seq. ID no. 14304851
acaagaacaagtaccagaacaataggagcatcatggttaggctatggtgctcttctctctcaattacacttttattccaacagctcatcagattgtgcatttcttggagtgtgcaaaccccaacacccccattgccaatcctccctctcccaatatattcccagttgaaatggcaacaaagggagatcataatgtttttccattttggtgtgaacacattcagtgacagagaatggggcactggccaggaaaacccagcaatcttcaatccaacggggctcaacaccacccagtgggccactgtggcagcagatgcaggagtttcattgatgatattaactgcaaaacaccatgatggcttctgcctctggccttccaagtacactgaccattctgtcattagcagcccctggcaaggtggcaagggtgatgtggttcaagactttgtcaatgcagccactgcacaaggaattgatgtaggggtctacctttcaccttgggatagacatgaccctagatatggcaatgatttgctctacaaccaatactacttggctcaactacaagagttgctcaagaaatatccaaatgttagagagatttggttcgatggagcaaagggtgccaatgcaaaaaatatgacgtattacttttcagattggttttccatggtgaaggagctgcagagtttcatcaacatcttctctgatgcaggtcctgatgttaggtgggtgggagatgaaacaggttctgcagggtatacatgttggtctaccattaatcgaacctctctatccattggaagtccagacatcattcagtatataaacactggtgatccaaaagggacagattggctaccggcggaatgtgatgtatccattcgaaaaggatggttttggcacaaatcagaatcaccaaaaaagctaagcgagctacttgacatttattacaattcggttgggagaaattgtgtgttacttctcaatgtgcctcctaatacaagtggccttataactgaagttgatgccaatagattgaaagagtttagaagtgcaatcaagacaattttccatcagaatcttgctgaggattgttttgttaaagttagtagccaaagagggggtttcgggccagaaaagatgctagacagtgaccacttgtggtcatactgggccccaagggacgatgatgatgaaaaggaccattgggttgaaatttgggccaaggaagggagattgagattcaatgtggttagaatacaagaggcaattggtcttggtcaaaggatcaaacggcatgaaatctatgtggatggtaaattgatcatcaaagccacaacggttggttataagaggcttcataggcttgatgggggtgaagtgcacgctcgtggtgtgaggataagaattagaaaggcaagaggagtgcctcttatctcttctattggcttgcattatgatcctttctggcactcaaagtttactgtatcctgaagagttaagtaagtttaggtaaaggagcataactgcaataaattaagtagagccttaagaagaatattgaaatattgttctatcagtaaagaacaaaaaataaatttactttaaatttctac

SEQ ID NO: 54838 - protein, 497 aa, Glycine max
  peptide (1)..(497): Ceres Seq. ID no. 14304852
  misc_feature (88)..(336): Pfam Name: Alpha-L-fucosidase Pfam Description: Alpha-L-fucosidase
  misc_feature (40)..(485): Homolog of NCBI NO: 23107703 NR Description: hypothetical protein [Novosphingobium
  misc_feature (85)..(357): Homolog of NCBI NO: 23119502 NR Description: hypothetical protein [Desulfitobacterium
  misc_feature (73)..(488): Homolog of NCBI NO: 29350121 NR Description: conserved hypothetical protein
  misc_feature (19)..(485): Homolog of NCBI NO: 29347602 NR Description: conserved hypothetical protein
  misc_feature (48)..(488): Homolog of NCBI NO: 15903995 NR Description: Hypothetical protein [Streptococcus pneumoniae
  misc_feature (48)..(488): Homolog of NCBI NO: 15901959 NR Description: conserved hypothetical protein [Streptococcus
  misc_feature (49)..(488): Homolog of NCBI NO: 18310858 NR Description: conserved hypothetical protein [Clostridium
  misc_feature (40)..(489): Homolog of NCBI NO: 38345843 NR Description: OSJNBa0084K11.7 [Oryza sativa (japonica
  misc_feature (17)..(489): Homolog of NCBI NO: 26453078 NR Description: unknown protein [Arabidopsis thaliana]
  misc_feature (17)..(489): Homolog of NCBI NO: 30683758 NR Description: glycosyl hydrolase family 29 (alpha-L-fucosidase)
KNKYQNNRSIMVRLWCSSLSITLLFQQLIRLCISWSVQTPTPPLPILPLPIYSQLKWQQREIIMFFHFGVNTFSDREWGTGQENPAIFNPTGLNTTQWATVAADAGVSLMILTAKHHDGFCLWPSKYTDHSVISSPWQGGKGDVVQDFVNAATAQGIDVGVYLSPWDRHDPRYGNDLLYNQYYLAQLQELLKKYPNVREIWFDGAKGANAKNMTYYFSDWFSMVKELQSFINIFSDAGPDVRWVGDETGSAGYTCWSTINRTSLSIGSPDIIQYINTGDPKGTDWLPAECDVSIRKGWFWHKSESPKKLSELLDIYYNSVGRNCVLLLNVPPNTSGLITEVDANRLKEFRSAIKTIFHQNLAEDCFVKVSSQRGGFGPEKMLDSDHLWSYWAPRDDDDEKDHWVEIWAKEGRLRFNVVRIQEAIGLGQRIKRHEIYVDGKLIIKATTVGYKRLHRLDGGEVHARGVRIRIRKARGVPLISSIGLHYDPFWHSKFTVS

SEQ ID NO: 54839 - protein, 487 aa, Glycine max
  peptide (1)..(487): Ceres Seq. ID no. 14304853
  misc_feature (78)..(326): Pfam Name: Alpha-L-fucosidase Pfam Description: Alpha-L-fucosidase
  misc_feature (30)..(475): Homolog of NCBI NO: 23107703 NR Description: hypothetical protein [Novosphingobium
  misc_feature (75)..(347): Homolog of NCBI NO: 23119502 NR Description: hypothetical protein [Desulfitobacterium
  misc_feature (63)..(478): Homolog of NCBI NO: 29350121 NR Description: conserved hypothetical protein
  misc_feature (9)..(475): Homolog of NCBI NO: 29347602 NR Description: conserved hypothetical protein
  misc_feature (38)..(478): Homolog of NCBI NO: 15903995 NR Description: Hypothetical protein [Streptococcus pneumoniae
  misc_feature (38)..(478): Homolog of NCBI NO: 15901959 NR Description: conserved hypothetical protein [Streptococcus
  misc_feature (39)..(478): Homolog of NCBI NO: 18310858 NR Description: conserved hypothetical protein [Clostridium
  misc_feature (30)..(479): Homolog of NCBI NO: 38345843 NR Description: OSJNBa0084K11.7 [Oryza sativa (japonica
  misc_feature (7)..(479): Homolog of NCBI NO: 26453078 NR Description: unknown protein [Arabidopsis thaliana]
  misc_feature (7)..(479): Homolog of NCBI NO: 30683758 NR Description: glycosyl hydrolase family 29 (alpha-L-fucosidase)
MVRLWCSSLSITLLFQQLIRLCISWSVQTPTPPLPILPLPIYSQLKWQQREIIMFFHFGVNTFSDREWGTGQENPAIFNPTGLNTTQWATVAADAGVSLMILTAKHHDGFCLWPSKYTDHSVISSPWQGGKGDVVQDFVNAATAQGIDVGVYLSPWDRHDPRYGNDLLYNQYYLAQLQELLKKYPNVREIWFDGAKGANAKNMTYYFSDWFSMVKELQSFINIFSDAGPDVRWVGDETGSAGYTCWSTINRTSLSIGSPDIIQYINTGDPKGTDWLPAECDVSIRKGWFWHKSESPKKLSELLDIYYNSVGRNCVLLLNVPPNTSGLITEVDANRLKEFRSAIKTIFHQNLAEDCFVKVSSQRGGFGPEKMLDSDHLWSYWAPRDDDDEKDHWVEIWAKEGRLRFNVVRIQEAIGLGQRIKRHEIYVDGKLIIKATTVGYKRLHRLDGGEVHARGVRIRIRKARGVPLISSIGLHYDPFWHSKFTVS

SEQ ID NO: 54840 - protein, 434 aa, Glycine max
  peptide (1)..(434): Ceres Seq. ID no. 14304854
  misc_feature (25)..(273): Pfam Name: Alpha-L-fucosidase Pfam Description: Alpha-L-fucosidase
  misc_feature (1)..(422): Homolog of NCBI NO: 23107703 NR Description: hypothetical protein [Novosphingobium
  misc_feature (22)..(294): Homolog of NCBI NO: 23119502 NR Description: hypothetical protein [Desulfitobacterium
  misc_feature (10)..(425): Homolog of NCBI NO: 29350121 NR Description: conserved hypothetical protein
  misc_feature (1)..(422): Homolog of NCBI NO: 29347602 NR Description: conserved hypothetical protein
  misc_feature (1)..(425): Homolog of NCBI NO: 15903995 NR Description: Hypothetical protein [Streptococcus pneumoniae
  misc_feature (1)..(425): Homolog of NCBI NO: 15901959 NR Description: conserved hypothetical protein [Streptococcus
  misc_feature (1)..(425): Homolog of NCBI NO: 18310858 NR Description: conserved hypothetical protein [Clostridium
  misc_feature (1)..(426): Homolog of NCBI NO: 38345843 NR Description: OSJNBa0084K11.7 [Oryza sativa (japonica
  misc_feature (1)..(426): Homolog of NCBI NO: 26453078 NR Description: unknown protein [Arabidopsis thaliana]
  misc_feature (1)..(426): Homolog of NCBI NO: 30683758 NR Description: glycosyl hydrolase family 29 (alpha-L-fucosidase)
MFFHFGVNTFSDREWGTGQENPAIFNPTGLNTTQWATVAADAGVSLMILTAKHHDGFCLWPSKYTDHSVISSPWQGGKGDVVQDFVNAATAQGIDVGVYLSPWDRHDPRYGNDLLYNQYYLAQLQELLKKYPNVREIWFDGAKGANAKNMTYYFSDWFSMVKELQSFINIFSDAGPDVRWVGDETGSAGYTCWSTINRTSLSIGSPDIIQYINTGDPKGTDWLPAECDVSIRKGWFWHKSESPKKLSELLDIYYNSVGRNCVLLLNVPPNTSGLITEVDANRLKEFRSAIKTIFHQNLAEDCFVKVSSQRGGFGPEKMLDSDHLWSYWAPRDDDDEKDHWVEIWAKEGRLRFNVVRIQEAIGLGQRIKRHEIYVDGKLIIKATTVGYKRLHRLDGGEVHARGVRIRIRKARGVPLISSIGLHYDPFWHSKFTVS

SEQ ID NO: 54841 - DNA, 1056 bp, Glycine max
  misc_feature (1)..(1056): Ceres Seq. ID no. 14313014
aaatctgaaccaaaccacaaacacttaatttctcatctcatcatttctaattctacctcttttctcttgcactaacaatccaagatgaataccaacaacgacaccgaaaaaaaccaatcatttccagaagcacaaggagcatcatcatcatcatcttctccacccaatgttgggactgagaattggggaactcacataatgggcacccctgctgttccaagcagccacccagataacaaaaaagcagctttacaaagtggacaacctcaaccagttcaatactaccatgaccaacatcaacatccctacgtgcaacatagcccagttgacaaaccaagcaacagtcccatggagtcaatccttaacatgttcgattcatggagcaaaaaagctgaagccaccgcacacaacgtctggcacaaccttaaaactggtccatcagtgtcttcagctgcactggggaagatgaatctgactgtgaaagcaatatcagagggtggatttgagtccctctacaagcaaacattcacaacctatccaaacgagaagctcaagaagagctttgcttgttacctttcaacatcaacaggtcctgttgcaggaaccctttacctgtccaatattcatgtagcgttttgcagcgatcgccctttgtgtttcactgcaccctctggccaagaaacttggacatactacaaggtaatggtgcctttgggaaaggttggagtggtcaacccagtgaccatgagggaaaacccatcagaaaagtacattcaggttgtaacggtggaagggcatgatttttggttcatgggttttgttaattttgacaaagcagttaagaacatctcagaaggtatctcacattttgtagcgccaggagtggccgtgccatccactagtggttcggaagctaatcgaaagaactttcagtgatttctagtttttggagtactatgatgtatactaattttgtttagaatttgactttgcggtttgtgtcgtatactagaacaatactttgttgtaaaaaaacttaggagtgtatgctataag

SEQ ID NO: 54842 - protein, 283 aa, Glycine max
  peptide (1)..(283): Ceres Seq. ID no. 14313015
  misc_feature (142)..(219): Pfam Name: GRAM domain Pfam Description: GRAM domain
  misc_feature (125)..(259): Homolog of NCBI NO: 33146631 NR Description: putative FH protein interacting protein FIP1
  misc_feature (73)..(259): Homolog of NCBI NO: 29788871 NR Description: putative ABA-responsive protein
  misc_feature (96)..(259): Homolog of NCBI NO: 34906818 NR Description: contains EST C91668(E31216)~similar to FH protein
  misc_feature (6)..(259): Homolog of NCBI NO: 26452129 NR Description: unknown protein [Arabidopsis thaliana]
  misc_feature (7)..(259): Homolog of NCBI NO: 21592789 NR Description: unknown [Arabidopsis thaliana]
  misc_feature (6)..(259): Homolog of NCBI NO: 18399985 NR Description: GRAM domain-containing protein [Arabidopsis
  misc_feature (73)..(261): Homolog of NCBI NO: 15217869 NR Description: GRAM domain-containing protein [Arabidopsis
  misc_feature (16)..(259): Homolog of NCBI NO: 34902414 NR Description: Putative FH protein interacting protein FIP1
  misc_feature (17)..(239): Homolog of NCBI NO: 11281146 NR Description: ABA-responsive protein - barley
  misc_feature (6)..(262): Homolog of NCBI NO: 15240044 NR Description: GRAM domain-containing protein [Arabidopsis
MNTNNDTEKNQSFPEAQGASSSSSSPPNVGTENWGTHIMGTPAVPSSHPDNKKAALQSGQPQPVQYYHDQHQHPYVQHSPVDKPSNSPMESILNMFDSWSKKAEATAHNVWHNLKTGPSVSSAALGKMNLTVKAISEGGFESLYKQTFTTYPNEKLKKSFACYLSTSTGPVAGTLYLSNIHVAFCSDRPLCFTAPSGQETWTYYKVMVPLGKVGVVNPVTMRENPSEKYIQVVTVEGHDFWFMGFVNFDKAVKNISEGISHFVAPGVAVPSTSGSEANRKNFQ

SEQ ID NO: 54843 - protein, 245 aa, Glycine max
  peptide (1)..(245): Ceres Seq. ID no. 14313016
  misc_feature (104)..(181): Pfam Name: GRAM domain Pfam Description: GRAM domain
  misc_feature (87)..(221): Homolog of NCBI NO: 33146631 NR Description: putative FH protein interacting protein FIP1
  misc_feature (35)..(221): Homolog of NCBI NO: 29788871 NR Description: putative ABA-responsive protein
  misc_feature (58)..(221): Homolog of NCBI NO: 34906818 NR Description: contains EST C91668(E31216)~similar to FH protein
  misc_feature (1)..(221): Homolog of NCBI NO: 26452129 NR Description: unknown protein [Arabidopsis thaliana]
  misc_feature (1)..(221): Homolog of NCBI NO: 21592789 NR Description: unknown [Arabidopsis thaliana]
  misc_feature (1)..(221): Homolog of NCBI NO: 18399985 NR Description: GRAM domain-containing protein [Arabidopsis
  misc_feature (35)..(223): Homolog of NCBI NO: 15217869 NR Description: GRAM domain-containing protein [Arabidopsis
  misc_feature (1)..(221): Homolog of NCBI NO: 34902414 NR Description: Putative FH protein interacting protein FIP1
  misc_feature (1)..(201): Homolog of NCBI NO: 11281146 NR Description: ABA-responsive protein - barley
  misc_feature (1)..(224): Homolog of NCBI NO: 15240044 NR Description: GRAM domain-containing protein [Arabidopsis
MGTPAVPSSHPDNKKAALQSGQPQPVQYYHDQHQHPYVQHSPVDKPSNSPMESILNMFDSWSKKAEATAHNVWHNLKTGPSVSSAALGKMNLTVKAISEGGFESLYKQTFTTYPNEKLKKSFACYLSTSTGPVAGTLYLSNIHVAFCSDRPLCFTAPSGQETWTYYKVMVPLGKVGVVNPVTMRENPSEKYIQVVTVEGHDFWFMGFVNFDKAVKNISEGISHFVAPGVAVPSTSGSEANRKNFQ

SEQ ID NO: 54844 - protein, 195 aa, Glycine max
  peptide (1)..(195): Ceres Seq. ID no. 14313017
  misc_feature (54)..(131): Pfam Name: GRAM domain Pfam Description: GRAM domain
  misc_feature (37)..(171): Homolog of NCBI NO: 33146631 NR Description: putative FH protein interacting protein FIP1
  misc_feature (1)..(171): Homolog of NCBI NO: 29788871 NR Description: putative ABA-responsive protein
  misc_feature (8)..(171): Homolog of NCBI NO: 34906818 NR Description: contains EST C91668(E31216)~similar to FH protein
  misc_feature (1)..(171): Homolog of NCBI NO: 26452129 NR Description: unknown protein [Arabidopsis thaliana]
  misc_feature (1)..(171): Homolog of NCBI NO: 21592789 NR Description: unknown [Arabidopsis thaliana]
  misc_feature (1)..(171): Homolog of NCBI NO: 18399985 NR Description: GRAM domain-containing protein [Arabidopsis
  misc_feature (1)..(173): Homolog of NCBI NO: 15217869 NR Description: GRAM domain-containing protein [Arabidopsis
  misc_feature (1)..(171): Homolog of NCBI NO: 34902414 NR Description: Putative FH protein interacting protein FIP1
  misc_feature (1)..(151): Homolog of NCBI NO: 11281146 NR Description: ABA-responsive protein - barley
  misc_feature (1)..(174): Homolog of NCBI NO: 15240044 NR Description: GRAM domain-containing protein [Arabidopsis
MESILNMFDSWSKKAEATAHNVWHNLKTGPSVSSAALGKMNLTVKAISEGGFESLYKQTFTTYPNEKLKKSFACYLSTSTGPVAGTLYLSNIHVAFCSDRPLCFTAPSGQETWTYYKVMVPLGKVGVVNPVTMRENPSEKYIQVVTVEGHDFWFMGFVNFDKAVKNISEGISHFVAPGVAVPSTSGSEANRKNFQ

SEQ ID NO: 54845 - DNA, 1340 bp, Glycine max
  misc_feature (1)..(1340): Ceres Seq. ID no. 14312208
gggagaaagaaagaaggaaagcaaagtagacgagtgattgcgttgcgattgacgacgacgaggaatcatgtcttccggcggcggcggtggtaagccgttcttctgccacgtgtgcagtcagaggattacgtgctccgatgagtcggaaccattctgcccgatgtgtatggaaagtttcgtagaagaatgcaaccctaacaatcccaaccctaatctcttccccgacagtgatgaatcttcggatcccgaactccccttccaccgcttctcacttctccctctcttgctctcatcagtctctaggtcccgatccgaacccgacgtgttcgacccgatggtcttcctccagaaccaccttcaggaccttcgcgccgacggtgccaacattcaagttgactttgaccatccttccaacgagaatcaaggctttcgccttgcgaacatcggcgactactttatgggccccggcctcgagcagtttattcagcagcttgccgacaacgaccccaaccgctacggaacgccgcccgccgccaaggacgccgtcgagaatctccccaccgttaccgtcgacgacgacttgctgaactccgagctgaaccagtgcgctgtctgccaggacgagttcgaaaagggttctaaggtgacacagatgccctgcaagcacgcgtatcacggcgactgcttgattccgtggcttcggctgcataattcatgccctgtgtgccgctatgaattgcccacggacgacgccgattacgagaacgaggttcacggtggtgatgctgggtcgaggacaggtgggagcgacggtggaggtgggagtaatagaccttttcgcaggactgttaggatatatttgcgccatcctgatgctggtgactctgcgcaggacggtgctgaaagggaatggagatggagaagttgagattgaaatttatgttttgtttcatgttgaaaaactggaaactatcttgtgcagctctgagcttccgtgaatagattgtagcattgcaatgtttacagaagtccttgtgaggaatgcaagaaatgttatttcccgtggcaaggaactttgttcgatcaaaggtctttgtttgttatggtagtagatagctggaacatgggaatgcacgaaaacacaactattgagattttaggtactgtgttaatgagcgttgataagaaacttcccgttacttttgtacagatcatcttccaaacatccaatattgattatcgtccttttgtacaatatgaactagtcatggtctatattgctcctgtgtgtgtgtataaaacgttttaatttagaaaaatgttcttttgacctatttaag

SEQ ID NO: 54846 - protein, 253 aa, Glycine max
  peptide (1)..(253): Ceres Seq. ID no. 14312209
  misc_feature (147)..(187): Pfam Name: Zinc finger, C3HC4 type (RING finger) Pfam Description: Zinc finger, C3HC4 type (RING finger)
  misc_feature (39)..(197): Homolog of NCBI NO: 15231238 NR Description: expressed protein [Arabidopsis thaliana]
  misc_feature (1)..(48): Homolog of NCBI NO: 22328949 NR Description: expressed protein [Arabidopsis thaliana]
  misc_feature (65)..(202): Homolog of NCBI NO: 22328949 NR Description: expressed protein [Arabidopsis thaliana]
  misc_feature (1)..(73): Homolog of NCBI NO: 18405411 NR Description: expressed protein [Arabidopsis thaliana]
  misc_feature (92)..(222): Homolog of NCBI NO: 18405411 NR Description: expressed protein [Arabidopsis thaliana]
  misc_feature (1)..(48): Homolog of NCBI NO: 15241188 NR Description: expressed protein [Arabidopsis thaliana]
  misc_feature (81)..(201): Homolog of NCBI NO: 15241188 NR Description: expressed protein [Arabidopsis thaliana]
  misc_feature (50)..(242): Homolog of NCBI NO: 37535546 NR Description: putative zinc finger protein
  misc_feature (1)..(226): Homolog of NCBI NO: 15231003 NR Description: expressed protein [Arabidopsis thaliana]
  misc_feature (1)..(226): Homolog of NCBI NO: 11994207 NR Description: gene_id:MPN9.20~unknown protein [Arabidopsis
MESFVEECNPNNPNPNLFPDSDESSDPELPFHRFSLLPLLLSSVSRSRSEPDVFDPMVFLQNHLQDLRADGANIQVDFDHPSNENQGFRLANIGDYFMGPGLEQFIQQLADNDPNRYGTPPAAKDAVENLPTVTVDDDLLNSELNQCAVCQDEFEKGSKVTQMPCKHAYHGDCLIPWLRLHNSCPVCRYELPTDDADYENEVHGGDAGSRTGGSDGGGGSNRPFRRTVRIYLRHPDAGDSAQDGAEREWRWRS

SEQ ID NO: 54847 - protein, 286 aa, Glycine max
  peptide (1)..(286): Ceres Seq. ID no. 14312210
  misc_feature (180)..(220): Pfam Name: Zinc finger, C3HC4 type (RING finger) Pfam Description: Zinc finger, C3HC4 type (RING finger)
  misc_feature (72)..(230): Homolog of NCBI NO: 15231238 NR Description: expressed protein [Arabidopsis thaliana]
  misc_feature (11)..(81): Homolog of NCBI NO: 22328949 NR Description: expressed protein [Arabidopsis thaliana]
  misc_feature (98)..(235): Homolog of NCBI NO: 22328949 NR Description: expressed protein [Arabidopsis thaliana]
  misc_feature (11)..(106): Homolog of NCBI NO: 18405411 NR Description: expressed protein [Arabidopsis thaliana]
  misc_feature (125)..(255): Homolog of NCBI NO: 18405411 NR Description: expressed protein [Arabidopsis thaliana]
  misc_feature (11)..(81): Homolog of NCBI NO: 15241188 NR Description: expressed protein [Arabidopsis thaliana]
  misc_feature (114)..(234): Homolog of NCBI NO: 15241188 NR Description: expressed protein [Arabidopsis thaliana]
  misc_feature (83)..(275): Homolog of NCBI NO: 37535546 NR Description: putative zinc finger protein
  misc_feature (1)..(259): Homolog of NCBI NO: 15231003 NR Description: expressed protein [Arabidopsis thaliana]
  misc_feature (1)..(259): Homolog of NCBI NO: 11994207 NR Description: gene_id:MPN9.20~unknown protein [Arabidopsis
MSSGGGGGKPFFCHVCSQRITCSDESEPFCPMCMESFVEECNPNNPNPNLFPDSDESSDPELPFHRFSLLPLLLSSVSRSRSEPDVFDPMVFLQNHLQDLRADGANIQVDFDHPSNENQGFRLANIGDYFMGPGLEQFIQQLADNDPNRYGTPPAAKDAVENLPTVTVDDDLLNSELNQCAVCQDEFEKGSKVTQMPCKHAYHGDCLIPWLRLHNSCPVCRYELPTDDADYENEVHGGDAGSRTGGSDGGGGSNRPFRRTVRIYLRHPDAGDSAQDGAEREWRWRS

SEQ ID NO: 54848 - protein, 255 aa, Glycine max
  peptide (1)..(255): Ceres Seq. ID no. 14312211
  misc_feature (149)..(189): Pfam Name: Zinc finger, C3HC4 type (RING finger) Pfam Description: Zinc finger, C3HC4 type (RING finger)
  misc_feature (41)..(199): Homolog of NCBI NO: 15231238 NR Description: expressed protein [Arabidopsis thaliana]
  misc_feature (1)..(50): Homolog of NCBI NO: 22328949 NR Description: expressed protein [Arabidopsis thaliana]
  misc_feature (67)..(204): Homolog of NCBI NO: 22328949 NR Description: expressed protein [Arabidopsis thaliana]
  misc_feature (1)..(75): Homolog of NCBI NO: 18405411 NR Description: expressed protein [Arabidopsis thaliana]
  misc_feature (94)..(224): Homolog of NCBI NO: 18405411 NR Description: expressed protein [Arabidopsis thaliana]
  misc_feature (1)..(50): Homolog of NCBI NO: 15241188 NR Description: expressed protein [Arabidopsis thaliana]
  misc_feature (83)..(203): Homolog of NCBI NO: 15241188 NR Description: expressed protein [Arabidopsis thaliana]
  misc_feature (52)..(244): Homolog of NCBI NO: 37535546 NR Description: putative zinc finger protein
  misc_feature (1)..(228): Homolog of NCBI NO: 15231003 NR Description: expressed protein [Arabidopsis thaliana]
  misc_feature (1)..(228): Homolog of NCBI NO: 11994207 NR Description: gene_id:MPN9.20~unknown protein [Arabidopsis
MCMESFVEECNPNNPNPNLFPDSDESSDPELPFHRFSLLPLLLSSVSRSRSEPDVFDPMVFLQNHLQDLRADGANIQVDFDHPSNENQGFRLANIGDYFMGPGLEQFIQQLADNDPNRYGTPPAAKDAVENLPTVTVDDDLLNSELNQCAVCQDEFEKGSKVTQMPCKHAYHGDCLIPWLRLHNSCPVCRYELPTDDADYENEVHGGDAGSRTGGSDGGGGSNRPFRRTVRIYLRHPDAGDSAQDGAEREWRWRS

SEQ ID NO: 54849 - DNA, 1137 bp, Glycine max
  misc_feature (1)..(1137): Ceres Seq. ID no. 14302047
aaagaatccttcatcacattaatcagtccagacagagaactgagagaagaccctcacttcctgtttggctcgacgaagacctcacttcgcccaacctccgtctccggcggcgtctcttatcctaacggctccttccctcaccgtcactgaaacggcgtccctgaactcgcaacactgccctccctctgactctgatttcgttcgaacttcgaactcattcccacttcgcagtcctcgccatgcttcgttgtcggcgactcctcgcagtggcaaacctcaaacgacatagctagagatacagggtgcgatttgtttccattttccagtcaatcctatactccttaggctattgtaatcttctgctaataaggaggaattattattgggttctgaaaacatgttgaaacaagcaattggcagaatcttcagaaccggtgtttatgcttgtgaaggaaatagagttttgccttggatttatgtgccttcgagctttttccaccatggacaagcgcacatggcacctagaagcttttttggggtagaggatttccttgatgatgacaatagccgaccttacacataccaaaaagggaagaagtcaaagaatccaaataagcacatatcattcaaacaaagaacaattgcctacatggaaccttttacacttgatgtgtttatctcaaagcgctttgtatcggcttcactcactcatagggtaacaagcaaacaggttgcagttgccgggaccaactccaaggacataaaagctgttcttaggtctcgttcagacataccagcatgcatagcaattggtaggattttagctgaaagagcaaaagaagctgatgtttacactggttcttatactccaagggacagggacaagtttgaagggaaaatcagagctgtagttcaatcacttattgacaatgggattgatatcaaggtttatcttgattgagtttagtcactcaagtttgtgggactatcagttaaggtgttgatattttggttgaagcagtaggccccttgtgtgtttgaacatgtccatttagtttggttttgatgataatgggaatatcattattcgaattacagatttggtaatttagttttatgaatgagttatgttgtcgc

SEQ ID NO: 54850 - protein, 187 aa, Glycine max
  peptide (1)..(187): Ceres Seq. ID no. 14302048
  misc_feature (80)..(181): Pfam Name: Ribosomal L18p/L5e family Pfam Description: Ribosomal L18p/L5e family
  misc_feature (80)..(182): Homolog of NCBI NO: 15241056 NR Description: ribosomal protein L18p family [Arabidopsis
  misc_feature (76)..(186): Homolog of NCBI NO: 22094358 NR Description: hypothetical protein [Oryza sativa (japonica
  misc_feature (64)..(180): Homolog of NCBI NO: 18402538 NR Description: expressed protein [Arabidopsis thaliana]
  misc_feature (69)..(186): Homolog of NCBI NO: 15229493 NR Description: hypothetical protein [Arabidopsis thaliana]
  misc_feature (1)..(187): Homolog of NCBI NO: 37536826 NR Description: hypothetical protein [Oryza sativa (japonica
  misc_feature (1)..(187): Homolog of NCBI NO: 30680844 NR Description: expressed protein [Arabidopsis thaliana]
MLKQAIGRIFRTGVYACEGNRVLPWIYVPSSFFHHGQAHMAPRSFFGVEDFLDDDNSRPYTYQKGKKSKNPNKHISFKQRTIAYMEPFTLDVFISKRFVSASLTHRVTSKQVAVAGTNSKDIKAVLRSRSDIPACIAIGRILAERAKEADVYTGSYTPRDRDKFEGKIRAVVQSLIDNGIDIKVYLD

SEQ ID NO: 54851 - protein, 148 aa, Glycine max
  peptide (1)..(148): Ceres Seq. ID no. 14302049
  misc_feature (41)..(142): Pfam Name: Ribosomal L18p/L5e family Pfam Description: Ribosomal L18p/L5e family
  misc_feature (41)..(143): Homolog of NCBI NO: 15241056 NR Description: ribosomal protein L18p family [Arabidopsis
  misc_feature (37)..(147): Homolog of NCBI NO: 22094358 NR Description: hypothetical protein [Oryza sativa (japonica
  misc_feature (25)..(141): Homolog of NCBI NO: 18402538 NR Description: expressed protein [Arabidopsis thaliana]
  misc_feature (30)..(147): Homolog of NCBI NO: 15229493 NR Description: hypothetical protein [Arabidopsis thaliana]
  misc_feature (1)..(148): Homolog of NCBI NO: 37536826 NR Description: hypothetical protein [Oryza sativa (japonica
  misc_feature (1)..(148): Homolog of NCBI NO: 30680844 NR Description: expressed protein [Arabidopsis thaliana]
MAPRSFFGVEDFLDDDNSRPYTYQKGKKSKNPNKHISFKQRTIAYMEPFTLDVFISKRFVSASLTHRVTSKQVAVAGTNSKDIKAVLRSRSDIPACIAIGRILAERAKEADVYTGSYTPRDRDKFEGKIRAVVQSLIDNGIDIKVYLD

SEQ ID NO: 54852 - protein, 103 aa, Glycine max
  peptide (1)..(103): Ceres Seq. ID no. 14302050
  misc_feature (1)..(97): Pfam Name: Ribosomal L18p/L5e family Pfam Description: Ribosomal L18p/L5e family
  misc_feature (1)..(98): Homolog of NCBI NO: 15241056 NR Description: ribosomal protein L18p family [Arabidopsis
  misc_feature (1)..(102): Homolog of NCBI NO: 22094358 NR Description: hypothetical protein [Oryza sativa (japonica
  misc_feature (1)..(96): Homolog of NCBI NO: 18402538 NR Description: expressed protein [Arabidopsis thaliana]
  misc_feature (1)..(102): Homolog of NCBI NO: 15229493 NR Description: hypothetical protein [Arabidopsis thaliana]
  misc_feature (1)..(103): Homolog of NCBI NO: 37536826 NR Description: hypothetical protein [Oryza sativa (japonica
  misc_feature (1)..(103): Homolog of NCBI NO: 30680844 NR Description: expressed protein [Arabidopsis thaliana]
MEPFTLDVFISKRFVSASLTHRVTSKQVAVAGTNSKDIKAVLRSRSDIPACIAIGRILAERAKEADVYTGSYTPRDRDKFEGKIRAVVQSLIDNGIDIKVYLD

SEQ ID NO: 54853 - DNA, 1471 bp, Glycine max
  misc_feature (1)..(1471): Ceres Seq. ID no. 14306986
gatccaagaccatatttaatttgccaaccgcgccagatcgccattactacaacaacatagactagtgcggtgcattccctcgtttaccatgctttcctaagagaaagagaaaagtaaaacccctcactactgatagattttcattcctccgaggaaaaaaaaaacatgtcggatgctttgatcaatggattggccggagctggaggagggatcattgctcagctcatcacatacccacttcaaactgtaaacactcgccaacaaaccgagcgtgatccgaagaaagacacgaggagtcaaggggccctcgaacgaatgtgccaggttgtaaaagaagaggggtgggaacggttgtatggaggcttgatgccatcggtagtgggtacagctgcgtctcagggagtttactattatttctatcaaatattcaggaacaaagctgaagcagctgcactacaacaaaagaaaatgggcgttggtgatggatcagttgggatgctctcctctcttgttgttgctgctttatctgggtgtgttaacgtgctcttgacaaatcccatatgggtagttgttacgcgtatgcagacacatagaaaagagtcgaacagaactccagctgatcagggtttgtttgttgccactgagcagccaattctttctgcagttgagcctcttccttatggaactagtcatgtgattcaagaaatctacggtgaagctggaatttggggtttctggaaaggtgtattaccaacattaatcatggtaagcaatccttccatacagttcatgctgtatgaagccatgttggcaaagttaagaaaaagacgtgcttggagtaagaagggtagcaacggggtaactgctttagagatatttcttattggagctttagctaagcttggagctactgttgtaacttatccgatcctagttgtgaaggcaaggctccaagctagacaggataaaactggagacaggagacaccattacaaaggtacatgggatgctattattaaaatgatccgctatgaggggtttaatgggttttacaaaggcatgggcacaaaaatcgtacaaagtgtgctggctgctgctgttttgttcatgatgaaggaagaattagttaggggggttcgtttcttgcttgccaaggatgctgtaaagccaaagaatctgtgattggaggccactagcttgatcaagatttcatgtaccatcttcagttagcaaattagttcaaatggtaggggaattagagtgattcaaacaacatattgaaatatggctttaactgtatcttgattattttcatcaggttagtttccatagaggaaattcatgccaaaaattacacactgggttcattggtttgtttcatgaacaagacagggttgtagatttgaagtatgctgctgaaacaaatattctttttacgaacgaatatcactatctgatttcattggcagcc

SEQ ID NO: 54854 - protein, 338 aa, Glycine max; identical to SEQ ID NO: 54396
  peptide (1)..(338): Ceres Seq. ID no. 14306987
  misc_feature (173)..(320): Homolog of NCBI NO: 19921888 NR Description: CG8026-PB [Drosophila melanogaster]
  misc_feature (53)..(320): Homolog of NCBI NO: 32404402 NR Description: hypothetical protein [Neurospora crassa]
  misc_feature (2)..(146): Homolog of NCBI NO: 40739628 NR Description: hypothetical protein AN4280.2 [Aspergillus
  misc_feature (169)..(320): Homolog of NCBI NO: 40739628 NR Description: hypothetical protein AN4280.2 [Aspergillus
  misc_feature (2)..(320): Homolog of NCBI NO: 38105196 NR Description: hypothetical protein MG03247.4 [Magnaporthe
  misc_feature (186)..(321): Homolog of NCBI NO: 28828484 NR Description: hypothetical protein [Dictyostelium discoideum]
  misc_feature (1)..(140): Homolog of NCBI NO: 28828484 NR Description: hypothetical protein [Dictyostelium discoideum]
  misc_feature (1)..(338): Homolog of NCBI NO: 34901996 NR Description: unknown protein [Oryza sativa (japonica
  misc_feature (1)..(329): Homolog of NCBI NO: 21593883 NR Description: putative peroxisomal membrane carrier protein
  misc_feature (1)..(329): Homolog of NCBI NO: 15225602 NR Description: peroxisomal membrane protein (PMP36) [Arabidopsis

SEQ ID NO: 54855 - protein, 288 aa, Glycine max; identical to SEQ ID NO: 54397
  peptide (1)..(288): Ceres Seq. ID no. 14306988
  misc_feature (123)..(270): Homolog of NCBI NO: 19921888 NR Description: CG8026-PB [Drosophila melanogaster]
  misc_feature (3)..(270): Homolog of NCBI NO: 32404402 NR Description: hypothetical protein [Neurospora crassa]
  misc_feature (1)..(96): Homolog of NCBI NO: 40739628 NR Description: hypothetical protein AN4280.2 [Aspergillus
  misc_feature (119)..(270): Homolog of NCBI NO: 40739628 NR Description: hypothetical protein AN4280.2 [Aspergillus
  misc_feature (1)..(270): Homolog of NCBI NO: 38105196 NR Description: hypothetical protein MG03247.4 [Magnaporthe
  misc_feature (136)..(271): Homolog of NCBI NO: 28828484 NR Description: hypothetical protein [Dictyostelium discoideum]
  misc_feature (1)..(90): Homolog of NCBI NO: 28828484 NR Description: hypothetical protein [Dictyostelium discoideum]
  misc_feature (1)..(288): Homolog of NCBI NO: 34901996 NR Description: unknown protein [Oryza sativa (japonica
  misc_feature (1)..(279): Homolog of NCBI NO: 21593883 NR Description: putative peroxisomal membrane carrier protein
  misc_feature (1)..(279): Homolog of NCBI NO: 15225602 NR Description: peroxisomal membrane protein (PMP36) [Arabidopsis

SEQ ID NO: 54856 - protein, 271 aa, Glycine max; identical to SEQ ID NO: 54398
  peptide (1)..(271): Ceres Seq. ID no. 14306989
  misc_feature (106)..(253): Homolog of NCBI NO: 19921888 NR Description: CG8026-PB [Drosophila melanogaster]
  misc_feature (1)..(253): Homolog of NCBI NO: 32404402 NR Description: hypothetical protein [Neurospora crassa]
  misc_feature (1)..(79): Homolog of NCBI NO: 40739628 NR Description: hypothetical protein AN4280.2 [Aspergillus
  misc_feature (102)..(253): Homolog of NCBI NO: 40739628 NR Description: hypothetical protein AN4280.2 [Aspergillus
  misc_feature (1)..(253): Homolog of NCBI NO: 38105196 NR Description: hypothetical protein MG03247.4 [Magnaporthe
  misc_feature (119)..(254): Homolog of NCBI NO: 28828484 NR Description: hypothetical protein [Dictyostelium discoideum]
  misc_feature (1)..(73): Homolog of NCBI NO: 28828484 NR Description: hypothetical protein [Dictyostelium discoideum]
  misc_feature (1)..(271): Homolog of NCBI NO: 34901996 NR Description: unknown protein [Oryza sativa (japonica
  misc_feature (1)..(262): Homolog of NCBI NO: 21593883 NR Description: putative peroxisomal membrane carrier protein
  misc_feature (1)..(262): Homolog of NCBI NO: 15225602 NR Description: peroxisomal membrane protein (PMP36) [Arabidopsis

SEQ ID NO: 54857 - DNA, 808 bp, Glycine max
  misc_feature (1)..(808): Ceres Seq. ID no. 14301742
acagcagttgttgagtcagcggttctgggttggagacagagagagagaagttttcagtttcagaaagaaagcaaaagcaatagcaatgggttggatcggtgagactgttgattccatcaaatctcttcagatccgccaggtcctcacccaggctgtgagcctaggcatgattgttacgtctgcactgataatatggaaggcattgatgtgcgttactggcagtgaatctcccgttgttgttgttctttctggaagcatggaacccggattcaagcggggagacatcttgttcttgcacatgagtaaagatcctattcgggcaggggagattgttgtgtttaatgttgatggacgtgagattccaattgttcatcgtgtaattaaggtacatgaaagggaagatactggggaggttgatgttctcacaaaaggagacaacaattatggggatgacaggctactgtatgctcatggtcaactttggctgcaaaggcaccacattatgggtagagccgtcgggttcttaccatacgtaggctgggtgaccatcattatgactgaaaagcctattatcaagtatattctcattggtgctttggggttgctcgtgataacttcgaaagattaaatgatgaatatgaagtcaaaactgcggtctaacttcggatggtagggtgagcagaatataatggtaagattaaaagatgaatctgaaatcattttgtaccattcatagtatatgggggacaatatgatgttaaggatttatgcaaaatagttgaattttggtatattcttacttcttcct

SEQ ID NO: 54858 - protein, 208 aa, Glycine max
  peptide (1)..(208): Ceres Seq. ID no. 14301743
  misc_feature (29)..(185): Pfam Name: Signal peptidase I Pfam Description: Signal peptidase I
  misc_feature (39)..(208): Homolog of NCBI NO: 24025634 NR Description: signal peptidase 21kDa subunit [Rattus
  misc_feature (36)..(208): Homolog of NCBI NO: 38511785 NR Description: Signal peptidase complex (18kD) [Silurana
  misc_feature (39)..(208): Homolog of NCBI NO: 15150809 NR Description: similar to signal peptidase complex (18kD) [Homo
  misc_feature (36)..(208): Homolog of NCBI NO: 32484220 NR Description: Unknown (protein for MGC:64284) [Xenopus laevis]
  misc_feature (36)..(208): Homolog of NCBI NO: 34784421 NR Description: Spc18-pending protein [Mus musculus]
  misc_feature (36)..(208): Homolog of NCBI NO: 9910550 NR Description: signal peptidase complex
  misc_feature (39)..(208): Homolog of NCBI NO: 31207577 NR Description: ENSANGP00000020448 [Anopheles gambiae]
  misc_feature (7)..(208): Homolog of NCBI NO: 31195617 NR Description: ENSANGP00000013674 [Anopheles gambiae]
  misc_feature (29)..(208): Homolog of NCBI NO: 18400874 NR Description: signal peptidase 21kDa subunit -related
  misc_feature (29)..(208): Homolog of NCBI NO: 15219044 NR Description: signal peptidase subunit -related [Arabidopsis
QQLLSQRFWVGDREREVFSFRKKAKAIAMGWIGETVDSIKSLQIRQVLTQAVSLGMIVTSALIIWKALMCVTGSESPVVVVLSGSMEPGFKRGDILFLHMSKDPIRAGEIVVFNVDGREIPIVHRVIKVHEREDTGEVDVLTKGDNNYGDDRLLYAHGQLWLQRHHIMGRAVGFLPYVGWVTIIMTEKPIIKYILIGALGLLVITSKD

SEQ ID NO: 54859 - protein, 180 aa, Glycine max
  peptide (1)..(180): Ceres Seq. ID no. 14301744
  misc_feature (1)..(157): Pfam Name: Signal peptidase I Pfam Description: Signal peptidase I
  misc_feature (11)..(180): Homolog of NCBI NO: 24025634 NR Description: signal peptidase 21kDa subunit [Rattus
  misc_feature (8)..(180): Homolog of NCBI NO: 38511785 NR Description: Signal peptidase complex (18kD) [Silurana
  misc_feature (11)..(180): Homolog of NCBI NO: 15150809 NR Description: similar to signal peptidase complex (18kD) [Homo
  misc_feature (8)..(180): Homolog of NCBI NO: 32484220 NR Description: Unknown (protein for MGC:64284) [Xenopus laevis]
  misc_feature (8)..(180): Homolog of NCBI NO: 34784421 NR Description: Spc18-pending protein [Mus musculus]
  misc_feature (8)..(180): Homolog of NCBI NO: 9910550 NR Description: signal peptidase complex
  misc_feature (11)..(180): Homolog of NCBI NO: 31207577 NR Description: ENSANGP00000020448 [Anopheles gambiae]
  misc_feature (1)..(180): Homolog of NCBI NO: 31195617 NR Description: ENSANGP00000013674 [Anopheles gambiae]
  misc_feature (1)..(180): Homolog of NCBI NO: 18400874 NR Description: signal peptidase 21kDa subunit -related
  misc_feature (1)..(180): Homolog of NCBI NO: 15219044 NR Description: signal peptidase subunit -related [Arabidopsis
MGWIGETVDSIKSLQIRQVLTQAVSLGMIVTSALIIWKALMCVTGSESPVVVVLSGSMEPGFKRGDILFLHMSKDPIRAGEIVVFNVDGREIPIVHRVIKVHEREDTGEVDVLTKGDNNYGDDRLLYAHGQLWLQRHHIMGRAVGFLPYVGWVTIIMTEKPIIKYILIGALGLLVITSKD

SEQ ID NO: 54860 - protein, 153 aa, Glycine max
  peptide (1)..(153): Ceres Seq. ID no. 14301745
  misc_feature (1)..(130): Pfam Name: Signal peptidase I Pfam Description: Signal peptidase I
  misc_feature (1)..(153): Homolog of NCBI NO: 24025634 NR Description: signal peptidase 21kDa subunit [Rattus
  misc_feature (1)..(153): Homolog of NCBI NO: 38511785 NR Description: Signal peptidase complex (18kD) [Silurana
  misc_feature (1)..(153): Homolog of NCBI NO: 15150809 NR Description: similar to signal peptidase complex (18kD) [Homo
  misc_feature (1)..(153): Homolog of NCBI NO: 32484220 NR Description: Unknown (protein for MGC:64284) [Xenopus laevis]
  misc_feature (1)..(153): Homolog of NCBI NO: 34784421 NR Description: Spc18-pending protein [Mus musculus]
  misc_feature (1)..(153): Homolog of NCBI NO: 9910550 NR Description: signal peptidase complex
  misc_feature (1)..(153): Homolog of NCBI NO: 31207577 NR Description: ENSANGP00000020448 [Anopheles gambiae]
  misc_feature (1)..(153): Homolog of NCBI NO: 31195617 NR Description: ENSANGP00000013674 [Anopheles gambiae]
  misc_feature (1)..(153): Homolog of NCBI NO: 18400874 NR Description: signal peptidase 21kDa subunit -related
  misc_feature (1)..(153): Homolog of NCBI NO: 15219044 NR Description: signal peptidase subunit -related [Arabidopsis
MIVTSALIIWKALMCVTGSESPVVVVLSGSMEPGFKRGDILFLHMSKDPIRAGEIVVFNVDGREIPIVHRVIKVHEREDTGEVDVLTKGDNNYGDDRLLYAHGQLWLQRHHIMGRAVGFLPYVGWVTIIMTEKPIIKYILIGALGLLVITSKD

SEQ ID NO: 54861 - DNA, 1349 bp, Glycine max
  misc_feature (1)..(1349): Ceres Seq. ID no. 15176437
atggtgacggaccaagatatagcgaaaggggtggagtccctactgcgtcactctgacccaaactccataactacggtaaacggcgtcgttcagcagctggaggccaaactagggttagacctctctcacaaggccagtttcatcagagaccagatcgatcatcttctccggtcacagccacagacatttgctcctcaccctcctccacttcacaaagactattttgcccctcacacccaactgcacttcccaaccacccactttgctccccattttgccctccatgacgagatcaacttcctgcagcacccccaccctcctccaccgcgtaaagtcgagacctttcctcctcaaaatgttgcccctcctcaagtgcccaaagaaagtgtgcaaactggaagcaaaagaagaggtggtgctggtggtctaaacaaagtttgtggtgtttctcctgaacttcaggcggttgttggtgagccggcaatgccaagaactgaaattgtgaggcagctgtgggcatacataaagaaaaacaacctccaagatcctggtaacaaaagaaagataatttgtgatgatgccctgcgtttggtatttgagacagactgcaccgatatgttcaagatgaatcagttgctagctaaacacattatcccacttggtcctacaaaggagtcacaggctaaacgagtgaaggtggatactgaaattaagactgaaagtgctgaacctgctccatctaccgtggcaatatctgaagcgcttgccaaatttttgggcactgagggaagagagatgcaacagtctgaagccataagacttgtttgggagtacatcaagcttcaccatttggaggatcctttaaattcaatggtgatattatgcgatgcaaagcttcaagagctacttggatgtgaaagcatttctgctttaggaataccagagatgttagcacgtcatcatctatttaaacagtctgacacccgttagtgctgatcaattattgccatataagggtatgatctgcacaaaacgctggttatatgtttctgctcgttgctagatcgtataggaactttttacttattcctgtcacttcatttatctctttgttcactgacgtatgtaaactgtatgttgtctgacggttattaggttggttgtttagaatgacaatgtataccttgagctaggcaagaagtatattgtatttaatatatgccctttaggttacccgtgcattttattttatcagttctcaatgtctaacctcaactggctgatcgaattagtgatacttttgtacattgagatacaccaactactctgaaatgcaccttgtttttact

SEQ ID NO: 54862 - protein, 329 aa, Glycine max
  peptide (1)..(329): Ceres Seq. ID no. 15176438
  misc_feature (1)..(58): Homolog of NCBI NO: 25405318 NR Description: hypothetical protein F13F21.4 [imported] -
  misc_feature (135)..(238): Homolog of NCBI NO: 25405318 NR Description: hypothetical protein F13F21.4 [imported] -
  misc_feature (1)..(58): Homolog of NCBI NO: 15222765 NR Description: hypothetical protein [Arabidopsis thaliana]
  misc_feature (135)..(240): Homolog of NCBI NO: 15222765 NR Description: hypothetical protein [Arabidopsis thaliana]
  misc_feature (1)..(58): Homolog of NCBI NO: 15230276 NR Description: hypothetical protein [Arabidopsis thaliana]
  misc_feature (126)..(322): Homolog of NCBI NO: 15230276 NR Description: hypothetical protein [Arabidopsis thaliana]
  misc_feature (68)..(326): Homolog of NCBI NO: 32488657 NR Description: OSJNBa0087O24.7 [Oryza sativa (japonica
  misc_feature (17)..(285): Homolog of NCBI NO: 7486830 NR Description: hypothetical protein T10I14.190 - Arabidopsis
  misc_feature (17)..(326): Homolog of NCBI NO: 18415906 NR Description: expressed protein [Arabidopsis thaliana]
  misc_feature (17)..(326): Homolog of NCBI NO: 21537175 NR Description: unknown [Arabidopsis thaliana]
MVTDQDIAKGVESLLRHSDPNSITTVNGVVQQLEAKLGLDLSHKASFIRDQIDHLLRSQPQTFAPHPPPLHKDYFAPHTQLHFPTTHFAPHFALHDEINFLQHPHPPPPRKVETFPPQNVAPPQVPKESVQTGSKRRGGAGGLNKVCGVSPELQAVVGEPAMPRTEIVRQLWAYIKKNNLQDPGNKRKIICDDALRLVFETDCTDMFKMNQLLAKHIIPLGPTKESQAKRVKVDTEIKTESAEPAPSTVAISEALAKFLGTEGREMQQSEAIRLVWEYIKLHHLEDPLNSMVILCDAKLQELLGCESISALGIPEMLARHHLFKQSDTR

SEQ ID NO: 54863 - protein, 168 aa, Glycine max
  peptide (1)..(168): Ceres Seq. ID no. 15176439
  misc_feature (1)..(112): Homolog of NCBI NO: 25405318 NR Description: hypothetical protein F13F21.4 [imported] -
  misc_feature (1)..(112): Homolog of NCBI NO: 15222765 NR Description: hypothetical protein [Arabidopsis thaliana]
  misc_feature (1)..(83): Homolog of NCBI NO: 9280327 NR Description: gb|AAD43149.1~gene_id:K13E13.21~strong similarity
  misc_feature (1)..(77): Homolog of NCBI NO: 25405318 NR Description: hypothetical protein F13F21.4 [imported] -
  misc_feature (1)..(79): Homolog of NCBI NO: 15222765 NR Description: hypothetical protein [Arabidopsis thaliana]
  misc_feature (1)..(161): Homolog of NCBI NO: 15230276 NR Description: hypothetical protein [Arabidopsis thaliana]
  misc_feature (1)..(165): Homolog of NCBI NO: 32488657 NR Description: OSJNBa0087O24.7 [Oryza sativa (japonica
  misc_feature (1)..(124): Homolog of NCBI NO: 7486830 NR Description: hypothetical protein T10I14.190 - Arabidopsis
  misc_feature (1)..(165): Homolog of NCBI NO: 18415906 NR Description: expressed protein [Arabidopsis thaliana]
  misc_feature (1)..(165): Homolog of NCBI NO: 21537175 NR Description: unknown [Arabidopsis thaliana]
MPRTEIVRQLWAYIKKNNLQDPGNKRKIICDDALRLVFETDCTDMFKMNQLLAKHIIPLGPTKESQAKRVKVDTEIKTESAEPAPSTVAISEALAKFLGTEGREMQQSEAIRLVWEYIKLHHLEDPLNSMVILCDAKLQELLGCESISALGIPEMLARHHLFKQSDTR

SEQ ID NO: 54864 - DNA, 1950 bp, Glycine max
  misc_feature (1)..(1950): Ceres Seq. ID no. 14303351
tttttgagaaaagaggaagccgtttgtgtctgtgtgtgtttgtgaaatagtgtgttaatatgagtaactggttggggttctctctcactccacacttgaggattgatgaagaatttgagagagaaaaccaagagcgtggaggagggtaccatcatccttctccttcttgtcaccctcacttgtctgttatgccccttcgctctgatggctctctctgtgttgctgactcctttagtcactctgctgcatctcaagaatggagatatgatagtgcaataggtggagggaattccaatgaagaaggtccaaagcttgaagactttttgggttgctactcaaactcccccgctaaggtcttttgccaagactctcagcctgaccaaaaccaaagccagaacaatgtttccaaaatcaatgttaatgtggcaccaagcttttgcaccaacaattcagagattgaaactggggataatctcacaaatccttcttccttgctccattctttccatgcatataatgataactcacatgctcttatccccaccaatggcatgtacaagtcctggttggcacaaacccagttttcttctgatggaaaaccttcaaatgaggctaatgggtgcaatttccaatctttgtccctcactatgagccccagtgtgcaaaatggggtgggtgcaatttcctctgttcaagtgaatgaggatagtaggaaacgggtcatggcgaaatctcatgctagagaaccagttcctcgcaaatctattgacacttttgggcaaagaacatctcaatatcgtggtgttacaaggcatagatggactggaagatatgaggcccatttgtgggataatagttgcagaaaggaagggcaaacaaggaaaggaaggcaagtttaccttggtggttatgataaggaagaaaaagcagcaaaggcttacgacttagctgcactcaagtattggggtccaacaactcacataaatttccctttaagcacttatgagaaggaacttgaagagatgaagcacatgaccaggcaagaatttgtcgccaatttaagaaggaagagcagtggattttcaagaggggcatctgtgtatagaggtgtgacaagacaccatcaacatggaaggtggcaggcccgaataggaagggttgcaggaaacaaggacttgtatcttggtacatttagcacacaagaagaagctgctgaagcatatgatatagcagcaatcaagttcagaggaacaagtgctgtgaccaactttgacataagtaggtatgatgtgaagagaatctgctcaagctccactcttattgcaggagatcttgcaaaacggtctcctaaagaatcaccagctccggttcctgcctctgacttcaattcgtgcggttcatcgccgatgccgctggtgtctcagccacctcctttggctataactgatggtgaacattctgatgagttgtccaacatgatgtggaatgccaacaacagtgatgagcaagcacagaatgagagtggtggtgctgaattcaacaacaatgtaactgaatcatcatcatcacaacaggtttcaccaagcagcaacaaggatgctttgaaccctcaaagccccaatgagtttggagtcagtggagcagattatggacatggctacttcacccttgatggaccaaaatatgatgatgggaacaatgaaaatgaccacatgagcaccaacaggcttggaaatttgggattggttaatcaagttcccatgtttgctttgtggaatgaatgaagggaatgttatgttgatgagttgagattacaaaaaacattagcttagaaaaaaaaactaagatcagatggcagaattattgaatgattattatattgtagcttggtatggtaactttttattttatgttgaaagaaaggggatatgtcagtagtgctgattcctt

SEQ ID NO: 54865 - protein, 574 aa, Glycine max
  peptide (1)..(574): Ceres Seq. ID no. 14303352
  misc_feature (243)..(316): Pfam Name: AP2 domain Pfam Description: AP2 domain
  misc_feature (76)..(436): Homolog of NCBI NO: 20330778 NR Description: Putative ovule development protein antitegumenta
  misc_feature (191)..(440): Homolog of NCBI NO: 32490266 NR Description: OSJNBb0116K07.8 [Oryza sativa (japonica
  misc_feature (196)..(463): Homolog of NCBI NO: 28201307 NR Description: putative ovule development protein antitegumenta
  misc_feature (165)..(439): Homolog of NCBI NO: 21069053 NR Description: AP2/EREBP transcription factor BABY BOOM2
  misc_feature (165)..(439): Homolog of NCBI NO: 21069051 NR Description: AP2/EREBP transcription factor BABY BOOM1
  misc_feature (165)..(439): Homolog of NCBI NO: 21069057 NR Description: BABY BOOM [Arabidopsis thaliana]
  misc_feature (32)..(429): Homolog of NCBI NO: 15235690 NR Description: ovule development protein aintegumenta (ANT)
  misc_feature (32)..(429): Homolog of NCBI NO: 1171429 NR Description: CKC
  misc_feature (1)..(435): Homolog of NCBI NO: 15218529 NR Description: ovule development protein, putative [Arabidopsis
  misc_feature (29)..(441): Homolog of NCBI NO: 38492172 NR Description: ANT-like protein [Nicotiana tabacum]
MSNWLGFSLTPHLRIDEEFERENQERGGGYHHPSPSCHPHLSVMPLRSDGSLCVADSFSHSAASQEWRYDSAIGGGNSNEEGPKLEDFLGCYSNSPAKVFCQDSQPDQNQSQNNVSKINVNVAPSFCTNNSEIETGDNLTNPSSLLHSFHAYNDNSHALIPTNGMYKSWLAQTQFSSDGKPSNEANGCNFQSLSLTMSPSVQNGVGAISSVQVNEDSRKRVMAKSHAREPVPRKSIDTFGQRTSQYRGVTRHRWTGRYEAHLWDNSCRKEGQTRKGRQVYLGGYDKEEKAAKAYDLAALKYWGPTTHINFPLSTYEKELEEMKHMTRQEFVANLRRKSSGFSRGASVYRGVTRHHQHGRWQARIGRVAGNKDLYLGTFSTQEEAAEAYDIAAIKFRGTSAVTNFDISRYDVKRICSSSTLIAGDLAKRSPKESPAPVPASDFNSCGSSPMPLVSQPPPLAITDGEHSDELSNMMWNANNSDEQAQNESGGAEFNNNVTESSSSQQVSPSSNKDALNPQSPNEFGVSGADYGHGYFTLDGPKYDDGNNENDHMSTNRLGNLGLVNQVPMFALWNE

SEQ ID NO: 54866 - protein, 531 aa, Glycine max
  peptide (1)..(531): Ceres Seq. ID no. 14303353
  misc_feature (200)..(273): Pfam Name: AP2 domain Pfam Description: AP2 domain
  misc_feature (33)..(393): Homolog of NCBI NO: 20330778 NR Description: Putative ovule development protein antitegumenta
  misc_feature (148)..(397): Homolog of NCBI NO: 32490266 NR Description: OSJNBb0116K07.8 [Oryza sativa (japonica
  misc_feature (153)..(420): Homolog of NCBI NO: 28201307 NR Description: putative ovule development protein antitegumenta
  misc_feature (122)..(396): Homolog of NCBI NO: 21069053 NR Description: AP2/EREBP transcription factor BABY BOOM2
  misc_feature (122)..(396): Homolog of NCBI NO: 21069051 NR Description: AP2/EREBP transcription factor BABY BOOM1
  misc_feature (122)..(396): Homolog of NCBI NO: 21069057 NR Description: BABY BOOM [Arabidopsis thaliana]
  misc_feature (1)..(386): Homolog of NCBI NO: 15235690 NR Description: ovule development protein aintegumenta (ANT)
  misc_feature (1)..(386): Homolog of NCBI NO: 1171429 NR Description: CKC
  misc_feature (1)..(392): Homolog of NCBI NO: 15218529 NR Description: ovule development protein, putative [Arabidopsis
  misc_feature (1)..(398): Homolog of NCBI NO: 38492172 NR Description: ANT-like protein [Nicotiana tabacum]
MPLRSDGSLCVADSFSHSAASQEWRYDSAIGGGNSNEEGPKLEDFLGCYSNSPAKVFCQDSQPDQNQSQNNVSKINVNVAPSFCTNNSEIETGDNLTNPSSLLHSFHAYNDNSHALIPTNGMYKSWLAQTQFSSDGKPSNEANGCNFQSLSLTMSPSVQNGVGAISSVQVNEDSRKRVMAKSHAREPVPRKSIDTFGQRTSQYRGVTRHRWTGRYEAHLWDNSCRKEGQTRKGRQVYLGGYDKEEKAAKAYDLAALKYWGPTTHINFPLSTYEKELEEMKHMTRQEFVANLRRKSSGFSRGASVYRGVTRHHQHGRWQARIGRVAGNKDLYLGTFSTQEEAAEAYDIAAIKFRGTSAVTNFDISRYDVKRICSSSTLIAGDLAKRSPKESPAPVPASDFNSCGSSPMPLVSQPPPLAITDGEHSDELSNMMWNANNSDEQAQNESGGAEFNNNVTESSSSQQVSPSSNKDALNPQSPNEFGVSGADYGHGYFTLDGPKYDDGNNENDHMSTNRLGNLGLVNQVPMFALWNE

SEQ ID NO: 54867 - protein, 410 aa, Glycine max
  peptide (1)..(410): Ceres Seq. ID no. 14303354
  misc_feature (79)..(152): Pfam Name: AP2 domain Pfam Description: AP2 domain
  misc_feature (1)..(272): Homolog of NCBI NO: 20330778 NR Description: Putative ovule development protein antitegumenta
  misc_feature (27)..(276): Homolog of NCBI NO: 32490266 NR Description: OSJNBb0116K07.8 [Oryza sativa (japonica
  misc_feature (32)..(299): Homolog of NCBI NO: 28201307 NR Description: putative ovule development protein antitegumenta
  misc_feature (1)..(275): Homolog of NCBI NO: 21069053 NR Description: AP2/EREBP transcription factor BABY BOOM2
  misc_feature (1)..(275): Homolog of NCBI NO: 21069051 NR Description: AP2/EREBP transcription factor BABY BOOM1
  misc_feature (1)..(275): Homolog of NCBI NO: 21069057 NR Description: BABY BOOM [Arabidopsis thaliana]
  misc_feature (1)..(265): Homolog of NCBI NO: 15235690 NR Description: ovule development protein aintegumenta (ANT)
  misc_feature (1)..(265): Homolog of NCBI NO: 1171429 NR Description: CKC
  misc_feature (1)..(271): Homolog of NCBI NO: 15218529 NR Description: ovule development protein, putative [Arabidopsis
  misc_feature (1)..(277): Homolog of NCBI NO: 38492172 NR Description: ANT-like protein [Nicotiana tabacum]
MYKSWLAQTQFSSDGKPSNEANGCNFQSLSLTMSPSVQNGVGAISSVQVNEDSRKRVMAKSHAREPVPRKSIDTFGQRTSQYRGVTRHRWTGRYEAHLWDNSCRKEGQTRKGRQVYLGGYDKEEKAAKAYDLAALKYWGPTTHINFPLSTYEKELEEMKHMTRQEFVANLRRKSSGFSRGASVYRGVTRHHQHGRWQARIGRVAGNKDLYLGTFSTQEEAAEAYDIAAIKFRGTSAVTNFDISRYDVKRICSSSTLIAGDLAKRSPKESPAPVPASDFNSCGSSPMPLVSQPPPLAITDGEHSDELSNMMWNANNSDEQAQNESGGAEFNNNVTESSSSQQVSPSSNKDALNPQSPNEFGVSGADYGHGYFTLDGPKYDDGNNENDHMSTNRLGNLGLVNQVPMFALWNE

SEQ ID NO: 54868 - DNA, 1902 bp, Glycine max
  misc_feature (1)..(1902): Ceres Seq. ID no. 15176911
tcacacacttgaccagcatctcattcccgtccccggcgactgagtagcggtctcttcccaactcggaactcagtccattccgcatttcaattttctcttcacttggcaaagcccaaaccaaaccctggctgaagaagagaattgactgagaagaagaacacagaaatgggctccgaactgattttcagagggcacgagacccagcccgtggacgacgcgtactcaccaaagccccacaaaccctggctcaccgtgactcgcccgattcactacatgctccgtgagcagcgactcctcttcgttctcctcggcgtcatcatagcaaccctcttcttcacattcgtcccttcctcttccccttccgcttcctcctcaagcgtttcgtacgagtctctcccgatctcctacttcgagcgcgagtcaaagattccggcgtaccaccaccgcgtggctgcggcggtgcattcggtggggaaggtgccgctggggattaagaggaagggactccggatcgtagtgacgggcggcgcggggttcgtggggtcgcacctggtggatcggttgattgcgagaggggacagcgtgatcgtggtggacaatttcttcacgggaagaaaagagaacgtgatgcaccattttgggaaccctagattcgagctcatccgacacgacgtcgttgagcctctcctgctcgaggttgatcagatctaccatctggcttgccctgcttcccctgtccactacaagttcaaccccgtcaagactatcaagacgaatgtggtggggaccttgaacatgctggggcttgcaaagagagtgggcgcgaggttcttgttgacgagtaccagtgaggtttatggagatcctctgcagcaccctcagaaggagacttactggggcaacgtcaacccaattggtgtccgaagctgctacgacgagggaaagcgtacggccgagacgttgaccatggactaccaccgaggtgccggcgtcgaggttagaattgctagaatctttaacacctacgggcctagaatgtgcttagatgatggtcgtgttgttagtaacttcgttgctcaggcactaaggaaggagcctctgaccgtttatggagatgggaagcagacaagaagtttccaatatgtctctgatttggtggagggtctaatccgccttatggaaggagaacacgtgggacctttcaatcttggaaatccgggagaatttacaatgctagaacttgccaaggtggttcaagaaacaatcgaccctgatgctaggatagagtacaggccgaacacagaggatgatccgcacaagagaaagcctgatataagtagggctaaggatcaacttggctgggaattcaaggttgatctgcgcaagggcctcccactaatggtttctgacttccggcaacgcatttttggtgaccagaaggaaaaggcaaccgtagcctaattcttgcgtgtcatgtatcttagagtgagaaagggatataagataataatagttcgaggataaccctggcccgccaaaggtcccattagtcatcacaggattatatgagctctactaaaatgtccctttgtcgtttgttctccgtcaatctttacatgccgggttatttaccctctttcaagattgaccaccacccctgattccatttttcaaattcctgccatctatattctatttctttctctttttttttggatgtaattggtatgtgcaacagtgcaagaggctacagttatagttatttcaacattttaccttctcacttgttctatttttatttaaacttcattacttctccacttatttgcaatttgatctctgaatttgtagagtttgctacactcttgttgaaattattactatcatcatcattcgttgttt

SEQ ID NO: 54869 - protein, 431 aa, Glycine max
  peptide (1)..(431): Ceres Seq. ID no. 15176912
  misc_feature (116)..(420): Pfam Name: NAD dependent epimerase/dehydratase family Pfam Description: NAD dependent epimerase/dehydratase family
  misc_feature (111)..(425): Homolog of NCBI NO: 13591616 NR Description: UDP-D-glucuronate carboxy-lyase [Pisum sativum]
  misc_feature (34)..(161): Homolog of NCBI NO: 34908082 NR Description: P0506B12.30 [Oryza sativa (japonica
  misc_feature (203)..(423): Homolog of NCBI NO: 34908082 NR Description: P0506B12.30 [Oryza sativa (japonica
  misc_feature (34)..(423): Homolog of NCBI NO: 25396402 NR Description: UDP-glucuronic acid decarboxylase
  misc_feature (8)..(427): Homolog of NCBI NO: 30693847 NR Description: NAD-dependent epimerase/dehydratase family
  misc_feature (8)..(427): Homolog of NCBI NO: 11270116 NR Description: dTDP-glucose 4-6-dehydratase-like protein -
  misc_feature (8)..(427): Homolog of NCBI NO: 17473549 NR Description: dTDP-glucose 4-6-dehydratase-like protein
  misc_feature (1)..(429): Homolog of NCBI NO: 15227109 NR Description: NAD-dependent epimerase/dehydratase family
  misc_feature (1)..(431): Homolog of NCBI NO: 2129578 NR Description: dTDP-glucose 4-6-dehydratase homolog D18 -
  misc_feature (1)..(431): Homolog of NCBI NO: 15229334 NR Description: NAD-dependent epimerase/dehydratase family
MGSELIFRGHETQPVDDAYSPKPHKPWLTVTRPIHYMLREQRLLFVLLGVIIATLFFTFVPSSSPSASSSSVSYESLPISYFERESKIPAYHHRVAAAVHSVGKVPLGIKRKGLRIVVTGGAGFVGSHLVDRLIARGDSVIVVDNFFTGRKENVMHHFGNPRFELIRHDVVEPLLLEVDQIYHLACPASPVHYKFNPVKTIKTNVVGTLNMLGLAKRVGARFLLTSTSEVYGDPLQHPQKETYWGNVNPIGVRSCYDEGKRTAETLTMDYHRGAGVEVRIARIFNTYGPRMCLDDGRVVSNFVAQALRKEPLTVYGDGKQTRSFQYVSDLVEGLIRLMEGEHVGPFNLGNPGEFTMLELAKVVQETIDPDARIEYRPNTEDDPHKRKPDISRAKDQLGWEFKVDLRKGLPLMVSDFRQRIFGDQKEKATVA

SEQ ID NO: 54870 - protein, 395 aa, Glycine max
  peptide (1)..(395): Ceres Seq. ID no. 15176913
  misc_feature (80)..(384): Pfam Name: NAD dependent epimerase/dehydratase family Pfam Description: NAD dependent epimerase/dehydratase family
  misc_feature (75)..(389): Homolog of NCBI NO: 13591616 NR Description: UDP-D-glucuronate carboxy-lyase [Pisum sativum]
  misc_feature (1)..(125): Homolog of NCBI NO: 34908082 NR Description: P0506B12.30 [Oryza sativa (japonica
  misc_feature (167)..(387): Homolog of NCBI NO: 34908082 NR Description: P0506B12.30 [Oryza sativa (japonica
  misc_feature (1)..(387): Homolog of NCBI NO: 25396402 NR Description: UDP-glucuronic acid decarboxylase
  misc_feature (1)..(391): Homolog of NCBI NO: 30693847 NR Description: NAD-dependent epimerase/dehydratase family
  misc_feature (1)..(391): Homolog of NCBI NO: 11270116 NR Description: dTDP-glucose 4-6-dehydratase-like protein -
  misc_feature (1)..(391): Homolog of NCBI NO: 17473549 NR Description: dTDP-glucose 4-6-dehydratase-like protein
  misc_feature (1)..(393): Homolog of NCBI NO: 15227109 NR Description: NAD-dependent epimerase/dehydratase family
  misc_feature (1)..(395): Homolog of NCBI NO: 2129578 NR Description: dTDP-glucose 4-6-dehydratase homolog D18 -
  misc_feature (1)..(395): Homolog of NCBI NO: 15229334 NR Description: NAD-dependent epimerase/dehydratase family
MLREQRLLFVLLGVIIATLFFTFVPSSSPSASSSSVSYESLPISYFERESKIPAYHHRVAAAVHSVGKVPLGIKRKGLRIVVTGGAGFVGSHLVDRLIARGDSVIVVDNFFTGRKENVMHHFGNPRFELIRHDVVEPLLLEVDQIYHLACPASPVHYKFNPVKTIKTNVVGTLNMLGLAKRVGARFLLTSTSEVYGDPLQHPQKETYWGNVNPIGVRSCYDEGKRTAETLTMDYHRGAGVEVRIARIFNTYGPRMCLDDGRVVSNFVAQALRKEPLTVYGDGKQTRSFQYVSDLVEGLIRLMEGEHVGPFNLGNPGEFTMLELAKVVQETIDPDARIEYRPNTEDDPHKRKPDISRAKDQLGWEFKVDLRKGLPLMVSDFRQRIFGDQKEKATVA

SEQ ID NO: 54871 - protein, 277 aa, Glycine max
  peptide (1)..(277): Ceres Seq. ID no. 15176914
  misc_feature (1)..(266): Pfam Name: NAD dependent epimerase/dehydratase family Pfam Description: NAD dependent epimerase/dehydratase family
  misc_feature (1)..(266): Homolog of NCBI NO: 22761003 NR Description: unnamed protein product [Homo sapiens]
  misc_feature (1)..(271): Homolog of NCBI NO: 13591616 NR Description: UDP-D-glucuronate carboxy-lyase [Pisum sativum]
  misc_feature (49)..(269): Homolog of NCBI NO: 34908082 NR Description: P0506B12.30 [Oryza sativa (japonica
  misc_feature (1)..(269): Homolog of NCBI NO: 25396402 NR Description: UDP-glucuronic acid decarboxylase
  misc_feature (1)..(273): Homolog of NCBI NO: 30693847 NR Description: NAD-dependent epimerase/dehydratase family
  misc_feature (1)..(273): Homolog of NCBI NO: 11270116 NR Description: dTDP-glucose 4-6-dehydratase-like protein -
  misc_feature (1)..(273): Homolog of NCBI NO: 17473549 NR Description: dTDP-glucose 4-6-dehydratase-like protein
  misc_feature (1)..(275): Homolog of NCBI NO: 15227109 NR Description: NAD-dependent epimerase/dehydratase family
  misc_feature (1)..(277): Homolog of NCBI NO: 2129578 NR Description: dTDP-glucose 4-6-dehydratase homolog D18 -
  misc_feature (1)..(277): Homolog of NCBI NO: 15229334 NR Description: NAD-dependent epimerase/dehydratase family
MHHFGNPRFELIRHDVVEPLLLEVDQIYHLACPASPVHYKFNPVKTIKTNVVGTLNMLGLAKRVGARFLLTSTSEVYGDPLQHPQKETYWGNVNPIGVRSCYDEGKRTAETLTMDYHRGAGVEVRIARIFNTYGPRMCLDDGRVVSNFVAQALRKEPLTVYGDGKQTRSFQYVSDLVEGLIRLMEGEHVGPFNLGNPGEFTMLELAKVVQETIDPDARIEYRPNTEDDPHKRKPDISRAKDQLGWEFKVDLRKGLPLMVSDFRQRIFGDQKEKATVA

SEQ ID NO: 54872 - DNA, 2571 bp, Glycine max
  misc_feature (1)..(2571): Ceres Seq. ID no. 14313875
aacacaacacgcgccctacccttcatcaattgcttctttctcactcactgaaactcaacccttactttgcaattgcattcccagattcatttcagacaacgcaaccttaactttcccacatacgctaactcaataaccctttcattccgttcattgctctttccagattctattttgcctcttagaagttggaatagagaactagagctgggtggatggaggatgacaagaggaggaggaagaacaagaagaagaagaacaagcagaacaagaatgtggaaaatggggtgggagaaactgctaatagggatcagaatctgctgagtaatggaaaggatgagcatactaatctttccaagactgcaaatgagcaaagctcgaatgtcgatttgaatggggttggagagacattaagtagggatcacaatctggtaaataatggtaaggatgaacctgctaatctttcaggagtcgctgatgagcaatgcatggatgcagatcggaatggggttgttgaaacccccaatagtgatcaaaatctggtgaaaagtggaaaggatgagaatattccatcattagagtttgcagatgggcaaagtactaatatggattcaaatggtcatccgccaaatggctatatcagaagagacaatcaggaaattaaaagaagagaatgatatacatattcagaaagagactttatcaaaagagacaatcaggaaattaaaggcagaaaatgatatgcacattcagaaggaggccataatggaagagacaatcagaaaattgacagaacaaaatgacatgcatatgcagaaagagattgcatcagaagagactatcagaaaattaaaagaaaaacatgatatggatgttcagaaagaggccatatcagaagatacaattagaaatttgaaagaaaaaaatgatgtgcacgtgcagaaagaggagacaataaaaaaattgaaagaagaaaatgaagtgcacattcaggaagaggccatatcaaaggagacaattaaaaatctcaaagaagaaaatgataaactacttcagaaagtggtttccttggaagaggtcatcaataatttacaaactgataatgaattgcagacacaaaaacatactagtctggaaatgagaattgcacaattgcaaagtgagaataattccttacttcaaaaagaggcgagtgattatgttttccctttaaaaagattaggaatcattgattttgagaatattatacatccagatatttaatagtatatcatatgtaggctggattggtggaaaaaactaatcagttgctgaatgaaaaggtagttttgagcctgaaagctgagagtttagagagaaaaataaatcttctggagaatgagttgagttcttttagtgagaaagaggttggacttgaaacaagaattgcacaattgcagagtgagaataattccttacttcaaaaagaggctacattggtggaaagaaccaatcaattgctgaatgaaaaggcagttttgagcctgaaaggggagagtttagaacaaaaaatatatcttctggaaagcgatttgaattctttagtcaagaaggagaattcaactaaagaaactatttcaaacctgaatggaaacattgctgtgctacaagcgcaggtggaagaattggaggagtccaggaataatctttttctagaaaaccagcaattgagggaaaaagtgtcgagtcttcagtcaacggtccaaaatcatgaaaacagtaacacttcttcctgctcatgggatgcatctgtaaaggatcttgcttctgaaaacgaggacttgaagtctgaaattgaagcagcctttacgttggtggagaaattgatggctgaaaatgcagaacttgttgagaaggtcaccgagttatgtgttgagctggatcaccgaagtgcagaagtcggacattctggagtcactgaatccaatgggatgactgaatttgttaaacctactggtgttgccattcctctaccagaatctgctgagtatgcgtctgtatcatcccccaagttgaattcattggaagagacttcagtgaaggataatggtaactctaatgatgctaagcatgttgttggggtaacgtcaaactcgtcgttggtatcggctgatgacgctggagaaatcgtgcaaattccattggatgataatgaaatacaagatatagagttgcaggatgctaagaatgtggaaaatgatgctgatgctgtgccaatcacagatgctccgcttatcggtgctccatttcgtttgatatcatttgttgctaattttgttagtggtgctgacttggttaaccaaagctcttcaaacactgctcgttgacttggttgaccaaagctctgttttttttggctggcagtcttgaacatacaataacctcacttacattaggcagaataccaatataggttggcctaatttgggccattttaatgtttgtatgttaattctttgaacacggaaatattgtactggggaaaagcatatagttttatgtgttcttacttcatattgctttcacttttgg

SEQ ID NO: 54873 - protein, 224 aa, Glycine max
  peptide (1)..(224): Ceres Seq. ID no. 14313876
  misc_feature (18)..(186): Pfam Name: Myosin tail Pfam Description: Myosin tail
  misc_feature (20)..(205): Homolog of NCBI NO: 137175 NR Description: Intracellular protein transport protein USO1
  misc_feature (28)..(209): Homolog of NCBI NO: 1903280 NR Description: USO1 [Saccharomyces cerevisiae]
  misc_feature (20)..(205): Homolog of NCBI NO: 677198 NR Description: putative
  misc_feature (14)..(196): Homolog of NCBI NO: 37534452 NR Description: putative centromere protein
  misc_feature (20)..(205): Homolog of NCBI NO: 1903280 NR Description: USO1 [Saccharomyces cerevisiae]
  misc_feature (89)..(202): Homolog of NCBI NO: 15224904 NR Description: hypothetical protein [Arabidopsis thaliana]
  misc_feature (36)..(213): Homolog of NCBI NO: 15224904 NR Description: hypothetical protein [Arabidopsis thaliana]
  misc_feature (19)..(169): Homolog of NCBI NO: 15224904 NR Description: hypothetical protein [Arabidopsis thaliana]
  misc_feature (13)..(198): Homolog of NCBI NO: 22024255 NR Description: CG3493-PA [Drosophila melanogaster]
  misc_feature (13)..(198): Homolog of NCBI NO: 18447644 NR Description: SD05887p [Drosophila melanogaster]
MGKVLIWIQMVIRQMAISEETIRKLKEENDIHIQKETLSKETIRKLKAENDMHIQKEAIMEETIRKLTEQNDMHMQKEIASEETIRKLKEKHDMDVQKEAISEDTIRNLKEKNDVHVQKEETIKKLKEENEVHIQEEAISKETIKNLKEENDKLLQKVVSLEEVINNLQTDNELQTQKHTSLEMRIAQLQSENNSLLQKEASDYVFPLKRLGIIDFENIIHPDI

SEQ ID NO: 54874 - protein, 215 aa, Glycine max
  peptide (1)..(215): Ceres Seq. ID no. 14313877
  misc_feature (9)..(177): Pfam Name: Myosin tail Pfam Description: Myosin tail
  misc_feature (11)..(196): Homolog of NCBI NO: 137175 NR Description: Intracellular protein transport protein USO1
  misc_feature (19)..(200): Homolog of NCBI NO: 1903280 NR Description: USO1 [Saccharomyces cerevisiae]
  misc_feature (11)..(196): Homolog of NCBI NO: 677198 NR Description: putative
  misc_feature (5)..(187): Homolog of NCBI NO: 37534452 NR Description: putative centromere protein
  misc_feature (11)..(196): Homolog of NCBI NO: 1903280 NR Description: USO1 [Saccharomyces cerevisiae]
  misc_feature (80)..(193): Homolog of NCBI NO: 15224904 NR Description: hypothetical protein [Arabidopsis thaliana]
  misc_feature (27)..(204): Homolog of NCBI NO: 15224904 NR Description: hypothetical protein [Arabidopsis thaliana]
  misc_feature (10)..(160): Homolog of NCBI NO: 15224904 NR Description: hypothetical protein [Arabidopsis thaliana]
  misc_feature (4)..(189): Homolog of NCBI NO: 22024255 NR Description: CG3493-PA [Drosophila melanogaster]
  misc_feature (4)..(189): Homolog of NCBI NO: 18447644 NR Description: SD05887p [Drosophila melanogaster]
MVIRQMAISEETIRKLKEENDIHIQKETLSKETIRKLKAENDMHIQKEAIMEETIRKLTEQNDMHMQKEIASEETIRKLKEKHDMDVQKEAISEDTIRNLKEKNDVHVQKEETIKKLKEENEVHIQEEAISKETIKNLKEENDKLLQKVVSLEEVINNLQTDNELQTQKHTSLEMRIAQLQSENNSLLQKEASDYVFPLKRLGIIDFENIIHPDI

SEQ ID NO: 54875 - protein, 210 aa, Glycine max
  peptide (1)..(210): Ceres Seq. ID no. 14313878
  misc_feature (4)..(172): Pfam Name: Myosin tail Pfam Description: Myosin tail
  misc_feature (6)..(191): Homolog of NCBI NO: 137175 NR Description: Intracellular protein transport protein USO1
  misc_feature (14)..(195): Homolog of NCBI NO: 1903280 NR Description: USO1 [Saccharomyces cerevisiae]
  misc_feature (6)..(191): Homolog of NCBI NO: 677198 NR Description: putative
  misc_feature (1)..(182): Homolog of NCBI NO: 37534452 NR Description: putative centromere protein
  misc_feature (6)..(191): Homolog of NCBI NO: 1903280 NR Description: USO1 [Saccharomyces cerevisiae]
  misc_feature (75)..(188): Homolog of NCBI NO: 15224904 NR Description: hypothetical protein [Arabidopsis thaliana]
  misc_feature (22)..(199): Homolog of NCBI NO: 15224904 NR Description: hypothetical protein [Arabidopsis thaliana]
  misc_feature (5)..(155): Homolog of NCBI NO: 15224904 NR Description: hypothetical protein [Arabidopsis thaliana]
  misc_feature (1)..(184): Homolog of NCBI NO: 22024255 NR Description: CG3493-PA [Drosophila melanogaster]
  misc_feature (1)..(184): Homolog of NCBI NO: 18447644 NR Description: SD05887p [Drosophila melanogaster]
MAISEETIRKLKEENDIHIQKETLSKETIRKLKAENDMHIQKEAIMEETIRKLTEQNDMHMQKEIASEETIRKLKEKHDMDVQKEAISEDTIRNLKEKNDVHVQKEETIKKLKEENEVHIQEEAISKETIKNLKEENDKLLQKVVSLEEVINNLQTDNELQTQKHTSLEMRIAQLQSENNSLLQKEASDYVFPLKRLGIIDFENIIHPDI

SEQ ID NO: 54876 - DNA, 2005 bp, Glycine max
  misc_feature (1)..(2005): Ceres Seq. ID no. 15172108
tatttttttaatataaaataaaatattatattttaaatatatttattattttttcagcttgctgcactaaatcagttaagaaatatatttggactgggtaaacgtgaagccgaggcgatttcacttgatgttacgtcgaaggtatatcgcaaacgacttgcacaggctgttgcagatggtgagttagaaatggcagatagcaaagcagccttccttcaaaatctatgtgatgaacttcattttgatccacaaaaggccagtgaacttcatgaagaaatttatcggcaaaagcttcagaaatgtgtagctgatggggagctcaatgaggaagatgttgctgctttgttgaggttgcgtgtaatgctctgcataccgcaacagattgttgaaacagctcattcagatatatgtggcagtttgtttgaaaaggttgtgaaggaggcaatcgcatcaggggttgatggatatgatgctgaaatccagaaatcagtaagaaaagcagcacatggcctgcgacttactagggaggttgctatttctattgcgagcaaggcggtaaggaagatttttattaattacataaaacgtgcgcgggcagctggaaatcgtacagagtctgcgaaagaactgaagaagatgatagccttcaacaccttagttgtaactaatttggtggaggacattaaaggggagtcagctgatatttcaactgaagaacctgtgaaagaggacattacacaaactgacgacgaagaatgggaatcacttcagacactcaagaaaataagaccgaacaaagaacttacggaaaagttgggaaaacctggtcagacagaaattactctgaaagatgatcttcctgaaagggataggactgatctttacaagacatacttactttattgtctaactggtgaagtgacaagggttccgttcggtgctcagatcactactaagaaggatgattctgagtatcttcttctaaatcagcttggtgggatcctgggattgagtagtcaagaaatagtggaagtgcacaggggtctagctgagcaagcttttaggcaacaggctgaggtaattttagctgatggacagttgacaaaggccagggtggagcagcttaataacctccagaagcaagtaggcttacctcaagaatatgctcagaaaataatcaagagtataaccactacaaaaatggcagctgccattgaaactgctgtaactcaagggaggctcaatatgaagcagattagggaactcaaggaagctaatgttgatttagacagtatggtatccgagaacttgagagaaaccctcttcaaaaaaactgttgatgacattttctcatccggtacaggagagtttgacaatgaggaagtatatgaaaaaatcccatcagatctcaacattaacaaagagaaggcaagaggtgttgttcatgagcttgcaaaaagtagactatctaactcattggttcaggccgtgtctctactaagacagagaaatcacaagggagtggtttcttcactcaatgacttgttggcatgtgacaaagcagtaccctcacagccagtttcatgggaagtgccagaggagcttgctgatctatacaccatatacttgaagagtgatccaactcctgagaatttgtctcgtttgcagtatctgttgggtataaatgattcaacagctgctgctcttagggagatgggagatagattactcaataccactgctgaggaagagaagtttgtattctagtgttgtgataaaatgtttggcattttaggcatactagagatgcttcaagtccccttaattttgccattttttatttgccattttgtttaacggtagcagaaaaagaatatcaccatgtataaactttggaatagagatgagtgcagtgctgaaatcttagataatattttgtttgagatagttaaattaatcaattgttattttgtatgaatgaaaataagttctcataatcgtgaac

SEQ ID NO: 54877 - protein, 525 aa, Glycine max
  peptide (1)..(525): Ceres Seq. ID no. 15172109
  misc_feature (1)..(453): Homolog of NCBI NO: 13812316 NR Description: IAP100 protein [Guillardia theta]
  misc_feature (1)..(525): Homolog of NCBI NO: 37535626 NR Description: putative chloroplast inner envelope protein
  misc_feature (1)..(525): Homolog of NCBI NO: 1498315 NR Description: IAP100
  misc_feature (1)..(525): Homolog of NCBI NO: 20466768 NR Description: chloroplast inner envelope protein, putative
  misc_feature (1)..(525): Homolog of NCBI NO: 15221009 NR Description: chloroplast inner envelope protein -related
  misc_feature (1)..(525): Homolog of NCBI NO: 7523692 NR Description: Putative chloroplast inner envelope protein
  misc_feature (1)..(525): Homolog of NCBI NO: 7488813 NR Description: import intermediate-associated 100K protein
MADSKAAFLQNLCDELHFDPQKASELHEEIYRQKLQKCVADGELNEEDVAALLRLRVMLCIPQQIVETAHSDICGSLFEKVVKEAIASGVDGYDAEIQKSVRKAAHGLRLTREVAISIASKAVRKIFINYIKRARAAGNRTESAKELKKMIAFNTLVVTNLVEDIKGESADISTEEPVKEDITQTDDEEWESLQTLKKIRPNKELTEKLGKPGQTEITLKDDLPERDRTDLYKTYLLYCLTGEVTRVPFGAQITTKKDDSEYLLLNQLGGILGLSSQEIVEVHRGLAEQAFRQQAEVILADGQLTKARVEQLNNLQKQVGLPQEYAQKIIKSITTTKMAAAIETAVTQGRLNMKQIRELKEANVDLDSMVSENLRETLFKKTVDDIFSSGTGEFDNEEVYEKIPSDLNINKEKARGVVHELAKSRLSNSLVQAVSLLRQRNHKGVVSSLNDLLACDKAVPSQPVSWEVPEELADLYTIYLKSDPTPENLSRLQYLLGINDSTAAALREMGDRLLNTTAEEEKFVF

SEQ ID NO: 54878 - protein, 468 aa, Glycine max
  peptide (1)..(468): Ceres Seq. ID no. 15172110
  misc_feature (1)..(396): Homolog of NCBI NO: 13812316 NR Description: IAP100 protein [Guillardia theta]
  misc_feature (1)..(468): Homolog of NCBI NO: 37535626 NR Description: putative chloroplast inner envelope protein
  misc_feature (1)..(468): Homolog of NCBI NO: 1498315 NR Description: IAP100
  misc_feature (1)..(468): Homolog of NCBI NO: 15221009 NR Description: chloroplast inner envelope protein -related
  misc_feature (1)..(468): Homolog of NCBI NO: 20466768 NR Description: chloroplast inner envelope protein, putative
  misc_feature (1)..(468): Homolog of NCBI NO: 7523692 NR Description: Putative chloroplast inner envelope protein
  misc_feature (1)..(468): Homolog of NCBI NO: 7488813 NR Description: import intermediate-associated 100K protein
MLCIPQQIVETAHSDICGSLFEKVVKEAIASGVDGYDAEIQKSVRKAAHGLRLTREVAISIASKAVRKIFINYIKRARAAGNRTESAKELKKMIAFNTLVVTNLVEDIKGESADISTEEPVKEDITQTDDEEWESLQTLKKIRPNKELTEKLGKPGQTEITLKDDLPERDRTDLYKTYLLYCLTGEVTRVPFGAQITTKKDDSEYLLLNQLGGILGLSSQEIVEVHRGLAEQAFRQQAEVILADGQLTKARVEQLNNLQKQVGLPQEYAQKIIKSITTTKMAAAIETAVTQGRLNMKQIRELKEANVDLDSMVSENLRETLFKKTVDDIFSSGTGEFDNEEVYEKIPSDLNINKEKARGVVHELAKSRLSNSLVQAVSLLRQRNHKGVVSSLNDLLACDKAVPSQPVSWEVPEELADLYTIYLKSDPTPENLSRLQYLLGINDSTAAALREMGDRLLNTTAEEEKFVF

SEQ ID NO: 54879 - protein, 376 aa, Glycine max
  peptide (1)..(376): Ceres Seq. ID no. 15172111
  misc_feature (1)..(304): Homolog of NCBI NO: 13812316 NR Description: IAP100 protein [Guillardia theta]
  misc_feature (1)..(376): Homolog of NCBI NO: 37535626 NR Description: putative chloroplast inner envelope protein
  misc_feature (1)..(376): Homolog of NCBI NO: 1498315 NR Description: IAP100
  misc_feature (1)..(376): Homolog of NCBI NO: 15221009 NR Description: chloroplast inner envelope protein -related
  misc_feature (1)..(376): Homolog of NCBI NO: 20466768 NR Description: chloroplast inner envelope protein, putative
  misc_feature (1)..(376): Homolog of NCBI NO: 7523692 NR Description: Putative chloroplast inner envelope protein
  misc_feature (1)..(376): Homolog of NCBI NO: 7488813 NR Description: import intermediate-associated 100K protein
MIAFNTLVVTNLVEDIKGESADISTEEPVKEDITQTDDEEWESLQTLKKIRPNKELTEKLGKPGQTEITLKDDLPERDRTDLYKTYLLYCLTGEVTRVPFGAQITTKKDDSEYLLLNQLGGILGLSSQEIVEVHRGLAEQAFRQQAEVILADGQLTKARVEQLNNLQKQVGLPQEYAQKIIKSITTTKMAAAIETAVTQGRLNMKQIRELKEANVDLDSMVSENLRETLFKKTVDDIFSSGTGEFDNEEVYEKIPSDLNINKEKARGVVHELAKSRLSNSLVQAVSLLRQRNHKGVVSSLNDLLACDKAVPSQPVSWEVPEELADLYTIYLKSDPTPENLSRLQYLLGINDSTAAALREMGDRLLNTTAEEEKFVF

SEQ ID NO: 54880 - DNA, 1988 bp, Glycine max
  misc_feature (1)..(1988): Ceres Seq. ID no. 12581802
cagctacgtaggcccccccccccgcgatctccctctctctaacgacgccgtttcgatcctctccttctgcttcgtagtaacagagttcaaaccataccatggatgagacttcagctctcatcgaagccattctccgagagcaagaggaagaagaagaagaagctcacagaagaagaaggaaccacaccacaatcaaaaataacaacaacaacaacaacgaatggcaaacggtgtcgtatacaaagcgcaaccgcaaccgcaacaataataggaagcctctcgccgacgacaatttcgccgccgatccttcttcctccgacgtcttcagctccgtccagcgccattccgaggaccgccgcctccggctactcaagtctcagatcgccgccgctgaagcggctgctgcggaagccacaccgagcagatcgaagcggcattccgacaacgaggaggacggcgatgccgagcctgaagccgaggtgaagaaggcgaagcagaagaagccgaagaagccgaaggtgacggtggccgaagctgcttccggaatcagcgccgatgatctcgacgcgtttctcgctgaaattaccgcttcgtatgaatcgcagcaagatattatgctgatgcggtttgctgattacttcggtcgcgcgttctcgtcggtgagtggagctcaattcccatggttgaagacgttcaaagagtctaccgttgcaaagattgttgatatccctcttttgcatatatctgaggatatttacaaaatatcaacggattgggtcagtcatcgatcatatgaagcacttggttcctttgtgctatggtcgttggacagcattcttgcagaccttgccagtcatcaaggagttgttaagggatctaagaaggcagtccagcaatcatcaccgaaatctcaggttgccatgtttgtggttttagcaatggtgcttcgacgaaaacctgatgtcttgattagtttattaccaataataaaggagaataaaaaatatcaaggacaggataaactccctgtcattgtttgggtgataactcaggcttctcaaggagatctagttatggggttgtacttgtgggtatatcttctattgccaatgctgagtgtgaagtctggttgtaatccacagtcaagagacttgatattacagttggttgagagaattatcacatctcctaaagctcgttctatcttgctaaatggggctgtcagaaggggggagcgtgttgtgcccccatgggcacttgattctctattgagagttactttccctcttccttcagcccgggtcaaggccactgaaagatttgaagctgtttatccaacattaagagaagttgcccttgccagttcccctggaagcaaagcaataaagcatcttgcacaacagatactaagctttgcaattaaagctgcaggagaagctaattctgacctatcaaaggaggcaagtgacatttttatttggtgtttgactcagaaccctgaatgttacaagcaatgggattttctttatatggataaccttgaagcaagtgttgttgtattgagaaaactttctggtgaatggaaggaatactttgtcaaacatcctactcttgatcctttgagggaaaatcttaagagcttcagtcaaaagaatgaaaaggcattggctaaggtggatgatggtgctcgccatgcattattgaaggatgcagacaagtactgcaaagtccttttgggacaattgtcacaaggccatggatgcttgaagagcatgatagttctttctgttgtacttgctgttggtgccgttttcatgtcccagaacttgcatttatgggattatagtcaactgacagaaatgttgaatctctcctaggatgagagttatcctgtgatttgctcggtgcttatgcccagtgtggatcacttcagtcaatagtgaggtgtgatgaggaatatttaatttattttagtcttcgattgagcg

SEQ ID NO: 54881 - protein, 592 aa, Glycine max
  peptide (1)..(592): Ceres Seq. ID no. 12581803
  misc_feature (139)..(577): Homolog of NCBI NO: 18399392 NR Description: expressed protein
  misc_feature (125)..(577): Homolog of NCBI NO: 6671944 NR Description: unknown protein [Arabidopsis thaliana]
  misc_feature (476)..(576): Homolog of NCBI NO: 25518112 NR Description: T26J12.6 protein - Arabidopsis thaliana
  misc_feature (74)..(195): Homolog of NCBI NO: 25518112 NR Description: T26J12.6 protein - Arabidopsis thaliana
  misc_feature (210)..(418): Homolog of NCBI NO: 25518112 NR Description: T26J12.6 protein - Arabidopsis thaliana
  misc_feature (74)..(195): Homolog of NCBI NO: 15220663 NR Description: unknown protein; protein id: At1g23170.1
  misc_feature (210)..(592): Homolog of NCBI NO: 15220663 NR Description: unknown protein; protein id: At1g23170.1
  misc_feature (42)..(592): Homolog of NCBI NO: 34895518 NR Description: unnamed protein product [Oryza sativa (japonica
  misc_feature (34)..(591): Homolog of NCBI NO: 15223242 NR Description: unknown protein; protein id: At1g70770.1
MDETSALIEAILREQEEEEEEAHRRRRNHTTIKNNNNNNNEWQTVSYTKRNRNRNNNRKPLADDNFAADPSSSDVFSSVQRHSEDRRLRLLKSQIAAAEAAAAEATPSRSKRHSDNEEDGDAEPEAEVKKAKQKKPKKPKVTVAEAASGISADDLDAFLAEITASYESQQDIMLMRFADYFGRAFSSVSGAQFPWLKTFKESTVAKIVDIPLLHISEDIYKISTDWVSHRSYEALGSFVLWSLDSILADLASHQGVVKGSKKAVQQSSPKSQVAMFVVLAMVLRRKPDVLISLLPIIKENKKYQGQDKLPVIVWVITQASQGDLVMGLYLWVYLLLPMLSVKSGCNPQSRDLILQLVERIITSPKARSILLNGAVRRGERVVPPWALDSLLRVTFPLPSARVKATERFEAVYPTLREVALASSPGSKAIKHLAQQILSFAIKAAGEANSDLSKEASDIFIWCLTQNPECYKQWDFLYMDNLEASVVVLRKLSGEWKEYFVKHPTLDPLRENLKSFSQKNEKALAKVDDGARHALLKDADKYCKVLLGQLSQGHGCLKSMIVLSVVLAVGAVFMSQNLHLWDYSQLTEMLNLS

SEQ ID NO: 54882 - protein, 420 aa, Glycine max
  peptide (1)..(420): Ceres Seq. ID no. 12581804
  misc_feature (1)..(405): Homolog of NCBI NO: 18399392 NR Description: expressed protein
  misc_feature (1)..(405): Homolog of NCBI NO: 6671944 NR Description: unknown protein [Arabidopsis thaliana]
  misc_feature (304)..(404): Homolog of NCBI NO: 25518112 NR Description: T26J12.6 protein - Arabidopsis thaliana
  misc_feature (1)..(23): Homolog of NCBI NO: 25518112 NR Description: T26J12.6 protein - Arabidopsis thaliana
  misc_feature (38)..(246): Homolog of NCBI NO: 25518112 NR Description: T26J12.6 protein - Arabidopsis thaliana
  misc_feature (1)..(23): Homolog of NCBI NO: 15220663 NR Description: unknown protein; protein id: At1g23170.1
  misc_feature (38)..(420): Homolog of NCBI NO: 15220663 NR Description: unknown protein; protein id: At1g23170.1
  misc_feature (1)..(420): Homolog of NCBI NO: 34895518 NR Description: unnamed protein product [Oryza sativa (japonica
  misc_feature (1)..(419): Homolog of NCBI NO: 15223242 NR Description: unknown protein; protein id: At1g70770.1
MLMRFADYFGRAFSSVSGAQFPWLKTFKESTVAKIVDIPLLHISEDIYKISTDWVSHRSYEALGSFVLWSLDSILADLASHQGVVKGSKKAVQQSSPKSQVAMFVVLAMVLRRKPDVLISLLPIIKENKKYQGQDKLPVIVWVITQASQGDLVMGLYLWVYLLLPMLSVKSGCNPQSRDLILQLVERIITSPKARSILLNGAVRRGERVVPPWALDSLLRVTFPLPSARVKATERFEAVYPTLREVALASSPGSKAIKHLAQQILSFAIKAAGEANSDLSKEASDIFIWCLTQNPECYKQWDFLYMDNLEASVVVLRKLSGEWKEYFVKHPTLDPLRENLKSFSQKNEKALAKVDDGARHALLKDADKYCKVLLGQLSQGHGCLKSMIVLSVVLAVGAVFMSQNLHLWDYSQLTEMLNLS

SEQ ID NO: 54883 - protein, 418 aa, Glycine max
  peptide (1)..(418): Ceres Seq. ID no. 12581805
  misc_feature (1)..(403): Homolog of NCBI NO: 18399392 NR Description: expressed protein
  misc_feature (1)..(403): Homolog of NCBI NO: 6671944 NR Description: unknown protein [Arabidopsis thaliana]
  misc_feature (302)..(402): Homolog of NCBI NO: 25518112 NR Description: T26J12.6 protein - Arabidopsis thaliana
  misc_feature (1)..(21): Homolog of NCBI NO: 25518112 NR Description: T26J12.6 protein - Arabidopsis thaliana
  misc_feature (36)..(244): Homolog of NCBI NO: 25518112 NR Description: T26J12.6 protein - Arabidopsis thaliana
  misc_feature (1)..(21): Homolog of NCBI NO: 15220663 NR Description: unknown protein; protein id: At1g23170.1
  misc_feature (36)..(418): Homolog of NCBI NO: 15220663 NR Description: unknown protein; protein id: At1g23170.1
  misc_feature (1)..(418): Homolog of NCBI NO: 34895518 NR Description: unnamed protein product [Oryza sativa (japonica
  misc_feature (1)..(417): Homolog of NCBI NO: 15223242 NR Description: unknown protein; protein id: At1g70770.1
MRFADYFGRAFSSVSGAQFPWLKTFKESTVAKIVDIPLLHISEDIYKISTDWVSHRSYEALGSFVLWSLDSILADLASHQGVVKGSKKAVQQSSPKSQVAMFVVLAMVLRRKPDVLISLLPIIKENKKYQGQDKLPVIVWVITQASQGDLVMGLYLWVYLLLPMLSVKSGCNPQSRDLILQLVERIITSPKARSILLNGAVRRGERVVPPWALDSLLRVTFPLPSARVKATERFEAVYPTLREVALASSPGSKAIKHLAQQILSFAIKAAGEANSDLSKEASDIFIWCLTQNPECYKQWDFLYMDNLEASVVVLRKLSGEWKEYFVKHPTLDPLRENLKSFSQKNEKALAKVDDGARHALLKDADKYCKVLLGQLSQGHGCLKSMIVLSVVLAVGAVFMSQNLHLWDYSQLTEMLNLS

SEQ ID NO: 54884 - DNA, 1227 bp, Glycine max
  misc_feature (1)..(1227): Ceres Seq. ID no. 14304830
agctttaagcttttaacagtcaaaacttactacaacccagatcaattgcagggactaatatggggataacaaaaattttaatcagttataatttttctgttcttgaaaggtaaagtaggacagtggtgtgaaattggtggaaagaaaaaacatcagtgatcttgagtaactaacaatccatccgtgtaaaacgtgattggatttgggtcagtaatttaatgtacgaattacgaggtggcagcgactttaagtgttgaatggtgtgcaacatagaatcgcattggcgcgaacacgatgatgaggtcaaagatagtgttgtttggagactccatcacggagcaatcgatccgagagaatggatggggtgttcctcttgccaatgcctattctcgcagggctgatgtacttgttcgtggttatggtggatacaacactaggtgggctatgttcttactgggccatctcttccctctggactcaactaaaccacctactgctaccacaattttctttggcgctaatgatgcagctttgttaggaagaaccagtgaaaggcaacatgtacctattgaagaattcaaagagaacctcagaaaatttgttcgacacttaaaggattgctcaccaactatggtaattgtgcttattactccacctccacttagtgaggaaggacgcctggcatacgtaagatccgtatatggtgagaatgctactaaaatacctgaaagaacaaatgaagtaactggtcaatatgcaaatgcctgtgttgaggtagcaaaggaaatgggcgtgtggtatatcaatctatggtccaaaatgcaagaaaccgatggctggcaaacaaaatttttgtgggatggattgcacctgacaacagaaggaaatgcagtagtctacgaagaagtgataaatgtgttcaatgaagcagggctttctgctgataacatgccaatggatttccctcaccactcaaaaattgattccaaacatcctgagagagctttccagcagaatgtttgtgatatcccattgtgacactgctttggtctagtctagcaattttataccacgttctatttgatgatctagattttcttccagaactatattcgagtttaatgctttgatgaaaccacggtgaagaatattttttgtaatgacgtctgattcatgtagttcatctcatataataatggaataaaactattgttgttgtaatgcttt

SEQ ID NO: 54885 - protein, 247 aa, Glycine max
  peptide (1)..(247): Ceres Seq. ID no. 14304831
  misc_feature (6)..(205): Pfam Name: GDSL-like Lipase/Acylhydrolase Pfam Description: GDSL-like Lipase/Acylhydrolase
  misc_feature (2)..(224): Homolog of NCBI NO: 16974631 NR Description: At2g38180/F16M14.11 [Arabidopsis thaliana]
  misc_feature (1)..(235): Homolog of NCBI NO: 27754071 NR Description: hypothetical protein 4833421E05Rik [Mus musculus]
  misc_feature (1)..(235): Homolog of NCBI NO: 27478045 NR Description: similar to hypothetical protein 4833421E05Rik
  misc_feature (3)..(230): Homolog of NCBI NO: 32352168 NR Description: hypothetical protein [Oryza sativa (japonica
  misc_feature (2)..(247): Homolog of NCBI NO: 13161403 NR Description: CPRD49 [Vigna unguiculata]
  misc_feature (2)..(239): Homolog of NCBI NO: 34903948 NR Description: OSJNBa0038J17.19 [Oryza sativa (japonica
  misc_feature (2)..(240): Homolog of NCBI NO: 15242539 NR Description: GDSL-motif lipase/hydrolase protein [Arabidopsis
  misc_feature (1)..(240): Homolog of NCBI NO: 38454102 NR Description: At5g45920 [Arabidopsis thaliana]
  misc_feature (1)..(239): Homolog of NCBI NO: 37535366 NR Description: putative esterase [Oryza sativa (japonica
  misc_feature (2)..(240): Homolog of NCBI NO: 15242002 NR Description: GDSL-motif lipase/hydrolase protein [Arabidopsis
MMRSKIVLFGDSITEQSIRENGWGVPLANAYSRRADVLVRGYGGYNTRWAMFLLGHLFPLDSTKPPTATTIFFGANDAALLGRTSERQHVPIEEFKENLRKFVRHLKDCSPTMVIVLITPPPLSEEGRLAYVRSVYGENATKIPERTNEVTGQYANACVEVAKEMGVWYINLWSKMQETDGWQTKFLWDGLHLTTEGNAVVYEEVINVFNEAGLSADNMPMDFPHHSKIDSKHPERAFQQNVCDIPL

SEQ ID NO: 54886 - protein, 246 aa, Glycine max
  peptide (1)..(246): Ceres Seq. ID no. 14304832
  misc_feature (5)..(204): Pfam Name: GDSL-like Lipase/Acylhydrolase Pfam Description: GDSL-like Lipase/Acylhydrolase
  misc_feature (1)..(223): Homolog of NCBI NO: 16974631 NR Description: At2g38180/F16M14.11 [Arabidopsis thaliana]
  misc_feature (1)..(234): Homolog of NCBI NO: 27754071 NR Description: hypothetical protein 4833421E05Rik [Mus musculus]
  misc_feature (1)..(234): Homolog of NCBI NO: 27478045 NR Description: similar to hypothetical protein 4833421E05Rik
  misc_feature (2)..(229): Homolog of NCBI NO: 32352168 NR Description: hypothetical protein [Oryza sativa (japonica
  misc_feature (1)..(246): Homolog of NCBI NO: 13161403 NR Description: CPRD49 [Vigna unguiculata]
  misc_feature (1)..(238): Homolog of NCBI NO: 34903948 NR Description: OSJNBa0038J17.19 [Oryza sativa (japonica
  misc_feature (1)..(239): Homolog of NCBI NO: 15242539 NR Description: GDSL-motif lipase/hydrolase protein [Arabidopsis
  misc_feature (1)..(239): Homolog of NCBI NO: 38454102 NR Description: At5g45920 [Arabidopsis thaliana]
  misc_feature (1)..(238): Homolog of NCBI NO: 37535366 NR Description: putative esterase [Oryza sativa (japonica
  misc_feature (1)..(239): Homolog of NCBI NO: 15242002 NR Description: GDSL-motif lipase/hydrolase protein [Arabidopsis
MRSKIVLFGDSITEQSIRENGWGVPLANAYSRRADVLVRGYGGYNTRWAMFLLGHLFPLDSTKPPTATTIFFGANDAALLGRTSERQHVPIEEFKENLRKFVRHLKDCSPTMVIVLITPPPLSEEGRLAYVRSVYGENATKIPERTNEVTGQYANACVEVAKEMGVWYINLWSKMQETDGWQTKFLWDGLHLTTEGNAVVYEEVINVFNEAGLSADNMPMDFPHHSKIDSKHPERAFQQNVCDIPL

SEQ ID NO: 54887 - protein, 197 aa, Glycine max
  peptide (1)..(197): Ceres Seq. ID no. 14304833
  misc_feature (1)..(155): Pfam Name: GDSL-like Lipase/Acylhydrolase Pfam Description: GDSL-like Lipase/Acylhydrolase
  misc_feature (1)..(174): Homolog of NCBI NO: 16974631 NR Description: At2g38180/F16M14.11 [Arabidopsis thaliana]
  misc_feature (1)..(185): Homolog of NCBI NO: 27754071 NR Description: hypothetical protein 4833421E05Rik [Mus musculus]
  misc_feature (1)..(185): Homolog of NCBI NO: 27478045 NR Description: similar to hypothetical protein 4833421E05Rik
  misc_feature (1)..(180): Homolog of NCBI NO: 32352168 NR Description: hypothetical protein [Oryza sativa (japonica
  misc_feature (1)..(197): Homolog of NCBI NO: 13161403 NR Description: CPRD49 [Vigna unguiculata]
  misc_feature (1)..(189): Homolog of NCBI NO: 34903948 NR Description: OSJNBa0038J17.19 [Oryza sativa (japonica
  misc_feature (1)..(190): Homolog of NCBI NO: 15242539 NR Description: GDSL-motif lipase/hydrolase protein [Arabidopsis
  misc_feature (1)..(190): Homolog of NCBI NO: 38454102 NR Description: At5g45920 [Arabidopsis thaliana]
  misc_feature (1)..(189): Homolog of NCBI NO: 37535366 NR Description: putative esterase [Oryza sativa (japonica
  misc_feature (1)..(190): Homolog of NCBI NO: 15242002 NR Description: GDSL-motif lipase/hydrolase protein [Arabidopsis
MFLLGHLFPLDSTKPPTATTIFFGANDAALLGRTSERQHVPIEEFKENLRKFVRHLKDCSPTMVIVLITPPPLSEEGRLAYVRSVYGENATKIPERTNEVTGQYANACVEVAKEMGVWYINLWSKMQETDGWQTKFLWDGLHLTTEGNAVVYEEVINVFNEAGLSADNMPMDFPHHSKIDSKHPERAFQQNVCDIPL

SEQ ID NO: 54888 - DNA, 690 bp, Glycine max
  misc_feature (1)..(690): Ceres Seq. ID no. 15227245
ccgggccccccctcgagtcagctwcgtaggccccccccccccaccgcagagaggatcaagggccacaacttctaatttatcagtttctcgttgatgatcttgacagtatggtgagtgatgctatgtggacagatgctaatggcatcgtgggttgtgaggattctaaacagagaaaggagctaaaggggtttcttcttgattgtgttatagaatatctagaatcaaattgctgccaatattttaactctggattcaagaaatggacgaagctgcccttgtgcatggaagctgagatgttggctcaagaggtgaagagggagatcaacaagtggttatctatggttgggatggtgcctgatgaaataatagaatgggaaatgagccactccttggggaaatggactgactttgacattgaagcatttgaggctggtgttgatatagatggggatatacttcaaattttggttgatgaagttgttcaagacctgcaggttgcaagcaggggcaccatttacttctaaaattcctttcagctgatcataggatatacttctaaaattcctttctctggtgagatatgtgatctaacaaggtgtattttttgtacaaataggattatgttatttctaatggaggcttttttttggggctctttgaattagtggacaaaataaagtccattgacct

SEQ ID NO: 54889 - protein, 138 aa, Glycine max
  peptide (1)..(138): Ceres Seq. ID no. 15227246
  misc_feature (1)..(128): Homolog of NCBI NO: 15230041 NR Description: expressed protein [Arabidopsis thaliana]
  misc_feature (1)..(128): Homolog of NCBI NO: 7485246 NR Description: hypothetical protein A_IG002P16.18 - Arabidopsis
  misc_feature (1)..(128): Homolog of NCBI NO: 15240405 NR Description: expressed protein [Arabidopsis thaliana]
  misc_feature (1)..(128): Homolog of NCBI NO: 37201986 NR Description: At5g26910 [Arabidopsis thaliana]
  misc_feature (1)..(127): Homolog of NCBI NO: 34895600 NR Description: OSJNBa0083M16.12 [Oryza sativa (japonica
  misc_feature (1)..(132): Homolog of NCBI NO: 34897244 NR Description: hypothetical protein [Oryza sativa (japonica
MVSDAMWTDANGIVGCEDSKQRKELKGFLLDCVIEYLESNCCQYFNSGFKKWTKLPLCMEAEMLAQEVKREINKWLSMVGMVPDEIIEWEMSHSLGKWTDFDIEAFEAGVDIDGDILQILVDEVVQDLQVASRGTIYF

SEQ ID NO: 54890 - protein, 133 aa, Glycine max
  peptide (1)..(133): Ceres Seq. ID no. 15227247
  misc_feature (1)..(123): Homolog of NCBI NO: 15230041 NR Description: expressed protein [Arabidopsis thaliana]
  misc_feature (1)..(123): Homolog of NCBI NO: 7485246 NR Description: hypothetical protein A_IG002P16.18 - Arabidopsis
  misc_feature (1)..(123): Homolog of NCBI NO: 15240405 NR Description: expressed protein [Arabidopsis thaliana]
  misc_feature (1)..(123): Homolog of NCBI NO: 37201986 NR Description: At5g26910 [Arabidopsis thaliana]
  misc_feature (1)..(122): Homolog of NCBI NO: 34895600 NR Description: OSJNBa0083M16.12 [Oryza sativa (japonica
  misc_feature (1)..(127): Homolog of NCBI NO: 34897244 NR Description: hypothetical protein [Oryza sativa (japonica
MWTDANGIVGCEDSKQRKELKGFLLDCVIEYLESNCCQYFNSGFKKWTKLPLCMEAEMLAQEVKREINKWLSMVGMVPDEIIEWEMSHSLGKWTDFDIEAFEAGVDIDGDILQILVDEVVQDLQVASRGTIYF

SEQ ID NO: 54891 - protein, 80 aa, Glycine max
  peptide (1)..(80): Ceres Seq. ID no. 15227248
  misc_feature (1)..(70): Homolog of NCBI NO: 15230041 NR Description: expressed protein [Arabidopsis thaliana]
  misc_feature (1)..(70): Homolog of NCBI NO: 7485246 NR Description: hypothetical protein A_IG002P16.18 - Arabidopsis
  misc_feature (1)..(70): Homolog of NCBI NO: 15240405 NR Description: expressed protein [Arabidopsis thaliana]
  misc_feature (1)..(70): Homolog of NCBI NO: 37201986 NR Description: At5g26910 [Arabidopsis thaliana]
  misc_feature (1)..(69): Homolog of NCBI NO: 34895600 NR Description: OSJNBa0083M16.12 [Oryza sativa (japonica
  misc_feature (1)..(74): Homolog of NCBI NO: 34897244 NR Description: hypothetical protein [Oryza sativa (japonica
MEAEMLAQEVKREINKWLSMVGMVPDEIIEWEMSHSLGKWTDFDIEAFEAGVDIDGDILQILVDEVVQDLQVASRGTIYF

SEQ ID NO: 54892 - DNA, 1362 bp, Glycine max
  misc_feature (1)..(1362): Ceres Seq. ID no. 14307351
actctcactggttttctctctccctttctctctctatctctgctctgtgctttttctctctgcagaatttcccaaatttctccactaccctatctcctctgctcctgaaactcgcacattcttcaccagcaatgcacgatcttcaatacgaatgcaatatcgatatttgacatccgagtatcagtgcttgagcgggtgaattggaaaatgctagaggcaatggaaagttcggtcaatggtggcttctcccatttgcagagctgtggagatagcagcgaagaagagttatcggtgcttcctcgtcacaccaaagttgtcgtaaccggaaataaccgcaccaaatcggtgctcgttggtcttcaaggtgtcgttaagaaagccgttggactaggcggatggcattggctggttcttacaaatggtattgaagtgaagctacaaaggaatgcacttagcgtgattgaagcacccactggtaatgaggaagatgatgaccttgagtttgaaaatatgccgtggaatggatcagatatggcatcggacgacacacacaagtcccacaaatcgaggcatagaatgtatagaacaatgggatcatctcacaagaccatgagtaggtccttctctggcgattcacagtcgaaggggtccgtttctatgcctaatgggtccgcgaaggtggacttgagcaaacttgaaatggctgcactgtggagatattggcgacattttaatctagtggatgcggtcccaaacccatcaaaagagcagctagtagacgttgttcagaggcatttcatgtcgcagcaaatcgacgaattgcaggtgattgtgggatttgtccaagctgcaaagaggctttagactgtatgcaattgagatggaatgatgcgagaaatgatatttgaatgaaaagtataattgtctatgctaacaaagataatgtatgtaatatccacttcccttcgtattatgtagcatgttttatcggtgatttttaactttctgttgtagtagtaggttagtagtttgaggttatagaggttcttactcttttgtagccacccggttgtgtagatatatatgacattgcaactggatcatcagggaagtcaccaccatggctttcttttcaacttgattcgatgtattactgactggggaagtgggttttcagagaccttaatgtatatatattttagtttctccctttgattcgtcttagatgaattcaagtgttgtgttgctccgggtggagtagtggatcgttgctaccatctccaagttaaagatactgttcaaatactattgagctaatgctagtgtgcgttcacaaagacaaaaatcactttatcattattc

SEQ ID NO: 54893 - protein, 218 aa, Glycine max
  peptide (1)..(218): Ceres Seq. ID no. 14307352
  misc_feature (200)..(218): Homolog of NCBI NO: 38567956 NR Description: OSJNBb0115I21.12 [Oryza sativa (japonica
  misc_feature (21)..(94): Homolog of NCBI NO: 38567956 NR Description: OSJNBb0115I21.12 [Oryza sativa (japonica
  misc_feature (21)..(218): Homolog of NCBI NO: 38346468 NR Description: OSJNBa0019G23.16 [Oryza sativa (japonica
  misc_feature (24)..(209): Homolog of NCBI NO: 37533376 NR Description: hypothetical protein [Oryza sativa (japonica
  misc_feature (24)..(209): Homolog of NCBI NO: 18767383 NR Description: Hypothetical protein [Oryza sativa]
  misc_feature (1)..(218): Homolog of NCBI NO: 15222092 NR Description: hypothetical protein [Arabidopsis thaliana]
  misc_feature (1)..(218): Homolog of NCBI NO: 18394724 NR Description: expressed protein [Arabidopsis thaliana]
  misc_feature (1)..(218): Homolog of NCBI NO: 25372870 NR Description: protein F18O14.5 [imported] - Arabidopsis
MLEAMESSVNGGFSHLQSCGDSSEEELSVLPRHTKVVVTGNNRTKSVLVGLQGVVKKAVGLGGWHWLVLTNGIEVKLQRNALSVIEAPTGNEEDDDLEFENMPWNGSDMASDDTHKSHKSRHRMYRTMGSSHKTMSRSFSGDSQSKGSVSMPNGSAKVDLSKLEMAALWRYWRHFNLVDAVPNPSKEQLVDVVQRHFMSQQIDELQVIVGFVQAAKRL

SEQ ID NO: 54894 - protein, 214 aa, Glycine max
  peptide (1)..(214): Ceres Seq. ID no. 14307353
  misc_feature (196)..(214): Homolog of NCBI NO: 38567956 NR Description: OSJNBb0115I21.12 [Oryza sativa (japonica
  misc_feature (17)..(90): Homolog of NCBI NO: 38567956 NR Description: OSJNBb0115I21.12 [Oryza sativa (japonica
  misc_feature (17)..(214): Homolog of NCBI NO: 38346468 NR Description: OSJNBa0019G23.16 [Oryza sativa (japonica
  misc_feature (20)..(205): Homolog of NCBI NO: 37533376 NR Description: hypothetical protein [Oryza sativa (japonica
  misc_feature (20)..(205): Homolog of NCBI NO: 18767383 NR Description: Hypothetical protein [Oryza sativa]
  misc_feature (1)..(214): Homolog of NCBI NO: 15222092 NR Description: hypothetical protein [Arabidopsis thaliana]
  misc_feature (1)..(214): Homolog of NCBI NO: 18394724 NR Description: expressed protein [Arabidopsis thaliana]
  misc_feature (1)..(214): Homolog of NCBI NO: 25372870 NR Description: protein F18O14.5 [imported] - Arabidopsis
MESSVNGGFSHLQSCGDSSEEELSVLPRHTKVVVTGNNRTKSVLVGLQGVVKKAVGLGGWHWLVLTNGIEVKLQRNALSVIEAPTGNEEDDDLEFENMPWNGSDMASDDTHKSHKSRHRMYRTMGSSHKTMSRSFSGDSQSKGSVSMPNGSAKVDLSKLEMAALWRYWRHFNLVDAVPNPSKEQLVDVVQRHFMSQQIDELQVIVGFVQAAKRL

SEQ ID NO: 54895 - protein, 117 aa, Glycine max
  peptide (1)..(117): Ceres Seq. ID no. 14307354
  misc_feature (99)..(117): Homolog of NCBI NO: 38567956 NR Description: OSJNBb0115I21.12 [Oryza sativa (japonica
  misc_feature (1)..(117): Homolog of NCBI NO: 38346468 NR Description: OSJNBa0019G23.16 [Oryza sativa (japonica
  misc_feature (1)..(108): Homolog of NCBI NO: 37533376 NR Description: hypothetical protein [Oryza sativa (japonica
  misc_feature (1)..(108): Homolog of NCBI NO: 18767383 NR Description: Hypothetical protein [Oryza sativa]
  misc_feature (1)..(117): Homolog of NCBI NO: 15222092 NR Description: hypothetical protein [Arabidopsis thaliana]
  misc_feature (1)..(117): Homolog of NCBI NO: 18394724 NR Description: expressed protein [Arabidopsis thaliana]
  misc_feature (1)..(117): Homolog of NCBI NO: 25372870 NR Description: protein F18O14.5 [imported] - Arabidopsis
MPWNGSDMASDDTHKSHKSRHRMYRTMGSSHKTMSRSFSGDSQSKGSVSMPNGSAKVDLSKLEMAALWRYWRHFNLVDAVPNPSKEQLVDVVQRHFMSQQIDELQVIVGFVQAAKRL

SEQ ID NO: 54896 - DNA, 1690 bp, Glycine max
  misc_feature (1)..(1690): Ceres Seq. ID no. 12581920
cagctacgtaggccccccccccgattcataactttgcgggttaggctcagacccaatctctattattagtattacatatcttggtcttaattttgattgaagctgaagcatcttggaggaaccaaatggctccactcttgtaccttggttgcagaagggtgctcctgttctctcttcttttgttcttttttgtttctgtttgctcagaacctcatcaaccagagagcaaagccttgtctggtgatggcagcagcagaagcagaagaagaatgttgttgttggagttggattctgaaaaggaagaatttgaacaacccctgaaaaagaaatccaccaaaaaccaaaccaagttaatcaaacccaccactagcctctcctccaaaaaccaaaccaaaaccatcaaatccaataaccttagttcctccaaaaaccaaaccaagctagccaaaaccaaagccaccaccctcaccgacaccgaggttgtcgtgaagaagctcaactccaccaccttaaagtccaagaagctgaattccacatccaaaggctccacgaaatcatcctcattggatctcgcgaaaacaagtggtactagtggcggcaagaacaaaacgacaaaagccaccgccaccaaggacaaggaagttaccaataaaaagaccaagttggatcaaaccgaagaatccgacaagcagagtaataagaagagtaacaccaccaacaacaagaagaagaaagaacaacaaggacaacctagttgggtgttcgaagacgaggtggacgatgatttggtttcggagttcaaagatctacccatgaagttccaacaaacactgatcccagacctggaacgaatctccacaacctcaaaagcctacataacaaaagccaacaaagagatcacgagagggttcaaaccctacgttggcaacaagtacgcacccaccatcaccactttactctcttgcgcattcgctttgatccctttgcttttggcctcactcctcttcaacaaaatcaaagcctatttctcactccaaaagctcttaatcttcatccaagcctacctcgctatctacttctccattctttgcctttcttccttcgtcactggccttgaacctctcaggtttttctactctgcttcgcgctccacctatctttgcctgcaggtcctccaaactctcgcttacgttctctaccttttgctgctactcatgtatctcgttttggtgttctcaactgattctggattgggctccaaattcttgggcctggcccaaacttttgtgggcttttccgtggggttgcattactacgtgactgtgtttcacagggttgtgttgaagcaaccgcccaagaccaattggaagattcacgccatttatgccacgtgttttttcctcatttgtgtcattgctagggctgatagaaagaagaagacctacttggaagaaggtggagaagagggcaagaaaaattgaaattagtcaaattggctatatatattagctattagctatacctacattttcgttttttttcctcataattaaaattttcaaattatccaaagcaacatataccaatattgttctattatattgtagcgaaatgccgtaaggcttttggcttttgtgtcaaccagcattcagattcgttccataaataaattcatgatgaggtgatggct

SEQ ID NO: 54897 - protein, 451 aa, Glycine max
  peptide (1)..(451): Ceres Seq. ID no. 12581921
  misc_feature (1)..(451): Homolog of NCBI NO: 15236054 NR Description: putative protein
MAPLLYLGCRRVLLFSLLLFFFVSVCSEPHQPESKALSGDGSSRSRRRMLLLELDSEKEEFEQPLKKKSTKNQTKLIKPTTSLSSKNQTKTIKSNNLSSSKNQTKLAKTKATTLTDTEVVVKKLNSTTLKSKKLNSTSKGSTKSSSLDLAKTSGTSGGKNKTTKATATKDKEVTNKKTKLDQTEESDKQSNKKSNTTNNKKKKEQQGQPSWVFEDEVDDDLVSEFKDLPMKFQQTLIPDLERISTTSKAYITKANKEITRGFKPYVGNKYAPTITTLLSCAFALIPLLLASLLFNKIKAYFSLQKLLIFIQAYLAIYFSILCLSSFVTGLEPLRFFYSASRSTYLCLQVLQTLAYVLYLLLLLMYLVLVFSTDSGLGSKFLGLAQTFVGFSVGLHYYVTVFHRVVLKQPPKTNWKIHAIYATCFFLICVIARADRKKKTYLEEGGEEGKKN

SEQ ID NO: 54898 - protein, 403 aa, Glycine max
  peptide (1)..(403): Ceres Seq. ID no. 12581922
  misc_feature (1)..(403): Homolog of NCBI NO: 15236054 NR Description: putative protein
MLLLELDSEKEEFEQPLKKKSTKNQTKLIKPTTSLSSKNQTKTIKSNNLSSSKNQTKLAKTKATTLTDTEVVVKKLNSTTLKSKKLNSTSKGSTKSSSLDLAKTSGTSGGKNKTTKATATKDKEVTNKKTKLDQTEESDKQSNKKSNTTNNKKKKEQQGQPSWVFEDEVDDDLVSEFKDLPMKFQQTLIPDLERISTTSKAYITKANKEITRGFKPYVGNKYAPTITTLLSCAFALIPLLLASLLFNKIKAYFSLQKLLIFIQAYLAIYFSILCLSSFVTGLEPLRFFYSASRSTYLCLQVLQTLAYVLYLLLLLMYLVLVFSTDSGLGSKFLGLAQTFVGFSVGLHYYVTVFHRVVLKQPPKTNWKIHAIYATCFFLICVIARADRKKKTYLEEGGEEGKKN

SEQ ID NO: 54899 - DNA, 1027 bp, Glycine max
  misc_feature (1)..(1027): Ceres Seq. ID no. 15170299
ttttaaatctgcaacctgcatagtgagacgtagatgccctggaaaatttctgtactgtagcaaacagagtagcaccaaaacaattttggttaaagagagtgaaaaacggggttagtaaattgcaatatcatattaagggcatgttgcaaatacgagtgaatgaatgtcttcgtttacgggtgcacgttccaaagcaaatgctaagtctgaaatgatcatagctaacgagattaacctctgccccatcaacacaagtaccattacatcaacctcgccagatacaagtgccaagaatgagaagaaaaagaagtctatccttccaaagattttcggatcaaagcgaaatgggagaggttcagacgaagagacactcaaatcatcaagtgcagaagaaggagatggagttactcttgatttggagaataagattgagacgagaagaaaagcatttttggaagcggcccccatcatgagaaaaagtttctcagaaagggagactagtcctgggatcgaaggcctaaatttgtccaattttgaacggcctatgatgactatggaaactgaacttctcaggatctttgttgcagcgtggaatgtgggagtcaccaagttatgacctcaacctccaagatttcttgctagtggaaggctccgcagatatatatgttttggggtacgaacatccatgcaacaaagtgaagaagaaaaaaataacgaacgaaagaagaagaagaagaagtatccctccccttcaccttaaaatttagttttcccttctcacaagtttggcatgttcgatgattgtgtgaatttagggcggaaagtgaaatacgggaaaaatggttgcttatggtaaattttgtttggaattgagattttatacatggacgtctcgaatgctcacttatgttgtatattttgttagttggttgttttgtgtttgtatctcttgatggctacaacatctcaccctttgtgactcctcttttataaaaatatcatcccaattttttctatgaatttgaat

SEQ ID NO: 54900 - protein, 150 aa, Glycine max
  peptide (1)..(150): Ceres Seq. ID no. 15170300
  misc_feature (83)..(146): Homolog of NCBI NO: 10178171 NR Description: inositol-1, 4, 5-trisphosphate 5-phosphatase-like
  misc_feature (83)..(146): Homolog of NCBI NO: 30698095 NR Description: endonuclease/exonuclease/phosphatase family
MSSFTGARSKANAKSEMIIANEINLCPINTSTITSTSPDTSAKNEKKKKSILPKIFGSKRNGRGSDEETLKSSSAEEGDGVTLDLENKIETRRKAFLEAAPIMRKSFSERETSPGIEGLNLSNFERPMMTMETELLRIFVAAWNVGVTKL

SEQ ID NO: 54901 - protein, 134 aa, Glycine max
  peptide (1)..(134): Ceres Seq. ID no. 15170301
  misc_feature (67)..(130): Homolog of NCBI NO: 10178171 NR Description: inositol-1, 4, 5-trisphosphate 5-phosphatase-like
  misc_feature (67)..(130): Homolog of NCBI NO: 30698095 NR Description: endonuclease/exonuclease/phosphatase family
MIIANEINLCPINTSTITSTSPDTSAKNEKKKKSILPKIFGSKRNGRGSDEETLKSSSAEEGDGVTLDLENKIETRRKAFLEAAPIMRKSFSERETSPGIEGLNLSNFERPMMTMETELLRIFVAAWNVGVTKL

SEQ ID NO: 54902 - DNA, 1602 bp, Glycine max
  misc_feature (1)..(1602): Ceres Seq. ID no. 14304823
accaaacctggttcatgtttaagacacggacatgtcacgtaaaccaagccaactattactcgcagatgagacaagaaacaattaaaaaaatcaattaaaatataaaaccagtgaagttgccacataactctttgattcccattactcatttccaccatttcaccttctcaatctgtttctctgctttactaatttgtcccaaatcagaaccagattgagcttctgcacaaccagaccagagattcaacgcagaaactatgcttatccctggtccataggatctgatttggttcataagagagtagtacacgtttcattgctcgaaatagagttgaaaaatctggagtttccatgtctgagaaaccatcttcatcgttgacatctaccgtagctgctcgagaagttgatcccttgttgcaggatttgaatgaaaaaaagcagagctttaggcgcaacgtggtgtcgttagcggtggagttgaaggagctacgtagtcgcctagcttcgcaggaacaatcgtatgctaaggaaactcaaaccagacaggaagcagagacaaatgccaagaacatggaattgcaaattggaaggttgcagaagaatttggaagaaagaaatgagcagcttcaggcgtcagcctcctctgctgagaagtatctgaaggagttggatgatcttagaacacagcttgtaacaacaagagcaactgctgatgcaagtgctgcatcagctcaatcagctcagctccaatgtttagaacttgtaaaagaattaaatgagaaaaatggttcactaagagagcatgaggatcgtgtcctgaggctaggggagcaactagacaatttacagaaggatcttcaggcaagggaatcttcacagaaacaattgaaagatgaagttttgaggattgagcacgatattatggaggctcttgcaaaagccggagagaacaagaattgtgaactgcggaaaatattggatgaggtttctcctaaaaattttgagaagatgaataagattctaggtgttaaggatgatgaaatagcaaaacttaaggatgaaattaagatcatgtctgctcactggaagctcaagactaaggaattagagtcacagttggagaaacagcggcgtgctgatcaagagctgaagaagaaagtgttgaagttagaattctgtctgcaggaagctcgttctcagacacgaaaactgcaaaggatgggtgaacgacgggacaaagctatcaaagaactgagagatcaattagctgcaaagcaacaaagagaagttgcagccgcagataagctaaaccagaatttctgggacacttctggattcaaaatggtggtctcgatgtccatgttgatcttggtggtattttcaaggcggtgaaaccattcctatatccaaaacaattcttgtatatagacccatatataccttcaaattctaggagtctagacaagttgtagaagccattttgcgcggcagtttttatagataatctactagctttagcttgtgcaaaatgtacgcgtagcaccaggatcagaaggcatttttgcggtgatctataaaattacattgcgtagttgcatttac

SEQ ID NO: 54903 - protein, 346 aa, Glycine max
  peptide (1)..(346): Ceres Seq. ID no. 14304824
  misc_feature (25)..(322): Pfam Name: Myosin tail Pfam Description: Myosin tail
  misc_feature (16)..(324): Homolog of NCBI NO: 34864325 NR Description: similar to KIAA1749 protein [Rattus norvegicus]
  misc_feature (1)..(208): Homolog of NCBI NO: 34894370 NR Description: unnamed protein product [Oryza sativa (japonica
  misc_feature (98)..(346): Homolog of NCBI NO: 34894370 NR Description: unnamed protein product [Oryza sativa (japonica
  misc_feature (241)..(336): Homolog of NCBI NO: 22329441 NR Description: myosin heavy chain -related [Arabidopsis thaliana]
  misc_feature (9)..(290): Homolog of NCBI NO: 25402551 NR Description: hypothetical protein [imported] - Arabidopsis
  misc_feature (18)..(346): Homolog of NCBI NO: 18397379 NR Description: expressed protein [Arabidopsis thaliana]
  misc_feature (18)..(346): Homolog of NCBI NO: 4097950 NR Description: plant IF-like protein [Arabidopsis thaliana]
  misc_feature (9)..(346): Homolog of NCBI NO: 22329439 NR Description: hypothetical protein [Arabidopsis thaliana]
  misc_feature (18)..(337): Homolog of NCBI NO: 7485248 NR Description: hypothetical protein A_IG002P16.20 - Arabidopsis
  misc_feature (18)..(346): Homolog of NCBI NO: 18421042 NR Description: expressed protein [Arabidopsis thaliana]
MSEKPSSSLTSTVAAREVDPLLQDLNEKKQSFRRNVVSLAVELKELRSRLASQEQSYAKETQTRQEAETNAKNMELQIGRLQKNLEERNEQLQASASSAEKYLKELDDLRTQLVTTRATADASAASAQSAQLQCLELVKELNEKNGSLREHEDRVLRLGEQLDNLQKDLQARESSQKQLKDEVLRIEHDIMEALAKAGENKNCELRKILDEVSPKNFEKMNKILGVKDDEIAKLKDEIKIMSAHWKLKTKELESQLEKQRRADQELKKKVLKLEFCLQEARSQTRKLQRMGERRDKAIKELRDQLAAKQQREVAAADKLNQNFWDTSGFKMVVSMSMLILVVFSRR

SEQ ID NO: 54904 - protein, 273 aa, Glycine max
  peptide (1)..(273): Ceres Seq. ID no. 14304825
  misc_feature (1)..(249): Pfam Name: Myosin tail Pfam Description: Myosin tail
  misc_feature (1)..(251): Homolog of NCBI NO: 34864325 NR Description: similar to KIAA1749 protein [Rattus norvegicus]
  misc_feature (1)..(135): Homolog of NCBI NO: 34894370 NR Description: unnamed protein product [Oryza sativa (japonica
  misc_feature (25)..(273): Homolog of NCBI NO: 34894370 NR Description: unnamed protein product [Oryza sativa (japonica
  misc_feature (168)..(263): Homolog of NCBI NO: 22329441 NR Description: myosin heavy chain -related [Arabidopsis thaliana]
  misc_feature (1)..(217): Homolog of NCBI NO: 25402551 NR Description: hypothetical protein [imported] - Arabidopsis
  misc_feature (1)..(273): Homolog of NCBI NO: 18397379 NR Description: expressed protein [Arabidopsis thaliana]
  misc_feature (1)..(273): Homolog of NCBI NO: 4097950 NR Description: plant IF-like protein [Arabidopsis thaliana]
  misc_feature (1)..(273): Homolog of NCBI NO: 22329439 NR Description: hypothetical protein [Arabidopsis thaliana]
  misc_feature (1)..(264): Homolog of NCBI NO: 7485248 NR Description: hypothetical protein A_IG002P16.20 - Arabidopsis
  misc_feature (1)..(273): Homolog of NCBI NO: 18421042 NR Description: expressed protein [Arabidopsis thaliana]
MELQIGRLQKNLEERNEQLQASASSAEKYLKELDDLRTQLVTTRATADASAASAQSAQLQCLELVKELNEKNGSLREHEDRVLRLGEQLDNLQKDLQARESSQKQLKDEVLRIEHDIMEALAKAGENKNCELRKILDEVSPKNFEKMNKILGVKDDEIAKLKDEIKIMSAHWKLKTKELESQLEKQRRADQELKKKVLKLEFCLQEARSQTRKLQRMGERRDKAIKELRDQLAAKQQREVAAADKLNQNFWDTSGFKMVVSMSMLILVVFSRR

SEQ ID NO: 54905 - DNA, 1252 bp, Glycine max
  misc_feature (1)..(1252): Ceres Seq. ID no. 15170265
atgcgtgctagttaatgtcttttccagaagaactgttttctgtacttcggacagtgcatctactgaggggacttagcattggacttggaatcaattactcttgtgcagaacagtggagacccttcgcagaagaagctttgtcccgagctggcagattaaaacgtggcactgtgactcttgcttaagacaggcatttctgaatggcatgccttacatgatttctagtattatcattcgttggttgcttctgatgtgtctatttcatatgaagatatctctccatcctactaaaccaactacatctagttatgatgtcacttgatgttttcacaggtaaggatgttaagcccagaggcagcaaaatgttgagtaaaatatttttttggagacactaaataggcaggtctggatcaatctagtttgttgattctgattcactggtaacttcttgtgtgacgtttaggaaagattatccgacccggaccgacccgacccgacccgaagcgagttgcagcaccgaaaaatgttcggcagaatcagagcatccacttcgtcgctcgacaccttagacggttctccgtccaagattctcaaagacgacactttctccttctacgaggctactctcatgaagctaatgcttggtgcgcgacgcgatacgagtgaggttacaaatgattcttcagttaattcaccttctgcggaagaagcaaatctcaagccagattttaatcctgcaacaagcacttcttgttccgagacaacgatgatggacacggagtctgataacgataactcttcacctagggttactgatcacgtttctagtgggagctcggaacagctaaagcagagcaacgtttccattcttcatttcttcaaagttaaggataccggacaggccggtgtgtcttcttccgaagaggcaacaacgtcaatgcggaatggaagttctgaatctatctcatcaatttgtgttgaatctgattgcagaagtgaagtggaaggtgttcaaattttgcaatattgtgaaatgtcggattaaaggttatacaaatatttattactcctactgcttctatcagttaaatgccatgctaaatatttttctgttgtgttgtactgtatctcactctggttacacttgagtgtggaccatgtattgttatattagatacactggtttttataccaaagtttggtaaattaagagtgtgtttccagtgaataaattagatgaagttgcaaagtt

SEQ ID NO: 54906 - protein, 173 aa, Glycine max
  peptide (1)..(173): Ceres Seq. ID no. 15170266
  misc_feature (1)..(127): Homolog of NCBI NO: 18408641 NR Description: expressed protein [Arabidopsis thaliana]
MFGRIRASTSSLDTLDGSPSKILKDDTFSFYEATLMKLMLGARRDTSEVTNDSSVNSPSAEEANLKPDFNPATSTSCSETTMMDTESDNDNSSPRVTDHVSSGSSEQLKQSNVSILHFFKVKDTGQAGVSSSEEATTSMRNGSSESISSICVESDCRSEVEGVQILQYCEMSD

SEQ ID NO: 54907 - protein, 138 aa, Glycine max
  peptide (1)..(138): Ceres Seq. ID no. 15170267
  misc_feature (1)..(92): Homolog of NCBI NO: 18408641 NR Description: expressed protein [Arabidopsis thaliana]
MKLMLGARRDTSEVTNDSSVNSPSAEEANLKPDFNPATSTSCSETTMMDTESDNDNSSPRVTDHVSSGSSEQLKQSNVSILHFFKVKDTGQAGVSSSEEATTSMRNGSSESISSICVESDCRSEVEGVQILQYCEMSD

SEQ ID NO: 54908 - protein, 135 aa, Glycine max
  peptide (1)..(135): Ceres Seq. ID no. 15170268
  misc_feature (1)..(89): Homolog of NCBI NO: 18408641 NR Description: expressed protein [Arabidopsis thaliana]
MLGARRDTSEVTNDSSVNSPSAEEANLKPDFNPATSTSCSETTMMDTESDNDNSSPRVTDHVSSGSSEQLKQSNVSILHFFKVKDTGQAGVSSSEEATTSMRNGSSESISSICVESDCRSEVEGVQILQYCEMSD

SEQ ID NO: 54909 - DNA, 566 bp, Glycine max
  misc_feature (1)..(566): Ceres Seq. ID no. 13581144
atatatggagagaatggagtttcagacagcaataaattatattcagaggaagtgaagaaggataatatcattagccctaaaatgaagaatgtaactgtgaaatggaatccctgttctgagaaagagcatcagttttatatttcagaagctgaactgcaaatgcatcaagctaagacgccattgtggggaaagactgggatatattttcattcagtgggtaaagaggctactttgatgatggatgaagaagctgctctcgaaggggaatttgagatcgaaaagattccaactcgtgtgatacaagctaggtcaaaagacttggttccaatttttgactatattcagacctcaaaatttcaacaaataaggtctgctttgatgactaactaattaacttactaattatctattaggtaggtcaaaagatttaggctttcgacattttgctattaatttttttgtcataacgacattacctcactttcgaaggctagagaataccaaaattgattatgttcatattgcatgtactctttgctgcatgcaaggagacagtttatttatgg

SEQ ID NO: 54910 - protein, 129 aa, Glycine max
  peptide (1)..(129): Ceres Seq. ID no. 13581145
  misc_feature (1)..(122): Homolog of NCBI NO: 15239726 NR Description: expressed protein [Arabidopsis thaliana]
  misc_feature (1)..(123): Homolog of NCBI NO: 34908756 NR Description: P0415A04.11 [Oryza sativa (japonica
IYGENGVSDSNKLYSEEVKKDNIISPKMKNVTVKWNPCSEKEHQFYISEAELQMHQAKTPLWGKTGIYFHSVGKEATLMMDEEAALEGEFEIEKIPTRVIQARSKDLVPIFDYIQTSKFQQIRSALMTN

SEQ ID NO: 54911 - protein, 102 aa, Glycine max
  peptide (1)..(102): Ceres Seq. ID no. 13581146
  misc_feature (1)..(95): Homolog of NCBI NO: 15239726 NR Description: expressed protein [Arabidopsis thaliana]
  misc_feature (1)..(96): Homolog of NCBI NO: 34908756 NR Description: P0415A04.11 [Oryza sativa (japonica
MKNVTVKWNPCSEKEHQFYISEAELQMHQAKTPLWGKTGIYFHSVGKEATLMMDEEAALEGEFEIEKIPTRVIQARSKDLVPIFDYIQTSKFQQIRSALMTN

SEQ ID NO: 54912 - protein, 76 aa, Glycine max
  peptide (1)..(76): Ceres Seq. ID no. 13581147
  misc_feature (1)..(69): Homolog of NCBI NO: 15239726 NR Description: expressed protein [Arabidopsis thaliana]
  misc_feature (1)..(70): Homolog of NCBI NO: 34908756 NR Description: P0415A04.11 [Oryza sativa (japonica
MHQAKTPLWGKTGIYFHSVGKEATLMMDEEAALEGEFEIEKIPTRVIQARSKDLVPIFDYIQTSKFQQIRSALMTN

SEQ ID NO: 54913 - DNA, 1107 bp, Glycine max
  misc_feature (1)..(1107): Ceres Seq. ID no. 14303359
ttttctctctctctctccccactttcatctgtaacaagttgtcaagggcgtgtgtttttgccccacttgggagttgggacactattctatttaatttaatttcacttctggtgagagggcctcaactcttctctacttctgtgctccaatttcctgttgcttcatgcatggctccctaagggaagaaagcttgtcatttgactcttattacgttatcctgtttgcaaatttatttgctctacaatctgcttcacaggtttctctctctgtttctgctggagttgttcaaatgggagaaagagttttattctctacgtagagtttggtagacaaagataatattttgagataatgctagttccacttgccccgtaccctccaccccctccaccagctccatatacgcctccaccaaatggtgcacagagtcaactagtctgttctgggtgtagaaaccttctgctctatccagttggagccacctctgtgtgctgtgctgtttgcaatgcagtcacaacagtgccacctcctggcacagaaatggcccagttagtttgtggaggctgtcacactttcctcatgtacatccgtggagccacaagtgtgcaatgctcttgctgtcacacggtcaatctagctttggaagcaaatctggtggcgcatgtcaactgtgggaactgtaagatgctactcaggtaccaatatggagcaagatccgtgaaatgtgccgtttgcagttttgtaacgtcagttggggcctcgacaagcaccactgagcagaaattcagcacctaaatcttactgtaaaattggtgacagacaccacgaccttggttttaatcaaatatcgcccttgaggaataacgagtgcatatgagatagctgaggaaattttcttaacatgtatagagctatttttcccttgagtgaaataattaaataaattttgtattattggtgtaccatgtaatgctttatttgtaagcagtgtaagcctctaaaggaatgagtagtggagtttatagttctccaatttcaattgcagtgtgccaaaaagctatttggaataactatatatgataagattattgattctgagtgcttttg

SEQ ID NO: 54914 - protein, 147 aa, Glycine max
  peptide (1)..(147): Ceres Seq. ID no. 14303360
  misc_feature (64)..(138): Homolog of NCBI NO: 32400832 NR Description: 18S subunit ribosomal protein [Triticum aestivum]
  misc_feature (58)..(137): Homolog of NCBI NO: 17981378 NR Description: zinc finger protein LSD1 [Brassica oleracea]
  misc_feature (25)..(134): Homolog of NCBI NO: 29467531 NR Description: P0582D05.23 [Oryza sativa (japonica
  misc_feature (25)..(134): Homolog of NCBI NO: 17981380 NR Description: zinc finger protein LSD2 [Brassica oleracea]
  misc_feature (25)..(137): Homolog of NCBI NO: 30685085 NR Description: zinc-finger protein Lsd1 [Arabidopsis thaliana]
  misc_feature (25)..(137): Homolog of NCBI NO: 30685083 NR Description: zinc-finger protein Lsd1 [Arabidopsis thaliana]
  misc_feature (1)..(98): Homolog of NCBI NO: 25403154 NR Description: probable zinc-finger protein, 7043-7771
  misc_feature (1)..(147): Homolog of NCBI NO: 34905200 NR Description: P0672D01.2 [Oryza sativa (japonica
  misc_feature (1)..(144): Homolog of NCBI NO: 30692719 NR Description: zinc-finger protein -related [Arabidopsis
  misc_feature (1)..(146): Homolog of NCBI NO: 18398482 NR Description: zinc-finger protein -related [Arabidopsis
MLVPLAPYPPPPPPAPYTPPPNGAQSQLVCSGCRNLLLYPVGATSVCCAVCNAVTTVPPPGTEMAQLVCGGCHTFLMYIRGATSVQCSCCHTVNLALEANLVAHVNCGNCKMLLRYQYGARSVKCAVCSFVTSVGASTSTTEQKFST

SEQ ID NO: 54915 - protein, 84 aa, Glycine max
  peptide (1)..(84): Ceres Seq. ID no. 14303361
  misc_feature (1)..(75): Homolog of NCBI NO: 32400832 NR Description: 18S subunit ribosomal protein [Triticum aestivum]
  misc_feature (1)..(74): Homolog of NCBI NO: 17981378 NR Description: zinc finger protein LSD1 [Brassica oleracea]
  misc_feature (1)..(71): Homolog of NCBI NO: 29467531 NR Description: P0582D05.23 [Oryza sativa (japonica
  misc_feature (1)..(71): Homolog of NCBI NO: 17981380 NR Description: zinc finger protein LSD2 [Brassica oleracea]
  misc_feature (1)..(74): Homolog of NCBI NO: 30685085 NR Description: zinc-finger protein Lsd1 [Arabidopsis thaliana]
  misc_feature (1)..(74): Homolog of NCBI NO: 30685083 NR Description: zinc-finger protein Lsd1 [Arabidopsis thaliana]
  misc_feature (1)..(35): Homolog of NCBI NO: 25403154 NR Description: probable zinc-finger protein, 7043-7771
  misc_feature (1)..(84): Homolog of NCBI NO: 34905200 NR Description: P0672D01.2 [Oryza sativa (japonica
  misc_feature (1)..(81): Homolog of NCBI NO: 30692719 NR Description: zinc-finger protein -related [Arabidopsis
  misc_feature (1)..(83): Homolog of NCBI NO: 18398482 NR Description: zinc-finger protein -related [Arabidopsis
MAQLVCGGCHTFLMYIRGATSVQCSCCHTVNLALEANLVAHVNCGNCKMLLRYQYGARSVKCAVCSFVTSVGASTSTTEQKFST

SEQ ID NO: 54916 - DNA, 937 bp, Glycine max
  misc_feature (1)..(937): Ceres Seq. ID no. 15170269
gaagatgcttcttcttatatgaagaatgcatctcaagtagatattccctttcctggaccattgcaagtttcaaaatcaagtggcttcgcatgggcaaaaaggcgtagagatgacacttcagttagatcccacagtcggtctatttctagaggatatatctttaattcatcagaaacttctacactaaattcaaggaataattctgaatccagaaaccatgaaaataagaaatttttcggggcacatgccaattctaggggccatgacctacttgaaatttctaagcttgccatgcaaaatcaatggagtaagtttgatcgtctagattcgtttgatacttgtgacgaataccattcacaagaactgtccgtggcactttataacaggcaagattcactatccaagagaagtaacctgagttaccaggatcaagcagaaaaggtagagttttcagggccactactatctcaaatgcacacagttgatgagctcttagaaagacacgagagtcatatccggcgtacggtcagaagatcatggtttcagagaggtaagaagcaagggaagtaactgcaactgtaatatttattcttgaaaggatatagatcctcgtatatcaaatcaaatgtccttgtgaaagggccttctccattcaccaagcacactcgctgctgtgactttgagcaacaatgaacattatcatgtacacatagacacagttaccagcagcatgagatgttacctagaagcttggaaactaactaatttgaggagtgtaattcaatttatagaaatcagaaggccgtggagaagagaagagaggctttttttttcttctttttcaccatggattctctatttttggccaattataatatagaaaaatttatttctgtatgatctaaacttcctcaatcctattgcctttgcctttggt

SEQ ID NO: 54917 - protein, 189 aa, Glycine max
  peptide (1)..(189): Ceres Seq. ID no. 15170270
  misc_feature (1)..(138): Homolog of NCBI NO: 22330629 NR Description: protein kinase -related [Arabidopsis thaliana]
  misc_feature (1)..(139): Homolog of NCBI NO: 15221833 NR Description: protein kinase -related [Arabidopsis thaliana]
  misc_feature (1)..(186): Homolog of NCBI NO: 33146814 NR Description: putative cyclin-dependent kinase CDC2C
EDASSYMKNASQVDIPFPGPLQVSKSSGFAWAKRRRDDTSVRSHSRSISRGYIFNSSETSTLNSRNNSESRNHENKKFFGAHANSRGHDLLEISKLAMQNQWSKFDRLDSFDTCDEYHSQELSVALYNRQDSLSKRSNLSYQDQAEKVEFSGPLLSQMHTVDELLERHESHIRRTVRRSWFQRGKKQGK

SEQ ID NO: 54918 - protein, 183 aa, Glycine max
  peptide (1)..(183): Ceres Seq. ID no. 15170271
  misc_feature (1)..(132): Homolog of NCBI NO: 22330629 NR Description: protein kinase -related [Arabidopsis thaliana]
  misc_feature (1)..(133): Homolog of NCBI NO: 15221833 NR Description: protein kinase -related [Arabidopsis thaliana]
  misc_feature (1)..(180): Homolog of NCBI NO: 33146814 NR Description: putative cyclin-dependent kinase CDC2C
MKNASQVDIPFPGPLQVSKSSGFAWAKRRRDDTSVRSHSRSISRGYIFNSSETSTLNSRNNSESRNHENKKFFGAHANSRGHDLLEISKLAMQNQWSKFDRLDSFDTCDEYHSQELSVALYNRQDSLSKRSNLSYQDQAEKVEFSGPLLSQMHTVDELLERHESHIRRTVRRSWFQRGKKQGK

SEQ ID NO: 54919 - DNA, 1377 bp, Glycine max
  misc_feature (1)..(1377): Ceres Seq. ID no. 14306949
tttttcttccctttttttataaattttttagaggctaacatggaggaggttgagcaagctaatagagtagctgttgaaagctgccatagggttctgagtttgttgtctcaaccaagggatcaggttcagcataggaatttaatggtggaaaccggtgaaactgtggtgaggttcaagaaggttgtttccatgcttcacaatggtttgggtcatgcaagagtgaggaaacttaaaaaccctcaaatcccctcttcccaccaaagcatcttcttagacaaccccaattgcaaaaccttaaccaacaacagcaacaacaaccatcactccaaaaaaaatctatactttccccaaaccagctaccctgacaattcagttcaggaacatggttcaaccattaagaattctctctctcttggacaaccctctttggaattgagctccaatgggaaaagtcctcttcacctcacacagcagggttcatcaaatcactatcacttctttcagcagcagcaacagcaaaggttgttgcagcagcagcagcaacaacaacaaatgaagcatcaagctgaaatgttgttccgaaggaacaatagtggcataaacctgaattttgacagcactagctgcacaccaacaatgtcatccactaagtcttttatttcttccttgagcatagatggaagtgtggctaacttggatggaagtgccttccatttaataggagctccacactcttctgatcagaattcgcaacagcctaagagaaaatgttctgccagaggcgatgagggaagcttgaaatgtgggagcagtgctagatgtcattgctctaagaagaggaaacatagagtgaagagggcaattaaggtgcctgctatcagcaacaaacttgcagatatccctcctgatgattattcgtggaggaagtatggacagaagccaatcaagggctctcctcaccctaggggatattacaagtgcagcagcatgagagggtgtcctgcaaggaagcatgttgagaggtgcttggaagagcctaccatgctaattgtcacctatgaaggtgaacataaccaccccaagttaccaacacaatctgcaaatgcatgaaactatgtggagagcttaaccagatcaagccaatcattcaattcgtcaaatcctctatgtgattggcttgagatgctgctgtacatatttttagtgatgcaaacaagcagggatggataatattgttggcgcagattttgtcttttggatagtttggctatccagccgttttatttagagggtgaggatgaggatcactgattaaatgaacaaagtctgtaaaattagctagtttcaattcctaagaactatttaatctttcttaag

SEQ ID NO: 54920 - protein, 369 aa, Glycine max
  peptide (1)..(369): Ceres Seq. ID no. 14306950
  misc_feature (301)..(361): Pfam Name: WRKY DNA -binding domain Pfam Description: WRKY DNA -binding domain
  misc_feature (115)..(367): Homolog of NCBI NO: 40539044 NR Description: putative somatic embryogenesis related protein
  misc_feature (14)..(92): Homolog of NCBI NO: 11993901 NR Description: somatic embryogenesis related protein [Dactylis
  misc_feature (109)..(367): Homolog of NCBI NO: 11993901 NR Description: somatic embryogenesis related protein [Dactylis
  misc_feature (14)..(172): Homolog of NCBI NO: 18396971 NR Description: WRKY family transcription factor [Arabidopsis
  misc_feature (187)..(368): Homolog of NCBI NO: 18396971 NR Description: WRKY family transcription factor [Arabidopsis
  misc_feature (136)..(366): Homolog of NCBI NO: 18402397 NR Description: WRKY family transcription factor [Arabidopsis
  misc_feature (14)..(103): Homolog of NCBI NO: 29839595 NR Description: Probable WRKY transcription factor 74 (WRKY
  misc_feature (104)..(368): Homolog of NCBI NO: 29839595 NR Description: Probable WRKY transcription factor 74 (WRKY
  misc_feature (14)..(103): Homolog of NCBI NO: 15241875 NR Description: WRKY family transcription factor [Arabidopsis
  misc_feature (104)..(368): Homolog of NCBI NO: 15241875 NR Description: WRKY family transcription factor [Arabidopsis
FFFPFFINFLEANMEEVEQANRVAVESCHRVLSLLSQPRDQVQHRNLMVETGETVVRFKKVVSMLHNGLGHARVRKLKNPQIPSSHQSIFLDNPNCKTLTNNSNNNHHSKKNLYFPQTSYPDNSVQEHGSTIKNSLSLGQPSLELSSNGKSPLHLTQQGSSNHYHFFQQQQQQRLLQQQQQQQQMKHQAEMLFRRNNSGINLNFDSTSCTPTMSSTKSFISSLSIDGSVANLDGSAFHLIGAPHSSDQNSQQPKRKCSARGDEGSLKCGSSARCHCSKKRKHRVKRAIKVPAISNKLADIPPDDYSWRKYGQKPIKGSPHPRGYYKCSSMRGCPARKHVERCLEEPTMLIVTYEGEHNHPKLPTQSANA

SEQ ID NO: 54921 - protein, 356 aa, Glycine max
  peptide (1)..(356): Ceres Seq. ID no. 14306951
  misc_feature (288)..(348): Pfam Name: WRKY DNA -binding domain Pfam Description: WRKY DNA -binding domain
  misc_feature (102)..(354): Homolog of NCBI NO: 40539044 NR Description: putative somatic embryogenesis related protein
  misc_feature (1)..(79): Homolog of NCBI NO: 11993901 NR Description: somatic embryogenesis related protein [Dactylis
  misc_feature (96)..(354): Homolog of NCBI NO: 11993901 NR Description: somatic embryogenesis related protein [Dactylis
  misc_feature (1)..(159): Homolog of NCBI NO: 18396971 NR Description: WRKY family transcription factor [Arabidopsis
  misc_feature (174)..(355): Homolog of NCBI NO: 18396971 NR Description: WRKY family transcription factor [Arabidopsis
  misc_feature (123)..(353): Homolog of NCBI NO: 18402397 NR Description: WRKY family transcription factor [Arabidopsis
  misc_feature (1)..(90): Homolog of NCBI NO: 29839595 NR Description: Probable WRKY transcription factor 74 (WRKY
  misc_feature (91)..(355): Homolog of NCBI NO: 29839595 NR Description: Probable WRKY transcription factor 74 (WRKY
  misc_feature (1)..(90): Homolog of NCBI NO: 15241875 NR Description: WRKY family transcription factor [Arabidopsis
  misc_feature (91)..(355): Homolog of NCBI NO: 15241875 NR Description: WRKY family transcription factor [Arabidopsis
MEEVEQANRVAVESCHRVLSLLSQPRDQVQHRNLMVETGETVVRFKKVVSMLHNGLGHARVRKLKNPQIPSSHQSIFLDNPNCKTLTNNSNNNHHSKKNLYFPQTSYPDNSVQEHGSTIKNSLSLGQPSLELSSNGKSPLHLTQQGSSNHYHFFQQQQQQRLLQQQQQQQQMKHQAEMLFRRNNSGINLNFDSTSCTPTMSSTKSFISSLSIDGSVANLDGSAFHLIGAPHSSDQNSQQPKRKCSARGDEGSLKCGSSARCHCSKKRKHRVKRAIKVPAISNKLADIPPDDYSWRKYGQKPIKGSPHPRGYYKCSSMRGCPARKHVERCLEEPTMLIVTYEGEHNHPKLPTQSANA

SEQ ID NO: 54922 - protein, 322 aa, Glycine max
  peptide (1)..(322): Ceres Seq. ID no. 14306952
  misc_feature (254)..(314): Pfam Name: WRKY DNA -binding domain Pfam Description: WRKY DNA -binding domain
  misc_feature (68)..(320): Homolog of NCBI NO: 40539044 NR Description: putative somatic embryogenesis related protein
  misc_feature (1)..(45): Homolog of NCBI NO: 11993901 NR Description: somatic embryogenesis related protein [Dactylis
  misc_feature (62)..(320): Homolog of NCBI NO: 11993901 NR Description: somatic embryogenesis related protein [Dactylis
  misc_feature (1)..(125): Homolog of NCBI NO: 18396971 NR Description: WRKY family transcription factor [Arabidopsis
  misc_feature (140)..(321): Homolog of NCBI NO: 18396971 NR Description: WRKY family transcription factor [Arabidopsis
  misc_feature (89)..(319): Homolog of NCBI NO: 18402397 NR Description: WRKY family transcription factor [Arabidopsis
  misc_feature (1)..(56): Homolog of NCBI NO: 29839595 NR Description: Probable WRKY transcription factor 74 (WRKY
  misc_feature (57)..(321): Homolog of NCBI NO: 29839595 NR Description: Probable WRKY transcription factor 74 (WRKY
  misc_feature (1)..(56): Homolog of NCBI NO: 15241875 NR Description: WRKY family transcription factor [Arabidopsis
  misc_feature (57)..(321): Homolog of NCBI NO: 15241875 NR Description: WRKY family transcription factor [Arabidopsis
MVETGETVVRFKKVVSMLHNGLGHARVRKLKNPQIPSSHQSIFLDNPNCKTLTNNSNNNHHSKKNLYFPQTSYPDNSVQEHGSTIKNSLSLGQPSLELSSNGKSPLHLTQQGSSNHYHFFQQQQQQRLLQQQQQQQQMKHQAEMLFRRNNSGINLNFDSTSCTPTMSSTKSFISSLSIDGSVANLDGSAFHLIGAPHSSDQNSQQPKRKCSARGDEGSLKCGSSARCHCSKKRKHRVKRAIKVPAISNKLADIPPDDYSWRKYGQKPIKGSPHPRGYYKCSSMRGCPARKHVERCLEEPTMLIVTYEGEHNHPKLPTQSANA

SEQ ID NO: 54923 - DNA, 1296 bp, Glycine max
  misc_feature (1)..(1296): Ceres Seq. ID no. 14303417
ggtgccattcccttcacaccattctcacaaaacaactttcaaactctgagaaagaatggctgccaacacattgatgagtactgctatctcagccttcccatctctcctttcttcctcaaaatccagatttgccaccgcagttcctctttctagctttggtgtcaccaatgcctcttcttctcgcttttctatgagtgctgactggatgccaggccagcctagacctccttaccttgatggttcagcacctggtgactttggattcgaccctcttcgtcttggtgaagtaccagagaatcttgagaggttcaaagagtcagaactcattcactgcagatgggccatgcttgctgttccagggattttggttccagaggcattgggcttaggcaactgggtaaaggctcaggaatgggcagcagttcctgggggccaagcaacctacctaggcaatccagttccatggggcaccctacccaccattctggccattgaattccttgctatttcctttgtggagcaccaaaggagcatggagaaggacccagagaagaagaaataccctggtggtgcttttgatcctttgggatactctaaggaccctaaaacattccatgaatacaaagtcaaagaacttaagaatggacgtcttgttttgttggcttttgtgggattctgtgttcaacaatcagcttatcccggcactggacctttggagaacttggctgctcacttggctgacccatggcacaacaacattggaaacatcattattccacaatcgattttgccttgaaaaaaaaaaatcaaatatttgtttcaatagctacctgtataattccatgtaacattttgtaacgaatcgggttgctacgttggtatctctgtgttgtaattaaacttcgaattcaaactcatactctggcaactcgttggtatgacagaaaagcttgaaacaaacttccaagtccaagtttaaaacttgcattacatgattacatccatatctaatgatgaataaaacatgttttggaccaactgcagcctgcaaagtgccaatttccttgaatgcttcctaaagtattaggcatccggtgtattccagcaaatattatgtcagctaacgacttttcaacaacatttggttttgttaaaactgattttcctgcaaaataataagtcagctaaacttatatacatgtctcaaattcagcattcagaactaagggagtctaacttgagtagggtgcatgagtttttaaaccccttggtacctgtgtttgattcctacaagtc

SEQ ID NO: 54924 - protein, 246 aa, Glycine max
  peptide (1)..(246): Ceres Seq. ID no. 14303418
  misc_feature (55)..(212): Pfam Name: Chlorophyll A-B binding protein Pfam Description: Chlorophyll A-B binding protein
  misc_feature (42)..(246): Homolog of NCBI NO: 20790 NR Description: Type 1 chlorophyll a /b-binding protein [Pinus
  misc_feature (1)..(246): Homolog of NCBI NO: 99485 NR Description: chlorophyll a/b-binding protein type 1 precursor,
  misc_feature (1)..(244): Homolog of NCBI NO: 6685157 NR Description: chlorophyll a/b binding protein precursor
  misc_feature (1)..(246): Homolog of NCBI NO: 3789954 NR Description: chlorophyll a/b-binding protein precursor [Oryza
  misc_feature (1)..(241): Homolog of NCBI NO: 13265501 NR Description: AT3g54890 [Arabidopsis thaliana]
  misc_feature (1)..(241): Homolog of NCBI NO: 15233115 NR Description: light-harvesting chlorophyll a/b binding protein
  misc_feature (1)..(246): Homolog of NCBI NO: 115764 NR Description: Chlorophyll A-B binding protein 6A, chloroplast
  misc_feature (1)..(246): Homolog of NCBI NO: 82079 NR Description: chlorophyll a/b-binding protein type I precursor
  misc_feature (1)..(246): Homolog of NCBI NO: 82078 NR Description: chlorophyll a/b-binding protein type I precursor
  misc_feature (1)..(246): Homolog of NCBI NO: 625547 NR Description: chlorophyll a/b-binding protein type I - common
MAANTLMSTAISAFPSLLSSSKSRFATAVPLSSFGVTNASSSRFSMSADWMPGQPRPPYLDGSAPGDFGFDPLRLGEVPENLERFKESELIHCRWAMLAVPGILVPEALGLGNWVKAQEWAAVPGGQATYLGNPVPWGTLPTILAIEFLAISFVEHQRSMEKDPEKKKYPGGAFDPLGYSKDPKTFHEYKVKELKNGRLVLLAFVGFCVQQSAYPGTGPLENLAAHLADPWHNNIGNIIIPQSILP

SEQ ID NO: 54925 - protein, 240 aa, Glycine max
  peptide (1)..(240): Ceres Seq. ID no. 14303419
  misc_feature (49)..(206): Pfam Name: Chlorophyll A-B binding protein Pfam Description: Chlorophyll A-B binding protein
  misc_feature (36)..(240): Homolog of NCBI NO: 20790 NR Description: Type 1 chlorophyll a /b-binding protein [Pinus
  misc_feature (1)..(240): Homolog of NCBI NO: 99485 NR Description: chlorophyll a/b-binding protein type 1 precursor,
  misc_feature (1)..(238): Homolog of NCBI NO: 6685157 NR Description: chlorophyll a/b binding protein precursor
  misc_feature (1)..(240): Homolog of NCBI NO: 3789954 NR Description: chlorophyll a/b-binding protein precursor [Oryza
  misc_feature (1)..(235): Homolog of NCBI NO: 13265501 NR Description: AT3g54890 [Arabidopsis thaliana]
  misc_feature (1)..(235): Homolog of NCBI NO: 15233115 NR Description: light-harvesting chlorophyll a/b binding protein
  misc_feature (1)..(240): Homolog of NCBI NO: 115764 NR Description: Chlorophyll A-B binding protein 6A, chloroplast
  misc_feature (1)..(240): Homolog of NCBI NO: 82079 NR Description: chlorophyll a/b-binding protein type I precursor
  misc_feature (1)..(240): Homolog of NCBI NO: 82078 NR Description: chlorophyll a/b-binding protein type I precursor
  misc_feature (1)..(240): Homolog of NCBI NO: 625547 NR Description: chlorophyll a/b-binding protein type I - common
MSTAISAFPSLLSSSKSRFATAVPLSSFGVTNASSSRFSMSADWMPGQPRPPYLDGSAPGDFGFDPLRLGEVPENLERFKESELIHCRWAMLAVPGILVPEALGLGNWVKAQEWAAVPGGQATYLGNPVPWGTLPTILAIEFLAISFVEHQRSMEKDPEKKKYPGGAFDPLGYSKDPKTFHEYKVKELKNGRLVLLAFVGFCVQQSAYPGTGPLENLAAHLADPWHNNIGNIIIPQSILP

SEQ ID NO: 54926 - protein, 201 aa, Glycine max
  peptide (1)..(201): Ceres Seq. ID no. 14303420
  misc_feature (10)..(167): Pfam Name: Chlorophyll A-B binding protein Pfam Description: Chlorophyll A-B binding protein
  misc_feature (1)..(201): Homolog of NCBI NO: 20790 NR Description: Type 1 chlorophyll a /b-binding protein [Pinus
  misc_feature (1)..(201): Homolog of NCBI NO: 99485 NR Description: chlorophyll a/b-binding protein type 1 precursor,
  misc_feature (1)..(199): Homolog of NCBI NO: 6685157 NR Description: chlorophyll a/b binding protein precursor
  misc_feature (1)..(201): Homolog of NCBI NO: 3789954 NR Description: chlorophyll a/b-binding protein precursor [Oryza
  misc_feature (1)..(196): Homolog of NCBI NO: 13265501 NR Description: AT3g54890 [Arabidopsis thaliana]
  misc_feature (1)..(196): Homolog of NCBI NO: 15233115 NR Description: light-harvesting chlorophyll a/b binding protein
  misc_feature (1)..(201): Homolog of NCBI NO: 115764 NR Description: Chlorophyll A-B binding protein 6A, chloroplast
  misc_feature (1)..(201): Homolog of NCBI NO: 82079 NR Description: chlorophyll a/b-binding protein type I precursor
  misc_feature (1)..(201): Homolog of NCBI NO: 82078 NR Description: chlorophyll a/b-binding protein type I precursor
  misc_feature (1)..(201): Homolog of NCBI NO: 625547 NR Description: chlorophyll a/b-binding protein type I - common
MSADWMPGQPRPPYLDGSAPGDFGFDPLRLGEVPENLERFKESELIHCRWAMLAVPGILVPEALGLGNWVKAQEWAAVPGGQATYLGNPVPWGTLPTILAIEFLAISFVEHQRSMEKDPEKKKYPGGAFDPLGYSKDPKTFHEYKVKELKNGRLVLLAFVGFCVQQSAYPGTGPLENLAAHLADPWHNNIGNIIIPQSILP

SEQ ID NO: 54927 - DNA, 1279 bp, Glycine max
  misc_feature (1)..(1279): Ceres Seq. ID no. 15225873
tttctatcatggaaacattatcagttggcttgaatgccaaaccatttcagaagactaaaaacacttcgaacttctctgcacctgcaagtgatcctgtttcctttcagagagaaaactgcagtgctgaaagtaaagaggctgttttgggagcaagaactaatgttgaggccaatggattgaggtcaaaagtaaacagcacacctctttctctgccaaaaaagagtacacatgaacctagaaagtcatttgacaattctagcagcaatacagacattcaagcacagaagagtgcaccttctcccaataacttgcagaagacagcgaaagaaagagataattcagatcaagtttctgaagtgcaccatgatgcttccgatgcttttccaacagagtgggtgccaccaaatttgagtgtacccattttggatctggttgatgttatcttccaggttcatgatggtggatggattaggcggaaggctttttgggttgctaaacaaatcttacaactaggaatgggtgatgcctttgatgactggttgatagagaaaattcagcttctccgtaagggttcagtggttgcttcaggggtcaagcgagttgagcaaatactctggcctgatggaatattcataaccaagcatccaaatcgacgacctccgtcaccttctagtccatctcagaattctcctcatggcaatcaacctacacaagtgtcttctccaaggttggatgatgagcagaaacaggaggcagatcggcgtgcaaaatttgtatatgagctaatgattgatcatgcaccgccagctattgtaggtcttgttggtcggaaggagtacgagcaatgtgcaagggatttatattttttccttcagtcatccgttatcttgaagcagctggcttttgacatcctggagctgctgctgacatcggcatttccggagcttgataatgtatttaagcagctgcatgaagaaaagcataaatttggtgagttcagaacacagtaaatattacaattttcagacgaggcacggagaaataatggtttagatgtttcgtcttccgaaatacattctttttcttgtgattgttcctgattgcccttttgtctctgcaaccgctatccttctctttctgccaactaatgagccaaaggcaattcaatttttccatctaccaagtcaagttttgtaattaaggttggcattttgaggcagacgtcatgtaaattttgagattaatgcaattattttgagattctttattggctaaaaag

SEQ ID NO: 54928 - protein, 335 aa, Glycine max
  peptide (1)..(335): Ceres Seq. ID no. 15225874
  misc_feature (51)..(262): Homolog of NCBI NO: 25411680 NR Description: hypothetical protein At2g15900 [imported] -
  misc_feature (51)..(324): Homolog of NCBI NO: 30679545 NR Description: expressed protein [Arabidopsis thaliana]
  misc_feature (237)..(270): Homolog of NCBI NO: 25518623 NR Description: hypothetical protein F9L1.19 [imported] -
  misc_feature (51)..(227): Homolog of NCBI NO: 25518623 NR Description: hypothetical protein F9L1.19 [imported] -
SIMETLSVGLNAKPFQKTKNTSNFSAPASDPVSFQRENCSAESKEAVLGARTNVEANGLRSKVNSTPLSLPKKSTHEPRKSFDNSSSNTDIQAQKSAPSPNNLQKTAKERDNSDQVSEVHHDASDAFPTEWVPPNLSVPILDLVDVIFQVHDGGWIRRKAFWVAKQILQLGMGDAFDDWLIEKIQLLRKGSVVASGVKRVEQILWPDGIFITKHPNRRPPSPSSPSQNSPHGNQPTQVSSPRLDDEQKQEADRRAKFVYELMIDHAPPAIVGLVGRKEYEQCARDLYFFLQSSVILKQLAFDILELLLTSAFPELDNVFKQLHEEKHKFGEFRTQ

SEQ ID NO: 54929 - protein, 333 aa, Glycine max
  peptide (1)..(333): Ceres Seq. ID no. 15225875
  misc_feature (49)..(260): Homolog of NCBI NO: 25411680 NR Description: hypothetical protein At2g15900 [imported] -
  misc_feature (49)..(322): Homolog of NCBI NO: 30679545 NR Description: expressed protein [Arabidopsis thaliana]
  misc_feature (235)..(268): Homolog of NCBI NO: 25518623 NR Description: hypothetical protein F9L1.19 [imported] -
  misc_feature (49)..(225): Homolog of NCBI NO: 25518623 NR Description: hypothetical protein F9L1.19 [imported] -
METLSVGLNAKPFQKTKNTSNFSAPASDPVSFQRENCSAESKEAVLGARTNVEANGLRSKVNSTPLSLPKKSTHEPRKSFDNSSSNTDIQAQKSAPSPNNLQKTAKERDNSDQVSEVHHDASDAFPTEWVPPNLSVPILDLVDVIFQVHDGGWIRRKAFWVAKQILQLGMGDAFDDWLIEKIQLLRKGSVVASGVKRVEQILWPDGIFITKHPNRRPPSPSSPSQNSPHGNQPTQVSSPRLDDEQKQEADRRAKFVYELMIDHAPPAIVGLVGRKEYEQCARDLYFFLQSSVILKQLAFDILELLLTSAFPELDNVFKQLHEEKHKFGEFRTQ

SEQ ID NO: 54930 - DNA, 1109 bp, Glycine max
  misc_feature (1)..(1109): Ceres Seq. ID no. 13637939
gttctaggggaacctgacagaggcagttaacgaacaaacagatgggttgggccatagcactacacggcggcgccggcgacatcccgctttcccttccaccggagcgccgccagcctcgcgaggaggccctccgccactgcctccaaatcggcgtggaagctctcaaggccaaactgcctcctctcgacgtggttgaacttgtctttcgggagttggagaacattccgcagtttaacgcgggaaggggatctgtgctgacttgcagaggcaccgtggaaatggaagcttccataatggacggcaccactatgaattgcggagctgtttccggcctcactaccgtcgtcaacgccatctctcttgctcgattggtcatggaaaacacgcctcacatctatctcgctttcgatggagcagaggaatttgcaagacaacaaggcgttgagactgtggattcaagccattttattacaaaagaaaatattgaaaggctaaagcaggcaaaagaagctaacagggttcagattgattatacgcaacctatccaaaatgatactaagaaagagaccgcattggctaatggtgatagccaaattggaactgttgggtgtgtggctgtagatagtcttgggaatttggcttctgcaacatctactggtggattagtgaacaaaatggtgggtcgaattggtgacacaccagtcattggtgctggtacctatgcggatgcacgttgtgcggtttcagcgacaggcaaaggtgaagcaataatacgtgggacagtggcaagagatgtggctgctctgatggagtttaagggtctttctctcgtggaagctgctaattgtgttgtacatgagcgcacaccaaaaggcactgttggtttggttgctgtgtctgccaaaggagaagttgcaatgccttttaatacaacaggcatgttcagagcgtgtgctactgaagatggatattctgagattgcaatttggcctgctgccaaaatagagtagtctttaggctttactgatttccaagcttaatgtattctgacatttgatgatgcttcacgcatgcttatatcacagggaaatctatttgcttttcaaggt

SEQ ID NO: 54931 - protein, 322 aa, Glycine max
  peptide (1)..(322): Ceres Seq. ID no. 13637940
  misc_feature (2)..(317): Pfam Name: Asparaginase Pfam Description: Asparaginase
  misc_feature (3)..(316): Homolog of NCBI NO: 10241428 NR Description: putative l-asparaginase [Oryza sativa (indica
  misc_feature (2)..(316): Homolog of NCBI NO: 18401029 NR Description: L-asparaginase -related [Arabidopsis thaliana]
  misc_feature (1)..(317): Homolog of NCBI NO: 1076292 NR Description: asparaginase (EC 3.5.1.1) - Arabidopsis thaliana
  misc_feature (1)..(317): Homolog of NCBI NO: 15241528 NR Description: asparaginase [Arabidopsis thaliana]
  misc_feature (19)..(319): Homolog of NCBI NO: 231574 NR Description: L-ASPARAGINASE (L-ASPARAGINE AMIDOHYDROLASE)
  misc_feature (2)..(317): Homolog of NCBI NO: 6685231 NR Description: L-asparaginase (L-asparagine amidohydrolase)
  misc_feature (2)..(317): Homolog of NCBI NO: 231573 NR Description: L-ASPARAGINASE (L-ASPARAGINE AMIDOHYDROLASE)
  misc_feature (2)..(319): Homolog of NCBI NO: 1703447 NR Description: L-ASPARAGINASE (L-ASPARAGINE AMIDOHYDROLASE)
MGWAIALHGGAGDIPLSLPPERRQPREEALRHCLQIGVEALKAKLPPLDVVELVFRELENIPQFNAGRGSVLTCRGTVEMEASIMDGTTMNCGAVSGLTTVVNAISLARLVMENTPHIYLAFDGAEEFARQQGVETVDSSHFITKENIERLKQAKEANRVQIDYTQPIQNDTKKETALANGDSQIGTVGCVAVDSLGNLASATSTGGLVNKMVGRIGDTPVIGAGTYADARCAVSATGKGEAIIRGTVARDVAALMEFKGLSLVEAANCVVHERTPKGTVGLVAVSAKGEVAMPFNTTGMFRACATEDGYSEIAIWPAAKIE

SEQ ID NO: 54932 - protein, 243 aa, Glycine max
  peptide (1)..(243): Ceres Seq. ID no. 13637941
  misc_feature (1)..(238): Pfam Name: Asparaginase Pfam Description: Asparaginase
  misc_feature (1)..(237): Homolog of NCBI NO: 10241428 NR Description: putative l-asparaginase [Oryza sativa (indica
  misc_feature (1)..(237): Homolog of NCBI NO: 18401029 NR Description: L-asparaginase -related [Arabidopsis thaliana]
  misc_feature (1)..(238): Homolog of NCBI NO: 1076292 NR Description: asparaginase (EC 3.5.1.1) - Arabidopsis thaliana
  misc_feature (1)..(238): Homolog of NCBI NO: 15241528 NR Description: asparaginase [Arabidopsis thaliana]
  misc_feature (1)..(240): Homolog of NCBI NO: 231574 NR Description: L-ASPARAGINASE (L-ASPARAGINE AMIDOHYDROLASE)
  misc_feature (1)..(238): Homolog of NCBI NO: 6685231 NR Description: L-asparaginase (L-asparagine amidohydrolase)
  misc_feature (1)..(238): Homolog of NCBI NO: 231573 NR Description: L-ASPARAGINASE (L-ASPARAGINE AMIDOHYDROLASE)
  misc_feature (1)..(240): Homolog of NCBI NO: 1703447 NR Description: L-ASPARAGINASE (L-ASPARAGINE AMIDOHYDROLASE)
MEASIMDGTTMNCGAVSGLTTVVNAISLARLVMENTPHIYLAFDGAEEFARQQGVETVDSSHFITKENIERLKQAKEANRVQIDYTQPIQNDTKKETALANGDSQIGTVGCVAVDSLGNLASATSTGGLVNKMVGRIGDTPVIGAGTYADARCAVSATGKGEAIIRGTVARDVAALMEFKGLSLVEAANCVVHERTPKGTVGLVAVSAKGEVAMPFNTTGMFRACATEDGYSEIAIWPAAKIE

SEQ ID NO: 54933 - protein, 238 aa, Glycine max
  peptide (1)..(238): Ceres Seq. ID no. 13637942
  misc_feature (1)..(233): Pfam Name: Asparaginase Pfam Description: Asparaginase
  misc_feature (1)..(232): Homolog of NCBI NO: 10241428 NR Description: putative l-asparaginase [Oryza sativa (indica
  misc_feature (1)..(232): Homolog of NCBI NO: 18401029 NR Description: L-asparaginase -related [Arabidopsis thaliana]
  misc_feature (1)..(233): Homolog of NCBI NO: 1076292 NR Description: asparaginase (EC 3.5.1.1) - Arabidopsis thaliana
  misc_feature (1)..(233): Homolog of NCBI NO: 15241528 NR Description: asparaginase [Arabidopsis thaliana]
  misc_feature (1)..(235): Homolog of NCBI NO: 231574 NR Description: L-ASPARAGINASE (L-ASPARAGINE AMIDOHYDROLASE)
  misc_feature (1)..(233): Homolog of NCBI NO: 6685231 NR Description: L-asparaginase (L-asparagine amidohydrolase)
  misc_feature (1)..(233): Homolog of NCBI NO: 231573 NR Description: L-ASPARAGINASE (L-ASPARAGINE AMIDOHYDROLASE)
  misc_feature (1)..(235): Homolog of NCBI NO: 1703447 NR Description: L-ASPARAGINASE (L-ASPARAGINE AMIDOHYDROLASE)
MDGTTMNCGAVSGLTTVVNAISLARLVMENTPHIYLAFDGAEEFARQQGVETVDSSHFITKENIERLKQAKEANRVQIDYTQPIQNDTKKETALANGDSQIGTVGCVAVDSLGNLASATSTGGLVNKMVGRIGDTPVIGAGTYADARCAVSATGKGEAIIRGTVARDVAALMEFKGLSLVEAANCVVHERTPKGTVGLVAVSAKGEVAMPFNTTGMFRACATEDGYSEIAIWPAAKIE

SEQ ID NO: 54934 - DNA, 1906 bp, Glycine max
  misc_feature (1)..(1906): Ceres Seq. ID no. 14313131
atttattacattttaactttgctccaactcaaatttgtaagtaagtggtttcaaggacgcatgcaattcttcaatctcagttgagtgataatatagaggccttgaagccttttcaagtttagtagaggctgagaaatgtattgtatctagaaaataatgcttgtttgtgtttgtatactatactattcaagaaatgctatagtatcaatatcttgtgatgtttttaatttagataaagaataataacgaaactttccaaagagactgagagtatgtgtaatcttcataaagtgatttttgtgctagaaactagaaagcacaaatacaacaaatgatacatatacaatatggcagacaatagataattttaaaaatagcaggacaccacaactataataagatatataaaattagcacaaaaaatttttaattcaaaagataaaattgatgttttatttttgaatgaatcattgtatacatataagactgttgttgttgtcttctaattattgtgatattcccatcggtattgctacaaaagtgtaagaaataaaggtaaacaatataaaatgtaacttagagtatttgaagtgtccatgaccgacatgacacaactgtaattttgtagtgtccgtgcttccttgtttatgtataagatccagatctgaagattttcctattctattaatgcatatatctaataatgtaaatactgtcttctgctctagattcaatcataaaacaggcgctgaggatgtgcatttcactgccatgtcctctaatgatgaatctgatactgatgttgatggctgtaacaatgatgagggcattgtcgaggaggaagcattggctcaaaattcctctatagatatgactgcgttaaataatgggaactgcaatgtcagtgacttggatagttcttcacttagtgagagtgatacttctatgctggagatgattatgacaaaagatgtcagcagtggaagtgaggtatttaatacttatgggatactgggtaatgctgctttgcttcatagatatggatttactgagcaagataattcctatgatattgtaaacatagatatggaactggtaattcaatggtgttcttccgtgttttcggaccgccacagtagagcaagagtttccctttggagaaggttaggctattctgtatgtggcagccaagactctgactattttgagatctcatttgatggagaaccacagattgaactcctcagtttgttacacatcatgttattaccagataatgcctaccataagttagacctatcagtatcggttgccggaaattatgatgaatcaaatggaaccacccttctgaatggtgatatctttcctagtaaagcatttaatatgaacaataaatccttgctgcccaaaaaagtttgtgatgccctgttgtcgctttctgatatgagggagagtctctatggtttgaaatcaattgaagatgatattgaggcattgggaaggtgtagtttaattagagagagaaaactgtatcattctttgatgctgcgcatcaatgaaaggaagatccttcagaggctcagaaattatgcttcacagccatttaaaaataaaatcacgaaccatggttctccgaggaagaagttgaaaagaacaacaaagaaaacaagttgatttttttagtgtttattttattttaattatttttctatgagatgctttaacttgtattttggtgcaccaagtcattggcctatgcaaagtagcaaagccgtctctttcatttgtcgcatttggtttttggtcagcaataaaacatcgtttttctttcattagttccttaatttatcatttgtgtttccgtcattttatgccatgatctttcatctcatgctcttatattgat

SEQ ID NO: 54935 - protein, 328 aa, Glycine max
  peptide (1)..(328): Ceres Seq. ID no. 14313132
  misc_feature (16)..(113): Pfam Name: SET domain Pfam Description: SET domain
  misc_feature (15)..(301): Homolog of NCBI NO: 28829640 NR Description: similar to Arabidopsis thaliana (Mouse-ear
  misc_feature (16)..(327): Homolog of NCBI NO: 15228958 NR Description: SET-domain transcriptional regulator family
  misc_feature (15)..(59): Homolog of NCBI NO: 34907380 NR Description: P0471B04.24 [Oryza sativa (japonica
  misc_feature (66)..(309): Homolog of NCBI NO: 34907380 NR Description: P0471B04.24 [Oryza sativa (japonica
MHISNNVNTVFCSRFNHKTGAEDVHFTAMSSNDESDTDVDGCNNDEGIVEEEALAQNSSIDMTALNNGNCNVSDLDSSSLSESDTSMLEMIMTKDVSSGSEVFNTYGILGNAALLHRYGFTEQDNSYDIVNIDMELVIQWCSSVFSDRHSRARVSLWRRLGYSVCGSQDSDYFEISFDGEPQIELLSLLHIMLLPDNAYHKLDLSVSVAGNYDESNGTTLLNGDIFPSKAFNMNNKSLLPKKVCDALLSLSDMRESLYGLKSIEDDIEALGRCSLIRERKLYHSLMLRINERKILQRLRNYASQPFKNKITNHGSPRKKLKRTTKKTS

SEQ ID NO: 54936 - protein, 300 aa, Glycine max
  peptide (1)..(300): Ceres Seq. ID no. 14313133
  misc_feature (1)..(85): Pfam Name: SET domain Pfam Description: SET domain
  misc_feature (1)..(273): Homolog of NCBI NO: 28829640 NR Description: similar to Arabidopsis thaliana (Mouse-ear
  misc_feature (1)..(299): Homolog of NCBI NO: 15228958 NR Description: SET-domain transcriptional regulator family
  misc_feature (1)..(31): Homolog of NCBI NO: 34907380 NR Description: P0471B04.24 [Oryza sativa (japonica
  misc_feature (38)..(281): Homolog of NCBI NO: 34907380 NR Description: P0471B04.24 [Oryza sativa (japonica
MSSNDESDTDVDGCNNDEGIVEEEALAQNSSIDMTALNNGNCNVSDLDSSSLSESDTSMLEMIMTKDVSSGSEVFNTYGILGNAALLHRYGFTEQDNSYDIVNIDMELVIQWCSSVFSDRHSRARVSLWRRLGYSVCGSQDSDYFEISFDGEPQIELLSLLHIMLLPDNAYHKLDLSVSVAGNYDESNGTTLLNGDIFPSKAFNMNNKSLLPKKVCDALLSLSDMRESLYGLKSIEDDIEALGRCSLIRERKLYHSLMLRINERKILQRLRNYASQPFKNKITNHGSPRKKLKRTTKKTS

SEQ ID NO: 54937 - protein, 267 aa, Glycine max
  peptide (1)..(267): Ceres Seq. ID no. 14313134
  misc_feature (1)..(52): Pfam Name: SET domain Pfam Description: SET domain
  misc_feature (1)..(240): Homolog of NCBI NO: 28829640 NR Description: similar to Arabidopsis thaliana (Mouse-ear
  misc_feature (1)..(266): Homolog of NCBI NO: 15228958 NR Description: SET-domain transcriptional regulator family
  misc_feature (5)..(248): Homolog of NCBI NO: 34907380 NR Description: P0471B04.24 [Oryza sativa (japonica
MTALNNGNCNVSDLDSSSLSESDTSMLEMIMTKDVSSGSEVFNTYGILGNAALLHRYGFTEQDNSYDIVNIDMELVIQWCSSVFSDRHSRARVSLWRRLGYSVCGSQDSDYFEISFDGEPQIELLSLLHIMLLPDNAYHKLDLSVSVAGNYDESNGTTLLNGDIFPSKAFNMNNKSLLPKKVCDALLSLSDMRESLYGLKSIEDDIEALGRCSLIRERKLYHSLMLRINERKILQRLRNYASQPFKNKITNHGSPRKKLKRTTKKTS

SEQ ID NO: 54938 - DNA, 1463 bp, Glycine max
  misc_feature (1)..(1463): Ceres Seq. ID no. 15172093
aattcattccacacaacaaaaacaccaattctccaccctctcattgaaaaaaaaacaaccaaacaaaaaaaatcaatcattttattttatttttttacgaaaatggttgatttacattggaaatcaaagatgcctagttccaaaacaccaaaactctctctctccgacaacaagtccttaccctctttgcaactacccttccgcaccacagatatctctcccgccgctccttccgtttgcgccgcttacgactactatctccgtcttccttaactcagaaagctttggaactccactgattttcctaattggaacaacgaaccgattctaaaaccaattttgcaagctctcgaaatcacgttccgctttctttccattgttctctccgatcccagaccttactccaaccacagagaatggactcgccggatagagtctctcatcatgcatcaaattgaaatcattgccatactttgtgaagaagaggaacaaaattccgacacacgtggcactgcaccaaccgctgatctcagcagcagcaatagcagcgtgagcagaagctacagcgaggcgagcctgcttcctcggcttgccacgtggtacaaatccagggacgtggcgcagaggatccttctctccgtggaatgccaaatgaggaggtgctcctacacgcttggtttgggcgagccgaacctagcggggaagccgagcctgctctacgacctcgtgtgcaagccgaatgagatccacgcgctgaagacgacgccgtacgacgagcgcgtggagaaccacgagaaccacgcggtgcacgccacgcaccagatcgcggagtcgtggattcacgcgtcgcggaaggttctggagagaatcgcggacgcggtgctctccagaaccttcctgaaagcagcagaggactgctacgccgtggagaggatctggaagcttctcgcggaggtggaggacctccacctgatgatggatccggacgatttcttgaggctaaagaatcaactctcggtgaaatcctcgagcggcgaaacggcatcgttctgcttcagatcgaatgagttagtggaactgacgaagatgtgcagagatctgaggcacaaggtgccggagatattggaggtggaggtggatccgaagggaggaccgaggattcaagaggcggcgatgaagctctacgtttcgaagagcgagttcgagaaggttcacttgttgcaggcgatgcaggcgattgaggcggcgatgaagagattcttctacgcgtataagcaggtgttggcggtggtgatgggaagttcagaggctaacggtaaccgagttgggttgagttgcgactcggctgactcgttgactcagattttccttgaaccgacgtattttccaagcttggatgccgccaagacttttcttggatacctgtgggataataacgataataacaaatggatatgaaaacg

SEQ ID NO: 54939 - protein, 337 aa, Glycine max
  peptide (1)..(337): Ceres Seq. ID no. 15172094
MHQIEIIAILCEEEEQNSDTRGTAPTADLSSSNSSVSRSYSEASLLPRLATWYKSRDVAQRILLSVECQMRRCSYTLGLGEPNLAGKPSLLYDLVCKPNEIHALKTTPYDERVENHENHAVHATHQIAESWIHASRKVLERIADAVLSRTFLKAAEDCYAVERIWKLLAEVEDLHLMMDPDDFLRLKNQLSVKSSSGETASFCFRSNELVELTKMCRDLRHKVPEILEVEVDPKGGPRIQEAAMKLYVSKSEFEKVHLLQAMQAIEAAMKRFFYAYKQVLAVVMGSSEANGNRVGLSCDSADSLTQIFLEPTYFPSLDAAKTFLGYLWDNNDNNKWI

SEQ ID NO: 54940 - protein, 268 aa, Glycine max
  peptide (1)..(268): Ceres Seq. ID no. 15172095
MRRCSYTLGLGEPNLAGKPSLLYDLVCKPNEIHALKTTPYDERVENHENHAVHATHQIAESWIHASRKVLERIADAVLSRTFLKAAEDCYAVERIWKLLAEVEDLHLMMDPDDFLRLKNQLSVKSSSGETASFCFRSNELVELTKMCRDLRHKVPEILEVEVDPKGGPRIQEAAMKLYVSKSEFEKVHLLQAMQAIEAAMKRFFYAYKQVLAVVMGSSEANGNRVGLSCDSADSLTQIFLEPTYFPSLDAAKTFLGYLWDNNDNNKWI

SEQ ID NO: 54941 - DNA, 1411 bp, Glycine max
  misc_feature (1)..(1411): Ceres Seq. ID no. 15170272
gtttgagagagcagaatggttctatcaaacaagaaactgaagcttaagctgagagctgaattagcccaaagcaactccaacgccgccgctgaacccccttcattttctattaataataataactctctcaaaactcttctggactctgccacgcccacacccagattcttcaagagagagaagcgaagaaagcttcgatccgaccaacctccacaacaacccaacaaggaaaatgaaactgaaacacagggttcgcccaataagaagacaaagaggaagaagctagaggacgatgacgtggcagcaactggagtttccgacacaccaaagaagaagaaaaaccccaggacggctaaggaaaacgaatctaatggtggaggggaaatgccagaggctacagagttaaccaagaccaatacaactaccagtcaagacaatggtgatgctcctaatacaaatacaaagatttatgttggaggaattccctattattcaactgaggatgatattcgaagttattttgaaagctgtggcaccataactgaagttgattgcatgacttttcctgaaactggcaagtttagagggattgccattattactttcaagactgaagcagcagccaaaagagcattggctcttgatggagctgacatgggaggactctttcttaaaatccaaccatataaagcaactcgagccaataaagcctcagattttgctccagaaattttggaggggtacaatagaatatatgttggaaatttgtcgtgggatataacagaggaagaactgaggaaattcttcaataattctgagataacatcgctacgattcggtatggacaaggagacaggagagtttcgagggtatgcccatgtggattttggtgatagtcagtcactaaaaaaagcacttgcattggaccaaaatgttttgtttgggagacctgtcaggataagttgtgcggttcctttgaagaaaaaaactggaactcatgcaagctccacagttaatgaagctaatggtgataaatcaagttccacaggaagtgacaagataaatggagctgatggtgataaatcaagttccacaggaagtggcaagatgaggaggaggacatgctatgagtgtggtgagaaaggacatacatttgcggcatgcccaacgaaacaaacagttgctgcaactacaacctaaagcgtgtaggaaaactcaaacaggtcactgttcttttttcttctagcaaacagtttgattgtagtttataaaatacaataatgaggcatccataactgatcggatttacagtttcctacttcccttgttattgttatcattttttcctcttgaaatgaaaattctttgtctttgttataagcaaagaaaagtaggaagagattaaaaagtc

SEQ ID NO: 54942 - protein, 394 aa, Glycine max
  peptide (1)..(394): Ceres Seq. ID no. 15170273
  misc_feature (151)..(221): Pfam Name: RNA recognition motif. (a.k.a. RRM, RBD, or RNP domain) Pfam Description: RNA recognition motif. (a.k.a. RRM, RBD, or RNP
  misc_feature (80)..(318): Homolog of NCBI NO: 133248 NR Description: 31 kDa ribonucleoprotein, chloroplast precursor
  misc_feature (18)..(388): Homolog of NCBI NO: 38344339 NR Description: OSJNBa0058K23.21 [Oryza sativa (japonica
  misc_feature (71)..(319): Homolog of NCBI NO: 25446691 NR Description: Unknown protein [Oryza sativa (japonica
  misc_feature (303)..(386): Homolog of NCBI NO: 18026763 NR Description: phragmoplastin-interacting protein PHIP1
  misc_feature (303)..(386): Homolog of NCBI NO: 15233246 NR Description: RNA recognition motif (RRM)-containing protein
  misc_feature (1)..(227): Homolog of NCBI NO: 18026763 NR Description: phragmoplastin-interacting protein PHIP1
  misc_feature (293)..(394): Homolog of NCBI NO: 15233246 NR Description: RNA recognition motif (RRM)-containing protein
  misc_feature (1)..(227): Homolog of NCBI NO: 15233246 NR Description: RNA recognition motif (RRM)-containing protein
  misc_feature (53)..(386): Homolog of NCBI NO: 18026763 NR Description: phragmoplastin-interacting protein PHIP1
  misc_feature (70)..(386): Homolog of NCBI NO: 15233246 NR Description: RNA recognition motif (RRM)-containing protein
MVLSNKKLKLKLRAELAQSNSNAAAEPPSFSINNNNSLKTLLDSATPTPRFFKREKRRKLRSDQPPQQPNKENETETQGSPNKKTKRKKLEDDDVAATGVSDTPKKKKNPRTAKENESNGGGEMPEATELTKTNTTTSQDNGDAPNTNTKIYVGGIPYYSTEDDIRSYFESCGTITEVDCMTFPETGKFRGIAIITFKTEAAAKRALALDGADMGGLFLKIQPYKATRANKASDFAPEILEGYNRIYVGNLSWDITEEELRKFFNNSEITSLRFGMDKETGEFRGYAHVDFGDSQSLKKALALDQNVLFGRPVRISCAVPLKKKTGTHASSTVNEANGDKSSSTGSDKINGADGDKSSSTGSGKMRRRTCYECGEKGHTFAACPTKQTVAATTT

SEQ ID NO: 54943 - protein, 271 aa, Glycine max
  peptide (1)..(271): Ceres Seq. ID no. 15170274
  misc_feature (28)..(98): Pfam Name: RNA recognition motif. (a.k.a. RRM, RBD, or RNP domain) Pfam Description: RNA recognition motif. (a.k.a. RRM, RBD, or RNP
  misc_feature (1)..(195): Homolog of NCBI NO: 133248 NR Description: 31 kDa ribonucleoprotein, chloroplast precursor
  misc_feature (1)..(265): Homolog of NCBI NO: 38344339 NR Description: OSJNBa0058K23.21 [Oryza sativa (japonica
  misc_feature (1)..(196): Homolog of NCBI NO: 25446691 NR Description: Unknown protein [Oryza sativa (japonica
  misc_feature (180)..(263): Homolog of NCBI NO: 18026763 NR Description: phragmoplastin-interacting protein PHIP1
  misc_feature (180)..(263): Homolog of NCBI NO: 15233246 NR Description: RNA recognition motif (RRM)-containing protein
  misc_feature (1)..(104): Homolog of NCBI NO: 18026763 NR Description: phragmoplastin-interacting protein PHIP1
  misc_feature (170)..(271): Homolog of NCBI NO: 15233246 NR Description: RNA recognition motif (RRM)-containing protein
  misc_feature (1)..(104): Homolog of NCBI NO: 15233246 NR Description: RNA recognition motif (RRM)-containing protein
  misc_feature (1)..(263): Homolog of NCBI NO: 18026763 NR Description: phragmoplastin-interacting protein PHIP1
  misc_feature (1)..(263): Homolog of NCBI NO: 15233246 NR Description: RNA recognition motif (RRM)-containing protein
MPEATELTKTNTTTSQDNGDAPNTNTKIYVGGIPYYSTEDDIRSYFESCGTITEVDCMTFPETGKFRGIAIITFKTEAAAKRALALDGADMGGLFLKIQPYKATRANKASDFAPEILEGYNRIYVGNLSWDITEEELRKFFNNSEITSLRFGMDKETGEFRGYAHVDFGDSQSLKKALALDQNVLFGRPVRISCAVPLKKKTGTHASSTVNEANGDKSSSTGSDKINGADGDKSSSTGSGKMRRRTCYECGEKGHTFAACPTKQTVAATTT

SEQ ID NO: 54944 - protein, 214 aa, Glycine max
  peptide (1)..(214): Ceres Seq. ID no. 15170275
  misc_feature (1)..(138): Homolog of NCBI NO: 133248 NR Description: 31 kDa ribonucleoprotein, chloroplast precursor
  misc_feature (1)..(208): Homolog of NCBI NO: 38344339 NR Description: OSJNBa0058K23.21 [Oryza sativa (japonica
  misc_feature (1)..(139): Homolog of NCBI NO: 25446691 NR Description: Unknown protein [Oryza sativa (japonica
  misc_feature (123)..(206): Homolog of NCBI NO: 18026763 NR Description: phragmoplastin-interacting protein PHIP1
  misc_feature (123)..(206): Homolog of NCBI NO: 15233246 NR Description: RNA recognition motif (RRM)-containing protein
  misc_feature (1)..(47): Homolog of NCBI NO: 18026763 NR Description: phragmoplastin-interacting protein PHIP1
  misc_feature (113)..(214): Homolog of NCBI NO: 15233246 NR Description: RNA recognition motif (RRM)-containing protein
  misc_feature (1)..(47): Homolog of NCBI NO: 15233246 NR Description: RNA recognition motif (RRM)-containing protein
  misc_feature (1)..(206): Homolog of NCBI NO: 18026763 NR Description: phragmoplastin-interacting protein PHIP1
  misc_feature (1)..(206): Homolog of NCBI NO: 15233246 NR Description: RNA recognition motif (RRM)-containing protein
MTFPETGKFRGIAIITFKTEAAAKRALALDGADMGGLFLKIQPYKATRANKASDFAPEILEGYNRIYVGNLSWDITEEELRKFFNNSEITSLRFGMDKETGEFRGYAHVDFGDSQSLKKALALDQNVLFGRPVRISCAVPLKKKTGTHASSTVNEANGDKSSSTGSDKINGADGDKSSSTGSGKMRRRTCYECGEKGHTFAACPTKQTVAATTT

SEQ ID NO: 54945 - DNA, 1733 bp, Glycine max
  misc_feature (1)..(1733): Ceres Seq. ID no. 15172476
ggttaatttcgtcggtcaactgcatgggtctccgcttctcctctggctcggcacctcactcctcttccctcaacggctctcactgttcaggttcagcaagaactggctgcaagaacgtggggttctccgcaaccgggaagagtcagttttcggagattgcgagtggaagcgacgatcgcgaagagtctcttggtcggattctgaaatggccaaacttgaaggtgtttagttttgaggagctgatttctgcctcaaggcgtttcaggtatgacatacaggggttagtgatcggtaaaggttgttttggcccagtttacaagggatgtttggatgagaatacccttacccctgccaaagtaggctatggaatggccgttgcgatcaaaatgtttaaccaagattacttccgagggtttgaagagtggcagtcagaagtaaactttttaggaaggctttctcaccccaacctggttaatctattgggatactgttgggacgaggataagcttcttctagtgtatgagttcatgccaaagggaagcttagactatcatctattcagaggaaacataacaccactttcttggaacacacggcttaaaatagctattggtgcagctcggggattagctttcttgcacgcctctgaaaacaatgtcatattcagtgatttcaaggcctcaaatatacttcttgacgggaattacaatgcaaagatctcagattttggctttgctagatgggggccttttgaaggagaatcacatgtatctaccagggtcattggcacatatgattatgctgctccagaatacatagcaacaggtaattatatttagccattattaacaactaaggtagctttaaaatgcatgttttgactttattaatgtctcataaggcaagatgtgagccaagattacattctatgccatgtaaaaaagacacggaagcaaaataaattaaaaaacaaaggatctgtttggtttaagaagatgttttcatctttgtttcctgtttttcacaaataattactgaaatgctatgtggtttcttgatttcaaagatttacacgagaaacagttaacaccagatttgcgttcttttcactgtttctgaaagtaggaaacaaagtcaaaacaaggtgacatattgacatttttgtagttatcaatacaaacaggaaatgaaaacagacgaagttttcttaaaccaaacaggacttagtgtaacacaaacagtcgatgctgtggaaggtgaagttgggagaaggcagactaaaataaggaatagtgtaatgctctgatccaccacaaactaacatgcctttgaattgtatcaatatttcaaaaggccacttgtatgtgaagagtgatatctatggatttggtgtagtgctgcttgaaatacttacaggcatgcgggcacttgacacaaatcgacctcaaaccatgcagaacctagttgaatggactaagccttgtctttcttccaaaaaaaagttgaaagccataatggatgctaagatagagggtcaatattcacttgaggcagcatggcaagcagcaaaacttactctaaaatgcctaaaatctgtccctgaagaacgtccttctatgaaagatgtagttgaggcattggaagccattgaagctatccaaaacccacaattcgcagcgtacatctcatccaccccctcggcagggtcgtaagagtataaacaaatttataag

SEQ ID NO: 54946 - protein, 278 aa, Glycine max
  peptide (1)..(278): Ceres Seq. ID no. 15172477
  misc_feature (31)..(278): Homolog of NCBI NO: 14719339 NR Description: putative protein kinase [Oryza sativa]
  misc_feature (64)..(278): Homolog of NCBI NO: 25287650 NR Description: hypothetical protein F15M4.14 [imported] -
  misc_feature (6)..(276): Homolog of NCBI NO: 34906046 NR Description: putative serine/threonine-specific protein kinase
  misc_feature (10)..(278): Homolog of NCBI NO: 30690422 NR Description: protein kinase family [Arabidopsis thaliana]
  misc_feature (7)..(278): Homolog of NCBI NO: 25287611 NR Description: protein kinase-like protein [imported] -
  misc_feature (40)..(278): Homolog of NCBI NO: 20503002 NR Description: Putative protein kinase [Oryza sativa (japonica
  misc_feature (8)..(278): Homolog of NCBI NO: 25287605 NR Description: probable protein kinase [imported] - Arabidopsis
  misc_feature (16)..(278): Homolog of NCBI NO: 18398350 NR Description: protein kinase -related [Arabidopsis thaliana]
  misc_feature (16)..(278): Homolog of NCBI NO: 21537344 NR Description: putative protein kinase [Arabidopsis thaliana]
  misc_feature (14)..(278): Homolog of NCBI NO: 38345396 NR Description: OSJNBa0017B10.2 [Oryza sativa (japonica
LISSVNCMGLRFSSGSAPHSSSLNGSHCSGSARTGCKNVGFSATGKSQFSEIASGSDDREESLGRILKWPNLKVFSFEELISASRRFRYDIQGLVIGKGCFGPVYKGCLDENTLTPAKVGYGMAVAIKMFNQDYFRGFEEWQSEVNFLGRLSHPNLVNLLGYCWDEDKLLLVYEFMPKGSLDYHLFRGNITPLSWNTRLKIAIGAARGLAFLHASENNVIFSDFKASNILLDGNYNAKISDFGFARWGPFEGESHVSTRVIGTYDYAAPEYIATGNYI

SEQ ID NO: 54947 - protein, 271 aa, Glycine max
  peptide (1)..(271): Ceres Seq. ID no. 15172478
  misc_feature (24)..(271): Homolog of NCBI NO: 14719339 NR Description: putative protein kinase [Oryza sativa]
  misc_feature (57)..(271): Homolog of NCBI NO: 25287650 NR Description: hypothetical protein F15M4.14 [imported] -
  misc_feature (1)..(269): Homolog of NCBI NO: 34906046 NR Description: putative serine/threonine-specific protein kinase
  misc_feature (3)..(271): Homolog of NCBI NO: 30690422 NR Description: protein kinase family [Arabidopsis thaliana]
  misc_feature (1)..(271): Homolog of NCBI NO: 25287611 NR Description: protein kinase-like protein [imported] -
  misc_feature (33)..(271): Homolog of NCBI NO: 20503002 NR Description: Putative protein kinase [Oryza sativa (japonica
  misc_feature (1)..(271): Homolog of NCBI NO: 25287605 NR Description: probable protein kinase [imported] - Arabidopsis
  misc_feature (9)..(271): Homolog of NCBI NO: 18398350 NR Description: protein kinase -related [Arabidopsis thaliana]
  misc_feature (9)..(271): Homolog of NCBI NO: 21537344 NR Description: putative protein kinase [Arabidopsis thaliana]
  misc_feature (7)..(271): Homolog of NCBI NO: 38345396 NR Description: OSJNBa0017B10.2 [Oryza sativa (japonica
MGLRFSSGSAPHSSSLNGSHCSGSARTGCKNVGFSATGKSQFSEIASGSDDREESLGRILKWPNLKVFSFEELISASRRFRYDIQGLVIGKGCFGPVYKGCLDENTLTPAKVGYGMAVAIKMFNQDYFRGFEEWQSEVNFLGRLSHPNLVNLLGYCWDEDKLLLVYEFMPKGSLDYHLFRGNITPLSWNTRLKIAIGAARGLAFLHASENNVIFSDFKASNILLDGNYNAKISDFGFARWGPFEGESHVSTRVIGTYDYAAPEYIATGNYI

SEQ ID NO: 54948 - protein, 156 aa, Glycine max
  peptide (1)..(156): Ceres Seq. ID no. 15172479
  misc_feature (1)..(156): Homolog of NCBI NO: 14719339 NR Description: putative protein kinase [Oryza sativa]
  misc_feature (1)..(156): Homolog of NCBI NO: 25287650 NR Description: hypothetical protein F15M4.14 [imported] -
  misc_feature (1)..(154): Homolog of NCBI NO: 34906046 NR Description: putative serine/threonine-specific protein kinase
  misc_feature (1)..(156): Homolog of NCBI NO: 30690422 NR Description: protein kinase family [Arabidopsis thaliana]
  misc_feature (1)..(156): Homolog of NCBI NO: 25287611 NR Description: protein kinase-like protein [imported] -
  misc_feature (1)..(156): Homolog of NCBI NO: 20503002 NR Description: Putative protein kinase [Oryza sativa (japonica
  misc_feature (1)..(156): Homolog of NCBI NO: 25287605 NR Description: probable protein kinase [imported] - Arabidopsis
  misc_feature (1)..(156): Homolog of NCBI NO: 18398350 NR Description: protein kinase -related [Arabidopsis thaliana]
  misc_feature (1)..(156): Homolog of NCBI NO: 21537344 NR Description: putative protein kinase [Arabidopsis thaliana]
  misc_feature (1)..(156): Homolog of NCBI NO: 38345396 NR Description: OSJNBa0017B10.2 [Oryza sativa (japonica
MAVAIKMFNQDYFRGFEEWQSEVNFLGRLSHPNLVNLLGYCWDEDKLLLVYEFMPKGSLDYHLFRGNITPLSWNTRLKIAIGAARGLAFLHASENNVIFSDFKASNILLDGNYNAKISDFGFARWGPFEGESHVSTRVIGTYDYAAPEYIATGNYI

SEQ ID NO: 54949 - DNA, 1380 bp, Glycine max
  misc_feature (1)..(1380): Ceres Seq. ID no. 15176234
gcattgttctaacacgataatcctgtgaaggcgttaactccaaagatccaatttcactatataaattgtgacgaaagcaaaatgaattcacatagctgagagagaaaggaaaggttaactaagaagcaatacttcaatggccacccttgttgttcataaccaaacttcttctgctcaagatgctgaggctctccaacaggctttcaaaggatggggggctgatgacaaggccattatagcaatactgggtcacagaaatgttcatcagaggcaagaaatcagaaaagcttatgaggagatttaccaagaggatctcatcaaacgccttgagtccgagatctctggtgactttgagagagctatgtaccggtggatgttgcagcctgcggatcgtgatgctgttttggtgaatgtggcaatcaagaatggcaccaaagactaccatgtgattgcagagattgcttgtgtcctatcagctgaagagctcttggcagtgaggcgggcctaccaccgccgctacaagtgttccttggaggaagatgtggcagctaacaccaccggcaatcttcgccagcttttggttggattggtgacctcatataggtatgagggtgatgagatcaatgtaaaattttcacaaactgaagctaatgttcttcatgaatctgtcaaggagaagaaaggcaacagtgaagaagtcatcaggatccttactacaagaagcaaaactcaacttgtggcaactttcaaccgctacagagatgaacatggaatttccatcagtaagaaattgttggatcaaacatctgatgacttccacaaggtgttgcacactgctattcgctgcatcaatgaccataagaagtactatgagaaggttttgcgcaatgcagtcaagaagtttggaactgacgaggatggactaagccgtgtgattgttacaagggctgagaaggatctgaaggacatcaaagagctctactacaagagaaacagtgttcaccttgaggatgaagtgtccaaggaaacttctggggactacaagaagttcctcctcactctcttggggaaataagactaagttaagaacttgctctaagggcatcttagtaatgggtttttgttaattatgtcattggtttctggtttgtgcgatttcattatgttagttttccagtaagagtttgttatatctggttaagtttttgagacaacaagaactcgtgtcttgtttgagggcatgcgtgccatttcttagggttgtgttggtacttggcatgctcttattagaggacctctatgctgcgtgtttcctttggattatgctattacctcacctggtttgcttttaatgaaaggttgataacaaatttatatgtg

SEQ ID NO: 54950 - protein, 312 aa, Glycine max
  peptide (1)..(312): Ceres Seq. ID no. 15176235
  misc_feature (242)..(309): Pfam Name: Annexin Pfam Description: Annexin
  misc_feature (14)..(311): Homolog of NCBI NO: 32401406 NR Description: annexin 11a; ANX XIa [Danio rerio]
  misc_feature (25)..(311): Homolog of NCBI NO: 34905372 NR Description: putative annexin [Oryza sativa (japonica
  misc_feature (1)..(312): Homolog of NCBI NO: 4580920 NR Description: vacuole-associated annexin VCaB42 [Nicotiana
  misc_feature (1)..(312): Homolog of NCBI NO: 3928134 NR Description: annexin P38 [Capsicum annuum]
  misc_feature (1)..(312): Homolog of NCBI NO: 1621539 NR Description: annexin-like protein
  misc_feature (1)..(312): Homolog of NCBI NO: 15220216 NR Description: Ca2+-dependent membrane-binding protein annexin
  misc_feature (1)..(311): Homolog of NCBI NO: 22326753 NR Description: annexin-related protein [Arabidopsis thaliana]
  misc_feature (44)..(312): Homolog of NCBI NO: 1362037 NR Description: annexin homolog RJ4 (clone RJ4) - garden
  misc_feature (1)..(312): Homolog of NCBI NO: 21264397 NR Description: Annexin-like protein RJ4
  misc_feature (1)..(312): Homolog of NCBI NO: 3176098 NR Description: annexin [Medicago truncatula]
MATLVVHNQTSSAQDAEALQQAFKGWGADDKAIIAILGHRNVHQRQEIRKAYEEIYQEDLIKRLESEISGDFERAMYRWMLQPADRDAVLVNVAIKNGTKDYHVIAEIACVLSAEELLAVRRAYHRRYKCSLEEDVAANTTGNLRQLLVGLVTSYRYEGDEINVKFSQTEANVLHESVKEKKGNSEEVIRILTTRSKTQLVATFNRYRDEHGISISKKLLDQTSDDFHKVLHTAIRCINDHKKYYEKVLRNAVKKFGTDEDGLSRVIVTRAEKDLKDIKELYYKRNSVHLEDEVSKETSGDYKKFLLTLLGK

SEQ ID NO: 54951 - protein, 237 aa, Glycine max; identical to SEQ ID NO: 53326
  peptide (1)..(237): Ceres Seq. ID no. 15176236
  misc_feature (167)..(234): Pfam Name: Annexin Pfam Description: Annexin
  misc_feature (1)..(236): Homolog of NCBI NO: 32401406 NR Description: annexin 11a; ANX XIa [Danio rerio]
  misc_feature (1)..(236): Homolog of NCBI NO: 34905372 NR Description: putative annexin [Oryza sativa (japonica
  misc_feature (1)..(237): Homolog of NCBI NO: 4580920 NR Description: vacuole-associated annexin VCaB42 [Nicotiana
  misc_feature (1)..(237): Homolog of NCBI NO: 3928134 NR Description: annexin P38 [Capsicum annuum]
  misc_feature (1)..(237): Homolog of NCBI NO: 1621539 NR Description: annexin-like protein
  misc_feature (1)..(237): Homolog of NCBI NO: 15220216 NR Description: Ca2+-dependent membrane-binding protein annexin
  misc_feature (1)..(236): Homolog of NCBI NO: 22326753 NR Description: annexin-related protein [Arabidopsis thaliana]
  misc_feature (1)..(237): Homolog of NCBI NO: 1362037 NR Description: annexin homolog RJ4 (clone RJ4) - garden
  misc_feature (1)..(237): Homolog of NCBI NO: 21264397 NR Description: Annexin-like protein RJ4
  misc_feature (1)..(237): Homolog of NCBI NO: 3176098 NR Description: annexin [Medicago truncatula]

SEQ ID NO: 54952 - protein, 233 aa, Glycine max; identical to SEQ ID NO: 53327
  peptide (1)..(233): Ceres Seq. ID no. 15176237
  misc_feature (163)..(230): Pfam Name: Annexin Pfam Description: Annexin
  misc_feature (1)..(232): Homolog of NCBI NO: 32401406 NR Description: annexin 11a; ANX XIa [Danio rerio]
  misc_feature (1)..(232): Homolog of NCBI NO: 34905372 NR Description: putative annexin [Oryza sativa (japonica
  misc_feature (1)..(233): Homolog of NCBI NO: 4580920 NR Description: vacuole-associated annexin VCaB42 [Nicotiana
  misc_feature (1)..(233): Homolog of NCBI NO: 3928134 NR Description: annexin P38 [Capsicum annuum]
  misc_feature (1)..(233): Homolog of NCBI NO: 1621539 NR Description: annexin-like protein
  misc_feature (1)..(233): Homolog of NCBI NO: 15220216 NR Description: Ca2+-dependent membrane-binding protein annexin
  misc_feature (1)..(232): Homolog of NCBI NO: 22326753 NR Description: annexin-related protein [Arabidopsis thaliana]
  misc_feature (1)..(233): Homolog of NCBI NO: 1362037 NR Description: annexin homolog RJ4 (clone RJ4) - garden
  misc_feature (1)..(233): Homolog of NCBI NO: 21264397 NR Description: Annexin-like protein RJ4
  misc_feature (1)..(233): Homolog of NCBI NO: 3176098 NR Description: annexin [Medicago truncatula]

SEQ ID NO: 54953 - DNA, 1440 bp, Glycine max
  misc_feature (1)..(1440): Ceres Seq. ID no. 12607348
gcccccccccctgggaaaatgctttttatttggttcttttaatttcatggcttgtagttagaactgaatagcataaactgtaatctgttgaatctgcttgtgttttaatttcaaagaagcaagacaattatctagctactttaatggccttttgttatcgttttgcattggtggcatattaagccttttcaatgtgtggattcaataccatcaaggatgggactggggctttgggttctccaccattgaatgaaattgaacagaaaataggagaaagaattctccttctcccccaaggatttgtcctttcacaactcatttctctattaacaaactaactaactactatcctatctgtcttaactaactctcccttccttctctcctaactcctaacataaaaactcttcttaacttggtgagatgaaataactttttatcatgtactgtcatgatattgtagtgattagaaaagaaaactgtgttgctattttgttgatctgattatatttattagagatctcagctgaacagagtggaaagaaacaatttataatataattttttacttctgagaattaggcttaaagtaattatggataaactaacacactggtttctgtgagcttgtcaagcatacacatttcccttggggcttatttaaaggttaatgcttatattggaatttaatggtttaattagaattggatgagaagtatactgtatagatttgattatgaagccaactattgttctttggactttgattattagtttacataattattgaagtggtttgaagtgaactgtctgtttaggatgactaagcatgcacttcaatcttctatttattccctgccccatatctcagcatatgaaattttagttgttacgtcattatacctaccagtgcatgcttgagtgttctctacttgtttaattgaaagcttcatgtaatttgctatgttttgcaggaggacaagatcacaatcatgccctttttgccgcgacaatcttaagagagtaaactcgggtgatctctgggtgttcactgacaatagggatgtagtagacatggcaacagtgacaagggagaatcttagaaggcttttcatgtacatagataagttgcctttggtcattccagactttctctttgacacatatgactctcacctaagatgagtggttgcaacagacagattttactgtctggtgtgtggtcttggaggggtggttcctttctatttagtaacgtaaactccgaatgcaatttggtaaatttagtttatatagagttgtattgttgcttcccacgtcttccagaagtatccagccctgtgtttactgtgggttggtggtgaagttgagatggtaaattgtatgtaggtcatttgtatatcctgtacagattgaattacttattaagaagagttttgc

SEQ ID NO: 54954 - protein, 73 aa, Glycine max
  peptide (1)..(73): Ceres Seq. ID no. 12607349
  misc_feature (5)..(62): Homolog of NCBI NO: 15241003 NR Description: putative protein
  misc_feature (6)..(73): Homolog of NCBI NO: 37534822 NR Description: putative AP2-domain DNA-binding protein
  misc_feature (7)..(73): Homolog of NCBI NO: 21618121 NR Description: RNA-binding protein-like protein [Arabidopsis
  misc_feature (7)..(73): Homolog of NCBI NO: 15232735 NR Description: RNA-binding protein-like protein
  misc_feature (7)..(73): Homolog of NCBI NO: 9294812 NR Description: MTD2 [Medicago truncatula]
  misc_feature (5)..(73): Homolog of NCBI NO: 18424150 NR Description: Expressed protein
  misc_feature (5)..(73): Homolog of NCBI NO: 8843801 NR Description: contains similarity to RNA binding-like
  misc_feature (6)..(73): Homolog of NCBI NO: 37535758 NR Description: unknown protein [Oryza sativa (japonica
  misc_feature (5)..(71): Homolog of NCBI NO: 34899152 NR Description: RNA-binding protein-like~contains EST
  misc_feature (5)..(73): Homolog of NCBI NO: 38175742 NR Description: zinc finger protein family-like
MFCRRTRSQSCPFCRDNLKRVNSGDLWVFTDNRDVVDMATVTRENLRRLFMYIDKLPLVIPDFLFDTYDSHLR

SEQ ID NO: 54955 - protein, 60 aa, Glycine max
  peptide (1)..(60): Ceres Seq. ID no. 12607350
MSGCNRQILLSGVWSWRGGSFLFSNVNSECNLVNLVYIELYCCFPRLPEVSSPVFTVGWW

SEQ ID NO: 54956 - protein, 48 aa, Glycine max
  peptide (1)..(48): Ceres Seq. ID no. 12607351
MCGFNTIKDGTGALGSPPLNEIEQKIGERILLLPQGFVLSQLISLLTN

SEQ ID NO: 54957 - DNA, 1683 bp, Glycine max
  misc_feature (1)..(1683): Ceres Seq. ID no. 15169252
agatataacagcagacactacctgcggaagacgatccggagccgccacctattcttttgttcatcacatattcaatggcttcctctcttctctctccatcatttacatccttcctccgcaccaaggatctctctctctctgctttcacttctcagcgatgcttcaaagcggtgccaaggaaaataatccgttgtgctattgcggcgcctcagcgccaaccttccaccactggatcagtgaggactgcaatgaccatgactgagaagatattggccagagcttctgagaaggcacagctgacccctggggataatgtttgggtcaatgttgatattttgatgacacatgatgtgtgtggccctggttctattgggattttcaagagggagtttggcgaggatgccaaggtttgggaccgtgaaaagcttgtaataatacctgaccactatattttcacaagtgatgaacgtgccaatcgcaatgtagacatattaagagatttctgccatgagcagaatatcaagtacttttatgatattaaggatcttagtaattttaaggtaaatccagactataagggtgtttgccatgttgctcttgctcaggaaggtcattgtaggccaggagaggttctcttaggtactgattctcacacttgtactgctggagcatttggtcaatttgctacagggattggtaatactgatgccggctttgtgctgggaactgggaaacttctgctcaaggtgcccccaactttgagatttgtaatggatggagaaatgcccgattatttgctttctaaggatttgattctgcaaattattggtgaaataactgtggctggggcaacatataaatcgatggagtttgttggtacaaccgttgaaagtttaactatggaagaacggatgacattgtgcaacatggttgttgaagctggtggaaagaatggtgttgttcctgctgacagcactacatttaaatatcttgagggcaagacatctctgccatatgaacctgtttatagtgacgatcaagcaagatttctcgcagagtatagatttgatgtctcaaaattggagccagtggtggccaagcctcattctccggataatcgtgctttggcaagagagtgcaaggatgtgaaaattgacagagtatacataggatcttgtacaggtggcaaaacagaggatttcatggctgcagcaaaagtttttctggcatcaggtaaacaggtcaaagttcctacatttcttgtgcctgcaacacaaaaggtttggatggacttgtactccctccctgtccctggatctggtggtaagacatgctcacagatatttgaagaagttgggtgtgacacaccagctagtcctagttgtggtgcttgtttgggtggcccaaaagatacttacgcacgcatgaatgaacctaaggtttgtgtttcaactacgaacaggaacttcccgggccgaatgggacacaaggaaggtcaaatctatttggcttccccttatacagctgctgcatctgcattgaccggttatgttactgatcctagagagttcttgtagtagaatgttgttacaatcatctcattgtgttgtactcgttgttggttatttgtgtattctctactctctactagtcataagttaaaactgacaactatttaagctc

SEQ ID NO: 54958 - protein, 500 aa, Glycine max
  peptide (1)..(500): Ceres Seq. ID no. 15169253
  misc_feature (60)..(491): Pfam Name: Aconitase family (aconitate hydratase) Pfam Description: Aconitase family (aconitate hydratase)
  misc_feature (52)..(498): Homolog of NCBI NO: 23050847 NR Description: hypothetical protein [Methanosarcina barkeri]
  misc_feature (60)..(497): Homolog of NCBI NO: 20091903 NR Description: 3-isopropylmalate dehydratase, large subunit
  misc_feature (59)..(498): Homolog of NCBI NO: 15606262 NR Description: large subunit of isopropylmalate isomerase
  misc_feature (58)..(496): Homolog of NCBI NO: 15679385 NR Description: 3-isopropylmalate dehydratase, LeuD subunit
  misc_feature (59)..(498): Homolog of NCBI NO: 15668676 NR Description: 3-isopropylmalate dehydratase (leuC)
  misc_feature (60)..(500): Homolog of NCBI NO: 20094876 NR Description: 3-isopropylmalate dehydratase large subunit
  misc_feature (58)..(500): Homolog of NCBI NO: 21673449 NR Description: 3-isopropylmalate dehydratase, large subunit,
  misc_feature (59)..(500): Homolog of NCBI NO: 23043646 NR Description: hypothetical protein [Trichodesmium erythraeum
  misc_feature (1)..(500): Homolog of NCBI NO: 7450363 NR Description: hypothetical protein T9E8.170 - Arabidopsis
  misc_feature (1)..(500): Homolog of NCBI NO: 18414006 NR Description: aconitase family [Arabidopsis thaliana]
MASSLLSPSFTSFLRTKDLSLSAFTSQRCFKAVPRKIIRCAIAAPQRQPSTTGSVRTAMTMTEKILARASEKAQLTPGDNVWVNVDILMTHDVCGPGSIGIFKREFGEDAKVWDREKLVIIPDHYIFTSDERANRNVDILRDFCHEQNIKYFYDIKDLSNFKVNPDYKGVCHVALAQEGHCRPGEVLLGTDSHTCTAGAFGQFATGIGNTDAGFVLGTGKLLLKVPPTLRFVMDGEMPDYLLSKDLILQIIGEITVAGATYKSMEFVGTTVESLTMEERMTLCNMVVEAGGKNGVVPADSTTFKYLEGKTSLPYEPVYSDDQARFLAEYRFDVSKLEPVVAKPHSPDNRALARECKDVKIDRVYIGSCTGGKTEDFMAAAKVFLASGKQVKVPTFLVPATQKVWMDLYSLPVPGSGGKTCSQIFEEVGCDTPASPSCGACLGGPKDTYARMNEPKVCVSTTNRNFPGRMGHKEGQIYLASPYTAAASALTGYVTDPREFL

SEQ ID NO: 54959 - protein, 442 aa, Glycine max
  peptide (1)..(442): Ceres Seq. ID no. 15169254
  misc_feature (2)..(433): Pfam Name: Aconitase family (aconitate hydratase) Pfam Description: Aconitase family (aconitate hydratase)
  misc_feature (1)..(440): Homolog of NCBI NO: 23050847 NR Description: hypothetical protein [Methanosarcina barkeri]
  misc_feature (2)..(439): Homolog of NCBI NO: 20091903 NR Description: 3-isopropylmalate dehydratase, large subunit
  misc_feature (1)..(440): Homolog of NCBI NO: 15606262 NR Description: large subunit of isopropylmalate isomerase
  misc_feature (1)..(438): Homolog of NCBI NO: 15679385 NR Description: 3-isopropylmalate dehydratase, LeuD subunit
  misc_feature (1)..(440): Homolog of NCBI NO: 15668676 NR Description: 3-isopropylmalate dehydratase (leuC)
  misc_feature (2)..(442): Homolog of NCBI NO: 20094876 NR Description: 3-isopropylmalate dehydratase large subunit
  misc_feature (1)..(442): Homolog of NCBI NO: 21673449 NR Description: 3-isopropylmalate dehydratase, large subunit,
  misc_feature (1)..(442): Homolog of NCBI NO: 23043646 NR Description: hypothetical protein [Trichodesmium erythraeum
  misc_feature (1)..(442): Homolog of NCBI NO: 7450363 NR Description: hypothetical protein T9E8.170 - Arabidopsis
  misc_feature (1)..(442): Homolog of NCBI NO: 18414006 NR Description: aconitase family [Arabidopsis thaliana]
MTMTEKILARASEKAQLTPGDNVWVNVDILMTHDVCGPGSIGIFKREFGEDAKVWDREKLVIIPDHYIFTSDERANRNVDILRDFCHEQNIKYFYDIKDLSNFKVNPDYKGVCHVALAQEGHCRPGEVLLGTDSHTCTAGAFGQFATGIGNTDAGFVLGTGKLLLKVPPTLRFVMDGEMPDYLLSKDLILQIIGEITVAGATYKSMEFVGTTVESLTMEERMTLCNMVVEAGGKNGVVPADSTTFKYLEGKTSLPYEPVYSDDQARFLAEYRFDVSKLEPVVAKPHSPDNRALARECKDVKIDRVYIGSCTGGKTEDFMAAAKVFLASGKQVKVPTFLVPATQKVWMDLYSLPVPGSGGKTCSQIFEEVGCDTPASPSCGACLGGPKDTYARMNEPKVCVSTTNRNFPGRMGHKEGQIYLASPYTAAASALTGYVTDPREFL

SEQ ID NO: 54960 - protein, 440 aa, Glycine max
  peptide (1)..(440): Ceres Seq. ID no. 15169255
  misc_feature (1)..(431): Pfam Name: Aconitase family (aconitate hydratase) Pfam Description: Aconitase family (aconitate hydratase)
  misc_feature (1)..(438): Homolog of NCBI NO: 23050847 NR Description: hypothetical protein [Methanosarcina barkeri]
  misc_feature (1)..(437): Homolog of NCBI NO: 20091903 NR Description: 3-isopropylmalate dehydratase, large subunit
  misc_feature (1)..(438): Homolog of NCBI NO: 15606262 NR Description: large subunit of isopropylmalate isomerase
  misc_feature (1)..(436): Homolog of NCBI NO: 15679385 NR Description: 3-isopropylmalate dehydratase, LeuD subunit
  misc_feature (1)..(438): Homolog of NCBI NO: 15668676 NR Description: 3-isopropylmalate dehydratase (leuC)
  misc_feature (1)..(440): Homolog of NCBI NO: 20094876 NR Description: 3-isopropylmalate dehydratase large subunit
  misc_feature (1)..(440): Homolog of NCBI NO: 21673449 NR Description: 3-isopropylmalate dehydratase, large subunit,
  misc_feature (1)..(440): Homolog of NCBI NO: 23043646 NR Description: hypothetical protein [Trichodesmium erythraeum
  misc_feature (1)..(440): Homolog of NCBI NO: 7450363 NR Description: hypothetical protein T9E8.170 - Arabidopsis
  misc_feature (1)..(440): Homolog of NCBI NO: 18414006 NR Description: aconitase family [Arabidopsis thaliana]
MTEKILARASEKAQLTPGDNVWVNVDILMTHDVCGPGSIGIFKREFGEDAKVWDREKLVIIPDHYIFTSDERANRNVDILRDFCHEQNIKYFYDIKDLSNFKVNPDYKGVCHVALAQEGHCRPGEVLLGTDSHTCTAGAFGQFATGIGNTDAGFVLGTGKLLLKVPPTLRFVMDGEMPDYLLSKDLILQIIGEITVAGATYKSMEFVGTTVESLTMEERMTLCNMVVEAGGKNGVVPADSTTFKYLEGKTSLPYEPVYSDDQARFLAEYRFDVSKLEPVVAKPHSPDNRALARECKDVKIDRVYIGSCTGGKTEDFMAAAKVFLASGKQVKVPTFLVPATQKVWMDLYSLPVPGSGGKTCSQIFEEVGCDTPASPSCGACLGGPKDTYARMNEPKVCVSTTNRNFPGRMGHKEGQIYLASPYTAAASALTGYVTDPREFL

SEQ ID NO: 54961 - DNA, 937 bp, Glycine max
  misc_feature (1)..(937): Ceres Seq. ID no. 13593987
ttacctccaggtcgccctcctgctccatctcaaatgatacctcatccaaatgttggtgcatatatgtcaagccaacagccaactgttggatatactaatttaattagttctctaatgtcgcaaggtgtgatctcattggctaaccagctgcctgcacaggattctgttggaactgagtttaatccagatattctgaaggttcgtcatgagtctgcagtcaatgccttatatggtgatctccctagacaatgcacaacttgtgggctgagattcaaatgccaagaggaacacagtagtcatatggattggcatgtgactaagaatcggatgtctaaaacccgtaagcagaaaccctctcggaagtggtttgttagtgacaggatgtggctcagtggtgcagaggcattgggaacagaatcagctccaggttttttgccaacagaaaccatagaagaaaggaaagatgatgaagagttggcagtgcctgcagaagaagaccagaatacatgtgcattatgcggagagccttttgatgagttttacagtgatgaaatggaggaatggatgtatcgaggagcagtatacctcaatgcacctacgggaacaacagcaggcatggataggactcagttaggccccataattcatgctaaatgcagatcagaatctaatatggccacctctgaagatcttggaccagatgaaaagggtgccgatgaagagggttcccaaaggaaacgaatgcgaagttgatcaatgttgaccagttttgtgcattgtaacttatgattttccgttggtgtatctcatagagttgaatcttgcaataccatggccattctgccaaagtcatgtacatgtatagttggactagtaacgttcatattttcttgcagccaacggttacattttaacttaaaattatttcgtcccttgc

SEQ ID NO: 54962 - protein, 250 aa, Glycine max
  peptide (1)..(250): Ceres Seq. ID no. 13593988
  misc_feature (53)..(229): Homolog of NCBI NO: 25408479 NR Description: hypothetical protein At2g36480 [imported] -
  misc_feature (53)..(229): Homolog of NCBI NO: 18404146 NR Description: expressed protein [Arabidopsis thaliana]
  misc_feature (15)..(226): Homolog of NCBI NO: 18086323 NR Description: At1g66500/F28G11_6 [Arabidopsis thaliana]
  misc_feature (15)..(226): Homolog of NCBI NO: 15219679 NR Description: expressed protein [Arabidopsis thaliana]
  misc_feature (3)..(226): Homolog of NCBI NO: 15239923 NR Description: S-locus protein 4-related [Arabidopsis thaliana]
  misc_feature (24)..(231): Homolog of NCBI NO: 18642418 NR Description: putative PCF11 protein [Brassica napus]
  misc_feature (2)..(231): Homolog of NCBI NO: 6069478 NR Description: S-locus protein 4 [Brassica rapa]
  misc_feature (1)..(224): Homolog of NCBI NO: 38637067 NR Description: putative S-locus protein 4
  misc_feature (18)..(224): Homolog of NCBI NO: 4115937 NR Description: contains similarity to human PCF11p homolog
  misc_feature (18)..(250): Homolog of NCBI NO: 30679905 NR Description: S-locus protein 4-related [Arabidopsis thaliana]
LPPGRPPAPSQMIPHPNVGAYMSSQQPTVGYTNLISSLMSQGVISLANQLPAQDSVGTEFNPDILKVRHESAVNALYGDLPRQCTTCGLRFKCQEEHSSHMDWHVTKNRMSKTRKQKPSRKWFVSDRMWLSGAEALGTESAPGFLPTETIEERKDDEELAVPAEEDQNTCALCGEPFDEFYSDEMEEWMYRGAVYLNAPTGTTAGMDRTQLGPIIHAKCRSESNMATSEDLGPDEKGADEEGSQRKRMRS

SEQ ID NO: 54963 - protein, 239 aa, Glycine max
  peptide (1)..(239): Ceres Seq. ID no. 13593989
  misc_feature (42)..(218): Homolog of NCBI NO: 25408479 NR Description: hypothetical protein At2g36480 [imported] -
  misc_feature (42)..(218): Homolog of NCBI NO: 18404146 NR Description: expressed protein [Arabidopsis thaliana]
  misc_feature (4)..(215): Homolog of NCBI NO: 18086323 NR Description: At1g66500/F28G11_6 [Arabidopsis thaliana]
  misc_feature (4)..(215): Homolog of NCBI NO: 15219679 NR Description: expressed protein [Arabidopsis thaliana]
  misc_feature (1)..(215): Homolog of NCBI NO: 15239923 NR Description: S-locus protein 4-related [Arabidopsis thaliana]
  misc_feature (13)..(220): Homolog of NCBI NO: 18642418 NR Description: putative PCF11 protein [Brassica napus]
  misc_feature (1)..(220): Homolog of NCBI NO: 6069478 NR Description: S-locus protein 4 [Brassica rapa]
  misc_feature (1)..(213): Homolog of NCBI NO: 38637067 NR Description: putative S-locus protein 4
  misc_feature (7)..(213): Homolog of NCBI NO: 4115937 NR Description: contains similarity to human PCF11p homolog
  misc_feature (7)..(239): Homolog of NCBI NO: 30679905 NR Description: S-locus protein 4-related [Arabidopsis thaliana]
MIPHPNVGAYMSSQQPTVGYTNLISSLMSQGVISLANQLPAQDSVGTEFNPDILKVRHESAVNALYGDLPRQCTTCGLRFKCQEEHSSHMDWHVTKNRMSKTRKQKPSRKWFVSDRMWLSGAEALGTESAPGFLPTETIEERKDDEELAVPAEEDQNTCALCGEPFDEFYSDEMEEWMYRGAVYLNAPTGTTAGMDRTQLGPIIHAKCRSESNMATSEDLGPDEKGADEEGSQRKRMRS

SEQ ID NO: 54964 - protein, 229 aa, Glycine max
  peptide (1)..(229): Ceres Seq. ID no. 13593990
  misc_feature (32)..(208): Homolog of NCBI NO: 25408479 NR Description: hypothetical protein At2g36480 [imported] -
  misc_feature (32)..(208): Homolog of NCBI NO: 18404146 NR Description: expressed protein [Arabidopsis thaliana]
  misc_feature (1)..(205): Homolog of NCBI NO: 18086323 NR Description: At1g66500/F28G11_6 [Arabidopsis thaliana]
  misc_feature (1)..(205): Homolog of NCBI NO: 15219679 NR Description: expressed protein [Arabidopsis thaliana]
  misc_feature (1)..(205): Homolog of NCBI NO: 15239923 NR Description: S-locus protein 4-related [Arabidopsis thaliana]
  misc_feature (3)..(210): Homolog of NCBI NO: 18642418 NR Description: putative PCF11 protein [Brassica napus]
  misc_feature (1)..(210): Homolog of NCBI NO: 6069478 NR Description: S-locus protein 4 [Brassica rapa]
  misc_feature (1)..(203): Homolog of NCBI NO: 38637067 NR Description: putative S-locus protein 4
  misc_feature (1)..(203): Homolog of NCBI NO: 4115937 NR Description: contains similarity to human PCF11p homolog
  misc_feature (1)..(229): Homolog of NCBI NO: 30679905 NR Description: S-locus protein 4-related [Arabidopsis thaliana]
MSSQQPTVGYTNLISSLMSQGVISLANQLPAQDSVGTEFNPDILKVRHESAVNALYGDLPRQCTTCGLRFKCQEEHSSHMDWHVTKNRMSKTRKQKPSRKWFVSDRMWLSGAEALGTESAPGFLPTETIEERKDDEELAVPAEEDQNTCALCGEPFDEFYSDEMEEWMYRGAVYLNAPTGTTAGMDRTQLGPIIHAKCRSESNMATSEDLGPDEKGADEEGSQRKRMRS

SEQ ID NO: 54965 - DNA, 2151 bp, Glycine max
  misc_feature (1)..(2151): Ceres Seq. ID no. 14310556
gggagttacacattattctctctctcactcacactcagagtggtagctagacaacaacgagagagagagagagagagatggaggatctcgaggaggaagagaacggagcggaggaggtgttggggtcaagcttgaccatggagaaagtggcggctgcgaagaagttcattgagaatcattatagggctcagatgaagaacatccaagagaggaaggagaggcgctgggttttagaaagaaaattggcatcatcagatgtgccaaatgaggagcggatcaacctcatcaaagatttagagaggaaggagactgaatatatgcgattgaaaagacacaagatttgtgttaatgattttgaacttttgaccatcattggaaggggggcttttggggaggttagactgtgccgggagaagaaatctggaaatatttatgctatgaaaaagctgaagaaatctgaaatgcttaggagaggccaggtggaacatgttagagctgagaggaatttgctggccgaagttgccagtcattgcattgtgaaactttactactcatttcaggatgctgagtacttgtatttaattatggagtatctgcctgggggtgacgttatgactctgctgatgagggaagacaccttaagtgaaaatgttgctagattttacattgcacaaagtgttctggccatagaatctattcacaaacacaattacattcacagagatattaaacctgataaccttcttctggataaaaatggtcacatgaagctctctgattttggtctctgtaagcctctggattgtattgccttgtctacactgcatgaaaatcagaccatagatgatgaaactttggcagaaccaatggatgttgatgatgcggacaatcgaagtagctggagaagtccacgtgaacagcttcaacattggcagatgaacaggaggaagttggcattttcaacagtggggacaccagactacattgctcctgaagtacttttgaaaaaaggatatgggatggaatgtgattggtggtcactgggagcaataatgtatgaaatgctggttggttacccaccattttactccgatgatccaataaccacatgcagaaagattgttcattggagaaatcatttaagatttccagatgatgcccagttaacacttgaggctaaggatctaatttataggttgctctgtgatgttgatcataggttaggtactcgaggggccattgaaataaaggctcatccttggttcaagggtgttgattgggataaactgtatgaaatggaggcagcatttaaacctcaagtcaacggggaactggatacccaaaacttcatgaagtttgatgaggttgatccaccaacagcagcaagaaccgggtctggatcctcacgaaagatgctaactaccaaagatctaagtttcgttggttatacttacaagaatttcgatgctgtaaaggaagggctccgtcaatcttttggtgattccatgcaagagtatgcttctaaacgggcagctgaagaaacaagtttacaaatgcttgcatcctctggagatccaatggttccataactttgtgcaaattgaagtccatcctgttgggtttttgtgtacttgctttggctttaaatattcggccaagaacatgtattatggtgtactccaattcctatgccatttgcaagaaaaatgtgtacagcaagcagttgacagcattgtcaaagcttgtagggcaaccccgcgcgtctgtatttgaattttcaacttaggaactgagagttgtgcgactgagtgctcctgtcctggctgcccaggttggctgaggaagacttgccttctctagtggcagttgctggttaaatgttagttatggacaaaaattgctaaggaactattaaagcatcctgaaaattattcgatgtgatgtgtacatttattggaagataacataaattaaactattaaaacaaactatgcttggggatggagtgtggaattgtctttagcagctcagttgcttgccctttttccctttttatctatttcatgtggaaaagtgcaattagtgacgtcaacctcactgtcctggtcactagctaatgcttgattgaatacaaacaactttttcttaaag

SEQ ID NO: 54966 - protein, 503 aa, Glycine max
  peptide (1)..(503): Ceres Seq. ID no. 14310557
  misc_feature (93)..(396): Pfam Name: Protein kinase domain Pfam Description: Protein kinase domain
  misc_feature (1)..(467): Homolog of NCBI NO: 7339534 NR Description: protein kinase MK6 [Mesembryanthemum crystallinum]
  misc_feature (447)..(472): Homolog of NCBI NO: 7446410 NR Description: protein kinase F27F23.20 (EC 2.7.1.-) -
  misc_feature (5)..(455): Homolog of NCBI NO: 7446410 NR Description: protein kinase F27F23.20 (EC 2.7.1.-) -
  misc_feature (5)..(472): Homolog of NCBI NO: 18399030 NR Description: protein kinase, putative [Arabidopsis thaliana]
  misc_feature (21)..(490): Homolog of NCBI NO: 34906336 NR Description: unnamed protein product [Oryza sativa (japonica
  misc_feature (21)..(484): Homolog of NCBI NO: 541824 NR Description: protein kinase (EC 2.7.1.-) - spinach
  misc_feature (1)..(502): Homolog of NCBI NO: 31088228 NR Description: protein kinase [Raphanus sativus]
  misc_feature (1)..(474): Homolog of NCBI NO: 15234064 NR Description: protein kinase, putative [Arabidopsis thaliana]
  misc_feature (1)..(502): Homolog of NCBI NO: 27311789 NR Description: putative protein kinase [Arabidopsis thaliana]
  misc_feature (1)..(502): Homolog of NCBI NO: 31088226 NR Description: protein kinase [Raphanus sativus]
MEDLEEEENGAEEVLGSSLTMEKVAAAKKFIENHYRAQMKNIQERKERRWVLERKLASSDVPNEERINLIKDLERKETEYMRLKRHKICVNDFELLTIIGRGAFGEVRLCREKKSGNIYAMKKLKKSEMLRRGQVEHVRAERNLLAEVASHCIVKLYYSFQDAEYLYLIMEYLPGGDVMTLLMREDTLSENVARFYIAQSVLAIESIHKHNYIHRDIKPDNLLLDKNGHMKLSDFGLCKPLDCIALSTLHENQTIDDETLAEPMDVDDADNRSSWRSPREQLQHWQMNRRKLAFSTVGTPDYIAPEVLLKKGYGMECDWWSLGAIMYEMLVGYPPFYSDDPITTCRKIVHWRNHLRFPDDAQLTLEAKDLIYRLLCDVDHRLGTRGAIEIKAHPWFKGVDWDKLYEMEAAFKPQVNGELDTQNFMKFDEVDPPTAARTGSGSSRKMLTTKDLSFVGYTYKNFDAVKEGLRQSFGDSMQEYASKRAAEETSLQMLASSGDPMVP

SEQ ID NO: 54967 - protein, 483 aa, Glycine max
  peptide (1)..(483): Ceres Seq. ID no. 14310558
  misc_feature (73)..(376): Pfam Name: Protein kinase domain Pfam Description: Protein kinase domain
  misc_feature (1)..(447): Homolog of NCBI NO: 7339534 NR Description: protein kinase MK6 [Mesembryanthemum crystallinum]
  misc_feature (427)..(452): Homolog of NCBI NO: 7446410 NR Description: protein kinase F27F23.20 (EC 2.7.1.-) -
  misc_feature (1)..(435): Homolog of NCBI NO: 7446410 NR Description: protein kinase F27F23.20 (EC 2.7.1.-) -
  misc_feature (1)..(452): Homolog of NCBI NO: 18399030 NR Description: protein kinase, putative [Arabidopsis thaliana]
  misc_feature (1)..(470): Homolog of NCBI NO: 34906336 NR Description: unnamed protein product [Oryza sativa (japonica
  misc_feature (1)..(464): Homolog of NCBI NO: 541824 NR Description: protein kinase (EC 2.7.1.-) - spinach
  misc_feature (1)..(482): Homolog of NCBI NO: 31088228 NR Description: protein kinase [Raphanus sativus]
  misc_feature (1)..(454): Homolog of NCBI NO: 15234064 NR Description: protein kinase, putative [Arabidopsis thaliana]
  misc_feature (1)..(482): Homolog of NCBI NO: 27311789 NR Description: putative protein kinase [Arabidopsis thaliana]
  misc_feature (1)..(482): Homolog of NCBI NO: 31088226 NR Description: protein kinase [Raphanus sativus]
MEKVAAAKKFIENHYRAQMKNIQERKERRWVLERKLASSDVPNEERINLIKDLERKETEYMRLKRHKICVNDFELLTIIGRGAFGEVRLCREKKSGNIYAMKKLKKSEMLRRGQVEHVRAERNLLAEVASHCIVKLYYSFQDAEYLYLIMEYLPGGDVMTLLMREDTLSENVARFYIAQSVLAIESIHKHNYIHRDIKPDNLLLDKNGHMKLSDFGLCKPLDCIALSTLHENQTIDDETLAEPMDVDDADNRSSWRSPREQLQHWQMNRRKLAFSTVGTPDYIAPEVLLKKGYGMECDWWSLGAIMYEMLVGYPPFYSDDPITTCRKIVHWRNHLRFPDDAQLTLEAKDLIYRLLCDVDHRLGTRGAIEIKAHPWFKGVDWDKLYEMEAAFKPQVNGELDTQNFMKFDEVDPPTAARTGSGSSRKMLTTKDLSFVGYTYKNFDAVKEGLRQSFGDSMQEYASKRAAEETSLQMLASSGDPMVP

SEQ ID NO: 54968 - protein, 465 aa, Glycine max
  peptide (1)..(465): Ceres Seq. ID no. 14310559
  misc_feature (55)..(358): Pfam Name: Protein kinase domain Pfam Description: Protein kinase domain
  misc_feature (1)..(429): Homolog of NCBI NO: 7339534 NR Description: protein kinase MK6 [Mesembryanthemum crystallinum]
  misc_feature (409)..(434): Homolog of NCBI NO: 7446410 NR Description: protein kinase F27F23.20 (EC 2.7.1.-) -
  misc_feature (1)..(417): Homolog of NCBI NO: 7446410 NR Description: protein kinase F27F23.20 (EC 2.7.1.-) -
  misc_feature (1)..(434): Homolog of NCBI NO: 18399030 NR Description: protein kinase, putative [Arabidopsis thaliana]
  misc_feature (1)..(452): Homolog of NCBI NO: 34906336 NR Description: unnamed protein product [Oryza sativa (japonica
  misc_feature (1)..(446): Homolog of NCBI NO: 541824 NR Description: protein kinase (EC 2.7.1.-) - spinach
  misc_feature (1)..(464): Homolog of NCBI NO: 31088228 NR Description: protein kinase [Raphanus sativus]
  misc_feature (1)..(436): Homolog of NCBI NO: 15234064 NR Description: protein kinase, putative [Arabidopsis thaliana]
  misc_feature (1)..(464): Homolog of NCBI NO: 27311789 NR Description: putative protein kinase [Arabidopsis thaliana]
  misc_feature (1)..(464): Homolog of NCBI NO: 31088226 NR Description: protein kinase [Raphanus sativus]
MKNIQERKERRWVLERKLASSDVPNEERINLIKDLERKETEYMRLKRHKICVNDFELLTIIGRGAFGEVRLCREKKSGNIYAMKKLKKSEMLRRGQVEHVRAERNLLAEVASHCIVKLYYSFQDAEYLYLIMEYLPGGDVMTLLMREDTLSENVARFYIAQSVLAIESIHKHNYIHRDIKPDNLLLDKNGHMKLSDFGLCKPLDCIALSTLHENQTIDDETLAEPMDVDDADNRSSWRSPREQLQHWQMNRRKLAFSTVGTPDYIAPEVLLKKGYGMECDWWSLGAIMYEMLVGYPPFYSDDPITTCRKIVHWRNHLRFPDDAQLTLEAKDLIYRLLCDVDHRLGTRGAIEIKAHPWFKGVDWDKLYEMEAAFKPQVNGELDTQNFMKFDEVDPPTAARTGSGSSRKMLTTKDLSFVGYTYKNFDAVKEGLRQSFGDSMQEYASKRAAEETSLQMLASSGDPMVP

SEQ ID NO: 54969 - DNA, 1316 bp, Glycine max
  misc_feature (1)..(1316): Ceres Seq. ID no. 14313620
catttgctttgcattgttccttcacacaacagttctttaccattcttctgttaatagattctggatccatgttcctgataatattgttccattctcaggatccagtgttgtgcagtgtgacagttggtgtttcccactttgaaagatgtgctctttgggttcaagtattgtattacccattctatggtagtggtgctgtcggagactatgaaggtgactatgccgaagaggatcctcaaatcatgagacagaagagaagcctaaggcccgaattaggtgaacctgtgattttgagatgtcagccatataaaattccattgactgagcttcttttgccacaccaaatatcacctgttgagtttttccgactgtggcccagtttgccagctatcgtagaatatactggcacatatacatatgaaggtagtggctttaaggctactgctgctcagcagtatggtgcatctcctttcttaagtggactgaaatccttgtcttccaagccattccacatagtttgttcacatataatccgcacggtggcagggtttgagatgtgttatgctgctaaaacttggcatggtggcttcttgggcatgatgatatttggtgcaagtgaagtgagtagaaatgtggacttgggtgatgagactacaaccatgctgtgcaagtttgtggttcgagcatccgatccatctattaccaaggagattggatcagatcttcaaggctggttggatgaccttactgatggcggtgtggagtatatgcctgaagatgaagtgaaagtagctgcagccgagaggcttcgcatatcaatggaaaggatagccttgttaaaggcggcccaaccacgacccaagactccaaaatctgacaacgaagatgaagaggaggaagatgacaaaaataaagaaaagaaagatggcgaagatgagaaaaagaaggggccttcaactctatcgaaactaactgctgaggaagctgaacatcaagctcttcaagcagcagtactacaggagtggcatatgatctgcaaggatagaacaactgaagttaattaactattttcttttggtgtttttgatttttcttttttccatggctttccgagaaatgtacgagtgtattctttgtaattttttctcattttacatacacgaattaggtagaagccaaaatttgcccgagaaacgttcgagtgtattctttgtatactctttcccatattttcaggaaagtgttttgtacatgtaccgcgcggctattgatctgctattttatatttgaagcatttgttggaggtgttaggcatt

SEQ ID NO: 54970 - protein, 353 aa, Glycine max
  peptide (1)..(353): Ceres Seq. ID no. 14313621
  misc_feature (31)..(315): Homolog of NCBI NO: 28393648 NR Description: unknown protein [Arabidopsis thaliana]
  misc_feature (31)..(348): Homolog of NCBI NO: 30678420 NR Description: expressed protein [Arabidopsis thaliana]
  misc_feature (31)..(348): Homolog of NCBI NO: 6016734 NR Description: unknown protein [Arabidopsis thaliana]
FALHCSFTQQFFTILLLIDSGSMFLIILFHSQDPVLCSVTVGVSHFERCALWVQVLYYPFYGSGAVGDYEGDYAEEDPQIMRQKRSLRPELGEPVILRCQPYKIPLTELLLPHQISPVEFFRLWPSLPAIVEYTGTYTYEGSGFKATAAQQYGASPFLSGLKSLSSKPFHIVCSHIIRTVAGFEMCYAAKTWHGGFLGMMIFGASEVSRNVDLGDETTTMLCKFVVRASDPSITKEIGSDLQGWLDDLTDGGVEYMPEDEVKVAAAERLRISMERIALLKAAQPRPKTPKSDNEDEEEEDDKNKEKKDGEDEKKKGPSTLSKLTAEEAEHQALQAAVLQEWHMICKDRTTEVN

SEQ ID NO: 54971 - protein, 331 aa, Glycine max
  peptide (1)..(331): Ceres Seq. ID no. 14313622
  misc_feature (9)..(293): Homolog of NCBI NO: 28393648 NR Description: unknown protein [Arabidopsis thaliana]
  misc_feature (9)..(326): Homolog of NCBI NO: 30678420 NR Description: expressed protein [Arabidopsis thaliana]
  misc_feature (9)..(326): Homolog of NCBI NO: 6016734 NR Description: unknown protein [Arabidopsis thaliana]
MFLIILFHSQDPVLCSVTVGVSHFERCALWVQVLYYPFYGSGAVGDYEGDYAEEDPQIMRQKRSLRPELGEPVILRCQPYKIPLTELLLPHQISPVEFFRLWPSLPAIVEYTGTYTYEGSGFKATAAQQYGASPFLSGLKSLSSKPFHIVCSHIIRTVAGFEMCYAAKTWHGGFLGMMIFGASEVSRNVDLGDETTTMLCKFVVRASDPSITKEIGSDLQGWLDDLTDGGVEYMPEDEVKVAAAERLRISMERIALLKAAQPRPKTPKSDNEDEEEEDDKNKEKKDGEDEKKKGPSTLSKLTAEEAEHQALQAAVLQEWHMICKDRTTEVN

SEQ ID NO: 54972 - protein, 273 aa, Glycine max
  peptide (1)..(273): Ceres Seq. ID no. 14313623
  misc_feature (1)..(235): Homolog of NCBI NO: 28393648 NR Description: unknown protein [Arabidopsis thaliana]
  misc_feature (1)..(268): Homolog of NCBI NO: 30678420 NR Description: expressed protein [Arabidopsis thaliana]
  misc_feature (1)..(268): Homolog of NCBI NO: 6016734 NR Description: unknown protein [Arabidopsis thaliana]
MRQKRSLRPELGEPVILRCQPYKIPLTELLLPHQISPVEFFRLWPSLPAIVEYTGTYTYEGSGFKATAAQQYGASPFLSGLKSLSSKPFHIVCSHIIRTVAGFEMCYAAKTWHGGFLGMMIFGASEVSRNVDLGDETTTMLCKFVVRASDPSITKEIGSDLQGWLDDLTDGGVEYMPEDEVKVAAAERLRISMERIALLKAAQPRPKTPKSDNEDEEEEDDKNKEKKDGEDEKKKGPSTLSKLTAEEAEHQALQAAVLQEWHMICKDRTTEVN

SEQ ID NO: 54973 - DNA, 1741 bp, Glycine max
  misc_feature (1)..(1741): Ceres Seq. ID no. 14313425
gatgatggaagaaacaaagagaagggaaatatcaggaggtgcgagtaccggagccaaacgcgggtgtgtgtgtgtgtgagggagagagagatgcagttccattcagaaactccaaactaaacatccctggcgacaaccttaggaatctcgatcgctgaaaaaacctatgcagccccgaacacactctctgcattccaacttgtttaagtcatgcctttcgattcacccttctctcaataaatttttaatcagattcttggccaccgccacactcataataaagttttgtttttccaaataaagggaatggcgactcctgttgagcctccaaatgggatcagaactgaagggaagcattattattccatgtggcaaaccctgtttgagattgactcaaaatacgttcccatcaagccgattggtcgcggagcatatggaattgtgtgctcttctgtgaatagagagataaatgagaaggttgccatcaagaagatacagaatgcctttgaaaaccgggttgatgccctgaggactttgcgcgaactcaagcttcttcgccaccttcaccatgagaatgtgattgctttgaaggacatcatgatgcctgttcacaggaatagtttcaaggatgtctatctggtttatgaactcatggacacggatttgcatcagattattaagtcttctcaagctttgtctaatgatcactgccagtatttcctctttcagttgctccggggcttgaaatatcttcactccgctaacattcttcatcgtgacttgaaacctgggaatcttctaatcaatgcaaattgtgacctaaaaatatgtgatttcgggctagctcgtactaattgcagcaagaaccagttcatgaccgagtatgttgtcactcggtggtatagggcaccagagctcctactctgctgtgacaactatgggacatctattgatgtttggtcagttggatgtatctttgcagagcttcttggccgaaaaccgattttccctggttcagagtgtctcaaccagctgaagttgattatcaatatccttggtagtcaaagggaggaggatattgaattcattgataacccaaaggcaaagaagtatatcaaatcacttccttattctcctggaacccccctttcgcaactttatcctaatgcgcatccattggcaattgatcttctggcaaagatgcttgttttcgatccaacaaagaggatcagtgtcactcaagcacttcaacacccttacatggcccctctgtatgatcctaactgtgaccctccagccgtcattccaattgatcttgacattgatgaggatctaggggaagagatgataagggacatgatgtggaaagaaatgcttcattaccatcctgaatctgctatggagagtgcagggttgtgctaatgatatttacttcctttcatagttatgttcccttttgttggtgccaggatagttctaatatcataacttgcttcaaataattaggagggctttgtcatcagtgagctccttatatgttctgttttctatttattgaaagcagagagaaacagcaaaaagatgaccatcttaaaaaaaaatgtgttattgctgatgatgcattgtagtctttaaacgccatgttgagagattgattttgtactgaactttgtattgtagttgccttgttttgttgtacataattatgtttctgtgtctttcataaaccattttgtaaatc

SEQ ID NO: 54974 - protein, 371 aa, Glycine max
  peptide (1)..(371): Ceres Seq. ID no. 14313426
  misc_feature (32)..(319): Pfam Name: Protein kinase domain Pfam Description: Protein kinase domain
  misc_feature (1)..(364): Homolog of NCBI NO: 533280 NR Description: ATMPK1 [Arabidopsis thaliana]
  misc_feature (1)..(362): Homolog of NCBI NO: 24412848 NR Description: putative mitogen-activated protein kinase, msrmk3
  misc_feature (1)..(362): Homolog of NCBI NO: 7341300 NR Description: MAP kinase MAPK2 [Oryza sativa]
  misc_feature (1)..(364): Homolog of NCBI NO: 533281 NR Description: ATMPK2 [Arabidopsis thaliana]
  misc_feature (1)..(362): Homolog of NCBI NO: 11869994 NR Description: MAP kinase 2 [Oryza sativa]
  misc_feature (1)..(364): Homolog of NCBI NO: 18406388 NR Description: mitogen-activated protein kinase (MAPK), putative
  misc_feature (1)..(364): Homolog of NCBI NO: 15218451 NR Description: mitogen-activated protein kinase (MAPK), putative
  misc_feature (1)..(365): Homolog of NCBI NO: 2499612 NR Description: MITOGEN-ACTIVATED PROTEIN KINASE HOMOLOG 1
  misc_feature (1)..(364): Homolog of NCBI NO: 2499614 NR Description: MITOGEN-ACTIVATED PROTEIN KINASE HOMOLOG NTF3
  misc_feature (1)..(370): Homolog of NCBI NO: 8132347 NR Description: MAP kinase PsMAPK2 [Pisum sativum]
MATPVEPPNGIRTEGKHYYSMWQTLFEIDSKYVPIKPIGRGAYGIVCSSVNREINEKVAIKKIQNAFENRVDALRTLRELKLLRHLHHENVIALKDIMMPVHRNSFKDVYLVYELMDTDLHQIIKSSQALSNDHCQYFLFQLLRGLKYLHSANILHRDLKPGNLLINANCDLKICDFGLARTNCSKNQFMTEYVVTRWYRAPELLLCCDNYGTSIDVWSVGCIFAELLGRKPIFPGSECLNQLKLIINILGSQREEDIEFIDNPKAKKYIKSLPYSPGTPLSQLYPNAHPLAIDLLAKMLVFDPTKRISVTQALQHPYMAPLYDPNCDPPAVIPIDLDIDEDLGEEMIRDMMWKEMLHYHPESAMESAGLC

SEQ ID NO: 54975 - protein, 351 aa, Glycine max
  peptide (1)..(351): Ceres Seq. ID no. 14313427
  misc_feature (12)..(299): Pfam Name: Protein kinase domain Pfam Description: Protein kinase domain
  misc_feature (1)..(344): Homolog of NCBI NO: 533280 NR Description: ATMPK1 [Arabidopsis thaliana]
  misc_feature (1)..(342): Homolog of NCBI NO: 24412848 NR Description: putative mitogen-activated protein kinase, msrmk3
  misc_feature (1)..(342): Homolog of NCBI NO: 7341300 NR Description: MAP kinase MAPK2 [Oryza sativa]
  misc_feature (1)..(344): Homolog of NCBI NO: 533281 NR Description: ATMPK2 [Arabidopsis thaliana]
  misc_feature (1)..(342): Homolog of NCBI NO: 11869994 NR Description: MAP kinase 2 [Oryza sativa]
  misc_feature (1)..(344): Homolog of NCBI NO: 18406388 NR Description: mitogen-activated protein kinase (MAPK), putative
  misc_feature (1)..(344): Homolog of NCBI NO: 15218451 NR Description: mitogen-activated protein kinase (MAPK), putative
  misc_feature (1)..(345): Homolog of NCBI NO: 2499612 NR Description: MITOGEN-ACTIVATED PROTEIN KINASE HOMOLOG 1
  misc_feature (1)..(344): Homolog of NCBI NO: 2499614 NR Description: MITOGEN-ACTIVATED PROTEIN KINASE HOMOLOG NTF3
  misc_feature (1)..(350): Homolog of NCBI NO: 8132347 NR Description: MAP kinase PsMAPK2 [Pisum sativum]
MWQTLFEIDSKYVPIKPIGRGAYGIVCSSVNREINEKVAIKKIQNAFENRVDALRTLRELKLLRHLHHENVIALKDIMMPVHRNSFKDVYLVYELMDTDLHQIIKSSQALSNDHCQYFLFQLLRGLKYLHSANILHRDLKPGNLLINANCDLKICDFGLARTNCSKNQFMTEYVVTRWYRAPELLLCCDNYGTSIDVWSVGCIFAELLGRKPIFPGSECLNQLKLIINILGSQREEDIEFIDNPKAKKYIKSLPYSPGTPLSQLYPNAHPLAIDLLAKMLVFDPTKRISVTQALQHPYMAPLYDPNCDPPAVIPIDLDIDEDLGEEMIRDMMWKEMLHYHPESAMESAGLC

SEQ ID NO: 54976 - protein, 274 aa, Glycine max
  peptide (1)..(274): Ceres Seq. ID no. 14313428
  misc_feature (1)..(222): Pfam Name: Protein kinase domain Pfam Description: Protein kinase domain
  misc_feature (1)..(267): Homolog of NCBI NO: 533280 NR Description: ATMPK1 [Arabidopsis thaliana]
  misc_feature (1)..(265): Homolog of NCBI NO: 24412848 NR Description: putative mitogen-activated protein kinase, msrmk3
  misc_feature (1)..(265): Homolog of NCBI NO: 7341300 NR Description: MAP kinase MAPK2 [Oryza sativa]
  misc_feature (1)..(267): Homolog of NCBI NO: 533281 NR Description: ATMPK2 [Arabidopsis thaliana]
  misc_feature (1)..(265): Homolog of NCBI NO: 11869994 NR Description: MAP kinase 2 [Oryza sativa]
  misc_feature (1)..(267): Homolog of NCBI NO: 18406388 NR Description: mitogen-activated protein kinase (MAPK), putative
  misc_feature (1)..(267): Homolog of NCBI NO: 15218451 NR Description: mitogen-activated protein kinase (MAPK), putative
  misc_feature (1)..(268): Homolog of NCBI NO: 2499612 NR Description: MITOGEN-ACTIVATED PROTEIN KINASE HOMOLOG 1
  misc_feature (1)..(267): Homolog of NCBI NO: 2499614 NR Description: MITOGEN-ACTIVATED PROTEIN KINASE HOMOLOG NTF3
  misc_feature (1)..(273): Homolog of NCBI NO: 8132347 NR Description: MAP kinase PsMAPK2 [Pisum sativum]
MMPVHRNSFKDVYLVYELMDTDLHQIIKSSQALSNDHCQYFLFQLLRGLKYLHSANILHRDLKPGNLLINANCDLKICDFGLARTNCSKNQFMTEYVVTRWYRAPELLLCCDNYGTSIDVWSVGCIFAELLGRKPIFPGSECLNQLKLIINILGSQREEDIEFIDNPKAKKYIKSLPYSPGTPLSQLYPNAHPLAIDLLAKMLVFDPTKRISVTQALQHPYMAPLYDPNCDPPAVIPIDLDIDEDLGEEMIRDMMWKEMLHYHPESAMESAGLC

SEQ ID NO: 54977 - DNA, 1400 bp, Glycine max
  misc_feature (1)..(1400): Ceres Seq. ID no. 15170239
gaaaccaagtctcgcaagccatcttggctagcactctctccttccccaccgcgccgccgagctccgcctccggccgacgcaagcagcccacctcggacgaattcttcttcccctactactcgtatctaccgggatggcgtcgggtggagatctcccatccgggttcgctgatgagagcaaaagtacaaaaacagaaggatcatccaacgaatgtcaaggggtccctccagctgccgctgcaggcttgtcgggtcctttcgatttttcttctatgcaaagtttgctcaatgatccatctataaaggagatggcggaccagattgcaagggaccctgcattcaatcagatggctgagcagctacagaaaggtgctcagactgcaggagaacagggcatgcctccattggatcctcatcaatacatggaaacaatgcaaaaggtcatggaaaaccctcagtttatgacaatggcagagcgcctcgggactgctcttatgcaggatcctactatgtccagtatgctggaaaatttgactagtccaacacataaggaggagcttgaagagcgcatgtctcggattaaggaagatccagccttgaagccaattcttgatgagttagagaatggtggtcctgctgcaatgataaagtactggaatgaccctgaaactcttcaaaagattggccaggcaatgggaactaccatgccgtttagcactgtctctactgctgaaccttctggtactgaagaaactgaagaagaaggtgaagatgaagacgaatccattgtccaccacactgccagtgttggtgacggtgagggtctgaagaaggctctagatggtggagcagacaaggatgaagaagactctgagggaagaagggccttgcactttgcatgtggatatggtgagttcaagtgtgcggaaatcctccttgaggcgggtgctgctgtagatgccatggataagaacaagaacaccccactgcattacgctgctggctatggccggaaagagtgtgtggatcttctgttgaagcacggtgctgctgtcactctccaaaacatggatgggaagacgcccatcgacgtcgccaagctcaacaaccaggacgaggtcctcaagctgctcgagaaggacgtgttcctgtaaatcacttcacttggcccccatgaagaggcatcatgttttacatcccttggcattggttttatatagtcatactcgaatcggcattttattcgttgtgtaagaatctactgttagctagcctgcaggccgactggctgaggttagaactgcatgttactgtatatggagacttgtgtatcgtccactttgttgctgttgattccactagagtaatccaagatgtacccaagattatttttgtcgtttg

SEQ ID NO: 54978 - protein, 339 aa, Glycine max
  peptide (1)..(339): Ceres Seq. ID no. 15170240
  misc_feature (280)..(312): Pfam Name: Ankyrin repeat Pfam Description: Ankyrin repeat
  misc_feature (212)..(339): Homolog of NCBI NO: 3929221 NR Description: TRF1-interacting ankyrin-related ADP-ribose
  misc_feature (13)..(339): Homolog of NCBI NO: 4205079 NR Description: ankyrin repeat-containing protein 2 [Arabidopsis
  misc_feature (13)..(339): Homolog of NCBI NO: 3478700 NR Description: AFT protein [Arabidopsis thaliana]
  misc_feature (13)..(339): Homolog of NCBI NO: 15237008 NR Description: ankyrin repeat-containing protein 2 [Arabidopsis
  misc_feature (1)..(339): Homolog of NCBI NO: 27573339 NR Description: unknown protein [Oryza sativa (japonica
  misc_feature (15)..(339): Homolog of NCBI NO: 29826244 NR Description: TGB12K interacting protein 3 [Nicotiana tabacum]
  misc_feature (15)..(339): Homolog of NCBI NO: 29826242 NR Description: TGB12K interacting protein 2 [Nicotiana tabacum]
  misc_feature (3)..(339): Homolog of NCBI NO: 13310811 NR Description: ankyrin-repeat protein HBP1 [Nicotiana tabacum]
  misc_feature (3)..(339): Homolog of NCBI NO: 24637568 NR Description: ankyrin domain protein [Nicotiana tabacum]
  misc_feature (13)..(339): Homolog of NCBI NO: 38175562 NR Description: putative ankyrin domain protein
MASGGDLPSGFADESKSTKTEGSSNECQGVPPAAAAGLSGPFDFSSMQSLLNDPSIKEMADQIARDPAFNQMAEQLQKGAQTAGEQGMPPLDPHQYMETMQKVMENPQFMTMAERLGTALMQDPTMSSMLENLTSPTHKEELEERMSRIKEDPALKPILDELENGGPAAMIKYWNDPETLQKIGQAMGTTMPFSTVSTAEPSGTEETEEEGEDEDESIVHHTASVGDGEGLKKALDGGADKDEEDSEGRRALHFACGYGEFKCAEILLEAGAAVDAMDKNKNTPLHYAAGYGRKECVDLLLKHGAAVTLQNMDGKTPIDVAKLNNQDEVLKLLEKDVFL

SEQ ID NO: 54979 - protein, 293 aa, Glycine max
  peptide (1)..(293): Ceres Seq. ID no. 15170241
  misc_feature (234)..(266): Pfam Name: Ankyrin repeat Pfam Description: Ankyrin repeat
  misc_feature (166)..(293): Homolog of NCBI NO: 3929221 NR Description: TRF1-interacting ankyrin-related ADP-ribose
  misc_feature (1)..(293): Homolog of NCBI NO: 4205079 NR Description: ankyrin repeat-containing protein 2 [Arabidopsis
  misc_feature (1)..(293): Homolog of NCBI NO: 3478700 NR Description: AFT protein [Arabidopsis thaliana]
  misc_feature (1)..(293): Homolog of NCBI NO: 15237008 NR Description: ankyrin repeat-containing protein 2 [Arabidopsis
  misc_feature (1)..(293): Homolog of NCBI NO: 27573339 NR Description: unknown protein [Oryza sativa (japonica
  misc_feature (1)..(293): Homolog of NCBI NO: 29826244 NR Description: TGB12K interacting protein 3 [Nicotiana tabacum]
  misc_feature (1)..(293): Homolog of NCBI NO: 29826242 NR Description: TGB12K interacting protein 2 [Nicotiana tabacum]
  misc_feature (1)..(293): Homolog of NCBI NO: 13310811 NR Description: ankyrin-repeat protein HBP1 [Nicotiana tabacum]
  misc_feature (1)..(293): Homolog of NCBI NO: 24637568 NR Description: ankyrin domain protein [Nicotiana tabacum]
  misc_feature (1)..(293): Homolog of NCBI NO: 38175562 NR Description: putative ankyrin domain protein
MQSLLNDPSIKEMADQIARDPAFNQMAEQLQKGAQTAGEQGMPPLDPHQYMETMQKVMENPQFMTMAERLGTALMQDPTMSSMLENLTSPTHKEELEERMSRIKEDPALKPILDELENGGPAAMIKYWNDPETLQKIGQAMGTTMPFSTVSTAEPSGTEETEEEGEDEDESIVHHTASVGDGEGLKKALDGGADKDEEDSEGRRALHFACGYGEFKCAEILLEAGAAVDAMDKNKNTPLHYAAGYGRKECVDLLLKHGAAVTLQNMDGKTPIDVAKLNNQDEVLKLLEKDVFL

SEQ ID NO: 54980 - protein, 281 aa, Glycine max
  peptide (1)..(281): Ceres Seq. ID no. 15170242
  misc_feature (222)..(254): Pfam Name: Ankyrin repeat Pfam Description: Ankyrin repeat
  misc_feature (154)..(281): Homolog of NCBI NO: 3929221 NR Description: TRF1-interacting ankyrin-related ADP-ribose
  misc_feature (1)..(281): Homolog of NCBI NO: 4205079 NR Description: ankyrin repeat-containing protein 2 [Arabidopsis
  misc_feature (1)..(281): Homolog of NCBI NO: 3478700 NR Description: AFT protein [Arabidopsis thaliana]
  misc_feature (1)..(281): Homolog of NCBI NO: 15237008 NR Description: ankyrin repeat-containing protein 2 [Arabidopsis
  misc_feature (1)..(281): Homolog of NCBI NO: 27573339 NR Description: unknown protein [Oryza sativa (japonica
  misc_feature (1)..(281): Homolog of NCBI NO: 29826244 NR Description: TGB12K interacting protein 3 [Nicotiana tabacum]
  misc_feature (1)..(281): Homolog of NCBI NO: 29826242 NR Description: TGB12K interacting protein 2 [Nicotiana tabacum]
  misc_feature (1)..(281): Homolog of NCBI NO: 13310811 NR Description: ankyrin-repeat protein HBP1 [Nicotiana tabacum]
  misc_feature (1)..(281): Homolog of NCBI NO: 24637568 NR Description: ankyrin domain protein [Nicotiana tabacum]
  misc_feature (1)..(281): Homolog of NCBI NO: 38175562 NR Description: putative ankyrin domain protein
MADQIARDPAFNQMAEQLQKGAQTAGEQGMPPLDPHQYMETMQKVMENPQFMTMAERLGTALMQDPTMSSMLENLTSPTHKEELEERMSRIKEDPALKPILDELENGGPAAMIKYWNDPETLQKIGQAMGTTMPFSTVSTAEPSGTEETEEEGEDEDESIVHHTASVGDGEGLKKALDGGADKDEEDSEGRRALHFACGYGEFKCAEILLEAGAAVDAMDKNKNTPLHYAAGYGRKECVDLLLKHGAAVTLQNMDGKTPIDVAKLNNQDEVLKLLEKDVFL

SEQ ID NO: 54981 - DNA, 953 bp, Glycine max
  misc_feature (1)..(953): Ceres Seq. ID no. 15224823
gagtcagctacgtaggccccccccccaatcagtcaaaggcatgtgtttagtcataccttctcaatgatttggcaaaatatgtttgtggggacttttgtttcatgttggaagttgaagaaacacaaaaatagatatggagtttctaaaaggtttcaggttttatataggccaggaaattacttatgtttctatcactaagtatgggtcctttggtatatatggattttggcatttgtcacgctcattgatatatggttgtcccccaagtttaagttcttacatgccttatctttggcgggttattggaatgtgactgagtatcctgacatgaaagttaatcttaatgttgaaatgatttggcaggagcatgcttataagtcataaccacacgtgtacaatttgtttatttggagctgtcctaaatttgtatcatttcccaaaaggaagactgtgtgcaccaggcctaattgtatgcacaccctcctccttccttctcttagttgtccacaactggagtcactctctaatgccatcaaatgggaagttttgcaaactcctcttaattacgagactcgaggaagcaaagttctcttcactacatgcagtaagagagttgcttcaaccatgcagtcaaataaagcgagtcaactagagcaattacatgaagaacattgctagaaatatgaattttggttcttgtctctcacgttgatgtgtatgacttgttctccatgggactgtgggtattgattgccgtgttttatgttctactttttcatttgtatcattggaattctataattgaaagagtgggaatataaaaatgtgaargggtgttgttttcttttgtttaataagacagcttctatacagaattatcctaagctaaatgcaagaatycyttwttygtttttttwwaaramaaagawaaaaaaaaaaaaaaagaattcctg

SEQ ID NO: 54982 - protein, 94 aa, Glycine max
  peptide (1)..(94): Ceres Seq. ID no. 15224824
MLISHNHTCTICLFGAVLNLYHFPKGRLCAPGLIVCTPSSFLLLVVHNWSHSLMPSNGKFCKLLLITRLEEAKFSSLHAVRELLQPCSQIKRVN

SEQ ID NO: 54983 - protein, 68 aa, Glycine max
  peptide (1)..(68): Ceres Seq. ID no. 15224825
  misc_feature (22)..(67): Homolog of NCBI NO: 7107256 NR Description: unknown [Cajanus cajan]
  misc_feature (22)..(68): Homolog of NCBI NO: 7488704 NR Description: probable resistance protein - soybean (fragment)
MHTLLLPSLSCPQLESLSNAIKWEVLQTPLNYETRGSKVLFTTCSKRVASTMQSNKASQLEQLHEEHC

SEQ ID NO: 54984 - protein, 59 aa, Glycine max
  peptide (1)..(59): Ceres Seq. ID no. 15224826
MEFLKGFRFYIGQEITYVSITKYGSFGIYGFWHLSRSLIYGCPPSLSSYMPYLWRVIGM

SEQ ID NO: 54985 - DNA, 1262 bp, Glycine max
  misc_feature (1)..(1262): Ceres Seq. ID no. 15175666
agtagagataatgagattaggtgtgagtgtgagtgtgcggtgctcaatcggcaccgcttcaggcaacacccaaaccgattatcccgccaaattccaacggtcatctttctcaactgccaacttcctccccgacaacgcttcttcagatttagcagtttcaatttcgagtagtagcagcaggagagggctaatacgcatagccacgttgccatgtcttcttcccctcataggttgcctcccagccaacgccatgcagccaggttcaaaggaatatcttctcattaaagaagaggtgaggaaggtcttgtccaagggaaaggctgctggcgtgcttcgattggtattccatgatgccggaacctttgacatcgatgacagtacaggtggtatgaatggttctatagtctatgaacttgaaagacctgaaaatgctggcctgaaaaaatcagtaaaggttctgcaaaaagcaaagactcagatagatgctatccaaccagtatcttgggcggacatgattgctgtggctggagctgaagcagttgaagtatgtggaggtccacctattcaagtttcactgggcagattagatacactggtgcctgatccagaagggagacttcctgaggaatctctcaatgcttctggtttgaagaaatgtttccagagcaaaggcttttcaacacaagaacttgtggctttgtctggagcccacactattggaagtaaaggttttggaagcccaatttcttttgacaattcatattataaggttcttttggagaagccgtggacgtcttcaggtggtatgccgagtatgattgggcttccttcagatcacgctcttgttgaggatgatgaatgcttaagatggattaaaaaatacgcagacagtgagaatctattctttgaagatttcaaaaatgcgtatgtcaagctggtgaattctggtgtgaggcggaatagcttataaattcaggagttgaatgttccaacttccactgaaggggcaacttgcatttttattgactttctaacagtgtttatgcacagttgccatgaagttttgggtgctttattattgatttgaacatcaagatctactaccccctaaaaatcaaccaacgaagtatgtgcatgcagggccaataaatttcatggaaaagtcgtttaaggggtgtattggattaagattttaaaagactattttagcataatttttttttttgaattttaaagattatgtaaaattattatgatttatc

SEQ ID NO: 54986 - protein, 322 aa, Glycine max
  peptide (1)..(322): Ceres Seq. ID no. 15175667
  misc_feature (98)..(296): Pfam Name: Peroxidase Pfam Description: Peroxidase
  misc_feature (242)..(321): Homolog of NCBI NO: 38104959 NR Description: hypothetical protein MG10368.4 [Magnaporthe
  misc_feature (83)..(263): Homolog of NCBI NO: 38104959 NR Description: hypothetical protein MG10368.4 [Magnaporthe
  misc_feature (95)..(316): Homolog of NCBI NO: 7489542 NR Description: L-ascorbate peroxidase (EC 1.11.1.11) [validated]
  misc_feature (89)..(322): Homolog of NCBI NO: 5442410 NR Description: ascorbate peroxidase [Zantedeschia aethiopica]
  misc_feature (90)..(316): Homolog of NCBI NO: 15080682 NR Description: peroxisome type ascorbate peroxidase
  misc_feature (94)..(125): Homolog of NCBI NO: 7487935 NR Description: L-ascorbate peroxidase homolog F10M6.50 -
  misc_feature (290)..(322): Homolog of NCBI NO: 7487935 NR Description: L-ascorbate peroxidase homolog F10M6.50 -
  misc_feature (166)..(264): Homolog of NCBI NO: 7487935 NR Description: L-ascorbate peroxidase homolog F10M6.50 -
  misc_feature (14)..(316): Homolog of NCBI NO: 27817866 NR Description: OJ1081_B12.15 [Oryza sativa (japonica
  misc_feature (57)..(322): Homolog of NCBI NO: 30689347 NR Description: ascorbate peroxidase family [Arabidopsis
VEIMRLGVSVSVRCSIGTASGNTQTDYPAKFQRSSFSTANFLPDNASSDLAVSISSSSSRRGLIRIATLPCLLPLIGCLPANAMQPGSKEYLLIKEEVRKVLSKGKAAGVLRLVFHDAGTFDIDDSTGGMNGSIVYELERPENAGLKKSVKVLQKAKTQIDAIQPVSWADMIAVAGAEAVEVCGGPPIQVSLGRLDTLVPDPEGRLPEESLNASGLKKCFQSKGFSTQELVALSGAHTIGSKGFGSPISFDNSYYKVLLEKPWTSSGGMPSMIGLPSDHALVEDDECLRWIKKYADSENLFFEDFKNAYVKLVNSGVRRNSL

SEQ ID NO: 54987 - protein, 319 aa, Glycine max
  peptide (1)..(319): Ceres Seq. ID no. 15175668
  misc_feature (95)..(293): Pfam Name: Peroxidase Pfam Description: Peroxidase
  misc_feature (239)..(318): Homolog of NCBI NO: 38104959 NR Description: hypothetical protein MG10368.4 [Magnaporthe
  misc_feature (80)..(260): Homolog of NCBI NO: 38104959 NR Description: hypothetical protein MG10368.4 [Magnaporthe
  misc_feature (92)..(313): Homolog of NCBI NO: 7489542 NR Description: L-ascorbate peroxidase (EC 1.11.1.11) [validated]
  misc_feature (86)..(319): Homolog of NCBI NO: 5442410 NR Description: ascorbate peroxidase [Zantedeschia aethiopica]
  misc_feature (87)..(313): Homolog of NCBI NO: 15080682 NR Description: peroxisome type ascorbate peroxidase
  misc_feature (91)..(122): Homolog of NCBI NO: 7487935 NR Description: L-ascorbate peroxidase homolog F10M6.50 -
  misc_feature (287)..(319): Homolog of NCBI NO: 7487935 NR Description: L-ascorbate peroxidase homolog F10M6.50 -
  misc_feature (163)..(261): Homolog of NCBI NO: 7487935 NR Description: L-ascorbate peroxidase homolog F10M6.50 -
  misc_feature (11)..(313): Homolog of NCBI NO: 27817866 NR Description: OJ1081_B12.15 [Oryza sativa (japonica
  misc_feature (54)..(319): Homolog of NCBI NO: 30689347 NR Description: ascorbate peroxidase family [Arabidopsis
MRLGVSVSVRCSIGTASGNTQTDYPAKFQRSSFSTANFLPDNASSDLAVSISSSSSRRGLIRIATLPCLLPLIGCLPANAMQPGSKEYLLIKEEVRKVLSKGKAAGVLRLVFHDAGTFDIDDSTGGMNGSIVYELERPENAGLKKSVKVLQKAKTQIDAIQPVSWADMIAVAGAEAVEVCGGPPIQVSLGRLDTLVPDPEGRLPEESLNASGLKKCFQSKGFSTQELVALSGAHTIGSKGFGSPISFDNSYYKVLLEKPWTSSGGMPSMIGLPSDHALVEDDECLRWIKKYADSENLFFEDFKNAYVKLVNSGVRRNSL

SEQ ID NO: 54988 - protein, 239 aa, Glycine max
  peptide (1)..(239): Ceres Seq. ID no. 15175669
  misc_feature (15)..(213): Pfam Name: Peroxidase Pfam Description: Peroxidase
  misc_feature (159)..(238): Homolog of NCBI NO: 38104959 NR Description: hypothetical protein MG10368.4 [Magnaporthe
  misc_feature (1)..(180): Homolog of NCBI NO: 38104959 NR Description: hypothetical protein MG10368.4 [Magnaporthe
  misc_feature (12)..(233): Homolog of NCBI NO: 7489542 NR Description: L-ascorbate peroxidase (EC 1.11.1.11) [validated]
  misc_feature (6)..(239): Homolog of NCBI NO: 5442410 NR Description: ascorbate peroxidase [Zantedeschia aethiopica]
  misc_feature (7)..(233): Homolog of NCBI NO: 15080682 NR Description: peroxisome type ascorbate peroxidase
  misc_feature (11)..(42): Homolog of NCBI NO: 7487935 NR Description: L-ascorbate peroxidase homolog F10M6.50 -
  misc_feature (207)..(239): Homolog of NCBI NO: 7487935 NR Description: L-ascorbate peroxidase homolog F10M6.50 -
  misc_feature (83)..(181): Homolog of NCBI NO: 7487935 NR Description: L-ascorbate peroxidase homolog F10M6.50 -
  misc_feature (1)..(233): Homolog of NCBI NO: 27817866 NR Description: OJ1081_B12.15 [Oryza sativa (japonica
  misc_feature (1)..(239): Homolog of NCBI NO: 30689347 NR Description: ascorbate peroxidase family [Arabidopsis
MQPGSKEYLLIKEEVRKVLSKGKAAGVLRLVFHDAGTFDIDDSTGGMNGSIVYELERPENAGLKKSVKVLQKAKTQIDAIQPVSWADMIAVAGAEAVEVCGGPPIQVSLGRLDTLVPDPEGRLPEESLNASGLKKCFQSKGFSTQELVALSGAHTIGSKGFGSPISFDNSYYKVLLEKPWTSSGGMPSMIGLPSDHALVEDDECLRWIKKYADSENLFFEDFKNAYVKLVNSGVRRNSL

SEQ ID NO: 54989 - DNA, 1261 bp, Glycine max
  misc_feature (1)..(1261): Ceres Seq. ID no. 14313599
ggtaataaggcaaaaccctctctctctctctctcaatttgtttacctcttcaactcaaccacacttctaagatcaaaagctacctttgttgctttgagtttgaactttgaatcaatcaatcaatcaaagtgggtggtgactcatggaagtgaaaggaaggataagcaactccaccatcaccaccaccacaatccaaagtgaggatgagatggaccttcgaagaggtccttggaccgtcgatgaggatcttgctctcatcaattacattgctaatcatggtgaaggtcgatggaactccctagctcgttcagctggactcaaacgaactggcaagagctgcagattgagatggttgaattatttgcgtcccgatgttcgacgtggcaacatcacacttgaagaacagcttcttattctcgagctccatggtcgctggggaaaccgatggtctaaaattgctcaatatttgcctggaagaaccgataatgagataaagaattattggagaacccgtgtccaaaagcaagccaagcaactcaaatgtgacgtgaatagcaagcaattcaaggatgccatgcgctacctttggatgccaaggctggtggagcgcattcaagccgccgccgtggccgccaccactgccacggccaccgtgggttctccaactgcatcagctagtgctactacaaccatcaccactaacaacaacgccaccacatacaactacgagaacaacaacaacaacaaccttaacaacagttttgaagtgcacagtgggaacatgatgttgagaaatccagcaatcatgaacattaataattttgttggttcacacagttacactccagagaataatagtacgggtgcctcatcggattcatttggtgctcaggtttcgcctgtctcggacttgactcaggattattacaataatgtcacggttgggaataataacaacaacaataaccctaatcctgagtattaccaacaagcacatgatcaattgagtttcttagactgcatcacaagcccttcagggttgttcgatttccagtccatggaaccaaacaccccgtggattcagagtaatgttggggacacgtcaaccaacggtttctggaatgttgaaaacatgttgctctttcaacaactctctgacaacatgtgaaacatcaattcgtaggagaattcatggtgagagggactaaaaaaactgtgaagggttgtgaaatttacagatgataaaattatataattaagt

SEQ ID NO: 54990 - protein, 341 aa, Glycine max
  peptide (1)..(341): Ceres Seq. ID no. 14313600
  misc_feature (27)..(74): Pfam Name: Myb-like DNA-binding domain Pfam Description: Myb-like DNA-binding domain
  misc_feature (16)..(209): Homolog of NCBI NO: 14249015 NR Description: myb-like transcription factor Myb 5 [Gossypium
  misc_feature (17)..(189): Homolog of NCBI NO: 18401993 NR Description: myb family transcription factor [Arabidopsis
  misc_feature (17)..(187): Homolog of NCBI NO: 34898110 NR Description: putative typical P-type R2R3 Myb protein
  misc_feature (24)..(188): Homolog of NCBI NO: 13177578 NR Description: Myb transcription factor JAMyb [Oryza sativa]
  misc_feature (24)..(184): Homolog of NCBI NO: 19073328 NR Description: typical P-type R2R3 Myb protein [Sorghum bicolor]
  misc_feature (20)..(338): Homolog of NCBI NO: 7446185 NR Description: dehydration-induced myb-related protein Cpm7 -
  misc_feature (20)..(290): Homolog of NCBI NO: 15240518 NR Description: myb family transcription factor [Arabidopsis
  misc_feature (2)..(338): Homolog of NCBI NO: 7446183 NR Description: ABA-induced myb-related protein Cpm10 -
  misc_feature (2)..(338): Homolog of NCBI NO: 7446184 NR Description: myb-related protein Cpm5 - Craterostigma
  misc_feature (1)..(213): Homolog of NCBI NO: 15230731 NR Description: myb family transcription factor (MYB108)
MEVKGRISNSTITTTTIQSEDEMDLRRGPWTVDEDLALINYIANHGEGRWNSLARSAGLKRTGKSCRLRWLNYLRPDVRRGNITLEEQLLILELHGRWGNRWSKIAQYLPGRTDNEIKNYWRTRVQKQAKQLKCDVNSKQFKDAMRYLWMPRLVERIQAAAVAATTATATVGSPTASASATTTITTNNNATTYNYENNNNNNLNNSFEVHSGNMMLRNPAIMNINNFVGSHSYTPENNSTGASSDSFGAQVSPVSDLTQDYYNNVTVGNNNNNNNPNPEYYQQAHDQLSFLDCITSPSGLFDFQSMEPNTPWIQSNVGDTSTNGFWNVENMLLFQQLSDNM

SEQ ID NO: 54991 - protein, 319 aa, Glycine max
  peptide (1)..(319): Ceres Seq. ID no. 14313601
  misc_feature (5)..(52): Pfam Name: Myb-like DNA-binding domain Pfam Description: Myb-like DNA-binding domain
  misc_feature (1)..(187): Homolog of NCBI NO: 14249015 NR Description: myb-like transcription factor Myb 5 [Gossypium
  misc_feature (1)..(167): Homolog of NCBI NO: 18401993 NR Description: myb family transcription factor [Arabidopsis
  misc_feature (1)..(165): Homolog of NCBI NO: 34898110 NR Description: putative typical P-type R2R3 Myb protein
  misc_feature (2)..(166): Homolog of NCBI NO: 13177578 NR Description: Myb transcription factor JAMyb [Oryza sativa]
  misc_feature (2)..(162): Homolog of NCBI NO: 19073328 NR Description: typical P-type R2R3 Myb protein [Sorghum bicolor]
  misc_feature (1)..(316): Homolog of NCBI NO: 7446185 NR Description: dehydration-induced myb-related protein Cpm7 -
  misc_feature (1)..(268): Homolog of NCBI NO: 15240518 NR Description: myb family transcription factor [Arabidopsis
  misc_feature (1)..(316): Homolog of NCBI NO: 7446183 NR Description: ABA-induced myb-related protein Cpm10 -
  misc_feature (1)..(316): Homolog of NCBI NO: 7446184 NR Description: myb-related protein Cpm5 - Craterostigma
  misc_feature (1)..(191): Homolog of NCBI NO: 15230731 NR Description: myb family transcription factor (MYB108)
MDLRRGPWTVDEDLALINYIANHGEGRWNSLARSAGLKRTGKSCRLRWLNYLRPDVRRGNITLEEQLLILELHGRWGNRWSKIAQYLPGRTDNEIKNYWRTRVQKQAKQLKCDVNSKQFKDAMRYLWMPRLVERIQAAAVAATTATATVGSPTASASATTTITTNNNATTYNYENNNNNNLNNSFEVHSGNMMLRNPAIMNINNFVGSHSYTPENNSTGASSDSFGAQVSPVSDLTQDYYNNVTVGNNNNNNNPNPEYYQQAHDQLSFLDCITSPSGLFDFQSMEPNTPWIQSNVGDTSTNGFWNVENMLLFQQLSDNM

SEQ ID NO: 54992 - protein, 197 aa, Glycine max
  peptide (1)..(197): Ceres Seq. ID no. 14313602
  misc_feature (1)..(65): Homolog of NCBI NO: 14249015 NR Description: myb-like transcription factor Myb 5 [Gossypium
  misc_feature (1)..(45): Homolog of NCBI NO: 18401993 NR Description: myb family transcription factor [Arabidopsis
  misc_feature (1)..(43): Homolog of NCBI NO: 34898110 NR Description: putative typical P-type R2R3 Myb protein
  misc_feature (1)..(44): Homolog of NCBI NO: 13177578 NR Description: Myb transcription factor JAMyb [Oryza sativa]
  misc_feature (1)..(40): Homolog of NCBI NO: 19073328 NR Description: typical P-type R2R3 Myb protein [Sorghum bicolor]
  misc_feature (1)..(194): Homolog of NCBI NO: 7446185 NR Description: dehydration-induced myb-related protein Cpm7 -
  misc_feature (1)..(146): Homolog of NCBI NO: 15240518 NR Description: myb family transcription factor [Arabidopsis
  misc_feature (1)..(194): Homolog of NCBI NO: 7446183 NR Description: ABA-induced myb-related protein Cpm10 -
  misc_feature (1)..(194): Homolog of NCBI NO: 7446184 NR Description: myb-related protein Cpm5 - Craterostigma
  misc_feature (1)..(69): Homolog of NCBI NO: 15230731 NR Description: myb family transcription factor (MYB108)
MRYLWMPRLVERIQAAAVAATTATATVGSPTASASATTTITTNNNATTYNYENNNNNNLNNSFEVHSGNMMLRNPAIMNINNFVGSHSYTPENNSTGASSDSFGAQVSPVSDLTQDYYNNVTVGNNNNNNNPNPEYYQQAHDQLSFLDCITSPSGLFDFQSMEPNTPWIQSNVGDTSTNGFWNVENMLLFQQLSDNM

SEQ ID NO: 54993 - DNA, 1674 bp, Glycine max
  misc_feature (1)..(1674): Ceres Seq. ID no. 15177903
ggtctgtttcgttgcaaagaagagtgttgaagcttttcttcttcctctgccttgtcttcttccctttgccttcaacctcgttttcttttcttcgtcttctatcaccgattccgattctcttcttccttattttattgatcctctctgcgattaccaattttctcatttcctccgttttctcggcgaccgaacggaggagtagaacgcagttctgaaaacgattggaaaatgctgggaactgcactgcaattcggcggcgttcgcggcgatgatcggttttacattccggtgaagacgcggaagagccagaatcagcgcaaacagagtcacagagccaagaacaatgaacctgaaaacacggatttagtttcgaagagcaaaatcgatatctctgaggataacaacagcaatagcgatagcaatctcaaccaatctctgaaaccaactctttctccgtccgtagagtctgtcagtaacatcgataggttcttggagtccacaacaccgtcagttccggctcagtatttctccaagacaacgatgagaagatggaagttttgcgatgtggagtatcagtcttattttgcactgagtgatctgtgggagtcttttaaggagtggagtgcgtacggagctggagtgcctttggtgcttgatcaaagtgattctgttgttcagtattatgttccgtatttgtcggctattcaactctatgctcactctgctgagaaggcaactgcaaagccaaggtacaccggtgaagatagtgatggtgattactacagagattcatgcagtgaaggaagtagtgattatgaatatggaaaaaggactgaatttatgactcaaagaagtagtcagtatctaacaggtggtatctcactgcaaatgaacacactatctatgcatgataaacacagtactgtgcaagaaggattttctagtgatgatagtgaaactgggaatcctcaagatctactttttgagtattttgaacaagatcctccgtatagtcgtgagcccttggctgacaagattcaagatcttgcacgccactatcctgccctcaagtcgttgagaagctgtgatttattaccagtcagttgggtgtctgtggcatggtatcctatatatcgaatacccacaggtccaactttaaaagatttagatggatgctttctaacataccatacactccatacacccttgacaggaagtggtcgtactcatgctccaacactggtttatcccagtgagatggatggtgtaccaaagatttctatacctacttttgcaatggcttcctataagttaaaggggtctatttggatgaaaaaaggagttagtgaatctcaacaagtgagttccctcttgcaggctgctgataactggttaagactagttcaggttaatcacccggattttcagttctttaaatcacatggcacataccatagatgaactgcataagccgacatgtctttcctgcttttggctaaaactgagccttaatttctgtgttcgttgcttggtgcaaacttggtaaaagcccatccatctgtagagattgtgatgacgcgatagctgcctaattttggattcttgtgatatgcctaagcagcacaaaaagatgaagccaatatgaagcaatgaattcatagagattgctaaagc

SEQ ID NO: 54994 - protein, 410 aa, Glycine max
  peptide (1)..(410): Ceres Seq. ID no. 15177904
  misc_feature (82)..(402): Pfam Name: Protein of unknown function (DUF789) Pfam Description: Protein of unknown function (DUF789)
  misc_feature (55)..(402): Homolog of NCBI NO: 18379188 NR Description: expressed protein [Arabidopsis thaliana]
  misc_feature (36)..(194): Homolog of NCBI NO: 34394268 NR Description: hypothetical protein [Oryza sativa (japonica
  misc_feature (236)..(405): Homolog of NCBI NO: 34394268 NR Description: hypothetical protein [Oryza sativa (japonica
  misc_feature (48)..(195): Homolog of NCBI NO: 22327664 NR Description: expressed protein [Arabidopsis thaliana]
  misc_feature (209)..(410): Homolog of NCBI NO: 22327664 NR Description: expressed protein [Arabidopsis thaliana]
  misc_feature (48)..(195): Homolog of NCBI NO: 10177151 NR Description: gb|AAF31026.1~gene_id:K21P3.10~similar to unknown
  misc_feature (209)..(410): Homolog of NCBI NO: 10177151 NR Description: gb|AAF31026.1~gene_id:K21P3.10~similar to unknown
  misc_feature (236)..(405): Homolog of NCBI NO: 15450996 NR Description: Unknown protein [Arabidopsis thaliana]
  misc_feature (11)..(195): Homolog of NCBI NO: 15450996 NR Description: Unknown protein [Arabidopsis thaliana]
  misc_feature (43)..(402): Homolog of NCBI NO: 22329567 NR Description: expressed protein [Arabidopsis thaliana]
MLGTALQFGGVRGDDRFYIPVKTRKSQNQRKQSHRAKNNEPENTDLVSKSKIDISEDNNSNSDSNLNQSLKPTLSPSVESVSNIDRFLESTTPSVPAQYFSKTTMRRWKFCDVEYQSYFALSDLWESFKEWSAYGAGVPLVLDQSDSVVQYYVPYLSAIQLYAHSAEKATAKPRYTGEDSDGDYYRDSCSEGSSDYEYGKRTEFMTQRSSQYLTGGISLQMNTLSMHDKHSTVQEGFSSDDSETGNPQDLLFEYFEQDPPYSREPLADKIQDLARHYPALKSLRSCDLLPVSWVSVAWYPIYRIPTGPTLKDLDGCFLTYHTLHTPLTGSGRTHAPTLVYPSEMDGVPKISIPTFAMASYKLKGSIWMKKGVSESQQVSSLLQAADNWLRLVQVNHPDFQFFKSHGTYHR

SEQ ID NO: 54995 - protein, 306 aa, Glycine max
  peptide (1)..(306): Ceres Seq. ID no. 15177905
  misc_feature (1)..(298): Pfam Name: Protein of unknown function (DUF789) Pfam Description: Protein of unknown function (DUF789)
  misc_feature (1)..(298): Homolog of NCBI NO: 18379188 NR Description: expressed protein [Arabidopsis thaliana]
  misc_feature (1)..(90): Homolog of NCBI NO: 34394268 NR Description: hypothetical protein [Oryza sativa (japonica
  misc_feature (132)..(301): Homolog of NCBI NO: 34394268 NR Description: hypothetical protein [Oryza sativa (japonica
  misc_feature (1)..(91): Homolog of NCBI NO: 22327664 NR Description: expressed protein [Arabidopsis thaliana]
  misc_feature (105)..(306): Homolog of NCBI NO: 22327664 NR Description: expressed protein [Arabidopsis thaliana]
  misc_feature (1)..(91): Homolog of NCBI NO: 10177151 NR Description: gb|AAF31026.1~gene_id:K21P3.10~similar to unknown
  misc_feature (105)..(306): Homolog of NCBI NO: 10177151 NR Description: gb|AAF31026.1~gene_id:K21P3.10~similar to unknown
  misc_feature (132)..(301): Homolog of NCBI NO: 15450996 NR Description: Unknown protein [Arabidopsis thaliana]
  misc_feature (1)..(91): Homolog of NCBI NO: 15450996 NR Description: Unknown protein [Arabidopsis thaliana]
  misc_feature (1)..(298): Homolog of NCBI NO: 22329567 NR Description: expressed protein [Arabidopsis thaliana]
MRRWKFCDVEYQSYFALSDLWESFKEWSAYGAGVPLVLDQSDSVVQYYVPYLSAIQLYAHSAEKATAKPRYTGEDSDGDYYRDSCSEGSSDYEYGKRTEFMTQRSSQYLTGGISLQMNTLSMHDKHSTVQEGFSSDDSETGNPQDLLFEYFEQDPPYSREPLADKIQDLARHYPALKSLRSCDLLPVSWVSVAWYPIYRIPTGPTLKDLDGCFLTYHTLHTPLTGSGRTHAPTLVYPSEMDGVPKISIPTFAMASYKLKGSIWMKKGVSESQQVSSLLQAADNWLRLVQVNHPDFQFFKSHGTYHR

SEQ ID NO: 54996 - protein, 206 aa, Glycine max
  peptide (1)..(206): Ceres Seq. ID no. 15177906
  misc_feature (1)..(198): Pfam Name: Protein of unknown function (DUF789) Pfam Description: Protein of unknown function (DUF789)
  misc_feature (32)..(126): Homolog of NCBI NO: 18414588 NR Description: expressed protein [Arabidopsis thaliana]
  misc_feature (46)..(198): Homolog of NCBI NO: 22328289 NR Description: expressed protein [Arabidopsis thaliana]
  misc_feature (27)..(206): Homolog of NCBI NO: 18379117 NR Description: expressed protein [Arabidopsis thaliana]
  misc_feature (27)..(206): Homolog of NCBI NO: 9280648 NR Description: F21B7.22 [Arabidopsis thaliana]
  misc_feature (1)..(198): Homolog of NCBI NO: 18379188 NR Description: expressed protein [Arabidopsis thaliana]
  misc_feature (32)..(201): Homolog of NCBI NO: 34394268 NR Description: hypothetical protein [Oryza sativa (japonica
  misc_feature (5)..(206): Homolog of NCBI NO: 22327664 NR Description: expressed protein [Arabidopsis thaliana]
  misc_feature (5)..(206): Homolog of NCBI NO: 10177151 NR Description: gb|AAF31026.1~gene_id:K21P3.10~similar to unknown
  misc_feature (32)..(201): Homolog of NCBI NO: 15450996 NR Description: Unknown protein [Arabidopsis thaliana]
  misc_feature (1)..(198): Homolog of NCBI NO: 22329567 NR Description: expressed protein [Arabidopsis thaliana]
MTQRSSQYLTGGISLQMNTLSMHDKHSTVQEGFSSDDSETGNPQDLLFEYFEQDPPYSREPLADKIQDLARHYPALKSLRSCDLLPVSWVSVAWYPIYRIPTGPTLKDLDGCFLTYHTLHTPLTGSGRTHAPTLVYPSEMDGVPKISIPTFAMASYKLKGSIWMKKGVSESQQVSSLLQAADNWLRLVQVNHPDFQFFKSHGTYHR

SEQ ID NO: 54997 - DNA, 1455 bp, Glycine max
  misc_feature (1)..(1455): Ceres Seq. ID no. 14311989
gttatgactctttgacttctccttcatctctttcgctggacaaaacccctttcgccggaaaacccaccgcaacctttgtggttcgcaactccgtttccggcttcaccgtgctcctcttacacgcagtatatatatatgtatgtatatggggaaaactaggtggttgataatattggttacctgtttatgcctgctttccttttctgatggcagagaactcaaggttaggcataaaaagcaacattaccaatacaatcatacagttgctacaatattagtggaatatgcttctgcggtatacttgtcagatttaactgaactttttacttggacgtgctctaggtgtaatggcttgaccaagggatttgaaatgatagagttagttgttgacgtcgagcattgcttacaggcatttgttggagtggccgatgatcctcatgccattatcattgcattcagaggaacaaatgaacacagcttacagaattggattgaagatttatattggaagcagcatgatataaattatccaggcatggatgatgcaatggtacaccgtggtttttataccgcgtaccacaatacaacaatacgtcctgcaattttagatgctgttgaaagagcaaagaagttttatggagatattgaaattatagcaacagggcattcaatgggaggggcaatggcttcattttgtggacttgatttaacggtaaatcaaaatgaaaaaaatgttcaagttatgacatttggacaacctcgtattggaaatgctgcttttgcatctctctatacgaaactagttccaaataccatccgagtcacaaatgaccatgatattgtacctcatttgcctccatactattattatttaccgcagaagacataccgccacttcccaagagaggtatggctttataacatcggattaggtagtcttgtgtacagtgttgagaagatttgtgatgaatctggtgaggatccaaattgcagcagatcggtgactgggaatagcattgctgatcacttggtctattatggcgttgacatgggatcagatgagccaagttcatgcagaattgttatggattcttatgttcagaatactaacatcaaagattcaagaggaaacttaatcttgtccagagatcctgcaacccccctcatcaaattgagtggagagggtgacaatcaggaaaatcccattaatgttgattgaattggcatcagatatctgttgcatgatatgttccagaggtttgccgtgtggcattattcttcagatttcttctttcttcatggtccatacagctgaacaattttattgaacaggctagggctggaaggagtttgtatagtcttggactcgtgtacatatgctcatacttgtatatataactaataattatatttttttacttcataattaataattcttgatactttgttaagtgc

SEQ ID NO: 54998 - protein, 359 aa, Glycine max
  peptide (1)..(359): Ceres Seq. ID no. 14311990
  misc_feature (63)..(305): Homolog of NCBI NO: 417256 NR Description: LIPASE PRECURSOR (TRIACYLGLYCEROL LIPASE)
  misc_feature (36)..(302): Homolog of NCBI NO: 21166167 NR Description: triacylglycerol lipase-like protein
  misc_feature (78)..(336): Homolog of NCBI NO: 34907212 NR Description: P0492G09.26 [Oryza sativa (japonica
  misc_feature (7)..(336): Homolog of NCBI NO: 34899296 NR Description: putative triacylglycerol lipase
  misc_feature (7)..(336): Homolog of NCBI NO: 34395192 NR Description: putative triacylglycerol lipase
  misc_feature (3)..(286): Homolog of NCBI NO: 30686925 NR Description: lipase (class 3) family [Arabidopsis thaliana]
  misc_feature (11)..(336): Homolog of NCBI NO: 21425569 NR Description: triacylglycerol Lipase [Triticum aestivum]
  misc_feature (17)..(336): Homolog of NCBI NO: 21425571 NR Description: triacylglycerol lipase [Triticum aestivum]
  misc_feature (3)..(346): Homolog of NCBI NO: 18418946 NR Description: lipase (class 3) family [Arabidopsis thaliana]
  misc_feature (1)..(344): Homolog of NCBI NO: 15238889 NR Description: lipase (class 3) family [Arabidopsis thaliana]
MYMGKTRWLIILVTCLCLLSFSDGRELKVRHKKQHYQYNHTVATILVEYASAVYLSDLTELFTWTCSRCNGLTKGFEMIELVVDVEHCLQAFVGVADDPHAIIIAFRGTNEHSLQNWIEDLYWKQHDINYPGMDDAMVHRGFYTAYHNTTIRPAILDAVERAKKFYGDIEIIATGHSMGGAMASFCGLDLTVNQNEKNVQVMTFGQPRIGNAAFASLYTKLVPNTIRVTNDHDIVPHLPPYYYYLPQKTYRHFPREVWLYNIGLGSLVYSVEKICDESGEDPNCSRSVTGNSIADHLVYYGVDMGSDEPSSCRIVMDSYVQNTNIKDSRGNLILSRDPATPLIKLSGEGDNQENPINVD

SEQ ID NO: 54999 - protein, 357 aa, Glycine max
  peptide (1)..(357): Ceres Seq. ID no. 14311991
  misc_feature (61)..(303): Homolog of NCBI NO: 417256 NR Description: LIPASE PRECURSOR (TRIACYLGLYCEROL LIPASE)
  misc_feature (34)..(300): Homolog of NCBI NO: 21166167 NR Description: triacylglycerol lipase-like protein
  misc_feature (76)..(334): Homolog of NCBI NO: 34907212 NR Description: P0492G09.26 [Oryza sativa (japonica
  misc_feature (5)..(334): Homolog of NCBI NO: 34899296 NR Description: putative triacylglycerol lipase
  misc_feature (5)..(334): Homolog of NCBI NO: 34395192 NR Description: putative triacylglycerol lipase
  misc_feature (1)..(284): Homolog of NCBI NO: 30686925 NR Description: lipase (class 3) family [Arabidopsis thaliana]
  misc_feature (9)..(334): Homolog of NCBI NO: 21425569 NR Description: triacylglycerol Lipase [Triticum aestivum]
  misc_feature (15)..(334): Homolog of NCBI NO: 21425571 NR Description: triacylglycerol lipase [Triticum aestivum]
  misc_feature (1)..(344): Homolog of NCBI NO: 18418946 NR Description: lipase (class 3) family [Arabidopsis thaliana]
  misc_feature (1)..(342): Homolog of NCBI NO: 15238889 NR Description: lipase (class 3) family [Arabidopsis thaliana]
MGKTRWLIILVTCLCLLSFSDGRELKVRHKKQHYQYNHTVATILVEYASAVYLSDLTELFTWTCSRCNGLTKGFEMIELVVDVEHCLQAFVGVADDPHAIIIAFRGTNEHSLQNWIEDLYWKQHDINYPGMDDAMVHRGFYTAYHNTTIRPAILDAVERAKKFYGDIEIIATGHSMGGAMASFCGLDLTVNQNEKNVQVMTFGQPRIGNAAFASLYTKLVPNTIRVTNDHDIVPHLPPYYYYLPQKTYRHFPREVWLYNIGLGSLVYSVEKICDESGEDPNCSRSVTGNSIADHLVYYGVDMGSDEPSSCRIVMDSYVQNTNIKDSRGNLILSRDPATPLIKLSGEGDNQENPINVD

SEQ ID NO: 55000 - protein, 282 aa, Glycine max
  peptide (1)..(282): Ceres Seq. ID no. 14311992
  misc_feature (1)..(228): Homolog of NCBI NO: 417256 NR Description: LIPASE PRECURSOR (TRIACYLGLYCEROL LIPASE)
  misc_feature (1)..(225): Homolog of NCBI NO: 21166167 NR Description: triacylglycerol lipase-like protein
  misc_feature (1)..(259): Homolog of NCBI NO: 34907212 NR Description: P0492G09.26 [Oryza sativa (japonica
  misc_feature (1)..(259): Homolog of NCBI NO: 34899296 NR Description: putative triacylglycerol lipase
  misc_feature (1)..(259): Homolog of NCBI NO: 34395192 NR Description: putative triacylglycerol lipase
  misc_feature (1)..(209): Homolog of NCBI NO: 30686925 NR Description: lipase (class 3) family [Arabidopsis thaliana]
  misc_feature (1)..(259): Homolog of NCBI NO: 21425569 NR Description: triacylglycerol Lipase [Triticum aestivum]
  misc_feature (1)..(259): Homolog of NCBI NO: 21425571 NR Description: triacylglycerol lipase [Triticum aestivum]
  misc_feature (1)..(269): Homolog of NCBI NO: 18418946 NR Description: lipase (class 3) family [Arabidopsis thaliana]
  misc_feature (1)..(267): Homolog of NCBI NO: 15238889 NR Description: lipase (class 3) family [Arabidopsis thaliana]
MIELVVDVEHCLQAFVGVADDPHAIIIAFRGTNEHSLQNWIEDLYWKQHDINYPGMDDAMVHRGFYTAYHNTTIRPAILDAVERAKKFYGDIEIIATGHSMGGAMASFCGLDLTVNQNEKNVQVMTFGQPRIGNAAFASLYTKLVPNTIRVTNDHDIVPHLPPYYYYLPQKTYRHFPREVWLYNIGLGSLVYSVEKICDESGEDPNCSRSVTGNSIADHLVYYGVDMGSDEPSSCRIVMDSYVQNTNIKDSRGNLILSRDPATPLIKLSGEGDNQENPINVD

SEQ ID NO: 55001 - DNA, 1414 bp, Glycine max
  misc_feature (1)..(1414): Ceres Seq. ID no. 13594080
ggggggggggsagctacgtaggccccccccccccatctctttcatactctcacgtcattatattaagctagctttgctaatattggacccttcttcaaccccaaaaatataaaaaactaaaaaaacatcaaccgaaggggtcatttctcccaatccgtttctgtttctgtcttccaggaacactgtcagtgagtgaaggatacgatgaacatcatgtctacccaccagtgtagttggcctgtgagaattcaggatcatcctgacaaaggaagtattaatagggctccattttccagaggatcagacttccttaatgttggataccatactcaaaaatatggtcatagtgccagaaaatgtaggcccgttttttccagttcagtgagcaacattacggatccttcagattcagataacactgataagaaaaaacctcagaatggtgaaatgggaggagtgaatagtgaaatgcttagagagagtctcgagaaaatagttggaaaagatgattccacgtttagtggatttgaccttgctacccttatcaggaacaaatatgggaggtcttatgatgttcagttgataaagaaggagttcatgggaagaaatctccttgcgatgaatgtcatgtggaagtacatggagcagagatccttcccattgaccgaagaagagtatattttgaggcttgatgatattgcaaacaacttaaaatgttggggagctgtgtctcatattcggaacagcctagaaaagtcgaaggaacgacctcggatagggaaggcagtaagcatttttatagatatggatgagtcgggtgctcgttccaacgagtggatctacaaatagaatgtgttactgatttgaaatcctaaagttagtcactggtttccagataacagtgaaggaaaagtccataggcagcaggtccaccacttttagtgaatttcgttagtttggaatttattacacttggatcttaacatctacagaagcttttctgacgtttctgttggcaacttggcatcaggcctaggcaactatatttttggttctgcccttctttttttcctttgttcatattgatgtaaaatgagttaatataagaaaaagcattcatattaaatttctaacaaactttctcttcaaattagaggagacactaatattaaaggtgttgtcctaagtgcatgcacattcctcgtgggaattacttgaaacatgagagaaatttgaatcctttgccagcaagtatgattatagccagctgatgctataactgcttggatagagaatacgatttttcagtgtagcttttatcaaagtagaaatttctttcgatgccaaaaaaaaaaaaaaaaaaaaaaaaaaaaaaaaagaaaaaaaaaaaaaaaaaagaattcctgcagcccgg

SEQ ID NO: 55002 - protein, 214 aa, Glycine max
  peptide (1)..(214): Ceres Seq. ID no. 15221297
  misc_feature (116)..(203): Homolog of NCBI NO: 33861020 NR Description: conserved hypothetical protein
  misc_feature (109)..(197): Homolog of NCBI NO: 33866372 NR Description: conserved hypothetical protein [Synechococcus sp.
  misc_feature (106)..(203): Homolog of NCBI NO: 37521175 NR Description: hypothetical protein gsr1606 [Gloeobacter
  misc_feature (106)..(212): Homolog of NCBI NO: 22298501 NR Description: ORF_ID:tll0958~hypothetical protein
  misc_feature (106)..(211): Homolog of NCBI NO: 16332324 NR Description: unknown protein [Synechocystis sp. PCC 6803]
  misc_feature (106)..(212): Homolog of NCBI NO: 23130142 NR Description: hypothetical protein [Nostoc punctiforme]
  misc_feature (106)..(212): Homolog of NCBI NO: 17229946 NR Description: hypothetical protein [Nostoc sp. PCC 7120]
  misc_feature (107)..(212): Homolog of NCBI NO: 23041855 NR Description: hypothetical protein [Trichodesmium erythraeum
  misc_feature (1)..(214): Homolog of NCBI NO: 18402409 NR Description: expressed protein [Arabidopsis thaliana]
  misc_feature (1)..(214): Homolog of NCBI NO: 11994202 NR Description: dbj|BAA18864.1~gene_id:MPN9.15~similar to unknown
MNIMSTHQCSWPVRIQDHPDKGSINRAPFSRGSDFLNVGYHTQKYGHSARKCRPVFSSSVSNITDPSDSDNTDKKKPQNGEMGGVNSEMLRESLEKIVGKDDSTFSGFDLATLIRNKYGRSYDVQLIKKEFMGRNLLAMNVMWKYMEQRSFPLTEEEYILRLDDIANNLKCWGAVSHIRNSLEKSKERPRIGKAVSIFIDMDESGARSNEWIYK

SEQ ID NO: 55003 - protein, 211 aa, Glycine max
  peptide (1)..(211): Ceres Seq. ID no. 15221298
  misc_feature (113)..(200): Homolog of NCBI NO: 33861020 NR Description: conserved hypothetical protein
  misc_feature (106)..(194): Homolog of NCBI NO: 33866372 NR Description: conserved hypothetical protein [Synechococcus sp.
  misc_feature (103)..(200): Homolog of NCBI NO: 37521175 NR Description: hypothetical protein gsr1606 [Gloeobacter
  misc_feature (103)..(209): Homolog of NCBI NO: 22298501 NR Description: ORF_ID:tll0958~hypothetical protein
  misc_feature (103)..(208): Homolog of NCBI NO: 16332324 NR Description: unknown protein [Synechocystis sp. PCC 6803]
  misc_feature (103)..(209): Homolog of NCBI NO: 23130142 NR Description: hypothetical protein [Nostoc punctiforme]
  misc_feature (103)..(209): Homolog of NCBI NO: 17229946 NR Description: hypothetical protein [Nostoc sp. PCC 7120]
  misc_feature (104)..(209): Homolog of NCBI NO: 23041855 NR Description: hypothetical protein [Trichodesmium erythraeum
  misc_feature (1)..(211): Homolog of NCBI NO: 18402409 NR Description: expressed protein [Arabidopsis thaliana]
  misc_feature (1)..(211): Homolog of NCBI NO: 11994202 NR Description: dbj|BAA18864.1~gene_id:MPN9.15~similar to unknown
MSTHQCSWPVRIQDHPDKGSINRAPFSRGSDFLNVGYHTQKYGHSARKCRPVFSSSVSNITDPSDSDNTDKKKPQNGEMGGVNSEMLRESLEKIVGKDDSTFSGFDLATLIRNKYGRSYDVQLIKKEFMGRNLLAMNVMWKYMEQRSFPLTEEEYILRLDDIANNLKCWGAVSHIRNSLEKSKERPRIGKAVSIFIDMDESGARSNEWIYK

SEQ ID NO: 55004 - protein, 133 aa, Glycine max
  peptide (1)..(133): Ceres Seq. ID no. 15221299
  misc_feature (35)..(122): Homolog of NCBI NO: 33861020 NR Description: conserved hypothetical protein
  misc_feature (28)..(116): Homolog of NCBI NO: 33866372 NR Description: conserved hypothetical protein [Synechococcus sp.
  misc_feature (25)..(122): Homolog of NCBI NO: 37521175 NR Description: hypothetical protein gsr1606 [Gloeobacter
  misc_feature (25)..(131): Homolog of NCBI NO: 22298501 NR Description: ORF_ID:tll0958~hypothetical protein
  misc_feature (25)..(130): Homolog of NCBI NO: 16332324 NR Description: unknown protein [Synechocystis sp. PCC 6803]
  misc_feature (25)..(131): Homolog of NCBI NO: 23130142 NR Description: hypothetical protein [Nostoc punctiforme]
  misc_feature (25)..(131): Homolog of NCBI NO: 17229946 NR Description: hypothetical protein [Nostoc sp. PCC 7120]
  misc_feature (26)..(131): Homolog of NCBI NO: 23041855 NR Description: hypothetical protein [Trichodesmium erythraeum
  misc_feature (1)..(133): Homolog of NCBI NO: 18402409 NR Description: expressed protein [Arabidopsis thaliana]
  misc_feature (1)..(133): Homolog of NCBI NO: 11994202 NR Description: dbj|BAA18864.1~gene_id:MPN9.15~similar to unknown
MGGVNSEMLRESLEKIVGKDDSTFSGFDLATLIRNKYGRSYDVQLIKKEFMGRNLLAMNVMWKYMEQRSFPLTEEEYILRLDDIANNLKCWGAVSHIRNSLEKSKERPRIGKAVSIFIDMDESGARSNEWIYK

SEQ ID NO: 55005 - DNA, 1555 bp, Glycine max
  misc_feature (1)..(1555): Ceres Seq. ID no. 15226529
gaaggtaaccccaaatcaaatccgagttgtttcttgtttaagggttcaagggtattatgcttgctggattcattctcttgctgaaatgcagtctttctagaaagtttgttcaactgtcccattattggcgttagctatgctacccactggagcaaaagagacccaattacgtgagagcaacagtcagaaggtccatcctcaaccaatagaagaggccatgaatcagaatccagaagcaatggaaaccctaatatctaaagtttttatgaatatctcttccttgaagtcagcttatattgagcttcaagctgctcatactccctacgaccctgataaaattcacactgctgataaacttgttattagtgagctgaaaaatctgtctgaactcaagcatttctacagggagaacaacccaaaaccagtgtgtgtttctccccaagactcacgtttagctgcagaaattcaagaacaacagagccttctgaaaacttatgaggtcatggtgaagaagttccaatctgaaatccagaataaagattcagagatccatcaattacagcagcagattgagcaggctagccagaagcgagcaaaactagagaaaaatctgaagcttagaggtttgtcaaccaaagaatcggaagatgaaaatggctttttccctgttgatctaactccagatctcttcacctctgctgtggaagtggctgcaaaagccattcatgatttttctaaacctttgatcaacatgatgaaagcagctgggtgggaccttgatgctgctgccaactcaatcgaacctgatgttgtttacgcaaagagagctcataagaaatatgcatttgagtcttacatatgccaaagaatgttcagtggctttgagcaggaaaacttctctgtcaaattagacaatactactgcaactaaagagagcttcttccaccagtttctcgctttaagagagatggatcccttggatatgctggggcaaaatccagattccatttttgggaaattttgcaggagcaaatacctggtggtagttcatcccaagatggaggcatcgttctttggaaatttagatcagcgaaattatgtgatgggtggagggcatccaaggactcctttttaccaggcttttcttaaactgaccaagtcaatttggcttttacacaggttggcttattcttttgagccgaatgttaaggtatttcaggttaaaggagggagtgagttctctgatgtttatatggaaagtgtggtcaagaatctgataatggatgacaatgatgaaaaacccaaaattggtttgatggttatgcctggattttggattgggggaagtttgattcagagtaaagtctatctctctggtatgaaggcggctgaatgattcctgaacacagtcaagactttcagaaaatgcatagttgattgtatgtggtttgtttgaattgtcgtttctttatcttgtaagaaaatgctgttgtctgtaatttttaatatcctttttagtggttgtaagagtaaatgagccctttatcctttgttt

SEQ ID NO: 55006 - protein, 419 aa, Glycine max
  peptide (1)..(419): Ceres Seq. ID no. 15226530
  misc_feature (24)..(159): Pfam Name: Plant protein of unknown function (DUF641) Pfam Description: Plant protein of unknown function (DUF641)
  misc_feature (37)..(414): Homolog of NCBI NO: 15232398 NR Description: expressed protein [Arabidopsis thaliana]
  misc_feature (30)..(413): Homolog of NCBI NO: 20466324 NR Description: unknown protein [Arabidopsis thaliana]
  misc_feature (30)..(413): Homolog of NCBI NO: 22329840 NR Description: expressed protein [Arabidopsis thaliana]
  misc_feature (1)..(413): Homolog of NCBI NO: 15219282 NR Description: expressed protein [Arabidopsis thaliana]
  misc_feature (34)..(413): Homolog of NCBI NO: 15231944 NR Description: expressed protein [Arabidopsis thaliana]
  misc_feature (34)..(413): Homolog of NCBI NO: 8777470 NR Description: gb|AAB82637.1~gene_id:K15M2.1~similar to unknown
  misc_feature (24)..(304): Homolog of NCBI NO: 15234143 NR Description: hypothetical protein [Arabidopsis thaliana]
  misc_feature (316)..(380): Homolog of NCBI NO: 15235221 NR Description: expressed protein [Arabidopsis thaliana]
  misc_feature (24)..(293): Homolog of NCBI NO: 15235221 NR Description: expressed protein [Arabidopsis thaliana]
  misc_feature (1)..(419): Homolog of NCBI NO: 15225441 NR Description: expressed protein [Arabidopsis thaliana]
MLPTGAKETQLRESNSQKVHPQPIEEAMNQNPEAMETLISKVFMNISSLKSAYIELQAAHTPYDPDKIHTADKLVISELKNLSELKHFYRENNPKPVCVSPQDSRLAAEIQEQQSLLKTYEVMVKKFQSEIQNKDSEIHQLQQQIEQASQKRAKLEKNLKLRGLSTKESEDENGFFPVDLTPDLFTSAVEVAAKAIHDFSKPLINMMKAAGWDLDAAANSIEPDVVYAKRAHKKYAFESYICQRMFSGFEQENFSVKLDNTTATKESFFHQFLALREMDPLDMLGQNPDSIFGKFCRSKYLVVVHPKMEASFFGNLDQRNYVMGGGHPRTPFYQAFLKLTKSIWLLHRLAYSFEPNVKVFQVKGGSEFSDVYMESVVKNLIMDDNDEKPKIGLMVMPGFWIGGSLIQSKVYLSGMKAAE

SEQ ID NO: 55007 - protein, 392 aa, Glycine max
  peptide (1)..(392): Ceres Seq. ID no. 15226531
  misc_feature (1)..(132): Pfam Name: Plant protein of unknown function (DUF641) Pfam Description: Plant protein of unknown function (DUF641)
  misc_feature (10)..(387): Homolog of NCBI NO: 15232398 NR Description: expressed protein [Arabidopsis thaliana]
  misc_feature (3)..(386): Homolog of NCBI NO: 20466324 NR Description: unknown protein [Arabidopsis thaliana]
  misc_feature (3)..(386): Homolog of NCBI NO: 22329840 NR Description: expressed protein [Arabidopsis thaliana]
  misc_feature (1)..(386): Homolog of NCBI NO: 15219282 NR Description: expressed protein [Arabidopsis thaliana]
  misc_feature (7)..(386): Homolog of NCBI NO: 15231944 NR Description: expressed protein [Arabidopsis thaliana]
  misc_feature (7)..(386): Homolog of NCBI NO: 8777470 NR Description: gb|AAB82637.1~gene_id:K15M2.1~similar to unknown
  misc_feature (1)..(277): Homolog of NCBI NO: 15234143 NR Description: hypothetical protein [Arabidopsis thaliana]
  misc_feature (289)..(353): Homolog of NCBI NO: 15235221 NR Description: expressed protein [Arabidopsis thaliana]
  misc_feature (1)..(266): Homolog of NCBI NO: 15235221 NR Description: expressed protein [Arabidopsis thaliana]
  misc_feature (1)..(392): Homolog of NCBI NO: 15225441 NR Description: expressed protein [Arabidopsis thaliana]
MNQNPEAMETLISKVFMNISSLKSAYIELQAAHTPYDPDKIHTADKLVISELKNLSELKHFYRENNPKPVCVSPQDSRLAAEIQEQQSLLKTYEVMVKKFQSEIQNKDSEIHQLQQQIEQASQKRAKLEKNLKLRGLSTKESEDENGFFPVDLTPDLFTSAVEVAAKAIHDFSKPLINMMKAAGWDLDAAANSIEPDVVYAKRAHKKYAFESYICQRMFSGFEQENFSVKLDNTTATKESFFHQFLALREMDPLDMLGQNPDSIFGKFCRSKYLVVVHPKMEASFFGNLDQRNYVMGGGHPRTPFYQAFLKLTKSIWLLHRLAYSFEPNVKVFQVKGGSEFSDVYMESVVKNLIMDDNDEKPKIGLMVMPGFWIGGSLIQSKVYLSGMKAAE

SEQ ID NO: 55008 - protein, 385 aa, Glycine max
  peptide (1)..(385): Ceres Seq. ID no. 15226532
  misc_feature (1)..(125): Pfam Name: Plant protein of unknown function (DUF641) Pfam Description: Plant protein of unknown function (DUF641)
  misc_feature (3)..(380): Homolog of NCBI NO: 15232398 NR Description: expressed protein [Arabidopsis thaliana]
  misc_feature (1)..(379): Homolog of NCBI NO: 20466324 NR Description: unknown protein [Arabidopsis thaliana]
  misc_feature (1)..(379): Homolog of NCBI NO: 22329840 NR Description: expressed protein [Arabidopsis thaliana]
  misc_feature (1)..(379): Homolog of NCBI NO: 15219282 NR Description: expressed protein [Arabidopsis thaliana]
  misc_feature (1)..(379): Homolog of NCBI NO: 15231944 NR Description: expressed protein [Arabidopsis thaliana]
  misc_feature (1)..(379): Homolog of NCBI NO: 8777470 NR Description: gb|AAB82637.1~gene_id:K15M2.1~similar to unknown
  misc_feature (1)..(270): Homolog of NCBI NO: 15234143 NR Description: hypothetical protein [Arabidopsis thaliana]
  misc_feature (282)..(346): Homolog of NCBI NO: 15235221 NR Description: expressed protein [Arabidopsis thaliana]
  misc_feature (1)..(259): Homolog of NCBI NO: 15235221 NR Description: expressed protein [Arabidopsis thaliana]
  misc_feature (1)..(385): Homolog of NCBI NO: 15225441 NR Description: expressed protein [Arabidopsis thaliana]
METLISKVFMNISSLKSAYIELQAAHTPYDPDKIHTADKLVISELKNLSELKHFYRENNPKPVCVSPQDSRLAAEIQEQQSLLKTYEVMVKKFQSEIQNKDSEIHQLQQQIEQASQKRAKLEKNLKLRGLSTKESEDENGFFPVDLTPDLFTSAVEVAAKAIHDFSKPLINMMKAAGWDLDAAANSIEPDVVYAKRAHKKYAFESYICQRMFSGFEQENFSVKLDNTTATKESFFHQFLALREMDPLDMLGQNPDSIFGKFCRSKYLVVVHPKMEASFFGNLDQRNYVMGGGHPRTPFYQAFLKLTKSIWLLHRLAYSFEPNVKVFQVKGGSEFSDVYMESVVKNLIMDDNDEKPKIGLMVMPGFWIGGSLIQSKVYLSGMKAAE

SEQ ID NO: 55009 - DNA, 1381 bp, Glycine max
  misc_feature (1)..(1381): Ceres Seq. ID no. 14308625
tgtaactcccgtagtcccgctgtatgttgtgttgaattgcttgctcaggcagcttgaaggagcacattgctaaggttaaaatagctgaaattgcatttatggtgcaattatgcaatttgctgtaagcagtgttgtggtagtaatgttctaaatcttgaaagtgttgtttcctaggtttatagcatctatttaaggactcatgagaaatcccagtttattggaacatgtttgtctcgctgacatctatctgctgtagcattcaactagtctgtgttttggtaactgtgtggacatgccattcaatccctgagtaaaatgtgaaaacattttacatttattgccactgctaatagtttccaaggataacgaaagcaataatctaattttgtttttgtaccctctactctagaaggtacaaagaaaatgcatgcttgaataaatttttaattgttctcatttgtagaaaaaagttggaattccattttacttgaagatgtttgagctaataacttctcttctaagttcgaacttacatggtttcttaaatggcaatcacaggcagcattgcatgctctaggaaacatctcgggagaaaccagatctgagaacaacatcatactcaatgccgaagaagaagaaaacctgcgacgcttaatttatgaaacagcatccagaagctcaaagctgactccatcgggtctttttctgtcagtattgcagcaggattcagaaatacgtctagcgggctatagaatgctaagtggattggttgcccgaccatggtgcttgatggagatatgttcaaaacaagagattataaataaagttacggacccaagtactgaaacgacaaaaataggtatggaaggcagatataactgctgcaaggcaatacacaaatcattgacagtgtctagtagagtttctgctaatcctgcttttgcaggaatagctgcaaagtttcaggaagctgttggaatgggtccatatcttgttaaaaggcatgttgaagctcaacctgctgtgataacggctgatagattttagttttcacacctgagtggtcaagcaatacctgtaatggagcagttttttttctcttctcaaatacaatgtggagtgttatagaacaaaaaccttttccccctcaaatgttgaaacttgatggaatgagtatattaatcatagttttttagtgtattatatttcaatggcttttgtcaactctagcaaatagatattctttttggctttggatgtgtgttgcatgtgtgaagtagtagtctttgtcaacaattacattgtctactaactggcatatatactgaacttgcattcagctataatttagcttattcaagttcgactgcagcatgttgtt

SEQ ID NO: 55010 - protein, 97 aa, Glycine max
  peptide (1)..(97): Ceres Seq. ID no. 14308626
  misc_feature (1)..(97): Homolog of NCBI NO: 21593496 NR Description: unknown [Arabidopsis thaliana]
  misc_feature (1)..(97): Homolog of NCBI NO: 18400660 NR Description: expressed protein [Arabidopsis thaliana]
  misc_feature (1)..(97): Homolog of NCBI NO: 11994507 NR Description: gene_id:F4B12.9~unknown protein [Arabidopsis
MLSGLVARPWCLMEICSKQEIINKVTDPSTETTKIGMEGRYNCCKAIHKSLTVSSRVSANPAFAGIAAKFQEAVGMGPYLVKRHVEAQPAVITADRF

SEQ ID NO: 55011 - protein, 85 aa, Glycine max
  peptide (1)..(85): Ceres Seq. ID no. 14308627
  misc_feature (1)..(85): Homolog of NCBI NO: 21593496 NR Description: unknown [Arabidopsis thaliana]
  misc_feature (1)..(85): Homolog of NCBI NO: 18400660 NR Description: expressed protein [Arabidopsis thaliana]
  misc_feature (1)..(85): Homolog of NCBI NO: 11994507 NR Description: gene_id:F4B12.9~unknown protein [Arabidopsis
MEICSKQEIINKVTDPSTETTKIGMEGRYNCCKAIHKSLTVSSRVSANPAFAGIAAKFQEAVGMGPYLVKRHVEAQPAVITADRF

SEQ ID NO: 55012 - protein, 61 aa, Glycine max
  peptide (1)..(61): Ceres Seq. ID no. 14308628
  misc_feature (1)..(61): Homolog of NCBI NO: 21593496 NR Description: unknown [Arabidopsis thaliana]
  misc_feature (1)..(61): Homolog of NCBI NO: 18400660 NR Description: expressed protein [Arabidopsis thaliana]
  misc_feature (1)..(61): Homolog of NCBI NO: 11994507 NR Description: gene_id:F4B12.9~unknown protein [Arabidopsis
MEGRYNCCKAIHKSLTVSSRVSANPAFAGIAAKFQEAVGMGPYLVKRHVEAQPAVITADRF

SEQ ID NO: 55013 - DNA, 1271 bp, Glycine max
  misc_feature (1)..(1271): Ceres Seq. ID no. 15169032
aaaagactgaaggataaaacaggcagacattgtcaccagcccccaagcccaaatactatagtgaatggactcacttggccatgtttggcagtggcaccactgacaccttaaggtggaaccagtgtagccatgttagaccatgtttggtgtccataccttggtgcattcgtctgttcttttcataggccaaaatctgattttacaagttattgtgacagggagttgtagtgtttagctttgatactactaatctgtgtttctcatctgctttaaactgtgagcagtgagattctcgcatcttatacatttaagcaattgaaagcatgatgaatcattactattaattttgttatcatatttttgcaatgcaagttctcagtctttcaaagtcttgtcaccttgctttgtgtttgctgatgtaagatttctggttaattaatttgaatctgaaatgtgggcgttcacctcaccatatgctattatagtgcaatctccttaatatatatttgagtatagtattatcaatccaagaaaaaagaaaaaagatattactgcatatcatttttttgttatcatacttttgcaaaataagttctgtctttcgacgttttgaaatcttgtgatgcaacttatttgccatttgtgtttgctgatgcaagattttccttgttaatttgaatcggaaatgcaggtgttagcccaacagctattgcagtgcaatccccttatgttgctcaagtacaacttttgagggacaagcttgatgaatttccagaagcagcaggtactgaggttgcaaccattgacagttttcaaggtcgggaagctgatgcagtaattttatccatggtacgatcaaacacattgggagctgttggattccttggggatagcagaagaatcaatgttgccatcacaagagcacgcaaacatttagctttggtctgtgacagctcgactatatgccacaataccttcttagcaaggcttctgcgtcatattagacactttggtagggtgaagcatgcagaaccaggtagttttggaggatatggacttgggatgaatccaatattaccttccattaattagtgtgcaacagtagcacgaaacaagttcctatttaatccaatattacttggaggatatggacttgggatggataggttttttctttaaacttgtatagttgtatagcaattcataaattcaaaattgtgtagcgtatcaagtacgtacagaaaagttcattgaaaccccaagattggtat

SEQ ID NO: 55014 - protein, 81 aa, Glycine max
  peptide (1)..(81): Ceres Seq. ID no. 15169033
  misc_feature (1)..(56): Homolog of NCBI NO: 7446669 NR Description: probable helicase At2g03270 [imported] -
  misc_feature (1)..(61): Homolog of NCBI NO: 6678029 NR Description: immunoglobulin mu binding protein 2
  misc_feature (1)..(61): Homolog of NCBI NO: 2498040 NR Description: DNA-BINDING PROTEIN SMUBP-2 (IMMUNOGLOBULIN MU PROTEIN 2) (SMUBP-2) (INSULIN II GENE ENHANCER-BINDING PROTEIN)
  misc_feature (1)..(61): Homolog of NCBI NO: 13928794 NR Description: immunoglobulin mu binding protein 2
  misc_feature (1)..(61): Homolog of NCBI NO: 4504623 NR Description: immunoglobulin mu binding protein 2
  misc_feature (1)..(61): Homolog of NCBI NO: 1082534 NR Description: Ig mu chain switch region binding protein 2 -
  misc_feature (1)..(61): Homolog of NCBI NO: 908917 NR Description: DNA helicase [Homo sapiens]
  misc_feature (1)..(61): Homolog of NCBI NO: 183250 NR Description: glial factor-1
  misc_feature (1)..(78): Homolog of NCBI NO: 30692868 NR Description: DNA helicase-related [Arabidopsis thaliana]
  misc_feature (1)..(78): Homolog of NCBI NO: 9758800 NR Description: DNA helicase-like [Arabidopsis thaliana]
MVRSNTLGAVGFLGDSRRINVAITRARKHLALVCDSSTICHNTFLARLLRHIRHFGRVKHAEPGSFGGYGLGMNPILPSIN

SEQ ID NO: 55015 - DNA, 2314 bp, Glycine max
  misc_feature (1)..(2314): Ceres Seq. ID no. 15224874
gatggaagagctctccgcggggcctctcgtccccgccgtcgtcaaaccggaagcgtccaaaggcgccgccgtcgccgccgacacctccgccgcggcctccggcggcacgttcccggcctccacgtcggagccggacaaggacttcctctgcccgatttgcatgcagatcatcaaggacgcgttcctcaccgcgtgcggccacagcttctgctacatgtgcatcatcacgcacctccgcaacaagagcgattgcccttgctgcggccactacctcaccaacaccaacctcttccctaacttcttgctcgacaagctactgaagaagacttctgcgcgtcaaatatcaaaaaccgcttcacctgtggaacatttccggcaggcattgcaaaagggttgtgatgtgtcaattaaggagctagacacccttttgtcacttcttgccgagaagaaaagaaaaatggaacaagaagaagctgagagaaatatgcaaatattgttagacttcttgcattgcttacgcaagcaaaaagttgatgagttgaaggaggtacaaactgatctccagtttataaaagaggacattaatgctgtggagaaacatagaatggatttgtatcgtgcacgggacaggtactctgtaaaattacggatgcttgatgactctggtggaagaaaatcatggcattcatcaatggacaagaacaacagtggccttatatctcgtcctctaaatctacgaggagggttgtcatcagggagccatactaagaaaaatgatggaaagtcccaaattagctctcacgggcatggagttcagagaagggatgccatcactggatccgattcacaatatataaatcaatcgggtctttctctagttagaaagaagagggtgcatacacagttcaatgacctacaagaatgttacctacaaaagcgacgacatgcagctgataggccccatagccaacaagtaagagatataaatctcataagtcgagaaggttatactgctggtcttgaagattttcagtcagtcttgacaactttcacacgctatagccgattgagagtcattgcagaactaagacatggggatatatttcattcagcaaatatagtgtcaagcatagagtttgactgcgatgatgatttgtttgctactgctggagtttcccggcgcatcaaagtttttgacttttctgctgttgtgaatgaacctacagatgctcactgtcctgttgtggagatgtctacacgttcaaaacttagttgcttgagttggaataaatatgctaagaatcaaatagctagtagtgattatgaaggaattgtgactgtttgggatgtaaccactcgaaagagtttaatggaatatgaagagcatgaaaagcgtgcatggagtgttgatttttcaagaacagatccctctatgcttgtatctggtagcgatgactgtaaggtcaaaatttggtgtacaaatcaggaagctagtgttctaaatatagacatgaaagcaaacatatgctgtgtcaaatataatcctggatctggcaattatattgcagttggatcagcagaccatcacatccattattatgatttgagaaatatcagccgtccagtccatgttttcagtgggcacaggaaggctgtttcatatgtgaaatttctgtctaatgatgaacttgcttctgcatcaacagatagtacactgcgattatgggatgtgaaggaaaacttgccagttcgtactttcaaaggccatgcaaatgagaaaaactttgttggccttacagtaagcagtgaatacattgcgtgtggcagtgaaacaaatgaagtctttgtgtaccacaaggaaatctcgagacctttgacttgccacagatttgggtcccctgatatggatgacgctgaagatgaggctggatcgtacttcattagtgctgtatgctggaagagtgatcgccccactattctaactgcaaatagtcaaggcaccatcaaagtgctggtgcttgcagcttgaacacgagaaaaaagaatagaatgtggaattggtattatcttttcccatgctattatgattgtatcatttattaattgtacatagttttcaagtgtatatggcaggctttagggatcttaatgagatattagttgagtgcttaaacctttatcaacaaacctatttaagggactgaactttaatttttaccaattgaggacctcaaatttattaaattttgtattaataaatgctcaggagacaaaataaaatatcaaatttggcatgcaaaaaaaaaaaaaaaaa

SEQ ID NO: 55016 - protein, 675 aa, Glycine max
  peptide (1)..(675): Ceres Seq. ID no. 15224875
  misc_feature (50)..(87): Pfam Name: Zinc finger, C3HC4 type (RING finger) Pfam Description: Zinc finger, C3HC4 type (RING finger)
  misc_feature (1)..(464): Homolog of NCBI NO: 8574407 NR Description: COP1 regulatory protein [Pisum sativum]
  misc_feature (1)..(464): Homolog of NCBI NO: 7688065 NR Description: constitutively photomorphogenic 1 protein [Pisum
  misc_feature (6)..(674): Homolog of NCBI NO: 16151847 NR Description: copI [Oryza sativa]
  misc_feature (1)..(675): Homolog of NCBI NO: 15029364 NR Description: photoregulatory zinc-finger protein COP1 [Rosa
  misc_feature (2)..(675): Homolog of NCBI NO: 11127996 NR Description: COP1 [Ipomoea nil]
  misc_feature (1)..(675): Homolog of NCBI NO: 4090943 NR Description: COP1 homolog [Lycopersicon esculentum]
  misc_feature (100)..(675): Homolog of NCBI NO: 7688065 NR Description: constitutively photomorphogenic 1 protein [Pisum
  misc_feature (1)..(675): Homolog of NCBI NO: 402685 NR Description: regulatory protein
  misc_feature (100)..(675): Homolog of NCBI NO: 8574407 NR Description: COP1 regulatory protein [Pisum sativum]
  misc_feature (1)..(675): Homolog of NCBI NO: 15225760 NR Description: COP1 regulatory protein [Arabidopsis thaliana]
MEELSAGPLVPAVVKPEASKGAAVAADTSAAASGGTFPASTSEPDKDFLCPICMQIIKDAFLTACGHSFCYMCIITHLRNKSDCPCCGHYLTNTNLFPNFLLDKLLKKTSARQISKTASPVEHFRQALQKGCDVSIKELDTLLSLLAEKKRKMEQEEAERNMQILLDFLHCLRKQKVDELKEVQTDLQFIKEDINAVEKHRMDLYRARDRYSVKLRMLDDSGGRKSWHSSMDKNNSGLISRPLNLRGGLSSGSHTKKNDGKSQISSHGHGVQRRDAITGSDSQYINQSGLSLVRKKRVHTQFNDLQECYLQKRRHAADRPHSQQVRDINLISREGYTAGLEDFQSVLTTFTRYSRLRVIAELRHGDIFHSANIVSSIEFDCDDDLFATAGVSRRIKVFDFSAVVNEPTDAHCPVVEMSTRSKLSCLSWNKYAKNQIASSDYEGIVTVWDVTTRKSLMEYEEHEKRAWSVDFSRTDPSMLVSGSDDCKVKIWCTNQEASVLNIDMKANICCVKYNPGSGNYIAVGSADHHIHYYDLRNISRPVHVFSGHRKAVSYVKFLSNDELASASTDSTLRLWDVKENLPVRTFKGHANEKNFVGLTVSSEYIACGSETNEVFVYHKEISRPLTCHRFGSPDMDDAEDEAGSYFISAVCWKSDRPTILTANSQGTIKVLVLAA

SEQ ID NO: 55017 - protein, 622 aa, Glycine max
  peptide (1)..(622): Ceres Seq. ID no. 15224876
  misc_feature (1)..(34): Pfam Name: Zinc finger, C3HC4 type (RING finger) Pfam Description: Zinc finger, C3HC4 type (RING finger)
  misc_feature (1)..(411): Homolog of NCBI NO: 8574407 NR Description: COP1 regulatory protein [Pisum sativum]
  misc_feature (1)..(411): Homolog of NCBI NO: 7688065 NR Description: constitutively photomorphogenic 1 protein [Pisum
  misc_feature (1)..(621): Homolog of NCBI NO: 16151847 NR Description: copI [Oryza sativa]
  misc_feature (1)..(622): Homolog of NCBI NO: 15029364 NR Description: photoregulatory zinc-finger protein COP1 [Rosa
  misc_feature (1)..(622): Homolog of NCBI NO: 11127996 NR Description: COP1 [Ipomoea nil]
  misc_feature (1)..(622): Homolog of NCBI NO: 4090943 NR Description: COP1 homolog [Lycopersicon esculentum]
  misc_feature (47)..(622): Homolog of NCBI NO: 7688065 NR Description: constitutively photomorphogenic 1 protein [Pisum
  misc_feature (1)..(622): Homolog of NCBI NO: 402685 NR Description: regulatory protein
  misc_feature (47)..(622): Homolog of NCBI NO: 8574407 NR Description: COP1 regulatory protein [Pisum sativum]
  misc_feature (1)..(622): Homolog of NCBI NO: 15225760 NR Description: COP1 regulatory protein [Arabidopsis thaliana]
MQIIKDAFLTACGHSFCYMCIITHLRNKSDCPCCGHYLTNTNLFPNFLLDKLLKKTSARQISKTASPVEHFRQALQKGCDVSIKELDTLLSLLAEKKRKMEQEEAERNMQILLDFLHCLRKQKVDELKEVQTDLQFIKEDINAVEKHRMDLYRARDRYSVKLRMLDDSGGRKSWHSSMDKNNSGLISRPLNLRGGLSSGSHTKKNDGKSQISSHGHGVQRRDAITGSDSQYINQSGLSLVRKKRVHTQFNDLQECYLQKRRHAADRPHSQQVRDINLISREGYTAGLEDFQSVLTTFTRYSRLRVIAELRHGDIFHSANIVSSIEFDCDDDLFATAGVSRRIKVFDFSAVVNEPTDAHCPVVEMSTRSKLSCLSWNKYAKNQIASSDYEGIVTVWDVTTRKSLMEYEEHEKRAWSVDFSRTDPSMLVSGSDDCKVKIWCTNQEASVLNIDMKANICCVKYNPGSGNYIAVGSADHHIHYYDLRNISRPVHVFSGHRKAVSYVKFLSNDELASASTDSTLRLWDVKENLPVRTFKGHANEKNFVGLTVSSEYIACGSETNEVFVYHKEISRPLTCHRFGSPDMDDAEDEAGSYFISAVCWKSDRPTILTANSQGTIKVLVLAA

SEQ ID NO: 55018 - protein, 604 aa, Glycine max
  peptide (1)..(604): Ceres Seq. ID no. 15224877
  misc_feature (424)..(463): Pfam Name: WD domain, G-beta repeat Pfam Description: WD domain, G-beta repeat
  misc_feature (1)..(393): Homolog of NCBI NO: 8574407 NR Description: COP1 regulatory protein [Pisum sativum]
  misc_feature (1)..(393): Homolog of NCBI NO: 7688065 NR Description: constitutively photomorphogenic 1 protein [Pisum
  misc_feature (1)..(603): Homolog of NCBI NO: 16151847 NR Description: copI [Oryza sativa]
  misc_feature (1)..(604): Homolog of NCBI NO: 15029364 NR Description: photoregulatory zinc-finger protein COP1 [Rosa
  misc_feature (1)..(604): Homolog of NCBI NO: 11127996 NR Description: COP1 [Ipomoea nil]
  misc_feature (1)..(604): Homolog of NCBI NO: 4090943 NR Description: COP1 homolog [Lycopersicon esculentum]
  misc_feature (29)..(604): Homolog of NCBI NO: 7688065 NR Description: constitutively photomorphogenic 1 protein [Pisum
  misc_feature (1)..(604): Homolog of NCBI NO: 402685 NR Description: regulatory protein
  misc_feature (29)..(604): Homolog of NCBI NO: 8574407 NR Description: COP1 regulatory protein [Pisum sativum]
  misc_feature (1)..(604): Homolog of NCBI NO: 15225760 NR Description: COP1 regulatory protein [Arabidopsis thaliana]
MCIITHLRNKSDCPCCGHYLTNTNLFPNFLLDKLLKKTSARQISKTASPVEHFRQALQKGCDVSIKELDTLLSLLAEKKRKMEQEEAERNMQILLDFLHCLRKQKVDELKEVQTDLQFIKEDINAVEKHRMDLYRARDRYSVKLRMLDDSGGRKSWHSSMDKNNSGLISRPLNLRGGLSSGSHTKKNDGKSQISSHGHGVQRRDAITGSDSQYINQSGLSLVRKKRVHTQFNDLQECYLQKRRHAADRPHSQQVRDINLISREGYTAGLEDFQSVLTTFTRYSRLRVIAELRHGDIFHSANIVSSIEFDCDDDLFATAGVSRRIKVFDFSAVVNEPTDAHCPVVEMSTRSKLSCLSWNKYAKNQIASSDYEGIVTVWDVTTRKSLMEYEEHEKRAWSVDFSRTDPSMLVSGSDDCKVKIWCTNQEASVLNIDMKANICCVKYNPGSGNYIAVGSADHHIHYYDLRNISRPVHVFSGHRKAVSYVKFLSNDELASASTDSTLRLWDVKENLPVRTFKGHANEKNFVGLTVSSEYIACGSETNEVFVYHKEISRPLTCHRFGSPDMDDAEDEAGSYFISAVCWKSDRPTILTANSQGTIKVLVLAA

SEQ ID NO: 55019 - DNA, 1366 bp, Glycine max
  misc_feature (1)..(1366): Ceres Seq. ID no. 12581680
cagctacgtaggcccccccccccccaccgcgtataccacaccgaacaacacaacagagagacagagcattaaggatgttggagctgtgccgcaagccactgaagatgtgcttcggtggtggaggcaacgacgacggcctcctctggcacacagaccttaagccccacgcttcagggaactactcaattgcagtggtgcaagctaattcatccttggaagaccaagcacaagtatttacctctccctccgcaacctttgttggtgtatacgacggtcacggtggtcctgaagcttcccgtttcatcaccaaccacctcttctccttccttcgcaaattcacaacagaggagggtggtttgtcggaggaagttataaagaaggcgttcgaggcaacggaagatgagtttttgcgtgtagtgagggaatcatggattgcgcggccacagatagcttccgtgggttcgtgttgtcttctgggagcgatttcaaagggagttctttatgttgctaatctcggggattcgagggcggttttgggtcggaaagcgttggaaggagaggtgaattgtggtgctggtgctgtggtggcagagcgtttgtccactgatcataatgttggagtggagaatgttagaaaggaggttgaagctcttcaccctgatgatccacacattgtggtttgcactcgtggagtttggcgaatcaagggcattattcaggtctcaagatcaataggagatgtttacctaaagaaaccagaatttgacactaatcctctgttccaacaatttgtatgtccactatacttgaggagacctgtaatgacagctgaaccatcgatattggcgcgtaaattgaaggcagatgatctgtttttgatctttgcatcagacgggctttgggagcatttaactgatgaagcggctgttgaaatcatctccagaagtcccagaataggaattgcaaaacgattggcgagagctgcactagaagaggttgcaaagaaaagagaaatgaggtatggggatctaaggaaaacagataaaggtctaaggcgccattttcatgatgatattacagtgatcgttctatatctcgatcattcaaaagaatctcaaaatggtagatcaagacgtaaaggagtttatgattgcattaatactcctattgatatcttctctgtgagctcagatgaagctgatctttaaattgaattagctattagcagtgactctccacgtactgctttttacacaagaaatttgtcacatacaaaagtagtagttacggtggccaaatgaaaaggattgtaaaagaagtaatactcattatcttaatcatcatatttttttctatttctctaact

SEQ ID NO: 55020 - protein, 377 aa, Glycine max
  peptide (1)..(377): Ceres Seq. ID no. 12581681
  misc_feature (36)..(313): Pfam Name: Protein phosphatase 2C Pfam Description: Protein phosphatase 2C
  misc_feature (1)..(354): Homolog of NCBI NO: 9294356 NR Description: protein phosphatase 2C [Arabidopsis thaliana]
  misc_feature (17)..(347): Homolog of NCBI NO: 11282001 NR Description: protein phosphatase 2C-like protein - Arabidopsis
  misc_feature (1)..(357): Homolog of NCBI NO: 18855039 NR Description: putative protein phosphatase [Oryza sativa]
  misc_feature (17)..(342): Homolog of NCBI NO: 15239244 NR Description: protein phosphatase 2C-like protein
  misc_feature (1)..(343): Homolog of NCBI NO: 38346816 NR Description: OSJNBa0088A01.23 [Oryza sativa (japonica
  misc_feature (16)..(375): Homolog of NCBI NO: 34915296 NR Description: protein phosphatase 2C-like
  misc_feature (16)..(375): Homolog of NCBI NO: 33147010 NR Description: protein phosphatase 2C-like
  misc_feature (15)..(375): Homolog of NCBI NO: 14488375 NR Description: putative protein phosphatase
  misc_feature (14)..(376): Homolog of NCBI NO: 26006493 NR Description: Putative protein phosphatase
  misc_feature (1)..(376): Homolog of NCBI NO: 15235152 NR Description: putative protein
MLELCRKPLKMCFGGGGNDDGLLWHTDLKPHASGNYSIAVVQANSSLEDQAQVFTSPSATFVGVYDGHGGPEASRFITNHLFSFLRKFTTEEGGLSEEVIKKAFEATEDEFLRVVRESWIARPQIASVGSCCLLGAISKGVLYVANLGDSRAVLGRKALEGEVNCGAGAVVAERLSTDHNVGVENVRKEVEALHPDDPHIVVCTRGVWRIKGIIQVSRSIGDVYLKKPEFDTNPLFQQFVCPLYLRRPVMTAEPSILARKLKADDLFLIFASDGLWEHLTDEAAVEIISRSPRIGIAKRLARAALEEVAKKREMRYGDLRKTDKGLRRHFHDDITVIVLYLDHSKESQNGRSRRKGVYDCINTPIDIFSVSSDEADL

SEQ ID NO: 55021 - protein, 367 aa, Glycine max
  peptide (1)..(367): Ceres Seq. ID no. 12581682
  misc_feature (26)..(303): Pfam Name: Protein phosphatase 2C Pfam Description: Protein phosphatase 2C
  misc_feature (1)..(344): Homolog of NCBI NO: 9294356 NR Description: protein phosphatase 2C [Arabidopsis thaliana]
  misc_feature (7)..(337): Homolog of NCBI NO: 11282001 NR Description: protein phosphatase 2C-like protein - Arabidopsis
  misc_feature (1)..(347): Homolog of NCBI NO: 18855039 NR Description: putative protein phosphatase [Oryza sativa]
  misc_feature (7)..(332): Homolog of NCBI NO: 15239244 NR Description: protein phosphatase 2C-like protein
  misc_feature (1)..(333): Homolog of NCBI NO: 38346816 NR Description: OSJNBa0088A01.23 [Oryza sativa (japonica
  misc_feature (6)..(365): Homolog of NCBI NO: 34915296 NR Description: protein phosphatase 2C-like
  misc_feature (6)..(365): Homolog of NCBI NO: 33147010 NR Description: protein phosphatase 2C-like
  misc_feature (5)..(365): Homolog of NCBI NO: 14488375 NR Description: putative protein phosphatase
  misc_feature (4)..(366): Homolog of NCBI NO: 26006493 NR Description: Putative protein phosphatase
  misc_feature (1)..(366): Homolog of NCBI NO: 15235152 NR Description: putative protein
MCFGGGGNDDGLLWHTDLKPHASGNYSIAVVQANSSLEDQAQVFTSPSATFVGVYDGHGGPEASRFITNHLFSFLRKFTTEEGGLSEEVIKKAFEATEDEFLRVVRESWIARPQIASVGSCCLLGAISKGVLYVANLGDSRAVLGRKALEGEVNCGAGAVVAERLSTDHNVGVENVRKEVEALHPDDPHIVVCTRGVWRIKGIIQVSRSIGDVYLKKPEFDTNPLFQQFVCPLYLRRPVMTAEPSILARKLKADDLFLIFASDGLWEHLTDEAAVEIISRSPRIGIAKRLARAALEEVAKKREMRYGDLRKTDKGLRRHFHDDITVIVLYLDHSKESQNGRSRRKGVYDCINTPIDIFSVSSDEADL

SEQ ID NO: 55022 - DNA, 1449 bp, Glycine max
  misc_feature (1)..(1449): Ceres Seq. ID no. 15169248
ggggaggaagcacagaccacaggggcatatctcaaatttttttacaaagtggataatataatataaattgaataactgagggtttggtacttaagtttaatttagttaaagttgtttgtgtctggaattggtgtttgaaaatggctctctttgctgcattttccatttgtaaagttgccaaggatgcagctggagttgcaggaaatgtctttgcttttgggttgtttgtgtctcccatacccacatttaggaggattatcagaaatgggtcaacagagatgttctcagggttgccatatatttattcccttctaaactgcttgatctgcatgtggtatggcacacctctgatatctgctgataatttgttggttacaactgttaattcaattggagctgtctttcaatttgtgtacataatcatcttcctgatgtatgctgagaaagcaaaaaaggtgagaatgattggattatcgctggcagttcttggcatatttgcaatcatattagttggaagcttgcaaatagatgacattataatgcggcggttctttgtgggattcttgagctgtgcctctctcatttcaatgtttgcctctccattgtttataattaaattggtcattcagacaaagagtgttgaattcatgccgttttatctctcactttccaccttcctaatgagcacctctttcttactttatggattattcaacgatgatgcctttatttatgtgccaaatgggataggaaccatattgggattgatacagttgatattatacttctatttcgagggtaaatctagagtgaactccagagaacctttgatagtgtcatatgcatgatcagttctgctgaaaagactggagtgacaacttcttgttcctgcacaaaacagaatcagagttagaaatgaccttttgctgctagatgtggtctgaaactggagttggcaacatccctgtctgtttgattcaatttataggagagcaattaccgttgcatctttgagagagaccagaagttgtgataatgaataacttgaaattgtctatatcatagttaccatatatctggtacaagtactggtacgtggtacttgtagttgtaggtacagatggccagtttttacattattattactagactttctttaaagagaacacggtatgcagtttgtggtacgttgaatacagcacacaatatgcaggattaactatggtctgtatatttatgcaagccttgagaaggtgaaccatgctccgaaatgggactatttcaagaaaggcacatcgcacctctcctgcagtcgttggtggtgctctaggctggcttctcttgcagtgaggccatttccaagttcatcagatgtttacagacaaatatgtacacattatttgagtggcatatattatttattatagtctgatgttgatcaccaaaaag

SEQ ID NO: 55023 - protein, 235 aa, Glycine max
  peptide (1)..(235): Ceres Seq. ID no. 15169249
  misc_feature (137)..(222): Pfam Name: MtN3/saliva family Pfam Description: MtN3/saliva family
  misc_feature (18)..(219): Homolog of NCBI NO: 15237803 NR Description: nodulin MtN3 family protein [Arabidopsis
  misc_feature (18)..(219): Homolog of NCBI NO: 15234863 NR Description: nodulin MtN3 family protein [Arabidopsis
  misc_feature (18)..(219): Homolog of NCBI NO: 21593109 NR Description: MtN3-like protein [Arabidopsis thaliana]
  misc_feature (18)..(219): Homolog of NCBI NO: 15241278 NR Description: nodulin MtN3 family protein [Arabidopsis
  misc_feature (18)..(221): Homolog of NCBI NO: 15238678 NR Description: nodulin MtN3 family protein [Arabidopsis
  misc_feature (18)..(221): Homolog of NCBI NO: 34146818 NR Description: At5g53190 [Arabidopsis thaliana]
  misc_feature (8)..(190): Homolog of NCBI NO: 34911484 NR Description: putative MtN3 [Oryza sativa (japonica
  misc_feature (12)..(215): Homolog of NCBI NO: 34907420 NR Description: P0018C10.36 [Oryza sativa (japonica
  misc_feature (12)..(228): Homolog of NCBI NO: 18394992 NR Description: nodulin MtN3 family protein [Arabidopsis
  misc_feature (1)..(234): Homolog of NCBI NO: 18400517 NR Description: nodulin MtN3 family protein [Arabidopsis
MALFAAFSICKVAKDAAGVAGNVFAFGLFVSPIPTFRRIIRNGSTEMFSGLPYIYSLLNCLICMWYGTPLISADNLLVTTVNSIGAVFQFVYIIIFLMYAEKAKKVRMIGLSLAVLGIFAIILVGSLQIDDIIMRRFFVGFLSCASLISMFASPLFIIKLVIQTKSVEFMPFYLSLSTFLMSTSFLLYGLFNDDAFIYVPNGIGTILGLIQLILYFYFEGKSRVNSREPLIVSYA

SEQ ID NO: 55024 - protein, 189 aa, Glycine max
  peptide (1)..(189): Ceres Seq. ID no. 15169250
  misc_feature (91)..(176): Pfam Name: MtN3/saliva family Pfam Description: MtN3/saliva family
  misc_feature (1)..(173): Homolog of NCBI NO: 15237803 NR Description: nodulin MtN3 family protein [Arabidopsis
  misc_feature (1)..(173): Homolog of NCBI NO: 15234863 NR Description: nodulin MtN3 family protein [Arabidopsis
  misc_feature (1)..(173): Homolog of NCBI NO: 21593109 NR Description: MtN3-like protein [Arabidopsis thaliana]
  misc_feature (1)..(173): Homolog of NCBI NO: 15241278 NR Description: nodulin MtN3 family protein [Arabidopsis
  misc_feature (1)..(175): Homolog of NCBI NO: 15238678 NR Description: nodulin MtN3 family protein [Arabidopsis
  misc_feature (1)..(175): Homolog of NCBI NO: 34146818 NR Description: At5g53190 [Arabidopsis thaliana]
  misc_feature (1)..(144): Homolog of NCBI NO: 34911484 NR Description: putative MtN3 [Oryza sativa (japonica
  misc_feature (1)..(169): Homolog of NCBI NO: 34907420 NR Description: P0018C10.36 [Oryza sativa (japonica
  misc_feature (1)..(182): Homolog of NCBI NO: 18394992 NR Description: nodulin MtN3 family protein [Arabidopsis
  misc_feature (1)..(188): Homolog of NCBI NO: 18400517 NR Description: nodulin MtN3 family protein [Arabidopsis
MFSGLPYIYSLLNCLICMWYGTPLISADNLLVTTVNSIGAVFQFVYIIIFLMYAEKAKKVRMIGLSLAVLGIFAIILVGSLQIDDIIMRRFFVGFLSCASLISMFASPLFIIKLVIQTKSVEFMPFYLSLSTFLMSTSFLLYGLFNDDAFIYVPNGIGTILGLIQLILYFYFEGKSRVNSREPLIVSYA

SEQ ID NO: 55025 - protein, 172 aa, Glycine max
  peptide (1)..(172): Ceres Seq. ID no. 15169251
  misc_feature (74)..(159): Pfam Name: MtN3/saliva family Pfam Description: MtN3/saliva family
  misc_feature (1)..(156): Homolog of NCBI NO: 15237803 NR Description: nodulin MtN3 family protein [Arabidopsis
  misc_feature (1)..(156): Homolog of NCBI NO: 15234863 NR Description: nodulin MtN3 family protein [Arabidopsis
  misc_feature (1)..(156): Homolog of NCBI NO: 21593109 NR Description: MtN3-like protein [Arabidopsis thaliana]
  misc_feature (1)..(156): Homolog of NCBI NO: 15241278 NR Description: nodulin MtN3 family protein [Arabidopsis
  misc_feature (1)..(158): Homolog of NCBI NO: 15238678 NR Description: nodulin MtN3 family protein [Arabidopsis
  misc_feature (1)..(158): Homolog of NCBI NO: 34146818 NR Description: At5g53190 [Arabidopsis thaliana]
  misc_feature (1)..(127): Homolog of NCBI NO: 34911484 NR Description: putative MtN3 [Oryza sativa (japonica
  misc_feature (1)..(152): Homolog of NCBI NO: 34907420 NR Description: P0018C10.36 [Oryza sativa (japonica
  misc_feature (1)..(165): Homolog of NCBI NO: 18394992 NR Description: nodulin MtN3 family protein [Arabidopsis
  misc_feature (1)..(171): Homolog of NCBI NO: 18400517 NR Description: nodulin MtN3 family protein [Arabidopsis
MWYGTPLISADNLLVTTVNSIGAVFQFVYIIIFLMYAEKAKKVRMIGLSLAVLGIFAIILVGSLQIDDIIMRRFFVGFLSCASLISMFASPLFIIKLVIQTKSVEFMPFYLSLSTFLMSTSFLLYGLFNDDAFIYVPNGIGTILGLIQLILYFYFEGKSRVNSREPLIVSYA

SEQ ID NO: 55026 - DNA, 1799 bp, Glycine max
  misc_feature (1)..(1799): Ceres Seq. ID no. 15169264
atcatttttcaattcttatcatcaaaactggtcccaaggagccagaaacaccaaagccaaaaacacttcctttgttacacaagatgaaaacagtttctcttgtccacaaaacagaagaactggctaataaaacagtggtttttgattttgagggtaccttgttaagatcagcttcactgtttccttacttcatgctggttgcttttgaagctggtgggttgctaaggtctctcgtgttgtttgtctcataccctttggtgtggctggttggtgaagatcaacttggcttgaagatcatggttttcttgaccctttttggcataaaaaaggacacgttcagaatagggtcagctgttctgccaaagttcttcttagaaaacatggggtgggaaggctttggagctattatgcgttgtaacaaaaaggtggcatcaagtaagttgccaagggccatggttgaaggtttcttgaaggactacttgggggttgagggtgttatagcaagagacatcaagtccttcaaagggtattttttgggattgtttgaggaaaagaaggaaaacaacacccctacccatatatatgatgaggctacagcaggcaacgacaacactattagtatcactggtagccatattgagtatattgaccaagagcttttcccttatttcaagaaggtttgcttaatgttaagctcagaggagaggagaaattggcatgtccttccaaaagagaggtatccaaagccattgatcttccatgatggaaggttggcattcaggccaacccctgcatcttctctagctttcttcatgtggttaccccttggactattcctttccatctgcagattcacctttggcactgcattgcccttcaatttatctgctccagtattggccttctcaggaacaagaaccactctttcaagaccccaaaaccctttgtcattggtccaaaatgaggaaaaccaaaagggcatgctctatgtgtgcaaccacagaaccttgcttgaccctctttacattgcatatgttttggacaaacctctctctgcagttacatacagcttgagcagattcaatgagctagtagcccccatcagaaccataagactaacaagggacagagaaagagacagagaaacaatggacaaattgctgagcctaggaaaccttgtggtgtgtcctgagggaacaacttgcagggaaccttatttgctaaggttcagtcctttgtttgctgaactcactgatgacattgttcctgtggcggttgatgttaaggttagcatgttctatggaacaacagctagtggacacaaatgtttggacccgtttttccacttcatgaacccgaatcccacgtacttcattaaaatcctcgacagggtaccgctgtcagaaacatgtcttggaggtggaagatcaagaattgaagttgccaattttgtgcaacgtgagattgggaatgctttaggatttgcatgcaccagcttgaccagaaaagacaagtacatgatcttggcaggtaacgagggtgtcaatgaagggccttgtcataactgcaagtagctactggctttgtgtcaaactttagagagaagaaattattacataatccgagaagtatgatggtgtctaccaattttcatgtaacatgttacggagttttcccgaatctttttcatgaaatgaaattctcaattgcatatcatataaattaagattggttgtatggtggtcgcgcatcatgtaatacttttttcttaagcaacaaatagttatgaatgttacacg

SEQ ID NO: 55027 - protein, 523 aa, Glycine max
  peptide (1)..(523): Ceres Seq. ID no. 15169265
  misc_feature (51)..(514): Homolog of NCBI NO: 31249749 NR Description: hypothetical protein [Oryza sativa (japonica
  misc_feature (44)..(515): Homolog of NCBI NO: 18481713 NR Description: hypothetical protein [Sorghum bicolor]
  misc_feature (38)..(513): Homolog of NCBI NO: 15224445 NR Description: phospholipid/glycerol acyltransferase family
  misc_feature (37)..(513): Homolog of NCBI NO: 38000002 NR Description: unknown protein [Oryza sativa (japonica
  misc_feature (44)..(513): Homolog of NCBI NO: 34894812 NR Description: P0554D10.9 [Oryza sativa (japonica
  misc_feature (38)..(514): Homolog of NCBI NO: 34905450 NR Description: P0487H02.19 [Oryza sativa (japonica
  misc_feature (11)..(514): Homolog of NCBI NO: 21618047 NR Description: unknown [Arabidopsis thaliana]
  misc_feature (11)..(514): Homolog of NCBI NO: 18390661 NR Description: phospholipid/glycerol acyltransferase family
  misc_feature (39)..(514): Homolog of NCBI NO: 15235185 NR Description: phospholipid/glycerol acyltransferase family
  misc_feature (34)..(514): Homolog of NCBI NO: 18378959 NR Description: phospholipid/glycerol acyltransferase family
HFSILIIKTGPKEPETPKPKTLPLLHKMKTVSLVHKTEELANKTVVFDFEGTLLRSASLFPYFMLVAFEAGGLLRSLVLFVSYPLVWLVGEDQLGLKIMVFLTLFGIKKDTFRIGSAVLPKFFLENMGWEGFGAIMRCNKKVASSKLPRAMVEGFLKDYLGVEGVIARDIKSFKGYFLGLFEEKKENNTPTHIYDEATAGNDNTISITGSHIEYIDQELFPYFKKVCLMLSSEERRNWHVLPKERYPKPLIFHDGRLAFRPTPASSLAFFMWLPLGLFLSICRFTFGTALPFNLSAPVLAFSGTRTTLSRPQNPLSLVQNEENQKGMLYVCNHRTLLDPLYIAYVLDKPLSAVTYSLSRFNELVAPIRTIRLTRDRERDRETMDKLLSLGNLVVCPEGTTCREPYLLRFSPLFAELTDDIVPVAVDVKVSMFYGTTASGHKCLDPFFHFMNPNPTYFIKILDRVPLSETCLGGGRSRIEVANFVQREIGNALGFACTSLTRKDKYMILAGNEGVNEGPCHNCK

SEQ ID NO: 55028 - protein, 496 aa, Glycine max
  peptide (1)..(496): Ceres Seq. ID no. 15169266
  misc_feature (24)..(487): Homolog of NCBI NO: 31249749 NR Description: hypothetical protein [Oryza sativa (japonica
  misc_feature (17)..(488): Homolog of NCBI NO: 18481713 NR Description: hypothetical protein [Sorghum bicolor]
  misc_feature (11)..(486): Homolog of NCBI NO: 15224445 NR Description: phospholipid/glycerol acyltransferase family
  misc_feature (10)..(486): Homolog of NCBI NO: 38000002 NR Description: unknown protein [Oryza sativa (japonica
  misc_feature (17)..(486): Homolog of NCBI NO: 34894812 NR Description: P0554D10.9 [Oryza sativa (japonica
  misc_feature (11)..(487): Homolog of NCBI NO: 34905450 NR Description: P0487H02.19 [Oryza sativa (japonica
  misc_feature (1)..(487): Homolog of NCBI NO: 21618047 NR Description: unknown [Arabidopsis thaliana]
  misc_feature (1)..(487): Homolog of NCBI NO: 18390661 NR Description: phospholipid/glycerol acyltransferase family
  misc_feature (12)..(487): Homolog of NCBI NO: 15235185 NR Description: phospholipid/glycerol acyltransferase family
  misc_feature (7)..(487): Homolog of NCBI NO: 18378959 NR Description: phospholipid/glycerol acyltransferase family
MKTVSLVHKTEELANKTVVFDFEGTLLRSASLFPYFMLVAFEAGGLLRSLVLFVSYPLVWLVGEDQLGLKIMVFLTLFGIKKDTFRIGSAVLPKFFLENMGWEGFGAIMRCNKKVASSKLPRAMVEGFLKDYLGVEGVIARDIKSFKGYFLGLFEEKKENNTPTHIYDEATAGNDNTISITGSHIEYIDQELFPYFKKVCLMLSSEERRNWHVLPKERYPKPLIFHDGRLAFRPTPASSLAFFMWLPLGLFLSICRFTFGTALPFNLSAPVLAFSGTRTTLSRPQNPLSLVQNEENQKGMLYVCNHRTLLDPLYIAYVLDKPLSAVTYSLSRFNELVAPIRTIRLTRDRERDRETMDKLLSLGNLVVCPEGTTCREPYLLRFSPLFAELTDDIVPVAVDVKVSMFYGTTASGHKCLDPFFHFMNPNPTYFIKILDRVPLSETCLGGGRSRIEVANFVQREIGNALGFACTSLTRKDKYMILAGNEGVNEGPCHNCK

SEQ ID NO: 55029 - protein, 460 aa, Glycine max
  peptide (1)..(460): Ceres Seq. ID no. 15169267
  misc_feature (1)..(451): Homolog of NCBI NO: 31249749 NR Description: hypothetical protein [Oryza sativa (japonica
  misc_feature (1)..(452): Homolog of NCBI NO: 18481713 NR Description: hypothetical protein [Sorghum bicolor]
  misc_feature (1)..(450): Homolog of NCBI NO: 15224445 NR Description: phospholipid/glycerol acyltransferase family
  misc_feature (1)..(450): Homolog of NCBI NO: 38000002 NR Description: unknown protein [Oryza sativa (japonica
  misc_feature (1)..(450): Homolog of NCBI NO: 34894812 NR Description: P0554D10.9 [Oryza sativa (japonica
  misc_feature (1)..(451): Homolog of NCBI NO: 34905450 NR Description: P0487H02.19 [Oryza sativa (japonica
  misc_feature (1)..(451): Homolog of NCBI NO: 21618047 NR Description: unknown [Arabidopsis thaliana]
  misc_feature (1)..(451): Homolog of NCBI NO: 18390661 NR Description: phospholipid/glycerol acyltransferase family
  misc_feature (1)..(451): Homolog of NCBI NO: 15235185 NR Description: phospholipid/glycerol acyltransferase family
  misc_feature (1)..(451): Homolog of NCBI NO: 18378959 NR Description: phospholipid/glycerol acyltransferase family
MLVAFEAGGLLRSLVLFVSYPLVWLVGEDQLGLKIMVFLTLFGIKKDTFRIGSAVLPKFFLENMGWEGFGAIMRCNKKVASSKLPRAMVEGFLKDYLGVEGVIARDIKSFKGYFLGLFEEKKENNTPTHIYDEATAGNDNTISITGSHIEYIDQELFPYFKKVCLMLSSEERRNWHVLPKERYPKPLIFHDGRLAFRPTPASSLAFFMWLPLGLFLSICRFTFGTALPFNLSAPVLAFSGTRTTLSRPQNPLSLVQNEENQKGMLYVCNHRTLLDPLYIAYVLDKPLSAVTYSLSRFNELVAPIRTIRLTRDRERDRETMDKLLSLGNLVVCPEGTTCREPYLLRFSPLFAELTDDIVPVAVDVKVSMFYGTTASGHKCLDPFFHFMNPNPTYFIKILDRVPLSETCLGGGRSRIEVANFVQREIGNALGFACTSLTRKDKYMILAGNEGVNEGPCHNCK

SEQ ID NO: 55030 - DNA, 1330 bp, Glycine max
  misc_feature (1)..(1330): Ceres Seq. ID no. 15177137
acggactgatgctgttctgttggtgacgattgtatccacattgagacgaaatctgacgatgaaacgtggagcattattgtcagtgcttgcgttcgccttcgcggcggcgatctgggcggcgaacggcaacgacaacctcgtcccgcctaggcgggaagtgtacggcaatggccgaatattcgacatcagtcaccggtaccaacccgagatgccggaatgggaatcgaataacggcattgggcagttcctgtggcttcccaagagcatgaagaacggttccctcgccaacaactccgaaatgaaactcccaacacacaccggcacgcatgtcgacgcccccggccacgtgttcgaccactacttcgatgccggcttcgatgtcgacaccctcgacttggacatcctcaacggacctgctctattagttgatgttccaagagatagtaatataactgctcaagttatgaagtcgttgaatattccaaggggtgttgtacgtgttctcttccgaacgttaaataccgacaggcggcttatgtttcagaaggaatgggacacaagctatgtaggattcacagttgatggagctaagtggctagtggataacacggatatcaaacttgttggaattgattacctatctgttgcttcttatgattacttgattccatctcaccttgtttttctaaaagacagggagatcattctcgtggaaggcttgaagcttgatgatgttccagcaggattatattcagtccattgcttacctcttaggttggctggtgctgagggatcaccaatacggtgcattctgattaaaaattagggaaacagtgctgtttcaaagtagtttttgcatttgcagagcaagagggatgcatcaatctttgcaatacttgaatttggttctcttttgtctgctaggctggaactgataaattggcatagtggtgtggtgtccttatggagcaagatagtttcaatgttgtgcatcaacttttgtggcttacgtttacacttgttaaaaacatgcataagcacttcaagaaatcattttgaaatggaaaataatgtatatatagataatttgcacgtagcattagcacttcgagaaagatgcaatggaataagttggcacaatggtgtgtctttgtggagcaagattagtaatgtttgttaactttagtggctcatgtgtacacttattcttgtttcctagtacagaattgcaactttcgttttgggcttgtttcaatagttagtccatcatagagcaccatgtacttgaaagttgatggattgaagatcaaggtgggattgttattactag

SEQ ID NO: 55031 - protein, 274 aa, Glycine max
  peptide (1)..(274): Ceres Seq. ID no. 15177138
  misc_feature (59)..(259): Pfam Name: Putative cyclase Pfam Description: Putative cyclase
  misc_feature (59)..(271): Homolog of NCBI NO: 23056289 NR Description: hypothetical protein [Geobacter metallireducens]
  misc_feature (58)..(271): Homolog of NCBI NO: 39998438 NR Description: cyclase, putative [Geobacter sulfurreducens PCA]
  misc_feature (58)..(274): Homolog of NCBI NO: 23016903 NR Description: hypothetical protein [Magnetospirillum
  misc_feature (59)..(271): Homolog of NCBI NO: 16330650 NR Description: hypothetical protein [Synechocystis sp. PCC 6803]
  misc_feature (44)..(151): Homolog of NCBI NO: 7486023 NR Description: hypothetical protein F23E12.220 - Arabidopsis
  misc_feature (20)..(236): Homolog of NCBI NO: 7486287 NR Description: hypothetical protein F28A23.60 - Arabidopsis
  misc_feature (5)..(273): Homolog of NCBI NO: 15219416 NR Description: hypothetical protein [Arabidopsis thaliana]
  misc_feature (20)..(273): Homolog of NCBI NO: 18418393 NR Description: expressed protein [Arabidopsis thaliana]
  misc_feature (47)..(273): Homolog of NCBI NO: 35215089 NR Description: hypothetical protein [Oryza sativa (japonica
  misc_feature (44)..(272): Homolog of NCBI NO: 18418598 NR Description: expressed protein [Arabidopsis thaliana]
RTDAVLLVTIVSTLRRNLTMKRGALLSVLAFAFAAAIWAANGNDNLVPPRREVYGNGRIFDISHRYQPEMPEWESNNGIGQFLWLPKSMKNGSLANNSEMKLPTHTGTHVDAPGHVFDHYFDAGFDVDTLDLDILNGPALLVDVPRDSNITAQVMKSLNIPRGVVRVLFRTLNTDRRLMFQKEWDTSYVGFTVDGAKWLVDNTDIKLVGIDYLSVASYDYLIPSHLVFLKDREIILVEGLKLDDVPAGLYSVHCLPLRLAGAEGSPIRCILIKN

SEQ ID NO: 55032 - protein, 255 aa, Glycine max
  peptide (1)..(255): Ceres Seq. ID no. 15177139
  misc_feature (40)..(240): Pfam Name: Putative cyclase Pfam Description: Putative cyclase
  misc_feature (40)..(252): Homolog of NCBI NO: 23056289 NR Description: hypothetical protein [Geobacter metallireducens]
  misc_feature (39)..(252): Homolog of NCBI NO: 39998438 NR Description: cyclase, putative [Geobacter sulfurreducens PCA]
  misc_feature (39)..(255): Homolog of NCBI NO: 23016903 NR Description: hypothetical protein [Magnetospirillum
  misc_feature (40)..(252): Homolog of NCBI NO: 16330650 NR Description: hypothetical protein [Synechocystis sp. PCC 6803]
  misc_feature (25)..(132): Homolog of NCBI NO: 7486023 NR Description: hypothetical protein F23E12.220 - Arabidopsis
  misc_feature (1)..(217): Homolog of NCBI NO: 7486287 NR Description: hypothetical protein F28A23.60 - Arabidopsis
  misc_feature (1)..(254): Homolog of NCBI NO: 15219416 NR Description: hypothetical protein [Arabidopsis thaliana]
  misc_feature (1)..(254): Homolog of NCBI NO: 18418393 NR Description: expressed protein [Arabidopsis thaliana]
  misc_feature (28)..(254): Homolog of NCBI NO: 35215089 NR Description: hypothetical protein [Oryza sativa (japonica
  misc_feature (25)..(253): Homolog of NCBI NO: 18418598 NR Description: expressed protein [Arabidopsis thaliana]
MKRGALLSVLAFAFAAAIWAANGNDNLVPPRREVYGNGRIFDISHRYQPEMPEWESNNGIGQFLWLPKSMKNGSLANNSEMKLPTHTGTHVDAPGHVFDHYFDAGFDVDTLDLDILNGPALLVDVPRDSNITAQVMKSLNIPRGVVRVLFRTLNTDRRLMFQKEWDTSYVGFTVDGAKWLVDNTDIKLVGIDYLSVASYDYLIPSHLVFLKDREIILVEGLKLDDVPAGLYSVHCLPLRLAGAEGSPIRCILIKN

SEQ ID NO: 55033 - protein, 205 aa, Glycine max
  peptide (1)..(205): Ceres Seq. ID no. 15177140
  misc_feature (1)..(190): Pfam Name: Putative cyclase Pfam Description: Putative cyclase
  misc_feature (1)..(202): Homolog of NCBI NO: 23056289 NR Description: hypothetical protein [Geobacter metallireducens]
  misc_feature (1)..(202): Homolog of NCBI NO: 39998438 NR Description: cyclase, putative [Geobacter sulfurreducens PCA]
  misc_feature (1)..(205): Homolog of NCBI NO: 23016903 NR Description: hypothetical protein [Magnetospirillum
  misc_feature (1)..(202): Homolog of NCBI NO: 16330650 NR Description: hypothetical protein [Synechocystis sp. PCC 6803]
  misc_feature (1)..(82): Homolog of NCBI NO: 7486023 NR Description: hypothetical protein F23E12.220 - Arabidopsis
  misc_feature (1)..(167): Homolog of NCBI NO: 7486287 NR Description: hypothetical protein F28A23.60 - Arabidopsis
  misc_feature (1)..(204): Homolog of NCBI NO: 15219416 NR Description: hypothetical protein [Arabidopsis thaliana]
  misc_feature (1)..(204): Homolog of NCBI NO: 18418393 NR Description: expressed protein [Arabidopsis thaliana]
  misc_feature (1)..(204): Homolog of NCBI NO: 35215089 NR Description: hypothetical protein [Oryza sativa (japonica
  misc_feature (1)..(203): Homolog of NCBI NO: 18418598 NR Description: expressed protein [Arabidopsis thaliana]
MPEWESNNGIGQFLWLPKSMKNGSLANNSEMKLPTHTGTHVDAPGHVFDHYFDAGFDVDTLDLDILNGPALLVDVPRDSNITAQVMKSLNIPRGVVRVLFRTLNTDRRLMFQKEWDTSYVGFTVDGAKWLVDNTDIKLVGIDYLSVASYDYLIPSHLVFLKDREIILVEGLKLDDVPAGLYSVHCLPLRLAGAEGSPIRCILIKN

SEQ ID NO: 55034 - DNA, 1371 bp, Glycine max
  misc_feature (1)..(1371): Ceres Seq. ID no. 15170956
gaagaagaagaagaatggaagagaagcagagagtgataatagtgggagcagggccttcggggatatcggcggcagcatgcttcacgaaacagtcgattccgtacataatcctggagagggaagactgttccgcttccctgtggaagaaatattcatacgagcgcctccacctccacctcaggaaacagtactgccagcttccccacaaacccttcccagcatcttttcctccctacgttcccaagaagcagttcttgcagtacctggacgactacgtctcccacttcggaatcacgccgctgtaccgaagaaccgtggagctggccgagtacgaccagggctgccacaactggagggtcatggccctcaacggggactccggtcagctcgaggagtaccgtgggaggtttctggtggtggccactggtgaaaccactgacccttttgtgccggagcttcaaggcctcagtggctttcctgggaagctcattcattccactgggtttcgttctgggaaggatttcaaagatcagcatgttcttgttgttggatcggggaattctggcatggaaatcgcattggaccttgtcaaccatggtgccaaaacttccattctcgttaggagcccggttcattttctatcaagggagatggtgagtttggggttgtttctgttgaaatatttgtcgttgagcaccgtggactcgctgatggtgatgcttagtacaatgatttacggggatgtgaccaaatatggggttgcaaggcccaatgagggtcccttttatatgaaggtcaagtatggaaagtacccagttattgacgttggaacctataaaaaaatcaagtctggagaattgaaggttttgccatcagaaatagaaagcctaagaggcaaggatgtcctattcaagaatggtgagtcgcacccatttgactccattgttttctgcaccggcttcaagagatcaaccaacaagtggcttaagggggatgattaccttctgaatgatgagggtcttccgaagccgagttacccgatccattggaagggaaataatggtttgtactgcgttgggctatcaaggagaggcttctatggcgctgccgcagatgctgaaaatatagcaaatgatgtaagctccttcacgcagcatccatgtccctgagaagtgagaacaaactacaagaccaacgacagttttgctgctgcaagtttttgaaacataattattacgacatatcatggcttcgcagattgccctgttagctgccattgctgctagctagagggacaacaatataatctccaaataatactatgagctctgtatattaagagtctctaacaattaattatttataaatgtc

SEQ ID NO: 55035 - protein, 388 aa, Glycine max
  peptide (1)..(388): Ceres Seq. ID no. 15170957
  misc_feature (12)..(356): Pfam Name: Pyridine nucleotide-disulphide oxidoreductase Pfam Description: Pyridine nucleotide-disulphide oxidoreductase
  misc_feature (12)..(384): Homolog of NCBI NO: 15235409 NR Description: flavin-containing monooxygenase (FMO) family
  misc_feature (12)..(379): Homolog of NCBI NO: 15235652 NR Description: flavin-containing monooxygenase (FMO/YUCCA2)
  misc_feature (12)..(381): Homolog of NCBI NO: 15219767 NR Description: flavin-containing monooxygenase (FMO/YUCCA3)
  misc_feature (2)..(381): Homolog of NCBI NO: 15240026 NR Description: flavin-containing monooxygenase (FMO) family
  misc_feature (6)..(381): Homolog of NCBI NO: 15218988 NR Description: flavin-containing monooxygenase (FMO) family
  misc_feature (11)..(379): Homolog of NCBI NO: 6979339 NR Description: hypothetical protein, similar to
  misc_feature (6)..(380): Homolog of NCBI NO: 6539582 NR Description: unnamed protein product [Oryza sativa (japonica
  misc_feature (7)..(387): Homolog of NCBI NO: 6979340 NR Description: hypothetical protein, similar to
  misc_feature (11)..(381): Homolog of NCBI NO: 15221995 NR Description: flavin-containing monooxygenase (FMO)-related
  misc_feature (6)..(380): Homolog of NCBI NO: 6539579 NR Description: unnamed protein product [Oryza sativa (japonica
RRRRMEEKQRVIIVGAGPSGISAAACFTKQSIPYIILEREDCSASLWKKYSYERLHLHLRKQYCQLPHKPFPASFPPYVPKKQFLQYLDDYVSHFGITPLYRRTVELAEYDQGCHNWRVMALNGDSGQLEEYRGRFLVVATGETTDPFVPELQGLSGFPGKLIHSTGFRSGKDFKDQHVLVVGSGNSGMEIALDLVNHGAKTSILVRSPVHFLSREMVSLGLFLLKYLSLSTVDSLMVMLSTMIYGDVTKYGVARPNEGPFYMKVKYGKYPVIDVGTYKKIKSGELKVLPSEIESLRGKDVLFKNGESHPFDSIVFCTGFKRSTNKWLKGDDYLLNDEGLPKPSYPIHWKGNNGLYCVGLSRRGFYGAAADAENIANDVSSFTQHPCP

SEQ ID NO: 55036 - protein, 384 aa, Glycine max
  peptide (1)..(384): Ceres Seq. ID no. 15170958
  misc_feature (8)..(352): Pfam Name: Pyridine nucleotide-disulphide oxidoreductase Pfam Description: Pyridine nucleotide-disulphide oxidoreductase
  misc_feature (8)..(380): Homolog of NCBI NO: 15235409 NR Description: flavin-containing monooxygenase (FMO) family
  misc_feature (8)..(375): Homolog of NCBI NO: 15235652 NR Description: flavin-containing monooxygenase (FMO/YUCCA2)
  misc_feature (8)..(377): Homolog of NCBI NO: 15219767 NR Description: flavin-containing monooxygenase (FMO/YUCCA3)
  misc_feature (1)..(377): Homolog of NCBI NO: 15240026 NR Description: flavin-containing monooxygenase (FMO) family
  misc_feature (2)..(377): Homolog of NCBI NO: 15218988 NR Description: flavin-containing monooxygenase (FMO) family
  misc_feature (7)..(375): Homolog of NCBI NO: 6979339 NR Description: hypothetical protein, similar to
  misc_feature (2)..(376): Homolog of NCBI NO: 6539582 NR Description: unnamed protein product [Oryza sativa (japonica
  misc_feature (3)..(383): Homolog of NCBI NO: 6979340 NR Description: hypothetical protein, similar to
  misc_feature (7)..(377): Homolog of NCBI NO: 15221995 NR Description: flavin-containing monooxygenase (FMO)-related
  misc_feature (2)..(376): Homolog of NCBI NO: 6539579 NR Description: unnamed protein product [Oryza sativa (japonica
MEEKQRVIIVGAGPSGISAAACFTKQSIPYIILEREDCSASLWKKYSYERLHLHLRKQYCQLPHKPFPASFPPYVPKKQFLQYLDDYVSHFGITPLYRRTVELAEYDQGCHNWRVMALNGDSGQLEEYRGRFLVVATGETTDPFVPELQGLSGFPGKLIHSTGFRSGKDFKDQHVLVVGSGNSGMEIALDLVNHGAKTSILVRSPVHFLSREMVSLGLFLLKYLSLSTVDSLMVMLSTMIYGDVTKYGVARPNEGPFYMKVKYGKYPVIDVGTYKKIKSGELKVLPSEIESLRGKDVLFKNGESHPFDSIVFCTGFKRSTNKWLKGDDYLLNDEGLPKPSYPIHWKGNNGLYCVGLSRRGFYGAAADAENIANDVSSFTQHPCP

SEQ ID NO: 55037 - protein, 269 aa, Glycine max
  peptide (1)..(269): Ceres Seq. ID no. 15170959
  misc_feature (1)..(237): Pfam Name: Pyridine nucleotide-disulphide oxidoreductase Pfam Description: Pyridine nucleotide-disulphide oxidoreductase
  misc_feature (1)..(265): Homolog of NCBI NO: 15235409 NR Description: flavin-containing monooxygenase (FMO) family
  misc_feature (1)..(260): Homolog of NCBI NO: 15235652 NR Description: flavin-containing monooxygenase (FMO/YUCCA2)
  misc_feature (1)..(262): Homolog of NCBI NO: 15219767 NR Description: flavin-containing monooxygenase (FMO/YUCCA3)
  misc_feature (1)..(262): Homolog of NCBI NO: 15240026 NR Description: flavin-containing monooxygenase (FMO) family
  misc_feature (1)..(262): Homolog of NCBI NO: 15218988 NR Description: flavin-containing monooxygenase (FMO) family
  misc_feature (1)..(260): Homolog of NCBI NO: 6979339 NR Description: hypothetical protein, similar to
  misc_feature (1)..(261): Homolog of NCBI NO: 6539582 NR Description: unnamed protein product [Oryza sativa (japonica
  misc_feature (1)..(268): Homolog of NCBI NO: 6979340 NR Description: hypothetical protein, similar to
  misc_feature (1)..(262): Homolog of NCBI NO: 15221995 NR Description: flavin-containing monooxygenase (FMO)-related
  misc_feature (1)..(261): Homolog of NCBI NO: 6539579 NR Description: unnamed protein product [Oryza sativa (japonica
MALNGDSGQLEEYRGRFLVVATGETTDPFVPELQGLSGFPGKLIHSTGFRSGKDFKDQHVLVVGSGNSGMEIALDLVNHGAKTSILVRSPVHFLSREMVSLGLFLLKYLSLSTVDSLMVMLSTMIYGDVTKYGVARPNEGPFYMKVKYGKYPVIDVGTYKKIKSGELKVLPSEIESLRGKDVLFKNGESHPFDSIVFCTGFKRSTNKWLKGDDYLLNDEGLPKPSYPIHWKGNNGLYCVGLSRRGFYGAAADAENIANDVSSFTQHPCP

SEQ ID NO: 55038 - DNA, 1597 bp, Glycine max
  misc_feature (1)..(1597): Ceres Seq. ID no. 14308803
ggcagctgagacactgcaaaaagagttatatagagagagaaaagaaaaatgcactgacacagtgacacagtggttctctcacctctccttctctgtgtaactctgccaccatcttcatttccccaagagaaaaagaaaaaggaaaagaaaaaaactgttcaacttttttttaactgaatcaatcactagcttccatttcttcacaggtggaactgtgaatgtgcaccacagctttttgatcctgttcctaaaattttcctgtgaaagattctgaaggcaattgaagtaaatgccatggatcgtggggaccaaatggcgttatccgggtcttactatatgcagcaaagaggaatacctggatctggagcaccacctgagttacatatttcgcctaatatgcgtccaatctctaatccaaatttaccatttcaatccagcattggtggtggtaccattggatccacattgccattggaatcttcagcaatttcagctcatggtgtcaatgtgggagctcctactggggcacctccaggggaacctgttaagaggaagagaggaaggcctaggaaatatggaaccgacggaagtgtgtcattggcattgactccaactccaacatcatctagctatcctggagccttgacacaaagccagaaacggggcagagggcgcccacccgggactgggaagaaacagcaattggcttcgcttggtgaattgatgtctggttcagctgggatgggattcactcctcatataatcaatattgcaagtggagaagacattacaacaaaaatcatggcattttctcagcagggagctagagctgtatgcattttgtcagccaatggtgctgtctctactgtcacacttcgtcagccatcaacttcaggtggcactgtcacatacgaggggcgctttgagatagtgtgtctgtcaggctcttacttggtcaccgataatggtggctcacgcaatcgaactggtggattgagtgtgtcccttgctagtcctgatggtcgtgtcattggtggtggagttggtggagtgcttattgcatcaagtcctgttcaggtggtagttgggagttttctatggggtggatcaaagacaaagaacaagaaaaaggaatcctcagaaggttcagaagttgctgtggagtcagatcaccagggagttcataatccagtttcactgaatagcagcatctcaccaaatcaaaaccttcctccaacccccccatctttaaatccttggtcgacatcgcgtccattggacatgcgtaattcccatgttgacatcgatttaatgcgtgggtgacacattgttgaatatacactagtgctgtgtatatatatttcagattcatggtcgctcatctaatttttgttgtagtagtaaaatgacagaatgggaagtaccaacagcagagtagagccagctgacttttgcaaattgataaatctcacttatatccatccacccttgatgattattgacttggggttgtactcatatttttgtagctgtgaggaattttcaatttgaaggttgtatgttcctgattggtaatgatacaatttgtcttattttg

SEQ ID NO: 55039 - protein, 342 aa, Glycine max
  peptide (1)..(342): Ceres Seq. ID no. 14308804
  misc_feature (23)..(334): Homolog of NCBI NO: 15235790 NR Description: DNA binding protein -related [Arabidopsis
  misc_feature (1)..(342): Homolog of NCBI NO: 22330402 NR Description: DNA-binding protein -related [Arabidopsis
  misc_feature (23)..(339): Homolog of NCBI NO: 22328578 NR Description: DNA-binding protein -related [Arabidopsis
  misc_feature (19)..(342): Homolog of NCBI NO: 6633838 NR Description: F2K11.15 [Arabidopsis thaliana]
  misc_feature (22)..(342): Homolog of NCBI NO: 30696854 NR Description: DNA-binding protein -related [Arabidopsis
  misc_feature (1)..(331): Homolog of NCBI NO: 2213534 NR Description: DNA-binding PD1-like protein [Pisum sativum]
  misc_feature (1)..(342): Homolog of NCBI NO: 7488825 NR Description: probable DNA-binding protein - garden pea
  misc_feature (7)..(342): Homolog of NCBI NO: 11281387 NR Description: probable DNA-binding protein - Arabidopsis
  misc_feature (1)..(342): Homolog of NCBI NO: 30695388 NR Description: DNA-binding protein -related [Arabidopsis
  misc_feature (1)..(342): Homolog of NCBI NO: 15225902 NR Description: AT-hook DNA-binding protein -related [Arabidopsis
MDRGDQMALSGSYYMQQRGIPGSGAPPELHISPNMRPISNPNLPFQSSIGGGTIGSTLPLESSAISAHGVNVGAPTGAPPGEPVKRKRGRPRKYGTDGSVSLALTPTPTSSSYPGALTQSQKRGRGRPPGTGKKQQLASLGELMSGSAGMGFTPHIINIASGEDITTKIMAFSQQGARAVCILSANGAVSTVTLRQPSTSGGTVTYEGRFEIVCLSGSYLVTDNGGSRNRTGGLSVSLASPDGRVIGGGVGGVLIASSPVQVVVGSFLWGGSKTKNKKKESSEGSEVAVESDHQGVHNPVSLNSSISPNQNLPPTPPSLNPWSTSRPLDMRNSHVDIDLMRG

SEQ ID NO: 55040 - protein, 336 aa, Glycine max
  peptide (1)..(336): Ceres Seq. ID no. 14308805
  misc_feature (17)..(328): Homolog of NCBI NO: 15235790 NR Description: DNA binding protein -related [Arabidopsis
  misc_feature (1)..(336): Homolog of NCBI NO: 22330402 NR Description: DNA-binding protein -related [Arabidopsis
  misc_feature (17)..(333): Homolog of NCBI NO: 22328578 NR Description: DNA-binding protein -related [Arabidopsis
  misc_feature (13)..(336): Homolog of NCBI NO: 6633838 NR Description: F2K11.15 [Arabidopsis thaliana]
  misc_feature (16)..(336): Homolog of NCBI NO: 30696854 NR Description: DNA-binding protein -related [Arabidopsis
  misc_feature (1)..(325): Homolog of NCBI NO: 2213534 NR Description: DNA-binding PD1-like protein [Pisum sativum]
  misc_feature (1)..(336): Homolog of NCBI NO: 7488825 NR Description: probable DNA-binding protein - garden pea
  misc_feature (1)..(336): Homolog of NCBI NO: 11281387 NR Description: probable DNA-binding protein - Arabidopsis
  misc_feature (1)..(336): Homolog of NCBI NO: 30695388 NR Description: DNA-binding protein -related [Arabidopsis
  misc_feature (1)..(336): Homolog of NCBI NO: 15225902 NR Description: AT-hook DNA-binding protein -related [Arabidopsis
MALSGSYYMQQRGIPGSGAPPELHISPNMRPISNPNLPFQSSIGGGTIGSTLPLESSAISAHGVNVGAPTGAPPGEPVKRKRGRPRKYGTDGSVSLALTPTPTSSSYPGALTQSQKRGRGRPPGTGKKQQLASLGELMSGSAGMGFTPHIINIASGEDITTKIMAFSQQGARAVCILSANGAVSTVTLRQPSTSGGTVTYEGRFEIVCLSGSYLVTDNGGSRNRTGGLSVSLASPDGRVIGGGVGGVLIASSPVQVVVGSFLWGGSKTKNKKKESSEGSEVAVESDHQGVHNPVSLNSSISPNQNLPPTPPSLNPWSTSRPLDMRNSHVDIDLMRG

SEQ ID NO: 55041 - protein, 328 aa, Glycine max
  peptide (1)..(328): Ceres Seq. ID no. 14308806
  misc_feature (9)..(320): Homolog of NCBI NO: 15235790 NR Description: DNA binding protein -related [Arabidopsis
  misc_feature (1)..(328): Homolog of NCBI NO: 22330402 NR Description: DNA-binding protein -related [Arabidopsis
  misc_feature (9)..(325): Homolog of NCBI NO: 22328578 NR Description: DNA-binding protein -related [Arabidopsis
  misc_feature (5)..(328): Homolog of NCBI NO: 6633838 NR Description: F2K11.15 [Arabidopsis thaliana]
  misc_feature (8)..(328): Homolog of NCBI NO: 30696854 NR Description: DNA-binding protein -related [Arabidopsis
  misc_feature (1)..(317): Homolog of NCBI NO: 2213534 NR Description: DNA-binding PD1-like protein [Pisum sativum]
  misc_feature (1)..(328): Homolog of NCBI NO: 7488825 NR Description: probable DNA-binding protein - garden pea
  misc_feature (1)..(328): Homolog of NCBI NO: 11281387 NR Description: probable DNA-binding protein - Arabidopsis
  misc_feature (1)..(328): Homolog of NCBI NO: 30695388 NR Description: DNA-binding protein -related [Arabidopsis
  misc_feature (1)..(328): Homolog of NCBI NO: 15225902 NR Description: AT-hook DNA-binding protein -related [Arabidopsis
MQQRGIPGSGAPPELHISPNMRPISNPNLPFQSSIGGGTIGSTLPLESSAISAHGVNVGAPTGAPPGEPVKRKRGRPRKYGTDGSVSLALTPTPTSSSYPGALTQSQKRGRGRPPGTGKKQQLASLGELMSGSAGMGFTPHIINIASGEDITTKIMAFSQQGARAVCILSANGAVSTVTLRQPSTSGGTVTYEGRFEIVCLSGSYLVTDNGGSRNRTGGLSVSLASPDGRVIGGGVGGVLIASSPVQVVVGSFLWGGSKTKNKKKESSEGSEVAVESDHQGVHNPVSLNSSISPNQNLPPTPPSLNPWSTSRPLDMRNSHVDIDLMRG

SEQ ID NO: 55042 - DNA, 1198 bp, Glycine max
  misc_feature (1)..(1198): Ceres Seq. ID no. 14312408
atcatttcttttctcttgttatttgagtaacccattcattaatttccctaatcgaaatggagcagagggatcaaaaccaacggcccatggagtggtgtttagagattcattgggtggaagacacaaagtgtacctgaaggccgatccaaggaacgagataattgtttcagccggtgcacttggaagcccacaacttctaatgttgagtggaattggacccagagagcaccttaaagcccacaacatcagaataacattgaatcagccattagtaggacaggaaatgactgacaaccccatgaacgccatctttgtcccttctcctgtccccgtagaggtctctctgattgaggtggtgggcatcaccagttttggcagctacattgaagctgccagtggtgaaaactttgccggtggttctccaaaagactacggaatgttctcccccaagattgggcaactctccacggtgcctccaaaggaaaggaccccagaggccctggccaaggcaacagaactgatggaaactctagaacaagcagccttcagaggaggattcatattggaaaaaatcatgggtccaatctcaagcgggcatttggagctccgaacccgcgacccgaacgacaacccatcagtgaccttcaactacttccaggaccctcgagacttgcagcgatgcgtgcagggcctgagcaccgtggagaagataatcgagtccaaagctttctctcccttcagataccccaacatgccagtgcccgttctgctcaacctgaccgcaagtgcccccgttaacttgttgcccaagcacaccaattcttcactttctttggaacagtattgcagagacactgtcatgaccatttggcactaccacggtggctgccaagtagggaaggttcttgatagggactacaagcttcttggtgtggatgcactgcgtgttattgatggctccacctttaactactctcctggaactaatcctcaggccactgttatgatgcttggcaggtatatgggagtgaaaatattgagcgagagactaggtggtgcggctgctgctgctgaaacagagcaataagttgtatatttttcctttcaacaaagtgtcttcgtgtcactgaggaaaaacaaattcttgtgagaatgatttgtgaagtaacctttcaatgagaaaaataacaaattaaac

SEQ ID NO: 55043 - protein, 361 aa, Glycine max
  peptide (1)..(361): Ceres Seq. ID no. 14312409
  misc_feature (142)..(341): Pfam Name: GMC oxidoreductase Pfam Description: GMC oxidoreductase
  misc_feature (22)..(354): Homolog of NCBI NO: 37572986 NR Description: putative mandelonitrile lyase
  misc_feature (25)..(349): Homolog of NCBI NO: 15242236 NR Description: glucose-methanol-choline (GMC) oxidoreductase
  misc_feature (24)..(350): Homolog of NCBI NO: 9502391 NR Description: T12C24.11 [Arabidopsis thaliana]
  misc_feature (24)..(350): Homolog of NCBI NO: 22329512 NR Description: glucose-methanol-choline (GMC) oxidoreductase
  misc_feature (24)..(350): Homolog of NCBI NO: 17978954 NR Description: At1g12570/T12C24_9 [Arabidopsis thaliana]
  misc_feature (24)..(350): Homolog of NCBI NO: 8778640 NR Description: F5O11.31 [Arabidopsis thaliana]
  misc_feature (26)..(349): Homolog of NCBI NO: 27452902 NR Description: Putative mandelonitrile lyase
  misc_feature (13)..(349): Homolog of NCBI NO: 11358959 NR Description: probable mandelonitrile lyase (EC 4.1.2.10)
  misc_feature (13)..(349): Homolog of NCBI NO: 37536228 NR Description: putative mandelonitrile lyase
  misc_feature (19)..(351): Homolog of NCBI NO: 38605946 NR Description: OSJNBa0019K04.7 [Oryza sativa (japonica
SFLFSCYLSNPFINFPNRNGAEGSKPTAHGVVFRDSLGGRHKVYLKADPRNEIIVSAGALGSPQLLMLSGIGPREHLKAHNIRITLNQPLVGQEMTDNPMNAIFVPSPVPVEVSLIEVVGITSFGSYIEAASGENFAGGSPKDYGMFSPKIGQLSTVPPKERTPEALAKATELMETLEQAAFRGGFILEKIMGPISSGHLELRTRDPNDNPSVTFNYFQDPRDLQRCVQGLSTVEKIIESKAFSPFRYPNMPVPVLLNLTASAPVNLLPKHTNSSLSLEQYCRDTVMTIWHYHGGCQVGKVLDRDYKLLGVDALRVIDGSTFNYSPGTNPQATVMMLGRYMGVKILSERLGGAAAAAETEQ

SEQ ID NO: 55044 - protein, 295 aa, Glycine max
  peptide (1)..(295): Ceres Seq. ID no. 14312410
  misc_feature (76)..(275): Pfam Name: GMC oxidoreductase Pfam Description: GMC oxidoreductase
  misc_feature (1)..(288): Homolog of NCBI NO: 37572986 NR Description: putative mandelonitrile lyase
  misc_feature (1)..(283): Homolog of NCBI NO: 15242236 NR Description: glucose-methanol-choline (GMC) oxidoreductase
  misc_feature (1)..(284): Homolog of NCBI NO: 9502391 NR Description: T12C24.11 [Arabidopsis thaliana]
  misc_feature (1)..(284): Homolog of NCBI NO: 22329512 NR Description: glucose-methanol-choline (GMC) oxidoreductase
  misc_feature (1)..(284): Homolog of NCBI NO: 17978954 NR Description: At1g12570/T12C24_9 [Arabidopsis thaliana]
  misc_feature (1)..(284): Homolog of NCBI NO: 8778640 NR Description: F5O11.31 [Arabidopsis thaliana]
  misc_feature (1)..(283): Homolog of NCBI NO: 27452902 NR Description: Putative mandelonitrile lyase
  misc_feature (1)..(283): Homolog of NCBI NO: 11358959 NR Description: probable mandelonitrile lyase (EC 4.1.2.10)
  misc_feature (1)..(283): Homolog of NCBI NO: 37536228 NR Description: putative mandelonitrile lyase
  misc_feature (1)..(285): Homolog of NCBI NO: 38605946 NR Description: OSJNBa0019K04.7 [Oryza sativa (japonica
MLSGIGPREHLKAHNIRITLNQPLVGQEMTDNPMNAIFVPSPVPVEVSLIEVVGITSFGSYIEAASGENFAGGSPKDYGMFSPKIGQLSTVPPKERTPEALAKATELMETLEQAAFRGGFILEKIMGPISSGHLELRTRDPNDNPSVTFNYFQDPRDLQRCVQGLSTVEKIIESKAFSPFRYPNMPVPVLLNLTASAPVNLLPKHTNSSLSLEQYCRDTVMTIWHYHGGCQVGKVLDRDYKLLGVDALRVIDGSTFNYSPGTNPQATVMMLGRYMGVKILSERLGGAAAAAETEQ

SEQ ID NO: 55045 - protein, 267 aa, Glycine max
  peptide (1)..(267): Ceres Seq. ID no. 14312411
  misc_feature (48)..(247): Pfam Name: GMC oxidoreductase Pfam Description: GMC oxidoreductase
  misc_feature (1)..(260): Homolog of NCBI NO: 37572986 NR Description: putative mandelonitrile lyase
  misc_feature (1)..(255): Homolog of NCBI NO: 15242236 NR Description: glucose-methanol-choline (GMC) oxidoreductase
  misc_feature (1)..(256): Homolog of NCBI NO: 9502391 NR Description: T12C24.11 [Arabidopsis thaliana]
  misc_feature (1)..(256): Homolog of NCBI NO: 17978954 NR Description: At1g12570/T12C24_9 [Arabidopsis thaliana]
  misc_feature (1)..(256): Homolog of NCBI NO: 22329512 NR Description: glucose-methanol-choline (GMC) oxidoreductase
  misc_feature (1)..(256): Homolog of NCBI NO: 8778640 NR Description: F5O11.31 [Arabidopsis thaliana]
  misc_feature (1)..(255): Homolog of NCBI NO: 27452902 NR Description: Putative mandelonitrile lyase
  misc_feature (1)..(255): Homolog of NCBI NO: 11358959 NR Description: probable mandelonitrile lyase (EC 4.1.2.10)
  misc_feature (1)..(255): Homolog of NCBI NO: 37536228 NR Description: putative mandelonitrile lyase
  misc_feature (1)..(257): Homolog of NCBI NO: 38605946 NR Description: OSJNBa0019K04.7 [Oryza sativa (japonica
MTDNPMNAIFVPSPVPVEVSLIEVVGITSFGSYIEAASGENFAGGSPKDYGMFSPKIGQLSTVPPKERTPEALAKATELMETLEQAAFRGGFILEKIMGPISSGHLELRTRDPNDNPSVTFNYFQDPRDLQRCVQGLSTVEKIIESKAFSPFRYPNMPVPVLLNLTASAPVNLLPKHTNSSLSLEQYCRDTVMTIWHYHGGCQVGKVLDRDYKLLGVDALRVIDGSTFNYSPGTNPQATVMMLGRYMGVKILSERLGGAAAAAETEQ

SEQ ID NO: 55046 - DNA, 1100 bp, Glycine max
  misc_feature (1)..(1100): Ceres Seq. ID no. 15172291
ttatatataccaaaattgaattttatgcagcaaaaagtgatattgaaagtgaagcctatacttgaagaaagcatcaagaggttgtgttgcaccaattttaaaagtaagttgagggtggcggatttaggatgtgcttcgggaccaaatgcacttatggtcatggtacaagaaaggcgagatggagtaggtgcatgcgttgtcaatgcaacaccagggagcttttacggaagactctttccgaataattacattcacttctttcaatcttcctatagcctccattggctctcacaaacccctgaagagttgatcaagggagcaaaaccactaaacaagggaaacatttatataacaactacaagctctccaatagtctttaaagcatacttagagcaattccaaagagatttcagtttttttctaaaatcacgttcagatgaactaaaagttggtggcattatggtactaactttccaaggcagagaaaaagctcatgaaattactcatcctttagtggtgattgggatgctgctcaaagatatgatattagagggtttggttgaggagacaaagttggactcatttaacttgcctatatattttccaacgatggaggaagttagagaagttattgaagcagaaggatcttttaccctacaaacattgaaaactttcaaactgggttgggatgcaaaccttcaagatgaagttaatggttctcttcttgatagtaaaataagaggagagttcatagctaagtccatcagagttgtttttgaacccattttaactgttgaatttggcaatgagatcatggatgaattattctcaaggtttgcaactaagatttcacaactcatagagttcgaagcattggagtatacaaacttggtcatgtccatgggaaaagcataaagggaaggaggaagtgggtgtatgctttactaaagatatctacaattaatccaagtgggttgtatcatgaaatttacttgagctacacttcatcatgttcaatatcttgttagtctccatcttcaaatcaactttaaagtttgaatcttgtacatattgataattcccttgtacactctttaatt

SEQ ID NO: 55047 - protein, 304 aa, Glycine max
  peptide (1)..(304): Ceres Seq. ID no. 15172292
  misc_feature (63)..(303): Pfam Name: SAM dependent carboxyl methyltransferase Pfam Description: SAM dependent carboxyl methyltransferase
  misc_feature (7)..(56): Homolog of NCBI NO: 28629497 NR Description: S-adenosyl-L-methionine:benzoic acid/salicylic
  misc_feature (60)..(303): Homolog of NCBI NO: 28629497 NR Description: S-adenosyl-L-methionine:benzoic acid/salicylic
  misc_feature (5)..(54): Homolog of NCBI NO: 26453379 NR Description: tentative caffeine synthase 3 [Coffea arabica]
  misc_feature (57)..(303): Homolog of NCBI NO: 26453379 NR Description: tentative caffeine synthase 3 [Coffea arabica]
  misc_feature (5)..(54): Homolog of NCBI NO: 26453381 NR Description: tentative caffeine synthase 4 [Coffea arabica]
  misc_feature (57)..(303): Homolog of NCBI NO: 26453381 NR Description: tentative caffeine synthase 4 [Coffea arabica]
  misc_feature (5)..(54): Homolog of NCBI NO: 13365749 NR Description: theobromine synthase [Coffea arabica]
  misc_feature (57)..(303): Homolog of NCBI NO: 13365749 NR Description: theobromine synthase [Coffea arabica]
  misc_feature (7)..(54): Homolog of NCBI NO: 13366161 NR Description: S-adenosyl-L-methionine:salicylic acid carboxyl
  misc_feature (63)..(303): Homolog of NCBI NO: 13366161 NR Description: S-adenosyl-L-methionine:salicylic acid carboxyl
LYIPKLNFMQQKVILKVKPILEESIKRLCCTNFKSKLRVADLGCASGPNALMVMVQERRDGVGACVVNATPGSFYGRLFPNNYIHFFQSSYSLHWLSQTPEELIKGAKPLNKGNIYITTTSSPIVFKAYLEQFQRDFSFFLKSRSDELKVGGIMVLTFQGREKAHEITHPLVVIGMLLKDMILEGLVEETKLDSFNLPIYFPTMEEVREVIEAEGSFTLQTLKTFKLGWDANLQDEVNGSLLDSKIRGEFIAKSIRVVFEPILTVEFGNEIMDELFSRFATKISQLIEFEALEYTNLVMSMGKA

SEQ ID NO: 55048 - protein, 296 aa, Glycine max
  peptide (1)..(296): Ceres Seq. ID no. 15172293
  misc_feature (55)..(295): Pfam Name: SAM dependent carboxyl methyltransferase Pfam Description: SAM dependent carboxyl methyltransferase
  misc_feature (1)..(48): Homolog of NCBI NO: 28629497 NR Description: S-adenosyl-L-methionine:benzoic acid/salicylic
  misc_feature (52)..(295): Homolog of NCBI NO: 28629497 NR Description: S-adenosyl-L-methionine:benzoic acid/salicylic
  misc_feature (1)..(46): Homolog of NCBI NO: 26453379 NR Description: tentative caffeine synthase 3 [Coffea arabica]
  misc_feature (49)..(295): Homolog of NCBI NO: 26453379 NR Description: tentative caffeine synthase 3 [Coffea arabica]
  misc_feature (1)..(46): Homolog of NCBI NO: 26453381 NR Description: tentative caffeine synthase 4 [Coffea arabica]
  misc_feature (49)..(295): Homolog of NCBI NO: 26453381 NR Description: tentative caffeine synthase 4 [Coffea arabica]
  misc_feature (1)..(46): Homolog of NCBI NO: 13365749 NR Description: theobromine synthase [Coffea arabica]
  misc_feature (49)..(295): Homolog of NCBI NO: 13365749 NR Description: theobromine synthase [Coffea arabica]
  misc_feature (1)..(46): Homolog of NCBI NO: 13366161 NR Description: S-adenosyl-L-methionine:salicylic acid carboxyl
  misc_feature (55)..(295): Homolog of NCBI NO: 13366161 NR Description: S-adenosyl-L-methionine:salicylic acid carboxyl
MQQKVILKVKPILEESIKRLCCTNFKSKLRVADLGCASGPNALMVMVQERRDGVGACVVNATPGSFYGRLFPNNYIHFFQSSYSLHWLSQTPEELIKGAKPLNKGNIYITTTSSPIVFKAYLEQFQRDFSFFLKSRSDELKVGGIMVLTFQGREKAHEITHPLVVIGMLLKDMILEGLVEETKLDSFNLPIYFPTMEEVREVIEAEGSFTLQTLKTFKLGWDANLQDEVNGSLLDSKIRGEFIAKSIRVVFEPILTVEFGNEIMDELFSRFATKISQLIEFEALEYTNLVMSMGKA

SEQ ID NO: 55049 - protein, 253 aa, Glycine max
  peptide (1)..(253): Ceres Seq. ID no. 15172294
  misc_feature (12)..(252): Pfam Name: SAM dependent carboxyl methyltransferase Pfam Description: SAM dependent carboxyl methyltransferase
  misc_feature (7)..(234): Homolog of NCBI NO: 15240823 NR Description: S-adenosyl-L-methionine:carboxyl
  misc_feature (7)..(234): Homolog of NCBI NO: 8885604 NR Description: S-adenosyl-L-methionine:salicylic acid carboxyl
  misc_feature (12)..(252): Homolog of NCBI NO: 9789277 NR Description: SAM:benzoic acid carboxyl methyltransferase
  misc_feature (6)..(252): Homolog of NCBI NO: 20271026 NR Description: N-methyltransferase [Coffea canephora]
  misc_feature (9)..(252): Homolog of NCBI NO: 28629495 NR Description: S-adenosyl-L-methionine:benzoic acid/salicylic
  misc_feature (9)..(252): Homolog of NCBI NO: 28629497 NR Description: S-adenosyl-L-methionine:benzoic acid/salicylic
  misc_feature (6)..(252): Homolog of NCBI NO: 26453379 NR Description: tentative caffeine synthase 3 [Coffea arabica]
  misc_feature (6)..(252): Homolog of NCBI NO: 26453381 NR Description: tentative caffeine synthase 4 [Coffea arabica]
  misc_feature (6)..(252): Homolog of NCBI NO: 13365749 NR Description: theobromine synthase [Coffea arabica]
  misc_feature (12)..(252): Homolog of NCBI NO: 13366161 NR Description: S-adenosyl-L-methionine:salicylic acid carboxyl
MVMVQERRDGVGACVVNATPGSFYGRLFPNNYIHFFQSSYSLHWLSQTPEELIKGAKPLNKGNIYITTTSSPIVFKAYLEQFQRDFSFFLKSRSDELKVGGIMVLTFQGREKAHEITHPLVVIGMLLKDMILEGLVEETKLDSFNLPIYFPTMEEVREVIEAEGSFTLQTLKTFKLGWDANLQDEVNGSLLDSKIRGEFIAKSIRVVFEPILTVEFGNEIMDELFSRFATKISQLIEFEALEYTNLVMSMGKA

SEQ ID NO: 55050 - DNA, 1368 bp, Glycine max
  misc_feature (1)..(1368): Ceres Seq. ID no. 14310419
gacatccaaaaaacatgaaacgaaaccataatttccccttccaccaccggccacgcaagtgggcgatggtgatccccaccgtcacaatatgcttcctcctcctcttcctcccgctccttcccctcaccaaaccctcatcttcatcttcttctttttctgcgacatggtcttcttcttcgctgaatttaacggaagaactagaagtgggtgttccgagattggcgtacatgttgacggcgacgaaaggggagggggcgcagctgaagagggtccttcaggcagtgtaccatcccaggaactactacctgctccatctcgatctagaggcttctgatgcggagaggctggagctggccaaatacgtcaagtccgagactgtgcttgcggcgtttgggaacgtcttggtggtgggtaagcctgatttggtcacctacaagggccccaccatgattgcttctactcttcacggtattgcccttttgctcaagagggccccacactgggactggttaatcaatctcagcgcctctgattatcctctcctctcccaggacgatatcttgcacatcttttcattcttgcccagggatctaaatttcattgagcatacaagtaatattggttggaaagagcatcaaagagctaggcctatcattatagatccaggcttatatcattcaaagaaatctggtgtttactgggctaaagagaagagatctgttccatcttcgttcaagttattcacagggtctgcatgggttgtcctgacaaaatcatttcttgagttttgtgtttggggttgggataatcttcctcgaactctccttatgtattacacaaattttctttcatcccctgagggttacttccatacggtcatttgcaatcataaggactatcaaaacacaaccattaatcatgatttacgttacataaggtgggacaacccgccaaagcagcatccagttttcttgaaattggagcattttgatgacatggtccatagtggtgcaccttttgctcgaaagtttaccaaggatgatccagttctcaacaaaattgataaggaacttttgagaagatcagatggtcactttacaccgggaggttggtgtattggcaatcctcttttgggaaaagatccttgtgctgtttatggaaatccaattgtagttaaacctaccttacaatcaaagaagctagaaaaactaatagtgaaactattagattctgaaaattttaggccgaaacaatgtaaatagtagtcactctgcaacgtgaaatttttatacacaattctattggcatttttaatgcgtcgtctgttcaaatttaacattatgaattgttatgaaacatctttctagc

SEQ ID NO: 55051 - protein, 419 aa, Glycine max
  peptide (1)..(419): Ceres Seq. ID no. 14310420
  misc_feature (74)..(298): Pfam Name: Core-2/I-Branching enzyme Pfam Description: Core-2/I-Branching enzyme
  misc_feature (70)..(419): Homolog of NCBI NO: 18400725 NR Description: N-acetylglucosaminyltransferase family
  misc_feature (70)..(419): Homolog of NCBI NO: 15146308 NR Description: AT3g15350/K7L4_15 [Arabidopsis thaliana]
  misc_feature (3)..(418): Homolog of NCBI NO: 15236287 NR Description: N-acetylglucosaminyltransferase family
  misc_feature (18)..(418): Homolog of NCBI NO: 15218824 NR Description: N-acetylglucosaminyltransferase family
  misc_feature (1)..(419): Homolog of NCBI NO: 15242532 NR Description: N-acetylglucosaminyltransferase family
  misc_feature (376)..(419): Homolog of NCBI NO: 7485441 NR Description: probable RING zinc finger protein
  misc_feature (43)..(362): Homolog of NCBI NO: 7485441 NR Description: probable RING zinc finger protein
  misc_feature (18)..(419): Homolog of NCBI NO: 15242199 NR Description: N-acetylglucosaminyltransferase family
  misc_feature (376)..(419): Homolog of NCBI NO: 18404468 NR Description: N-acetylglucosaminyltransferase family
  misc_feature (5)..(362): Homolog of NCBI NO: 18404468 NR Description: N-acetylglucosaminyltransferase family
HPKNMKRNHNFPFHHRPRKWAMVIPTVTICFLLLFLPLLPLTKPSSSSSSFSATWSSSSLNLTEELEVGVPRLAYMLTATKGEGAQLKRVLQAVYHPRNYYLLHLDLEASDAERLELAKYVKSETVLAAFGNVLVVGKPDLVTYKGPTMIASTLHGIALLLKRAPHWDWLINLSASDYPLLSQDDILHIFSFLPRDLNFIEHTSNIGWKEHQRARPIIIDPGLYHSKKSGVYWAKEKRSVPSSFKLFTGSAWVVLTKSFLEFCVWGWDNLPRTLLMYYTNFLSSPEGYFHTVICNHKDYQNTTINHDLRYIRWDNPPKQHPVFLKLEHFDDMVHSGAPFARKFTKDDPVLNKIDKELLRRSDGHFTPGGWCIGNPLLGKDPCAVYGNPIVVKPTLQSKKLEKLIVKLLDSENFRPKQCK

SEQ ID NO: 55052 - protein, 415 aa, Glycine max
  peptide (1)..(415): Ceres Seq. ID no. 14310421
  misc_feature (70)..(294): Pfam Name: Core-2/I-Branching enzyme Pfam Description: Core-2/I-Branching enzyme
  misc_feature (66)..(415): Homolog of NCBI NO: 18400725 NR Description: N-acetylglucosaminyltransferase family
  misc_feature (66)..(415): Homolog of NCBI NO: 15146308 NR Description: AT3g15350/K7L4_15 [Arabidopsis thaliana]
  misc_feature (1)..(414): Homolog of NCBI NO: 15236287 NR Description: N-acetylglucosaminyltransferase family
  misc_feature (14)..(414): Homolog of NCBI NO: 15218824 NR Description: N-acetylglucosaminyltransferase family
  misc_feature (1)..(415): Homolog of NCBI NO: 15242532 NR Description: N-acetylglucosaminyltransferase family
  misc_feature (372)..(415): Homolog of NCBI NO: 7485441 NR Description: probable RING zinc finger protein
  misc_feature (39)..(358): Homolog of NCBI NO: 7485441 NR Description: probable RING zinc finger protein
  misc_feature (14)..(415): Homolog of NCBI NO: 15242199 NR Description: N-acetylglucosaminyltransferase family
  misc_feature (372)..(415): Homolog of NCBI NO: 18404468 NR Description: N-acetylglucosaminyltransferase family
  misc_feature (1)..(358): Homolog of NCBI NO: 18404468 NR Description: N-acetylglucosaminyltransferase family
MKRNHNFPFHHRPRKWAMVIPTVTICFLLLFLPLLPLTKPSSSSSSFSATWSSSSLNLTEELEVGVPRLAYMLTATKGEGAQLKRVLQAVYHPRNYYLLHLDLEASDAERLELAKYVKSETVLAAFGNVLVVGKPDLVTYKGPTMIASTLHGIALLLKRAPHWDWLINLSASDYPLLSQDDILHIFSFLPRDLNFIEHTSNIGWKEHQRARPIIIDPGLYHSKKSGVYWAKEKRSVPSSFKLFTGSAWVVLTKSFLEFCVWGWDNLPRTLLMYYTNFLSSPEGYFHTVICNHKDYQNTTINHDLRYIRWDNPPKQHPVFLKLEHFDDMVHSGAPFARKFTKDDPVLNKIDKELLRRSDGHFTPGGWCIGNPLLGKDPCAVYGNPIVVKPTLQSKKLEKLIVKLLDSENFRPKQCK

SEQ ID NO: 55053 - protein, 398 aa, Glycine max
  peptide (1)..(398): Ceres Seq. ID no. 14310422
  misc_feature (53)..(277): Pfam Name: Core-2/I-Branching enzyme Pfam Description: Core-2/I-Branching enzyme
  misc_feature (49)..(398): Homolog of NCBI NO: 18400725 NR Description: N-acetylglucosaminyltransferase family
  misc_feature (49)..(398): Homolog of NCBI NO: 15146308 NR Description: AT3g15350/K7L4_15 [Arabidopsis thaliana]
  misc_feature (1)..(397): Homolog of NCBI NO: 15236287 NR Description: N-acetylglucosaminyltransferase family
  misc_feature (1)..(397): Homolog of NCBI NO: 15218824 NR Description: N-acetylglucosaminyltransferase family
  misc_feature (1)..(398): Homolog of NCBI NO: 15242532 NR Description: N-acetylglucosaminyltransferase family
  misc_feature (355)..(398): Homolog of NCBI NO: 7485441 NR Description: probable RING zinc finger protein
  misc_feature (22)..(341): Homolog of NCBI NO: 7485441 NR Description: probable RING zinc finger protein
  misc_feature (1)..(398): Homolog of NCBI NO: 15242199 NR Description: N-acetylglucosaminyltransferase family
  misc_feature (355)..(398): Homolog of NCBI NO: 18404468 NR Description: N-acetylglucosaminyltransferase family
  misc_feature (1)..(341): Homolog of NCBI NO: 18404468 NR Description: N-acetylglucosaminyltransferase family
MVIPTVTICFLLLFLPLLPLTKPSSSSSSFSATWSSSSLNLTEELEVGVPRLAYMLTATKGEGAQLKRVLQAVYHPRNYYLLHLDLEASDAERLELAKYVKSETVLAAFGNVLVVGKPDLVTYKGPTMIASTLHGIALLLKRAPHWDWLINLSASDYPLLSQDDILHIFSFLPRDLNFIEHTSNIGWKEHQRARPIIIDPGLYHSKKSGVYWAKEKRSVPSSFKLFTGSAWVVLTKSFLEFCVWGWDNLPRTLLMYYTNFLSSPEGYFHTVICNHKDYQNTTINHDLRYIRWDNPPKQHPVFLKLEHFDDMVHSGAPFARKFTKDDPVLNKIDKELLRRSDGHFTPGGWCIGNPLLGKDPCAVYGNPIVVKPTLQSKKLEKLIVKLLDSENFRPKQCK

SEQ ID NO: 55054 - DNA, 1440 bp, Glycine max
  misc_feature (1)..(1440): Ceres Seq. ID no. 13638058
aattgattgatactgcaatctcaacctgcctgaaagaaagcaagcctgtgtacataagcataagttgtaacttgcctggcattcctcaccccacattcagtcgcgagccggttccattttctctgtctccaagattgagtaacaagatggggttggaggctgcagtggaagcagcagcagagttcctaaacaaggcagtgaagcctgtaatggttggaggtcctaaactaagggtggctaatgcatgtgatgcatttgttgagcttgctgatgcatgtggctatccatttgctgtgatgccatcagccaagggactagtcccggagcacaaaccccacttcattggcacattctggggtgctgtgagcaccgcattctgtgctgaaatcgtcgaatctgctgatgcatacttgtttgctggccccattttcaatgactacagctctgttgggtactcactcctcctcaagaaggagaaggccatcatcgtgcagccggagcgcgttgtgatctccaatggacccgcattcgggtgtgtcctcatgaaggacttcctcagggaactcgcaaagcgtctcaagcacaacaacactgcttatgaaaattactcaaggatttttgtccctgagggaaagcctgtgaaagctgaacccagagagcctttgagggttaatgttctgtttaagcatatacaagatatgctgtctggcgaaaccgcggtgattgctgagacaggggactcttggtttaactgccagaagctgaagttgccaaaggggtgtgggtatgagttccaaatgcaatatggttcaattggttggtctgttggtgctacacttggttatgctcaggcggttcctgagaagcgagtgatttcttgcattggtgatggaagctttcaggtgacagctcaggatgtgtccacaatgctgcgaaatgagcagaagaccatcatcttcctgataaacaatggtggatacaccattgaagttgaaattcatgatgggccatacaatgtgattaagaactggaactacactggcttggttgatgcaatccacaatggtgaaggaaaatgctggaccactaaggttacatgtgaagaggagcttgttgaggcaattcagacagcaacaggtgacaagaaagattgcttgtgcttcattgaagtgattgttcacaaggatgacacaagcaaagaattgcttgaatggggctcaagggtttgtgctgctaacggtcgtcctcccaatcctcagtgaatttcaaacacttaattgagccattacaaatttgctggagtttctccctatttcaaacacttactcttgctgatagaaaaaagaaaatagaacaatttaatttcatgttttatttaacaaagacaataactaccatgagatttacttatatttatttttaaataaaattgagtttttt

SEQ ID NO: 55055 - protein, 419 aa, Glycine max
  peptide (1)..(419): Ceres Seq. ID no. 13638059
  misc_feature (2)..(419): Homolog of NCBI NO: 15240950 NR Description: pyruvate decarboxylase-related protein
  misc_feature (15)..(419): Homolog of NCBI NO: 1706329 NR Description: Pyruvate decarboxylase isozyme 2 (PDC)
  misc_feature (2)..(419): Homolog of NCBI NO: 15234062 NR Description: pyruvate decarboxylase-1 (Pdc1) [Arabidopsis
  misc_feature (260)..(419): Homolog of NCBI NO: 1706330 NR Description: Pyruvate decarboxylase isozyme 2 (PDC)
  misc_feature (2)..(262): Homolog of NCBI NO: 1706330 NR Description: Pyruvate decarboxylase isozyme 2 (PDC)
  misc_feature (1)..(419): Homolog of NCBI NO: 24745919 NR Description: pyruvate decarboxylase [Solanum tuberosum]
  misc_feature (1)..(419): Homolog of NCBI NO: 17225598 NR Description: pyruvate decarboxylase [Fragaria x ananassa]
  misc_feature (1)..(419): Homolog of NCBI NO: 10121330 NR Description: pyruvate decarboxylase [Fragaria x ananassa]
  misc_feature (2)..(419): Homolog of NCBI NO: 10732644 NR Description: pyruvate decarboxylase 1 [Vitis vinifera]
  misc_feature (2)..(419): Homolog of NCBI NO: 29373077 NR Description: pyruvate decarboxylase 1 [Lotus corniculatus]
LIDTAISTCLKESKPVYISISCNLPGIPHPTFSREPVPFSLSPRLSNKMGLEAAVEAAAEFLNKAVKPVMVGGPKLRVANACDAFVELADACGYPFAVMPSAKGLVPEHKPHFIGTFWGAVSTAFCAEIVESADAYLFAGPIFNDYSSVGYSLLLKKEKAIIVQPERVVISNGPAFGCVLMKDFLRELAKRLKHNNTAYENYSRIFVPEGKPVKAEPREPLRVNVLFKHIQDMLSGETAVIAETGDSWFNCQKLKLPKGCGYEFQMQYGSIGWSVGATLGYAQAVPEKRVISCIGDGSFQVTAQDVSTMLRNEQKTIIFLINNGGYTIEVEIHDGPYNVIKNWNYTGLVDAIHNGEGKCWTTKVTCEEELVEAIQTATGDKKDCLCFIEVIVHKDDTSKELLEWGSRVCAANGRPPNPQ

SEQ ID NO: 55056 - protein, 371 aa, Glycine max
  peptide (1)..(371): Ceres Seq. ID no. 13638060
  misc_feature (1)..(371): Homolog of NCBI NO: 15240950 NR Description: pyruvate decarboxylase-related protein
  misc_feature (1)..(371): Homolog of NCBI NO: 1706329 NR Description: Pyruvate decarboxylase isozyme 2 (PDC)
  misc_feature (1)..(371): Homolog of NCBI NO: 15234062 NR Description: pyruvate decarboxylase-1 (Pdc1) [Arabidopsis
  misc_feature (212)..(371): Homolog of NCBI NO: 1706330 NR Description: Pyruvate decarboxylase isozyme 2 (PDC)
  misc_feature (1)..(214): Homolog of NCBI NO: 1706330 NR Description: Pyruvate decarboxylase isozyme 2 (PDC)
  misc_feature (1)..(371): Homolog of NCBI NO: 24745919 NR Description: pyruvate decarboxylase [Solanum tuberosum]
  misc_feature (1)..(371): Homolog of NCBI NO: 17225598 NR Description: pyruvate decarboxylase [Fragaria x ananassa]
  misc_feature (1)..(371): Homolog of NCBI NO: 10121330 NR Description: pyruvate decarboxylase [Fragaria x ananassa]
  misc_feature (1)..(371): Homolog of NCBI NO: 10732644 NR Description: pyruvate decarboxylase 1 [Vitis vinifera]
  misc_feature (1)..(371): Homolog of NCBI NO: 29373077 NR Description: pyruvate decarboxylase 1 [Lotus corniculatus]
MGLEAAVEAAAEFLNKAVKPVMVGGPKLRVANACDAFVELADACGYPFAVMPSAKGLVPEHKPHFIGTFWGAVSTAFCAEIVESADAYLFAGPIFNDYSSVGYSLLLKKEKAIIVQPERVVISNGPAFGCVLMKDFLRELAKRLKHNNTAYENYSRIFVPEGKPVKAEPREPLRVNVLFKHIQDMLSGETAVIAETGDSWFNCQKLKLPKGCGYEFQMQYGSIGWSVGATLGYAQAVPEKRVISCIGDGSFQVTAQDVSTMLRNEQKTIIFLINNGGYTIEVEIHDGPYNVIKNWNYTGLVDAIHNGEGKCWTTKVTCEEELVEAIQTATGDKKDCLCFIEVIVHKDDTSKELLEWGSRVCAANGRPPNPQ

SEQ ID NO: 55057 - protein, 350 aa, Glycine max
  peptide (1)..(350): Ceres Seq. ID no. 13638061
  misc_feature (1)..(350): Homolog of NCBI NO: 15240950 NR Description: pyruvate decarboxylase-related protein
  misc_feature (1)..(350): Homolog of NCBI NO: 1706329 NR Description: Pyruvate decarboxylase isozyme 2 (PDC)
  misc_feature (1)..(350): Homolog of NCBI NO: 15234062 NR Description: pyruvate decarboxylase-1 (Pdc1) [Arabidopsis
  misc_feature (191)..(350): Homolog of NCBI NO: 1706330 NR Description: Pyruvate decarboxylase isozyme 2 (PDC)
  misc_feature (1)..(193): Homolog of NCBI NO: 1706330 NR Description: Pyruvate decarboxylase isozyme 2 (PDC)
  misc_feature (1)..(350): Homolog of NCBI NO: 24745919 NR Description: pyruvate decarboxylase [Solanum tuberosum]
  misc_feature (1)..(350): Homolog of NCBI NO: 17225598 NR Description: pyruvate decarboxylase [Fragaria x ananassa]
  misc_feature (1)..(350): Homolog of NCBI NO: 10121330 NR Description: pyruvate decarboxylase [Fragaria x ananassa]
  misc_feature (1)..(350): Homolog of NCBI NO: 10732644 NR Description: pyruvate decarboxylase 1 [Vitis vinifera]
  misc_feature (1)..(350): Homolog of NCBI NO: 29373077 NR Description: pyruvate decarboxylase 1 [Lotus corniculatus]
MVGGPKLRVANACDAFVELADACGYPFAVMPSAKGLVPEHKPHFIGTFWGAVSTAFCAEIVESADAYLFAGPIFNDYSSVGYSLLLKKEKAIIVQPERVVISNGPAFGCVLMKDFLRELAKRLKHNNTAYENYSRIFVPEGKPVKAEPREPLRVNVLFKHIQDMLSGETAVIAETGDSWFNCQKLKLPKGCGYEFQMQYGSIGWSVGATLGYAQAVPEKRVISCIGDGSFQVTAQDVSTMLRNEQKTIIFLINNGGYTIEVEIHDGPYNVIKNWNYTGLVDAIHNGEGKCWTTKVTCEEELVEAIQTATGDKKDCLCFIEVIVHKDDTSKELLEWGSRVCAANGRPPNPQ

SEQ ID NO: 55058 - DNA, 1254 bp, Glycine max
  misc_feature (1)..(1254): Ceres Seq. ID no. 15176238
aactcccaaaaattattctgattgaatttatatttatatttatataaatggaagacacgttaacgttgtggggaaaaaagatagaagaggaaaagtcataaaaagcataagaatctgcaacaaatagtcatggctgcgcttggggaccaatcagaggaacaagccatggctgcccaacctaaacctcagaaccgacccatttctaacatcgtcatcgtcgttgctatgcagacggaggcacttcccattgttaacagattccagctcactgaggaccctgacaccccgtttccgcaaggggttccttgggtccgttatcaggggacatacaaagatcttaatataagcttgatttggccgggaaaagatccaactttgggggttgatagtgtaggcacgatatcatctgctcttgtaacgtatgctgctattcaagcattacaaccagacttgatcatcaatgcaggcactgctggtggcttcaaggccaaaggagctagtattggtgatgttttcattgtatcagattgtgcttttcacgacagaagaatacccatacctgtttttgatctgtatggagttggtttacgtaaagcctttgtagcacccaaccttgtaaaggagcttaatctaaaggtgggtaaattgtctactggtgactctttagatatgacacagcaggatgaatcgtcaatcattgcaaatgatgccacagttaaagatatggagggagcagctattgcttatgtttctgaccttctgaaagttcctgcaatatttgtaaaagctgtgactgatatcattgatggtgacaaaccaactgcagaagaattcctgcaaaatttggcagctgtaactactgcacttgatctggcagttgaacaagttattaattttattaatggaaagtgcgaatctgaactttgacaacccaatttcaccttccagagtttttttttgtatgcaatgttacacggtgggctccaattgtacactactaccattatttggttgggaatttgtgagatttaagtaaaaatacaaacttataaactgaagatattgcagccccacctcccatctctcttttgtactgttctggccctgcaggctgtataagttatctggcaaagattgtggcaatcattgtaaacatgtacgatgacatactttagtgaatcacatgtagcatatggatgattatttgtctctgaaattttccatgatgatggaatgattgagtaagttgatttc

SEQ ID NO: 55059 - protein, 265 aa, Glycine max
  peptide (1)..(265): Ceres Seq. ID no. 15176239
  misc_feature (27)..(247): Pfam Name: Phosphorylase family Pfam Description: Phosphorylase family
  misc_feature (78)..(236): Homolog of NCBI NO: 23037085 NR Description: hypothetical protein [Oenococcus oeni MCW]
  misc_feature (78)..(254): Homolog of NCBI NO: 15642376 NR Description: MTA/SAH nucleosidase [Vibrio cholerae]
  misc_feature (63)..(250): Homolog of NCBI NO: 23467396 NR Description: hypothetical protein [Haemophilus somnus 129PT]
  misc_feature (67)..(265): Homolog of NCBI NO: 7486865 NR Description: hypothetical protein T11I11.80 - Arabidopsis
  misc_feature (20)..(265): Homolog of NCBI NO: 30690140 NR Description: expressed protein [Arabidopsis thaliana]
  misc_feature (1)..(265): Homolog of NCBI NO: 15234791 NR Description: expressed protein [Arabidopsis thaliana]
  misc_feature (24)..(265): Homolog of NCBI NO: 18087497 NR Description: methylthioadenosine/S-adenosyl homocysteine
  misc_feature (24)..(265): Homolog of NCBI NO: 34897892 NR Description: ESTs C28489(C61317),AU031689(R0560) correspond to region of the predicted gene.~Similar to Arabidopsis thaliana DNA
  misc_feature (1)..(265): Homolog of NCBI NO: 7406708 NR Description: putative ripening-related protein [Vitis vinifera]
MAALGDQSEEQAMAAQPKPQNRPISNIVIVVAMQTEALPIVNRFQLTEDPDTPFPQGVPWVRYQGTYKDLNISLIWPGKDPTLGVDSVGTISSALVTYAAIQALQPDLIINAGTAGGFKAKGASIGDVFIVSDCAFHDRRIPIPVFDLYGVGLRKAFVAPNLVKELNLKVGKLSTGDSLDMTQQDESSIIANDATVKDMEGAAIAYVSDLLKVPAIFVKAVTDIIDGDKPTAEEFLQNLAAVTTALDLAVEQVINFINGKCESEL

SEQ ID NO: 55060 - protein, 253 aa, Glycine max
  peptide (1)..(253): Ceres Seq. ID no. 15176240
  misc_feature (15)..(235): Pfam Name: Phosphorylase family Pfam Description: Phosphorylase family
  misc_feature (66)..(224): Homolog of NCBI NO: 23037085 NR Description: hypothetical protein [Oenococcus oeni MCW]
  misc_feature (66)..(242): Homolog of NCBI NO: 15642376 NR Description: MTA/SAH nucleosidase [Vibrio cholerae]
  misc_feature (51)..(238): Homolog of NCBI NO: 23467396 NR Description: hypothetical protein [Haemophilus somnus 129PT]
  misc_feature (55)..(253): Homolog of NCBI NO: 7486865 NR Description: hypothetical protein T11I11.80 - Arabidopsis
  misc_feature (8)..(253): Homolog of NCBI NO: 30690140 NR Description: expressed protein [Arabidopsis thaliana]
  misc_feature (1)..(253): Homolog of NCBI NO: 15234791 NR Description: expressed protein [Arabidopsis thaliana]
  misc_feature (12)..(253): Homolog of NCBI NO: 18087497 NR Description: methylthioadenosine/S-adenosyl homocysteine
  misc_feature (12)..(253): Homolog of NCBI NO: 34897892 NR Description: ESTs C28489(C61317),AU031689(R0560) correspond to region of the predicted gene.~Similar to Arabidopsis thaliana DNA
  misc_feature (1)..(253): Homolog of NCBI NO: 7406708 NR Description: putative ripening-related protein [Vitis vinifera]
MAAQPKPQNRPISNIVIVVAMQTEALPIVNRFQLTEDPDTPFPQGVPWVRYQGTYKDLNISLIWPGKDPTLGVDSVGTISSALVTYAAIQALQPDLIINAGTAGGFKAKGASIGDVFIVSDCAFHDRRIPIPVFDLYGVGLRKAFVAPNLVKELNLKVGKLSTGDSLDMTQQDESSIIANDATVKDMEGAAIAYVSDLLKVPAIFVKAVTDIIDGDKPTAEEFLQNLAAVTTALDLAVEQVINFINGKCESEL

SEQ ID NO: 55061 - protein, 233 aa, Glycine max
  peptide (1)..(233): Ceres Seq. ID no. 15176241
  misc_feature (1)..(215): Pfam Name: Phosphorylase family Pfam Description: Phosphorylase family
  misc_feature (46)..(204): Homolog of NCBI NO: 23037085 NR Description: hypothetical protein [Oenococcus oeni MCW]
  misc_feature (46)..(222): Homolog of NCBI NO: 15642376 NR Description: MTA/SAH nucleosidase [Vibrio cholerae]
  misc_feature (31)..(218): Homolog of NCBI NO: 23467396 NR Description: hypothetical protein [Haemophilus somnus 129PT]
  misc_feature (35)..(233): Homolog of NCBI NO: 7486865 NR Description: hypothetical protein T11I11.80 - Arabidopsis
  misc_feature (1)..(233): Homolog of NCBI NO: 30690140 NR Description: expressed protein [Arabidopsis thaliana]
  misc_feature (1)..(233): Homolog of NCBI NO: 15234791 NR Description: expressed protein [Arabidopsis thaliana]
  misc_feature (1)..(233): Homolog of NCBI NO: 18087497 NR Description: methylthioadenosine/S-adenosyl homocysteine
  misc_feature (1)..(233): Homolog of NCBI NO: 34897892 NR Description: ESTs C28489(C61317),AU031689(R0560) correspond to region of the predicted gene.~Similar to Arabidopsis thaliana DNA
  misc_feature (1)..(233): Homolog of NCBI NO: 7406708 NR Description: putative ripening-related protein [Vitis vinifera]
MQTEALPIVNRFQLTEDPDTPFPQGVPWVRYQGTYKDLNISLIWPGKDPTLGVDSVGTISSALVTYAAIQALQPDLIINAGTAGGFKAKGASIGDVFIVSDCAFHDRRIPIPVFDLYGVGLRKAFVAPNLVKELNLKVGKLSTGDSLDMTQQDESSIIANDATVKDMEGAAIAYVSDLLKVPAIFVKAVTDIIDGDKPTAEEFLQNLAAVTTALDLAVEQVINFINGKCESEL

SEQ ID NO: 55062 - DNA, 2254 bp, Glycine max
  misc_feature (1)..(2254): Ceres Seq. ID no. 15169439
gaagatgacgcgtcgataagtaaaaaaccctagaaaccacactgatatactcttagtgtcttacacacactgtggctttggcagcgcgactcgtcttcgttccttaccctcgggttgatctgtgagaggggcttgatagccctctctctctgctgctgcaattcagattgttggcaactattttttatacagacgatttgtcttcacatggaagcattgcttgcttgagggacgcctttgtctcaaaggagttggaattttcgggttttttgtgggattggagatttagagagtgcccttgcactccctgttttatttcatcaccatgattgccactgaaactatagtaccaagtacaaaattgaagatcaagttctcaaccaaaaggatagagattgattctgggccaaaatgtgagtttggacagaaagtgtatcacaatgataaaaacaggcgctgtaattctaatgaaaattcctcagcactgaattctaacaagaggggaccaccagtaagtgttgagggccaaaaggagaaaagacaaaagattgatcggaaagggtcgatgcagtgtgctacaatacttaagagtttaatgtctcactcatatagttgggtgtttcttaagccagtggaccctgtagcattgagtattccagattattttacaatcatatctcatccaatggatttgggcacaattaaatctaagctggagagaaacatttattctggcactgaggagtttgcagatgatgtcagactgaccttctcaaatgcaatgaaatataatcctcccggtaatgatgttcatatgatggcgaaggaactcagcaaaatatttgacagaaaatggaaagactttggtaggaaatggaagtttgaagatgagcatgataaaagcgaaactgaaacaattaaggaaactgggagaaaaagtcttgatgcaatgcttccccggcataaagattccttgcccaaaaaaacacaattattcgaacacataggaatgcacaagattagatcattggcaacaaaagatgccagagtggagacacctaaattatcacagattccttgcaagttgattgagaaagacttgcacaaaggcagcaaaggtaatcatgatgtggaacagccttctggctctctaaagtcatatttttcagtacgttttgtcacatccaagtgtagaatttgtggcaatatcatatgccattgtgaaaatcctagcaattcaacacaggtgtcatcagacatatcatccgaaggatctgaaggaagggacctaattgcacgtggtgccgattcattgagacaggattgccggactaaatgtacatcacctatggagaagaaatctgatcttgattctgatggagctgtaagttctttggacagtgaacatgtttgtcctagttctcagcatgtaactcctactactgatgcctcttctggggaagtatggagcatgcctgttttgcccgtccagctttctcctaaaaaggctcttcgtgctgctatacttaaaagccgctttgcagataccattttgaaagcacagcaaaagacccttcttgatcatggtgataaaggtaatcctcaaaaaatgcagcaggaaaaggagagattggaaaggattcagcgtgaagaaagagctaggatcgaagcccaaattaaaactgctgaagctgctgcaagaatgagggctgaggaagagtcaaggcagcggagagaaaaggaaagagaagcttcacgagctgcaatagaaaagatgaaaagaaccgttgatatagaacataatatggagattattaaagaacttgaaagtttgagtggatgcacgctatcttataaggccgttggcggtagaaatggctacaaagttgcattggagacattggataaacatcagtttgagaacccattggagcggcttggtttatttatcaaggaagacttcaccacagatcttgatgaggaggttttgaacggaggctttgaagaaggggaaatttttaactgaatgcaccttcatgcagttctgccagctctaagtgtttatatcccttttagacatggaaacagacaattattgtaaatgcacatattgtttggaatcaagtctttcgactatatctgccttaattaccctcttgtctgggaattagataactacacacgcttgcaattttgttttacaatattaaagtattccttccagcaaacatataaagaaagctcttacaggcga

SEQ ID NO: 55063 - protein, 566 aa, Glycine max
  peptide (1)..(566): Ceres Seq. ID no. 15169440
  misc_feature (389)..(564): Homolog of NCBI NO: 6016737 NR Description: hypothetical protein [Arabidopsis thaliana]
  misc_feature (48)..(183): Homolog of NCBI NO: 9294219 NR Description: gb|AAF01563.1~gene_id:K17E12.8~similar to unknown
  misc_feature (350)..(553): Homolog of NCBI NO: 9294219 NR Description: gb|AAF01563.1~gene_id:K17E12.8~similar to unknown
  misc_feature (48)..(183): Homolog of NCBI NO: 15232127 NR Description: DNA-binding protein family [Arabidopsis thaliana]
  misc_feature (350)..(553): Homolog of NCBI NO: 15232127 NR Description: DNA-binding protein family [Arabidopsis thaliana]
  misc_feature (82)..(564): Homolog of NCBI NO: 18395937 NR Description: DNA-binding protein family [Arabidopsis thaliana]
  misc_feature (50)..(183): Homolog of NCBI NO: 30694987 NR Description: DNA-binding protein family [Arabidopsis thaliana]
  misc_feature (292)..(512): Homolog of NCBI NO: 30694987 NR Description: DNA-binding protein family [Arabidopsis thaliana]
  misc_feature (1)..(183): Homolog of NCBI NO: 8885596 NR Description: contains similarity to kinase~gene_id:F10E10.2
  misc_feature (292)..(512): Homolog of NCBI NO: 8885596 NR Description: contains similarity to kinase~gene_id:F10E10.2
MIATETIVPSTKLKIKFSTKRIEIDSGPKCEFGQKVYHNDKNRRCNSNENSSALNSNKRGPPVSVEGQKEKRQKIDRKGSMQCATILKSLMSHSYSWVFLKPVDPVALSIPDYFTIISHPMDLGTIKSKLERNIYSGTEEFADDVRLTFSNAMKYNPPGNDVHMMAKELSKIFDRKWKDFGRKWKFEDEHDKSETETIKETGRKSLDAMLPRHKDSLPKKTQLFEHIGMHKIRSLATKDARVETPKLSQIPCKLIEKDLHKGSKGNHDVEQPSGSLKSYFSVRFVTSKCRICGNIICHCENPSNSTQVSSDISSEGSEGRDLIARGADSLRQDCRTKCTSPMEKKSDLDSDGAVSSLDSEHVCPSSQHVTPTTDASSGEVWSMPVLPVQLSPKKALRAAILKSRFADTILKAQQKTLLDHGDKGNPQKMQQEKERLERIQREERARIEAQIKTAEAAARMRAEEESRQRREKEREASRAAIEKMKRTVDIEHNMEIIKELESLSGCTLSYKAVGGRNGYKVALETLDKHQFENPLERLGLFIKEDFTTDLDEEVLNGGFEEGEIFN

SEQ ID NO: 55064 - protein, 486 aa, Glycine max
  peptide (1)..(486): Ceres Seq. ID no. 15169441
  misc_feature (309)..(484): Homolog of NCBI NO: 6016737 NR Description: hypothetical protein [Arabidopsis thaliana]
  misc_feature (1)..(103): Homolog of NCBI NO: 9294219 NR Description: gb|AAF01563.1~gene_id:K17E12.8~similar to unknown
  misc_feature (270)..(473): Homolog of NCBI NO: 9294219 NR Description: gb|AAF01563.1~gene_id:K17E12.8~similar to unknown
  misc_feature (1)..(103): Homolog of NCBI NO: 15232127 NR Description: DNA-binding protein family [Arabidopsis thaliana]
  misc_feature (270)..(473): Homolog of NCBI NO: 15232127 NR Description: DNA-binding protein family [Arabidopsis thaliana]
  misc_feature (2)..(484): Homolog of NCBI NO: 18395937 NR Description: DNA-binding protein family [Arabidopsis thaliana]
  misc_feature (1)..(103): Homolog of NCBI NO: 30694987 NR Description: DNA-binding protein family [Arabidopsis thaliana]
  misc_feature (212)..(432): Homolog of NCBI NO: 30694987 NR Description: DNA-binding protein family [Arabidopsis thaliana]
  misc_feature (1)..(103): Homolog of NCBI NO: 8885596 NR Description: contains similarity to kinase~gene_id:F10E10.2
  misc_feature (212)..(432): Homolog of NCBI NO: 8885596 NR Description: contains similarity to kinase~gene_id:F10E10.2
MQCATILKSLMSHSYSWVFLKPVDPVALSIPDYFTIISHPMDLGTIKSKLERNIYSGTEEFADDVRLTFSNAMKYNPPGNDVHMMAKELSKIFDRKWKDFGRKWKFEDEHDKSETETIKETGRKSLDAMLPRHKDSLPKKTQLFEHIGMHKIRSLATKDARVETPKLSQIPCKLIEKDLHKGSKGNHDVEQPSGSLKSYFSVRFVTSKCRICGNIICHCENPSNSTQVSSDISSEGSEGRDLIARGADSLRQDCRTKCTSPMEKKSDLDSDGAVSSLDSEHVCPSSQHVTPTTDASSGEVWSMPVLPVQLSPKKALRAAILKSRFADTILKAQQKTLLDHGDKGNPQKMQQEKERLERIQREERARIEAQIKTAEAAARMRAEEESRQRREKEREASRAAIEKMKRTVDIEHNMEIIKELESLSGCTLSYKAVGGRNGYKVALETLDKHQFENPLERLGLFIKEDFTTDLDEEVLNGGFEEGEIFN

SEQ ID NO: 55065 - protein, 476 aa, Glycine max
  peptide (1)..(476): Ceres Seq. ID no. 15169442
  misc_feature (299)..(474): Homolog of NCBI NO: 6016737 NR Description: hypothetical protein [Arabidopsis thaliana]
  misc_feature (1)..(93): Homolog of NCBI NO: 9294219 NR Description: gb|AAF01563.1~gene_id:K17E12.8~similar to unknown
  misc_feature (260)..(463): Homolog of NCBI NO: 9294219 NR Description: gb|AAF01563.1~gene_id:K17E12.8~similar to unknown
  misc_feature (1)..(93): Homolog of NCBI NO: 15232127 NR Description: DNA-binding protein family [Arabidopsis thaliana]
  misc_feature (260)..(463): Homolog of NCBI NO: 15232127 NR Description: DNA-binding protein family [Arabidopsis thaliana]
  misc_feature (1)..(474): Homolog of NCBI NO: 18395937 NR Description: DNA-binding protein family [Arabidopsis thaliana]
  misc_feature (1)..(93): Homolog of NCBI NO: 30694987 NR Description: DNA-binding protein family [Arabidopsis thaliana]
  misc_feature (202)..(422): Homolog of NCBI NO: 30694987 NR Description: DNA-binding protein family [Arabidopsis thaliana]
  misc_feature (1)..(93): Homolog of NCBI NO: 8885596 NR Description: contains similarity to kinase~gene_id:F10E10.2
  misc_feature (202)..(422): Homolog of NCBI NO: 8885596 NR Description: contains similarity to kinase~gene_id:F10E10.2
MSHSYSWVFLKPVDPVALSIPDYFTIISHPMDLGTIKSKLERNIYSGTEEFADDVRLTFSNAMKYNPPGNDVHMMAKELSKIFDRKWKDFGRKWKFEDEHDKSETETIKETGRKSLDAMLPRHKDSLPKKTQLFEHIGMHKIRSLATKDARVETPKLSQIPCKLIEKDLHKGSKGNHDVEQPSGSLKSYFSVRFVTSKCRICGNIICHCENPSNSTQVSSDISSEGSEGRDLIARGADSLRQDCRTKCTSPMEKKSDLDSDGAVSSLDSEHVCPSSQHVTPTTDASSGEVWSMPVLPVQLSPKKALRAAILKSRFADTILKAQQKTLLDHGDKGNPQKMQQEKERLERIQREERARIEAQIKTAEAAARMRAEEESRQRREKEREASRAAIEKMKRTVDIEHNMEIIKELESLSGCTLSYKAVGGRNGYKVALETLDKHQFENPLERLGLFIKEDFTTDLDEEVLNGGFEEGEIFN

SEQ ID NO: 55066 - DNA, 1151 bp, Glycine max
  misc_feature (1)..(1151): Ceres Seq. ID no. 14310498
aattctgagaaaaactccaacgaacttcgcatttccacgaaaatggcttcccaaaacccagcggaggaagaaaattcaaagcgacattggtcccttgaagacttcgagatcggaaaacctctcggtaggggcaaattcggtagagtttacgtcgccagagaagttaagagcaaatttgttgtggcgttgaaggttatatttaaggaacaaattgataagtacagagttcatcaccaactgaggagagagatggagatacagaccagtctccggcacgcaaacatcctgcgtctttacggttggtttcatgatgctgaccgtgttttcttgattcttgagtatgctcataagggagagctttacaaggagctgagaaaaaagggtcatctcactgagaagcaagctgccacgtatattttgagcctcacaaaggcgttggcatattgtcatgagaaacatgttattcatagggatatcaagccagaaaatttgttgcttgaccatgaggggcgtcttaaaattgcagactttggttggtctgttcagtctagaagcaaaagacataccatgtgtggaacattggattatttagcaccagaaatggttgaaaacaaagctcatgactatgcagttgacaactggactttgggtatcctttgttatgagttcctctatggtgctcctccatttgaggctgagagtcaatctgataccttcaaaaggataatgaaggttgatctaagcttcccttccaccccttctgtctctatagaggcgaaaaatctgattagtcggctcctggtgaaagactcctcacgaaggctctctcttcagaagataatggagcatccttggataatcaagaatgcagattttgtgggtatttgctagtagcatcaactcactaatttaactttggccacgagggattaagactgaattctgtatatgatgttataaaatgcatgtaagtgttttgcagtgttcaagtgtttaatcaacttgaatgacacattacctttgctgcgaggttaggaacattaggatggtatatctgcctatttgtaatagttgtattgtaggtgtaatttcttccagttctttgtgcatctaaaccaggcatgactaatgacttgcacagatttattttg

SEQ ID NO: 55067 - protein, 296 aa, Glycine max
  peptide (1)..(296): Ceres Seq. ID no. 14310499
  misc_feature (35)..(286): Pfam Name: Protein kinase domain Pfam Description: Protein kinase domain
  misc_feature (14)..(296): Homolog of NCBI NO: 27923855 NR Description: Serine/threonine kinase 6 (Serine/threonine
  misc_feature (22)..(290): Homolog of NCBI NO: 27923860 NR Description: Serine/threonine protein kinase Eg2 (pEg2)
  misc_feature (22)..(290): Homolog of NCBI NO: 27923859 NR Description: Serine/threonine protein kinase Eg2-like
  misc_feature (22)..(290): Homolog of NCBI NO: 1079309 NR Description: protein kinase (EC 2.7.1.-) p46XlEg22 - African
  misc_feature (15)..(295): Homolog of NCBI NO: 34906424 NR Description: putative protein kinase [Oryza sativa (japonica
  misc_feature (21)..(295): Homolog of NCBI NO: 15225210 NR Description: serine/threonine protein kinase, putative
  misc_feature (8)..(295): Homolog of NCBI NO: 21592557 NR Description: putative serine/threonine protein kinase
  misc_feature (8)..(295): Homolog of NCBI NO: 15233958 NR Description: protein kinase, putative [Arabidopsis thaliana]
  misc_feature (27)..(296): Homolog of NCBI NO: 31415939 NR Description: putative aurora-related kinase
  misc_feature (25)..(296): Homolog of NCBI NO: 15225495 NR Description: protein kinase, putative [Arabidopsis thaliana]
NSEKNSNELRISTKMASQNPAEEENSKRHWSLEDFEIGKPLGRGKFGRVYVAREVKSKFVVALKVIFKEQIDKYRVHHQLRREMEIQTSLRHANILRLYGWFHDADRVFLILEYAHKGELYKELRKKGHLTEKQAATYILSLTKALAYCHEKHVIHRDIKPENLLLDHEGRLKIADFGWSVQSRSKRHTMCGTLDYLAPEMVENKAHDYAVDNWTLGILCYEFLYGAPPFEAESQSDTFKRIMKVDLSFPSTPSVSIEAKNLISRLLVKDSSRRLSLQKIMEHPWIIKNADFVGIC

SEQ ID NO: 55068 - protein, 282 aa, Glycine max
  peptide (1)..(282): Ceres Seq. ID no. 14310500
  misc_feature (21)..(272): Pfam Name: Protein kinase domain Pfam Description: Protein kinase domain
  misc_feature (1)..(282): Homolog of NCBI NO: 27923855 NR Description: Serine/threonine kinase 6 (Serine/threonine
  misc_feature (8)..(276): Homolog of NCBI NO: 27923860 NR Description: Serine/threonine protein kinase Eg2 (pEg2)
  misc_feature (8)..(276): Homolog of NCBI NO: 27923859 NR Description: Serine/threonine protein kinase Eg2-like
  misc_feature (8)..(276): Homolog of NCBI NO: 1079309 NR Description: protein kinase (EC 2.7.1.-) p46XlEg22 - African
  misc_feature (1)..(281): Homolog of NCBI NO: 34906424 NR Description: putative protein kinase [Oryza sativa (japonica
  misc_feature (7)..(281): Homolog of NCBI NO: 15225210 NR Description: serine/threonine protein kinase, putative
  misc_feature (1)..(281): Homolog of NCBI NO: 21592557 NR Description: putative serine/threonine protein kinase
  misc_feature (1)..(281): Homolog of NCBI NO: 15233958 NR Description: protein kinase, putative [Arabidopsis thaliana]
  misc_feature (13)..(282): Homolog of NCBI NO: 31415939 NR Description: putative aurora-related kinase
  misc_feature (11)..(282): Homolog of NCBI NO: 15225495 NR Description: protein kinase, putative [Arabidopsis thaliana]
MASQNPAEEENSKRHWSLEDFEIGKPLGRGKFGRVYVAREVKSKFVVALKVIFKEQIDKYRVHHQLRREMEIQTSLRHANILRLYGWFHDADRVFLILEYAHKGELYKELRKKGHLTEKQAATYILSLTKALAYCHEKHVIHRDIKPENLLLDHEGRLKIADFGWSVQSRSKRHTMCGTLDYLAPEMVENKAHDYAVDNWTLGILCYEFLYGAPPFEAESQSDTFKRIMKVDLSFPSTPSVSIEAKNLISRLLVKDSSRRLSLQKIMEHPWIIKNADFVGIC

SEQ ID NO: 55069 - protein, 213 aa, Glycine max
  peptide (1)..(213): Ceres Seq. ID no. 14310501
  misc_feature (1)..(203): Pfam Name: Protein kinase domain Pfam Description: Protein kinase domain
  misc_feature (1)..(213): Homolog of NCBI NO: 27923855 NR Description: Serine/threonine kinase 6 (Serine/threonine
  misc_feature (1)..(207): Homolog of NCBI NO: 27923860 NR Description: Serine/threonine protein kinase Eg2 (pEg2)
  misc_feature (1)..(207): Homolog of NCBI NO: 27923859 NR Description: Serine/threonine protein kinase Eg2-like
  misc_feature (1)..(207): Homolog of NCBI NO: 1079309 NR Description: protein kinase (EC 2.7.1.-) p46XlEg22 - African
  misc_feature (1)..(212): Homolog of NCBI NO: 34906424 NR Description: putative protein kinase [Oryza sativa (japonica
  misc_feature (1)..(212): Homolog of NCBI NO: 15225210 NR Description: serine/threonine protein kinase, putative
  misc_feature (1)..(212): Homolog of NCBI NO: 21592557 NR Description: putative serine/threonine protein kinase
  misc_feature (1)..(212): Homolog of NCBI NO: 15233958 NR Description: protein kinase, putative [Arabidopsis thaliana]
  misc_feature (1)..(213): Homolog of NCBI NO: 31415939 NR Description: putative aurora-related kinase
  misc_feature (1)..(213): Homolog of NCBI NO: 15225495 NR Description: protein kinase, putative [Arabidopsis thaliana]
MEIQTSLRHANILRLYGWFHDADRVFLILEYAHKGELYKELRKKGHLTEKQAATYILSLTKALAYCHEKHVIHRDIKPENLLLDHEGRLKIADFGWSVQSRSKRHTMCGTLDYLAPEMVENKAHDYAVDNWTLGILCYEFLYGAPPFEAESQSDTFKRIMKVDLSFPSTPSVSIEAKNLISRLLVKDSSRRLSLQKIMEHPWIIKNADFVGIC

SEQ ID NO: 55070 - DNA, 1353 bp, Glycine max
  misc_feature (1)..(1353): Ceres Seq. ID no. 14312391
aaggtctggacagtggcgtggaaggcgaatcagccactggcactgaacaattaaccattaacaagaacaagaacatttcaagggaggacatagtaatggacatggttctgcattcagccttgtacccaccatctctgtcttgttcctcttctactactggaacaagatggcccaattcccgggttggtgttagtttgagttggaggagcttgtccttggtgccttgtgcactgaaggcatattatgattctgaattggagaataaaaagcatctacttctgacctctgtccaagacacgcaaaggggcctcttaacaactcctgatcaacgctcttgtatcgaggaggctctggtgagtctcgaaggatgcaacattggctctcaccctatcaatctctccaacttggatggaacatggcgcctccagtacacttctgcctctgatgttctcattcttctccaagctgctgctactcttcctttctttcaagttggacagatctttcaaaaatttgaatgtcgtgatcaatctaatggaggtgttatccgcaatgttgttcgatggagcattccaaatttgttagaggaacaagaaggtgctacactgcttgtatccgccaagtttaatgtagtatctgtccgtaatatctaccttcagtttcaagagatcacaatccaagatataaatattagtgaagagctgcaggctctaatagctccagcaatactaccaagatcttttataagtcttcagattttgcaatttctccgcactttcaaagcttaaatccctgtgagggatccaggaaggcaatcagttggaggactatattaccttagctatttggatgataatatgcttttgggtcgtgctgttggtggaggaggggtatttgtgtttacgagagcccaatctctctactgatgagcaccgagcaggagttaaaacttgtgtttgccagcaataacactcaatgagcctctgtttatagaagtgaccccatggagagagcaagaaattgattcaaagcatatagcgcataaggaattctgcaaagcttattgaagaaggctattatgtgcagttgtcgtgttgactttagtcgaactgcttttttgtttatgtatgtatatttgcattgtttgtatcaatttggttatatattggcaaagtacgaagatggtgagtgttcaatgtaagtgatacaactcgtgggaaaatgataaggagcccagtcctcgctatgtgcagtgtaggcatcttataattatgttatgttgcataggatagatagtattatgtctcttgttagttttcttatctagttagtttaatctgtgatttttaactt

SEQ ID NO: 55071 - protein, 261 aa, Glycine max
  peptide (1)..(261): Ceres Seq. ID no. 14312392
  misc_feature (86)..(261): Pfam Name: PAP_fibrillin Pfam Description: PAP_fibrillin
  misc_feature (89)..(225): Homolog of NCBI NO: 23126201 NR Description: hypothetical protein [Nostoc punctiforme]
  misc_feature (88)..(221): Homolog of NCBI NO: 17231810 NR Description: fibrillin [Nostoc sp. PCC 7120]
  misc_feature (203)..(261): Homolog of NCBI NO: 37535940 NR Description: unknown protein [Oryza sativa (japonica
  misc_feature (84)..(261): Homolog of NCBI NO: 21553852 NR Description: unknown [Arabidopsis thaliana]
  misc_feature (84)..(261): Homolog of NCBI NO: 18407205 NR Description: plastid-lipid associated protein PAP/fibrillin
GLDSGVEGESATGTEQLTINKNKNISREDIVMDMVLHSALYPPSLSCSSSTTGTRWPNSRVGVSLSWRSLSLVPCALKAYYDSELENKKHLLLTSVQDTQRGLLTTPDQRSCIEEALVSLEGCNIGSHPINLSNLDGTWRLQYTSASDVLILLQAAATLPFFQVGQIFQKFECRDQSNGGVIRNVVRWSIPNLLEEQEGATLLVSAKFNVVSVRNIYLQFQEITIQDINISEELQALIAPAILPRSFISLQILQFLRTFKA

SEQ ID NO: 55072 - protein, 230 aa, Glycine max
  peptide (1)..(230): Ceres Seq. ID no. 14312393
  misc_feature (55)..(230): Pfam Name: PAP_fibrillin Pfam Description: PAP_fibrillin
  misc_feature (58)..(194): Homolog of NCBI NO: 23126201 NR Description: hypothetical protein [Nostoc punctiforme]
  misc_feature (57)..(190): Homolog of NCBI NO: 17231810 NR Description: fibrillin [Nostoc sp. PCC 7120]
  misc_feature (172)..(230): Homolog of NCBI NO: 37535940 NR Description: unknown protein [Oryza sativa (japonica
  misc_feature (53)..(230): Homolog of NCBI NO: 21553852 NR Description: unknown [Arabidopsis thaliana]
  misc_feature (53)..(230): Homolog of NCBI NO: 18407205 NR Description: plastid-lipid associated protein PAP/fibrillin
MDMVLHSALYPPSLSCSSSTTGTRWPNSRVGVSLSWRSLSLVPCALKAYYDSELENKKHLLLTSVQDTQRGLLTTPDQRSCIEEALVSLEGCNIGSHPINLSNLDGTWRLQYTSASDVLILLQAAATLPFFQVGQIFQKFECRDQSNGGVIRNVVRWSIPNLLEEQEGATLLVSAKFNVVSVRNIYLQFQEITIQDINISEELQALIAPAILPRSFISLQILQFLRTFKA

SEQ ID NO: 55073 - protein, 228 aa, Glycine max
  peptide (1)..(228): Ceres Seq. ID no. 14312394
  misc_feature (53)..(228): Pfam Name: PAP_fibrillin Pfam Description: PAP_fibrillin
  misc_feature (56)..(192): Homolog of NCBI NO: 23126201 NR Description: hypothetical protein [Nostoc punctiforme]
  misc_feature (55)..(188): Homolog of NCBI NO: 17231810 NR Description: fibrillin [Nostoc sp. PCC 7120]
  misc_feature (170)..(228): Homolog of NCBI NO: 37535940 NR Description: unknown protein [Oryza sativa (japonica
  misc_feature (51)..(228): Homolog of NCBI NO: 21553852 NR Description: unknown [Arabidopsis thaliana]
  misc_feature (51)..(228): Homolog of NCBI NO: 18407205 NR Description: plastid-lipid associated protein PAP/fibrillin
MVLHSALYPPSLSCSSSTTGTRWPNSRVGVSLSWRSLSLVPCALKAYYDSELENKKHLLLTSVQDTQRGLLTTPDQRSCIEEALVSLEGCNIGSHPINLSNLDGTWRLQYTSASDVLILLQAAATLPFFQVGQIFQKFECRDQSNGGVIRNVVRWSIPNLLEEQEGATLLVSAKFNVVSVRNIYLQFQEITIQDINISEELQALIAPAILPRSFISLQILQFLRTFKA

SEQ ID NO: 55074 - DNA, 580 bp, Glycine max
  misc_feature (1)..(580): Ceres Seq. ID no. 15169825
aacattctttccatattaactagttaacatcatggctcatggcttgagttatattttacttttcaactaacatgttaatgttcttgaagatgtttgttatactttgtttgatgcaggatgtgatggatgacccttgtgttgctgctgatggatatacatatgatcgcaaagcaattgaaaagtggcttgaagagaacgacaaatcaccaatgacgaacatggctttacctcataagcatttaattcctaattacacactgctctcagcaattttggagtggaagtccagagaatcgtgatatcagcattatctttctccatgttaatattgagaccaatgatttctctgatgtagagagtggctagaaagtttggtgggtatgacctttagcagtgtcttggatgcagatttttttcgtagttgtaccattccaagcatgctgtctggttaatttaggtagagcgatttcaagtgtagataaatttgattctattgtctgattctgtgtatacatacatatgtcaaatcttgttcttactataaataaaataagaaccatgtatacattcaaggctagct

SEQ ID NO: 55075 - protein, 75 aa, Glycine max
  peptide (1)..(75): Ceres Seq. ID no. 15169826
  misc_feature (11)..(74): Pfam Name: U-box domain Pfam Description: U-box domain
  misc_feature (1)..(70): Homolog of NCBI NO: 7488259 NR Description: protein kinase homolog F4I18.11 - Arabidopsis
  misc_feature (13)..(73): Homolog of NCBI NO: 15224775 NR Description: protein kinase family [Arabidopsis thaliana]
  misc_feature (13)..(73): Homolog of NCBI NO: 22327904 NR Description: protein kinase family [Arabidopsis thaliana]
  misc_feature (11)..(72): Homolog of NCBI NO: 37536860 NR Description: putative protein kinase [Oryza sativa (japonica
  misc_feature (13)..(73): Homolog of NCBI NO: 30697549 NR Description: protein kinase family [Arabidopsis thaliana]
  misc_feature (13)..(73): Homolog of NCBI NO: 9758471 NR Description: contains similarity to receptor-like protein
  misc_feature (13)..(73): Homolog of NCBI NO: 15241414 NR Description: protein kinase family [Arabidopsis thaliana]
  misc_feature (11)..(72): Homolog of NCBI NO: 15234952 NR Description: protein kinase family [Arabidopsis thaliana]
  misc_feature (11)..(74): Homolog of NCBI NO: 15240280 NR Description: protein kinase family [Arabidopsis thaliana]
  misc_feature (11)..(73): Homolog of NCBI NO: 29367517 NR Description: putative serine/threonine protein kinase
MLMFLKMFVILCLMQDVMDDPCVAADGYTYDRKAIEKWLEENDKSPMTNMALPHKHLIPNYTLLSAILEWKSRES

SEQ ID NO: 55076 - protein, 73 aa, Glycine max
  peptide (1)..(73): Ceres Seq. ID no. 15169827
  misc_feature (9)..(72): Pfam Name: U-box domain Pfam Description: U-box domain
  misc_feature (1)..(68): Homolog of NCBI NO: 7488259 NR Description: protein kinase homolog F4I18.11 - Arabidopsis
  misc_feature (11)..(71): Homolog of NCBI NO: 15224775 NR Description: protein kinase family [Arabidopsis thaliana]
  misc_feature (11)..(71): Homolog of NCBI NO: 22327904 NR Description: protein kinase family [Arabidopsis thaliana]
  misc_feature (9)..(70): Homolog of NCBI NO: 37536860 NR Description: putative protein kinase [Oryza sativa (japonica
  misc_feature (11)..(71): Homolog of NCBI NO: 30697549 NR Description: protein kinase family [Arabidopsis thaliana]
  misc_feature (11)..(71): Homolog of NCBI NO: 9758471 NR Description: contains similarity to receptor-like protein
  misc_feature (11)..(71): Homolog of NCBI NO: 15241414 NR Description: protein kinase family [Arabidopsis thaliana]
  misc_feature (9)..(70): Homolog of NCBI NO: 15234952 NR Description: protein kinase family [Arabidopsis thaliana]
  misc_feature (9)..(72): Homolog of NCBI NO: 15240280 NR Description: protein kinase family [Arabidopsis thaliana]
  misc_feature (9)..(71): Homolog of NCBI NO: 29367517 NR Description: putative serine/threonine protein kinase
MFLKMFVILCLMQDVMDDPCVAADGYTYDRKAIEKWLEENDKSPMTNMALPHKHLIPNYTLLSAILEWKSRES

SEQ ID NO: 55077 - protein, 69 aa, Glycine max
  peptide (1)..(69): Ceres Seq. ID no. 15169828
  misc_feature (5)..(68): Pfam Name: U-box domain Pfam Description: U-box domain
  misc_feature (1)..(64): Homolog of NCBI NO: 7488259 NR Description: protein kinase homolog F4I18.11 - Arabidopsis
  misc_feature (7)..(67): Homolog of NCBI NO: 15224775 NR Description: protein kinase family [Arabidopsis thaliana]
  misc_feature (7)..(67): Homolog of NCBI NO: 22327904 NR Description: protein kinase family [Arabidopsis thaliana]
  misc_feature (5)..(66): Homolog of NCBI NO: 37536860 NR Description: putative protein kinase [Oryza sativa (japonica
  misc_feature (7)..(67): Homolog of NCBI NO: 30697549 NR Description: protein kinase family [Arabidopsis thaliana]
  misc_feature (7)..(67): Homolog of NCBI NO: 9758471 NR Description: contains similarity to receptor-like protein
  misc_feature (7)..(67): Homolog of NCBI NO: 15241414 NR Description: protein kinase family [Arabidopsis thaliana]
  misc_feature (5)..(66): Homolog of NCBI NO: 15234952 NR Description: protein kinase family [Arabidopsis thaliana]
  misc_feature (5)..(68): Homolog of NCBI NO: 15240280 NR Description: protein kinase family [Arabidopsis thaliana]
  misc_feature (5)..(67): Homolog of NCBI NO: 29367517 NR Description: putative serine/threonine protein kinase
MFVILCLMQDVMDDPCVAADGYTYDRKAIEKWLEENDKSPMTNMALPHKHLIPNYTLLSAILEWKSRES

SEQ ID NO: 55078 - DNA, 1255 bp, Glycine max
  misc_feature (1)..(1255): Ceres Seq. ID no. 12581768
cagctacgtaggcccccccccccgaatatcagagcattagtaaatctaattaatataagttcaagcaaaccacatatgaccgaaaagaagcctgttcatattctaataagctcaacattagctacaattgttgttactgctttaaccaaccctctcgatgtgttgaaggtgagaattcaaaataacgataagaattgcagcactatcaaccacactcattgcgtgactcgatcaagttctcactctgctcccaattccttacgacaagcttccttatatcgtcttgtaatgacaccgaaccttcaagaacattatcaagtcttgtgtgattgcctcccctttagatcaaacgcaaaagcccttgtttacttgactcgtaaagagggatacagagtacttaccaacggattggctcaaggtttgatgggttctgtactgagcaccgtaacttacttttactgctacgaggctgcaagaaagcgtgtgaagcaatatacttcacacaatattggtcttccattgttgacagctctgacagccagaaccatcacgacatgtatcgctttcccatttgaatattggaagaccttgcaacaaagttcggttggtgtgagtggaaagtcttcaatgaaactcggaacaaaaataaatgcaggattcggtactttgctcggaagagacttgatgttttctgggctttattgggtgttggtggaaaatatcagaagacatgtgaagagctggagccaacaaaatgaagagggatatcaagataaaggaagtctattgctttctaatgtgattgccggtggtttggcaggaggaatatcagcatccgtgacattacccttggatgtggtaaaaacaagaaaacaattgaatccaaaagaatataagaagaaatccacaattcgaattctcaaggatatctattataatgaaggaaaggatgctttgacagcaggtatgagacaaagagtgaccaaggttactatggcatgtgcaggcatcttgacattatatgagctcttctctgacatgttgagagaagacaatgtttactgagtggagtagttaggtttgcttgattgattttttaaattaaatattttggctgatttcgtacatttttattgtaattttagctagtgctcttcctttcgaataatgtctttttatctctttgtttatttatctatccctgtataaagataattaaatatcgtattgtataaccatatcatgaaaattattg

SEQ ID NO: 55079 - protein, 354 aa, Glycine max
  peptide (1)..(354): Ceres Seq. ID no. 12581769
  misc_feature (36)..(200): Homolog of NCBI NO: 40253478 NR Description: putative mitochondrial carrier protein
  misc_feature (35)..(353): Homolog of NCBI NO: 7770165 NR Description: PRO2163 [Homo sapiens]
  misc_feature (31)..(353): Homolog of NCBI NO: 20137934 NR Description: Mitochondrial carrier protein CGI-69 (PRO2163)
  misc_feature (114)..(353): Homolog of NCBI NO: 30520231 NR Description: RIKEN cDNA B230315F11 gene [Mus musculus]
  misc_feature (114)..(353): Homolog of NCBI NO: 26337655 NR Description: unnamed protein product [Mus musculus]
  misc_feature (31)..(342): Homolog of NCBI NO: 13386046 NR Description: RIKEN cDNA 3010027G13 [Mus musculus]
  misc_feature (31)..(353): Homolog of NCBI NO: 11359936 NR Description: hypothetical protein DKFZp434C119.1 - human
  misc_feature (31)..(353): Homolog of NCBI NO: 7706306 NR Description: CGI-69 protein [Homo sapiens]
  misc_feature (120)..(353): Homolog of NCBI NO: 34854043 NR Description: similar to mitochondrial carrier family protein
  misc_feature (31)..(354): Homolog of NCBI NO: 32766523 NR Description: Unknown (protein for MGC:63736) [Danio rerio]
QLRRPPPPNIRALVNLINISSSKPHMTEKKPVHILISSTLATIVVTALTNPLDVLKVRIQNNDKNCSTINHTHCVTRSSSHSAPNSLRQASLYRLVMTPNLQEHYQVLCDCLPFRSNAKALVYLTRKEGYRVLTNGLAQGLMGSVLSTVTYFYCYEAARKRVKQYTSHNIGLPLLTALTARTITTCIAFPFEYWKTLQQSSVGVSGKSSMKLGTKINAGFGTLLGRDLMFSGLYWVLVENIRRHVKSWSQQNEEGYQDKGSLLLSNVIAGGLAGGISASVTLPLDVVKTRKQLNPKEYKKKSTIRILKDIYYNEGKDALTAGMRQRVTKVTMACAGILTLYELFSDMLREDNVY

SEQ ID NO: 55080 - protein, 329 aa, Glycine max
  peptide (1)..(329): Ceres Seq. ID no. 12581770
  misc_feature (11)..(175): Homolog of NCBI NO: 40253478 NR Description: putative mitochondrial carrier protein
  misc_feature (10)..(328): Homolog of NCBI NO: 7770165 NR Description: PRO2163 [Homo sapiens]
  misc_feature (6)..(328): Homolog of NCBI NO: 20137934 NR Description: Mitochondrial carrier protein CGI-69 (PRO2163)
  misc_feature (89)..(328): Homolog of NCBI NO: 30520231 NR Description: RIKEN cDNA B230315F11 gene [Mus musculus]
  misc_feature (89)..(328): Homolog of NCBI NO: 26337655 NR Description: unnamed protein product [Mus musculus]
  misc_feature (6)..(317): Homolog of NCBI NO: 13386046 NR Description: RIKEN cDNA 3010027G13 [Mus musculus]
  misc_feature (6)..(328): Homolog of NCBI NO: 11359936 NR Description: hypothetical protein DKFZp434C119.1 - human
  misc_feature (6)..(328): Homolog of NCBI NO: 7706306 NR Description: CGI-69 protein [Homo sapiens]
  misc_feature (95)..(328): Homolog of NCBI NO: 34854043 NR Description: similar to mitochondrial carrier family protein
  misc_feature (6)..(329): Homolog of NCBI NO: 32766523 NR Description: Unknown (protein for MGC:63736) [Danio rerio]
MTEKKPVHILISSTLATIVVTALTNPLDVLKVRIQNNDKNCSTINHTHCVTRSSSHSAPNSLRQASLYRLVMTPNLQEHYQVLCDCLPFRSNAKALVYLTRKEGYRVLTNGLAQGLMGSVLSTVTYFYCYEAARKRVKQYTSHNIGLPLLTALTARTITTCIAFPFEYWKTLQQSSVGVSGKSSMKLGTKINAGFGTLLGRDLMFSGLYWVLVENIRRHVKSWSQQNEEGYQDKGSLLLSNVIAGGLAGGISASVTLPLDVVKTRKQLNPKEYKKKSTIRILKDIYYNEGKDALTAGMRQRVTKVTMACAGILTLYELFSDMLREDNVY

SEQ ID NO: 55081 - protein, 258 aa, Glycine max
  peptide (1)..(258): Ceres Seq. ID no. 12581771
  misc_feature (1)..(104): Homolog of NCBI NO: 40253478 NR Description: putative mitochondrial carrier protein
  misc_feature (1)..(257): Homolog of NCBI NO: 7770165 NR Description: PRO2163 [Homo sapiens]
  misc_feature (1)..(257): Homolog of NCBI NO: 20137934 NR Description: Mitochondrial carrier protein CGI-69 (PRO2163)
  misc_feature (18)..(257): Homolog of NCBI NO: 30520231 NR Description: RIKEN cDNA B230315F11 gene [Mus musculus]
  misc_feature (18)..(257): Homolog of NCBI NO: 26337655 NR Description: unnamed protein product [Mus musculus]
  misc_feature (1)..(246): Homolog of NCBI NO: 13386046 NR Description: RIKEN cDNA 3010027G13 [Mus musculus]
  misc_feature (1)..(257): Homolog of NCBI NO: 11359936 NR Description: hypothetical protein DKFZp434C119.1 - human
  misc_feature (1)..(257): Homolog of NCBI NO: 7706306 NR Description: CGI-69 protein [Homo sapiens]
  misc_feature (24)..(257): Homolog of NCBI NO: 34854043 NR Description: similar to mitochondrial carrier family protein
  misc_feature (1)..(258): Homolog of NCBI NO: 32766523 NR Description: Unknown (protein for MGC:63736) [Danio rerio]
MTPNLQEHYQVLCDCLPFRSNAKALVYLTRKEGYRVLTNGLAQGLMGSVLSTVTYFYCYEAARKRVKQYTSHNIGLPLLTALTARTITTCIAFPFEYWKTLQQSSVGVSGKSSMKLGTKINAGFGTLLGRDLMFSGLYWVLVENIRRHVKSWSQQNEEGYQDKGSLLLSNVIAGGLAGGISASVTLPLDVVKTRKQLNPKEYKKKSTIRILKDIYYNEGKDALTAGMRQRVTKVTMACAGILTLYELFSDMLREDNVY

SEQ ID NO: 55082 - DNA, 1295 bp, Glycine max
  misc_feature (1)..(1295): Ceres Seq. ID no. 14308401
atgtgtggcaggctccttccactgcgcaccatttggtggcatgatatagataacagctagtaattaggaagttggcgttacaagaacaagaacaaaaccccactcactcaatgcacataataatacaataatttcttagggagtgaatggcgaacttgccccaatccatctccacaagcggcgcgacgtcgtttggagcttcttctgccaccgccaaggatcgcagcaggatagcgtctgtggaacacctcgttctccaactcaacaaccccgatctccgagaaaacgctctccatgaactctccaagaagagagagttatttcaggatcttgctccattattgtggaattcttttggtaccatgtcagcacttttacaggaaatagtttcaatattccctgttatttcacctccaaaccttactccagcacaatcaactcgagtgtgcaatgctcttgctctttttcagtgtgtggcatctcaccttgatacaaggatgcaattcctccatgctcatatacctctatatctgtatcccttccttaatacaaccagtaagtccagaccatttgagtatttgaggcttaccagtcttggagtcattggtgccttagtgaaggttgatgatacaaaagttataagtttccttctttcaacagagattattccgttgtgcctgcgcagtatggaaatgggcagtgaattgtcaaaaactgttgcaacctttatagttcaaaaaattctgttggacgaaattggtttgaaatatatttgtactacagcagagcgcttttatgcagtagctcaagttttgggaaacatggtggaaactcttgttgagcaaccttcaagtcgtcttttgaagcacattattcgttgttatcttcgtctgtcagataatcagagtgcttgcaaggcattaagaacctgtcttccagacatgttaagagatgctacattcagtaattgccttcgtgaagacccaacagctaggatgtggctacagcagttgcttcataatattggagacaatcgggttcctgcactacaaggtggaggaggattcgatcgtatgatggggtcgtgagaacaaagacttgctactttgtgaaaattatcaactagctacatacataaaataggattttcagttgggcatgtattgagaatgaagaattgaatgggaagggaactatctttccgtaagatgttaagagtgaagtatacatgagaatagtgacctcttaattgaatacaaatattaaaatcataatgagccatatattttaaactg

SEQ ID NO: 55083 - protein, 313 aa, Glycine max
  peptide (1)..(313): Ceres Seq. ID no. 14308402
  misc_feature (35)..(294): Pfam Name: Cell differentiation family, Rcd1-like Pfam Description: Cell differentiation family, Rcd1-like
  misc_feature (17)..(296): Homolog of NCBI NO: 23480586 NR Description: hypothetical protein [Plasmodium yoelii yoelii]
  misc_feature (13)..(303): Homolog of NCBI NO: 10946722 NR Description: rcd1 (required for cell differentiation) homolog 1
  misc_feature (13)..(303): Homolog of NCBI NO: 38174128 NR Description: Unknown (protein for MGC:76003) [Silurana
  misc_feature (22)..(296): Homolog of NCBI NO: 23613099 NR Description: cell differentiation protein rcd1, putative
  misc_feature (5)..(312): Homolog of NCBI NO: 34899762 NR Description: putative cell differentiation protein
  misc_feature (5)..(312): Homolog of NCBI NO: 34897134 NR Description: putative cell differentiation protein [Oryza
  misc_feature (1)..(299): Homolog of NCBI NO: 15239962 NR Description: expressed protein [Arabidopsis thaliana]
  misc_feature (9)..(311): Homolog of NCBI NO: 9294407 NR Description: RCD1 [Arabidopsis thaliana]
  misc_feature (1)..(311): Homolog of NCBI NO: 21537250 NR Description: putative cell differentiation protein
  misc_feature (1)..(311): Homolog of NCBI NO: 15232369 NR Description: cell differentiation protein -related
MANLPQSISTSGATSFGASSATAKDRSRIASVEHLVLQLNNPDLRENALHELSKKRELFQDLAPLLWNSFGTMSALLQEIVSIFPVISPPNLTPAQSTRVCNALALFQCVASHLDTRMQFLHAHIPLYLYPFLNTTSKSRPFEYLRLTSLGVIGALVKVDDTKVISFLLSTEIIPLCLRSMEMGSELSKTVATFIVQKILLDEIGLKYICTTAERFYAVAQVLGNMVETLVEQPSSRLLKHIIRCYLRLSDNQSACKALRTCLPDMLRDATFSNCLREDPTARMWLQQLLHNIGDNRVPALQGGGGFDRMMGS

SEQ ID NO: 55084 - protein, 241 aa, Glycine max
  peptide (1)..(241): Ceres Seq. ID no. 14308403
  misc_feature (1)..(222): Pfam Name: Cell differentiation family, Rcd1-like Pfam Description: Cell differentiation family, Rcd1-like
  misc_feature (1)..(224): Homolog of NCBI NO: 23480586 NR Description: hypothetical protein [Plasmodium yoelii yoelii]
  misc_feature (1)..(231): Homolog of NCBI NO: 10946722 NR Description: rcd1 (required for cell differentiation) homolog 1
  misc_feature (1)..(231): Homolog of NCBI NO: 38174128 NR Description: Unknown (protein for MGC:76003) [Silurana
  misc_feature (1)..(224): Homolog of NCBI NO: 23613099 NR Description: cell differentiation protein rcd1, putative
  misc_feature (1)..(240): Homolog of NCBI NO: 34899762 NR Description: putative cell differentiation protein
  misc_feature (1)..(240): Homolog of NCBI NO: 34897134 NR Description: putative cell differentiation protein [Oryza
  misc_feature (1)..(227): Homolog of NCBI NO: 15239962 NR Description: expressed protein [Arabidopsis thaliana]
  misc_feature (1)..(239): Homolog of NCBI NO: 9294407 NR Description: RCD1 [Arabidopsis thaliana]
  misc_feature (1)..(239): Homolog of NCBI NO: 21537250 NR Description: putative cell differentiation protein
  misc_feature (1)..(239): Homolog of NCBI NO: 15232369 NR Description: cell differentiation protein -related
MSALLQEIVSIFPVISPPNLTPAQSTRVCNALALFQCVASHLDTRMQFLHAHIPLYLYPFLNTTSKSRPFEYLRLTSLGVIGALVKVDDTKVISFLLSTEIIPLCLRSMEMGSELSKTVATFIVQKILLDEIGLKYICTTAERFYAVAQVLGNMVETLVEQPSSRLLKHIIRCYLRLSDNQSACKALRTCLPDMLRDATFSNCLREDPTARMWLQQLLHNIGDNRVPALQGGGGFDRMMGS

SEQ ID NO: 55085 - protein, 196 aa, Glycine max
  peptide (1)..(196): Ceres Seq. ID no. 14308404
  misc_feature (1)..(177): Pfam Name: Cell differentiation family, Rcd1-like Pfam Description: Cell differentiation family, Rcd1-like
  misc_feature (1)..(179): Homolog of NCBI NO: 23480586 NR Description: hypothetical protein [Plasmodium yoelii yoelii]
  misc_feature (1)..(186): Homolog of NCBI NO: 10946722 NR Description: rcd1 (required for cell differentiation) homolog 1
  misc_feature (1)..(186): Homolog of NCBI NO: 38174128 NR Description: Unknown (protein for MGC:76003) [Silurana
  misc_feature (1)..(179): Homolog of NCBI NO: 23613099 NR Description: cell differentiation protein rcd1, putative
  misc_feature (1)..(195): Homolog of NCBI NO: 34899762 NR Description: putative cell differentiation protein
  misc_feature (1)..(195): Homolog of NCBI NO: 34897134 NR Description: putative cell differentiation protein [Oryza
  misc_feature (1)..(182): Homolog of NCBI NO: 15239962 NR Description: expressed protein [Arabidopsis thaliana]
  misc_feature (1)..(194): Homolog of NCBI NO: 9294407 NR Description: RCD1 [Arabidopsis thaliana]
  misc_feature (1)..(194): Homolog of NCBI NO: 21537250 NR Description: putative cell differentiation protein
  misc_feature (1)..(194): Homolog of NCBI NO: 15232369 NR Description: cell differentiation protein -related
MQFLHAHIPLYLYPFLNTTSKSRPFEYLRLTSLGVIGALVKVDDTKVISFLLSTEIIPLCLRSMEMGSELSKTVATFIVQKILLDEIGLKYICTTAERFYAVAQVLGNMVETLVEQPSSRLLKHIIRCYLRLSDNQSACKALRTCLPDMLRDATFSNCLREDPTARMWLQQLLHNIGDNRVPALQGGGGFDRMMGS

SEQ ID NO: 55086 - DNA, 1202 bp, Glycine max
  misc_feature (1)..(1202): Ceres Seq. ID no. 15176487
gaacaaaaggagtagataaggaactcttgtgaagtctatacttgtcttagcattgttttcactcttgtttcttcatctgaatcaagtaagaagagcatggaggtggatttcaagtctccttcccttgaaaaaacagaagctgagcctcaagtagaagaaaacatgcgctttcacaagtctcttcaggttcatatataactatatatgcacatgtactctgttgtataatatttgtatgtaatctatttctttctgttgttctagtattcttctacagtttttctatgaagttctgtgttttggttatggtggttttaggagctaagagaatcgcagtctcagttgcaccatgctgcagattattgtgaaacaactttcttgaaaagtgaagctaagagagatgtgttggaaaatacaaaagaatacatatgcagggccatggttactgttgttgatcatcttgggaacgtctcggctaatcttgatgaccttatttctcaaacaaatgcattttctgaggctgagtctagaatccggtgcctcaaacaaagacttttctcatgtgaacaatatgctgataagcttgcgctcacaaaaatgagatggagggagaaagtgccaagactccatacacgatatttatcatcaccacccatccttgagagatcaagcagcgagaaattaagagattctaaaactgaagatacctcaaaattagatgataaacacatactagaaaagcatgaggatttgccactctttttgtacacccaaaagccacatggagataagaatttgaagccaaccagctttactacattgaaggagcataatttgaccatggtggtaccgattcgggatggtttgtcagtcttaacaaaagtttcaaatcctacatttcatttccaaggttccccgaaggttgcacgccatagaagatccttgcatggcagtgacatcttatggttcatacggcgtacaaaaagaatccaataaaaaacaatgttgcctattgcttcatgtgctattagccttaagtactcatggtggtggtctatcattttcatgtggcagttcaatgttagttgtttgattcaggaaccaaacattatttacaaatatttatattttgaggcactttgaagtagttatttatgtaattttggtaggaaacgtcatcatggttataatgatttagattt

SEQ ID NO: 55087 - protein, 185 aa, Glycine max
  peptide (1)..(185): Ceres Seq. ID no. 15176488
  misc_feature (1)..(84): Homolog of NCBI NO: 10177091 NR Description: emb|CAB66408.1~gene_id:MOP9.13~strong similarity
  misc_feature (1)..(84): Homolog of NCBI NO: 30689382 NR Description: expressed protein [Arabidopsis thaliana]
  misc_feature (1)..(87): Homolog of NCBI NO: 25408977 NR Description: hypothetical protein At2g46220 [imported] -
  misc_feature (1)..(153): Homolog of NCBI NO: 21618229 NR Description: unknown [Arabidopsis thaliana]
  misc_feature (1)..(153): Homolog of NCBI NO: 15238265 NR Description: expressed protein [Arabidopsis thaliana]
  misc_feature (1)..(37): Homolog of NCBI NO: 34909742 NR Description: hypothetical protein [Oryza sativa (japonica
  misc_feature (1)..(89): Homolog of NCBI NO: 15229112 NR Description: expressed protein [Arabidopsis thaliana]
  misc_feature (1)..(88): Homolog of NCBI NO: 34912804 NR Description: P0501G01.11 [Oryza sativa (japonica
  misc_feature (1)..(174): Homolog of NCBI NO: 26452761 NR Description: unknown protein [Arabidopsis thaliana]
  misc_feature (1)..(174): Homolog of NCBI NO: 18407012 NR Description: expressed protein [Arabidopsis thaliana]
MVTVVDHLGNVSANLDDLISQTNAFSEAESRIRCLKQRLFSCEQYADKLALTKMRWREKVPRLHTRYLSSPPILERSSSEKLRDSKTEDTSKLDDKHILEKHEDLPLFLYTQKPHGDKNLKPTSFTTLKEHNLTMVVPIRDGLSVLTKVSNPTFHFQGSPKVARHRRSLHGSDILWFIRRTKRIQ

SEQ ID NO: 55088 - protein, 132 aa, Glycine max
  peptide (1)..(132): Ceres Seq. ID no. 15176489
  misc_feature (1)..(15): Homolog of NCBI NO: 34913914 NR Description: OSJNBa0066C06.8 [Oryza sativa (japonica
  misc_feature (1)..(31): Homolog of NCBI NO: 10177091 NR Description: emb|CAB66408.1~gene_id:MOP9.13~strong similarity
  misc_feature (1)..(31): Homolog of NCBI NO: 30689382 NR Description: expressed protein [Arabidopsis thaliana]
  misc_feature (1)..(34): Homolog of NCBI NO: 25408977 NR Description: hypothetical protein At2g46220 [imported] -
  misc_feature (1)..(100): Homolog of NCBI NO: 21618229 NR Description: unknown [Arabidopsis thaliana]
  misc_feature (1)..(100): Homolog of NCBI NO: 15238265 NR Description: expressed protein [Arabidopsis thaliana]
  misc_feature (1)..(36): Homolog of NCBI NO: 15229112 NR Description: expressed protein [Arabidopsis thaliana]
  misc_feature (1)..(35): Homolog of NCBI NO: 34912804 NR Description: P0501G01.11 [Oryza sativa (japonica
  misc_feature (1)..(121): Homolog of NCBI NO: 26452761 NR Description: unknown protein [Arabidopsis thaliana]
  misc_feature (1)..(121): Homolog of NCBI NO: 18407012 NR Description: expressed protein [Arabidopsis thaliana]
MRWREKVPRLHTRYLSSPPILERSSSEKLRDSKTEDTSKLDDKHILEKHEDLPLFLYTQKPHGDKNLKPTSFTTLKEHNLTMVVPIRDGLSVLTKVSNPTFHFQGSPKVARHRRSLHGSDILWFIRRTKRIQ

SEQ ID NO: 55089 - DNA, 1555 bp, Glycine max
  misc_feature (1)..(1555): Ceres Seq. ID no. 15225530
actcctttcccccctcccgttcccaacttttcttgtgtttaaacagcgaaytgggtaccggcccccccctcgagtcagctacgtaggccccccccccactgtctgcctttgttgtcatctttcttggtgctttatttgattgaaagagttctgggaattattatgcattgtggaaaccttcatgctgagaatgcttttacaggaagctccagtgcttgggaagccaacaatttttaccagtgatagtgtgggtgaaaagatccagtgggctcaatgtgaagattgtttcaagtggcgcaaattgccagcaagtgcgcttcttccatcaaaatggacgtgttctgataattcatgggatccagaaagattttcttgttcagctgcgcaagagctgacagcagagcaacttgagaatttgctacctccttgtaattcagctgttcccaagaaaatgaaggccaccaaacaggatcccgataatgctgaagctttggagggacttgacacccttgcaaatctakctatcctgggagagggtgaggcactcccagcatccgcccaggccacaactaagcatccacgccatagacctggctgctcttgcattgtttgcattcagcctcccagtggaaagggccccaagcataagcagacatgcacatgtaatgtatgcttaacagtgaagcgacgattccgtacccttatgttacggcgtgagaagaaacaatcagaaaaagaagcagagacaactcgtaaaaagcaacagcaacaacatcctctaccattaccttcatctgaaattttgcttgatgaagattccttgccctgtagtaacacaggtgatagtagcccaaaccagaaccaaaagagggtaatgatggttctgatgatgatcctagccgaataaaatcatctgcttcgccgttcaaaggcaaaattgacctcaatatccmaccagagcgagaagaagaattatcacctggttcggattctggcggcatgatgaagttgctccatgatgctactgagcgatatctcaaacagcagactgktgaactctggtactggagattcatcaggcagtcagtcacagctggtaggagatgcaatgagggaagataaacttagcaatggtgttgcccatggcagtagtagtcataatactgataaggaacatgcccaatctttgcctatgaatgtgtgaaaatcatattggcgctagccataattgatacgttcttgcaaagctatattgaagtggggaaagattttgctgtacattttatccacttcggcttcttgctttttcttgtttgtacataaagaggagtaggaaaaaatggtgagaaaccaatatattccggtaatataagtgggcatcatagtggtttgtgtaggaaaactatgaaatgcagctgaatgggtagtaggttgaagctgtttagtttctttgagagctcaccgtgccacctgatttcaacaacgttgaaaatgtaactatgcctaatttgttctcccaatttattcttagcctgtaagatgtttatactttctt

SEQ ID NO: 55090 - protein, 241 aa, Glycine max
  peptide (1)..(241): Ceres Seq. ID no. 15225531
  misc_feature (27)..(79): Pfam Name: ELM2 domain Pfam Description: ELM2 domain
  misc_feature (89)..(212): Homolog of NCBI NO: 15236645 NR Description: transcriptional factor B3 family [Arabidopsis
  misc_feature (118)..(196): Homolog of NCBI NO: 7485714 NR Description: hypothetical protein F18E5.170 - Arabidopsis
  misc_feature (118)..(196): Homolog of NCBI NO: 15234504 NR Description: transcriptional factor B3 family [Arabidopsis
  misc_feature (8)..(234): Homolog of NCBI NO: 30684597 NR Description: transcriptional factor B3 family [Arabidopsis
  misc_feature (8)..(234): Homolog of NCBI NO: 25408077 NR Description: probable VP1/ABI3 family regulatory protein
  misc_feature (8)..(192): Homolog of NCBI NO: 34394741 NR Description: VP1/ABI3 family regulatory protein-like
  misc_feature (7)..(205): Homolog of NCBI NO: 34898718 NR Description: similar to VP1/ABI3 family regulatory protein
  misc_feature (114)..(114): Xaa is any aa, unknown or other
MLRMLLQEAPVLGKPTIFTSDSVGEKIQWAQCEDCFKWRKLPASALLPSKWTCSDNSWDPERFSCSAAQELTAEQLENLLPPCNSAVPKKMKATKQDPDNAEALEGLDTLANLXILGEGEALPASAQATTKHPRHRPGCSCIVCIQPPSGKGPKHKQTCTCNVCLTVKRRFRTLMLRREKKQSEKEAETTRKKQQQQHPLPLPSSEILLDEDSLPCSNTGDSSPNQNQKRVMMVLMMILAE

SEQ ID NO: 55091 - protein, 238 aa, Glycine max
  peptide (1)..(238): Ceres Seq. ID no. 15225532
  misc_feature (24)..(76): Pfam Name: ELM2 domain Pfam Description: ELM2 domain
  misc_feature (86)..(209): Homolog of NCBI NO: 15236645 NR Description: transcriptional factor B3 family [Arabidopsis
  misc_feature (115)..(193): Homolog of NCBI NO: 7485714 NR Description: hypothetical protein F18E5.170 - Arabidopsis
  misc_feature (115)..(193): Homolog of NCBI NO: 15234504 NR Description: transcriptional factor B3 family [Arabidopsis
  misc_feature (5)..(231): Homolog of NCBI NO: 30684597 NR Description: transcriptional factor B3 family [Arabidopsis
  misc_feature (5)..(231): Homolog of NCBI NO: 25408077 NR Description: probable VP1/ABI3 family regulatory protein
  misc_feature (5)..(189): Homolog of NCBI NO: 34394741 NR Description: VP1/ABI3 family regulatory protein-like
  misc_feature (4)..(202): Homolog of NCBI NO: 34898718 NR Description: similar to VP1/ABI3 family regulatory protein
  misc_feature (111)..(111): Xaa is any aa, unknown or other
MLLQEAPVLGKPTIFTSDSVGEKIQWAQCEDCFKWRKLPASALLPSKWTCSDNSWDPERFSCSAAQELTAEQLENLLPPCNSAVPKKMKATKQDPDNAEALEGLDTLANLXILGEGEALPASAQATTKHPRHRPGCSCIVCIQPPSGKGPKHKQTCTCNVCLTVKRRFRTLMLRREKKQSEKEAETTRKKQQQQHPLPLPSSEILLDEDSLPCSNTGDSSPNQNQKRVMMVLMMILAE

SEQ ID NO: 55092 - protein, 151 aa, Glycine max
  peptide (1)..(151): Ceres Seq. ID no. 15225533
  misc_feature (1)..(122): Homolog of NCBI NO: 15236645 NR Description: transcriptional factor B3 family [Arabidopsis
  misc_feature (28)..(106): Homolog of NCBI NO: 7485714 NR Description: hypothetical protein F18E5.170 - Arabidopsis
  misc_feature (28)..(106): Homolog of NCBI NO: 15234504 NR Description: transcriptional factor B3 family [Arabidopsis
  misc_feature (1)..(144): Homolog of NCBI NO: 30684597 NR Description: transcriptional factor B3 family [Arabidopsis
  misc_feature (1)..(144): Homolog of NCBI NO: 25408077 NR Description: probable VP1/ABI3 family regulatory protein
  misc_feature (1)..(102): Homolog of NCBI NO: 34394741 NR Description: VP1/ABI3 family regulatory protein-like
  misc_feature (1)..(115): Homolog of NCBI NO: 34898718 NR Description: similar to VP1/ABI3 family regulatory protein
  misc_feature (24)..(24): Xaa is any aa, unknown or other
MKATKQDPDNAEALEGLDTLANLXILGEGEALPASAQATTKHPRHRPGCSCIVCIQPPSGKGPKHKQTCTCNVCLTVKRRFRTLMLRREKKQSEKEAETTRKKQQQQHPLPLPSSEILLDEDSLPCSNTGDSSPNQNQKRVMMVLMMILAE

SEQ ID NO: 55093 - DNA, 2086 bp, Glycine max
  misc_feature (1)..(2086): Ceres Seq. ID no. 15169400
gtccctttgcagcagtcaaagaaatcagaacctgagaagccaaattatagtgaagccaacaagggtgaaccagctcatgaaacatttatgcaacaaacaaagggtaaggataaacaatctgcaactgctactgcagaaacagatgataatcaagaagttagtggcctacctactaatattccaggaagcaacactaaaacagttatcaaaaatgagttaaaggcagtcagttctgttgccacacagaatactgaattaccttcagcgagagcttggaaacctgctcctggtttcaaggcaaaatctctcttagaaattcaactggaagaacaaaaaaagtcactgacagaaaagcttgtatctgaggttgctactcctgtcaattccatgagctcaacaactccctgggttggagttgtcgccaatccagactctatgaaggtgtcaaatgatggccacagagaagcagaaaatactgaatatctggctaaagctgaaaaatctcaaaatagtaaaagcaagaaaagcccattacatgatctattggcagaagatcttgtaccaaaatctagtgaaagagatggcaaggttcctgacagtatgctcccctcacaaaatatagctgttcactcaaaactggtagatgatggagactttattgaagctaaagacactaaaagaagccggaaaaaatctgcaaagttgaagagttcaggagctaaggtttcaatgccagttgcctctagtgaagtacccataagcccaattcacattgaaaaggtaaaaagctcccgttctgttcagcaggagaaagaacaactgccttccattccttcaggaccctctttgggagattttgttctttggaaaggagagccaacaagcccatctcctcctccagcatggactactgattctgctaggattcctaaaccaacatcattaagggacattctaaaggagcaggagaagaagtcctctgcagtactcccaaatcaactgcctactcctcaaaaatcacaaactgcccaagctgcacggagtagtggttcttcacgcccaatttcagcttcatctccatcaaaaactgcaccttctagccagataaactcccaagcttctctgtcaaaatacagaggggatgatgatatgttttggggtccagtcgagcaatccaagcaagaaaataagcagtcaaatttccctcaacttgctaggcaggggagctggggttctaaaagtgttcccatgaaaggtaattcacctggatcattgagtcgacaaaaatctgggagtggcaaaccaactgagcaatctctatcatcatcacctgcctcttctcaatcactgctaaaactgaaaaaagatgcaatgaccaagaattctgaagccatggacttcagagtttggtgtgagaatgaatgtgcgaggctcattgggacaaaagatacaagtttccttgagttttgcttgaagcagacaagatctgaagcagagatatttctcacagaaaacctgggattatatgaccatgatcatgaattcattgataaattcctcaattacatggacctactaccatcagatgttttggaaatagcttttcaaaccgtgaatgatcggaaagttgatgcaaatacagatgtactagagctaggttacactgatggatccttttcaaaagttggaaagaagaaaggcggcaacaaaggaaaaaaggtaagctcttcagttttgggattcaatgtcgtgagtaacaggatcatgatgggtgagatccagacagtagaagactaacataacataggttattgcggaacgtgtaaatattttttggccatacgtgtattttgtaaatgtattttctgttattcatttaactttttttggcttttttaacagtagcagcatcaattgtatctgctcaatcagttttgttgtcttaaatgtattttgacgtttgatcacgctgacaaacataatattgtgtcagccttaacttgattcaattaatttgctgtttatcttttgtaagcaagctaattgattcgtaggcagagtctgtagcttgtaaagcccgttttgg

SEQ ID NO: 55094 - protein, 598 aa, Glycine max
  peptide (1)..(598): Ceres Seq. ID no. 15169401
  misc_feature (1)..(294): Pfam Name: Protein of unknown function, DUF612 Pfam Description: Protein of unknown function, DUF612
  misc_feature (7)..(464): Homolog of NCBI NO: 32477034 NR Description: hypothetical protein-signal peptide prediction
  misc_feature (83)..(598): Homolog of NCBI NO: 34394390 NR Description: unknown protein [Oryza sativa (japonica
  misc_feature (8)..(598): Homolog of NCBI NO: 15239132 NR Description: expressed protein [Arabidopsis thaliana]
VPLQQSKKSEPEKPNYSEANKGEPAHETFMQQTKGKDKQSATATAETDDNQEVSGLPTNIPGSNTKTVIKNELKAVSSVATQNTELPSARAWKPAPGFKAKSLLEIQLEEQKKSLTEKLVSEVATPVNSMSSTTPWVGVVANPDSMKVSNDGHREAENTEYLAKAEKSQNSKSKKSPLHDLLAEDLVPKSSERDGKVPDSMLPSQNIAVHSKLVDDGDFIEAKDTKRSRKKSAKLKSSGAKVSMPVASSEVPISPIHIEKVKSSRSVQQEKEQLPSIPSGPSLGDFVLWKGEPTSPSPPPAWTTDSARIPKPTSLRDILKEQEKKSSAVLPNQLPTPQKSQTAQAARSSGSSRPISASSPSKTAPSSQINSQASLSKYRGDDDMFWGPVEQSKQENKQSNFPQLARQGSWGSKSVPMKGNSPGSLSRQKSGSGKPTEQSLSSSPASSQSLLKLKKDAMTKNSEAMDFRVWCENECARLIGTKDTSFLEFCLKQTRSEAEIFLTENLGLYDHDHEFIDKFLNYMDLLPSDVLEIAFQTVNDRKVDANTDVLELGYTDGSFSKVGKKKGGNKGKKVSSSVLGFNVVSNRIMMGEIQTVED

SEQ ID NO: 55095 - protein, 569 aa, Glycine max
  peptide (1)..(569): Ceres Seq. ID no. 15169402
  misc_feature (1)..(265): Pfam Name: Protein of unknown function, DUF612 Pfam Description: Protein of unknown function, DUF612
  misc_feature (1)..(435): Homolog of NCBI NO: 32477034 NR Description: hypothetical protein-signal peptide prediction
  misc_feature (54)..(569): Homolog of NCBI NO: 34394390 NR Description: unknown protein [Oryza sativa (japonica
  misc_feature (1)..(569): Homolog of NCBI NO: 15239132 NR Description: expressed protein [Arabidopsis thaliana]
MQQTKGKDKQSATATAETDDNQEVSGLPTNIPGSNTKTVIKNELKAVSSVATQNTELPSARAWKPAPGFKAKSLLEIQLEEQKKSLTEKLVSEVATPVNSMSSTTPWVGVVANPDSMKVSNDGHREAENTEYLAKAEKSQNSKSKKSPLHDLLAEDLVPKSSERDGKVPDSMLPSQNIAVHSKLVDDGDFIEAKDTKRSRKKSAKLKSSGAKVSMPVASSEVPISPIHIEKVKSSRSVQQEKEQLPSIPSGPSLGDFVLWKGEPTSPSPPPAWTTDSARIPKPTSLRDILKEQEKKSSAVLPNQLPTPQKSQTAQAARSSGSSRPISASSPSKTAPSSQINSQASLSKYRGDDDMFWGPVEQSKQENKQSNFPQLARQGSWGSKSVPMKGNSPGSLSRQKSGSGKPTEQSLSSSPASSQSLLKLKKDAMTKNSEAMDFRVWCENECARLIGTKDTSFLEFCLKQTRSEAEIFLTENLGLYDHDHEFIDKFLNYMDLLPSDVLEIAFQTVNDRKVDANTDVLELGYTDGSFSKVGKKKGGNKGKKVSSSVLGFNVVSNRIMMGEIQTVED

SEQ ID NO: 55096 - protein, 469 aa, Glycine max
  peptide (1)..(469): Ceres Seq. ID no. 15169403
  misc_feature (1)..(165): Pfam Name: Protein of unknown function, DUF612 Pfam Description: Protein of unknown function, DUF612
  misc_feature (1)..(335): Homolog of NCBI NO: 32477034 NR Description: hypothetical protein-signal peptide prediction
  misc_feature (1)..(469): Homolog of NCBI NO: 34394390 NR Description: unknown protein [Oryza sativa (japonica
  misc_feature (1)..(469): Homolog of NCBI NO: 15239132 NR Description: expressed protein [Arabidopsis thaliana]
MSSTTPWVGVVANPDSMKVSNDGHREAENTEYLAKAEKSQNSKSKKSPLHDLLAEDLVPKSSERDGKVPDSMLPSQNIAVHSKLVDDGDFIEAKDTKRSRKKSAKLKSSGAKVSMPVASSEVPISPIHIEKVKSSRSVQQEKEQLPSIPSGPSLGDFVLWKGEPTSPSPPPAWTTDSARIPKPTSLRDILKEQEKKSSAVLPNQLPTPQKSQTAQAARSSGSSRPISASSPSKTAPSSQINSQASLSKYRGDDDMFWGPVEQSKQENKQSNFPQLARQGSWGSKSVPMKGNSPGSLSRQKSGSGKPTEQSLSSSPASSQSLLKLKKDAMTKNSEAMDFRVWCENECARLIGTKDTSFLEFCLKQTRSEAEIFLTENLGLYDHDHEFIDKFLNYMDLLPSDVLEIAFQTVNDRKVDANTDVLELGYTDGSFSKVGKKKGGNKGKKVSSSVLGFNVVSNRIMMGEIQTVED

SEQ ID NO: 55097 - DNA, 1758 bp, Glycine max
  misc_feature (1)..(1758): Ceres Seq. ID no. 14308359
gcgaccaacttttcctgactcatccacaccactgcttccctttcttccatcacttttcttcctcataacttgcattttctccaaaaaccaaagaaagaaagaaacacacacacacacacctctctctctctctcactcacacatggcagctttttcataccaataccatccttttcttgttgaccctgcattcttccccaacaacttaaacaccccttcccctcctcctcatcagtttcaacaactccctcatgaaacatcatcttttaatgtcacaaaccaggagactagctgtgttgatcagagctccaagatcaccatcagtgacaatgagccttctgtcactgaaaaccttagccctcagtcctccatggtagtggacaagcttgaaactggggagcaggtcactcagaaggtgaacactcctgtggagaagaaaaggaaaaccagaaatggatcttccttgactagtaacccccaatccaaggatgctgcaacagaaaggaaaaacaagaaacaaaggaagggcaatggtgggttgaaagaagaggacaaggcaaaagaagagaagaaggaacagagaaagtgtcccgaagagcctccaacaggctatatccatgtcagagcaagaaggggtcaggcaacggatagccacagccttgctgaaagggtgagaagagagaagataagtgaaaggatgaaggtgttgcaacggcttgtgccaggctgtgacaaggtgactggaaaggcccttatgttggacgaaataatcaattatgttcagtctctacagaatcaagttgagttcttgtcaatgaagcttgcttcagtgaatcccatgttttatgacttggcaacggatctagacaccctcttggttagaccagagaaactaaatagcatggcatcaccatcaccaccactaccatctgtgtcacattgcaacagccctaacaaccaagccactacttttgctgatacaaccaccatgacccccaccaacatcttccacattgctagtgactatcttttggataattcagtctcattttttcttcaagggcagaggtcaaatgtgttctctgaggaggatactggtagtcatttctgggacgcagaggaccagcggcaaaagtttcttcatccatgtggattcagcaacaacttatgttcctttcattaatataaaattcatagagctgccctacaaaactacgaacatgttgatttagcttttacactagctaggtaaggaaattccaaagaggcatgagaatgagccaacaagaagttaggcattaggaggaaaaaccaaagctacgcttggtatcggtatataagtacatcatcattccagggtaattcgtagcgtaaagagtctggcttggttcctagtccatcagattaaagtggcctttgaagatgaataattaaggggcaccaaaattaatggatgaagaaccaaaaggacagaaaataccgaccaaataagaccatatctttttctagatccattgttctgtttcagtgattgttgactctccaaggacttatgatgcacaaattccgagagactatcaatcctatatacagagcagacattgaaattaatttctgttccatgtaaattatatccaagtattgattcttgtggtggcagttattctgttggtacagttaatttcaccattattgagaaatgaggggttgatgcaactgatcatgttcttgacatgactggccatgcatttgtttgtt

SEQ ID NO: 55098 - protein, 393 aa, Glycine max
  peptide (1)..(393): Ceres Seq. ID no. 14308360
  misc_feature (214)..(264): Pfam Name: Helix-loop-helix DNA-binding domain Pfam Description: Helix-loop-helix DNA-binding domain
  misc_feature (161)..(323): Homolog of NCBI NO: 30681559 NR Description: expressed protein [Arabidopsis thaliana]
  misc_feature (102)..(382): Homolog of NCBI NO: 22331295 NR Description: bHLH protein [Arabidopsis thaliana]
  misc_feature (85)..(331): Homolog of NCBI NO: 15221563 NR Description: DNA-binding protein -related [Arabidopsis
  misc_feature (93)..(326): Homolog of NCBI NO: 29647487 NR Description: OJ1191_A10.7 [Oryza sativa (japonica
  misc_feature (85)..(331): Homolog of NCBI NO: 30697769 NR Description: DNA-binding protein -related [Arabidopsis
  misc_feature (85)..(331): Homolog of NCBI NO: 20127044 NR Description: putative bHLH transcription factor [Arabidopsis
  misc_feature (93)..(379): Homolog of NCBI NO: 20127085 NR Description: putative bHLH transcription factor [Arabidopsis
  misc_feature (93)..(379): Homolog of NCBI NO: 15239013 NR Description: bHLH protein family [Arabidopsis thaliana]
  misc_feature (83)..(304): Homolog of NCBI NO: 18423212 NR Description: bHLH protein family [Arabidopsis thaliana]
  misc_feature (77)..(305): Homolog of NCBI NO: 5923912 NR Description: bHLH transcription factor GBOF-1 [Tulipa
RPTFPDSSTPLLPFLPSLFFLITCIFSKNQRKKETHTHTPLSLSHSHMAAFSYQYHPFLVDPAFFPNNLNTPSPPPHQFQQLPHETSSFNVTNQETSCVDQSSKITISDNEPSVTENLSPQSSMVVDKLETGEQVTQKVNTPVEKKRKTRNGSSLTSNPQSKDAATERKNKKQRKGNGGLKEEDKAKEEKKEQRKCPEEPPTGYIHVRARRGQATDSHSLAERVRREKISERMKVLQRLVPGCDKVTGKALMLDEIINYVQSLQNQVEFLSMKLASVNPMFYDLATDLDTLLVRPEKLNSMASPSPPLPSVSHCNSPNNQATTFADTTTMTPTNIFHIASDYLLDNSVSFFLQGQRSNVFSEEDTGSHFWDAEDQRQKFLHPCGFSNNLCSFH

SEQ ID NO: 55099 - protein, 346 aa, Glycine max
  peptide (1)..(346): Ceres Seq. ID no. 14308361
  misc_feature (167)..(217): Pfam Name: Helix-loop-helix DNA-binding domain Pfam Description: Helix-loop-helix DNA-binding domain
  misc_feature (114)..(276): Homolog of NCBI NO: 30681559 NR Description: expressed protein [Arabidopsis thaliana]
  misc_feature (55)..(335): Homolog of NCBI NO: 22331295 NR Description: bHLH protein [Arabidopsis thaliana]
  misc_feature (38)..(284): Homolog of NCBI NO: 15221563 NR Description: DNA-binding protein -related [Arabidopsis
  misc_feature (46)..(279): Homolog of NCBI NO: 29647487 NR Description: OJ1191_A10.7 [Oryza sativa (japonica
  misc_feature (38)..(284): Homolog of NCBI NO: 30697769 NR Description: DNA-binding protein -related [Arabidopsis
  misc_feature (38)..(284): Homolog of NCBI NO: 20127044 NR Description: putative bHLH transcription factor [Arabidopsis
  misc_feature (46)..(332): Homolog of NCBI NO: 20127085 NR Description: putative bHLH transcription factor [Arabidopsis
  misc_feature (46)..(332): Homolog of NCBI NO: 15239013 NR Description: bHLH protein family [Arabidopsis thaliana]
  misc_feature (36)..(257): Homolog of NCBI NO: 18423212 NR Description: bHLH protein family [Arabidopsis thaliana]
  misc_feature (30)..(258): Homolog of NCBI NO: 5923912 NR Description: bHLH transcription factor GBOF-1 [Tulipa
MAAFSYQYHPFLVDPAFFPNNLNTPSPPPHQFQQLPHETSSFNVTNQETSCVDQSSKITISDNEPSVTENLSPQSSMVVDKLETGEQVTQKVNTPVEKKRKTRNGSSLTSNPQSKDAATERKNKKQRKGNGGLKEEDKAKEEKKEQRKCPEEPPTGYIHVRARRGQATDSHSLAERVRREKISERMKVLQRLVPGCDKVTGKALMLDEIINYVQSLQNQVEFLSMKLASVNPMFYDLATDLDTLLVRPEKLNSMASPSPPLPSVSHCNSPNNQATTFADTTTMTPTNIFHIASDYLLDNSVSFFLQGQRSNVFSEEDTGSHFWDAEDQRQKFLHPCGFSNNLCSFH

SEQ ID NO: 55100 - protein, 270 aa, Glycine max
  peptide (1)..(270): Ceres Seq. ID no. 14308362
  misc_feature (91)..(141): Pfam Name: Helix-loop-helix DNA-binding domain Pfam Description: Helix-loop-helix DNA-binding domain
  misc_feature (38)..(200): Homolog of NCBI NO: 30681559 NR Description: expressed protein [Arabidopsis thaliana]
  misc_feature (1)..(259): Homolog of NCBI NO: 22331295 NR Description: bHLH protein [Arabidopsis thaliana]
  misc_feature (1)..(208): Homolog of NCBI NO: 15221563 NR Description: DNA-binding protein -related [Arabidopsis
  misc_feature (1)..(203): Homolog of NCBI NO: 29647487 NR Description: OJ1191_A10.7 [Oryza sativa (japonica
  misc_feature (1)..(208): Homolog of NCBI NO: 30697769 NR Description: DNA-binding protein -related [Arabidopsis
  misc_feature (1)..(208): Homolog of NCBI NO: 20127044 NR Description: putative bHLH transcription factor [Arabidopsis
  misc_feature (1)..(256): Homolog of NCBI NO: 20127085 NR Description: putative bHLH transcription factor [Arabidopsis
  misc_feature (1)..(256): Homolog of NCBI NO: 15239013 NR Description: bHLH protein family [Arabidopsis thaliana]
  misc_feature (1)..(181): Homolog of NCBI NO: 18423212 NR Description: bHLH protein family [Arabidopsis thaliana]
  misc_feature (1)..(182): Homolog of NCBI NO: 5923912 NR Description: bHLH transcription factor GBOF-1 [Tulipa
MVVDKLETGEQVTQKVNTPVEKKRKTRNGSSLTSNPQSKDAATERKNKKQRKGNGGLKEEDKAKEEKKEQRKCPEEPPTGYIHVRARRGQATDSHSLAERVRREKISERMKVLQRLVPGCDKVTGKALMLDEIINYVQSLQNQVEFLSMKLASVNPMFYDLATDLDTLLVRPEKLNSMASPSPPLPSVSHCNSPNNQATTFADTTTMTPTNIFHIASDYLLDNSVSFFLQGQRSNVFSEEDTGSHFWDAEDQRQKFLHPCGFSNNLCSFH

SEQ ID NO: 55101 - DNA, 1865 bp, Glycine max
  misc_feature (1)..(1865): Ceres Seq. ID no. 15170990
gagtgatgctatgttatggcttgggtgtttgagttgcggagtcgttccctctgcacgtcctcctcctcgaaatggagggtgaagcaggtgacaacctccaacttccaagagtccctgcaagagataaagacgcacatctccaactccgactttgtcgccatttccatgggaaaaacgggctctccctccgcgccgtcgtggctccgccctctacccttcgacaccgcccagactgcctactccaaggcccgccgcgccgcccagagattccagctcctccacttcgccgtctgccccttctccgtctcccgctccgacaaactcctcgctcacccgtataatttcatgttgtttccaagagatgaaatgaagatggggatgcccacttacagcttttcgtgccagacttcgctacttgcctccatggctcgccaggggtttgatttcaatgcttgcgtctacaatggcatatcatatctatccagagcacaagagtcagcagctagaattcgtcttgggactgctctcccttctcttcgtgtgatgaaatcttcttcaccctctactgttgctgatacagtgtttgttgagaggattagatcaaaggttaaatattggagagagtcatgtaaaagctccgacacaaacaaaagcagagatgaagaacttgtcaactcccttaggaatattgtcctgggcaatgaacagttcagatcaagaccttgcatgactgtagatgtttgcagtgaacgtcaagtgcaacttattctggagatggtgttagactactcagatgatcttcttcctttgccaatccctactaagagtgggaccattcatgcagtacgaattgttttggcaaattctaaagaagataaggatttattggagagagagcttcgaaatcttgaagaggaggaaagcaagaaaattcgtggattccgagagattgtacactaattcattcaaaattcattgctccacttccgcctgagatagatgaatttgtgagctccttgtgctcggttttccctgaggtgcttgacataaattatttgatgaagaaacatggaaccatgagaaaagtgaccaacattccgagtgctatatcctacttgaataatcatttttttgcaccagttgatttggaaattcctgaccaagctacagtaaaagaaggcaagattcacggacttactgcattaaggctatcctatttatttatgaagctttgctctatattgaaaatttccccaaatgttactgaatctggcaacaagcatttggcccccgagcttgaagacttcaccaatgtattccatccattctcaacccctatccaagattcatttaatggtggggatgtcggcatgtggaccaataatacaaaaaaagtcagttgtgagcatttggttttcttatggggattcaaaattggtatcacagctggcatgctgaagagtttacttcgttcttcccatgatatcttttcacgagagtttgatgttaaattggtggacaagagttgtgccattgttgttttctggcaatctggggtatcaaaaagatttctagacatattgaatagtgaagaaataagaggagacttaaaggagttagtgtcagatggcatgagggtaaccagttatgagacctacaacacaatatgtaggttaggtttgtgggagatggatcttgcagaatcattagaaagagccttggaaagttcttgctgtgatattgagagtaattgtgagagaaaatcttctgagattcattggtataatgacaatgtaattaacttggatgatctttaatgttgtcatgaaccaattattgaaatgttagttctatcattcattgag

SEQ ID NO: 55102 - protein, 314 aa, Glycine max
  peptide (1)..(314): Ceres Seq. ID no. 15170991
  misc_feature (23)..(162): Pfam Name: CAF1 family ribonuclease Pfam Description: CAF1 family ribonuclease
  misc_feature (21)..(164): Homolog of NCBI NO: 34868070 NR Description: similar to poly(A)-specific ribonuclease
  misc_feature (24)..(164): Homolog of NCBI NO: 18256918 NR Description: poly(A)-specific ribonuclease (deadenylation
  misc_feature (24)..(164): Homolog of NCBI NO: 20891791 NR Description: poly(A)-specific ribonuclease (deadenylation
  misc_feature (24)..(164): Homolog of NCBI NO: 29791562 NR Description: Similar to poly(A)-specific ribonuclease
  misc_feature (24)..(217): Homolog of NCBI NO: 4505611 NR Description: poly(A)-specific ribonuclease (deadenylation
  misc_feature (24)..(164): Homolog of NCBI NO: 14495249 NR Description: poly(A)-specific ribonuclease [Xenopus laevis]
  misc_feature (1)..(313): Homolog of NCBI NO: 8778305 NR Description: F14J16.11 [Arabidopsis thaliana]
  misc_feature (1)..(313): Homolog of NCBI NO: 15222792 NR Description: poly(A)-specific ribonuclease -related
  misc_feature (14)..(314): Homolog of NCBI NO: 9279724 NR Description: gb|AAD21483.1~gene_id:MWL2.4~similar to unknown
  misc_feature (14)..(314): Homolog of NCBI NO: 15230837 NR Description: hypothetical protein
MAWVFELRSRSLCTSSSSKWRVKQVTTSNFQESLQEIKTHISNSDFVAISMGKTGSPSAPSWLRPLPFDTAQTAYSKARRAAQRFQLLHFAVCPFSVSRSDKLLAHPYNFMLFPRDEMKMGMPTYSFSCQTSLLASMARQGFDFNACVYNGISYLSRAQESAARIRLGTALPSLRVMKSSSPSTVADTVFVERIRSKVKYWRESCKSSDTNKSRDEELVNSLRNIVLGNEQFRSRPCMTVDVCSERQVQLILEMVLDYSDDLLPLPIPTKSGTIHAVRIVLANSKEDKDLLERELRNLEEEESKKIRGFREIVH

SEQ ID NO: 55103 - protein, 264 aa, Glycine max
  peptide (1)..(264): Ceres Seq. ID no. 15170992
  misc_feature (1)..(112): Pfam Name: CAF1 family ribonuclease Pfam Description: CAF1 family ribonuclease
  misc_feature (1)..(114): Homolog of NCBI NO: 34868070 NR Description: similar to poly(A)-specific ribonuclease
  misc_feature (1)..(114): Homolog of NCBI NO: 18256918 NR Description: poly(A)-specific ribonuclease (deadenylation
  misc_feature (1)..(114): Homolog of NCBI NO: 20891791 NR Description: poly(A)-specific ribonuclease (deadenylation
  misc_feature (1)..(114): Homolog of NCBI NO: 29791562 NR Description: Similar to poly(A)-specific ribonuclease
  misc_feature (1)..(167): Homolog of NCBI NO: 4505611 NR Description: poly(A)-specific ribonuclease (deadenylation
  misc_feature (1)..(114): Homolog of NCBI NO: 14495249 NR Description: poly(A)-specific ribonuclease [Xenopus laevis]
  misc_feature (1)..(263): Homolog of NCBI NO: 8778305 NR Description: F14J16.11 [Arabidopsis thaliana]
  misc_feature (1)..(263): Homolog of NCBI NO: 15222792 NR Description: poly(A)-specific ribonuclease -related
  misc_feature (1)..(264): Homolog of NCBI NO: 9279724 NR Description: gb|AAD21483.1~gene_id:MWL2.4~similar to unknown
  misc_feature (1)..(264): Homolog of NCBI NO: 15230837 NR Description: hypothetical protein
MGKTGSPSAPSWLRPLPFDTAQTAYSKARRAAQRFQLLHFAVCPFSVSRSDKLLAHPYNFMLFPRDEMKMGMPTYSFSCQTSLLASMARQGFDFNACVYNGISYLSRAQESAARIRLGTALPSLRVMKSSSPSTVADTVFVERIRSKVKYWRESCKSSDTNKSRDEELVNSLRNIVLGNEQFRSRPCMTVDVCSERQVQLILEMVLDYSDDLLPLPIPTKSGTIHAVRIVLANSKEDKDLLERELRNLEEEESKKIRGFREIVH

SEQ ID NO: 55104 - protein, 252 aa, Glycine max
  peptide (1)..(252): Ceres Seq. ID no. 15170993
  misc_feature (1)..(63): Pfam Name: CAF1 family ribonuclease Pfam Description: CAF1 family ribonuclease
  misc_feature (1)..(20): Homolog of NCBI NO: 8778305 NR Description: F14J16.11 [Arabidopsis thaliana]
  misc_feature (1)..(20): Homolog of NCBI NO: 15222792 NR Description: poly(A)-specific ribonuclease -related
  misc_feature (1)..(239): Homolog of NCBI NO: 9279724 NR Description: gb|AAD21483.1~gene_id:MWL2.4~similar to unknown
  misc_feature (1)..(252): Homolog of NCBI NO: 15230837 NR Description: hypothetical protein
MKKHGTMRKVTNIPSAISYLNNHFFAPVDLEIPDQATVKEGKIHGLTALRLSYLFMKLCSILKISPNVTESGNKHLAPELEDFTNVFHPFSTPIQDSFNGGDVGMWTNNTKKVSCEHLVFLWGFKIGITAGMLKSLLRSSHDIFSREFDVKLVDKSCAIVVFWQSGVSKRFLDILNSEEIRGDLKELVSDGMRVTSYETYNTICRLGLWEMDLAESLERALESSCCDIESNCERKSSEIHWYNDNVINLDDL

SEQ ID NO: 55105 - DNA, 1186 bp, Glycine max
  misc_feature (1)..(1186): Ceres Seq. ID no. 14310460
agttagcacttagcagactctgctgcagtgaggtgaggggaggtttgtttgttgtttcgtttttcctttcctttccgccagaatccgttgagaatggcgttgccggtagtcgtcgatgcagagtacctcaaggaggtcgacaaggctcgccgcgatctccgcgcactcatcgctaacaggaactgcgctcctctcatgctccgattagcctggcacgatgccggaacttacgatgctaagaccaagaccggtggacctaacggttcgatccggaacgaggaagagtattctcacggagccaataatggcttgaagaaagctattgatttctgccaggaagtgaaggcaaaatatcctaaaattacatatgcagatctcttccagcttgcgggtgttgttgcagttgaggttactgggggtccaacaattgatttcgttcctggtagaagagattcaaaagtatctcctaatgaagggcggcttcctgatgctaaaaaaggtgttccacatctccgtgatatcttttatcgaatgggcttgactgaccgagatattgttgcactatctggaggacatacactggggagagcacatccagagagatcagggtttgatggcccttggacggaggaccctctgaagtttgataactcatactttgtggaacttttgaaagaagattctgctgggctgcttaaacttccaacagacaaggctttattggaggatgctgaatttcgctgttatgttgagctatatgcaaaggatgaggatgcattttttcgagattatgctgaatcacataagaaactttcagagctaggctttgtgccaagttcaaagccgatttctattaaggaagggaccatactggcacaaggtgctgtaggagttgtagttgctaccgcagtggtgatcctcagttacttgtatgaagttcgcaaaagagggaagtaaactggatttgttcatctcttggctgttacggttgcgtgaccctgaccctgacccatagtgtgcaaaacagggttcatttttgcagcttcagtttctgtttacttagtaacaataaagaataatgctacagacattcagacttttatatgaatagactaaaaacatccctgagtactcaaattgagagcaacttcattatacgtaaatacaaattttaacattcttagtt

SEQ ID NO: 55106 - protein, 287 aa, Glycine max
  peptide (1)..(287): Ceres Seq. ID no. 14310461
  misc_feature (18)..(225): Pfam Name: Peroxidase Pfam Description: Peroxidase
  misc_feature (1)..(285): Homolog of NCBI NO: 37030052 NR Description: putative peroxisome-bound ascorbate peroxidase
  misc_feature (1)..(285): Homolog of NCBI NO: 38344123 NR Description: OSJNBb0072N21.2 [Oryza sativa (japonica
  misc_feature (1)..(287): Homolog of NCBI NO: 15080682 NR Description: peroxisome type ascorbate peroxidase
  misc_feature (1)..(287): Homolog of NCBI NO: 3288066 NR Description: ascorbate peroxidase [Arabidopsis thaliana]
  misc_feature (1)..(287): Homolog of NCBI NO: 5442410 NR Description: ascorbate peroxidase [Zantedeschia aethiopica]
  misc_feature (1)..(287): Homolog of NCBI NO: 15236239 NR Description: ascorbate peroxidase, putative (APX) [Arabidopsis
  misc_feature (1)..(287): Homolog of NCBI NO: 17066705 NR Description: ascorbate peroxidase [Capsicum annuum]
  misc_feature (1)..(287): Homolog of NCBI NO: 7484726 NR Description: L-ascorbate peroxidase (EC 1.11.1.11),
  misc_feature (1)..(287): Homolog of NCBI NO: 4835909 NR Description: cytosolic ascorbate peroxidase [Mesembryanthemum
  misc_feature (1)..(287): Homolog of NCBI NO: 15430584 NR Description: peroxisomal ascorbate peroxidase [Cucurbita cv.
MALPVVVDAEYLKEVDKARRDLRALIANRNCAPLMLRLAWHDAGTYDAKTKTGGPNGSIRNEEEYSHGANNGLKKAIDFCQEVKAKYPKITYADLFQLAGVVAVEVTGGPTIDFVPGRRDSKVSPNEGRLPDAKKGVPHLRDIFYRMGLTDRDIVALSGGHTLGRAHPERSGFDGPWTEDPLKFDNSYFVELLKEDSAGLLKLPTDKALLEDAEFRCYVELYAKDEDAFFRDYAESHKKLSELGFVPSSKPISIKEGTILAQGAVGVVVATAVVILSYLYEVRKRGK

SEQ ID NO: 55107 - protein, 253 aa, Glycine max
  peptide (1)..(253): Ceres Seq. ID no. 14310462
  misc_feature (1)..(191): Pfam Name: Peroxidase Pfam Description: Peroxidase
  misc_feature (1)..(251): Homolog of NCBI NO: 37030052 NR Description: putative peroxisome-bound ascorbate peroxidase
  misc_feature (1)..(251): Homolog of NCBI NO: 38344123 NR Description: OSJNBb0072N21.2 [Oryza sativa (japonica
  misc_feature (1)..(253): Homolog of NCBI NO: 15080682 NR Description: peroxisome type ascorbate peroxidase
  misc_feature (1)..(253): Homolog of NCBI NO: 3288066 NR Description: ascorbate peroxidase [Arabidopsis thaliana]
  misc_feature (1)..(253): Homolog of NCBI NO: 5442410 NR Description: ascorbate peroxidase [Zantedeschia aethiopica]
  misc_feature (1)..(253): Homolog of NCBI NO: 15236239 NR Description: ascorbate peroxidase, putative (APX) [Arabidopsis
  misc_feature (1)..(253): Homolog of NCBI NO: 17066705 NR Description: ascorbate peroxidase [Capsicum annuum]
  misc_feature (1)..(253): Homolog of NCBI NO: 7484726 NR Description: L-ascorbate peroxidase (EC 1.11.1.11),
  misc_feature (1)..(253): Homolog of NCBI NO: 4835909 NR Description: cytosolic ascorbate peroxidase [Mesembryanthemum
  misc_feature (1)..(253): Homolog of NCBI NO: 15430584 NR Description: peroxisomal ascorbate peroxidase [Cucurbita cv.
MLRLAWHDAGTYDAKTKTGGPNGSIRNEEEYSHGANNGLKKAIDFCQEVKAKYPKITYADLFQLAGVVAVEVTGGPTIDFVPGRRDSKVSPNEGRLPDAKKGVPHLRDIFYRMGLTDRDIVALSGGHTLGRAHPERSGFDGPWTEDPLKFDNSYFVELLKEDSAGLLKLPTDKALLEDAEFRCYVELYAKDEDAFFRDYAESHKKLSELGFVPSSKPISIKEGTILAQGAVGVVVATAVVILSYLYEVRKRGK

SEQ ID NO: 55108 - DNA, 1564 bp, Glycine max
  misc_feature (1)..(1564): Ceres Seq. ID no. 14308455
aaagcaaaactgtcaagggttctgtaattgccaaaaataatcctaaatcttctggtttaatgaagccaaacaagttaaagtctacacatagaaatgggattttaagcagcacgatatctgagactgtggctgatacaggaaaagatatcaaaattctaaacaaggctcctcatttgcgttctaattttccagcagccactgctccaaatacatatcaccaaataggaaaattttcatcattagccaacccaacatgccatgtttccccccccacaaaccacaggccaaatacctctactaactacagaccaactgggagagtgtctaatgtaaatgatcgagttttgttgggtgacaacaaattcaggagtggacaatctgaaatgtcaatggagatgactcggggtcctcggggtcattacaacaattttcttctacaaccatcacttgttaaggatgcacttgcaatcacaatatgtagagacgaatataacctttcagatttccaaactgaatacgaaattgctaaattttatgtgattaaatctttcaatgaagatgacgttcataagagtgttaaatataatgtttggacaagtactccaaatggaaataagaagttgaacgccgcattccttgatgcagaagctaaattgagacagacagggactaagtgtccagttttcctcttcttctcggttaatgctagcagacagtttgttggagtggctgagatgcttggaccggtggactttaaaaacgacatgaacttttggaaacttgataagtacaacggtttcttcccaattaagtggcacataataaaagatgttcccaacaatcagtttgtgcatatcatccttccaagcaatgagaacaagcctgtaacttacactagggacacacaagagattggattgaaggagggcctggagatgctgaatatttttagaagttatacagctaagacatctctattggatgattttgacttctatgagaggcgagaaaagttatttcgttcccagaggagtactaagcacaagcatgcaaggccggaacaggaagtatatggcaatgacaattatcaaaacactgtcaaagccagagagaagaaaatggagatgcaatcgagtggtaccaagcaaggtactctcatcaaacataccaaaaacctttctctcaacaactctggatttagatagcaagattgggagaggagaaaaagagagcccgatatttatttctacacgtatgtaggcatttaagagttgcagacgcaattgcagtttggtttgtttagagcttctgaagcacacgcacgcttcctttttgatttgtgtgatatgccgataagatgaccacgacaacacattttaagtttgaccaattatttttatattactcaatgagttgatgtttgccattggcaaatgaggaggtatttgatagtatggttcgatgtctccaatatttccgtataactcattggctttggtctgtatttactattttgtttcacgtggatgagcgcccagttccatagttgtgttttgtttggttg

SEQ ID NO: 55109 - protein, 400 aa, Glycine max
  peptide (1)..(400): Ceres Seq. ID no. 14308456
  misc_feature (229)..(319): Pfam Name: YT521-B-like family Pfam Description: YT521-B-like family
  misc_feature (67)..(366): Homolog of NCBI NO: 18405397 NR Description: expressed protein [Arabidopsis thaliana]
  misc_feature (101)..(343): Homolog of NCBI NO: 22773231 NR Description: Putative RNA-binding protein
  misc_feature (98)..(391): Homolog of NCBI NO: 30684473 NR Description: expressed protein [Arabidopsis thaliana]
  misc_feature (99)..(386): Homolog of NCBI NO: 18087662 NR Description: putative RNA-binding protein [Oryza sativa]
  misc_feature (20)..(338): Homolog of NCBI NO: 18412316 NR Description: expressed protein [Arabidopsis thaliana]
  misc_feature (20)..(338): Homolog of NCBI NO: 7487895 NR Description: hypothetical protein YUP8H12R.13 - Arabidopsis
  misc_feature (147)..(400): Homolog of NCBI NO: 25402579 NR Description: hypothetical protein [imported] - Arabidopsis
  misc_feature (91)..(336): Homolog of NCBI NO: 38346520 NR Description: OSJNBa0027H09.15 [Oryza sativa (japonica
  misc_feature (156)..(343): Homolog of NCBI NO: 34911170 NR Description: B1144G04.32 [Oryza sativa (japonica
  misc_feature (5)..(400): Homolog of NCBI NO: 30681366 NR Description: expressed protein [Arabidopsis thaliana]
SKTVKGSVIAKNNPKSSGLMKPNKLKSTHRNGILSSTISETVADTGKDIKILNKAPHLRSNFPAATAPNTYHQIGKFSSLANPTCHVSPPTNHRPNTSTNYRPTGRVSNVNDRVLLGDNKFRSGQSEMSMEMTRGPRGHYNNFLLQPSLVKDALAITICRDEYNLSDFQTEYEIAKFYVIKSFNEDDVHKSVKYNVWTSTPNGNKKLNAAFLDAEAKLRQTGTKCPVFLFFSVNASRQFVGVAEMLGPVDFKNDMNFWKLDKYNGFFPIKWHIIKDVPNNQFVHIILPSNENKPVTYTRDTQEIGLKEGLEMLNIFRSYTAKTSLLDDFDFYERREKLFRSQRSTKHKHARPEQEVYGNDNYQNTVKAREKKMEMQSSGTKQGTLIKHTKNLSLNNSGFR

SEQ ID NO: 55110 - protein, 381 aa, Glycine max
  peptide (1)..(381): Ceres Seq. ID no. 14308457
  misc_feature (210)..(300): Pfam Name: YT521-B-like family Pfam Description: YT521-B-like family
  misc_feature (48)..(347): Homolog of NCBI NO: 18405397 NR Description: expressed protein [Arabidopsis thaliana]
  misc_feature (82)..(324): Homolog of NCBI NO: 22773231 NR Description: Putative RNA-binding protein
  misc_feature (79)..(372): Homolog of NCBI NO: 30684473 NR Description: expressed protein [Arabidopsis thaliana]
  misc_feature (80)..(367): Homolog of NCBI NO: 18087662 NR Description: putative RNA-binding protein [Oryza sativa]
  misc_feature (1)..(319): Homolog of NCBI NO: 18412316 NR Description: expressed protein [Arabidopsis thaliana]
  misc_feature (1)..(319): Homolog of NCBI NO: 7487895 NR Description: hypothetical protein YUP8H12R.13 - Arabidopsis
  misc_feature (128)..(381): Homolog of NCBI NO: 25402579 NR Description: hypothetical protein [imported] - Arabidopsis
  misc_feature (72)..(317): Homolog of NCBI NO: 38346520 NR Description: OSJNBa0027H09.15 [Oryza sativa (japonica
  misc_feature (137)..(324): Homolog of NCBI NO: 34911170 NR Description: B1144G04.32 [Oryza sativa (japonica
  misc_feature (1)..(381): Homolog of NCBI NO: 30681366 NR Description: expressed protein [Arabidopsis thaliana]
MKPNKLKSTHRNGILSSTISETVADTGKDIKILNKAPHLRSNFPAATAPNTYHQIGKFSSLANPTCHVSPPTNHRPNTSTNYRPTGRVSNVNDRVLLGDNKFRSGQSEMSMEMTRGPRGHYNNFLLQPSLVKDALAITICRDEYNLSDFQTEYEIAKFYVIKSFNEDDVHKSVKYNVWTSTPNGNKKLNAAFLDAEAKLRQTGTKCPVFLFFSVNASRQFVGVAEMLGPVDFKNDMNFWKLDKYNGFFPIKWHIIKDVPNNQFVHIILPSNENKPVTYTRDTQEIGLKEGLEMLNIFRSYTAKTSLLDDFDFYERREKLFRSQRSTKHKHARPEQEVYGNDNYQNTVKAREKKMEMQSSGTKQGTLIKHTKNLSLNNSGFR

SEQ ID NO: 55111 - protein, 273 aa, Glycine max
  peptide (1)..(273): Ceres Seq. ID no. 14308458
  misc_feature (102)..(192): Pfam Name: YT521-B-like family Pfam Description: YT521-B-like family
  misc_feature (1)..(239): Homolog of NCBI NO: 18405397 NR Description: expressed protein [Arabidopsis thaliana]
  misc_feature (1)..(216): Homolog of NCBI NO: 22773231 NR Description: Putative RNA-binding protein
  misc_feature (1)..(264): Homolog of NCBI NO: 30684473 NR Description: expressed protein [Arabidopsis thaliana]
  misc_feature (1)..(259): Homolog of NCBI NO: 18087662 NR Description: putative RNA-binding protein [Oryza sativa]
  misc_feature (1)..(211): Homolog of NCBI NO: 18412316 NR Description: expressed protein [Arabidopsis thaliana]
  misc_feature (1)..(211): Homolog of NCBI NO: 7487895 NR Description: hypothetical protein YUP8H12R.13 - Arabidopsis
  misc_feature (20)..(273): Homolog of NCBI NO: 25402579 NR Description: hypothetical protein [imported] - Arabidopsis
  misc_feature (1)..(209): Homolog of NCBI NO: 38346520 NR Description: OSJNBa0027H09.15 [Oryza sativa (japonica
  misc_feature (29)..(216): Homolog of NCBI NO: 34911170 NR Description: B1144G04.32 [Oryza sativa (japonica
  misc_feature (1)..(273): Homolog of NCBI NO: 30681366 NR Description: expressed protein [Arabidopsis thaliana]
MSMEMTRGPRGHYNNFLLQPSLVKDALAITICRDEYNLSDFQTEYEIAKFYVIKSFNEDDVHKSVKYNVWTSTPNGNKKLNAAFLDAEAKLRQTGTKCPVFLFFSVNASRQFVGVAEMLGPVDFKNDMNFWKLDKYNGFFPIKWHIIKDVPNNQFVHIILPSNENKPVTYTRDTQEIGLKEGLEMLNIFRSYTAKTSLLDDFDFYERREKLFRSQRSTKHKHARPEQEVYGNDNYQNTVKAREKKMEMQSSGTKQGTLIKHTKNLSLNNSGFR

SEQ ID NO: 55112 - DNA, 1382 bp, Glycine max
  misc_feature (1)..(1382): Ceres Seq. ID no. 14308294
gttagaatcgaaactccacagtccagtgagaggaagagaaagcatgaagttcacagactcgccggtgatcgagcttgcggtgaacgacgccgttctgtcgcttcagcaagacaacgggtccatgcacgtgggaaccaccgtgtggccatgctccctcgtcctcgtcaaattcgcggagcgctggggcccaccctctgacaacaacccctacgctcgcgtgctcgacttccaaggcaagcgggccgtggagctcggcacgggctgcggcgtggcgggaatgggcctctacctgttgggcctgacggacctgctcctcaccgacatcgcacccgtcatgccggccctgaagcgcaacctgaaagtcaacaagcccatcctccgcaaggccctcaaacactccgtgctctactggaacaacccgcagcagatcgctgccctaaatcctcccttcgatttcgttatcgcaaccgatgtcgtttacattccggaatctgttccttccttggtttctgcaatggaaaccctcgtctctgacgacggcgtcgttttgcttgggtaccagcttagggcacccgaggcgcacgagcttttctgggaactgtgtcaacaagtcttccacgttgagaaagtcccgcacgagcatctgcatcccgattacgcttacgaagaaaccgatgtttatctgttgaagaagaaaaacaagaaacagtgactgattatagctaatagggtgtgatagaaagttgttagccgtggtgtttatgttgacccttcaaatgattgccaacaaaggatcctggaatatacctgagacgcgtgtgcttgctgctgtttttgtctttgtttttctgagctttaggctcccttgacataagggggaaaaagttagtgaatggagggtattaaatatgagagtaaagctacctatatctaattgttacataaattttattatttaatcatagctcatttaaccttctttttaatcattaatattcggattctggtatatgtcccatgtgtgagtaggagtgtgcagacctggtttgcaatacatctcattgtaaataaatgaatatgcaaatcataggcaaatacaaatttcttatggttgaaggtatggctctgcaagacttggtttggtggcataaagtagtagacttgattgcaccacaagtcaatacaccatcagtattattttattttagtacaaacaagctaccgaatggcagatggtgaatagtctgccactgatgtaagaacaagaccgagaagaagacgcagatgaagagaagctgactatttatgtgtgcactttgccctttctgtatacaaagataattttgatttcatgcatcatcgaatataaatgttagttaatc

SEQ ID NO: 55113 - protein, 236 aa, Glycine max
  peptide (1)..(236): Ceres Seq. ID no. 14308295
  misc_feature (32)..(94): Homolog of NCBI NO: 26452646 NR Description: putative DNA ligase [Arabidopsis thaliana]
  misc_feature (82)..(235): Homolog of NCBI NO: 33146776 NR Description: unknown protein [Oryza sativa (japonica
  misc_feature (84)..(236): Homolog of NCBI NO: 14388497 NR Description: hypothetical protein [Macaca fascicularis]
  misc_feature (77)..(159): Homolog of NCBI NO: 25407025 NR Description: protein T6D22.22 [imported] - Arabidopsis
  misc_feature (97)..(233): Homolog of NCBI NO: 28973317 NR Description: unknown protein [Arabidopsis thaliana]
  misc_feature (16)..(236): Homolog of NCBI NO: 21752748 NR Description: unnamed protein product [Homo sapiens]
  misc_feature (16)..(236): Homolog of NCBI NO: 29126226 NR Description: similar to hepatocellular carcinoma-associated
  misc_feature (44)..(235): Homolog of NCBI NO: 15219438 NR Description: tumor-related protein -related [Arabidopsis
  misc_feature (15)..(235): Homolog of NCBI NO: 15241427 NR Description: expressed protein [Arabidopsis thaliana]
LESKLHSPVRGRESMKFTDSPVIELAVNDAVLSLQQDNGSMHVGTTVWPCSLVLVKFAERWGPPSDNNPYARVLDFQGKRAVELGTGCGVAGMGLYLLGLTDLLLTDIAPVMPALKRNLKVNKPILRKALKHSVLYWNNPQQIAALNPPFDFVIATDVVYIPESVPSLVSAMETLVSDDGVVLLGYQLRAPEAHELFWELCQQVFHVEKVPHEHLHPDYAYEETDVYLLKKKNKKQ

SEQ ID NO: 55114 - protein, 222 aa, Glycine max
  peptide (1)..(222): Ceres Seq. ID no. 14308296
  misc_feature (18)..(80): Homolog of NCBI NO: 26452646 NR Description: putative DNA ligase [Arabidopsis thaliana]
  misc_feature (68)..(221): Homolog of NCBI NO: 33146776 NR Description: unknown protein [Oryza sativa (japonica
  misc_feature (70)..(222): Homolog of NCBI NO: 14388497 NR Description: hypothetical protein [Macaca fascicularis]
  misc_feature (63)..(145): Homolog of NCBI NO: 25407025 NR Description: protein T6D22.22 [imported] - Arabidopsis
  misc_feature (83)..(219): Homolog of NCBI NO: 28973317 NR Description: unknown protein [Arabidopsis thaliana]
  misc_feature (2)..(222): Homolog of NCBI NO: 21752748 NR Description: unnamed protein product [Homo sapiens]
  misc_feature (2)..(222): Homolog of NCBI NO: 29126226 NR Description: similar to hepatocellular carcinoma-associated
  misc_feature (30)..(221): Homolog of NCBI NO: 15219438 NR Description: tumor-related protein -related [Arabidopsis
  misc_feature (1)..(221): Homolog of NCBI NO: 15241427 NR Description: expressed protein [Arabidopsis thaliana]
MKFTDSPVIELAVNDAVLSLQQDNGSMHVGTTVWPCSLVLVKFAERWGPPSDNNPYARVLDFQGKRAVELGTGCGVAGMGLYLLGLTDLLLTDIAPVMPALKRNLKVNKPILRKALKHSVLYWNNPQQIAALNPPFDFVIATDVVYIPESVPSLVSAMETLVSDDGVVLLGYQLRAPEAHELFWELCQQVFHVEKVPHEHLHPDYAYEETDVYLLKKKNKKQ

SEQ ID NO: 55115 - protein, 196 aa, Glycine max
  peptide (1)..(196): Ceres Seq. ID no. 14308297
  misc_feature (1)..(54): Homolog of NCBI NO: 26452646 NR Description: putative DNA ligase [Arabidopsis thaliana]
  misc_feature (42)..(195): Homolog of NCBI NO: 33146776 NR Description: unknown protein [Oryza sativa (japonica
  misc_feature (44)..(196): Homolog of NCBI NO: 14388497 NR Description: hypothetical protein [Macaca fascicularis]
  misc_feature (37)..(119): Homolog of NCBI NO: 25407025 NR Description: protein T6D22.22 [imported] - Arabidopsis
  misc_feature (57)..(193): Homolog of NCBI NO: 28973317 NR Description: unknown protein [Arabidopsis thaliana]
  misc_feature (1)..(196): Homolog of NCBI NO: 21752748 NR Description: unnamed protein product [Homo sapiens]
  misc_feature (1)..(196): Homolog of NCBI NO: 29126226 NR Description: similar to hepatocellular carcinoma-associated
  misc_feature (4)..(195): Homolog of NCBI NO: 15219438 NR Description: tumor-related protein -related [Arabidopsis
  misc_feature (1)..(195): Homolog of NCBI NO: 15241427 NR Description: expressed protein [Arabidopsis thaliana]
MHVGTTVWPCSLVLVKFAERWGPPSDNNPYARVLDFQGKRAVELGTGCGVAGMGLYLLGLTDLLLTDIAPVMPALKRNLKVNKPILRKALKHSVLYWNNPQQIAALNPPFDFVIATDVVYIPESVPSLVSAMETLVSDDGVVLLGYQLRAPEAHELFWELCQQVFHVEKVPHEHLHPDYAYEETDVYLLKKKNKKQ

SEQ ID NO: 55116 - DNA, 1912 bp, Glycine max
  misc_feature (1)..(1912): Ceres Seq. ID no. 15172237
gccgagcaacagtgaatttggccaccataccataccatgagcataagggcgcgcgcgcgcaaaggattagggtttcgaacgtagcgattttggagcttccatttcgatttatacttgcgcacgatctgatgcaaaaaatgccagggacaaagcagagagatacatcccaaaatccagactcaccagaggggaacagtgagcctgagaaacctacagattctgatgagcgagtagactttgatggggacaatgatcaagaggagacaatggaggaagaagttgagtatgaagaagtagaggaggaggaagaagaggaggaggaggaggaggaagaagaagaagaagaagagactaagctctcagataagacaagagtggcagacactaaggatgaagttgagaaaaagaagcatgctgagcttcttgcacttccacctcatgggtctgaggtttacattgggggcattcctcaaaatgtttctgaagaagatttgagggtcttctgtcaatctgtgggagaagtttcagaggttaggataatgaagggaaaagaatccggtgaagcaaaaggttatgcttttgtgaccttcatgacaaaggaattggcatctaaggctattgaggagctgaacaactctgaatttaagggaaaaagaataaagtgctccacatctcaagttaagcacaagttgttcattggtaatgttcctaaatattggactgaaggagatatgaaaaaagttgttgctgaaattggccctggagtaatttgtgtggaactgttgaaggacccacagaattctagccgtaaccgaggatatgcttttatagagtattacaatcatgcttgtgcagagtattcaaggcagaagatgtcaaactcaaactttaaacttggcagcaatgctccaacggtgagctgggctgatccaaggaattctgaatcatctgcaatctctctggtaaaatcagtgtatgtaaagaaccttccagaaaacattactcaggatcgtctcaaggagctgtttgaacatcatggaaagatcacaaaagtggttctcccttctgctaaatcgggtcaagaaaagagcagatttggttttgttcactttgctgaaaggtcaagtgccatgaaggctttgaagaacacagagaaatatgaaattgatggacaattgctggagtgttcgctagcaaagccacaagcaaattcacaaaaaccagctttacttcccacttatccacctcatcttggttatggtatggttggtggtgctataggtgcaggatatggtgctgctggctttgcacaaccactgatgtatggtcccggaccaacccctggtggcatggcaatgatgccaatgatgttatcagatggaaggattgcatacatagtgcaacagccagggtttcaacagcctgccccagtatcccgacatgggaggagtggtggcagtagctccagtggtgggaaatgcagtaatgatgataatcgcaatcgtgggcatggccgctatcatccctactaacttaatgggctttaaggagctagcaaaacaaggaattgcacctgaggcctaaaagtgttgacgattcaaggcacagcgcccaactgattaagacaaacagggcgctgctgtgaatgcagttatgattttgtaatacatctacctagggccaagattcagttaagcatctaagtcaggttttcgtataattttacttatcttgtccatcaattttttgatctcaaattcttaaagagaccacagtgatctatctgaaggacatgataaatcttactagattgatgaaaaattatgtagaggtgtttcagatgtttagcttgcggttcatgtattcatgtttctaaccgtcgttctagaagaattggaacgatgtttgaatg

SEQ ID NO: 55117 - protein, 509 aa, Glycine max
  peptide (1)..(509): Ceres Seq. ID no. 15172238
  misc_feature (230)..(305): Pfam Name: RNA recognition motif. (a.k.a. RRM, RBD, or RNP domain) Pfam Description: RNA recognition motif. (a.k.a. RRM, RBD, or RNP
  misc_feature (144)..(406): Homolog of NCBI NO: 31242563 NR Description: ENSANGP00000023817 [Anopheles gambiae]
  misc_feature (432)..(509): Homolog of NCBI NO: 15241771 NR Description: RNA recognition motif (RRM)-containing protein
  misc_feature (291)..(389): Homolog of NCBI NO: 15241771 NR Description: RNA recognition motif (RRM)-containing protein
  misc_feature (432)..(509): Homolog of NCBI NO: 22327128 NR Description: RNA recognition motif (RRM)-containing protein
  misc_feature (291)..(389): Homolog of NCBI NO: 22327128 NR Description: RNA recognition motif (RRM)-containing protein
  misc_feature (50)..(504): Homolog of NCBI NO: 7485284 NR Description: hypothetical protein A_TM018A10.14 - Arabidopsis
  misc_feature (56)..(509): Homolog of NCBI NO: 37531112 NR Description: putative RNA-binding protein
  misc_feature (52)..(504): Homolog of NCBI NO: 18411454 NR Description: RNA recognition motif (RRM)-containing protein
  misc_feature (45)..(492): Homolog of NCBI NO: 29371361 NR Description: putative RNA-binding protein
  misc_feature (65)..(509): Homolog of NCBI NO: 15231284 NR Description: RNA recognition motif (RRM)-containing protein
RATVNLATIPYHEHKGARAQRIRVSNVAILELPFRFILAHDLMQKMPGTKQRDTSQNPDSPEGNSEPEKPTDSDERVDFDGDNDQEETMEEEVEYEEVEEEEEEEEEEEEEEEEEETKLSDKTRVADTKDEVEKKKHAELLALPPHGSEVYIGGIPQNVSEEDLRVFCQSVGEVSEVRIMKGKESGEAKGYAFVTFMTKELASKAIEELNNSEFKGKRIKCSTSQVKHKLFIGNVPKYWTEGDMKKVVAEIGPGVICVELLKDPQNSSRNRGYAFIEYYNHACAEYSRQKMSNSNFKLGSNAPTVSWADPRNSESSAISLVKSVYVKNLPENITQDRLKELFEHHGKITKVVLPSAKSGQEKSRFGFVHFAERSSAMKALKNTEKYEIDGQLLECSLAKPQANSQKPALLPTYPPHLGYGMVGGAIGAGYGAAGFAQPLMYGPGPTPGGMAMMPMMLSDGRIAYIVQQPGFQQPAPVSRHGRSGGSSSSGGKCSNDDNRNRGHGRYHPY

SEQ ID NO: 55118 - protein, 467 aa, Glycine max
  peptide (1)..(467): Ceres Seq. ID no. 15172239
  misc_feature (188)..(263): Pfam Name: RNA recognition motif. (a.k.a. RRM, RBD, or RNP domain) Pfam Description: RNA recognition motif. (a.k.a. RRM, RBD, or RNP
  misc_feature (102)..(364): Homolog of NCBI NO: 31242563 NR Description: ENSANGP00000023817 [Anopheles gambiae]
  misc_feature (390)..(467): Homolog of NCBI NO: 15241771 NR Description: RNA recognition motif (RRM)-containing protein
  misc_feature (249)..(347): Homolog of NCBI NO: 15241771 NR Description: RNA recognition motif (RRM)-containing protein
  misc_feature (390)..(467): Homolog of NCBI NO: 22327128 NR Description: RNA recognition motif (RRM)-containing protein
  misc_feature (249)..(347): Homolog of NCBI NO: 22327128 NR Description: RNA recognition motif (RRM)-containing protein
  misc_feature (8)..(462): Homolog of NCBI NO: 7485284 NR Description: hypothetical protein A_TM018A10.14 - Arabidopsis
  misc_feature (14)..(467): Homolog of NCBI NO: 37531112 NR Description: putative RNA-binding protein
  misc_feature (10)..(462): Homolog of NCBI NO: 18411454 NR Description: RNA recognition motif (RRM)-containing protein
  misc_feature (3)..(450): Homolog of NCBI NO: 29371361 NR Description: putative RNA-binding protein
  misc_feature (23)..(467): Homolog of NCBI NO: 15231284 NR Description: RNA recognition motif (RRM)-containing protein
MQKMPGTKQRDTSQNPDSPEGNSEPEKPTDSDERVDFDGDNDQEETMEEEVEYEEVEEEEEEEEEEEEEEEEEETKLSDKTRVADTKDEVEKKKHAELLALPPHGSEVYIGGIPQNVSEEDLRVFCQSVGEVSEVRIMKGKESGEAKGYAFVTFMTKELASKAIEELNNSEFKGKRIKCSTSQVKHKLFIGNVPKYWTEGDMKKVVAEIGPGVICVELLKDPQNSSRNRGYAFIEYYNHACAEYSRQKMSNSNFKLGSNAPTVSWADPRNSESSAISLVKSVYVKNLPENITQDRLKELFEHHGKITKVVLPSAKSGQEKSRFGFVHFAERSSAMKALKNTEKYEIDGQLLECSLAKPQANSQKPALLPTYPPHLGYGMVGGAIGAGYGAAGFAQPLMYGPGPTPGGMAMMPMMLSDGRIAYIVQQPGFQQPAPVSRHGRSGGSSSSGGKCSNDDNRNRGHGRYHPY

SEQ ID NO: 55119 - protein, 464 aa, Glycine max
  peptide (1)..(464): Ceres Seq. ID no. 15172240
  misc_feature (185)..(260): Pfam Name: RNA recognition motif. (a.k.a. RRM, RBD, or RNP domain) Pfam Description: RNA recognition motif. (a.k.a. RRM, RBD, or RNP
  misc_feature (99)..(361): Homolog of NCBI NO: 31242563 NR Description: ENSANGP00000023817 [Anopheles gambiae]
  misc_feature (387)..(464): Homolog of NCBI NO: 15241771 NR Description: RNA recognition motif (RRM)-containing protein
  misc_feature (246)..(344): Homolog of NCBI NO: 15241771 NR Description: RNA recognition motif (RRM)-containing protein
  misc_feature (387)..(464): Homolog of NCBI NO: 22327128 NR Description: RNA recognition motif (RRM)-containing protein
  misc_feature (246)..(344): Homolog of NCBI NO: 22327128 NR Description: RNA recognition motif (RRM)-containing protein
  misc_feature (5)..(459): Homolog of NCBI NO: 7485284 NR Description: hypothetical protein A_TM018A10.14 - Arabidopsis
  misc_feature (11)..(464): Homolog of NCBI NO: 37531112 NR Description: putative RNA-binding protein
  misc_feature (7)..(459): Homolog of NCBI NO: 18411454 NR Description: RNA recognition motif (RRM)-containing protein
  misc_feature (1)..(447): Homolog of NCBI NO: 29371361 NR Description: putative RNA-binding protein
  misc_feature (20)..(464): Homolog of NCBI NO: 15231284 NR Description: RNA recognition motif (RRM)-containing protein
MPGTKQRDTSQNPDSPEGNSEPEKPTDSDERVDFDGDNDQEETMEEEVEYEEVEEEEEEEEEEEEEEEEEETKLSDKTRVADTKDEVEKKKHAELLALPPHGSEVYIGGIPQNVSEEDLRVFCQSVGEVSEVRIMKGKESGEAKGYAFVTFMTKELASKAIEELNNSEFKGKRIKCSTSQVKHKLFIGNVPKYWTEGDMKKVVAEIGPGVICVELLKDPQNSSRNRGYAFIEYYNHACAEYSRQKMSNSNFKLGSNAPTVSWADPRNSESSAISLVKSVYVKNLPENITQDRLKELFEHHGKITKVVLPSAKSGQEKSRFGFVHFAERSSAMKALKNTEKYEIDGQLLECSLAKPQANSQKPALLPTYPPHLGYGMVGGAIGAGYGAAGFAQPLMYGPGPTPGGMAMMPMMLSDGRIAYIVQQPGFQQPAPVSRHGRSGGSSSSGGKCSNDDNRNRGHGRYHPY

SEQ ID NO: 55120 - DNA, 1927 bp, Glycine max
  misc_feature (1)..(1927): Ceres Seq. ID no. 15171856
gctcttccaaaccttcccttcaccttctataccctgccttgcaaaacaatattccaccccctcatcttcttttcttacacaaaccaatattttcataaaacagaaaccatggtgtcatcaaaacctagtggcttctatgaacaaaggagctttccatcaatcaaaatcctcatacttatactccttaattctatacttcacaaagccaactcaggctgcagcaactctgtttccaactccttagttccatttctatctcatgagatactctcatcattgcaaacactacctctagatggccactttagcctaagggacaatgaggatgctgccaaggactttggcaacatacaccattttcctcccctagcagtgctgtatccaaaaacagtttctgacatatcactcaccatcaagcatgtttttgaaatggggtttgccgcacagctgaagattgctgctagaggccatggccattcacttcaaggccaagcacaagtacatggaggcctagtcattaacatggagtctttacagggtcctgaaatgaaagttcacaatggagaattgccttatgtggatgtctcaggaggtgagttgtggataaacattctgcatgagactcttaaacttgggttggcaccaaagtcatggacagattaccttcacctcactgttgggggtactctttcaaatgctggcataagtgggcaagccttcaaacatggacctcagatcaataacatctttcagcttgaagtgatcacaggaaaaggagaggtggttacctgctcagggaaccgaaacgctgaccttttttatggtgttcttggagggcttggtcaatttggcatcattacaagggctagaatttctcttgaaccagcacctaagatggttaaatggattagggtgctctactcagagttctctacatttactagggatcaagagtatttggtatcacttaacaacacatttgattatattgaagggtttgtgatcataaacagaactggcatccttaacaattggagatcatcctttgatcccaaaaaccaacttcaagccagccaattcagttctgatgggaaaaccttctactgtctagagatggcaaaatatttcaaccctggtgaagctgaagccatgaatcagagtgtagcttacctactgtcaaagttgagttacattccatccacactcttcctatcagaagtttcttacgtggaattcttagacagagtgcatgtttctgagaaaaagctaagagcacaaggcttgtgggaagttccccatccttggctgaaccttctgatcccaaggagtgagattcataactttgctgaagaagtatttggcaatattcttaaagacacaaacaatggacccatactcattcaccccgtcaaccaaacacggtggaacagcaaaacatcattgattaccccagaggaagatattttttacctagtagcattcctatccttagctctcccaaattctaccggtgcagacagtttagaacacattctagcccaaaacaaaagagtcatagatttctacactggtgccaaaatgagagtgaagcaataccttccccattacagcacacaggaagaatggcaagtccattttgggtcacgatgggagacattcgtggaaagaaaaagggcctatgacccactagcactgctagcccctggccacaaaatctttcaaaaggctgtctcctcttcgtgttagttttctagtgtgttgtaaggttgtgaactaatgataaattacgtaagagtgttgcttcctgcacctctctggcatcccattacattacggaatgtccaatctgtaatgtaatttaatcattctgtaatgtaatggggcatgaagcaaaatttgaaggtgcacgaagtttcacttgttaatc

SEQ ID NO: 55121 - protein, 581 aa, Glycine max
  peptide (1)..(581): Ceres Seq. ID no. 15171857
  misc_feature (122)..(282): Pfam Name: FAD binding domain Pfam Description: FAD binding domain
  misc_feature (90)..(574): Homolog of NCBI NO: 22330649 NR Description: cytokinin oxidase family [Arabidopsis thaliana]
  misc_feature (90)..(580): Homolog of NCBI NO: 15229433 NR Description: cytokinin oxidase family [Arabidopsis thaliana]
  misc_feature (88)..(576): Homolog of NCBI NO: 38520865 NR Description: cytokinin oxidase 3 [Zea mays]
  misc_feature (88)..(576): Homolog of NCBI NO: 38520863 NR Description: cytokinin oxidase 3 [Zea mays]
  misc_feature (77)..(579): Homolog of NCBI NO: 28883584 NR Description: cytokinin dehydrogenase 3 [Hordeum vulgare]
  misc_feature (88)..(576): Homolog of NCBI NO: 38520861 NR Description: cytokinin oxidase 2 [Zea mays var. nobilis]
  misc_feature (88)..(576): Homolog of NCBI NO: 20161335 NR Description: putative cytokinin oxidase
  misc_feature (85)..(579): Homolog of NCBI NO: 27312007 NR Description: cytokinin dehydrogenase 2 [Hordeum vulgare]
  misc_feature (85)..(579): Homolog of NCBI NO: 23267157 NR Description: cytokinin dehydrogenase 2 [Hordeum vulgare]
  misc_feature (45)..(575): Homolog of NCBI NO: 15227374 NR Description: cytokinin oxidase family [Arabidopsis thaliana]
ALPNLPFTFYTLPCKTIFHPLIFFSYTNQYFHKTETMVSSKPSGFYEQRSFPSIKILILILLNSILHKANSGCSNSVSNSLVPFLSHEILSSLQTLPLDGHFSLRDNEDAAKDFGNIHHFPPLAVLYPKTVSDISLTIKHVFEMGFAAQLKIAARGHGHSLQGQAQVHGGLVINMESLQGPEMKVHNGELPYVDVSGGELWINILHETLKLGLAPKSWTDYLHLTVGGTLSNAGISGQAFKHGPQINNIFQLEVITGKGEVVTCSGNRNADLFYGVLGGLGQFGIITRARISLEPAPKMVKWIRVLYSEFSTFTRDQEYLVSLNNTFDYIEGFVIINRTGILNNWRSSFDPKNQLQASQFSSDGKTFYCLEMAKYFNPGEAEAMNQSVAYLLSKLSYIPSTLFLSEVSYVEFLDRVHVSEKKLRAQGLWEVPHPWLNLLIPRSEIHNFAEEVFGNILKDTNNGPILIHPVNQTRWNSKTSLITPEEDIFYLVAFLSLALPNSTGADSLEHILAQNKRVIDFYTGAKMRVKQYLPHYSTQEEWQVHFGSRWETFVERKRAYDPLALLAPGHKIFQKAVSSSC

SEQ ID NO: 55122 - protein, 545 aa, Glycine max
  peptide (1)..(545): Ceres Seq. ID no. 15171858
  misc_feature (86)..(246): Pfam Name: FAD binding domain Pfam Description: FAD binding domain
  misc_feature (54)..(538): Homolog of NCBI NO: 22330649 NR Description: cytokinin oxidase family [Arabidopsis thaliana]
  misc_feature (54)..(544): Homolog of NCBI NO: 15229433 NR Description: cytokinin oxidase family [Arabidopsis thaliana]
  misc_feature (52)..(540): Homolog of NCBI NO: 38520865 NR Description: cytokinin oxidase 3 [Zea mays]
  misc_feature (52)..(540): Homolog of NCBI NO: 38520863 NR Description: cytokinin oxidase 3 [Zea mays]
  misc_feature (41)..(543): Homolog of NCBI NO: 28883584 NR Description: cytokinin dehydrogenase 3 [Hordeum vulgare]
  misc_feature (52)..(540): Homolog of NCBI NO: 38520861 NR Description: cytokinin oxidase 2 [Zea mays var. nobilis]
  misc_feature (52)..(540): Homolog of NCBI NO: 20161335 NR Description: putative cytokinin oxidase
  misc_feature (49)..(543): Homolog of NCBI NO: 27312007 NR Description: cytokinin dehydrogenase 2 [Hordeum vulgare]
  misc_feature (49)..(543): Homolog of NCBI NO: 23267157 NR Description: cytokinin dehydrogenase 2 [Hordeum vulgare]
  misc_feature (9)..(539): Homolog of NCBI NO: 15227374 NR Description: cytokinin oxidase family [Arabidopsis thaliana]
MVSSKPSGFYEQRSFPSIKILILILLNSILHKANSGCSNSVSNSLVPFLSHEILSSLQTLPLDGHFSLRDNEDAAKDFGNIHHFPPLAVLYPKTVSDISLTIKHVFEMGFAAQLKIAARGHGHSLQGQAQVHGGLVINMESLQGPEMKVHNGELPYVDVSGGELWINILHETLKLGLAPKSWTDYLHLTVGGTLSNAGISGQAFKHGPQINNIFQLEVITGKGEVVTCSGNRNADLFYGVLGGLGQFGIITRARISLEPAPKMVKWIRVLYSEFSTFTRDQEYLVSLNNTFDYIEGFVIINRTGILNNWRSSFDPKNQLQASQFSSDGKTFYCLEMAKYFNPGEAEAMNQSVAYLLSKLSYIPSTLFLSEVSYVEFLDRVHVSEKKLRAQGLWEVPHPWLNLLIPRSEIHNFAEEVFGNILKDTNNGPILIHPVNQTRWNSKTSLITPEEDIFYLVAFLSLALPNSTGADSLEHILAQNKRVIDFYTGAKMRVKQYLPHYSTQEEWQVHFGSRWETFVERKRAYDPLALLAPGHKIFQKAVSSSC

SEQ ID NO: 55123 - protein, 438 aa, Glycine max
  peptide (1)..(438): Ceres Seq. ID no. 15171859
  misc_feature (1)..(139): Pfam Name: FAD binding domain Pfam Description: FAD binding domain
  misc_feature (1)..(431): Homolog of NCBI NO: 22330649 NR Description: cytokinin oxidase family [Arabidopsis thaliana]
  misc_feature (1)..(437): Homolog of NCBI NO: 15229433 NR Description: cytokinin oxidase family [Arabidopsis thaliana]
  misc_feature (1)..(433): Homolog of NCBI NO: 38520865 NR Description: cytokinin oxidase 3 [Zea mays]
  misc_feature (1)..(433): Homolog of NCBI NO: 38520863 NR Description: cytokinin oxidase 3 [Zea mays]
  misc_feature (1)..(436): Homolog of NCBI NO: 28883584 NR Description: cytokinin dehydrogenase 3 [Hordeum vulgare]
  misc_feature (1)..(433): Homolog of NCBI NO: 38520861 NR Description: cytokinin oxidase 2 [Zea mays var. nobilis]
  misc_feature (1)..(433): Homolog of NCBI NO: 20161335 NR Description: putative cytokinin oxidase
  misc_feature (1)..(436): Homolog of NCBI NO: 27312007 NR Description: cytokinin dehydrogenase 2 [Hordeum vulgare]
  misc_feature (1)..(436): Homolog of NCBI NO: 23267157 NR Description: cytokinin dehydrogenase 2 [Hordeum vulgare]
  misc_feature (1)..(432): Homolog of NCBI NO: 15227374 NR Description: cytokinin oxidase family [Arabidopsis thaliana]
MGFAAQLKIAARGHGHSLQGQAQVHGGLVINMESLQGPEMKVHNGELPYVDVSGGELWINILHETLKLGLAPKSWTDYLHLTVGGTLSNAGISGQAFKHGPQINNIFQLEVITGKGEVVTCSGNRNADLFYGVLGGLGQFGIITRARISLEPAPKMVKWIRVLYSEFSTFTRDQEYLVSLNNTFDYIEGFVIINRTGILNNWRSSFDPKNQLQASQFSSDGKTFYCLEMAKYFNPGEAEAMNQSVAYLLSKLSYIPSTLFLSEVSYVEFLDRVHVSEKKLRAQGLWEVPHPWLNLLIPRSEIHNFAEEVFGNILKDTNNGPILIHPVNQTRWNSKTSLITPEEDIFYLVAFLSLALPNSTGADSLEHILAQNKRVIDFYTGAKMRVKQYLPHYSTQEEWQVHFGSRWETFVERKRAYDPLALLAPGHKIFQKAVSSSC

SEQ ID NO: 55124 - DNA, 1192 bp, Glycine max
  misc_feature (1)..(1192): Ceres Seq. ID no. 14308776
atatcacgttgttcttcacctctgtttcacttcactagctgctaatcaagccctctcttcctacatttctcaggggggacttgaagcaagcacattaatggagagggacccaaacatgggcaaggaaaaagtggtttcaaattccacattgcttccctcgtccacaaaagggttcaaggacaagggcatccccaacaatagcatgccctcctggcttctcaccaacatttctgacttggaggagaggatgaaagtgttggcaatgagtacaacagaagatgaagaaatgggagacacatttgctgatagagcagaaacttactaccaaaagaggcctcagctactgtcccttctgcaggacttgtacaatggctacataaccttatctgaccgttacatccaaacactggccaaacacaagcaccatagtagacactcttctcaagtttcaactgtagatgaaggcttctctgaccaagaagaagaagctagtggtgtgagccacagtgattcagacattgaaagctcaatctcctaccaacacccccaacacatgatgatgccaataggcctcccaaaaagctccatgcttgatgttgatgctattgttgctgagcttttgataaggaatattgagtatgacatgttgatgcatgaagttggtgtcatggagaggaggtactgtgagtcctcaaggaaaagtgagcttcaaaagagccttcttgaggtgttggagtctgagaggattgttcttttgaatgagaatgctagcttgggctatagggtcaacactttggtggaagaaaacaaggagcttgcatctgagtcagtgttcatcaagagaaaagccggtgagcttgctaagtgtgtgctgaagatgagggaggatcatagagtgtacttgctgcacaggaaaattgaggatcttcaggctcagatacatgccttggagaagaggaacaaggagtactatgataagcttctgagaagagatggtcatgaagatggtaaaaaaggtgtggctttggaggtttgtgttcagatggacaagcaaaagaggttcaagtggaaagatggcaacacttctgggatgaagaaatttcatgggaagaagtcccccccaagtttgtggaaaaagctgaagaacatggatttgttgttgtgtggtactaatccaacttgtgcttgatga

SEQ ID NO: 55125 - protein, 395 aa, Glycine max
  peptide (1)..(395): Ceres Seq. ID no. 14308777
  misc_feature (76)..(271): Homolog of NCBI NO: 7485917 NR Description: hypothetical protein F21B7.25 - Arabidopsis
  misc_feature (71)..(248): Homolog of NCBI NO: 22326709 NR Description: expressed protein [Arabidopsis thaliana]
  misc_feature (66)..(271): Homolog of NCBI NO: 30678573 NR Description: expressed protein [Arabidopsis thaliana]
  misc_feature (66)..(271): Homolog of NCBI NO: 9280668 NR Description: F21B7.9 [Arabidopsis thaliana]
  misc_feature (73)..(178): Homolog of NCBI NO: 22330107 NR Description: hypothetical protein [Arabidopsis thaliana]
  misc_feature (73)..(178): Homolog of NCBI NO: 8778711 NR Description: T1N15.1 [Arabidopsis thaliana]
  misc_feature (171)..(338): Homolog of NCBI NO: 22330107 NR Description: hypothetical protein [Arabidopsis thaliana]
  misc_feature (67)..(361): Homolog of NCBI NO: 30684631 NR Description: expressed protein [Arabidopsis thaliana]
  misc_feature (51)..(361): Homolog of NCBI NO: 9294158 NR Description: contains similarity to unknown
  misc_feature (69)..(327): Homolog of NCBI NO: 24431596 NR Description: Unknown protein [Oryza sativa (japonica
YHVVLHLCFTSLAANQALSSYISQGGLEASTLMERDPNMGKEKVVSNSTLLPSSTKGFKDKGIPNNSMPSWLLTNISDLEERMKVLAMSTTEDEEMGDTFADRAETYYQKRPQLLSLLQDLYNGYITLSDRYIQTLAKHKHHSRHSSQVSTVDEGFSDQEEEASGVSHSDSDIESSISYQHPQHMMMPIGLPKSSMLDVDAIVAELLIRNIEYDMLMHEVGVMERRYCESSRKSELQKSLLEVLESERIVLLNENASLGYRVNTLVEENKELASESVFIKRKAGELAKCVLKMREDHRVYLLHRKIEDLQAQIHALEKRNKEYYDKLLRRDGHEDGKKGVALEVCVQMDKQKRFKWKDGNTSGMKKFHGKKSPPSLWKKLKNMDLLLCGTNPTCA

SEQ ID NO: 55126 - protein, 363 aa, Glycine max
  peptide (1)..(363): Ceres Seq. ID no. 14308778
  misc_feature (44)..(239): Homolog of NCBI NO: 7485917 NR Description: hypothetical protein F21B7.25 - Arabidopsis
  misc_feature (39)..(216): Homolog of NCBI NO: 22326709 NR Description: expressed protein [Arabidopsis thaliana]
  misc_feature (34)..(239): Homolog of NCBI NO: 30678573 NR Description: expressed protein [Arabidopsis thaliana]
  misc_feature (34)..(239): Homolog of NCBI NO: 9280668 NR Description: F21B7.9 [Arabidopsis thaliana]
  misc_feature (41)..(146): Homolog of NCBI NO: 22330107 NR Description: hypothetical protein [Arabidopsis thaliana]
  misc_feature (41)..(146): Homolog of NCBI NO: 8778711 NR Description: T1N15.1 [Arabidopsis thaliana]
  misc_feature (139)..(306): Homolog of NCBI NO: 22330107 NR Description: hypothetical protein [Arabidopsis thaliana]
  misc_feature (35)..(329): Homolog of NCBI NO: 30684631 NR Description: expressed protein [Arabidopsis thaliana]
  misc_feature (19)..(329): Homolog of NCBI NO: 9294158 NR Description: contains similarity to unknown
  misc_feature (37)..(295): Homolog of NCBI NO: 24431596 NR Description: Unknown protein [Oryza sativa (japonica
MERDPNMGKEKVVSNSTLLPSSTKGFKDKGIPNNSMPSWLLTNISDLEERMKVLAMSTTEDEEMGDTFADRAETYYQKRPQLLSLLQDLYNGYITLSDRYIQTLAKHKHHSRHSSQVSTVDEGFSDQEEEASGVSHSDSDIESSISYQHPQHMMMPIGLPKSSMLDVDAIVAELLIRNIEYDMLMHEVGVMERRYCESSRKSELQKSLLEVLESERIVLLNENASLGYRVNTLVEENKELASESVFIKRKAGELAKCVLKMREDHRVYLLHRKIEDLQAQIHALEKRNKEYYDKLLRRDGHEDGKKGVALEVCVQMDKQKRFKWKDGNTSGMKKFHGKKSPPSLWKKLKNMDLLLCGTNPTCA

SEQ ID NO: 55127 - protein, 357 aa, Glycine max
  peptide (1)..(357): Ceres Seq. ID no. 14308779
  misc_feature (38)..(233): Homolog of NCBI NO: 7485917 NR Description: hypothetical protein F21B7.25 - Arabidopsis
  misc_feature (33)..(210): Homolog of NCBI NO: 22326709 NR Description: expressed protein [Arabidopsis thaliana]
  misc_feature (28)..(233): Homolog of NCBI NO: 30678573 NR Description: expressed protein [Arabidopsis thaliana]
  misc_feature (28)..(233): Homolog of NCBI NO: 9280668 NR Description: F21B7.9 [Arabidopsis thaliana]
  misc_feature (35)..(140): Homolog of NCBI NO: 22330107 NR Description: hypothetical protein [Arabidopsis thaliana]
  misc_feature (35)..(140): Homolog of NCBI NO: 8778711 NR Description: T1N15.1 [Arabidopsis thaliana]
  misc_feature (133)..(300): Homolog of NCBI NO: 22330107 NR Description: hypothetical protein [Arabidopsis thaliana]
  misc_feature (29)..(323): Homolog of NCBI NO: 30684631 NR Description: expressed protein [Arabidopsis thaliana]
  misc_feature (13)..(323): Homolog of NCBI NO: 9294158 NR Description: contains similarity to unknown
  misc_feature (31)..(289): Homolog of NCBI NO: 24431596 NR Description: Unknown protein [Oryza sativa (japonica
MGKEKVVSNSTLLPSSTKGFKDKGIPNNSMPSWLLTNISDLEERMKVLAMSTTEDEEMGDTFADRAETYYQKRPQLLSLLQDLYNGYITLSDRYIQTLAKHKHHSRHSSQVSTVDEGFSDQEEEASGVSHSDSDIESSISYQHPQHMMMPIGLPKSSMLDVDAIVAELLIRNIEYDMLMHEVGVMERRYCESSRKSELQKSLLEVLESERIVLLNENASLGYRVNTLVEENKELASESVFIKRKAGELAKCVLKMREDHRVYLLHRKIEDLQAQIHALEKRNKEYYDKLLRRDGHEDGKKGVALEVCVQMDKQKRFKWKDGNTSGMKKFHGKKSPPSLWKKLKNMDLLLCGTNPTCA

SEQ ID NO: 55128 - DNA, 2255 bp, Glycine max
  misc_feature (1)..(2255): Ceres Seq. ID no. 15176771
gaattaagattgcattgcattaggctttcacaacacctcagcgtcactgtaccagttggaaatggagacaataacagagaacggatcagatggtgtgagtttggcaagaaatacatccaacaacgcccgtcgagggttgccaatgatccaaacaaacatgaagccaacggattcggaattccaagtgtgccacgacgacagcaccccgccggtcagagcccaaaccattcacgagctccattctctgcagaagaaaaagtcaaccccttccactcccctctcagcaacgcaaggccccttcgccactgtttccgatgaggaacgccagaaacagcaactccaatcaatcagtgcgtcgttggcgtcgttgacgagggagtcagggcctaaggtggtgaaaggagacccagccactaaggcagagaaggggacacatgttcatcaccatccgcaaccacattactttgcttcaacggcgtttgatgtcagtgacagtgcgctcaaattcacccacgtcctctacaatctctcccccgctgagctgtatgagcaagcgattaagcacgagaaaggatcattcataacggcaacgggagcgttagctacactttctggagcaaaaacgggacgctctccccgagacaaacgggttgtcagggacgacaccaccgagcatgacctctggtggggaaagggctcgcccaatattgaaatggacgaacataccttcttaatcaacagagaaagagcagttgattacttgaactcccttgaaaaggtttatgtgaatgatcaatttctgaattgggatccagaacacagaatcaaagtccggatagtatctgcaagagcttatcactccctatttatgcacaatatgtgcatccgacccactcctgaagagctagaggaatttggaactccagacttcactatatacaatgcaggacagttcccttgtaatcgttacacacactacatgacttcatcaactagtattgacatcaacattgcaaggaaagaaatggtcatccttggcacacaatatgctggggaaatgaagaaaggtctctttggtttaatgcactacctcatgcccaagcgcaatattctctccctacattctgggtgcaatatgggcaaagatggcgatgttgcactcttttttggattatcaggtactggaaagacaactctgtctaccgatcataaccggtacttaattggagatgatgagcattgctggagtgaaaatggagtggcaaatattgaagggggttgctatgcaaagtgtgtcgatctttcaaaggataaagaaccagacatctggaatgccatcaaatttgggacagtactcgaaaatgttgtttttgatgagcatactcgagaggtagatttctctgacaaatctgtgaccgagaacactcgtgcagcatatcctattgagtacatacccaatgctaagataccgtgtgttgctccccatgcaaagaatgtcatccttctagcttgtgatgcatttggggtgctccccccagtaagcaagctgagcttggcccaaacaatgtaccatttcatcagtggctacacagccctggttgctgggacagaggatggtataaaagaaccacaggctacattctctgcttgtttcggggcagcgtttataatgatgcaccctaccaaatatgcagcaatgctagccgaaaagatgcagaagcatggggctactggatggcttgtcaatactggctggtcaggaggaagttatggattaggcaatcggattaagttagcgtatactaggaaaatcattgatgctattcactctgggagccttttgaatgcacagtacactaagactgaagtgtttgggcttgagatcccaacagcactagagggagtcccttctgaaatcttggaccctgtgaatacttggtctgacaagaaggcctatcaagatacacgcttgaaactagcaagcttattcaagaagaattttgatggattcacgacctacaagataggaggggatcagaagttgactgaagagattgtctctgctggtcctatattctgatgagagcatttcctatttagcgaaaaaaaaaatgaagtccaaaagcattcggttgattatttctacttaaaggttttcactgtatttagcttgcttgactataagacgatccctttattattgacacttacgagacaatacacaaatctgttattttgcgagcgtttaattattc

SEQ ID NO: 55129 - protein, 672 aa, Glycine max
  peptide (1)..(672): Ceres Seq. ID no. 15176772
  misc_feature (148)..(619): Pfam Name: Phosphoenolpyruvate carboxykinase Pfam Description: Phosphoenolpyruvate carboxykinase
  misc_feature (22)..(138): Homolog of NCBI NO: 37532252 NR Description: putative phosphoenolpyruvate carboxykinase
  misc_feature (86)..(672): Homolog of NCBI NO: 37532252 NR Description: putative phosphoenolpyruvate carboxykinase
  misc_feature (25)..(672): Homolog of NCBI NO: 12230480 NR Description: Phosphoenolpyruvate carboxykinase
  misc_feature (22)..(672): Homolog of NCBI NO: 22328084 NR Description: phosphoenolpyruvate carboxykinase (ATP) -related
  misc_feature (19)..(670): Homolog of NCBI NO: 1172571 NR Description: Phosphoenolpyruvate carboxykinase
  misc_feature (26)..(672): Homolog of NCBI NO: 15235730 NR Description: phosphoenolpyruvate carboxykinase (ATP) -related
  misc_feature (9)..(672): Homolog of NCBI NO: 16950587 NR Description: phosphoenolpyruvate carboxykinase [Lycopersicon
  misc_feature (4)..(672): Homolog of NCBI NO: 13785469 NR Description: phosphoenolpyruvate carboxykinase [Flaveria
  misc_feature (4)..(672): Homolog of NCBI NO: 13785471 NR Description: phosphoenolpyruvate carboxykinase [Flaveria
  misc_feature (4)..(672): Homolog of NCBI NO: 13785467 NR Description: phosphoenolpyruvate carboxykinase [Flaveria
METITENGSDGVSLARNTSNNARRGLPMIQTNMKPTDSEFQVCHDDSTPPVRAQTIHELHSLQKKKSTPSTPLSATQGPFATVSDEERQKQQLQSISASLASLTRESGPKVVKGDPATKAEKGTHVHHHPQPHYFASTAFDVSDSALKFTHVLYNLSPAELYEQAIKHEKGSFITATGALATLSGAKTGRSPRDKRVVRDDTTEHDLWWGKGSPNIEMDEHTFLINRERAVDYLNSLEKVYVNDQFLNWDPEHRIKVRIVSARAYHSLFMHNMCIRPTPEELEEFGTPDFTIYNAGQFPCNRYTHYMTSSTSIDINIARKEMVILGTQYAGEMKKGLFGLMHYLMPKRNILSLHSGCNMGKDGDVALFFGLSGTGKTTLSTDHNRYLIGDDEHCWSENGVANIEGGCYAKCVDLSKDKEPDIWNAIKFGTVLENVVFDEHTREVDFSDKSVTENTRAAYPIEYIPNAKIPCVAPHAKNVILLACDAFGVLPPVSKLSLAQTMYHFISGYTALVAGTEDGIKEPQATFSACFGAAFIMMHPTKYAAMLAEKMQKHGATGWLVNTGWSGGSYGLGNRIKLAYTRKIIDAIHSGSLLNAQYTKTEVFGLEIPTALEGVPSEILDPVNTWSDKKAYQDTRLKLASLFKKNFDGFTTYKIGGDQKLTEEIVSAGPIF

SEQ ID NO: 55130 - protein, 645 aa, Glycine max
  peptide (1)..(645): Ceres Seq. ID no. 15176773
  misc_feature (121)..(592): Pfam Name: Phosphoenolpyruvate carboxykinase Pfam Description: Phosphoenolpyruvate carboxykinase
  misc_feature (1)..(111): Homolog of NCBI NO: 37532252 NR Description: putative phosphoenolpyruvate carboxykinase
  misc_feature (59)..(645): Homolog of NCBI NO: 37532252 NR Description: putative phosphoenolpyruvate carboxykinase
  misc_feature (1)..(645): Homolog of NCBI NO: 12230480 NR Description: Phosphoenolpyruvate carboxykinase
  misc_feature (1)..(645): Homolog of NCBI NO: 22328084 NR Description: phosphoenolpyruvate carboxykinase (ATP) -related
  misc_feature (1)..(643): Homolog of NCBI NO: 1172571 NR Description: Phosphoenolpyruvate carboxykinase
  misc_feature (1)..(645): Homolog of NCBI NO: 15235730 NR Description: phosphoenolpyruvate carboxykinase (ATP) -related
  misc_feature (1)..(645): Homolog of NCBI NO: 16950587 NR Description: phosphoenolpyruvate carboxykinase [Lycopersicon
  misc_feature (1)..(645): Homolog of NCBI NO: 13785469 NR Description: phosphoenolpyruvate carboxykinase [Flaveria
  misc_feature (1)..(645): Homolog of NCBI NO: 13785471 NR Description: phosphoenolpyruvate carboxykinase [Flaveria
  misc_feature (1)..(645): Homolog of NCBI NO: 13785467 NR Description: phosphoenolpyruvate carboxykinase [Flaveria
MIQTNMKPTDSEFQVCHDDSTPPVRAQTIHELHSLQKKKSTPSTPLSATQGPFATVSDEERQKQQLQSISASLASLTRESGPKVVKGDPATKAEKGTHVHHHPQPHYFASTAFDVSDSALKFTHVLYNLSPAELYEQAIKHEKGSFITATGALATLSGAKTGRSPRDKRVVRDDTTEHDLWWGKGSPNIEMDEHTFLINRERAVDYLNSLEKVYVNDQFLNWDPEHRIKVRIVSARAYHSLFMHNMCIRPTPEELEEFGTPDFTIYNAGQFPCNRYTHYMTSSTSIDINIARKEMVILGTQYAGEMKKGLFGLMHYLMPKRNILSLHSGCNMGKDGDVALFFGLSGTGKTTLSTDHNRYLIGDDEHCWSENGVANIEGGCYAKCVDLSKDKEPDIWNAIKFGTVLENVVFDEHTREVDFSDKSVTENTRAAYPIEYIPNAKIPCVAPHAKNVILLACDAFGVLPPVSKLSLAQTMYHFISGYTALVAGTEDGIKEPQATFSACFGAAFIMMHPTKYAAMLAEKMQKHGATGWLVNTGWSGGSYGLGNRIKLAYTRKIIDAIHSGSLLNAQYTKTEVFGLEIPTALEGVPSEILDPVNTWSDKKAYQDTRLKLASLFKKNFDGFTTYKIGGDQKLTEEIVSAGPIF

SEQ ID NO: 55131 - protein, 640 aa, Glycine max
  peptide (1)..(640): Ceres Seq. ID no. 15176774
  misc_feature (116)..(587): Pfam Name: Phosphoenolpyruvate carboxykinase Pfam Description: Phosphoenolpyruvate carboxykinase
  misc_feature (1)..(106): Homolog of NCBI NO: 37532252 NR Description: putative phosphoenolpyruvate carboxykinase
  misc_feature (54)..(640): Homolog of NCBI NO: 37532252 NR Description: putative phosphoenolpyruvate carboxykinase
  misc_feature (1)..(640): Homolog of NCBI NO: 12230480 NR Description: Phosphoenolpyruvate carboxykinase
  misc_feature (1)..(640): Homolog of NCBI NO: 22328084 NR Description: phosphoenolpyruvate carboxykinase (ATP) -related
  misc_feature (1)..(638): Homolog of NCBI NO: 1172571 NR Description: Phosphoenolpyruvate carboxykinase
  misc_feature (1)..(640): Homolog of NCBI NO: 15235730 NR Description: phosphoenolpyruvate carboxykinase (ATP) -related
  misc_feature (1)..(640): Homolog of NCBI NO: 16950587 NR Description: phosphoenolpyruvate carboxykinase [Lycopersicon
  misc_feature (1)..(640): Homolog of NCBI NO: 13785469 NR Description: phosphoenolpyruvate carboxykinase [Flaveria
  misc_feature (1)..(640): Homolog of NCBI NO: 13785471 NR Description: phosphoenolpyruvate carboxykinase [Flaveria
  misc_feature (1)..(640): Homolog of NCBI NO: 13785467 NR Description: phosphoenolpyruvate carboxykinase [Flaveria
MKPTDSEFQVCHDDSTPPVRAQTIHELHSLQKKKSTPSTPLSATQGPFATVSDEERQKQQLQSISASLASLTRESGPKVVKGDPATKAEKGTHVHHHPQPHYFASTAFDVSDSALKFTHVLYNLSPAELYEQAIKHEKGSFITATGALATLSGAKTGRSPRDKRVVRDDTTEHDLWWGKGSPNIEMDEHTFLINRERAVDYLNSLEKVYVNDQFLNWDPEHRIKVRIVSARAYHSLFMHNMCIRPTPEELEEFGTPDFTIYNAGQFPCNRYTHYMTSSTSIDINIARKEMVILGTQYAGEMKKGLFGLMHYLMPKRNILSLHSGCNMGKDGDVALFFGLSGTGKTTLSTDHNRYLIGDDEHCWSENGVANIEGGCYAKCVDLSKDKEPDIWNAIKFGTVLENVVFDEHTREVDFSDKSVTENTRAAYPIEYIPNAKIPCVAPHAKNVILLACDAFGVLPPVSKLSLAQTMYHFISGYTALVAGTEDGIKEPQATFSACFGAAFIMMHPTKYAAMLAEKMQKHGATGWLVNTGWSGGSYGLGNRIKLAYTRKIIDAIHSGSLLNAQYTKTEVFGLEIPTALEGVPSEILDPVNTWSDKKAYQDTRLKLASLFKKNFDGFTTYKIGGDQKLTEEIVSAGPIF

SEQ ID NO: 55132 - DNA, 1523 bp, Glycine max
  misc_feature (1)..(1523): Ceres Seq. ID no. 14310547
atccaaaatgaagcttgaagaatctgtgtccagctccaacatcattgcccggctgcttccaccggaagatccgaatccgcaaaatggatcaatctccggagcggtgttcaacataacaaccaccatgatcggtgccggaatcatgtccattccggcgaccatgaaggttttaggcatagttccggggttggtggtgatcgtgttggtggcactgataacagatgtgactgtggagtttatgctaaggtacacaagttccggtaaatcctctacttacgctggcatgatggcagagtcctttgcctccataggatccctcgccgttaagatttgcgtcatcatatccaatttgggggtcctcatcatctatttcattatccttggagacgtgctctctggaaacgagtcgaacggaatcacacacttgggtattctacaagaatggtttggcatcaactggtggacctctcgtgcttttgctcttcttattgttgcactcttcataatgcttccacttgttatgttacgacgtgttgattcactgaagtatagttctgctatagcaatcctactagcatttgtgtttgttgtaatatgttcatcaatggcggttagtgcattgttgtctggaaaaactcaaacactaagaatagtgcctgatttctctcaagccaccgtccttgaccttttcaccactatcccagtgtttgtcacgggtttcggattccatgtcaatgttcatccaattagagcagagctaggaaaagttgcacacatgggtttggctgcacggatttcgttgataatctgcgtggctatttactttgctattggtttctttgggtaccttttatttggggactccatcatgcccgatgtgttggtaaactttgaccaaaactcccatacaagtgctggtcgattactcaataccattgttcggttaagttatgcactccatcttgcacttgtgttcccaatcatgaactattccttgagggccaacatagatgaactaattttctcaaacaaaaataagcctccccttgcatcagataccccaagatttgtgtcactcactttgactttgctagccctcacatactttgtggctgtggccatcccaaatatatggtttttttttcagttcttgggatccacaaccattgtttgcacctcattcatcttccctgccgcaattgttctaagggacatgcatggcatatcaaagacaaaagatcaagtgatggcaatagtggtgattgttttggctgtaggaacaagcggaattgctatatggaccaacttgaatggttcaggggctgctcaatgattaaccatgatgctatataacacccagtcttttcaagttttagggaagcctagtgaacagctgcatcaatttggtccttaatttgattaatttatcttatagaaattaatttaataacatttaaaggtgagattgagaattgcacatcttgtattttgaaactatagacgatcctactttgattcaaacg

SEQ ID NO: 55133 - protein, 443 aa, Glycine max
  peptide (1)..(443): Ceres Seq. ID no. 14310548
  misc_feature (27)..(319): Homolog of NCBI NO: 24461850 NR Description: CTV.3 [Poncirus trifoliata]
  misc_feature (27)..(429): Homolog of NCBI NO: 18412864 NR Description: amino acid transporter family [Arabidopsis
  misc_feature (66)..(436): Homolog of NCBI NO: 25408697 NR Description: hypothetical protein At2g40420 [imported] -
  misc_feature (28)..(435): Homolog of NCBI NO: 15241555 NR Description: amino acid transporter family [Arabidopsis
  misc_feature (28)..(435): Homolog of NCBI NO: 9758059 NR Description: amino acid transporter-like protein [Arabidopsis
  misc_feature (8)..(435): Homolog of NCBI NO: 18406463 NR Description: amino acid transporter family [Arabidopsis
  misc_feature (18)..(435): Homolog of NCBI NO: 34898706 NR Description: hypothetical protein [Oryza sativa (japonica
  misc_feature (30)..(414): Homolog of NCBI NO: 34907894 NR Description: P0439E11.11 [Oryza sativa (japonica
  misc_feature (11)..(436): Homolog of NCBI NO: 30688270 NR Description: amino acid transporter family [Arabidopsis
  misc_feature (14)..(436): Homolog of NCBI NO: 15228851 NR Description: amino acid transporter family [Arabidopsis
SKMKLEESVSSSNIIARLLPPEDPNPQNGSISGAVFNITTTMIGAGIMSIPATMKVLGIVPGLVVIVLVALITDVTVEFMLRYTSSGKSSTYAGMMAESFASIGSLAVKICVIISNLGVLIIYFIILGDVLSGNESNGITHLGILQEWFGINWWTSRAFALLIVALFIMLPLVMLRRVDSLKYSSAIAILLAFVFVVICSSMAVSALLSGKTQTLRIVPDFSQATVLDLFTTIPVFVTGFGFHVNVHPIRAELGKVAHMGLAARISLIICVAIYFAIGFFGYLLFGDSIMPDVLVNFDQNSHTSAGRLLNTIVRLSYALHLALVFPIMNYSLRANIDELIFSNKNKPPLASDTPRFVSLTLTLLALTYFVAVAIPNIWFFFQFLGSTTIVCTSFIFPAAIVLRDMHGISKTKDQVMAIVVIVLAVGTSGIAIWTNLNGSGAAQ

SEQ ID NO: 55134 - protein, 441 aa, Glycine max
  peptide (1)..(441): Ceres Seq. ID no. 14310549
  misc_feature (25)..(317): Homolog of NCBI NO: 24461850 NR Description: CTV.3 [Poncirus trifoliata]
  misc_feature (25)..(427): Homolog of NCBI NO: 18412864 NR Description: amino acid transporter family [Arabidopsis
  misc_feature (64)..(434): Homolog of NCBI NO: 25408697 NR Description: hypothetical protein At2g40420 [imported] -
  misc_feature (26)..(433): Homolog of NCBI NO: 15241555 NR Description: amino acid transporter family [Arabidopsis
  misc_feature (26)..(433): Homolog of NCBI NO: 9758059 NR Description: amino acid transporter-like protein [Arabidopsis
  misc_feature (6)..(433): Homolog of NCBI NO: 18406463 NR Description: amino acid transporter family [Arabidopsis
  misc_feature (16)..(433): Homolog of NCBI NO: 34898706 NR Description: hypothetical protein [Oryza sativa (japonica
  misc_feature (28)..(412): Homolog of NCBI NO: 34907894 NR Description: P0439E11.11 [Oryza sativa (japonica
  misc_feature (9)..(434): Homolog of NCBI NO: 30688270 NR Description: amino acid transporter family [Arabidopsis
  misc_feature (12)..(434): Homolog of NCBI NO: 15228851 NR Description: amino acid transporter family [Arabidopsis
MKLEESVSSSNIIARLLPPEDPNPQNGSISGAVFNITTTMIGAGIMSIPATMKVLGIVPGLVVIVLVALITDVTVEFMLRYTSSGKSSTYAGMMAESFASIGSLAVKICVIISNLGVLIIYFIILGDVLSGNESNGITHLGILQEWFGINWWTSRAFALLIVALFIMLPLVMLRRVDSLKYSSAIAILLAFVFVVICSSMAVSALLSGKTQTLRIVPDFSQATVLDLFTTIPVFVTGFGFHVNVHPIRAELGKVAHMGLAARISLIICVAIYFAIGFFGYLLFGDSIMPDVLVNFDQNSHTSAGRLLNTIVRLSYALHLALVFPIMNYSLRANIDELIFSNKNKPPLASDTPRFVSLTLTLLALTYFVAVAIPNIWFFFQFLGSTTIVCTSFIFPAAIVLRDMHGISKTKDQVMAIVVIVLAVGTSGIAIWTNLNGSGAAQ

SEQ ID NO: 55135 - protein, 402 aa, Glycine max
  peptide (1)..(402): Ceres Seq. ID no. 14310550
  misc_feature (1)..(278): Homolog of NCBI NO: 24461850 NR Description: CTV.3 [Poncirus trifoliata]
  misc_feature (1)..(388): Homolog of NCBI NO: 18412864 NR Description: amino acid transporter family [Arabidopsis
  misc_feature (25)..(395): Homolog of NCBI NO: 25408697 NR Description: hypothetical protein At2g40420 [imported] -
  misc_feature (1)..(394): Homolog of NCBI NO: 15241555 NR Description: amino acid transporter family [Arabidopsis
  misc_feature (1)..(394): Homolog of NCBI NO: 9758059 NR Description: amino acid transporter-like protein [Arabidopsis
  misc_feature (1)..(394): Homolog of NCBI NO: 18406463 NR Description: amino acid transporter family [Arabidopsis
  misc_feature (1)..(394): Homolog of NCBI NO: 34898706 NR Description: hypothetical protein [Oryza sativa (japonica
  misc_feature (1)..(373): Homolog of NCBI NO: 34907894 NR Description: P0439E11.11 [Oryza sativa (japonica
  misc_feature (1)..(395): Homolog of NCBI NO: 30688270 NR Description: amino acid transporter family [Arabidopsis
  misc_feature (1)..(395): Homolog of NCBI NO: 15228851 NR Description: amino acid transporter family [Arabidopsis
MIGAGIMSIPATMKVLGIVPGLVVIVLVALITDVTVEFMLRYTSSGKSSTYAGMMAESFASIGSLAVKICVIISNLGVLIIYFIILGDVLSGNESNGITHLGILQEWFGINWWTSRAFALLIVALFIMLPLVMLRRVDSLKYSSAIAILLAFVFVVICSSMAVSALLSGKTQTLRIVPDFSQATVLDLFTTIPVFVTGFGFHVNVHPIRAELGKVAHMGLAARISLIICVAIYFAIGFFGYLLFGDSIMPDVLVNFDQNSHTSAGRLLNTIVRLSYALHLALVFPIMNYSLRANIDELIFSNKNKPPLASDTPRFVSLTLTLLALTYFVAVAIPNIWFFFQFLGSTTIVCTSFIFPAAIVLRDMHGISKTKDQVMAIVVIVLAVGTSGIAIWTNLNGSGAAQ

SEQ ID NO: 55136 - DNA, 1507 bp, Glycine max
  misc_feature (1)..(1507): Ceres Seq. ID no. 12612470
acctcccaagctccctagcaccatatgctaaggtcgttaacaacttcaatgggaattgtatcagtagcaccaactcagactgtggtgtatttggtccctcggtatcctccatcaatctccacatatctctatgcttcttctcttaccaaggctaagaccattcatcaacccacacaatcttatgttcactccaaatcagtagaaactgcaatagagagtacatcacagttggtgccattcccattgttgacgaatgggaattacacagcatgcaccattccttggaggttcccttcagacgatccaagcattcccactcccaccgagctatcttggattaatctcctcctcaatactatccccaccttcaagaagcatgctgagaatgatacttctgttcctgatgctgcaaataaagctgaaaattttgctcaaaggtatgctagaatacttgaagatttcaagaaagatcctgcaagtcaaggcaggcctcttgatatccttattctatgcagacttcgtgagcaagtccttagagaacagggattcagagatatcttcaagaaaataaaggatgtagagaatgcaaatgccatatccctatttcagaatgttgttcatcttaatgatgccattgaagatgaagggaaacgactggagaatttggttagaggaatttttgcagggaacatatttgatcttggtgctacacagcttgcagaggttttctcaagggatggagtatctttttcgactacttgtcaaaatcttgtccctcgaccctggattattgatgaccttgaaactttcagaatagcatggagcaagaagtcctggaagaaggtaatcatatttgtggataactctggtgcagatgtcattttgggtattctgccatttgcaagggagctccttcgacgtgggagtcaggttatattggctgctaatgacttaccttccatcaatgatgtgacttactctgacctaattgaaattataccaaagttaaaggatgaagaaggacgtctcacgggtgtcagtacttcaaatcttctaattgccaactccggaaatgatttacctgttattgatcttacaagggtgtcacaagaacttgcataccttgctaatgatgtagatcttgtcatcttagaagggatgggtcgtggaatagaaacaaatctctatgctcaatttaaatgtgattcccttaagattgggatggtaaaacatcctgaggttgcagaatttcttgggtcacgtttgtatgactgcgtgatcaaatacgatgaagtttagagcttataattaagttgattctttactttgataaatacctaacactacatttgcaatttcaactgcaaatttccaaataatcaaaattgaaatttccaaacaattactttttcaatgtacaagtccgaatttggatcaacaatgctggaaaaaaaaaatctgaacccattaaatttaattagattgaattaaaaaaatatttattatt

SEQ ID NO: 55137 - protein, 424 aa, Glycine max
  peptide (1)..(424): Ceres Seq. ID no. 12612471
  misc_feature (98)..(421): Pfam Name: Protein of unknown function DUF89 Pfam Description: Protein of unknown function DUF89
  misc_feature (57)..(422): Homolog of NCBI NO: 17570183 NR Description: Unidentified Vitellogenin-linked Transcript UVT-3
  misc_feature (161)..(397): Homolog of NCBI NO: 7486028 NR Description: hypothetical protein F23E12.80 - Arabidopsis
  misc_feature (323)..(424): Homolog of NCBI NO: 15227811 NR Description: unknown protein; protein id: At2g17320.1
  misc_feature (69)..(248): Homolog of NCBI NO: 15227811 NR Description: unknown protein; protein id: At2g17320.1
  misc_feature (302)..(424): Homolog of NCBI NO: 25370535 NR Description: hypothetical protein At2g17340 [imported] -
  misc_feature (63)..(226): Homolog of NCBI NO: 25370535 NR Description: hypothetical protein At2g17340 [imported] -
  misc_feature (63)..(424): Homolog of NCBI NO: 18418688 NR Description: putative protein
  misc_feature (63)..(424): Homolog of NCBI NO: 21554145 NR Description: unknown [Arabidopsis thaliana]
  misc_feature (63)..(424): Homolog of NCBI NO: 18398388 NR Description: expressed protein
  misc_feature (63)..(424): Homolog of NCBI NO: 21554574 NR Description: unknown [Arabidopsis thaliana]
MLRSLTTSMGIVSVAPTQTVVYLVPRYPPSISTYLYASSLTKAKTIHQPTQSYVHSKSVETAIESTSQLVPFPLLTNGNYTACTIPWRFPSDDPSIPTPTELSWINLLLNTIPTFKKHAENDTSVPDAANKAENFAQRYARILEDFKKDPASQGRPLDILILCRLREQVLREQGFRDIFKKIKDVENANAISLFQNVVHLNDAIEDEGKRLENLVRGIFAGNIFDLGATQLAEVFSRDGVSFSTTCQNLVPRPWIIDDLETFRIAWSKKSWKKVIIFVDNSGADVILGILPFARELLRRGSQVILAANDLPSINDVTYSDLIEIIPKLKDEEGRLTGVSTSNLLIANSGNDLPVIDLTRVSQELAYLANDVDLVILEGMGRGIETNLYAQFKCDSLKIGMVKHPEVAEFLGSRLYDCVIKYDEV

SEQ ID NO: 55138 - protein, 416 aa, Glycine max
  peptide (1)..(416): Ceres Seq. ID no. 12612472
  misc_feature (90)..(413): Pfam Name: Protein of unknown function DUF89 Pfam Description: Protein of unknown function DUF89
  misc_feature (49)..(414): Homolog of NCBI NO: 17570183 NR Description: Unidentified Vitellogenin-linked Transcript UVT-3
  misc_feature (153)..(389): Homolog of NCBI NO: 7486028 NR Description: hypothetical protein F23E12.80 - Arabidopsis
  misc_feature (315)..(416): Homolog of NCBI NO: 15227811 NR Description: unknown protein; protein id: At2g17320.1
  misc_feature (61)..(240): Homolog of NCBI NO: 15227811 NR Description: unknown protein; protein id: At2g17320.1
  misc_feature (294)..(416): Homolog of NCBI NO: 25370535 NR Description: hypothetical protein At2g17340 [imported] -
  misc_feature (55)..(218): Homolog of NCBI NO: 25370535 NR Description: hypothetical protein At2g17340 [imported] -
  misc_feature (55)..(416): Homolog of NCBI NO: 18418688 NR Description: putative protein
  misc_feature (55)..(416): Homolog of NCBI NO: 21554145 NR Description: unknown [Arabidopsis thaliana]
  misc_feature (55)..(416): Homolog of NCBI NO: 18398388 NR Description: expressed protein
  misc_feature (55)..(416): Homolog of NCBI NO: 21554574 NR Description: unknown [Arabidopsis thaliana]
MGIVSVAPTQTVVYLVPRYPPSISTYLYASSLTKAKTIHQPTQSYVHSKSVETAIESTSQLVPFPLLTNGNYTACTIPWRFPSDDPSIPTPTELSWINLLLNTIPTFKKHAENDTSVPDAANKAENFAQRYARILEDFKKDPASQGRPLDILILCRLREQVLREQGFRDIFKKIKDVENANAISLFQNVVHLNDAIEDEGKRLENLVRGIFAGNIFDLGATQLAEVFSRDGVSFSTTCQNLVPRPWIIDDLETFRIAWSKKSWKKVIIFVDNSGADVILGILPFARELLRRGSQVILAANDLPSINDVTYSDLIEIIPKLKDEEGRLTGVSTSNLLIANSGNDLPVIDLTRVSQELAYLANDVDLVILEGMGRGIETNLYAQFKCDSLKIGMVKHPEVAEFLGSRLYDCVIKYDEV

SEQ ID NO: 55139 - DNA, 1215 bp, Glycine max
  misc_feature (1)..(1215): Ceres Seq. ID no. 14308632
agcaatacatgtaacaaagcttcagttcaaattgaagccagaaaatcaggtgcagtttctagtgcttctgagaaatatgattgccatagagactatgcagacaggggaatggttgattcttttcaaggttcaattcagtcatcagagcaagcatcatccaagaatgggtccatgtttatcaaggaaaagaagagggaaatgttggtcaatggtggtgtcagtggttcttcctcaagagcatcaaatcttgatggtgctgttcatggtggagtgaagggaaagagaagcgagagggagaggaatcaaagccgggatcagagcagacaaaattctattggcagagctggacgcatgtcactggacagtagccaaaatgagaacaaaccaaaagctaagaagcaaaagagtactgctagtggacatgataggtttatggaagcaaaggaatctgctcgtttaccaattcatgatacaatcaataatgatagcaaagatggggctacgttatctggtaaccaggacacttctcaaataaaggaatccaatgactttgggaatttgccgctacctgacttaagttcaatagaagaatttggtggtgcgcaagatcttagttcatggttgaactttgaagaagatggtttgccagaccatgattctattggccttgatattccaatggatgacctatcggatttaaatatgcttatgtgaagggatgtacacgtgttatatctgaaggagagtttgtatgtactcagtgaaccttgtggggcgtcaagatcttgatggtatacttgggtttctctggaggggaaatttttgtgattggaattatgaattttgacacatttatagggtgaacgggagatggggagtgacttaaaattgcaatttgatatttttgtggacgttgtatagaggaagctacaatcatggatttcatgaaattgctgtcagatatctcccttctcccatgaatcaaactagttttgctgtgttaaagtcatgatctcagaaatggcttttctataggagattagattaattaaagtgctatagcctgagagtggtttcatttctgaagctgtgacttcagctaccatactatgtaaaatgtttattgttcttgtagaccgaaactcgcacaattttgattgttttctcctgaataatggagaatgagtttttaattaagtttttctaggattaaag

SEQ ID NO: 55140 - protein, 237 aa, Glycine max
  peptide (1)..(237): Ceres Seq. ID no. 14308633
  misc_feature (49)..(235): Homolog of NCBI NO: 16604627 NR Description: unknown protein [Arabidopsis thaliana]
  misc_feature (49)..(235): Homolog of NCBI NO: 18399028 NR Description: expressed protein [Arabidopsis thaliana]
  misc_feature (49)..(235): Homolog of NCBI NO: 7486242 NR Description: hypothetical protein At2g19390 [imported] -
  misc_feature (69)..(236): Homolog of NCBI NO: 34905908 NR Description: P0458E05.30 [Oryza sativa (japonica
  misc_feature (37)..(237): Homolog of NCBI NO: 15233709 NR Description: expressed protein [Arabidopsis thaliana]
SNTCNKASVQIEARKSGAVSSASEKYDCHRDYADRGMVDSFQGSIQSSEQASSKNGSMFIKEKKREMLVNGGVSGSSSRASNLDGAVHGGVKGKRSERERNQSRDQSRQNSIGRAGRMSLDSSQNENKPKAKKQKSTASGHDRFMEAKESARLPIHDTINNDSKDGATLSGNQDTSQIKESNDFGNLPLPDLSSIEEFGGAQDLSSWLNFEEDGLPDHDSIGLDIPMDDLSDLNMLM

SEQ ID NO: 55141 - protein, 201 aa, Glycine max
  peptide (1)..(201): Ceres Seq. ID no. 14308634
  misc_feature (13)..(199): Homolog of NCBI NO: 16604627 NR Description: unknown protein [Arabidopsis thaliana]
  misc_feature (13)..(199): Homolog of NCBI NO: 18399028 NR Description: expressed protein [Arabidopsis thaliana]
  misc_feature (13)..(199): Homolog of NCBI NO: 7486242 NR Description: hypothetical protein At2g19390 [imported] -
  misc_feature (33)..(200): Homolog of NCBI NO: 34905908 NR Description: P0458E05.30 [Oryza sativa (japonica
  misc_feature (1)..(201): Homolog of NCBI NO: 15233709 NR Description: expressed protein [Arabidopsis thaliana]
MVDSFQGSIQSSEQASSKNGSMFIKEKKREMLVNGGVSGSSSRASNLDGAVHGGVKGKRSERERNQSRDQSRQNSIGRAGRMSLDSSQNENKPKAKKQKSTASGHDRFMEAKESARLPIHDTINNDSKDGATLSGNQDTSQIKESNDFGNLPLPDLSSIEEFGGAQDLSSWLNFEEDGLPDHDSIGLDIPMDDLSDLNMLM

SEQ ID NO: 55142 - protein, 180 aa, Glycine max
  peptide (1)..(180): Ceres Seq. ID no. 14308635
  misc_feature (1)..(178): Homolog of NCBI NO: 16604627 NR Description: unknown protein [Arabidopsis thaliana]
  misc_feature (1)..(178): Homolog of NCBI NO: 18399028 NR Description: expressed protein [Arabidopsis thaliana]
  misc_feature (1)..(178): Homolog of NCBI NO: 7486242 NR Description: hypothetical protein At2g19390 [imported] -
  misc_feature (12)..(179): Homolog of NCBI NO: 34905908 NR Description: P0458E05.30 [Oryza sativa (japonica
  misc_feature (1)..(180): Homolog of NCBI NO: 15233709 NR Description: expressed protein [Arabidopsis thaliana]
MFIKEKKREMLVNGGVSGSSSRASNLDGAVHGGVKGKRSERERNQSRDQSRQNSIGRAGRMSLDSSQNENKPKAKKQKSTASGHDRFMEAKESARLPIHDTINNDSKDGATLSGNQDTSQIKESNDFGNLPLPDLSSIEEFGGAQDLSSWLNFEEDGLPDHDSIGLDIPMDDLSDLNMLM

SEQ ID NO: 55143 - DNA, 1232 bp, Glycine max
  misc_feature (1)..(1232): Ceres Seq. ID no. 14308586
aaagaatgcaatgactcaactccagatagtagatagtgagtgagtgaagctaaagctacaaaaacaacaaccaaacaaaaaactcaattctcttctgttcttggtttttgcttttcctcattctctcattctcaacaccaccaaaatgggccttgtttcccaggatgccctcaaccaactccaagctctcatggatcaagtgctacttgaggaggagccactgcagagaacgtttcagaatgttcatcaaggatgtgtcgccgaaaccttaacgcggtttctaaaagcaagggagtggaatgctaccaaggcccataaaatgatagtcgattgtttaaagtggagagtacaaaatgagattgacaacatattatctaaaccaataatccctactgatttatacagaggcattcgtgattcacaacttataggattgtccgggtactccagagagggtctgccagtctttgcaattggtgttgggcttagcacatttgacaaagcgtctgtccattattatgtgcagtctcacattcaaattaatgaatatcgtgatcgtgtaatcttgccttcagcatcaaagaagcatgagcggcctattaccacatgtgtaaaggttttggatatgactggtctgaagttgtcagccctgaatcagataaagttgttaacaataatatcatccattgatgatctgaactaccccgagaaaacaaatacttattacattgtaaatgccccatacatattttcagcttgttggaaggttgtgaagccacttttacaagagaggacaagaagaaaagtacaagtcttacaaggttgtgggcgagatgagctattaaagatcatggattacacgtctctgccacatttctgtagaagagaaggctctggatcatcaagacattcagagaatggaaatgaaaattgctattccgtggatcatcctttccataagcagctctacaactacatcaaggagcaatccagaatccatgaagctgttgaacccatcaagcagggatcgttccatgtagattttcccgaacctcctgccgagaaagcagagattgtcaagactttagagtctgagctacacaagtttaagatcagcaatgagaatggtgattgaagattgatactgttaccaatggtgtcttggccatgttgtcttttacctgtcctactaaccatttgaaccaaactaatgatgtaacaacggttcttcc

SEQ ID NO: 55144 - protein, 329 aa, Glycine max
  peptide (1)..(329): Ceres Seq. ID no. 14308587
  misc_feature (138)..(242): Pfam Name: CRAL/TRIO domain Pfam Description: CRAL/TRIO domain
MGLVSQDALNQLQALMDQVLLEEEPLQRTFQNVHQGCVAETLTRFLKAREWNATKAHKMIVDCLKWRVQNEIDNILSKPIIPTDLYRGIRDSQLIGLSGYSREGLPVFAIGVGLSTFDKASVHYYVQSHIQINEYRDRVILPSASKKHERPITTCVKVLDMTGLKLSALNQIKLLTIISSIDDLNYPEKTNTYYIVNAPYIFSACWKVVKPLLQERTRRKVQVLQGCGRDELLKIMDYTSLPHFCRREGSGSSRHSENGNENCYSVDHPFHKQLYNYIKEQSRIHEAVEPIKQGSFHVDFPEPPAEKAEIVKTLESELHKFKISNENGD

SEQ ID NO: 55145 - protein, 314 aa, Glycine max
  peptide (1)..(314): Ceres Seq. ID no. 14308588
  misc_feature (123)..(227): Pfam Name: CRAL/TRIO domain Pfam Description: CRAL/TRIO domain
MDQVLLEEEPLQRTFQNVHQGCVAETLTRFLKAREWNATKAHKMIVDCLKWRVQNEIDNILSKPIIPTDLYRGIRDSQLIGLSGYSREGLPVFAIGVGLSTFDKASVHYYVQSHIQINEYRDRVILPSASKKHERPITTCVKVLDMTGLKLSALNQIKLLTIISSIDDLNYPEKTNTYYIVNAPYIFSACWKVVKPLLQERTRRKVQVLQGCGRDELLKIMDYTSLPHFCRREGSGSSRHSENGNENCYSVDHPFHKQLYNYIKEQSRIHEAVEPIKQGSFHVDFPEPPAEKAEIVKTLESELHKFKISNENGD

SEQ ID NO: 55146 - protein, 271 aa, Glycine max
  peptide (1)..(271): Ceres Seq. ID no. 14308589
  misc_feature (80)..(184): Pfam Name: CRAL/TRIO domain Pfam Description: CRAL/TRIO domain
MIVDCLKWRVQNEIDNILSKPIIPTDLYRGIRDSQLIGLSGYSREGLPVFAIGVGLSTFDKASVHYYVQSHIQINEYRDRVILPSASKKHERPITTCVKVLDMTGLKLSALNQIKLLTIISSIDDLNYPEKTNTYYIVNAPYIFSACWKVVKPLLQERTRRKVQVLQGCGRDELLKIMDYTSLPHFCRREGSGSSRHSENGNENCYSVDHPFHKQLYNYIKEQSRIHEAVEPIKQGSFHVDFPEPPAEKAEIVKTLESELHKFKISNENGD

SEQ ID NO: 55147 - DNA, 1434 bp, Glycine max
  misc_feature (1)..(1434): Ceres Seq. ID no. 15176254
gaaaaataggtattttcagtgtgaagctgcaccagaaatcgcgtagtggctgcatctccgttcaccactgatcgcttacgagctcgaaaaggttaatgaaggagcacgtcattgcgcttctactactcttccactttcacagataaccctattgcataatcgcgctccttcctctctagggtttcttcaacttcatggcttcccctactcatttcgacgatgacttcgatttcggaggcggatttggcggaaggcattcaggtaataagaggtcgtctcccgattacgacgacgaggattatgacaacgatccttttgcaccgaagaaggctataacaaaagctgaagaagcttctggtgtaacaacaggaatgatcttgtcacttcgtgagagtctccagaactgtaaggatacacttgcaacatgccaaaatgaacttgaggctgcaaaatcagagattcagagttggcattctacacttaaaaatcagccatccatacttgccgggatcactccagagcccaagatgttgattaattatctgcaggccttgaaatcctctgaagagtctttaagagagcagcttgaaaaggcaaagaaaaaggaagctgcattcattgtaacatttgcaaaacgagaacaagagatagcagagttgaagtctgcggtgcgagatctgaaagtgcaactcaagccaccatcaatgcaggctaggaggttgttactagatccagctgttcatgaagagttcacgcgtttaaagaacttagttgaggaaaaggataaaaaagtaaaggagttgcaagataacattgctgctgtaagttttactccccaaagcaagatggggaagatgctgatggctaaatgtagaaccctgcaagaggaaaatgaagagattggaaatcaagcgtctgaggggaagatgcatgaattagggatgaaacttgcattgcagaagtcccaaaattcacaacttagaaatcaatttgaagggttgcagaagcacatggaaggactgacaaatgatgtggaaagatccaatgaaatggttcttatgttacaagaaaaattagaagagaaggatcggcagatacagagactaaaacatgagattaaacagaagaacttggaggatcaaagactaaaacatgagcttcaacagaaaaacttggaggatcaaagactaaaacatgaacttcaacagaagaacttggaggatggaaatgacaataatgccggggaggctgctaactaatttgatatatatatatatatatatatatatatatatatatatatatatttactgctgtacattatattaattttttttgcgaaaactgtggatatttatgaggaatgattatgcttctgctttgaatggaattatggaaaatatagtagatggagctactttttaatacaaaaag

SEQ ID NO: 55148 - protein, 354 aa, Glycine max
  peptide (1)..(354): Ceres Seq. ID no. 15176255
  misc_feature (35)..(338): Pfam Name: Myosin tail Pfam Description: Myosin tail
  misc_feature (127)..(322): Homolog of NCBI NO: 24653461 NR Description: female lethal d CG6315-PB [Drosophila
  misc_feature (127)..(322): Homolog of NCBI NO: 5441313 NR Description: FL(2)D-s protein [Drosophila melanogaster]
  misc_feature (79)..(322): Homolog of NCBI NO: 24653459 NR Description: female lethal d CG6315-PA [Drosophila
  misc_feature (117)..(310): Homolog of NCBI NO: 31239559 NR Description: ENSANGP00000011593 [Anopheles gambiae]
  misc_feature (115)..(304): Homolog of NCBI NO: 33416867 NR Description: Unknown (protein for MGC:66202) [Danio rerio]
  misc_feature (115)..(310): Homolog of NCBI NO: 21361159 NR Description: Wilms' tumour 1-associating protein isoform 1
  misc_feature (115)..(310): Homolog of NCBI NO: 11322455 NR Description: WTAP protein [Mus musculus]
  misc_feature (115)..(310): Homolog of NCBI NO: 10334526 NR Description: WTAP protein [Homo sapiens]
  misc_feature (115)..(309): Homolog of NCBI NO: 38648992 NR Description: Unknown (protein for MGC:75954) [Silurana
  misc_feature (8)..(317): Homolog of NCBI NO: 15232439 NR Description: FKBP12 interacting protein (FIP37) [Arabidopsis
MASPTHFDDDFDFGGGFGGRHSGNKRSSPDYDDEDYDNDPFAPKKAITKAEEASGVTTGMILSLRESLQNCKDTLATCQNELEAAKSEIQSWHSTLKNQPSILAGITPEPKMLINYLQALKSSEESLREQLEKAKKKEAAFIVTFAKREQEIAELKSAVRDLKVQLKPPSMQARRLLLDPAVHEEFTRLKNLVEEKDKKVKELQDNIAAVSFTPQSKMGKMLMAKCRTLQEENEEIGNQASEGKMHELGMKLALQKSQNSQLRNQFEGLQKHMEGLTNDVERSNEMVLMLQEKLEEKDRQIQRLKHEIKQKNLEDQRLKHELQQKNLEDQRLKHELQQKNLEDGNDNNAGEAAN

SEQ ID NO: 55149 - protein, 295 aa, Glycine max
  peptide (1)..(295): Ceres Seq. ID no. 15176256
  misc_feature (1)..(279): Pfam Name: Myosin tail Pfam Description: Myosin tail
  misc_feature (68)..(263): Homolog of NCBI NO: 24653461 NR Description: female lethal d CG6315-PB [Drosophila
  misc_feature (68)..(263): Homolog of NCBI NO: 5441313 NR Description: FL(2)D-s protein [Drosophila melanogaster]
  misc_feature (20)..(263): Homolog of NCBI NO: 24653459 NR Description: female lethal d CG6315-PA [Drosophila
  misc_feature (58)..(251): Homolog of NCBI NO: 31239559 NR Description: ENSANGP00000011593 [Anopheles gambiae]
  misc_feature (56)..(245): Homolog of NCBI NO: 33416867 NR Description: Unknown (protein for MGC:66202) [Danio rerio]
  misc_feature (56)..(251): Homolog of NCBI NO: 21361159 NR Description: Wilms' tumour 1-associating protein isoform 1
  misc_feature (56)..(251): Homolog of NCBI NO: 11322455 NR Description: WTAP protein [Mus musculus]
  misc_feature (56)..(251): Homolog of NCBI NO: 10334526 NR Description: WTAP protein [Homo sapiens]
  misc_feature (56)..(250): Homolog of NCBI NO: 38648992 NR Description: Unknown (protein for MGC:75954) [Silurana
  misc_feature (1)..(258): Homolog of NCBI NO: 15232439 NR Description: FKBP12 interacting protein (FIP37) [Arabidopsis
MILSLRESLQNCKDTLATCQNELEAAKSEIQSWHSTLKNQPSILAGITPEPKMLINYLQALKSSEESLREQLEKAKKKEAAFIVTFAKREQEIAELKSAVRDLKVQLKPPSMQARRLLLDPAVHEEFTRLKNLVEEKDKKVKELQDNIAAVSFTPQSKMGKMLMAKCRTLQEENEEIGNQASEGKMHELGMKLALQKSQNSQLRNQFEGLQKHMEGLTNDVERSNEMVLMLQEKLEEKDRQIQRLKHEIKQKNLEDQRLKHELQQKNLEDQRLKHELQQKNLEDGNDNNAGEAAN

SEQ ID NO: 55150 - protein, 243 aa, Glycine max
  peptide (1)..(243): Ceres Seq. ID no. 15176257
  misc_feature (1)..(227): Pfam Name: Myosin tail Pfam Description: Myosin tail
  misc_feature (16)..(211): Homolog of NCBI NO: 24653461 NR Description: female lethal d CG6315-PB [Drosophila
  misc_feature (16)..(211): Homolog of NCBI NO: 5441313 NR Description: FL(2)D-s protein [Drosophila melanogaster]
  misc_feature (1)..(211): Homolog of NCBI NO: 24653459 NR Description: female lethal d CG6315-PA [Drosophila
  misc_feature (6)..(199): Homolog of NCBI NO: 31239559 NR Description: ENSANGP00000011593 [Anopheles gambiae]
  misc_feature (4)..(193): Homolog of NCBI NO: 33416867 NR Description: Unknown (protein for MGC:66202) [Danio rerio]
  misc_feature (4)..(199): Homolog of NCBI NO: 21361159 NR Description: Wilms' tumour 1-associating protein isoform 1
  misc_feature (4)..(199): Homolog of NCBI NO: 11322455 NR Description: WTAP protein [Mus musculus]
  misc_feature (4)..(199): Homolog of NCBI NO: 10334526 NR Description: WTAP protein [Homo sapiens]
  misc_feature (4)..(198): Homolog of NCBI NO: 38648992 NR Description: Unknown (protein for MGC:75954) [Silurana
  misc_feature (1)..(206): Homolog of NCBI NO: 15232439 NR Description: FKBP12 interacting protein (FIP37) [Arabidopsis
MLINYLQALKSSEESLREQLEKAKKKEAAFIVTFAKREQEIAELKSAVRDLKVQLKPPSMQARRLLLDPAVHEEFTRLKNLVEEKDKKVKELQDNIAAVSFTPQSKMGKMLMAKCRTLQEENEEIGNQASEGKMHELGMKLALQKSQNSQLRNQFEGLQKHMEGLTNDVERSNEMVLMLQEKLEEKDRQIQRLKHEIKQKNLEDQRLKHELQQKNLEDQRLKHELQQKNLEDGNDNNAGEAAN

SEQ ID NO: 55151 - DNA, 1129 bp, Glycine max
  misc_feature (1)..(1129): Ceres Seq. ID no. 14312572
aattatttattataacacgtacattaaactaaaacatagttacatacgtaaaaaaacttgcaattgttttataaggaatcagattagttacacttccattcccttccagcagctgggtttgagaagacaattgattatataggttttgttagtaaacaaaagaaaaggaaacatgaaggacgcagatgtgtcaaggcagatccagcagatgatcaggttcatccgtcaagaggctgaagagaaagctaatgaaatatctgttgctgctgaagaggaattcaatattgagaaactgcaattgcttgaagctgaaaaaagaaagatcaggcaagagtacgaacgaaaagccaaacaaattgacgttcgaagaaagattgaatactcaacacaactgaatgcagcccgaataaaagtgcttcaagcacaagatgatgcggtgggtgctatgaaggacgctgctaaaaaggggcttttacgtatctcaaatgataagaaagtatacaggaaactcgtcaaagacatgattgttcagggtttactacgcctgagggaaccatcagtgctattaagatgcagagagagtgaccgtaagcttgttgagtcattgatagaggaagccaaaaaagaatactcggagaaagccaatatgcaagcccctaagattgcccttgatgatcgtgtttacctcccaccgtcgccaaagaacagtgccgtggattcccatgaaccttattgcaccggaggaatagtattggcctcagaggatgggaagattgtgttggaaaatacccttgatgcacggcttgatgtcattttccggcagaaactacctgaggtaaggaagcgcctgttaggttgaacaacatactgcaatttgaattctcgctttatgtcagcaaatggaagagcaaggatgttgccacttcttttccgctgagcctgatcaaagcaaatgcaccaccccttttgttttttcttttctctaagaccaagttttaaatgttaagtctctttatttttgtaatttttaattctaataagctagactagaggaagaacatttcagtaatgtttttccggtacatttttttttctcagaagagagtaataaaatagactatttaaaatt

SEQ ID NO: 55152 - protein, 228 aa, Glycine max
  peptide (1)..(228): Ceres Seq. ID no. 14312573
  misc_feature (16)..(227): Pfam Name: ATP synthase (E/31 kDa) subunit Pfam Description: ATP synthase (E/31 kDa) subunit
  misc_feature (1)..(226): Homolog of NCBI NO: 3334410 NR Description: Vacuolar ATP synthase subunit E (V-ATPase E
  misc_feature (1)..(227): Homolog of NCBI NO: 4099148 NR Description: YLP [Hordeum vulgare]
  misc_feature (1)..(228): Homolog of NCBI NO: 20340245 NR Description: vacuolar ATPase subunit E-like protein
  misc_feature (1)..(228): Homolog of NCBI NO: 3334405 NR Description: Vacuolar ATP synthase subunit E (V-ATPase E
  misc_feature (1)..(227): Homolog of NCBI NO: 12585474 NR Description: Vacuolar ATP synthase subunit E (V-ATPase E
  misc_feature (1)..(227): Homolog of NCBI NO: 12585492 NR Description: Vacuolar ATP synthase subunit E (V-ATPase E
  misc_feature (1)..(228): Homolog of NCBI NO: 34912000 NR Description: putative YLP [Oryza sativa (japonica
  misc_feature (1)..(228): Homolog of NCBI NO: 1143394 NR Description: V-type proton-ATPase [Arabidopsis thaliana]
  misc_feature (1)..(228): Homolog of NCBI NO: 15237054 NR Description: H+-transporting ATPase chain E, vacuolar
  misc_feature (1)..(228): Homolog of NCBI NO: 15231933 NR Description: vacuolar ATP synthase subunit E -related
MKDADVSRQIQQMIRFIRQEAEEKANEISVAAEEEFNIEKLQLLEAEKRKIRQEYERKAKQIDVRRKIEYSTQLNAARIKVLQAQDDAVGAMKDAAKKGLLRISNDKKVYRKLVKDMIVQGLLRLREPSVLLRCRESDRKLVESLIEEAKKEYSEKANMQAPKIALDDRVYLPPSPKNSAVDSHEPYCTGGIVLASEDGKIVLENTLDARLDVIFRQKLPEVRKRLLG

SEQ ID NO: 55153 - protein, 216 aa, Glycine max
  peptide (1)..(216): Ceres Seq. ID no. 14312574
  misc_feature (4)..(215): Pfam Name: ATP synthase (E/31 kDa) subunit Pfam Description: ATP synthase (E/31 kDa) subunit
  misc_feature (1)..(214): Homolog of NCBI NO: 3334410 NR Description: Vacuolar ATP synthase subunit E (V-ATPase E
  misc_feature (1)..(215): Homolog of NCBI NO: 4099148 NR Description: YLP [Hordeum vulgare]
  misc_feature (1)..(216): Homolog of NCBI NO: 20340245 NR Description: vacuolar ATPase subunit E-like protein
  misc_feature (1)..(216): Homolog of NCBI NO: 3334405 NR Description: Vacuolar ATP synthase subunit E (V-ATPase E
  misc_feature (1)..(215): Homolog of NCBI NO: 12585474 NR Description: Vacuolar ATP synthase subunit E (V-ATPase E
  misc_feature (1)..(215): Homolog of NCBI NO: 12585492 NR Description: Vacuolar ATP synthase subunit E (V-ATPase E
  misc_feature (1)..(216): Homolog of NCBI NO: 34912000 NR Description: putative YLP [Oryza sativa (japonica
  misc_feature (1)..(216): Homolog of NCBI NO: 1143394 NR Description: V-type proton-ATPase [Arabidopsis thaliana]
  misc_feature (1)..(216): Homolog of NCBI NO: 15237054 NR Description: H+-transporting ATPase chain E, vacuolar
  misc_feature (1)..(216): Homolog of NCBI NO: 15231933 NR Description: vacuolar ATP synthase subunit E -related
MIRFIRQEAEEKANEISVAAEEEFNIEKLQLLEAEKRKIRQEYERKAKQIDVRRKIEYSTQLNAARIKVLQAQDDAVGAMKDAAKKGLLRISNDKKVYRKLVKDMIVQGLLRLREPSVLLRCRESDRKLVESLIEEAKKEYSEKANMQAPKIALDDRVYLPPSPKNSAVDSHEPYCTGGIVLASEDGKIVLENTLDARLDVIFRQKLPEVRKRLLG

SEQ ID NO: 55154 - protein, 137 aa, Glycine max
  peptide (1)..(137): Ceres Seq. ID no. 14312575
  misc_feature (1)..(136): Pfam Name: ATP synthase (E/31 kDa) subunit Pfam Description: ATP synthase (E/31 kDa) subunit
  misc_feature (1)..(135): Homolog of NCBI NO: 3334410 NR Description: Vacuolar ATP synthase subunit E (V-ATPase E
  misc_feature (1)..(136): Homolog of NCBI NO: 4099148 NR Description: YLP [Hordeum vulgare]
  misc_feature (1)..(137): Homolog of NCBI NO: 20340245 NR Description: vacuolar ATPase subunit E-like protein
  misc_feature (1)..(137): Homolog of NCBI NO: 3334405 NR Description: Vacuolar ATP synthase subunit E (V-ATPase E
  misc_feature (1)..(136): Homolog of NCBI NO: 12585474 NR Description: Vacuolar ATP synthase subunit E (V-ATPase E
  misc_feature (1)..(136): Homolog of NCBI NO: 12585492 NR Description: Vacuolar ATP synthase subunit E (V-ATPase E
  misc_feature (1)..(137): Homolog of NCBI NO: 34912000 NR Description: putative YLP [Oryza sativa (japonica
  misc_feature (1)..(137): Homolog of NCBI NO: 1143394 NR Description: V-type proton-ATPase [Arabidopsis thaliana]
  misc_feature (1)..(137): Homolog of NCBI NO: 15237054 NR Description: H+-transporting ATPase chain E, vacuolar
  misc_feature (1)..(137): Homolog of NCBI NO: 15231933 NR Description: vacuolar ATP synthase subunit E -related
MKDAAKKGLLRISNDKKVYRKLVKDMIVQGLLRLREPSVLLRCRESDRKLVESLIEEAKKEYSEKANMQAPKIALDDRVYLPPSPKNSAVDSHEPYCTGGIVLASEDGKIVLENTLDARLDVIFRQKLPEVRKRLLG

SEQ ID NO: 55155 - DNA, 1461 bp, Glycine max
  misc_feature (1)..(1461): Ceres Seq. ID no. 14308061
aaagaaaggaatgaatgaaagagggatggtaggagaaaaatgagaatggcgtgaatgtgaggagagaagagcctgaatattagaatcggatacccttaaagaagcggagataggagtgtgcgcctccaaacccaaggggcttcggaggggctcttcatcggaggcggtgctatattcccctccggatattcccaccatgaagagcctcttcaagcccaagccccgcacttttccgatatcgtcaaacaaacgcgagatcttcttctccgtctcacctcccgagatgacgataacatgcccgacttgaccaaaaacctcagggacttaaagtcaatcctctatggtaacagtgaatccgaacccgtccccgaagcttgtgcacagctcactcaggaattcttcgccgacaacaccttacgcctccttatccaatatcttcccaaactcaacttggaggctagaaaagatgccactcagattgttgcaaatttacagaggcagcaggttcagtccaagctcatcgcctctgattacttggatactaatttggatcttatggatgtcttggtatctggatatgaaaacacagacatggctttacactacggtgcaatgttgagggagtgcataagacaccagattgttgcaaaatatgttctggactcacctcatatgaagaagttttttgactacattcagcttccaaattttgacatagctgcagatgccgcagcaacttttaaggagctaatgacaaggcataaatctactgtagctgatttccttagcaattattatgaatggttttttgatgaatataactctaaactgttggaatcttccaattatattacaaggcgccaagctgtcaagttgctgggagatatgttacttgatcgcacaaattcagcagtaatgacaagatatgtcagctcacgagacaacttaaggattttaatgaatcttctacgtgagtcaagcaagagcatacagatagaagcatttcatgttttcaagctgtttgctgctaaccaaaagaaaccagctgatatcatcagcatatttgttgcaaacagaagcaagcttcttagacttttgggtgacttaaaaaccgataaagaggatgaacagttcgaagctgataaagctcaagttataaaagaaattgcggctcttgaacctagggacctcgcttgagcttcagtttgtgtcgagtaacaagttgcattgtggcattttaccttatttaattgtctattgttatagttcttttagtcttcatcaagatgagactaacattcaacacaaattccagtgttttctttctgaattttcatttcggttctgtaattcctagatgaataaattgctgaaagagctacatgcagtggcagtattcggctttcatggtgttagaaagctttgcttgcctagcagttagtttataaattatacgatgcc

SEQ ID NO: 55156 - protein, 300 aa, Glycine max
  peptide (1)..(300): Ceres Seq. ID no. 14308062
  misc_feature (1)..(296): Pfam Name: Mo25 protein family Pfam Description: Mo25 protein family
  misc_feature (1)..(295): Homolog of NCBI NO: 31982582 NR Description: MO25 protein
  misc_feature (1)..(295): Homolog of NCBI NO: 18044843 NR Description: MO25 protein [Mus musculus]
  misc_feature (1)..(295): Homolog of NCBI NO: 34877516 NR Description: similar to MO25 protein [Rattus norvegicus]
  misc_feature (1)..(295): Homolog of NCBI NO: 7706481 NR Description: MO25 protein [Homo sapiens]
  misc_feature (1)..(299): Homolog of NCBI NO: 15227629 NR Description: MO25 protein family [Arabidopsis thaliana]
  misc_feature (1)..(294): Homolog of NCBI NO: 34901086 NR Description: putative MO25 protein (CGI-66)
  misc_feature (1)..(300): Homolog of NCBI NO: 7485184 NR Description: hypothetical protein - Arabidopsis thaliana
  misc_feature (1)..(300): Homolog of NCBI NO: 15236013 NR Description: MO25 protein family [Arabidopsis thaliana]
  misc_feature (1)..(300): Homolog of NCBI NO: 15238126 NR Description: MO25 protein family [Arabidopsis thaliana]
  misc_feature (1)..(300): Homolog of NCBI NO: 15214076 NR Description: Hypothetical MO25-like protein At5g47540
MPDLTKNLRDLKSILYGNSESEPVPEACAQLTQEFFADNTLRLLIQYLPKLNLEARKDATQIVANLQRQQVQSKLIASDYLDTNLDLMDVLVSGYENTDMALHYGAMLRECIRHQIVAKYVLDSPHMKKFFDYIQLPNFDIAADAAATFKELMTRHKSTVADFLSNYYEWFFDEYNSKLLESSNYITRRQAVKLLGDMLLDRTNSAVMTRYVSSRDNLRILMNLLRESSKSIQIEAFHVFKLFAANQKKPADIISIFVANRSKLLRLLGDLKTDKEDEQFEADKAQVIKEIAALEPRDLA

SEQ ID NO: 55157 - protein, 213 aa, Glycine max
  peptide (1)..(213): Ceres Seq. ID no. 14308063
  misc_feature (1)..(209): Pfam Name: Mo25 protein family Pfam Description: Mo25 protein family
  misc_feature (1)..(208): Homolog of NCBI NO: 31982582 NR Description: MO25 protein
  misc_feature (1)..(208): Homolog of NCBI NO: 18044843 NR Description: MO25 protein [Mus musculus]
  misc_feature (1)..(208): Homolog of NCBI NO: 34877516 NR Description: similar to MO25 protein [Rattus norvegicus]
  misc_feature (1)..(208): Homolog of NCBI NO: 7706481 NR Description: MO25 protein [Homo sapiens]
  misc_feature (1)..(212): Homolog of NCBI NO: 15227629 NR Description: MO25 protein family [Arabidopsis thaliana]
  misc_feature (1)..(207): Homolog of NCBI NO: 34901086 NR Description: putative MO25 protein (CGI-66)
  misc_feature (1)..(213): Homolog of NCBI NO: 7485184 NR Description: hypothetical protein - Arabidopsis thaliana
  misc_feature (1)..(213): Homolog of NCBI NO: 15236013 NR Description: MO25 protein family [Arabidopsis thaliana]
  misc_feature (1)..(213): Homolog of NCBI NO: 15238126 NR Description: MO25 protein family [Arabidopsis thaliana]
  misc_feature (1)..(213): Homolog of NCBI NO: 15214076 NR Description: Hypothetical MO25-like protein At5g47540
MDVLVSGYENTDMALHYGAMLRECIRHQIVAKYVLDSPHMKKFFDYIQLPNFDIAADAAATFKELMTRHKSTVADFLSNYYEWFFDEYNSKLLESSNYITRRQAVKLLGDMLLDRTNSAVMTRYVSSRDNLRILMNLLRESSKSIQIEAFHVFKLFAANQKKPADIISIFVANRSKLLRLLGDLKTDKEDEQFEADKAQVIKEIAALEPRDLA

SEQ ID NO: 55158 - protein, 201 aa, Glycine max
  peptide (1)..(201): Ceres Seq. ID no. 14308064
  misc_feature (1)..(197): Pfam Name: Mo25 protein family Pfam Description: Mo25 protein family
  misc_feature (1)..(196): Homolog of NCBI NO: 31982582 NR Description: MO25 protein
  misc_feature (1)..(196): Homolog of NCBI NO: 18044843 NR Description: MO25 protein [Mus musculus]
  misc_feature (1)..(196): Homolog of NCBI NO: 34877516 NR Description: similar to MO25 protein [Rattus norvegicus]
  misc_feature (1)..(196): Homolog of NCBI NO: 7706481 NR Description: MO25 protein [Homo sapiens]
  misc_feature (1)..(200): Homolog of NCBI NO: 15227629 NR Description: MO25 protein family [Arabidopsis thaliana]
  misc_feature (1)..(195): Homolog of NCBI NO: 34901086 NR Description: putative MO25 protein (CGI-66)
  misc_feature (1)..(201): Homolog of NCBI NO: 7485184 NR Description: hypothetical protein - Arabidopsis thaliana
  misc_feature (1)..(201): Homolog of NCBI NO: 15236013 NR Description: MO25 protein family [Arabidopsis thaliana]
  misc_feature (1)..(201): Homolog of NCBI NO: 15238126 NR Description: MO25 protein family [Arabidopsis thaliana]
  misc_feature (1)..(201): Homolog of NCBI NO: 15214076 NR Description: Hypothetical MO25-like protein At5g47540
MALHYGAMLRECIRHQIVAKYVLDSPHMKKFFDYIQLPNFDIAADAAATFKELMTRHKSTVADFLSNYYEWFFDEYNSKLLESSNYITRRQAVKLLGDMLLDRTNSAVMTRYVSSRDNLRILMNLLRESSKSIQIEAFHVFKLFAANQKKPADIISIFVANRSKLLRLLGDLKTDKEDEQFEADKAQVIKEIAALEPRDLA

SEQ ID NO: 55159 - DNA, 911 bp, Glycine max
  misc_feature (1)..(911): Ceres Seq. ID no. 15226780
aaatttttgtcgtctccctgttggtccaaagaaatattttcaggcttttggactctattagctgcatctacaggaaagaaatgaagctgtcacaagaagagcttgtccctagcccagtcatccataaggaaaagaaaaagggtatattcagctctgttatcaaagattttactggcagtaaagaaaagcatgctcccattttggaaacagaagatactaaagaaagcatcctggaactctcagctatcttctcaaatgaaaattttccatgtgatgctgataataatgataatctgactgttgatgaagatgagattgaattaaacatagatgacattgacctggatgatcatgaagaaaaacgcaaagatcaaagtatattgggagctcttaataagaagaaattgactgggaagtttcaggttctaaaaggtagattgaaagagatgaagggcaacatccagaaaacatcaagcaaggaaaagcaacaagatgagcaagctggttcagtcgatcaaattaagaagaaatatggattttcttcttccaatgaaacaagcgtcgctaaattggcagaaagcaagctacaggagaacatgaaaaaactgcagggtatcaaccttcgaaccacagaaatgcaagataaagcaaaatcattttcaacattggcaaaccaagtgctgtggactgcagaacaggaaaggcgaaattaagaagcaccaacctcatggattacaccaaaaattacaaagccccccttttacccctcttgtacttatgcttctttattttgtgactggattctcatctcagtttttgggttgatattgaatgaaagtaaattaagaacaatgtcttcccttttttgccaattacataattctaccgagaatgaagtgaaaagccctact

SEQ ID NO: 55160 - protein, 236 aa, Glycine max
  peptide (1)..(236): Ceres Seq. ID no. 15226781
  misc_feature (169)..(226): Pfam Name: Synaptobrevin Pfam Description: Synaptobrevin
  misc_feature (2)..(234): Homolog of NCBI NO: 38345401 NR Description: OSJNBa0017B10.7 [Oryza sativa (japonica
  misc_feature (1)..(236): Homolog of NCBI NO: 15237037 NR Description: expressed protein [Arabidopsis thaliana]
IFVVSLLVQRNIFRLLDSISCIYRKEMKLSQEELVPSPVIHKEKKKGIFSSVIKDFTGSKEKHAPILETEDTKESILELSAIFSNENFPCDADNNDNLTVDEDEIELNIDDIDLDDHEEKRKDQSILGALNKKKLTGKFQVLKGRLKEMKGNIQKTSSKEKQQDEQAGSVDQIKKKYGFSSSNETSVAKLAESKLQENMKKLQGINLRTTEMQDKAKSFSTLANQVLWTAEQERRN

SEQ ID NO: 55161 - protein, 210 aa, Glycine max
  peptide (1)..(210): Ceres Seq. ID no. 15226782
  misc_feature (143)..(200): Pfam Name: Synaptobrevin Pfam Description: Synaptobrevin
  misc_feature (1)..(208): Homolog of NCBI NO: 38345401 NR Description: OSJNBa0017B10.7 [Oryza sativa (japonica
  misc_feature (1)..(210): Homolog of NCBI NO: 15237037 NR Description: expressed protein [Arabidopsis thaliana]
MKLSQEELVPSPVIHKEKKKGIFSSVIKDFTGSKEKHAPILETEDTKESILELSAIFSNENFPCDADNNDNLTVDEDEIELNIDDIDLDDHEEKRKDQSILGALNKKKLTGKFQVLKGRLKEMKGNIQKTSSKEKQQDEQAGSVDQIKKKYGFSSSNETSVAKLAESKLQENMKKLQGINLRTTEMQDKAKSFSTLANQVLWTAEQERRN

SEQ ID NO: 55162 - DNA, 1384 bp, Glycine max
  misc_feature (1)..(1384): Ceres Seq. ID no. 15170945
agcagctcccattccaacagattctagaagcacttagttgctcaacgataatcttaattgaagaagccaattcgtttattcttcttctgctttggaacatggctgataatattgttacctccagcaattcttctacggcctcgctgaaccctactcggataatctgtcacgtatgtcagaagcagttttcccagtacacgtgtcctcgatgcaattcgcgatactgttccctccaatgttacaaatcccatagtctccgttgcactgaatccttcatgaaagaaaatgtagttcagcaacttcaccaaatgcagcctgatgaacaaactaaaaataagatgttggacatactgaaaagatttcattcacaagaggaaatggatgaggattgacaggaaatcagctttgacgatttatcacttgaagaaaagaaacggtttcacatagcaattgcttatggggaactgagcaagatgatcaaaccatgggatccatggtggtcaaagccttctgcaagaaacatctgtctcagtaaggaaggaactcagcttgttcaacctattccagatcaggaattgctagatgatgatattggaagtgatgaattcagcaaagttcctcttggacctgaaactccacttcctcctctaagcaggcttagttccaaggagccatcaccccttttaacagttcacctagtcgatattctgtatagctattgcttcactcttcgtctctacaatggagattggaggtcagatgccttagggtcagtcatggttgtattgagtgtgtcctcggtgttgggtcaaggtgcacagccggagacagtactagaagccctttctcattgcttggagcaggtatgctgtccagcttacagacacattggaggattgcaatttggtttgggtgtcattgatgatgtgatcagtctgcttggtttgggaactcctgcattggtttgtgcccttcgtgatatgcattggtgcattcaagaaggcgaaaaggaggccaaatcagaaaggccaagaaagtcccagagaggtgggactagaagtgccattaagctggctgaaaggaagatatatttcatcatgtgttgggttcatgagcagccagaggaagtctggtcttccttagcagccattgtaagagcagaaaagacatcagccatggaatttcaacagatcaatagatctgaagatttgaacaataagacagaggccaaaggcaaaagtttaatccaggagatttaatgatttacgtagactgctaccccttacggttgtagtggactacgaggggtccgggagttcttgcagtggcaagaaagttaagtttcaaactagtttgggttgataatctatctacatttctttcg

SEQ ID NO: 55163 - protein, 261 aa, Glycine max
  peptide (1)..(261): Ceres Seq. ID no. 15170946
  misc_feature (1)..(32): Homolog of NCBI NO: 23613640 NR Description: hypothetical protein [Plasmodium falciparum 3D7]
  misc_feature (1)..(68): Homolog of NCBI NO: 7656936 NR Description: chromosome 11 open reading frame 5
  misc_feature (1)..(67): Homolog of NCBI NO: 27469505 NR Description: Similar to chromosome 11 open reading frame 5
  misc_feature (1)..(240): Homolog of NCBI NO: 26352237 NR Description: unnamed protein product [Mus musculus]
  misc_feature (1)..(240): Homolog of NCBI NO: 18044459 NR Description: open reading frame 6 [Mus musculus]
  misc_feature (1)..(240): Homolog of NCBI NO: 7305357 NR Description: open reading frame 6; Chromosome 11 open reading
  misc_feature (1)..(240): Homolog of NCBI NO: 34861831 NR Description: similar to Protein C11orf5 homolog (Protein FON)
  misc_feature (118)..(261): Homolog of NCBI NO: 37536148 NR Description: hypothetical protein [Oryza sativa (japonica
  misc_feature (1)..(261): Homolog of NCBI NO: 15237537 NR Description: expressed protein [Arabidopsis thaliana]
MIKPWDPWWSKPSARNICLSKEGTQLVQPIPDQELLDDDIGSDEFSKVPLGPETPLPPLSRLSSKEPSPLLTVHLVDILYSYCFTLRLYNGDWRSDALGSVMVVLSVSSVLGQGAQPETVLEALSHCLEQVCCPAYRHIGGLQFGLGVIDDVISLLGLGTPALVCALRDMHWCIQEGEKEAKSERPRKSQRGGTRSAIKLAERKIYFIMCWVHEQPEEVWSSLAAIVRAEKTSAMEFQQINRSEDLNNKTEAKGKSLIQEI

SEQ ID NO: 55164 - protein, 160 aa, Glycine max
  peptide (1)..(160): Ceres Seq. ID no. 15170947
  misc_feature (1)..(139): Homolog of NCBI NO: 18044459 NR Description: open reading frame 6 [Mus musculus]
  misc_feature (1)..(139): Homolog of NCBI NO: 26352237 NR Description: unnamed protein product [Mus musculus]
  misc_feature (1)..(139): Homolog of NCBI NO: 7305357 NR Description: open reading frame 6; Chromosome 11 open reading
  misc_feature (1)..(139): Homolog of NCBI NO: 34861831 NR Description: similar to Protein C11orf5 homolog (Protein FON)
  misc_feature (17)..(160): Homolog of NCBI NO: 37536148 NR Description: hypothetical protein [Oryza sativa (japonica
  misc_feature (1)..(160): Homolog of NCBI NO: 15237537 NR Description: expressed protein [Arabidopsis thaliana]
MVVLSVSSVLGQGAQPETVLEALSHCLEQVCCPAYRHIGGLQFGLGVIDDVISLLGLGTPALVCALRDMHWCIQEGEKEAKSERPRKSQRGGTRSAIKLAERKIYFIMCWVHEQPEEVWSSLAAIVRAEKTSAMEFQQINRSEDLNNKTEAKGKSLIQEI

SEQ ID NO: 55165 - DNA, 1252 bp, Glycine max
  misc_feature (1)..(1252): Ceres Seq. ID no. 15175697
atacattaccgtttttttccccttcttattcgtcgttcagttcaatttctcgcgagtttttcttccatatgctaccaatcgttgccgttgatccacgcgccggcgaatttcagttttgattctccgccaccgttttggctgttgttactttggttcttccgagagaagggagccatatatagaaagtattttatggtgcgccgatgagcagaactgatgttattggcagtagaaggaggaggattcttctctgcttcggcttcagggtatactaagggcctgagccttctcctcttgggtcagaggaatgaggataaacccatgagagtagcgccgtggaaccagtatcagttggtagaccaagaatctgaccctgagctccagctggcttccacaaagaatcgcctctcccgcggctgtgcctcctttgtttgctttggtcgcacttccgcaggacttgatactccgtctcctcttaaagtgggccctgctcaacaacatgatgtctcaccagggccactggtttccaacaagggaaaggatccttctgcacatgtagatgatgaaagtgataacagaaaggctacactaaaaagtagcataaagaagccacaaaatagaaaatccgttcctgttgaggttgctaatgaacatgaagcatcaagtggacaggggatttgtactcctggaggtcaacccgaaagaaggaaagtgcagtggacagataattgtggtagtgagcttgtggaaattcgagaatttgagcccagtgaagtggatggatcagatgatgaatttgatagtggaaatgacagaacttgttcctgtgcgattatgtaaattggagtttcattaagttgataggttcatcgggtcattcactgctaacatccatcactcgatttgagacaaaagaggcaaaggtttcagttctgtggagatatatacacaaacatcttgcctgagtgatgtgtctgttattgcttgctgcggctttaaattttgctcctctgcccctcatcaatttgtataattcttgtcatgtgtgaattctttgcctttgattcatcatttttatgctactttatgttcttatttttataaggattaacaaagttttctttctatgatctggcattatcttgaaaaaaggtaatacaagtgtaagattttgtaaaaaaatcagtgtgccaacctggtaacaaacttgtgatgagactaggatttgttaaggcttatctgttgaaagtat

SEQ ID NO: 55166 - protein, 207 aa, Glycine max
  peptide (1)..(207): Ceres Seq. ID no. 15175698
  misc_feature (102)..(184): Homolog of NCBI NO: 25334118 NR Description: F12G12.17 protein - Arabidopsis thaliana
  misc_feature (102)..(184): Homolog of NCBI NO: 10092447 NR Description: unknown protein; 15226-14726 [Arabidopsis
  misc_feature (1)..(92): Homolog of NCBI NO: 25334118 NR Description: F12G12.17 protein - Arabidopsis thaliana
  misc_feature (1)..(92): Homolog of NCBI NO: 10092447 NR Description: unknown protein; 15226-14726 [Arabidopsis
  misc_feature (1)..(92): Homolog of NCBI NO: 30692973 NR Description: expressed protein [Arabidopsis thaliana]
  misc_feature (102)..(207): Homolog of NCBI NO: 30692973 NR Description: expressed protein [Arabidopsis thaliana]
  misc_feature (20)..(187): Homolog of NCBI NO: 7452500 NR Description: hypothetical protein T22J18.4 - Arabidopsis
  misc_feature (1)..(206): Homolog of NCBI NO: 34912224 NR Description: P0415C01.14 [Oryza sativa (japonica
  misc_feature (1)..(187): Homolog of NCBI NO: 2505872 NR Description: hypothetical protein [Arabidopsis thaliana]
  misc_feature (1)..(207): Homolog of NCBI NO: 18395162 NR Description: expressed protein [Arabidopsis thaliana]
MLLAVEGGGFFSASASGYTKGLSLLLLGQRNEDKPMRVAPWNQYQLVDQESDPELQLASTKNRLSRGCASFVCFGRTSAGLDTPSPLKVGPAQQHDVSPGPLVSNKGKDPSAHVDDESDNRKATLKSSIKKPQNRKSVPVEVANEHEASSGQGICTPGGQPERRKVQWTDNCGSELVEIREFEPSEVDGSDDEFDSGNDRTCSCAIM

SEQ ID NO: 55167 - protein, 172 aa, Glycine max
  peptide (1)..(172): Ceres Seq. ID no. 15175699
  misc_feature (67)..(149): Homolog of NCBI NO: 25334118 NR Description: F12G12.17 protein - Arabidopsis thaliana
  misc_feature (67)..(149): Homolog of NCBI NO: 10092447 NR Description: unknown protein; 15226-14726 [Arabidopsis
  misc_feature (1)..(57): Homolog of NCBI NO: 25334118 NR Description: F12G12.17 protein - Arabidopsis thaliana
  misc_feature (1)..(57): Homolog of NCBI NO: 10092447 NR Description: unknown protein; 15226-14726 [Arabidopsis
  misc_feature (1)..(57): Homolog of NCBI NO: 30692973 NR Description: expressed protein [Arabidopsis thaliana]
  misc_feature (67)..(172): Homolog of NCBI NO: 30692973 NR Description: expressed protein [Arabidopsis thaliana]
  misc_feature (1)..(152): Homolog of NCBI NO: 7452500 NR Description: hypothetical protein T22J18.4 - Arabidopsis
  misc_feature (1)..(171): Homolog of NCBI NO: 34912224 NR Description: P0415C01.14 [Oryza sativa (japonica
  misc_feature (1)..(152): Homolog of NCBI NO: 2505872 NR Description: hypothetical protein [Arabidopsis thaliana]
  misc_feature (1)..(172): Homolog of NCBI NO: 18395162 NR Description: expressed protein [Arabidopsis thaliana]
MRVAPWNQYQLVDQESDPELQLASTKNRLSRGCASFVCFGRTSAGLDTPSPLKVGPAQQHDVSPGPLVSNKGKDPSAHVDDESDNRKATLKSSIKKPQNRKSVPVEVANEHEASSGQGICTPGGQPERRKVQWTDNCGSELVEIREFEPSEVDGSDDEFDSGNDRTCSCAIM

SEQ ID NO: 55168 - DNA, 1448 bp, Glycine max
  misc_feature (1)..(1448): Ceres Seq. ID no. 15176596
ggcattggcttacaaatctcaaccaccctatcttaaaatcttctgtgcaaccagaaaaaaacggaccttgccctcagtctcttttttccatcatcacttcattaaacattattcactctctttctctgtctctagtttttacaacatggctactgcggtaactgctgcagtgtcctttccagccaccaagtccacttctctttcaagcagaacctctatcactgccccagatagaattgtcttcaagaaggtttcgttgcaatacagagatgtttcaaccagtggaagggtagtttcaatcagagcacaagtgaccacagaggcacctgctaaggttgaaaaggaatcaaagaaacaggaggaaggtgtgatcgtgaacaagttcaaacccaagaacccatatattggtaggtgtcttctcaacacaaagatcactggggatgatgcacctggagaaacttggcacatggtcttcagcactgagggagaagttccttacagagaaggacaatcaatcggggtaattcctgatggggttgacaagaatggcaagcctcacaagctgagattgtattcaattgctagcagtgcccttggtgattttggagattccaaaactgtttctttatgcgtgaaacgtcttgtgtacacaaatgaaaacggagaacttgtcaaaggagtttgctcaaatttcttgtgcgacttgaagccaggagccgaagtaaagattactggacctgttggtaaagaaatgcttatgccaaaagatcctaatgcaaccgtcatcatgttggcaactggaacaggaattgccccattccgctcatttttatggaaaatgttctttgagaagcatgatgattacaagttcaatggtttggcatggctcttcttgggtgtccccacaagcagctcactactttataaggaggaatttgaaaagatgaaggagaaagcacctgacaacttcaggcttgactttgctgtgagcagagagcaaacaaacgaaaaaggagagaaaatgtacatccaaacacgaatggctcaatatgcagaagagttatgggaattactgaagaaagataacacttttgtctatatgtgtggactgaagggaatggaaaagggtatagatgacataatggtttcattggctgcaaaagatggtattgattggattgagtacaagaggcaattgaagaaggcagagcaatggaatgtcgaagtctactaattaatatcacttgcacttgctcagatatcatgccctactttgtgcagcagcaaatctattttgctgtcatgcgctgtgtagatagattacggccctgtaatttttctatgatgggattttttaccttccttatgaacgtacaagcttcattgcaacagccttgcatgaaataattttgaggatctatcaatatagatgaagtcaacttctgttt

SEQ ID NO: 55169 - protein, 410 aa, Glycine max
  peptide (1)..(410): Ceres Seq. ID no. 15176597
  misc_feature (258)..(380): Pfam Name: Oxidoreductase NAD-binding domain Pfam Description: Oxidoreductase NAD-binding domain
  misc_feature (103)..(410): Homolog of NCBI NO: 4930123 NR Description: Chain A, Wild-Type Pea Fnr
  misc_feature (49)..(410): Homolog of NCBI NO: 5730139 NR Description: ferredoxin-NADP+ reductase [Arabidopsis thaliana]
  misc_feature (49)..(410): Homolog of NCBI NO: 15239282 NR Description: ferredoxin--NADP(+) reductase (adrenodoxin
  misc_feature (49)..(410): Homolog of NCBI NO: 729477 NR Description: Ferredoxin--NADP reductase, chloroplast precursor
  misc_feature (49)..(410): Homolog of NCBI NO: 119906 NR Description: Ferredoxin--NADP reductase, chloroplast precursor
  misc_feature (49)..(410): Homolog of NCBI NO: 3913651 NR Description: Ferredoxin--NADP reductase, leaf-type isozyme,
  misc_feature (49)..(410): Homolog of NCBI NO: 170111 NR Description: ferredoxin-NADP oxidoreductase
  misc_feature (49)..(410): Homolog of NCBI NO: 729479 NR Description: Ferredoxin--NADP reductase, chloroplast precursor
  misc_feature (49)..(410): Homolog of NCBI NO: 6899972 NR Description: chloroplast ferredoxin-NADP+ oxidoreductase
  misc_feature (49)..(410): Homolog of NCBI NO: 119905 NR Description: Ferredoxin--NADP reductase, leaf isozyme,
ALAYKSQPPYLKIFCATRKKRTLPSVSFFHHHFIKHYSLSFSVSSFYNMATAVTAAVSFPATKSTSLSSRTSITAPDRIVFKKVSLQYRDVSTSGRVVSIRAQVTTEAPAKVEKESKKQEEGVIVNKFKPKNPYIGRCLLNTKITGDDAPGETWHMVFSTEGEVPYREGQSIGVIPDGVDKNGKPHKLRLYSIASSALGDFGDSKTVSLCVKRLVYTNENGELVKGVCSNFLCDLKPGAEVKITGPVGKEMLMPKDPNATVIMLATGTGIAPFRSFLWKMFFEKHDDYKFNGLAWLFLGVPTSSSLLYKEEFEKMKEKAPDNFRLDFAVSREQTNEKGEKMYIQTRMAQYAEELWELLKKDNTFVYMCGLKGMEKGIDDIMVSLAAKDGIDWIEYKRQLKKAEQWNVEVY

SEQ ID NO: 55170 - protein, 362 aa, Glycine max
  peptide (1)..(362): Ceres Seq. ID no. 15176598
  misc_feature (210)..(332): Pfam Name: Oxidoreductase NAD-binding domain Pfam Description: Oxidoreductase NAD-binding domain
  misc_feature (55)..(362): Homolog of NCBI NO: 4930123 NR Description: Chain A, Wild-Type Pea Fnr
  misc_feature (1)..(362): Homolog of NCBI NO: 5730139 NR Description: ferredoxin-NADP+ reductase [Arabidopsis thaliana]
  misc_feature (1)..(362): Homolog of NCBI NO: 15239282 NR Description: ferredoxin--NADP(+) reductase (adrenodoxin
  misc_feature (1)..(362): Homolog of NCBI NO: 729477 NR Description: Ferredoxin--NADP reductase, chloroplast precursor
  misc_feature (1)..(362): Homolog of NCBI NO: 119906 NR Description: Ferredoxin--NADP reductase, chloroplast precursor
  misc_feature (1)..(362): Homolog of NCBI NO: 3913651 NR Description: Ferredoxin--NADP reductase, leaf-type isozyme,
  misc_feature (1)..(362): Homolog of NCBI NO: 170111 NR Description: ferredoxin-NADP oxidoreductase
  misc_feature (1)..(362): Homolog of NCBI NO: 729479 NR Description: Ferredoxin--NADP reductase, chloroplast precursor
  misc_feature (1)..(362): Homolog of NCBI NO: 6899972 NR Description: chloroplast ferredoxin-NADP+ oxidoreductase
  misc_feature (1)..(362): Homolog of NCBI NO: 119905 NR Description: Ferredoxin--NADP reductase, leaf isozyme,
MATAVTAAVSFPATKSTSLSSRTSITAPDRIVFKKVSLQYRDVSTSGRVVSIRAQVTTEAPAKVEKESKKQEEGVIVNKFKPKNPYIGRCLLNTKITGDDAPGETWHMVFSTEGEVPYREGQSIGVIPDGVDKNGKPHKLRLYSIASSALGDFGDSKTVSLCVKRLVYTNENGELVKGVCSNFLCDLKPGAEVKITGPVGKEMLMPKDPNATVIMLATGTGIAPFRSFLWKMFFEKHDDYKFNGLAWLFLGVPTSSSLLYKEEFEKMKEKAPDNFRLDFAVSREQTNEKGEKMYIQTRMAQYAEELWELLKKDNTFVYMCGLKGMEKGIDDIMVSLAAKDGIDWIEYKRQLKKAEQWNVEVY

SEQ ID NO: 55171 - protein, 255 aa, Glycine max
  peptide (1)..(255): Ceres Seq. ID no. 15176599
  misc_feature (103)..(225): Pfam Name: Oxidoreductase NAD-binding domain Pfam Description: Oxidoreductase NAD-binding domain
  misc_feature (1)..(255): Homolog of NCBI NO: 4930123 NR Description: Chain A, Wild-Type Pea Fnr
  misc_feature (1)..(255): Homolog of NCBI NO: 5730139 NR Description: ferredoxin-NADP+ reductase [Arabidopsis thaliana]
  misc_feature (1)..(255): Homolog of NCBI NO: 15239282 NR Description: ferredoxin--NADP(+) reductase (adrenodoxin
  misc_feature (1)..(255): Homolog of NCBI NO: 729477 NR Description: Ferredoxin--NADP reductase, chloroplast precursor
  misc_feature (1)..(255): Homolog of NCBI NO: 119906 NR Description: Ferredoxin--NADP reductase, chloroplast precursor
  misc_feature (1)..(255): Homolog of NCBI NO: 3913651 NR Description: Ferredoxin--NADP reductase, leaf-type isozyme,
  misc_feature (1)..(255): Homolog of NCBI NO: 170111 NR Description: ferredoxin-NADP oxidoreductase
  misc_feature (1)..(255): Homolog of NCBI NO: 729479 NR Description: Ferredoxin--NADP reductase, chloroplast precursor
  misc_feature (1)..(255): Homolog of NCBI NO: 6899972 NR Description: chloroplast ferredoxin-NADP+ oxidoreductase
  misc_feature (1)..(255): Homolog of NCBI NO: 119905 NR Description: Ferredoxin--NADP reductase, leaf isozyme,
MVFSTEGEVPYREGQSIGVIPDGVDKNGKPHKLRLYSIASSALGDFGDSKTVSLCVKRLVYTNENGELVKGVCSNFLCDLKPGAEVKITGPVGKEMLMPKDPNATVIMLATGTGIAPFRSFLWKMFFEKHDDYKFNGLAWLFLGVPTSSSLLYKEEFEKMKEKAPDNFRLDFAVSREQTNEKGEKMYIQTRMAQYAEELWELLKKDNTFVYMCGLKGMEKGIDDIMVSLAAKDGIDWIEYKRQLKKAEQWNVEVY

SEQ ID NO: 55172 - DNA, 1377 bp, Glycine max
  misc_feature (1)..(1377): Ceres Seq. ID no. 15170994
agtgcaggcttcagtcatgccaggctttgggagcctcttacctcaaagattaaagcaattagctcaaacaataacaggttctgctggcaaaaatcttggccttgataactcagtttttggcagagttaaagaagtcagattatcttctttcttgaagaatacactacatgcttcctcaccttctcctgctcctgctccatctccacagttaattgatcactctgagccatcaacttcaccacatcgtgctagtccttacactccaatatcaccagcagctgctgaacaacctccttgtttcgattgtgaagtaccctcacctgcaccttctatggtgcctgcgcatcctccagatccctgtctatatagtggcttccttcatcatccaatcccttcgccaaaatcttattctaaaccatcctttccccctgattattcacctgctgctgcccctacctcaaattctgctagccacaccagtgaggaagcttctgatccgtctcgtgaagccgaggtgtcccatggatccaagcttcggcagggtgaagagacgtctaataaactggtgtctcatctacttgctccatcctctttatcttcagcgagtggtgatttccgtggggaaatgttgctaatgggattttgtatggtattaatttcatttgtttttctcaatgataccacattttgatgatatggagatgttgcctgctgaaggatcctggagacatgcgaggactactacaacagcctaatgacgtgctttgcaagttttgtttagataatggaaggaagaaacttccgtccaattttaatttgccttaattttacttcaagtatgcaaccgaccaccatgtaaagctccggtgggtaaagggtcaaagccagaaagttggcaggcctctcatctagtactacatatttctatgaagcatgaaattgatcccaaaggggtcaactaacaaacatcatgatcgagagcaaaattggctttcagatgtcagaagaaccatcccttgtattcgatcaagtgtatgatatgcaaagaaatgtgggttctttgagcatctgaatctgtaaaacaaccatagtaatatctagcaaaaagataaattagtcacacttgtatagctctatgctcccccccttctccctacttttgaaagaaaataagaattcaaattcatccatgaagaaacgcgtgttctttgtagtctagacagatcttttactctggaaaaaagtggtcaaaggaaaacatatagagaaaagtgaatgttaactacatgtgttagagtttcttgggactagcaagtgtcaagataaagaaaaataataagagggttcggaacagatgttctgcccagatttctgttt

SEQ ID NO: 55173 - protein, 229 aa, Glycine max
  peptide (1)..(229): Ceres Seq. ID no. 15170995
  misc_feature (55)..(145): Pfam Name: Extensin-like region Pfam Description: Extensin-like region
  misc_feature (56)..(151): Homolog of NCBI NO: 7488674 NR Description: extensin homolog HRGP2 - soybean (fragment)
  misc_feature (59)..(177): Homolog of NCBI NO: 1076211 NR Description: hypothetical protein VSP-3 - Chlamydomonas
  misc_feature (58)..(151): Homolog of NCBI NO: 7488674 NR Description: extensin homolog HRGP2 - soybean (fragment)
  misc_feature (1)..(201): Homolog of NCBI NO: 15228375 NR Description: zinc finger (C3HC4-type RING finger) protein
  misc_feature (1)..(158): Homolog of NCBI NO: 30694478 NR Description: proline-rich protein family [Arabidopsis thaliana]
VQASVMPGFGSLLPQRLKQLAQTITGSAGKNLGLDNSVFGRVKEVRLSSFLKNTLHASSPSPAPAPSPQLIDHSEPSTSPHRASPYTPISPAAAEQPPCFDCEVPSPAPSMVPAHPPDPCLYSGFLHHPIPSPKSYSKPSFPPDYSPAAAPTSNSASHTSEEASDPSREAEVSHGSKLRQGEETSNKLVSHLLAPSSLSSASGDFRGEMLLMGFCMVLISFVFLNDTTF

SEQ ID NO: 55174 - protein, 224 aa, Glycine max
  peptide (1)..(224): Ceres Seq. ID no. 15170996
  misc_feature (50)..(140): Pfam Name: Extensin-like region Pfam Description: Extensin-like region
  misc_feature (51)..(146): Homolog of NCBI NO: 7488674 NR Description: extensin homolog HRGP2 - soybean (fragment)
  misc_feature (54)..(172): Homolog of NCBI NO: 1076211 NR Description: hypothetical protein VSP-3 - Chlamydomonas
  misc_feature (53)..(146): Homolog of NCBI NO: 7488674 NR Description: extensin homolog HRGP2 - soybean (fragment)
  misc_feature (1)..(196): Homolog of NCBI NO: 15228375 NR Description: zinc finger (C3HC4-type RING finger) protein
  misc_feature (1)..(153): Homolog of NCBI NO: 30694478 NR Description: proline-rich protein family [Arabidopsis thaliana]
MPGFGSLLPQRLKQLAQTITGSAGKNLGLDNSVFGRVKEVRLSSFLKNTLHASSPSPAPAPSPQLIDHSEPSTSPHRASPYTPISPAAAEQPPCFDCEVPSPAPSMVPAHPPDPCLYSGFLHHPIPSPKSYSKPSFPPDYSPAAAPTSNSASHTSEEASDPSREAEVSHGSKLRQGEETSNKLVSHLLAPSSLSSASGDFRGEMLLMGFCMVLISFVFLNDTTF

SEQ ID NO: 55175 - protein, 119 aa, Glycine max
  peptide (1)..(119): Ceres Seq. ID no. 15170997
  misc_feature (1)..(41): Homolog of NCBI NO: 7488674 NR Description: extensin homolog HRGP2 - soybean (fragment)
  misc_feature (1)..(67): Homolog of NCBI NO: 1076211 NR Description: hypothetical protein VSP-3 - Chlamydomonas
  misc_feature (1)..(41): Homolog of NCBI NO: 7488674 NR Description: extensin homolog HRGP2 - soybean (fragment)
  misc_feature (1)..(91): Homolog of NCBI NO: 15228375 NR Description: zinc finger (C3HC4-type RING finger) protein
  misc_feature (1)..(48): Homolog of NCBI NO: 30694478 NR Description: proline-rich protein family [Arabidopsis thaliana]
MVPAHPPDPCLYSGFLHHPIPSPKSYSKPSFPPDYSPAAAPTSNSASHTSEEASDPSREAEVSHGSKLRQGEETSNKLVSHLLAPSSLSSASGDFRGEMLLMGFCMVLISFVFLNDTTF

SEQ ID NO: 55176 - DNA, 1857 bp, Glycine max
  misc_feature (1)..(1857): Ceres Seq. ID no. 15169274
aggattcaaatccatttttcagtccatatgttgtccaagcttgaagaatgtaggaacgagaatgtctcatcaagaaggaaagagtagtcaggatttagtgccaggtaacatggaacatggaatagatgctactccaataacctgttgggcagaaaacaatagcctttccaaactgtgtttgcaatcaaataagtttgaagtatctactgggggaaatgatgccggtctgtcctcgcagcctaagattaaacctctaaatttttttaactgtcatgaaagcagcaaaaacaacccagtggagactaaaaattattccatcttgggccatagtaaggacaaggaagaagtggcatcacattcatcttcaaccaaacaaaatacagataataatgataacatcgattctaatgtgctatgtgatagaaaggaagaagagaatatctgtcacagaagagataatctgggaagtctgtggataactcgtttttctccaaaattcactgctcccttgagagaacaacctgccaatgacacagaggtctctactgatcttaaggaagataagggaaataatgatcataaatcaatgtatttgttcaaacccctttcatcttccccaggattcagaaatttagagccaacggcttcaatgtttggaaggagatttggtgccatcaaacaaatcataccaacaaatgcaacagatactaccacacaggttaatatgttgtgttttttttgtggaacaagaggacatcaactctctgattgcttagctattgcagaaaacaagttagaagatctccagaagaatatagattcatatggaggattggaagaacatcattgtctatgcatcaaatgttttcagcccaaccattgggcaatttcatgtcccacttcaatctcaactaggaaacatgaactgaaagctaatgccttggtcaatgattgtggaaaacatttaatctcgatcaatgaagggagtgccaggctgctgactgatgaggatgaccgagttttatctggaggttctattaatgatgaaacagatcaacgagcaggtcaaaatattaatttgaagtggaaatcaaatgaaattataacccataaggtagggtgcaatgcatcattcaagaaataccgtggtttgagttcagaggaaaacaaattcagagaaaatcctacattatctccatccaaattggctgaaaggcagatttcacaggtgccaaaggaaatatttgaagcagtaaaaaagcttcaattgtcccgcaccgacatcttgaaatggatcaatactcgtgggtcaatctctcaacttgatggttttttcctacgcctgcggctcggaaagtgggaagaagggccagggggaactggataccatgtggcatacataaatgagacccagtcccagagacagtgttcagagcagaatacaagaaaatctctctcagtgaaagtggggagtatcaagtgtatggtcgaaagtcagtatatatccaatcatgattttcttgaggaagaaatcatggaatggtggtccaacacctcacaagctggtgccgagatttcatctgaagaatatataatagaaaaatttaaaaagaaagaaatgttaggtctctaggcatttattaaattaaatgttaatatattcataagcaaggttactctcacttttagaaaaaagttatgtttcctttttattatccaattaattgtatatcaaaggaagcttaaaaaattgaagatggtggcaactcaccatcatgattttgtgaatgtcttaccaaaacattcctatacaaagaattgctttatcttacgcaatgaaagttatagtaattcatt

SEQ ID NO: 55177 - protein, 543 aa, Glycine max
  peptide (1)..(543): Ceres Seq. ID no. 15169275
  misc_feature (416)..(521): Pfam Name: Plus-3 domain Pfam Description: Plus-3 domain
  misc_feature (385)..(541): Homolog of NCBI NO: 34909996 NR Description: P0490D09.22 [Oryza sativa (japonica
  misc_feature (385)..(542): Homolog of NCBI NO: 15239925 NR Description: expressed protein [Arabidopsis thaliana]
  misc_feature (1)..(322): Homolog of NCBI NO: 15239925 NR Description: expressed protein [Arabidopsis thaliana]
GFKSIFQSICCPSLKNVGTRMSHQEGKSSQDLVPGNMEHGIDATPITCWAENNSLSKLCLQSNKFEVSTGGNDAGLSSQPKIKPLNFFNCHESSKNNPVETKNYSILGHSKDKEEVASHSSSTKQNTDNNDNIDSNVLCDRKEEENICHRRDNLGSLWITRFSPKFTAPLREQPANDTEVSTDLKEDKGNNDHKSMYLFKPLSSSPGFRNLEPTASMFGRRFGAIKQIIPTNATDTTTQVNMLCFFCGTRGHQLSDCLAIAENKLEDLQKNIDSYGGLEEHHCLCIKCFQPNHWAISCPTSISTRKHELKANALVNDCGKHLISINEGSARLLTDEDDRVLSGGSINDETDQRAGQNINLKWKSNEIITHKVGCNASFKKYRGLSSEENKFRENPTLSPSKLAERQISQVPKEIFEAVKKLQLSRTDILKWINTRGSISQLDGFFLRLRLGKWEEGPGGTGYHVAYINETQSQRQCSEQNTRKSLSVKVGSIKCMVESQYISNHDFLEEEIMEWWSNTSQAGAEISSEEYIIEKFKKKEMLGL

SEQ ID NO: 55178 - protein, 523 aa, Glycine max
  peptide (1)..(523): Ceres Seq. ID no. 15169276
  misc_feature (396)..(501): Pfam Name: Plus-3 domain Pfam Description: Plus-3 domain
  misc_feature (365)..(521): Homolog of NCBI NO: 34909996 NR Description: P0490D09.22 [Oryza sativa (japonica
  misc_feature (365)..(522): Homolog of NCBI NO: 15239925 NR Description: expressed protein [Arabidopsis thaliana]
  misc_feature (1)..(302): Homolog of NCBI NO: 15239925 NR Description: expressed protein [Arabidopsis thaliana]
MSHQEGKSSQDLVPGNMEHGIDATPITCWAENNSLSKLCLQSNKFEVSTGGNDAGLSSQPKIKPLNFFNCHESSKNNPVETKNYSILGHSKDKEEVASHSSSTKQNTDNNDNIDSNVLCDRKEEENICHRRDNLGSLWITRFSPKFTAPLREQPANDTEVSTDLKEDKGNNDHKSMYLFKPLSSSPGFRNLEPTASMFGRRFGAIKQIIPTNATDTTTQVNMLCFFCGTRGHQLSDCLAIAENKLEDLQKNIDSYGGLEEHHCLCIKCFQPNHWAISCPTSISTRKHELKANALVNDCGKHLISINEGSARLLTDEDDRVLSGGSINDETDQRAGQNINLKWKSNEIITHKVGCNASFKKYRGLSSEENKFRENPTLSPSKLAERQISQVPKEIFEAVKKLQLSRTDILKWINTRGSISQLDGFFLRLRLGKWEEGPGGTGYHVAYINETQSQRQCSEQNTRKSLSVKVGSIKCMVESQYISNHDFLEEEIMEWWSNTSQAGAEISSEEYIIEKFKKKEMLGL

SEQ ID NO: 55179 - protein, 507 aa, Glycine max
  peptide (1)..(507): Ceres Seq. ID no. 15169277
  misc_feature (380)..(485): Pfam Name: Plus-3 domain Pfam Description: Plus-3 domain
  misc_feature (349)..(505): Homolog of NCBI NO: 34909996 NR Description: P0490D09.22 [Oryza sativa (japonica
  misc_feature (349)..(506): Homolog of NCBI NO: 15239925 NR Description: expressed protein [Arabidopsis thaliana]
  misc_feature (1)..(286): Homolog of NCBI NO: 15239925 NR Description: expressed protein [Arabidopsis thaliana]
MEHGIDATPITCWAENNSLSKLCLQSNKFEVSTGGNDAGLSSQPKIKPLNFFNCHESSKNNPVETKNYSILGHSKDKEEVASHSSSTKQNTDNNDNIDSNVLCDRKEEENICHRRDNLGSLWITRFSPKFTAPLREQPANDTEVSTDLKEDKGNNDHKSMYLFKPLSSSPGFRNLEPTASMFGRRFGAIKQIIPTNATDTTTQVNMLCFFCGTRGHQLSDCLAIAENKLEDLQKNIDSYGGLEEHHCLCIKCFQPNHWAISCPTSISTRKHELKANALVNDCGKHLISINEGSARLLTDEDDRVLSGGSINDETDQRAGQNINLKWKSNEIITHKVGCNASFKKYRGLSSEENKFRENPTLSPSKLAERQISQVPKEIFEAVKKLQLSRTDILKWINTRGSISQLDGFFLRLRLGKWEEGPGGTGYHVAYINETQSQRQCSEQNTRKSLSVKVGSIKCMVESQYISNHDFLEEEIMEWWSNTSQAGAEISSEEYIIEKFKKKEMLGL

SEQ ID NO: 55180 - DNA, 1611 bp, Glycine max
  misc_feature (1)..(1611): Ceres Seq. ID no. 15169005
gatttgtcgtagtttattttcatccacaccacagagtaaaactacaacctcaggaggagaatgttcctctgaatccgaagcccgtgctctacccagcgactttgccagaagtccaccatttcttgatttttggaggttaacagtcttcatattcaacactttgctatttcttaacttcaagtgcaagagaacaaagagcataaaatcctttagagtgtcagcagtcaagaatgcatacaggaatggcttcgttaactcaactccattataaagtacatgcctccactctcagaagggtgcattcaagaagccaagggctattgaagtctggaaaactatcccaactccaacgatctgcctttcctagtattcacattaatcaatcctgcatatgctgcacaaagttaactccatgggagtcatcacctgtcacatatgctcctactgataatcaaattgatacttttttgccgcaaaatgccaatatatttgaaactcttgaatctagtaaaacagctgattcatcaataacaaatgctgaaggggttgtagagacagaatctcagccaggcctgcagcttcaggttttcaaatggccattgtggcttttgggcccttccgttctcctagcaactggcatggtcccaacattgtggttaccgatatcatcaatctttctcggccccaatatagccagcctactttccttaattggacttgattgcatatttaacctcggtgcaaccctttttctcctcatggctgatgcttgttcacgaccaaagtctccaacacaagactgcaaaagcaaggctcccttcagttaccaattctggaacattgttgcaactcttaccggttttgttatcccactgttgatgatgtttggatctcagaagggttttctccaacctcaactacctttcatcccatttgcagttctacttggtccatatcttcttcttttgtctgtacagtttctgactgagatgttgacttggcattggcaatcaccagtctggcttgttacccctgtcatttacgagtcctaccgtgtcttgcagctaatgaggggattaaagcttggggttgagctcagtgcaccggcatgggtgatgcatacaattagggggctggtttgctggtgggtgctaattcttggtctgcagttgatgagggttgcttggtttgctggcttagctgcacgagctcgtaagcagcaattgtcttctgatacttctagtgttaatggtgattagtgattaatacattgtaaaaatattctgaaagagacagattatagaataagtagatgttgtttattttagttatggatgttttccatcccatccatataccatagtgatagtggtacacatctaatagatatatacacaagtaaattgcatacaagacttactttatcactgggctttatgctgtatcaatggttttgtctgtgctatcttcaagttgtgaacaaagtggtttatctgtttttacctcaacttatgaagatggaaaaattatatagtggttggttcaagtaaaagtttatggatttattatttttgataaattataggtaataaaataagttatattaattag

SEQ ID NO: 55181 - protein, 342 aa, Glycine max
  peptide (1)..(342): Ceres Seq. ID no. 15169006
  misc_feature (124)..(290): Homolog of NCBI NO: 18424658 NR Description: expressed protein [Arabidopsis thaliana]
  misc_feature (124)..(290): Homolog of NCBI NO: 9758304 NR Description: emb|CAB81845.1~gene_id:MJH22.10~similar to
  misc_feature (124)..(290): Homolog of NCBI NO: 21592953 NR Description: unknown [Arabidopsis thaliana]
  misc_feature (107)..(290): Homolog of NCBI NO: 34910348 NR Description: P0684B02.8 [Oryza sativa (japonica
  misc_feature (177)..(338): Homolog of NCBI NO: 30695238 NR Description: expressed protein [Arabidopsis thaliana]
  misc_feature (107)..(338): Homolog of NCBI NO: 30695235 NR Description: expressed protein [Arabidopsis thaliana]
  misc_feature (5)..(323): Homolog of NCBI NO: 38605903 NR Description: OSJNBb0020O11.15 [Oryza sativa (japonica
  misc_feature (4)..(338): Homolog of NCBI NO: 11281196 NR Description: hypothetical protein T8B10.250 - Arabidopsis
MHTGMASLTQLHYKVHASTLRRVHSRSQGLLKSGKLSQLQRSAFPSIHINQSCICCTKLTPWESSPVTYAPTDNQIDTFLPQNANIFETLESSKTADSSITNAEGVVETESQPGLQLQVFKWPLWLLGPSVLLATGMVPTLWLPISSIFLGPNIASLLSLIGLDCIFNLGATLFLLMADACSRPKSPTQDCKSKAPFSYQFWNIVATLTGFVIPLLMMFGSQKGFLQPQLPFIPFAVLLGPYLLLLSVQFLTEMLTWHWQSPVWLVTPVIYESYRVLQLMRGLKLGVELSAPAWVMHTIRGLVCWWVLILGLQLMRVAWFAGLAARARKQQLSSDTSSVNGD

SEQ ID NO: 55182 - protein, 338 aa, Glycine max
  peptide (1)..(338): Ceres Seq. ID no. 15169007
  misc_feature (120)..(286): Homolog of NCBI NO: 18424658 NR Description: expressed protein [Arabidopsis thaliana]
  misc_feature (120)..(286): Homolog of NCBI NO: 9758304 NR Description: emb|CAB81845.1~gene_id:MJH22.10~similar to
  misc_feature (120)..(286): Homolog of NCBI NO: 21592953 NR Description: unknown [Arabidopsis thaliana]
  misc_feature (103)..(286): Homolog of NCBI NO: 34910348 NR Description: P0684B02.8 [Oryza sativa (japonica
  misc_feature (173)..(334): Homolog of NCBI NO: 30695238 NR Description: expressed protein [Arabidopsis thaliana]
  misc_feature (103)..(334): Homolog of NCBI NO: 30695235 NR Description: expressed protein [Arabidopsis thaliana]
  misc_feature (1)..(319): Homolog of NCBI NO: 38605903 NR Description: OSJNBb0020O11.15 [Oryza sativa (japonica
  misc_feature (1)..(334): Homolog of NCBI NO: 11281196 NR Description: hypothetical protein T8B10.250 - Arabidopsis
MASLTQLHYKVHASTLRRVHSRSQGLLKSGKLSQLQRSAFPSIHINQSCICCTKLTPWESSPVTYAPTDNQIDTFLPQNANIFETLESSKTADSSITNAEGVVETESQPGLQLQVFKWPLWLLGPSVLLATGMVPTLWLPISSIFLGPNIASLLSLIGLDCIFNLGATLFLLMADACSRPKSPTQDCKSKAPFSYQFWNIVATLTGFVIPLLMMFGSQKGFLQPQLPFIPFAVLLGPYLLLLSVQFLTEMLTWHWQSPVWLVTPVIYESYRVLQLMRGLKLGVELSAPAWVMHTIRGLVCWWVLILGLQLMRVAWFAGLAARARKQQLSSDTSSVNGD

SEQ ID NO: 55183 - protein, 206 aa, Glycine max
  peptide (1)..(206): Ceres Seq. ID no. 15169008
  misc_feature (1)..(154): Homolog of NCBI NO: 18424658 NR Description: expressed protein [Arabidopsis thaliana]
  misc_feature (1)..(154): Homolog of NCBI NO: 9758304 NR Description: emb|CAB81845.1~gene_id:MJH22.10~similar to
  misc_feature (1)..(154): Homolog of NCBI NO: 21592953 NR Description: unknown [Arabidopsis thaliana]
  misc_feature (1)..(154): Homolog of NCBI NO: 34910348 NR Description: P0684B02.8 [Oryza sativa (japonica
  misc_feature (41)..(202): Homolog of NCBI NO: 30695238 NR Description: expressed protein [Arabidopsis thaliana]
  misc_feature (1)..(202): Homolog of NCBI NO: 30695235 NR Description: expressed protein [Arabidopsis thaliana]
  misc_feature (1)..(187): Homolog of NCBI NO: 38605903 NR Description: OSJNBb0020O11.15 [Oryza sativa (japonica
  misc_feature (1)..(202): Homolog of NCBI NO: 11281196 NR Description: hypothetical protein T8B10.250 - Arabidopsis
MVPTLWLPISSIFLGPNIASLLSLIGLDCIFNLGATLFLLMADACSRPKSPTQDCKSKAPFSYQFWNIVATLTGFVIPLLMMFGSQKGFLQPQLPFIPFAVLLGPYLLLLSVQFLTEMLTWHWQSPVWLVTPVIYESYRVLQLMRGLKLGVELSAPAWVMHTIRGLVCWWVLILGLQLMRVAWFAGLAARARKQQLSSDTSSVNGD

SEQ ID NO: 55184 - DNA, 1373 bp, Glycine max
  misc_feature (1)..(1373): Ceres Seq. ID no. 14311625
atccaacttgttcttatatgatgaataccttgatgagtacatgtccacaatagctgtggaacatttaccacaaaataggccactatgggaacttcacattataaaatacccaacaagcaatgctaagggtaccttggtgttcaaactccaccatgcccttggggatggtttttctctcatgggtgcccttctttcatgcatgcaaagagctgacaacacctctcttcccttcacactcccatcaagccaaaggcccaaagcatcatcaatttccaacaccaaagggtttttcaagaaattgccctccattttcttccaaactatatccgaatttggatggagtttcttgaaaagtaagttgattgaagatgatcaaacaccaataaggtcttgtgcggaagacttcaagactcgccaaatgaccatctcagatgtcaccttctcattggatcttatcaaagacgtgaaatccaaacttggagtgagcataaatgatgtgcttgctggagtaattttttttggcattcggctatacatgcaagaaattaatctgaaatcaagccaaacccaatccacagcattggtgttgctgaacacaagaaacattgaaggttacaagtctgttaaggagatgattgagaagaccaatagtcgttctgcatgggggaatcaatatgcctttttgcatgtttcaattccagagcttagtgactccaaatatgcaaacccacttgagtttataagggaagcccataaggatatgaccaaaaagaaaaattctttggccactcctctcactggcatgcttctagatatgctcagaaaactcaggggtcctgaggctgcagctagctacttacgcagtactttgagaaactcaagcacaacaatctcaaacatcattggaccagtggagcaaatggctgtggctaatcatccaattaaagggttttacttcatggtagctggttcacctgagagtctcaccatgacgatcatgagctacatgggaaagataagaattgcatttggagtagagaagaacttcatcgacaagcaattattcaagtcgtgtttggagaattctcttgagatgataaaggaagcagcaaaaaagatttccgcataaaatcaaatatggaagatatgtactttttttgttgttgttgtggaagatatgtactaccactatattctatctatattcttgttaatatttaattattttatttaaatatatgtgatgtggtgattctgtaatagaaatttgtttctgagtggaatgtattttattgaactggaacagtatcattacggccgggcatggctgtttttagttgggaagtccctacattacatcaaaaagtagaatt

SEQ ID NO: 55185 - protein, 375 aa, Glycine max
  peptide (1)..(375): Ceres Seq. ID no. 14311626
  misc_feature (9)..(179): Pfam Name: Condensation domain Pfam Description: Condensation domain
  misc_feature (194)..(370): Homolog of NCBI NO: 34909902 NR Description: P0665A11.11 [Oryza sativa (japonica
  misc_feature (1)..(371): Homolog of NCBI NO: 18421632 NR Description: expressed protein [Arabidopsis thaliana]
  misc_feature (1)..(371): Homolog of NCBI NO: 9758716 NR Description: emb|CAB66398.1~gene_id:MNJ8.9~strong similarity
  misc_feature (7)..(372): Homolog of NCBI NO: 15218351 NR Description: expressed protein [Arabidopsis thaliana]
  misc_feature (9)..(369): Homolog of NCBI NO: 15242259 NR Description: hypothetical protein [Arabidopsis thaliana]
  misc_feature (1)..(370): Homolog of NCBI NO: 30687731 NR Description: hypothetical protein [Arabidopsis thaliana]
  misc_feature (7)..(370): Homolog of NCBI NO: 34909900 NR Description: P0665A11.10 [Oryza sativa (japonica
  misc_feature (7)..(369): Homolog of NCBI NO: 26451548 NR Description: unknown protein [Arabidopsis thaliana]
  misc_feature (7)..(369): Homolog of NCBI NO: 30696326 NR Description: expressed protein [Arabidopsis thaliana]
  misc_feature (7)..(369): Homolog of NCBI NO: 9759186 NR Description: emb|CAB66399.1~gene_id:K19E1.19~strong similarity
SNLFLYDEYLDEYMSTIAVEHLPQNRPLWELHIIKYPTSNAKGTLVFKLHHALGDGFSLMGALLSCMQRADNTSLPFTLPSSQRPKASSISNTKGFFKKLPSIFFQTISEFGWSFLKSKLIEDDQTPIRSCAEDFKTRQMTISDVTFSLDLIKDVKSKLGVSINDVLAGVIFFGIRLYMQEINLKSSQTQSTALVLLNTRNIEGYKSVKEMIEKTNSRSAWGNQYAFLHVSIPELSDSKYANPLEFIREAHKDMTKKKNSLATPLTGMLLDMLRKLRGPEAAASYLRSTLRNSSTTISNIIGPVEQMAVANHPIKGFYFMVAGSPESLTMTIMSYMGKIRIAFGVEKNFIDKQLFKSCLENSLEMIKEAAKKISA

SEQ ID NO: 55186 - protein, 362 aa, Glycine max
  peptide (1)..(362): Ceres Seq. ID no. 14311627
  misc_feature (1)..(166): Pfam Name: Condensation domain Pfam Description: Condensation domain
  misc_feature (181)..(357): Homolog of NCBI NO: 34909902 NR Description: P0665A11.11 [Oryza sativa (japonica
  misc_feature (1)..(358): Homolog of NCBI NO: 18421632 NR Description: expressed protein [Arabidopsis thaliana]
  misc_feature (1)..(358): Homolog of NCBI NO: 9758716 NR Description: emb|CAB66398.1~gene_id:MNJ8.9~strong similarity
  misc_feature (1)..(359): Homolog of NCBI NO: 15218351 NR Description: expressed protein [Arabidopsis thaliana]
  misc_feature (1)..(356): Homolog of NCBI NO: 15242259 NR Description: hypothetical protein [Arabidopsis thaliana]
  misc_feature (1)..(357): Homolog of NCBI NO: 30687731 NR Description: hypothetical protein [Arabidopsis thaliana]
  misc_feature (1)..(357): Homolog of NCBI NO: 34909900 NR Description: P0665A11.10 [Oryza sativa (japonica
  misc_feature (1)..(356): Homolog of NCBI NO: 26451548 NR Description: unknown protein [Arabidopsis thaliana]
  misc_feature (1)..(356): Homolog of NCBI NO: 30696326 NR Description: expressed protein [Arabidopsis thaliana]
  misc_feature (1)..(356): Homolog of NCBI NO: 9759186 NR Description: emb|CAB66399.1~gene_id:K19E1.19~strong similarity
MSTIAVEHLPQNRPLWELHIIKYPTSNAKGTLVFKLHHALGDGFSLMGALLSCMQRADNTSLPFTLPSSQRPKASSISNTKGFFKKLPSIFFQTISEFGWSFLKSKLIEDDQTPIRSCAEDFKTRQMTISDVTFSLDLIKDVKSKLGVSINDVLAGVIFFGIRLYMQEINLKSSQTQSTALVLLNTRNIEGYKSVKEMIEKTNSRSAWGNQYAFLHVSIPELSDSKYANPLEFIREAHKDMTKKKNSLATPLTGMLLDMLRKLRGPEAAASYLRSTLRNSSTTISNIIGPVEQMAVANHPIKGFYFMVAGSPESLTMTIMSYMGKIRIAFGVEKNFIDKQLFKSCLENSLEMIKEAAKKISA

SEQ ID NO: 55187 - protein, 316 aa, Glycine max
  peptide (1)..(316): Ceres Seq. ID no. 14311628
  misc_feature (1)..(120): Pfam Name: Condensation domain Pfam Description: Condensation domain
  misc_feature (135)..(311): Homolog of NCBI NO: 34909902 NR Description: P0665A11.11 [Oryza sativa (japonica
  misc_feature (1)..(312): Homolog of NCBI NO: 18421632 NR Description: expressed protein [Arabidopsis thaliana]
  misc_feature (1)..(312): Homolog of NCBI NO: 9758716 NR Description: emb|CAB66398.1~gene_id:MNJ8.9~strong similarity
  misc_feature (1)..(313): Homolog of NCBI NO: 15218351 NR Description: expressed protein [Arabidopsis thaliana]
  misc_feature (1)..(310): Homolog of NCBI NO: 15242259 NR Description: hypothetical protein [Arabidopsis thaliana]
  misc_feature (1)..(311): Homolog of NCBI NO: 30687731 NR Description: hypothetical protein [Arabidopsis thaliana]
  misc_feature (1)..(311): Homolog of NCBI NO: 34909900 NR Description: P0665A11.10 [Oryza sativa (japonica
  misc_feature (1)..(310): Homolog of NCBI NO: 26451548 NR Description: unknown protein [Arabidopsis thaliana]
  misc_feature (1)..(310): Homolog of NCBI NO: 30696326 NR Description: expressed protein [Arabidopsis thaliana]
  misc_feature (1)..(310): Homolog of NCBI NO: 9759186 NR Description: emb|CAB66399.1~gene_id:K19E1.19~strong similarity
MGALLSCMQRADNTSLPFTLPSSQRPKASSISNTKGFFKKLPSIFFQTISEFGWSFLKSKLIEDDQTPIRSCAEDFKTRQMTISDVTFSLDLIKDVKSKLGVSINDVLAGVIFFGIRLYMQEINLKSSQTQSTALVLLNTRNIEGYKSVKEMIEKTNSRSAWGNQYAFLHVSIPELSDSKYANPLEFIREAHKDMTKKKNSLATPLTGMLLDMLRKLRGPEAAASYLRSTLRNSSTTISNIIGPVEQMAVANHPIKGFYFMVAGSPESLTMTIMSYMGKIRIAFGVEKNFIDKQLFKSCLENSLEMIKEAAKKISA

SEQ ID NO: 55188 - DNA, 1733 bp, Glycine max
  misc_feature (1)..(1733): Ceres Seq. ID no. 15176200
atagacatctgcgatgatattgctatcaaacacttcacgtatataccaatgctgtttgtttcagtcgcactctgcaatcctatcttgtttgcatgtcaaaatctcattcatcatcatcttcttcttaaaagttaaaaggttaagagagagagagaaagatgagtagcgtgttggagcatggtgttgtgggatgttgcaaatcagggccaggctatgctaccccactggaagccatgtctggtccaagagagtctcttatttatgtaactgctgtctacacagggacaggaatagagaagccggactatttggccacagtggacatagatccaaactctccaacttattccaaagtcatccataggcttcgtgttccttatttaggtgacgaattgcatcacactggttggaattcatgcagctcttgccatggagacccctcggcagaccgacgatttctcatcgcacctgcactcgtttcaggtcgcatatatgtggttgatgtgaaaacaaatccaagggctccatctttgcacaaagttgttgagcctgccgatatcatacagaagactggattagcttatccacacacatctcactgccttgcttctggtgacataatgatctcatgtcttggagataaagatggaaatgctgcaggaaatggatttcttcttcttgattcagagtttaatgtgaagggaaggtgggagaaaccgggtcacagtccactatttggatatgacttttggtaccaaccacgtcacaataccatgattagcacatcatggggtgctcctagtgcttttacaaaaggttttaacttacagcatctttctgatggattatacgggaggcatctccatgtatatagctggcctgggggcgaactgagacaaacactggaccttggtgattcagggcttttacccttagagataaggttcttgcatgatcctgctaaagatacaggttttgtcgggagtgcattgacaagtaacatgatacgattttttaagacccaagatgaatcatggagccatgaggttgccatatcagtgaaaccactgaaagtgcaaaactggattcttcctgaaatgcctgggcttataactgattttttgatttctcttgatgatcggtttctgtactttgtaaactggcttcatggggatatcagacagtataacattgagaaccttaaaaatcctaaactgaccggacaagtatgggttggtggacttatccagaaaggaagccctgtagtagctataactgatgatggtgaaacttggcaagctgaagtgcctgagattcagggcaacaagttgagagggggccctcagatgattcaattgagtttagatgggaaacggctctatgctaccaactcactatttagtacatgggacaaacagttttatccagagtttgtccagaaaggctcccacataatacagattgatgttgatactgagaaaggtggcctgaaaatcaaccccaacttctttgtggactttggagctgagcctgatggtccttctcttgcccatgagatgagatatcctggtggtgactgcacttcagatatatggatttaagcttacgtgtcgttatttccctttaataaacggtatctgtcatatggttgtaatgagctattatgctttataaataatgctcctgtgaatcttcaacatttcgaagacagtttgcagttgcataaatatatg

SEQ ID NO: 55189 - protein, 480 aa, Glycine max
  peptide (1)..(480): Ceres Seq. ID no. 15176201
  misc_feature (13)..(480): Pfam Name: 56kDa selenium binding protein (SBP56) Pfam Description: 56kDa selenium binding protein (SBP56)
  misc_feature (1)..(480): Homolog of NCBI NO: 22530900 NR Description: selenium-binding protein-like protein
  misc_feature (1)..(480): Homolog of NCBI NO: 15236386 NR Description: selenium-binding protein like [Arabidopsis
  misc_feature (1)..(480): Homolog of NCBI NO: 13605825 NR Description: AT4g14040/dl3061c [Arabidopsis thaliana]
  misc_feature (3)..(480): Homolog of NCBI NO: 15236385 NR Description: selenium-binding protein like [Arabidopsis
  misc_feature (1)..(480): Homolog of NCBI NO: 15485716 NR Description: selenium binding protein [Lotus corniculatus var.
  misc_feature (1)..(480): Homolog of NCBI NO: 15485720 NR Description: selenium binding protein [Medicago sativa]
MSSVLEHGVVGCCKSGPGYATPLEAMSGPRESLIYVTAVYTGTGIEKPDYLATVDIDPNSPTYSKVIHRLRVPYLGDELHHTGWNSCSSCHGDPSADRRFLIAPALVSGRIYVVDVKTNPRAPSLHKVVEPADIIQKTGLAYPHTSHCLASGDIMISCLGDKDGNAAGNGFLLLDSEFNVKGRWEKPGHSPLFGYDFWYQPRHNTMISTSWGAPSAFTKGFNLQHLSDGLYGRHLHVYSWPGGELRQTLDLGDSGLLPLEIRFLHDPAKDTGFVGSALTSNMIRFFKTQDESWSHEVAISVKPLKVQNWILPEMPGLITDFLISLDDRFLYFVNWLHGDIRQYNIENLKNPKLTGQVWVGGLIQKGSPVVAITDDGETWQAEVPEIQGNKLRGGPQMIQLSLDGKRLYATNSLFSTWDKQFYPEFVQKGSHIIQIDVDTEKGGLKINPNFFVDFGAEPDGPSLAHEMRYPGGDCTSDIWI

SEQ ID NO: 55190 - protein, 455 aa, Glycine max
  peptide (1)..(455): Ceres Seq. ID no. 15176202
  misc_feature (1)..(455): Pfam Name: 56kDa selenium binding protein (SBP56) Pfam Description: 56kDa selenium binding protein (SBP56)
  misc_feature (1)..(455): Homolog of NCBI NO: 22530900 NR Description: selenium-binding protein-like protein
  misc_feature (1)..(455): Homolog of NCBI NO: 15236386 NR Description: selenium-binding protein like [Arabidopsis
  misc_feature (1)..(455): Homolog of NCBI NO: 13605825 NR Description: AT4g14040/dl3061c [Arabidopsis thaliana]
  misc_feature (1)..(455): Homolog of NCBI NO: 15236385 NR Description: selenium-binding protein like [Arabidopsis
  misc_feature (1)..(455): Homolog of NCBI NO: 15485716 NR Description: selenium binding protein [Lotus corniculatus var.
  misc_feature (1)..(455): Homolog of NCBI NO: 15485720 NR Description: selenium binding protein [Medicago sativa]
MSGPRESLIYVTAVYTGTGIEKPDYLATVDIDPNSPTYSKVIHRLRVPYLGDELHHTGWNSCSSCHGDPSADRRFLIAPALVSGRIYVVDVKTNPRAPSLHKVVEPADIIQKTGLAYPHTSHCLASGDIMISCLGDKDGNAAGNGFLLLDSEFNVKGRWEKPGHSPLFGYDFWYQPRHNTMISTSWGAPSAFTKGFNLQHLSDGLYGRHLHVYSWPGGELRQTLDLGDSGLLPLEIRFLHDPAKDTGFVGSALTSNMIRFFKTQDESWSHEVAISVKPLKVQNWILPEMPGLITDFLISLDDRFLYFVNWLHGDIRQYNIENLKNPKLTGQVWVGGLIQKGSPVVAITDDGETWQAEVPEIQGNKLRGGPQMIQLSLDGKRLYATNSLFSTWDKQFYPEFVQKGSHIIQIDVDTEKGGLKINPNFFVDFGAEPDGPSLAHEMRYPGGDCTSDIWI

SEQ ID NO: 55191 - protein, 326 aa, Glycine max
  peptide (1)..(326): Ceres Seq. ID no. 15176203
  misc_feature (1)..(326): Pfam Name: 56kDa selenium binding protein (SBP56) Pfam Description: 56kDa selenium binding protein (SBP56)
  misc_feature (1)..(326): Homolog of NCBI NO: 22530900 NR Description: selenium-binding protein-like protein
  misc_feature (1)..(326): Homolog of NCBI NO: 15236386 NR Description: selenium-binding protein like [Arabidopsis
  misc_feature (1)..(326): Homolog of NCBI NO: 13605825 NR Description: AT4g14040/dl3061c [Arabidopsis thaliana]
  misc_feature (1)..(326): Homolog of NCBI NO: 15236385 NR Description: selenium-binding protein like [Arabidopsis
  misc_feature (1)..(326): Homolog of NCBI NO: 15485716 NR Description: selenium binding protein [Lotus corniculatus var.
  misc_feature (1)..(326): Homolog of NCBI NO: 15485720 NR Description: selenium binding protein [Medicago sativa]
MISCLGDKDGNAAGNGFLLLDSEFNVKGRWEKPGHSPLFGYDFWYQPRHNTMISTSWGAPSAFTKGFNLQHLSDGLYGRHLHVYSWPGGELRQTLDLGDSGLLPLEIRFLHDPAKDTGFVGSALTSNMIRFFKTQDESWSHEVAISVKPLKVQNWILPEMPGLITDFLISLDDRFLYFVNWLHGDIRQYNIENLKNPKLTGQVWVGGLIQKGSPVVAITDDGETWQAEVPEIQGNKLRGGPQMIQLSLDGKRLYATNSLFSTWDKQFYPEFVQKGSHIIQIDVDTEKGGLKINPNFFVDFGAEPDGPSLAHEMRYPGGDCTSDIWI

SEQ ID NO: 55192 - DNA, 1777 bp, Glycine max
  misc_feature (1)..(1777): Ceres Seq. ID no. 13594023
acaatcgctctcaatctttccagattttctcccaaaccgttcaaacccgtatcgcgtgtcaaattgttcttctgattttctcattgatcgcgattatcgcatctcaaatcgaacttgaatcagagaagacgttgaatttttgaaaagtgagaaaagagggattctggaacgtctctatcgtggtttgtcagtaccctatctcaaacgaaaatgtcatctttatatggaggggaatccaagaggtacaataatatacccagaggacaccatcatttgacaacacagaagaaacaggagattagggaagcctttgaattattcaatactgatggctcaggtactattgatgccaaggatctgaatgttgccatgagggccattggatttgaaatgacagaagagctcattaatcaaatgaaagcagatttggacaaggatggaagtggagcaattgattatgaagaatttgagtacatgatgacaaccaaaataggagagcgggacagtaaagagggaaagatatctgcatcagacatcaagtgcattgcgaaagagccaggtcaaaatttcactaacagagacattcaggagatggttgacgaagcagaccaagatagtaagttattccaatcttatccttgtcaacattctaattttacagcaaaacttttacttctaatactgtggatttttattctgaggtttactgggtgtggatgcatgggagtgatgggaccatggacttcagatcttgctgacataatgtgtgtatataaaaaaaatactatcatttctttgaaattcaaattggccgttttctgcattaaaataaataaatggacaatacagaggccaaaagattaaaaaaaaaagtattcatgaatcattatgataagaggtcactaaattgtatacaagactcactggaaaaataagtagtttgtagttttacctcagtaacactaatcagtttaccaaaaaaatgatacaaagtggtatatatgtttgaaaaattaaataggaatatttcttattcaaaagttatttttcaatgtagtttttaaaagtatattgggatgtttgcattggaatcataatgctcaggggaggtcaatgtattatacactcttgtctgttggatgacaaattctattatataaatgataaaggaacactatatttgccattattttatttttaatgatagatttagtgatcaaccttgacttgttttatttgttcgacattgcataggtttaatgtctgttaatttattattcatgttaattaccatagaattgaaaatatcacagcctgaggtcttaaaaggaaaaggaagaaaacattaccttttgcgaaaagtattttaaagcttgctaggatagaggcttaatcgtggttcaattataatttataacaggggtgcctcattttttattttgcttccccattagtgtactatttcttctcatgattatcagatgttatatctatttttaagttataaaatatgcagattgtcctgaagttagtgcagaggagtttataaggatgttgttcgatcccccctactacggccactaatcgtacagaaattaatgcagtcatattttcataaatttaaattggagatgctagttatgatcaaacaacctcgaacctcgaagttatcgtgtgtaatttttaatttcttttatcaatctatatattgttcattttcataaatttaaattggagatcctagttatgatcaaacaacctcgaagttctcgtgttt

SEQ ID NO: 55193 - protein, 217 aa, Glycine max
  peptide (1)..(217): Ceres Seq. ID no. 13594024
  misc_feature (29)..(57): Pfam Name: EF hand Pfam Description: EF hand
  misc_feature (16)..(135): Homolog of NCBI NO: 21554823 NR Description: caltractin-like protein [Arabidopsis thaliana]
  misc_feature (16)..(135): Homolog of NCBI NO: 15234588 NR Description: caltractin (centrin), putative [Arabidopsis
  misc_feature (22)..(135): Homolog of NCBI NO: 543936 NR Description: CALTRACTIN (CENTRIN)
  misc_feature (7)..(135): Homolog of NCBI NO: 2920835 NR Description: centrin [Marsilea vestita]
  misc_feature (1)..(135): Homolog of NCBI NO: 6358511 NR Description: centrin [Nicotiana tabacum]
  misc_feature (1)..(135): Homolog of NCBI NO: 6358509 NR Description: centrin [Nicotiana tabacum]
  misc_feature (7)..(135): Homolog of NCBI NO: 33146874 NR Description: putative caltractin [Oryza sativa (japonica
  misc_feature (2)..(135): Homolog of NCBI NO: 34906754 NR Description: putative caltractin [Oryza sativa (japonica
  misc_feature (16)..(135): Homolog of NCBI NO: 729051 NR Description: CALTRACTIN (CENTRIN)
  misc_feature (1)..(135): Homolog of NCBI NO: 15229732 NR Description: caltractin (centrin) [Arabidopsis thaliana]
MSSLYGGESKRYNNIPRGHHHLTTQKKQEIREAFELFNTDGSGTIDAKDLNVAMRAIGFEMTEELINQMKADLDKDGSGAIDYEEFEYMMTTKIGERDSKEGKISASDIKCIAKEPGQNFTNRDIQEMVDEADQDSKLFQSYPCQHSNFTAKLLLLILWIFILRFTGCGCMGVMGPWTSDLADIMCVYKKNTIISLKFKLAVFCIKINKWTIQRPKD

SEQ ID NO: 55194 - protein, 164 aa, Glycine max
  peptide (1)..(164): Ceres Seq. ID no. 13594025
  misc_feature (1)..(82): Homolog of NCBI NO: 21554823 NR Description: caltractin-like protein [Arabidopsis thaliana]
  misc_feature (1)..(82): Homolog of NCBI NO: 15234588 NR Description: caltractin (centrin), putative [Arabidopsis
  misc_feature (1)..(82): Homolog of NCBI NO: 543936 NR Description: CALTRACTIN (CENTRIN)
  misc_feature (1)..(82): Homolog of NCBI NO: 2920835 NR Description: centrin [Marsilea vestita]
  misc_feature (1)..(82): Homolog of NCBI NO: 6358511 NR Description: centrin [Nicotiana tabacum]
  misc_feature (1)..(82): Homolog of NCBI NO: 6358509 NR Description: centrin [Nicotiana tabacum]
  misc_feature (1)..(82): Homolog of NCBI NO: 33146874 NR Description: putative caltractin [Oryza sativa (japonica
  misc_feature (1)..(82): Homolog of NCBI NO: 34906754 NR Description: putative caltractin [Oryza sativa (japonica
  misc_feature (1)..(82): Homolog of NCBI NO: 729051 NR Description: CALTRACTIN (CENTRIN)
  misc_feature (1)..(82): Homolog of NCBI NO: 15229732 NR Description: caltractin (centrin) [Arabidopsis thaliana]
MRAIGFEMTEELINQMKADLDKDGSGAIDYEEFEYMMTTKIGERDSKEGKISASDIKCIAKEPGQNFTNRDIQEMVDEADQDSKLFQSYPCQHSNFTAKLLLLILWIFILRFTGCGCMGVMGPWTSDLADIMCVYKKNTIISLKFKLAVFCIKINKWTIQRPKD

SEQ ID NO: 55195 - protein, 157 aa, Glycine max
  peptide (1)..(157): Ceres Seq. ID no. 13594026
  misc_feature (1)..(75): Homolog of NCBI NO: 21554823 NR Description: caltractin-like protein [Arabidopsis thaliana]
  misc_feature (1)..(75): Homolog of NCBI NO: 15234588 NR Description: caltractin (centrin), putative [Arabidopsis
  misc_feature (1)..(75): Homolog of NCBI NO: 543936 NR Description: CALTRACTIN (CENTRIN)
  misc_feature (1)..(75): Homolog of NCBI NO: 2920835 NR Description: centrin [Marsilea vestita]
  misc_feature (1)..(75): Homolog of NCBI NO: 6358511 NR Description: centrin [Nicotiana tabacum]
  misc_feature (1)..(75): Homolog of NCBI NO: 6358509 NR Description: centrin [Nicotiana tabacum]
  misc_feature (1)..(75): Homolog of NCBI NO: 33146874 NR Description: putative caltractin [Oryza sativa (japonica
  misc_feature (1)..(75): Homolog of NCBI NO: 34906754 NR Description: putative caltractin [Oryza sativa (japonica
  misc_feature (1)..(75): Homolog of NCBI NO: 729051 NR Description: CALTRACTIN (CENTRIN)
  misc_feature (1)..(75): Homolog of NCBI NO: 15229732 NR Description: caltractin (centrin) [Arabidopsis thaliana]
MTEELINQMKADLDKDGSGAIDYEEFEYMMTTKIGERDSKEGKISASDIKCIAKEPGQNFTNRDIQEMVDEADQDSKLFQSYPCQHSNFTAKLLLLILWIFILRFTGCGCMGVMGPWTSDLADIMCVYKKNTIISLKFKLAVFCIKINKWTIQRPKD

SEQ ID NO: 55196 - DNA, 1291 bp, Glycine max
  misc_feature (1)..(1291): Ceres Seq. ID no. 14308413
aatatgacgcgctccggcgccgccaggggtggtaagaccctgccgccgcgggcttcagcccgcgatgatgagatcaatgacacgattccgactttgggatcggagactaattttaggaatgggaagtatttgtattactcgagaggtggggattactgcaagggaatgaatcattatttgtggagtttcttgtgtggattgggggaagctatgtttttgaacaggacttttgttatggatttgagtgtttgtttggcttcaacttataaccctagtaacaaggatgaggaggggaaggattttaggtactacttcgatttcgagcatttgaaggagacggcttcgtttgtggaggaaggtgagtttttgagggattggaagaattgggataaaacgcatttgaagaagaagaagattcctgttaggaaggttgtcaatcacaaggtgactcctatgcagcttaagaaggataagagtacgattatatggaggcagtttgatgcgccggagcctgaaaattattggtatagggtttgtgaaggtgaggccgctaagaatattcagaggccttggcatgctgtgtggaaatccaagaggttgatgaatattgttactgagattagtggaaggttggactgggattttgacgccgttcatgtggttcggggagagaaagctcagaacaaggagttgtggcctcatttggattatgatacgtcgccggatgttcttgtcgagaagcttaaatggatggttcagccttggagacatttgtacattgccaccaatgagccttattataattactttgataagttgaggtcaaattacaaggtgcatctgcttgatgactataaggagctgtggggaaatacaagtgagtggtataacgagaccacacttctcaacaatggaaagcctgttgagtttgatgggtacatgagagttgcagtggatactgaggtcttttaccgtggaaagacacgcgtggaaacgttctacaatttgactaaagattgcaaggatggagttaatacatgctgatcaggttggcactactgattatgatgctttttcagaatacatggtacactcgggccttgcttttggattcagtttcagattcataccattgggttagatatgagcttgttgttgtgcttgcttgttcttttattatattgatgatttatattgattatcatgattttgtatacatactatagaatccctttctaccctctttcctttctgttgactcaagctgctaaatccattctcgtattctttc

SEQ ID NO: 55197 - protein, 347 aa, Glycine max
  peptide (1)..(347): Ceres Seq. ID no. 14308414
  misc_feature (121)..(331): Homolog of NCBI NO: 34909040 NR Description: P0034E02.33 [Oryza sativa (japonica
  misc_feature (30)..(220): Homolog of NCBI NO: 34909040 NR Description: P0034E02.33 [Oryza sativa (japonica
  misc_feature (10)..(347): Homolog of NCBI NO: 15235454 NR Description: expressed protein [Arabidopsis thaliana]
  misc_feature (23)..(347): Homolog of NCBI NO: 37534994 NR Description: unknown protein [Oryza sativa (japonica
  misc_feature (25)..(347): Homolog of NCBI NO: 18395698 NR Description: expressed protein [Arabidopsis thaliana]
  misc_feature (1)..(347): Homolog of NCBI NO: 34913308 NR Description: P0519E12.32 [Oryza sativa (japonica
  misc_feature (18)..(347): Homolog of NCBI NO: 15236611 NR Description: expressed protein [Arabidopsis thaliana]
NMTRSGAARGGKTLPPRASARDDEINDTIPTLGSETNFRNGKYLYYSRGGDYCKGMNHYLWSFLCGLGEAMFLNRTFVMDLSVCLASTYNPSNKDEEGKDFRYYFDFEHLKETASFVEEGEFLRDWKNWDKTHLKKKKIPVRKVVNHKVTPMQLKKDKSTIIWRQFDAPEPENYWYRVCEGEAAKNIQRPWHAVWKSKRLMNIVTEISGRLDWDFDAVHVVRGEKAQNKELWPHLDYDTSPDVLVEKLKWMVQPWRHLYIATNEPYYNYFDKLRSNYKVHLLDDYKELWGNTSEWYNETTLLNNGKPVEFDGYMRVAVDTEVFYRGKTRVETFYNLTKDCKDGVNTC

SEQ ID NO: 55198 - protein, 346 aa, Glycine max
  peptide (1)..(346): Ceres Seq. ID no. 14308415
  misc_feature (120)..(330): Homolog of NCBI NO: 34909040 NR Description: P0034E02.33 [Oryza sativa (japonica
  misc_feature (29)..(219): Homolog of NCBI NO: 34909040 NR Description: P0034E02.33 [Oryza sativa (japonica
  misc_feature (9)..(346): Homolog of NCBI NO: 15235454 NR Description: expressed protein [Arabidopsis thaliana]
  misc_feature (22)..(346): Homolog of NCBI NO: 37534994 NR Description: unknown protein [Oryza sativa (japonica
  misc_feature (24)..(346): Homolog of NCBI NO: 18395698 NR Description: expressed protein [Arabidopsis thaliana]
  misc_feature (1)..(346): Homolog of NCBI NO: 34913308 NR Description: P0519E12.32 [Oryza sativa (japonica
  misc_feature (17)..(346): Homolog of NCBI NO: 15236611 NR Description: expressed protein [Arabidopsis thaliana]
MTRSGAARGGKTLPPRASARDDEINDTIPTLGSETNFRNGKYLYYSRGGDYCKGMNHYLWSFLCGLGEAMFLNRTFVMDLSVCLASTYNPSNKDEEGKDFRYYFDFEHLKETASFVEEGEFLRDWKNWDKTHLKKKKIPVRKVVNHKVTPMQLKKDKSTIIWRQFDAPEPENYWYRVCEGEAAKNIQRPWHAVWKSKRLMNIVTEISGRLDWDFDAVHVVRGEKAQNKELWPHLDYDTSPDVLVEKLKWMVQPWRHLYIATNEPYYNYFDKLRSNYKVHLLDDYKELWGNTSEWYNETTLLNNGKPVEFDGYMRVAVDTEVFYRGKTRVETFYNLTKDCKDGVNTC

SEQ ID NO: 55199 - protein, 292 aa, Glycine max
  peptide (1)..(292): Ceres Seq. ID no. 14308416
  misc_feature (66)..(276): Homolog of NCBI NO: 34909040 NR Description: P0034E02.33 [Oryza sativa (japonica
  misc_feature (1)..(165): Homolog of NCBI NO: 34909040 NR Description: P0034E02.33 [Oryza sativa (japonica
  misc_feature (1)..(292): Homolog of NCBI NO: 15235454 NR Description: expressed protein [Arabidopsis thaliana]
  misc_feature (1)..(292): Homolog of NCBI NO: 37534994 NR Description: unknown protein [Oryza sativa (japonica
  misc_feature (1)..(292): Homolog of NCBI NO: 18395698 NR Description: expressed protein [Arabidopsis thaliana]
  misc_feature (1)..(292): Homolog of NCBI NO: 34913308 NR Description: P0519E12.32 [Oryza sativa (japonica
  misc_feature (1)..(292): Homolog of NCBI NO: 15236611 NR Description: expressed protein [Arabidopsis thaliana]
MNHYLWSFLCGLGEAMFLNRTFVMDLSVCLASTYNPSNKDEEGKDFRYYFDFEHLKETASFVEEGEFLRDWKNWDKTHLKKKKIPVRKVVNHKVTPMQLKKDKSTIIWRQFDAPEPENYWYRVCEGEAAKNIQRPWHAVWKSKRLMNIVTEISGRLDWDFDAVHVVRGEKAQNKELWPHLDYDTSPDVLVEKLKWMVQPWRHLYIATNEPYYNYFDKLRSNYKVHLLDDYKELWGNTSEWYNETTLLNNGKPVEFDGYMRVAVDTEVFYRGKTRVETFYNLTKDCKDGVNTC

SEQ ID NO: 55200 - DNA, 1363 bp, Glycine max
  misc_feature (1)..(1363): Ceres Seq. ID no. 15169195
tactataaagtataaacccactgcgcgcaccattctccactgtccaaggagatcaagcaccaaacccaacacacacctctctctctctctctctctctcttgtgctgttgttctatttctcattctttcgcaagtgaatgttgaactgactctgcggttcggttcggttttttttttttctgtttatggatccgggcgcgatgatgaacgagggttccttcgcgaacaatgcgagcggtaatacggcgccgtttagcttggcggagatctggcagcagttcccgccggcgattagtggcggcggtggattggggctcagaagcccgcagttcggtcacgggccaggagggcagtttggggatttcaccaccgggccgagccacggactcggacccagtaacagcagaaagcggcgcgactccgaggaggacgattccgctaagggcgtgtccaccagcaatgccgtgaatgagggtgatggaaaacgtgttaaagggaataggaacgagggtggtggtgatggtggtaataataaaggtgaaggtgaagtcagttcaggaaagcctgcggagcaaagcgctaagccagcttcggagcctccgaagcaagactacattcacgttcgagccagaaggggtcaagccactgatagtcacagtcttgcagaacgagctcgaagggaaaagattagtgaaaggatgaaaattcttcaggatttggtccctggttgtaataaggttattgggaaagcattggtccttgatgagataattaattatattcaatctcttcagcgccaagttgagtttttgtcaatgaagcttgaagcagtgaattcaagacttaactctggtattgaagcgtttcctcctaaagattttggtcagcaagcatttgatcctgctggcataccattcggttcgcaagctccaagagagtatagcagaggttcttcaccagactggttacatatgcagataggaggtagttttgaaagaacaacgtagtctacgagatcccttggtaataaatacataaaccagtggtattccattcttcagtagcacccagaaaacatcaatggtatactcagggaagcaagtacaatgggcacctcattcccattttctacactaggcatggagctgtcactgtttttcacaggactgcttcagtttctatttaagcatctccatatgttggtgtgttggaaaatgaattcatttactcaatatatgtagtatagtggacttttaggctttgtattctgctactcaacataacccttaaaatgatcattcttcttgtaaaagaatgctgcttcatcttaatacatgatgcttacagattgtgtaatactctc

SEQ ID NO: 55201 - protein, 273 aa, Glycine max
  peptide (1)..(273): Ceres Seq. ID no. 15169196
  misc_feature (153)..(203): Pfam Name: Helix-loop-helix DNA-binding domain Pfam Description: Helix-loop-helix DNA-binding domain
  misc_feature (64)..(234): Homolog of NCBI NO: 34906952 NR Description: DNA-binding protein-like protein
  misc_feature (1)..(231): Homolog of NCBI NO: 30696324 NR Description: bHLH protein [Arabidopsis thaliana]
  misc_feature (1)..(231): Homolog of NCBI NO: 25453562 NR Description: helix-loop-helix protein homolog
  misc_feature (1)..(273): Homolog of NCBI NO: 15241896 NR Description: bHLH protein family [Arabidopsis thaliana]
  misc_feature (21)..(273): Homolog of NCBI NO: 29150361 NR Description: hypothetical protein [Oryza sativa (japonica
  misc_feature (232)..(273): Homolog of NCBI NO: 25404871 NR Description: protein T30E16.21 [imported] - Arabidopsis
  misc_feature (22)..(231): Homolog of NCBI NO: 25404871 NR Description: protein T30E16.21 [imported] - Arabidopsis
  misc_feature (1)..(273): Homolog of NCBI NO: 21592490 NR Description: unknown [Arabidopsis thaliana]
  misc_feature (1)..(273): Homolog of NCBI NO: 18406408 NR Description: bHLH protein [Arabidopsis thaliana]
  misc_feature (15)..(273): Homolog of NCBI NO: 33339703 NR Description: MYC1 [Catharanthus roseus]
MDPGAMMNEGSFANNASGNTAPFSLAEIWQQFPPAISGGGGLGLRSPQFGHGPGGQFGDFTTGPSHGLGPSNSRKRRDSEEDDSAKGVSTSNAVNEGDGKRVKGNRNEGGGDGGNNKGEGEVSSGKPAEQSAKPASEPPKQDYIHVRARRGQATDSHSLAERARREKISERMKILQDLVPGCNKVIGKALVLDEIINYIQSLQRQVEFLSMKLEAVNSRLNSGIEAFPPKDFGQQAFDPAGIPFGSQAPREYSRGSSPDWLHMQIGGSFERTT

SEQ ID NO: 55202 - protein, 268 aa, Glycine max
  peptide (1)..(268): Ceres Seq. ID no. 15169197
  misc_feature (148)..(198): Pfam Name: Helix-loop-helix DNA-binding domain Pfam Description: Helix-loop-helix DNA-binding domain
  misc_feature (59)..(229): Homolog of NCBI NO: 34906952 NR Description: DNA-binding protein-like protein
  misc_feature (1)..(226): Homolog of NCBI NO: 30696324 NR Description: bHLH protein [Arabidopsis thaliana]
  misc_feature (1)..(226): Homolog of NCBI NO: 25453562 NR Description: helix-loop-helix protein homolog
  misc_feature (1)..(268): Homolog of NCBI NO: 15241896 NR Description: bHLH protein family [Arabidopsis thaliana]
  misc_feature (16)..(268): Homolog of NCBI NO: 29150361 NR Description: hypothetical protein [Oryza sativa (japonica
  misc_feature (227)..(268): Homolog of NCBI NO: 25404871 NR Description: protein T30E16.21 [imported] - Arabidopsis
  misc_feature (17)..(226): Homolog of NCBI NO: 25404871 NR Description: protein T30E16.21 [imported] - Arabidopsis
  misc_feature (1)..(268): Homolog of NCBI NO: 21592490 NR Description: unknown [Arabidopsis thaliana]
  misc_feature (1)..(268): Homolog of NCBI NO: 18406408 NR Description: bHLH protein [Arabidopsis thaliana]
  misc_feature (10)..(268): Homolog of NCBI NO: 33339703 NR Description: MYC1 [Catharanthus roseus]
MMNEGSFANNASGNTAPFSLAEIWQQFPPAISGGGGLGLRSPQFGHGPGGQFGDFTTGPSHGLGPSNSRKRRDSEEDDSAKGVSTSNAVNEGDGKRVKGNRNEGGGDGGNNKGEGEVSSGKPAEQSAKPASEPPKQDYIHVRARRGQATDSHSLAERARREKISERMKILQDLVPGCNKVIGKALVLDEIINYIQSLQRQVEFLSMKLEAVNSRLNSGIEAFPPKDFGQQAFDPAGIPFGSQAPREYSRGSSPDWLHMQIGGSFERTT

SEQ ID NO: 55203 - protein, 267 aa, Glycine max
  peptide (1)..(267): Ceres Seq. ID no. 15169198
  misc_feature (147)..(197): Pfam Name: Helix-loop-helix DNA-binding domain Pfam Description: Helix-loop-helix DNA-binding domain
  misc_feature (58)..(228): Homolog of NCBI NO: 34906952 NR Description: DNA-binding protein-like protein
  misc_feature (1)..(225): Homolog of NCBI NO: 30696324 NR Description: bHLH protein [Arabidopsis thaliana]
  misc_feature (1)..(225): Homolog of NCBI NO: 25453562 NR Description: helix-loop-helix protein homolog
  misc_feature (1)..(267): Homolog of NCBI NO: 15241896 NR Description: bHLH protein family [Arabidopsis thaliana]
  misc_feature (15)..(267): Homolog of NCBI NO: 29150361 NR Description: hypothetical protein [Oryza sativa (japonica
  misc_feature (226)..(267): Homolog of NCBI NO: 25404871 NR Description: protein T30E16.21 [imported] - Arabidopsis
  misc_feature (16)..(225): Homolog of NCBI NO: 25404871 NR Description: protein T30E16.21 [imported] - Arabidopsis
  misc_feature (1)..(267): Homolog of NCBI NO: 21592490 NR Description: unknown [Arabidopsis thaliana]
  misc_feature (1)..(267): Homolog of NCBI NO: 18406408 NR Description: bHLH protein [Arabidopsis thaliana]
  misc_feature (9)..(267): Homolog of NCBI NO: 33339703 NR Description: MYC1 [Catharanthus roseus]
MNEGSFANNASGNTAPFSLAEIWQQFPPAISGGGGLGLRSPQFGHGPGGQFGDFTTGPSHGLGPSNSRKRRDSEEDDSAKGVSTSNAVNEGDGKRVKGNRNEGGGDGGNNKGEGEVSSGKPAEQSAKPASEPPKQDYIHVRARRGQATDSHSLAERARREKISERMKILQDLVPGCNKVIGKALVLDEIINYIQSLQRQVEFLSMKLEAVNSRLNSGIEAFPPKDFGQQAFDPAGIPFGSQAPREYSRGSSPDWLHMQIGGSFERTT

SEQ ID NO: 55204 - DNA, 2013 bp, Glycine max
  misc_feature (1)..(2013): Ceres Seq. ID no. 15175670
atgtagaatgattcacctaaggaaaaattagtagcttcttgttgtgctttttattttgttttgttttgtgtagagataaatctgtttggtattgttttgtgttttatgaattatttgatgggtgaagagggagaagaagtggtgagaaagcaaggacaaaggggtgttgatggagataaatggtacttgtatagctgcttacaagactgtaaatattggtgctgtaatttaatacacgagactagcagttctttttcgatggttccttttgagtgaaaaaaaccttgtcttctcatcagctttctttggagagatcttaaagacgacattgactgctaacaacaataaagtggatcaatcattaaaggcttacttcttcttcttcttcttcttcttcttcttctaacaacaataagatcccatctttcccactcatgaagagacttaacagctcagattcttccactgccctcatgacaatttttccatcatcatcaacagaggaacatagtccgaggaacagccaccacatgtatggcagggagttccgatcgatgttggacggactcgacgaggaagggtgtgttgaagaaccggggcatcaatctgagaagaagcgtcgactaagtgtggaacaagtgaaggctttggagaagaactttgaggttgaaaacaagcttgaacctgagaggaaggtcaagcttgcccaagaacttgggttgcaacctagacaagtagccgtttggttccaaaaccgccgagccagatggaaaaccaaacaattggagagagattatggtgtcctcaaagccaattatgatgctcttaagcttaactttggcaccctcaatcaggacaacgaagccttacgaaagcagataaaggaattgaaatcgaggctgctgcaagaagagaacacagcaggaagcggtgtttcggtgaaggaagaagagataacaacgatgcctgcagactcagaagagaaaacgatggaacaaagtaagagtgacccaccttctgaaacctcgaacattaatcctagttcggagtcgtcggaggaggaccacttgaattacgaatgtttcaacaacaacagcgacgactgtgtcgtcggaggatccgccgcagcatcgctcttgcaagtggacttcatgaaagacgggttcttccgacagcgacggatcaagcgcgatcttgaacgaagacaccatgtacttgccgtcttcgatgactgttttcagttccagaaaccgtatcatcacgcgcagtacgtgaagacggaggagcacaatttcttgagcgccgatgaggcctgcaatttcttctccgatgaacaagcaccgaccctgcaatggtactgtccagaacagtggagctgagatagaagaaacatgggaaaattggaaaccgctttcagaaatttttgtttaatatgttgcacggttgtgttgaacacagctcattgaggtaaaagttgtaaaaaaaggttgccacttgccaacagaggctgcttgaaggtagaaaatgaaacactgtgcagaagatagagttacgaaagagagaacagagatcaatggctgcatggcgtggggtcggagatgaaggatgacgattaaggttaattattactctcgatcgtgggtaatatcaataattattcaatcgtaaagcaaaccatgctgtaaaaaacaaatttcaattcaagtatagaataacgatgtagtactttatcaaacagaaaacgaaaaaaaaaattataaatctgttaaacaatatccttttgcctcactgaactcagtttactagtgtttatgattgattatccttttcctgtaaaagtatttttttttcaccaacaattgctactaaactgaatttgagttggaggcaacatatgagttgttttttaatgttcatttccattgacattgtttattcattagtcgtgtcaagtaaaaatatttttgttattagtatatcattcaaataaaatttattttatcaacatatttt

SEQ ID NO: 55205 - protein, 314 aa, Glycine max
  peptide (1)..(314): Ceres Seq. ID no. 15175671
  misc_feature (60)..(114): Pfam Name: Homeobox domain Pfam Description: Homeobox domain
MKRLNSSDSSTALMTIFPSSSTEEHSPRNSHHMYGREFRSMLDGLDEEGCVEEPGHQSEKKRRLSVEQVKALEKNFEVENKLEPERKVKLAQELGLQPRQVAVWFQNRRARWKTKQLERDYGVLKANYDALKLNFGTLNQDNEALRKQIKELKSRLLQEENTAGSGVSVKEEEITTMPADSEEKTMEQSKSDPPSETSNINPSSESSEEDHLNYECFNNNSDDCVVGGSAAASLLQVDFMKDGFFRQRRIKRDLERRHHVLAVFDDCFQFQKPYHHAQYVKTEEHNFLSADEACNFFSDEQAPTLQWYCPEQWS

SEQ ID NO: 55206 - protein, 301 aa, Glycine max
  peptide (1)..(301): Ceres Seq. ID no. 15175672
  misc_feature (47)..(101): Pfam Name: Homeobox domain Pfam Description: Homeobox domain
MTIFPSSSTEEHSPRNSHHMYGREFRSMLDGLDEEGCVEEPGHQSEKKRRLSVEQVKALEKNFEVENKLEPERKVKLAQELGLQPRQVAVWFQNRRARWKTKQLERDYGVLKANYDALKLNFGTLNQDNEALRKQIKELKSRLLQEENTAGSGVSVKEEEITTMPADSEEKTMEQSKSDPPSETSNINPSSESSEEDHLNYECFNNNSDDCVVGGSAAASLLQVDFMKDGFFRQRRIKRDLERRHHVLAVFDDCFQFQKPYHHAQYVKTEEHNFLSADEACNFFSDEQAPTLQWYCPEQWS

SEQ ID NO: 55207 - protein, 282 aa, Glycine max
  peptide (1)..(282): Ceres Seq. ID no. 15175673
  misc_feature (28)..(82): Pfam Name: Homeobox domain Pfam Description: Homeobox domain
MYGREFRSMLDGLDEEGCVEEPGHQSEKKRRLSVEQVKALEKNFEVENKLEPERKVKLAQELGLQPRQVAVWFQNRRARWKTKQLERDYGVLKANYDALKLNFGTLNQDNEALRKQIKELKSRLLQEENTAGSGVSVKEEEITTMPADSEEKTMEQSKSDPPSETSNINPSSESSEEDHLNYECFNNNSDDCVVGGSAAASLLQVDFMKDGFFRQRRIKRDLERRHHVLAVFDDCFQFQKPYHHAQYVKTEEHNFLSADEACNFFSDEQAPTLQWYCPEQWS

SEQ ID NO: 55208 - DNA, 761 bp, Glycine max
  misc_feature (1)..(761): Ceres Seq. ID no. 12607455
cagtgaagagcaggtcaaacttgctctgctgtctgacccctctctctccactggcccctttattttctaatttattttgattttacgctgaacaaatatgctgcagcagctgcttactgttgcaaacaaaaatttgaatcctgtagacgaaagctattctatccgatgccattaaatgtaatcaagaagaaaaacaccttgcagtcaccctggaatttgcaaaatgggaattgggcgatactgagaaggaattgaagttgctcaagtctgctgtttcctcttcagagaaagaatacgatcaaattccgaaagatacggaagctattcaaatggaattggagagtgaaaggagtttacggaagaagcttgaggaagaacttggagaattgaacagcaaaattgatgagctgacttctgaaactggagaaaccacaatacaaaaactcgaaaaagaaataaggatttgcaagaacatgatcaagtgtactgtctgtactgatcgtccaaaggaggttgtgattgtcaagtgctatcatctgttctgcaatccatgcattcagagaaatctagagcttcggcaccgcaaatgtcctgcatgtggaacagcatttggacagagtgatgtccgctttgtaaaaatatgaaacagatgttaagatagatactttgtagataggtgttgattgattgtaatgttttggatccttggttaccctgatcatagtttcaaacaagcattcttagccgaaagaaatatatgc

SEQ ID NO: 55209 - protein, 104 aa, Glycine max
  peptide (1)..(104): Ceres Seq. ID no. 12607456
  misc_feature (52)..(90): Pfam Name: Zinc finger, C3HC4 type (RING finger) Pfam Description: Zinc finger, C3HC4 type (RING finger)
  misc_feature (1)..(98): Homolog of NCBI NO: 31199091 NR Description: ENSANGP00000022800 [Anopheles gambiae]
  misc_feature (1)..(98): Homolog of NCBI NO: 31199093 NR Description: ENSANGP00000009515 [Anopheles gambiae]
  misc_feature (1)..(99): Homolog of NCBI NO: 28828361 NR Description: similar to Homo sapiens (Human). Hypothetical
  misc_feature (1)..(104): Homolog of NCBI NO: 38605849 NR Description: OSJNBb0034G17.7 [Oryza sativa (japonica
  misc_feature (1)..(104): Homolog of NCBI NO: 30689877 NR Description: zinc finger (C3HC4-type RING finger) protein
  misc_feature (1)..(104): Homolog of NCBI NO: 7486945 NR Description: hypothetical protein At2g44950 [imported] -
  misc_feature (1)..(104): Homolog of NCBI NO: 37536934 NR Description: unknown protein [Oryza sativa (japonica
  misc_feature (1)..(104): Homolog of NCBI NO: 25405809 NR Description: unknown protein, 71207-66119 [imported] -
  misc_feature (1)..(104): Homolog of NCBI NO: 18405292 NR Description: Expressed protein
  misc_feature (1)..(104): Homolog of NCBI NO: 21553880 NR Description: unknown [Arabidopsis thaliana]
MELESERSLRKKLEEELGELNSKIDELTSETGETTIQKLEKEIRICKNMIKCTVCTDRPKEVVIVKCYHLFCNPCIQRNLELRHRKCPACGTAFGQSDVRFVKI

SEQ ID NO: 55210 - protein, 56 aa, Glycine max
  peptide (1)..(56): Ceres Seq. ID no. 12607457
  misc_feature (4)..(42): Pfam Name: Zinc finger, C3HC4 type (RING finger) Pfam Description: Zinc finger, C3HC4 type (RING finger)
  misc_feature (1)..(50): Homolog of NCBI NO: 31199091 NR Description: ENSANGP00000022800 [Anopheles gambiae]
  misc_feature (1)..(50): Homolog of NCBI NO: 31199093 NR Description: ENSANGP00000009515 [Anopheles gambiae]
  misc_feature (1)..(51): Homolog of NCBI NO: 28828361 NR Description: similar to Homo sapiens (Human). Hypothetical
  misc_feature (1)..(56): Homolog of NCBI NO: 38605849 NR Description: OSJNBb0034G17.7 [Oryza sativa (japonica
  misc_feature (1)..(56): Homolog of NCBI NO: 30689877 NR Description: zinc finger (C3HC4-type RING finger) protein
  misc_feature (1)..(56): Homolog of NCBI NO: 7486945 NR Description: hypothetical protein At2g44950 [imported] -
  misc_feature (1)..(56): Homolog of NCBI NO: 37536934 NR Description: unknown protein [Oryza sativa (japonica
  misc_feature (1)..(56): Homolog of NCBI NO: 25405809 NR Description: unknown protein, 71207-66119 [imported] -
  misc_feature (1)..(56): Homolog of NCBI NO: 18405292 NR Description: Expressed protein
  misc_feature (1)..(56): Homolog of NCBI NO: 21553880 NR Description: unknown [Arabidopsis thaliana]
MIKCTVCTDRPKEVVIVKCYHLFCNPCIQRNLELRHRKCPACGTAFGQSDVRFVKI

SEQ ID NO: 55211 - DNA, 1320 bp, Glycine max
  misc_feature (1)..(1320): Ceres Seq. ID no. 14310780
atgcaaaaccactgctcagaaagccaacacaagtactagagattaataatgtgtttgcagcagacactattttgtctttatccgacatggccattgaagaaattttggatgatgtacggttggaatgtgcaagatttgggactattaaatcaattaatgtagtcaagcatagcagtggcgagaatttagcaaccaaattagaagaatgcaaagtcataaacaaagtggatgctaaagaagtttctcaagacacaaactgtattactaataatacagaatctagtttttctgacaaggctacttaccccgactttgaaggaacaaatgggatggaaatccatgataacaatgaaatggaagaagttaaagttgacgagggtagctgtgtttatgttgataaaaatgctgaagtttttgactataaatcatgtagagaacacgtggatgattcagcagtagaagatgtgggggataagggcataccttgtagtatcattcaagaatgtcctgatcaacaagatacacccaatgatgggccagaattttatgataagatggttgctaacgatattgatgtgaatattgaaaataatatggaatctaaagacacagtttgtgcatttcaggaaggcttttctgaatgggatatcagtgcagaattggttagtccccaaaagagcattgacacggaagaggatatttatggtcatgtatttaaaccaggttctgttcttgttgagtatggaagagctgaagcatgttgttcggcagcacatagtttgcacggacgattctttgatggcagaattgtgacggtgggatatgttgctctcagcctatacagatcaagatttacaaaatgagcatttcaaagcagcaactcgtggttatatgatgaaacaccaaattatatttttgcatgattgtggaagaatagattaatcaatctgattggttatgccagcctgcttcctggatagctttttaactttcagatttacacttctgatgtttagtatttcaacatttggagtgggtaaaagcttaactgagcaatgtcgatttgaggaaaatgcagtatagcacacatcaagtttgtaactgcagactatctgatgatttgttatgcaaatcgggcatatgatttttatttttttattttgtacgtttaaatgtggttacatttcgagctggtggtcttatgctatttggcaatattttgtgtacatggttatgttgcgttacaaactgattattgtatcgtagttatttttagatgttggttacagggccatacttttcataattattttttttgac

SEQ ID NO: 55212 - protein, 286 aa, Glycine max
  peptide (1)..(286): Ceres Seq. ID no. 14310781
  misc_feature (184)..(284): Homolog of NCBI NO: 25408271 NR Description: probable splicing factor U2AF large chain
  misc_feature (184)..(284): Homolog of NCBI NO: 30685703 NR Description: splicing factor U2AF (U2 snRNP auxiliary factor
  misc_feature (241)..(279): Homolog of NCBI NO: 34905724 NR Description: OJ1294_F06.3 [Oryza sativa (japonica
  misc_feature (2)..(87): Homolog of NCBI NO: 34905724 NR Description: OJ1294_F06.3 [Oryza sativa (japonica
AKPLLRKPTQVLEINNVFAADTILSLSDMAIEEILDDVRLECARFGTIKSINVVKHSSGENLATKLEECKVINKVDAKEVSQDTNCITNNTESSFSDKATYPDFEGTNGMEIHDNNEMEEVKVDEGSCVYVDKNAEVFDYKSCREHVDDSAVEDVGDKGIPCSIIQECPDQQDTPNDGPEFYDKMVANDIDVNIENNMESKDTVCAFQEGFSEWDISAELVSPQKSIDTEEDIYGHVFKPGSVLVEYGRAEACCSAAHSLHGRFFDGRIVTVGYVALSLYRSRFTK

SEQ ID NO: 55213 - protein, 258 aa, Glycine max
  peptide (1)..(258): Ceres Seq. ID no. 14310782
  misc_feature (156)..(256): Homolog of NCBI NO: 25408271 NR Description: probable splicing factor U2AF large chain
  misc_feature (156)..(256): Homolog of NCBI NO: 30685703 NR Description: splicing factor U2AF (U2 snRNP auxiliary factor
  misc_feature (213)..(251): Homolog of NCBI NO: 34905724 NR Description: OJ1294_F06.3 [Oryza sativa (japonica
  misc_feature (1)..(59): Homolog of NCBI NO: 34905724 NR Description: OJ1294_F06.3 [Oryza sativa (japonica
MAIEEILDDVRLECARFGTIKSINVVKHSSGENLATKLEECKVINKVDAKEVSQDTNCITNNTESSFSDKATYPDFEGTNGMEIHDNNEMEEVKVDEGSCVYVDKNAEVFDYKSCREHVDDSAVEDVGDKGIPCSIIQECPDQQDTPNDGPEFYDKMVANDIDVNIENNMESKDTVCAFQEGFSEWDISAELVSPQKSIDTEEDIYGHVFKPGSVLVEYGRAEACCSAAHSLHGRFFDGRIVTVGYVALSLYRSRFTK

SEQ ID NO: 55214 - protein, 177 aa, Glycine max
  peptide (1)..(177): Ceres Seq. ID no. 14310783
  misc_feature (75)..(175): Homolog of NCBI NO: 25408271 NR Description: probable splicing factor U2AF large chain
  misc_feature (75)..(175): Homolog of NCBI NO: 30685703 NR Description: splicing factor U2AF (U2 snRNP auxiliary factor
  misc_feature (132)..(170): Homolog of NCBI NO: 34905724 NR Description: OJ1294_F06.3 [Oryza sativa (japonica
MEIHDNNEMEEVKVDEGSCVYVDKNAEVFDYKSCREHVDDSAVEDVGDKGIPCSIIQECPDQQDTPNDGPEFYDKMVANDIDVNIENNMESKDTVCAFQEGFSEWDISAELVSPQKSIDTEEDIYGHVFKPGSVLVEYGRAEACCSAAHSLHGRFFDGRIVTVGYVALSLYRSRFTK

SEQ ID NO: 55215 - DNA, 1235 bp, Glycine max
  misc_feature (1)..(1235): Ceres Seq. ID no. 14315843
aatgcctcaaagctaaaccccaaaccatcttcttcaccttttctctctgcacacgaatatggcatcaatttgcgacaaagatatccctcttcgactacacaacatcgacgctttcatcgcttcttacagaaactccctccactcgctcagagccaccgcactcgaagccgcgcgatctcaatccgaattagccgaggttaaagctaaactgcgagaggctgaggatgaattggtaaaggcacttgcagttaagactcggagagaggcgaagcgaatggccttgaaagaggcgattgtttctgtgaagggaagaattgaggatctgaagacgagtattcagaagcagagaacccaaaacgaggaatgtgccacggttgtgtcgcatcaccgtcttgttttggaagtgtctgaacagaaatcaaatgaaagcagtgaacatagagatgaagtccaggaggccatatcttggtacaataggatccttggttttcagattgaaggtggacgtggggtaaaattcagcttcaagaatattaatgtggacaacccaaatgaggagttcttttttaccatccgccacgaagatgacgtgtatacattgctaaattgtaaaccatctgtcaaagatactgacgagttgatccatgaattaaacaacacaaatgggctatttaaatttgtcagaacaatgaggaaaaagtttcaagaagtagtggcacaaggccgtttatctatgacaacaaatgaacattaagaatctgcctttatctctgcatctggtccagttttatcaatatcaaccattactgaagataatgatcatcaagatgaacccaccaaaggtaatgcacatctccagaaacaagttaatcgaagaagggtaaaatcagcaattctatctcctggatctgcatcatctgtccgtcaatctcctcgtttgaaggtcaggaaatgaagcggtgtgggggatgctcacctgctcggtaccttattttgatgagacatgctggttcatgtagggaattaattgctaactaattgacatgtaaattaagacatacccaggttccagatgtctgaacctgtatataatagaccagaagatccctacattttttgtgtatggtccatttgatatttgtgtgtattttattttgttttttccattgctgatatactggtattgttcaataaaacatcagtcattctagtgagatatcttgtcttggcattgt

SEQ ID NO: 55216 - protein, 231 aa, Glycine max
  peptide (1)..(231): Ceres Seq. ID no. 14315844
  misc_feature (43)..(218): Homolog of NCBI NO: 19075708 NR Description: hypothetical protein [Schizosaccharomyces pombe]
  misc_feature (1)..(216): Homolog of NCBI NO: 34906038 NR Description: P0518C01.32 [Oryza sativa (japonica
  misc_feature (43)..(231): Homolog of NCBI NO: 14719337 NR Description: hypothetical protein [Oryza sativa]
  misc_feature (1)..(182): Homolog of NCBI NO: 7487387 NR Description: hypothetical protein T24C20.90 - Arabidopsis
  misc_feature (1)..(231): Homolog of NCBI NO: 21593341 NR Description: unknown [Arabidopsis thaliana]
  misc_feature (1)..(231): Homolog of NCBI NO: 18408605 NR Description: expressed protein [Arabidopsis thaliana]
MASICDKDIPLRLHNIDAFIASYRNSLHSLRATALEAARSQSELAEVKAKLREAEDELVKALAVKTRREAKRMALKEAIVSVKGRIEDLKTSIQKQRTQNEECATVVSHHRLVLEVSEQKSNESSEHRDEVQEAISWYNRILGFQIEGGRGVKFSFKNINVDNPNEEFFFTIRHEDDVYTLLNCKPSVKDTDELIHELNNTNGLFKFVRTMRKKFQEVVAQGRLSMTTNEH

SEQ ID NO: 55217 - protein, 159 aa, Glycine max
  peptide (1)..(159): Ceres Seq. ID no. 14315845
  misc_feature (1)..(146): Homolog of NCBI NO: 19075708 NR Description: hypothetical protein [Schizosaccharomyces pombe]
  misc_feature (1)..(144): Homolog of NCBI NO: 34906038 NR Description: P0518C01.32 [Oryza sativa (japonica
  misc_feature (1)..(159): Homolog of NCBI NO: 14719337 NR Description: hypothetical protein [Oryza sativa]
  misc_feature (1)..(110): Homolog of NCBI NO: 7487387 NR Description: hypothetical protein T24C20.90 - Arabidopsis
  misc_feature (1)..(159): Homolog of NCBI NO: 21593341 NR Description: unknown [Arabidopsis thaliana]
  misc_feature (1)..(159): Homolog of NCBI NO: 18408605 NR Description: expressed protein [Arabidopsis thaliana]
MALKEAIVSVKGRIEDLKTSIQKQRTQNEECATVVSHHRLVLEVSEQKSNESSEHRDEVQEAISWYNRILGFQIEGGRGVKFSFKNINVDNPNEEFFFTIRHEDDVYTLLNCKPSVKDTDELIHELNNTNGLFKFVRTMRKKFQEVVAQGRLSMTTNEH

SEQ ID NO: 55218 - DNA, 1285 bp, Glycine max
  misc_feature (1)..(1285): Ceres Seq. ID no. 14308080
gtgcagaccactgtctccccttttgctctcttcattttccattcgtagacgccaagaaccctaacaggagaatgcagtggacctggataatttgtgaggatatttaacatcgtgtacattgtgctcctttaattattttcatcagttggtgttgtgatggatggtaataatggtcttaacatacgtaattggggttactatgaacccgctacgtcgtttaagagccacctggggctgcagctgatgtcatccttgccggaaaaacctttaattggagggcgcaatgctgtggttttagctggcactgatggggcatttcaccatagggacattggtggtatgccccaagctacataccctatcgaatacatgagggatacatggattagtcagagagacaaatatatgaatatgatacctacaaaccataattatggtggtattccggagacatcttcagcacatcaaattcaaatgattcaagcaccggaattgccaaaggaagaaaagccagtggaagaagcacctgtcgtcaagaaggcaaatggaactcgtaagaaaagacaggggcccaaggttcccaaatctcccaaggctaagaagccaaagagggtgcctcgtgcgccaaaggatgagaatgctcctgcagttcaacgtgcaagggttccgaagaaaactactgaaattgtaataaatgggattgatatggatatttctcgcattccaattccagtttgttcatgcaccggggcaacgcaacagtgttataaatggggatctggtggttggcagtctgcatgttgcacaacaggcatgtcggtatatcctttgcctatgagtaccaagcggcgtggtgctaggattgctggaaggaaaatgagtataggagcatttaagaaagtgttagagaaactcgccgccgagggttataacttttctaatccgattgatttgaggacttattgggcaaaacatggcaccaacaagtttgtcaccatcaggtagatctagtctgtggccatctggcctgttatgtcttttagcctgtttgtgatgtatatacatgcgtatttggccagagacagactttttagctggtttgtagtacaacaattttcaaattcattagacatcttgttttgtcttctaactctctttgttagtatcttcactttattggatgtagtacatgggaactcatctatcggttggttggttcagattgggaactacctgatgaggtcttgttttattaatatttagtaggagaatttaattggttcac

SEQ ID NO: 55219 - protein, 282 aa, Glycine max
  peptide (1)..(282): Ceres Seq. ID no. 14308081
MDGNNGLNIRNWGYYEPATSFKSHLGLQLMSSLPEKPLIGGRNAVVLAGTDGAFHHRDIGGMPQATYPIEYMRDTWISQRDKYMNMIPTNHNYGGIPETSSAHQIQMIQAPELPKEEKPVEEAPVVKKANGTRKKRQGPKVPKSPKAKKPKRVPRAPKDENAPAVQRARVPKKTTEIVINGIDMDISRIPIPVCSCTGATQQCYKWGSGGWQSACCTTGMSVYPLPMSTKRRGARIAGRKMSIGAFKKVLEKLAAEGYNFSNPIDLRTYWAKHGTNKFVTIR

SEQ ID NO: 55220 - protein, 253 aa, Glycine max
  peptide (1)..(253): Ceres Seq. ID no. 14308082
MSSLPEKPLIGGRNAVVLAGTDGAFHHRDIGGMPQATYPIEYMRDTWISQRDKYMNMIPTNHNYGGIPETSSAHQIQMIQAPELPKEEKPVEEAPVVKKANGTRKKRQGPKVPKSPKAKKPKRVPRAPKDENAPAVQRARVPKKTTEIVINGIDMDISRIPIPVCSCTGATQQCYKWGSGGWQSACCTTGMSVYPLPMSTKRRGARIAGRKMSIGAFKKVLEKLAAEGYNFSNPIDLRTYWAKHGTNKFVTIR

SEQ ID NO: 55221 - protein, 221 aa, Glycine max
  peptide (1)..(221): Ceres Seq. ID no. 14308083
MPQATYPIEYMRDTWISQRDKYMNMIPTNHNYGGIPETSSAHQIQMIQAPELPKEEKPVEEAPVVKKANGTRKKRQGPKVPKSPKAKKPKRVPRAPKDENAPAVQRARVPKKTTEIVINGIDMDISRIPIPVCSCTGATQQCYKWGSGGWQSACCTTGMSVYPLPMSTKRRGARIAGRKMSIGAFKKVLEKLAAEGYNFSNPIDLRTYWAKHGTNKFVTIR

SEQ ID NO: 55222 - DNA, 1829 bp, Glycine max
  misc_feature (1)..(1829): Ceres Seq. ID no. 15225341
tcagctacgtaggccccccccccttatttatacggtaaacaaaacacaacacaccaaacatcattcgaccatacacattgctgttcaccattttcaattttctaagtggtttggcttggtttgacatacataaacctttcaagatctcagaggggcagaagatcaaagccaagacatcctctcgtatataaagagtgtctctgatttgatctttgtttcttctctttctctcgtttgagatttttcagtactccaccaaggttttgtcagaaaagcttgaatttttcgcctaccctttacaatgatctcttcgttgagacagcctgttgtagggatcagtggttctgatcttcttttgaggcaaagacatgcaactccaattaaggcaaggtcgtttttaccctctttgtcaagagaaaagggtcaaggatctcttgtttcagttcaaaagccactccacattggtgcttctcttggtgttggaaattttgtgtcagtgaagagtgatgctaaaaggggtgatttggtgaagtgtgaggcctatgaggcagacagatcagaggttgagggtgcaagcacaccgtcagaggctgcaaagaaggtaaaaattgggatatattttgcaacctggtgggctctgaatgtggtgttcaatatttataacaagaaggttctgaatgcctacccttacccttggcttacttcaactctctcacttgcatgtgggtctcttatgatgttgatctcttgggccactgggattgcagaagcccccaagactgatcctgagttttggaagtctttgttccctgttgctgttgcacatacaataggacatgtagcggcaacagttagtatgtcaaaagttgcggtatcgtttacacatattatcaagagtggtgaacctgcttttagtgttctggtttcaagatttcttttgggtgagagcttccctgtgcctgtctatctgtctttaattccaatcattggtggatgtgcacttgctgctgtgactgagctcaatttcaatatgatcggttttatgggagctatgatatcgaatttggcatttgtattccgtaatatcttttccaaaaagggcatgaagggaaagtctgtcagtggaatgaattactatgcttgtttatctattttgtcccttgcaattctcacacccttcgcaattgctgtggaaggaccacagatgtgggctgctggatggcaaacagctatgtctcaaattggaccccaattcatatggtgggtagctgctcaaagtgtattctatcatctatacaatcaagtgtcgtacatgtctctggatcagatctctcccttgacgtttagcattggaaacaccatgaaacgtatatctgtcattgtgtcttccattattatcttccacacaccagttcaacccatcaatgctcttggtgctgccattgctatccttggaaccttcttgtattcacaggcgaaacaatagagttggggaactaagattcctctagggacttgtttgttactgttcttcatgctcaaccacggacaaggaagttgattttgtaatgtgtcactgctggaattttgtaatactaggatgatctggctgtcagtccatctgtagatataataataagaataatgctgctgaggaaacgttatcataatacagatgattaggtttttttttttttttttgaatttctgaaatgccaatgatttgaaataaatgccttttgtttatatagtatgagaagaatttctcaagacattgtttactataaggagcttgcaataaagtgatgcctatgatcaatttgatgctc

SEQ ID NO: 55223 - protein, 394 aa, Glycine max
  peptide (1)..(394): Ceres Seq. ID no. 15225342
  misc_feature (112)..(237): Pfam Name: Integral membrane protein DUF6 Pfam Description: Integral membrane protein DUF6
  misc_feature (25)..(394): Homolog of NCBI NO: 14150753 NR Description: glucose-6-phosphate/phosphate translocator [Oryza
  misc_feature (25)..(394): Homolog of NCBI NO: 38637068 NR Description: glucose-6-phosphate/phosphate translocator
  misc_feature (12)..(394): Homolog of NCBI NO: 7484980 NR Description: glucose-6-phosphate/phosphate translocator
  misc_feature (12)..(394): Homolog of NCBI NO: 14596173 NR Description: Similar to
  misc_feature (1)..(394): Homolog of NCBI NO: 9295277 NR Description: glucose-6P/phosphate translocator precursor
  misc_feature (37)..(391): Homolog of NCBI NO: 9758260 NR Description: glucose-6-phosphate/phosphate translocator
  misc_feature (37)..(393): Homolog of NCBI NO: 21554690 NR Description: glucose-6-phosphate/phosphate translocator
  misc_feature (12)..(394): Homolog of NCBI NO: 18407336 NR Description: glucose-6-phosphate/phosphate-translocator,
  misc_feature (37)..(393): Homolog of NCBI NO: 18423670 NR Description: glucose-6-phosphate/phosphate translocator,
  misc_feature (1)..(394): Homolog of NCBI NO: 7488807 NR Description: glucose-6-phosphate/phosphate-translocator
MISSLRQPVVGISGSDLLLRQRHATPIKARSFLPSLSREKGQGSLVSVQKPLHIGASLGVGNFVSVKSDAKRGDLVKCEAYEADRSEVEGASTPSEAAKKVKIGIYFATWWALNVVFNIYNKKVLNAYPYPWLTSTLSLACGSLMMLISWATGIAEAPKTDPEFWKSLFPVAVAHTIGHVAATVSMSKVAVSFTHIIKSGEPAFSVLVSRFLLGESFPVPVYLSLIPIIGGCALAAVTELNFNMIGFMGAMISNLAFVFRNIFSKKGMKGKSVSGMNYYACLSILSLAILTPFAIAVEGPQMWAAGWQTAMSQIGPQFIWWVAAQSVFYHLYNQVSYMSLDQISPLTFSIGNTMKRISVIVSSIIIFHTPVQPINALGAAIAILGTFLYSQAKQ

SEQ ID NO: 55224 - protein, 250 aa, Glycine max
  peptide (1)..(250): Ceres Seq. ID no. 15225343
  misc_feature (1)..(93): Pfam Name: Integral membrane protein DUF6 Pfam Description: Integral membrane protein DUF6
  misc_feature (1)..(250): Homolog of NCBI NO: 14150753 NR Description: glucose-6-phosphate/phosphate translocator [Oryza
  misc_feature (1)..(250): Homolog of NCBI NO: 38637068 NR Description: glucose-6-phosphate/phosphate translocator
  misc_feature (1)..(250): Homolog of NCBI NO: 7484980 NR Description: glucose-6-phosphate/phosphate translocator
  misc_feature (1)..(250): Homolog of NCBI NO: 14596173 NR Description: Similar to
  misc_feature (1)..(250): Homolog of NCBI NO: 9295277 NR Description: glucose-6P/phosphate translocator precursor
  misc_feature (1)..(247): Homolog of NCBI NO: 9758260 NR Description: glucose-6-phosphate/phosphate translocator
  misc_feature (1)..(249): Homolog of NCBI NO: 21554690 NR Description: glucose-6-phosphate/phosphate translocator
  misc_feature (1)..(250): Homolog of NCBI NO: 18407336 NR Description: glucose-6-phosphate/phosphate-translocator,
  misc_feature (1)..(249): Homolog of NCBI NO: 18423670 NR Description: glucose-6-phosphate/phosphate translocator,
  misc_feature (1)..(250): Homolog of NCBI NO: 7488807 NR Description: glucose-6-phosphate/phosphate-translocator
MMLISWATGIAEAPKTDPEFWKSLFPVAVAHTIGHVAATVSMSKVAVSFTHIIKSGEPAFSVLVSRFLLGESFPVPVYLSLIPIIGGCALAAVTELNFNMIGFMGAMISNLAFVFRNIFSKKGMKGKSVSGMNYYACLSILSLAILTPFAIAVEGPQMWAAGWQTAMSQIGPQFIWWVAAQSVFYHLYNQVSYMSLDQISPLTFSIGNTMKRISVIVSSIIIFHTPVQPINALGAAIAILGTFLYSQAKQ

SEQ ID NO: 55225 - protein, 249 aa, Glycine max
  peptide (1)..(249): Ceres Seq. ID no. 15225344
  misc_feature (1)..(92): Pfam Name: Integral membrane protein DUF6 Pfam Description: Integral membrane protein DUF6
  misc_feature (1)..(249): Homolog of NCBI NO: 14150753 NR Description: glucose-6-phosphate/phosphate translocator [Oryza
  misc_feature (1)..(249): Homolog of NCBI NO: 38637068 NR Description: glucose-6-phosphate/phosphate translocator
  misc_feature (1)..(249): Homolog of NCBI NO: 7484980 NR Description: glucose-6-phosphate/phosphate translocator
  misc_feature (1)..(249): Homolog of NCBI NO: 14596173 NR Description: Similar to
  misc_feature (1)..(249): Homolog of NCBI NO: 9295277 NR Description: glucose-6P/phosphate translocator precursor
  misc_feature (1)..(246): Homolog of NCBI NO: 9758260 NR Description: glucose-6-phosphate/phosphate translocator
  misc_feature (1)..(248): Homolog of NCBI NO: 21554690 NR Description: glucose-6-phosphate/phosphate translocator
  misc_feature (1)..(249): Homolog of NCBI NO: 18407336 NR Description: glucose-6-phosphate/phosphate-translocator,
  misc_feature (1)..(248): Homolog of NCBI NO: 18423670 NR Description: glucose-6-phosphate/phosphate translocator,
  misc_feature (1)..(249): Homolog of NCBI NO: 7488807 NR Description: glucose-6-phosphate/phosphate-translocator
MLISWATGIAEAPKTDPEFWKSLFPVAVAHTIGHVAATVSMSKVAVSFTHIIKSGEPAFSVLVSRFLLGESFPVPVYLSLIPIIGGCALAAVTELNFNMIGFMGAMISNLAFVFRNIFSKKGMKGKSVSGMNYYACLSILSLAILTPFAIAVEGPQMWAAGWQTAMSQIGPQFIWWVAAQSVFYHLYNQVSYMSLDQISPLTFSIGNTMKRISVIVSSIIIFHTPVQPINALGAAIAILGTFLYSQAKQ

SEQ ID NO: 55226 - DNA, 1503 bp, Glycine max
  misc_feature (1)..(1503): Ceres Seq. ID no. 14308389
gcaggaagcacataagatccaagccatttacaaaaatggtaaccattaaagcatcttacacagtccttccaaatgaaccaactccggagggccttttatggctatctgatattgatcaagtggcacgtctacgccacacacccaccatctacattttccatgcaaaacacaaccatgatacattaattgagaggatgagaaactctcttagcaagattttggttcactactatccaatagccggtcgattgagaaggatagaaggtagtggtcgattggaattggattgcaatgcaaaaggggtggtgttgcttgaagctgaatccacaaaaacattggatgattatggagactttttacgtgagtccatcaaggacttggttccaacggttgattacacaagccctatagaggaacttccctcgctactagttcaagtaacaacattccatggtggtaaatcctttgccattggagttgccttatgccatatcttgtgtgatggggttggtgccattcagtttatcaactcttgggcaaagttagctcgaggagacacattggagccacatgagatgccatttctggatcgaacagtgctcaagttcccacaccctctgtcgccgccgcgctttgatcacctggagttcaagcctttgccacttatattgggaagatctgacaacacagtagagaaaaacaagaaggttgatgccaccttgctgaagctaacaccagaacaagtggggaagctgaagaagaaggccaatgatgactcaacaaaagaagggtcaagaccttatagcagatttgaagctattgctgcacatatatggagatgtgcctctaaggctcgtaaactagataagaatcaaccaactctagttcggttcaatgccgatattcgcaatagactaattccacctctccctaagaattattttgggaatgctttgtccttaacaacagcatcatgtcacgttggagatgtcatatcaaattctttgagttatgctgctcagaagataagggaagcaattgaagtggttacatatgagtatatatggtcacagatagatgtgattagaggtcaggagcaactggataatgcaagggctttgttctttggacaaaatgaaggaaaggatgccttgttttatgggaaccctaaccttcttattacaagttggatgagcatgccaatgcacgaagcagattttggctggggaaagcctgtgtatttaggtctaggaagtgtatctacacaagatagggcactgattattcaaagccctgatggtgacggctctattattctgtccatacactttcagatggaacatatgcagcttttcaagaaatatttttatgaagatatgtgaactatattcacatcgctactatcttgaacttcttgtatgggagcttaatttacgtgtgatctgcaatttctcatgtttaataaatttagttaaccatgtgggttaactataagcttgaatg

SEQ ID NO: 55227 - protein, 459 aa, Glycine max
  peptide (1)..(459): Ceres Seq. ID no. 14308390
  misc_feature (13)..(458): Pfam Name: Transferase family Pfam Description: Transferase family
  misc_feature (13)..(457): Homolog of NCBI NO: 40644899 NR Description: hydroxycinnamoyl CoA quinate transferase
  misc_feature (13)..(457): Homolog of NCBI NO: 21536883 NR Description: anthranilate N-benzoyltransferase [Arabidopsis
  misc_feature (13)..(457): Homolog of NCBI NO: 15239747 NR Description: anthranilate
  misc_feature (13)..(457): Homolog of NCBI NO: 32400291 NR Description: hydroxyanthranilate hydroxycinnamoyltransferase 1
  misc_feature (13)..(457): Homolog of NCBI NO: 32400295 NR Description: hydroxyanthranilate hydroxycinnamoyltransferase 3
  misc_feature (13)..(457): Homolog of NCBI NO: 32400293 NR Description: hydroxyanthranilate hydroxycinnamoyltransferase 2
  misc_feature (13)..(457): Homolog of NCBI NO: 38345030 NR Description: OSJNBa0029H02.14 [Oryza sativa (japonica
  misc_feature (13)..(457): Homolog of NCBI NO: 6469032 NR Description: N-hydroxycinnamoyl/benzoyltransferase [Ipomoea
  misc_feature (13)..(457): Homolog of NCBI NO: 27475616 NR Description: hydroxycinnamoyl transferase [Nicotiana tabacum]
  misc_feature (13)..(459): Homolog of NCBI NO: 15224709 NR Description: hydroxycinnamoyl/benzoyltransferase family
RKHIRSKPFTKMVTIKASYTVLPNEPTPEGLLWLSDIDQVARLRHTPTIYIFHAKHNHDTLIERMRNSLSKILVHYYPIAGRLRRIEGSGRLELDCNAKGVVLLEAESTKTLDDYGDFLRESIKDLVPTVDYTSPIEELPSLLVQVTTFHGGKSFAIGVALCHILCDGVGAIQFINSWAKLARGDTLEPHEMPFLDRTVLKFPHPLSPPRFDHLEFKPLPLILGRSDNTVEKNKKVDATLLKLTPEQVGKLKKKANDDSTKEGSRPYSRFEAIAAHIWRCASKARKLDKNQPTLVRFNADIRNRLIPPLPKNYFGNALSLTTASCHVGDVISNSLSYAAQKIREAIEVVTYEYIWSQIDVIRGQEQLDNARALFFGQNEGKDALFYGNPNLLITSWMSMPMHEADFGWGKPVYLGLGSVSTQDRALIIQSPDGDGSIILSIHFQMEHMQLFKKYFYEDM

SEQ ID NO: 55228 - protein, 448 aa, Glycine max
  peptide (1)..(448): Ceres Seq. ID no. 14308391
  misc_feature (2)..(447): Pfam Name: Transferase family Pfam Description: Transferase family
  misc_feature (2)..(446): Homolog of NCBI NO: 40644899 NR Description: hydroxycinnamoyl CoA quinate transferase
  misc_feature (2)..(446): Homolog of NCBI NO: 21536883 NR Description: anthranilate N-benzoyltransferase [Arabidopsis
  misc_feature (2)..(446): Homolog of NCBI NO: 15239747 NR Description: anthranilate
  misc_feature (2)..(446): Homolog of NCBI NO: 32400291 NR Description: hydroxyanthranilate hydroxycinnamoyltransferase 1
  misc_feature (2)..(446): Homolog of NCBI NO: 32400295 NR Description: hydroxyanthranilate hydroxycinnamoyltransferase 3
  misc_feature (2)..(446): Homolog of NCBI NO: 32400293 NR Description: hydroxyanthranilate hydroxycinnamoyltransferase 2
  misc_feature (2)..(446): Homolog of NCBI NO: 38345030 NR Description: OSJNBa0029H02.14 [Oryza sativa (japonica
  misc_feature (2)..(446): Homolog of NCBI NO: 6469032 NR Description: N-hydroxycinnamoyl/benzoyltransferase [Ipomoea
  misc_feature (2)..(446): Homolog of NCBI NO: 27475616 NR Description: hydroxycinnamoyl transferase [Nicotiana tabacum]
  misc_feature (2)..(448): Homolog of NCBI NO: 15224709 NR Description: hydroxycinnamoyl/benzoyltransferase family
MVTIKASYTVLPNEPTPEGLLWLSDIDQVARLRHTPTIYIFHAKHNHDTLIERMRNSLSKILVHYYPIAGRLRRIEGSGRLELDCNAKGVVLLEAESTKTLDDYGDFLRESIKDLVPTVDYTSPIEELPSLLVQVTTFHGGKSFAIGVALCHILCDGVGAIQFINSWAKLARGDTLEPHEMPFLDRTVLKFPHPLSPPRFDHLEFKPLPLILGRSDNTVEKNKKVDATLLKLTPEQVGKLKKKANDDSTKEGSRPYSRFEAIAAHIWRCASKARKLDKNQPTLVRFNADIRNRLIPPLPKNYFGNALSLTTASCHVGDVISNSLSYAAQKIREAIEVVTYEYIWSQIDVIRGQEQLDNARALFFGQNEGKDALFYGNPNLLITSWMSMPMHEADFGWGKPVYLGLGSVSTQDRALIIQSPDGDGSIILSIHFQMEHMQLFKKYFYEDM

SEQ ID NO: 55229 - protein, 395 aa, Glycine max
  peptide (1)..(395): Ceres Seq. ID no. 14308392
  misc_feature (1)..(394): Pfam Name: Transferase family Pfam Description: Transferase family
  misc_feature (1)..(393): Homolog of NCBI NO: 40644899 NR Description: hydroxycinnamoyl CoA quinate transferase
  misc_feature (1)..(393): Homolog of NCBI NO: 21536883 NR Description: anthranilate N-benzoyltransferase [Arabidopsis
  misc_feature (1)..(393): Homolog of NCBI NO: 15239747 NR Description: anthranilate
  misc_feature (1)..(393): Homolog of NCBI NO: 32400291 NR Description: hydroxyanthranilate hydroxycinnamoyltransferase 1
  misc_feature (1)..(393): Homolog of NCBI NO: 32400295 NR Description: hydroxyanthranilate hydroxycinnamoyltransferase 3
  misc_feature (1)..(393): Homolog of NCBI NO: 32400293 NR Description: hydroxyanthranilate hydroxycinnamoyltransferase 2
  misc_feature (1)..(393): Homolog of NCBI NO: 38345030 NR Description: OSJNBa0029H02.14 [Oryza sativa (japonica
  misc_feature (1)..(393): Homolog of NCBI NO: 6469032 NR Description: N-hydroxycinnamoyl/benzoyltransferase [Ipomoea
  misc_feature (1)..(393): Homolog of NCBI NO: 27475616 NR Description: hydroxycinnamoyl transferase [Nicotiana tabacum]
  misc_feature (1)..(395): Homolog of NCBI NO: 15224709 NR Description: hydroxycinnamoyl/benzoyltransferase family
MRNSLSKILVHYYPIAGRLRRIEGSGRLELDCNAKGVVLLEAESTKTLDDYGDFLRESIKDLVPTVDYTSPIEELPSLLVQVTTFHGGKSFAIGVALCHILCDGVGAIQFINSWAKLARGDTLEPHEMPFLDRTVLKFPHPLSPPRFDHLEFKPLPLILGRSDNTVEKNKKVDATLLKLTPEQVGKLKKKANDDSTKEGSRPYSRFEAIAAHIWRCASKARKLDKNQPTLVRFNADIRNRLIPPLPKNYFGNALSLTTASCHVGDVISNSLSYAAQKIREAIEVVTYEYIWSQIDVIRGQEQLDNARALFFGQNEGKDALFYGNPNLLITSWMSMPMHEADFGWGKPVYLGLGSVSTQDRALIIQSPDGDGSIILSIHFQMEHMQLFKKYFYEDM

SEQ ID NO: 55230 - DNA, 1478 bp, Glycine max
  misc_feature (1)..(1478): Ceres Seq. ID no. 13518411
cagctacgtaggccccccccccagatttgaatttatttaagagagaatcgtatgttgtggaattgggactattaagtaaggttccacatgcaagattggtcccaatcctgggccactgcttggacaatgaaaatgagaaattcatagtttacaagtacatgccaaatcgagatttagctacttccttgcacagagtcaccggttcagatggtaaattacagtccctggattggatcacgagattgaaaattgcaataggagctgctgaaggcatagcttacctacatgagtgcagccctccccttgtccacagagatatccaagctagcagtatactacttgatgataaatttgaagtgcgacttggaagtttgagtgaggttactgcccaaggagatcttcaacaaggagtcatctcaagggttttcagcaagccaccatcttccaatcaagcagattctggtaaatcatcagtgacatgtgcctatgatatctactgttttggcaagattttacttgagctcattaccggtaacattgaagtcagcaagttagatgatgcctctacaaaggagtggttagagcaaaccttgccttacatcactatatacgataaagaacgggtgactaagattattgacccatcattgatcgtggatgaggacctgttggaagaggtatgggctatggcaattgtggccaatgcatgcttgaatcccaagccttccaaacgccctcctatgaggcatgtcctgaaagcattggaaaatccattgaagattgtgagagaagaaaatactagctcagcaaggttgagatcaaactcttctaggaaatcttggagcactgcattctttggtagctggagacacagctcatcagacagtgttgttgccacaaacaaagagggttctagtgacactaaaaaatcaggaaaagtaggttctcaaagtagtggaaacgatcactcttcttccaataaaagatcgtccaatgaaattttccccgaaccattggaaatactagatgtggagacaggagtggcaagataagcacttgtgaaatggatttggttattctttagtctgtgaggttttttttttaccactttctcagataactggtggtgccatagcaattgcttgttattagcacatcaaactcactacccagcatccattatggtccgtattgaagcaatggaaaaccttaatactgctagtgatagcttttgctttccaaagctcagattaagcagtacagattgaaatgtctggtatgagaactccgaaaaaaactgaataattttactcattcaatagattgtttgaaacacacagccctcccctaggttaaaagttgtgtgacaaaatgtaaaataatgagagggttttcatttttacgagtaattgtaggtgggaaaaacgttgttactcactcgaggttttctttggtaggttatatgtatttagcattgt

SEQ ID NO: 55231 - protein, 297 aa, Glycine max
  peptide (1)..(297): Ceres Seq. ID no. 13518412
  misc_feature (1)..(283): Homolog of NCBI NO: 15240947 NR Description: protein kinase family [Arabidopsis thaliana]
  misc_feature (1)..(274): Homolog of NCBI NO: 22329101 NR Description: protein kinase family [Arabidopsis thaliana]
  misc_feature (1)..(233): Homolog of NCBI NO: 15221470 NR Description: protein kinase family [Arabidopsis thaliana]
  misc_feature (1)..(280): Homolog of NCBI NO: 29367569 NR Description: putative receptor protein kinase
  misc_feature (1)..(279): Homolog of NCBI NO: 15218591 NR Description: protein kinase family [Arabidopsis thaliana]
  misc_feature (1)..(281): Homolog of NCBI NO: 20466770 NR Description: receptor protein kinase-like protein [Arabidopsis
  misc_feature (1)..(281): Homolog of NCBI NO: 15235005 NR Description: leucine-rich repeat transmembrane protein kinase,
  misc_feature (1)..(285): Homolog of NCBI NO: 34394416 NR Description: putative Systemin receptor SR160 precursor
  misc_feature (1)..(288): Homolog of NCBI NO: 34915200 NR Description: putative  receptor-like protein kinase
  misc_feature (1)..(285): Homolog of NCBI NO: 15226721 NR Description: leucine-rich repeat transmembrane protein kinase,
MPNRDLATSLHRVTGSDGKLQSLDWITRLKIAIGAAEGIAYLHECSPPLVHRDIQASSILLDDKFEVRLGSLSEVTAQGDLQQGVISRVFSKPPSSNQADSGKSSVTCAYDIYCFGKILLELITGNIEVSKLDDASTKEWLEQTLPYITIYDKERVTKIIDPSLIVDEDLLEEVWAMAIVANACLNPKPSKRPPMRHVLKALENPLKIVREENTSSARLRSNSSRKSWSTAFFGSWRHSSSDSVVATNKEGSSDTKKSGKVGSQSSGNDHSSSNKRSSNEIFPEPLEILDVETGVAR

SEQ ID NO: 55232 - DNA, 1228 bp, Glycine max
  misc_feature (1)..(1228): Ceres Seq. ID no. 14316302
tttaagttgaacatgatggaatggccgtctttctcttttgggtatcttcccaaatcaggaaacactttctcatcttccctttcccagtttcacaccctacctcatggaaggctctgtcaacgaacgtcttcattttgggaagattggatatggatgcaatcattacaggagaagatgcaggattcgtgctccctgctgcaacgagatctactcatgccgtcactgtcataacgaggccgcgagcttgttgaagaatccctttgatcgccacgagctcgttcgccaagatgttaaacaagttatttgttcagtttgtgacactgagcaacctgttgctcaagtttgcacaaactgtggcgtcaaaatgggagaatatttctgcaacatctgcaaattcttcgatgatgatgttgagaaagaacagtttcactgtgatgattgtgggatctgcagggttggtggtcgagataattttttccactgcaagaagtgcgggtcttgttatgcagttggtctgcatgataatcatttatgtgtggagaactccatgaggcatcactgtcccatttgttacgagtacctttttgattcattgaaagatgtcattgttatgaaatgtggtcacacaatgcaccatgaatgttacctggagatgataaaaaatgacaaatattgttgtcccatatgctccaagtcagtgattgacatgtctaagacatggaagagaattgatgaagagattgaagcaaccgtcatgcctcaagattatcgaaacaggaaggtttggatactatgtaatgactgcaatgacacaacagaagtttacttccacattcttggccaaaaatgtggtcactgcagatcatataatacccgcacagttgcacctccagttcttccccaatgaccagatctcttgggttcaagaagggaacactgtcagcagaaagttaaagttagcaccctgttattactatggagggttattgaattaattgagcatcaaaagtgattggtgtattgtgtcctagatagttttcttaggttattcttcctccaacatatggagtgggattgttgtctcttggttatttattgggcaggtataaacatctttatactgtaatagagggaaaacatttttcccgtcatgaattgctggtaatagtgatgcattgatacttgatgattgattgcattgtcggccatagtggttttctataaaaag

SEQ ID NO: 55233 - protein, 267 aa, Glycine max
  peptide (1)..(267): Ceres Seq. ID no. 14316303
  misc_feature (18)..(100): Pfam Name: CHY zinc finger Pfam Description: CHY zinc finger
  misc_feature (17)..(257): Homolog of NCBI NO: 24308061 NR Description: zinc finger protein 363
  misc_feature (16)..(258): Homolog of NCBI NO: 37535002 NR Description: putative PGPD14 protein (pollen germination
  misc_feature (7)..(260): Homolog of NCBI NO: 34910658 NR Description: putative PGPD14 protein (pollen germination
  misc_feature (12)..(258): Homolog of NCBI NO: 4105798 NR Description: PGPD14 [Petunia x hybrida]
  misc_feature (9)..(258): Homolog of NCBI NO: 21593716 NR Description: PGPD14 protein [Arabidopsis thaliana]
  misc_feature (9)..(258): Homolog of NCBI NO: 15237169 NR Description: PGPD14 protein [Arabidopsis thaliana]
  misc_feature (2)..(266): Homolog of NCBI NO: 11358168 NR Description: hypothetical protein T20O10.70 - Arabidopsis
  misc_feature (2)..(266): Homolog of NCBI NO: 30695702 NR Description: expressed protein [Arabidopsis thaliana]
  misc_feature (2)..(266): Homolog of NCBI NO: 30102616 NR Description: At3g62970 [Arabidopsis thaliana]
  misc_feature (1)..(267): Homolog of NCBI NO: 15238890 NR Description: expressed protein [Arabidopsis thaliana]
MEGSVNERLHFGKIGYGCNHYRRRCRIRAPCCNEIYSCRHCHNEAASLLKNPFDRHELVRQDVKQVICSVCDTEQPVAQVCTNCGVKMGEYFCNICKFFDDDVEKEQFHCDDCGICRVGGRDNFFHCKKCGSCYAVGLHDNHLCVENSMRHHCPICYEYLFDSLKDVIVMKCGHTMHHECYLEMIKNDKYCCPICSKSVIDMSKTWKRIDEEIEATVMPQDYRNRKVWILCNDCNDTTEVYFHILGQKCGHCRSYNTRTVAPPVLPQ

SEQ ID NO: 55234 - protein, 180 aa, Glycine max
  peptide (1)..(180): Ceres Seq. ID no. 14316304
  misc_feature (66)..(108): Pfam Name: Zinc finger, C3HC4 type (RING finger) Pfam Description: Zinc finger, C3HC4 type (RING finger)
  misc_feature (1)..(170): Homolog of NCBI NO: 24308061 NR Description: zinc finger protein 363
  misc_feature (1)..(171): Homolog of NCBI NO: 37535002 NR Description: putative PGPD14 protein (pollen germination
  misc_feature (1)..(173): Homolog of NCBI NO: 34910658 NR Description: putative PGPD14 protein (pollen germination
  misc_feature (1)..(171): Homolog of NCBI NO: 4105798 NR Description: PGPD14 [Petunia x hybrida]
  misc_feature (1)..(171): Homolog of NCBI NO: 21593716 NR Description: PGPD14 protein [Arabidopsis thaliana]
  misc_feature (1)..(171): Homolog of NCBI NO: 15237169 NR Description: PGPD14 protein [Arabidopsis thaliana]
  misc_feature (1)..(179): Homolog of NCBI NO: 11358168 NR Description: hypothetical protein T20O10.70 - Arabidopsis
  misc_feature (1)..(179): Homolog of NCBI NO: 30695702 NR Description: expressed protein [Arabidopsis thaliana]
  misc_feature (1)..(179): Homolog of NCBI NO: 30102616 NR Description: At3g62970 [Arabidopsis thaliana]
  misc_feature (1)..(180): Homolog of NCBI NO: 15238890 NR Description: expressed protein [Arabidopsis thaliana]
MGEYFCNICKFFDDDVEKEQFHCDDCGICRVGGRDNFFHCKKCGSCYAVGLHDNHLCVENSMRHHCPICYEYLFDSLKDVIVMKCGHTMHHECYLEMIKNDKYCCPICSKSVIDMSKTWKRIDEEIEATVMPQDYRNRKVWILCNDCNDTTEVYFHILGQKCGHCRSYNTRTVAPPVLPQ

SEQ ID NO: 55235 - DNA, 1504 bp, Glycine max
  misc_feature (1)..(1504): Ceres Seq. ID no. 14310764
gacaccatttcgttcgttctatatgcttcctcttcaacccttcttctttccatcatctcccaccactttcacgctgctctggaatttacaacactaactcacataaaaccaaagttaaatgatgaatttcattgtaaattttcaattgaaatctgttgtggaaatttcctttgttcattgagattttttcgaggtgcagaagatttcccagttttgaagatatatttctcttcagacgggttttgaaactctgaactttttgcaagtcgtacgtgacaaggacgatcgctacttggccatcgtcgcagacagaagctcagaaatgtgattagtagttgagttttcggcatagatttgcattttccatagctctggaactgaaatctggataattttccaggtttcctacagctttgaacaaagttttagcaggagcagacttaggagatagaaaaatcagctccttttccccttagtttcagaaggaattgattgctcgacgattgctacttttttaaggaacgggttcaagagatggagaacgagtcaattattcagagcaataacaatacgaacacaatgtctagtgttagagaaaaaaacggaggggatgggtcgttgctgttgagggcgaattccgatagcgctaggcaagcaacgacgtcggatttggtgttgcagtgggggaatcggaagcggctaaggtgcatgaaggtgcaggttaaggacgattcttccggtccggttcagaggactacggttcgggtggatcgccgggtcgttagaaccgacaaggattctttaaataagctcactttcggtgtcaataataataatcatcatcatcagagtaacgggtatccgaatctccgtcaacgtccatcttcgccgcaaccacgaattctcaggaactcagaaagttcaagtgccatgagaggaggacaaagcaacgggggcgttagtgttaggggaattgcctcaccggacaggggtgcgcatgataagagagggacccataatgacaataacaagtccgcggcctcatcggatactgcgcacgatagcaagaagggagggtcgccgtccggcagcggagatgcggctgctccgccggtgtggccacccaagttcgtgattgccttgaccaacaaggagaaggaagaagattttctcgccattaagggctcaaagctgcctcagagacccaagaagagagctaaattcattcaacgaaccctcaatctcgttagtcctggcgcatggttgtgcgatcttaccttggaacgatacgaggttagggagaagaagatatccaaaaagcagagaccaagaggtttgaaagcaatgggaaacatggactcggactctgaatagagaatgagtgaaggtgctaagtaagctttatgtttgctaaggatgtgtaggaaatgcatggcatggcatctcagctaggtgccaacgaatccaaatcgaaatacaaaatattttagctttgccgctgctt

SEQ ID NO: 55236 - protein, 279 aa, Glycine max
  peptide (1)..(279): Ceres Seq. ID no. 14310765
  misc_feature (237)..(279): Homolog of NCBI NO: 6006854 NR Description: hypothetical protein [Arabidopsis thaliana]
  misc_feature (123)..(235): Homolog of NCBI NO: 6006854 NR Description: hypothetical protein [Arabidopsis thaliana]
  misc_feature (42)..(83): Homolog of NCBI NO: 25405821 NR Description: unknown protein, 25817-24837 [imported] -
  misc_feature (194)..(264): Homolog of NCBI NO: 25405821 NR Description: unknown protein, 25817-24837 [imported] -
  misc_feature (34)..(87): Homolog of NCBI NO: 30103017 NR Description: unknown protein [Oryza sativa (japonica
  misc_feature (197)..(279): Homolog of NCBI NO: 30103017 NR Description: unknown protein [Oryza sativa (japonica
  misc_feature (45)..(64): Homolog of NCBI NO: 30678969 NR Description: expressed protein [Arabidopsis thaliana]
  misc_feature (123)..(279): Homolog of NCBI NO: 30678969 NR Description: expressed protein [Arabidopsis thaliana]
  misc_feature (42)..(83): Homolog of NCBI NO: 30695924 NR Description: expressed protein [Arabidopsis thaliana]
  misc_feature (194)..(279): Homolog of NCBI NO: 30695924 NR Description: expressed protein [Arabidopsis thaliana]
MENESIIQSNNNTNTMSSVREKNGGDGSLLLRANSDSARQATTSDLVLQWGNRKRLRCMKVQVKDDSSGPVQRTTVRVDRRVVRTDKDSLNKLTFGVNNNNHHHQSNGYPNLRQRPSSPQPRILRNSESSSAMRGGQSNGGVSVRGIASPDRGAHDKRGTHNDNNKSAASSDTAHDSKKGGSPSGSGDAAAPPVWPPKFVIALTNKEKEEDFLAIKGSKLPQRPKKRAKFIQRTLNLVSPGAWLCDLTLERYEVREKKISKKQRPRGLKAMGNMDSDSE

SEQ ID NO: 55237 - protein, 264 aa, Glycine max
  peptide (1)..(264): Ceres Seq. ID no. 14310766
  misc_feature (222)..(264): Homolog of NCBI NO: 6006854 NR Description: hypothetical protein [Arabidopsis thaliana]
  misc_feature (108)..(220): Homolog of NCBI NO: 6006854 NR Description: hypothetical protein [Arabidopsis thaliana]
  misc_feature (27)..(68): Homolog of NCBI NO: 25405821 NR Description: unknown protein, 25817-24837 [imported] -
  misc_feature (179)..(249): Homolog of NCBI NO: 25405821 NR Description: unknown protein, 25817-24837 [imported] -
  misc_feature (19)..(72): Homolog of NCBI NO: 30103017 NR Description: unknown protein [Oryza sativa (japonica
  misc_feature (182)..(264): Homolog of NCBI NO: 30103017 NR Description: unknown protein [Oryza sativa (japonica
  misc_feature (30)..(49): Homolog of NCBI NO: 30678969 NR Description: expressed protein [Arabidopsis thaliana]
  misc_feature (108)..(264): Homolog of NCBI NO: 30678969 NR Description: expressed protein [Arabidopsis thaliana]
  misc_feature (27)..(68): Homolog of NCBI NO: 30695924 NR Description: expressed protein [Arabidopsis thaliana]
  misc_feature (179)..(264): Homolog of NCBI NO: 30695924 NR Description: expressed protein [Arabidopsis thaliana]
MSSVREKNGGDGSLLLRANSDSARQATTSDLVLQWGNRKRLRCMKVQVKDDSSGPVQRTTVRVDRRVVRTDKDSLNKLTFGVNNNNHHHQSNGYPNLRQRPSSPQPRILRNSESSSAMRGGQSNGGVSVRGIASPDRGAHDKRGTHNDNNKSAASSDTAHDSKKGGSPSGSGDAAAPPVWPPKFVIALTNKEKEEDFLAIKGSKLPQRPKKRAKFIQRTLNLVSPGAWLCDLTLERYEVREKKISKKQRPRGLKAMGNMDSDSE

SEQ ID NO: 55238 - protein, 221 aa, Glycine max
  peptide (1)..(221): Ceres Seq. ID no. 14310767
  misc_feature (39)..(221): Homolog of NCBI NO: 7485821 NR Description: hypothetical protein F1C12.211 - Arabidopsis
  misc_feature (179)..(221): Homolog of NCBI NO: 6006854 NR Description: hypothetical protein [Arabidopsis thaliana]
  misc_feature (65)..(177): Homolog of NCBI NO: 6006854 NR Description: hypothetical protein [Arabidopsis thaliana]
  misc_feature (1)..(25): Homolog of NCBI NO: 25405821 NR Description: unknown protein, 25817-24837 [imported] -
  misc_feature (136)..(206): Homolog of NCBI NO: 25405821 NR Description: unknown protein, 25817-24837 [imported] -
  misc_feature (1)..(29): Homolog of NCBI NO: 30103017 NR Description: unknown protein [Oryza sativa (japonica
  misc_feature (139)..(221): Homolog of NCBI NO: 30103017 NR Description: unknown protein [Oryza sativa (japonica
  misc_feature (65)..(221): Homolog of NCBI NO: 30678969 NR Description: expressed protein [Arabidopsis thaliana]
  misc_feature (1)..(25): Homolog of NCBI NO: 30695924 NR Description: expressed protein [Arabidopsis thaliana]
  misc_feature (136)..(221): Homolog of NCBI NO: 30695924 NR Description: expressed protein [Arabidopsis thaliana]
MKVQVKDDSSGPVQRTTVRVDRRVVRTDKDSLNKLTFGVNNNNHHHQSNGYPNLRQRPSSPQPRILRNSESSSAMRGGQSNGGVSVRGIASPDRGAHDKRGTHNDNNKSAASSDTAHDSKKGGSPSGSGDAAAPPVWPPKFVIALTNKEKEEDFLAIKGSKLPQRPKKRAKFIQRTLNLVSPGAWLCDLTLERYEVREKKISKKQRPRGLKAMGNMDSDSE

SEQ ID NO: 55239 - DNA, 1076 bp, Glycine max
  misc_feature (1)..(1076): Ceres Seq. ID no. 15226410
ataacgacttgctcttcaagcactttgggatctgccttttctttaacaggcgctatgaactcagggtacgtatgtttttccattttgaattaatctttatttgatttaagtgttgatctgcatttgaatattttaagtactagtggacaagatgttgctttataagtatttttcaataaaacagaacaaatatttacaagttgatcaatgaaaatataacacatgcagtatttgtcacatgtacattgtgtataagagtggaaatataggtcaggacaaacaagacttagtcggaacttgtttaaaaaaattcaaggcttaaattaggttggttgccggtttatcaatggaagtggcatgtgcttttttctcacaatcatgatgcagtctgactctgataacataataaactctaatgtcttggttgttatttctctatattttacttttttttattcgtagaaattaaaataattaaaaaaattataacaattcatacatcttcttaaatcaactaagttaaactccttgattttttctatattttgctaacttcagtattctctatctttttcttaaataatgaattaaatccttttttctacacacaagaatagatatttttattaaacatgtatttcatatagcaagttggccctatatatgaagtgaacaattcattgtttaattttattgcagattctcgaagaagagcctaataagaattatttctcgccatggtgtgtgatacccatgatgttcaatgctgttttggaactaataaggagctttaccattgcgttcaagaatggacctcactatagagaaggatggtttctttttggcttcaggttgtttggtttgctgattcctggcttacctgctcatggtccacaagattatattaattccactcttctgggatcaattgaaaaacattttaaagcagattgatgtgtccgtgtactgtacatgatcattccgtaccactccatgtgtatggtcatgcaaactaaaatttacgtgatatataatcaagtttttcaatttaaataatgaaaaaaaaaaaaaaaaaa

SEQ ID NO: 55240 - protein, 66 aa, Glycine max
  peptide (1)..(66): Ceres Seq. ID no. 15226411
  misc_feature (1)..(57): Homolog of NCBI NO: 9279583 NR Description: gene_id:MLN21.14~unknown protein [Arabidopsis
  misc_feature (1)..(57): Homolog of NCBI NO: 18400365 NR Description: lipase (class 3) family [Arabidopsis thaliana]
  misc_feature (1)..(57): Homolog of NCBI NO: 15810243 NR Description: unknown protein [Arabidopsis thaliana]
  misc_feature (1)..(59): Homolog of NCBI NO: 22135828 NR Description: At1g45200 [Arabidopsis thaliana]
  misc_feature (1)..(59): Homolog of NCBI NO: 30693938 NR Description: conserved hypothetical protein [Arabidopsis
  misc_feature (1)..(56): Homolog of NCBI NO: 15240187 NR Description: lipase (class 3) family [Arabidopsis thaliana]
  misc_feature (1)..(58): Homolog of NCBI NO: 15223573 NR Description: lipase (class 3) family [Arabidopsis thaliana]
  misc_feature (1)..(58): Homolog of NCBI NO: 25404138 NR Description: hypothetical protein F25P12.93 [imported] -
MMFNAVLELIRSFTIAFKNGPHYREGWFLFGFRLFGLLIPGLPAHGPQDYINSTLLGSIEKHFKAD

SEQ ID NO: 55241 - protein, 65 aa, Glycine max
  peptide (1)..(65): Ceres Seq. ID no. 15226412
  misc_feature (1)..(56): Homolog of NCBI NO: 9279583 NR Description: gene_id:MLN21.14~unknown protein [Arabidopsis
  misc_feature (1)..(56): Homolog of NCBI NO: 18400365 NR Description: lipase (class 3) family [Arabidopsis thaliana]
  misc_feature (1)..(56): Homolog of NCBI NO: 15810243 NR Description: unknown protein [Arabidopsis thaliana]
  misc_feature (1)..(58): Homolog of NCBI NO: 22135828 NR Description: At1g45200 [Arabidopsis thaliana]
  misc_feature (1)..(58): Homolog of NCBI NO: 30693938 NR Description: conserved hypothetical protein [Arabidopsis
  misc_feature (1)..(55): Homolog of NCBI NO: 15240187 NR Description: lipase (class 3) family [Arabidopsis thaliana]
  misc_feature (1)..(57): Homolog of NCBI NO: 15223573 NR Description: lipase (class 3) family [Arabidopsis thaliana]
  misc_feature (1)..(57): Homolog of NCBI NO: 25404138 NR Description: hypothetical protein F25P12.93 [imported] -
MFNAVLELIRSFTIAFKNGPHYREGWFLFGFRLFGLLIPGLPAHGPQDYINSTLLGSIEKHFKAD

SEQ ID NO: 55242 - protein, 34 aa, Glycine max
  peptide (1)..(34): Ceres Seq. ID no. 15226413
MCFFLTIMMQSDSDNIINSNVLVVISLYFTFFYS

SEQ ID NO: 55243 - DNA, 1607 bp, Glycine max
  misc_feature (1)..(1607): Ceres Seq. ID no. 15176002
gagcaccgtgtgcgtagaggactggtgaacactcactcgccactgctcacgaaccgtataaaccctaaaaccttgatttttcccaatccattccacgcacaatatggcttcagatgctgacatggaggactacggtttcgagtactccgatgaggaggaagtggagcaagacgttgatatcgagaatcaatattacaattcaaaaggtatggtagaaagtgatccagaaggtgcgcttgctggttttgctcaggtagtgcaaatggaacaagaaaaagcagaatggggatttaaagctctaaaacagactgtcaagctatattatcgactgggaaggtataaagagatgatggaagcctatagggagatgttgacatatattaagtcagcagtgactcgtaactatagtgaaaaatgcataaacagcattatggactatgtctcaggttcagcaagccagaactttggccttctccaggaattctaccagactactctgaggtcccttgaagatgcaaagaacgagagattgtggtttaagacaaatctgaagctttgcaagatatattttgatattggtgaatatgggcgtatgaataagatcttgaaggaacttcacaaatcttgtcaaaaagaagatggcacagatgaccacaaaaaaggaactcaacttttggaggtatatgctgtagagattcaaatgtacacagagaccaagaacaacaaaaaacttaagcaactttaccagaaagcactcactattaagtcagcaattccccatccaaggataatgggaataatccatgaatgtggcgggaaaatgcatatggcagagcgccagtgggcagaagcagctactgatttctttgaagctttcaagaattatgatgaagctgggagtcagagacgtatccaatgcttgaagtaccttgttcttgccaacatgttgatggagtctgaagtaaatccatttgatgggcaggaagctaagccatacaagaatgaccctgaaattttggtgatgactaacttaatagcggcttatcaacgtaatgaaatattggaatttgagaaaattctgaagagtaacagaagaactatcatggatgatccatttatcagaaattacattgaggatctgctaaagaatattagaacacaagtcttgctgaagctcatcaaaccatatacaaggatcaggatcccttttatatctaaggaacttaatgttcctgagcatgatgttgagcagctattggtgtcgctgattttggataatagaattcaagggcatattgatcaagtgaaccggctcttagaacgcgctgataggtcgaaaggaatgaaaaagtacactgcagttgacaaatggaacacacagcttaaatctctttatcaaactattaacaacagagtttgttaaaacgtgtatcatggaagtgttatatttcttgttttccccaacttgcagttttgccatgtgaattattgtaagctacactgaggggaggagggagatgggagtgtattaccactatagcggaattcaggtcaaaccaacttgtggttcttgttttatattatagaaaaatataattgtttgaaac

SEQ ID NO: 55244 - protein, 439 aa, Glycine max
  peptide (1)..(439): Ceres Seq. ID no. 15176003
  misc_feature (305)..(373): Pfam Name: PCI domain Pfam Description: PCI domain
  misc_feature (6)..(438): Homolog of NCBI NO: 13445486 NR Description: TRIP15-ISO [Homo sapiens]
  misc_feature (6)..(438): Homolog of NCBI NO: 5410310 NR Description: thyroid receptor interactor trip15 [Homo sapiens]
  misc_feature (6)..(438): Homolog of NCBI NO: 18606281 NR Description: COP9 (constitutive photomorphogenic) homolog,
  misc_feature (6)..(438): Homolog of NCBI NO: 6753486 NR Description: COP9 (constitutive photomorphogenic) homolog,
  misc_feature (6)..(438): Homolog of NCBI NO: 4759264 NR Description: thyroid receptor interacting protein 15 [Homo
  misc_feature (373)..(410): Homolog of NCBI NO: 34903328 NR Description: unnamed protein product [Oryza sativa (japonica
  misc_feature (7)..(373): Homolog of NCBI NO: 34903328 NR Description: unnamed protein product [Oryza sativa (japonica
  misc_feature (7)..(439): Homolog of NCBI NO: 25407849 NR Description: probable PCI domain protein [imported] -
  misc_feature (1)..(439): Homolog of NCBI NO: 15215816 NR Description: At2g26990/T20P8.4 [Arabidopsis thaliana]
  misc_feature (1)..(439): Homolog of NCBI NO: 18401293 NR Description: COP9 complex subunit CSN2, putative [Arabidopsis
MASDADMEDYGFEYSDEEEVEQDVDIENQYYNSKGMVESDPEGALAGFAQVVQMEQEKAEWGFKALKQTVKLYYRLGRYKEMMEAYREMLTYIKSAVTRNYSEKCINSIMDYVSGSASQNFGLLQEFYQTTLRSLEDAKNERLWFKTNLKLCKIYFDIGEYGRMNKILKELHKSCQKEDGTDDHKKGTQLLEVYAVEIQMYTETKNNKKLKQLYQKALTIKSAIPHPRIMGIIHECGGKMHMAERQWAEAATDFFEAFKNYDEAGSQRRIQCLKYLVLANMLMESEVNPFDGQEAKPYKNDPEILVMTNLIAAYQRNEILEFEKILKSNRRTIMDDPFIRNYIEDLLKNIRTQVLLKLIKPYTRIRIPFISKELNVPEHDVEQLLVSLILDNRIQGHIDQVNRLLERADRSKGMKKYTAVDKWNTQLKSLYQTINNRVC

SEQ ID NO: 55245 - protein, 433 aa, Glycine max
  peptide (1)..(433): Ceres Seq. ID no. 15176004
  misc_feature (299)..(367): Pfam Name: PCI domain Pfam Description: PCI domain
  misc_feature (1)..(432): Homolog of NCBI NO: 13445486 NR Description: TRIP15-ISO [Homo sapiens]
  misc_feature (1)..(432): Homolog of NCBI NO: 5410310 NR Description: thyroid receptor interactor trip15 [Homo sapiens]
  misc_feature (1)..(432): Homolog of NCBI NO: 18606281 NR Description: COP9 (constitutive photomorphogenic) homolog,
  misc_feature (1)..(432): Homolog of NCBI NO: 6753486 NR Description: COP9 (constitutive photomorphogenic) homolog,
  misc_feature (1)..(432): Homolog of NCBI NO: 4759264 NR Description: thyroid receptor interacting protein 15 [Homo
  misc_feature (367)..(404): Homolog of NCBI NO: 34903328 NR Description: unnamed protein product [Oryza sativa (japonica
  misc_feature (1)..(367): Homolog of NCBI NO: 34903328 NR Description: unnamed protein product [Oryza sativa (japonica
  misc_feature (1)..(433): Homolog of NCBI NO: 25407849 NR Description: probable PCI domain protein [imported] -
  misc_feature (1)..(433): Homolog of NCBI NO: 15215816 NR Description: At2g26990/T20P8.4 [Arabidopsis thaliana]
  misc_feature (1)..(433): Homolog of NCBI NO: 18401293 NR Description: COP9 complex subunit CSN2, putative [Arabidopsis
MEDYGFEYSDEEEVEQDVDIENQYYNSKGMVESDPEGALAGFAQVVQMEQEKAEWGFKALKQTVKLYYRLGRYKEMMEAYREMLTYIKSAVTRNYSEKCINSIMDYVSGSASQNFGLLQEFYQTTLRSLEDAKNERLWFKTNLKLCKIYFDIGEYGRMNKILKELHKSCQKEDGTDDHKKGTQLLEVYAVEIQMYTETKNNKKLKQLYQKALTIKSAIPHPRIMGIIHECGGKMHMAERQWAEAATDFFEAFKNYDEAGSQRRIQCLKYLVLANMLMESEVNPFDGQEAKPYKNDPEILVMTNLIAAYQRNEILEFEKILKSNRRTIMDDPFIRNYIEDLLKNIRTQVLLKLIKPYTRIRIPFISKELNVPEHDVEQLLVSLILDNRIQGHIDQVNRLLERADRSKGMKKYTAVDKWNTQLKSLYQTINNRVC

SEQ ID NO: 55246 - protein, 404 aa, Glycine max
  peptide (1)..(404): Ceres Seq. ID no. 15176005
  misc_feature (270)..(338): Pfam Name: PCI domain Pfam Description: PCI domain
  misc_feature (1)..(403): Homolog of NCBI NO: 13445486 NR Description: TRIP15-ISO [Homo sapiens]
  misc_feature (1)..(403): Homolog of NCBI NO: 5410310 NR Description: thyroid receptor interactor trip15 [Homo sapiens]
  misc_feature (1)..(403): Homolog of NCBI NO: 18606281 NR Description: COP9 (constitutive photomorphogenic) homolog,
  misc_feature (1)..(403): Homolog of NCBI NO: 6753486 NR Description: COP9 (constitutive photomorphogenic) homolog,
  misc_feature (1)..(403): Homolog of NCBI NO: 4759264 NR Description: thyroid receptor interacting protein 15 [Homo
  misc_feature (338)..(375): Homolog of NCBI NO: 34903328 NR Description: unnamed protein product [Oryza sativa (japonica
  misc_feature (1)..(338): Homolog of NCBI NO: 34903328 NR Description: unnamed protein product [Oryza sativa (japonica
  misc_feature (1)..(404): Homolog of NCBI NO: 25407849 NR Description: probable PCI domain protein [imported] -
  misc_feature (1)..(404): Homolog of NCBI NO: 15215816 NR Description: At2g26990/T20P8.4 [Arabidopsis thaliana]
  misc_feature (1)..(404): Homolog of NCBI NO: 18401293 NR Description: COP9 complex subunit CSN2, putative [Arabidopsis
MVESDPEGALAGFAQVVQMEQEKAEWGFKALKQTVKLYYRLGRYKEMMEAYREMLTYIKSAVTRNYSEKCINSIMDYVSGSASQNFGLLQEFYQTTLRSLEDAKNERLWFKTNLKLCKIYFDIGEYGRMNKILKELHKSCQKEDGTDDHKKGTQLLEVYAVEIQMYTETKNNKKLKQLYQKALTIKSAIPHPRIMGIIHECGGKMHMAERQWAEAATDFFEAFKNYDEAGSQRRIQCLKYLVLANMLMESEVNPFDGQEAKPYKNDPEILVMTNLIAAYQRNEILEFEKILKSNRRTIMDDPFIRNYIEDLLKNIRTQVLLKLIKPYTRIRIPFISKELNVPEHDVEQLLVSLILDNRIQGHIDQVNRLLERADRSKGMKKYTAVDKWNTQLKSLYQTINNRVC

SEQ ID NO: 55247 - DNA, 1509 bp, Glycine max
  misc_feature (1)..(1509): Ceres Seq. ID no. 14308863
gctataattgggagtagcagtacgggatctttatcagttcaacaaactgttaatacaacatctgggtctgtagcaccaagtacaacagctggtcttaatatggctgaggcattggcacagactccatcccgagctcgctctgctccccaggtgctagtcaaaacccaaaggcttgaggaactggctatcaagcagtcaagacagttgattccagtaacaccctcaatgcctaaagcttcggttcataattctgagaaatcaaagcccaaaacagctatcagaaatgctgatatgaatgtagttaccaagactgtgccacagcaaccgtctgcattgcacattgcaagccaatctgttcgcagtgttaatgccaaagttgatactccaaagacatctgggaagtttactgatctcaaatcagtagtgtgggaaaatggtgcttcccctacctctaaggatgtatcaaatccaacaaattattctaacagcaaaccaggaaatcaacatgctgttgcttcaggagctgcctctgcaccattgaggaacccaaataacctaaaatcccctacggagcggaagccatcttctatggatttgaaattaggttccaatttggagaagaaacattccatctctcaagtgcagagccggaatgatttcttcaatctcattaagaagaaaacattgatgaactgctctgcagttcttccagattctggcccgatggtttcatctcctgcgatggagaaatctggtgaagtaaatagggaaatagttaacccttctgcaagtccccagtctcttggaaatggtactgaactgaccagcaatggtacccatgctcatgaagtgattcacagaatttctgataatgaggagaaagaatcaaatcccagtgttacaatatatcccgaggaggaagaagctgctttccttcgttctcttggctgggaggagaactcagatgaggatgaaggccttacagaggaggaaatcaatgctttctatcaagagtgcaagaaattggacccaactgcattcaagctaagccagggaatgcagccaaagctgtccaagttgtttgaatcttatgcatctaacttgcgtgaatcttctgctgagttgagctcttctgatcccggatctgaagcttgatgtattgtttctttaatcatagttagatccaagcttcaaattttgatggcagatgactagttccattccttttgttctgaaggccaatgatttgagagtgaaagaagaggggtgggtttgattggaaccctgcattttgcaaatattgcaataagttacaggtgcctcaatcctgcctggtttacagggaatttttttttccttttttgttttttggttatagggttggtagggtaggggctattttaaggtgctgggccattgcatcttttggggtattttgatccgtttcttttctttcatgagggtttgattctacttgataaagtttatgctgtttttggtcaattttac

SEQ ID NO: 55248 - protein, 384 aa, Glycine max
  peptide (1)..(384): Ceres Seq. ID no. 14308864
  misc_feature (26)..(239): Homolog of NCBI NO: 38344828 NR Description: OSJNBa0064H22.9 [Oryza sativa (japonica
  misc_feature (161)..(345): Homolog of NCBI NO: 15236516 NR Description: hypothetical protein [Arabidopsis thaliana]
  misc_feature (2)..(289): Homolog of NCBI NO: 15236516 NR Description: hypothetical protein [Arabidopsis thaliana]
  misc_feature (2)..(344): Homolog of NCBI NO: 15221236 NR Description: expressed protein [Arabidopsis thaliana]
AIIGSSSTGSLSVQQTVNTTSGSVAPSTTAGLNMAEALAQTPSRARSAPQVLVKTQRLEELAIKQSRQLIPVTPSMPKASVHNSEKSKPKTAIRNADMNVVTKTVPQQPSALHIASQSVRSVNAKVDTPKTSGKFTDLKSVVWENGASPTSKDVSNPTNYSNSKPGNQHAVASGAASAPLRNPNNLKSPTERKPSSMDLKLGSNLEKKHSISQVQSRNDFFNLIKKKTLMNCSAVLPDSGPMVSSPAMEKSGEVNREIVNPSASPQSLGNGTELTSNGTHAHEVIHRISDNEEKESNPSVTIYPEEEEAAFLRSLGWEENSDEDEGLTEEEINAFYQECKKLDPTAFKLSQGMQPKLSKLFESYASNLRESSAELSSSDPGSEA

SEQ ID NO: 55249 - protein, 351 aa, Glycine max
  peptide (1)..(351): Ceres Seq. ID no. 14308865
  misc_feature (1)..(206): Homolog of NCBI NO: 38344828 NR Description: OSJNBa0064H22.9 [Oryza sativa (japonica
  misc_feature (128)..(312): Homolog of NCBI NO: 15236516 NR Description: hypothetical protein [Arabidopsis thaliana]
  misc_feature (1)..(256): Homolog of NCBI NO: 15236516 NR Description: hypothetical protein [Arabidopsis thaliana]
  misc_feature (1)..(311): Homolog of NCBI NO: 15221236 NR Description: expressed protein [Arabidopsis thaliana]
MAEALAQTPSRARSAPQVLVKTQRLEELAIKQSRQLIPVTPSMPKASVHNSEKSKPKTAIRNADMNVVTKTVPQQPSALHIASQSVRSVNAKVDTPKTSGKFTDLKSVVWENGASPTSKDVSNPTNYSNSKPGNQHAVASGAASAPLRNPNNLKSPTERKPSSMDLKLGSNLEKKHSISQVQSRNDFFNLIKKKTLMNCSAVLPDSGPMVSSPAMEKSGEVNREIVNPSASPQSLGNGTELTSNGTHAHEVIHRISDNEEKESNPSVTIYPEEEEAAFLRSLGWEENSDEDEGLTEEEINAFYQECKKLDPTAFKLSQGMQPKLSKLFESYASNLRESSAELSSSDPGSEA

SEQ ID NO: 55250 - protein, 309 aa, Glycine max
  peptide (1)..(309): Ceres Seq. ID no. 14308866
  misc_feature (1)..(164): Homolog of NCBI NO: 38344828 NR Description: OSJNBa0064H22.9 [Oryza sativa (japonica
  misc_feature (86)..(270): Homolog of NCBI NO: 15236516 NR Description: hypothetical protein [Arabidopsis thaliana]
  misc_feature (1)..(214): Homolog of NCBI NO: 15236516 NR Description: hypothetical protein [Arabidopsis thaliana]
  misc_feature (1)..(269): Homolog of NCBI NO: 15221236 NR Description: expressed protein [Arabidopsis thaliana]
MPKASVHNSEKSKPKTAIRNADMNVVTKTVPQQPSALHIASQSVRSVNAKVDTPKTSGKFTDLKSVVWENGASPTSKDVSNPTNYSNSKPGNQHAVASGAASAPLRNPNNLKSPTERKPSSMDLKLGSNLEKKHSISQVQSRNDFFNLIKKKTLMNCSAVLPDSGPMVSSPAMEKSGEVNREIVNPSASPQSLGNGTELTSNGTHAHEVIHRISDNEEKESNPSVTIYPEEEEAAFLRSLGWEENSDEDEGLTEEEINAFYQECKKLDPTAFKLSQGMQPKLSKLFESYASNLRESSAELSSSDPGSEA

SEQ ID NO: 55251 - DNA, 2160 bp, Glycine max
  misc_feature (1)..(2160): Ceres Seq. ID no. 15176922
ggcatttccataaattccactctcaagattcatatctgattctgaagctcgaaattgagaatggcgtcttctctctctactacctcttttctctgcacacactctctgaaatccccaacgctgaaacctctcacaaagcctcattgcttcgctcgttttcgtgctcgagttcgagttccacccaaagcttcttcgcaaaacaacaatgccgataatgattctgttgaaactccgtccctccaaccctcttcccctaaaccaccatataattcctcttcttcgctgcttcgtcatttcagtaatggctggtttaaatttgatgaacttgggatggagatagtgctcattgctctgcctgctgctttggctttggcggctgatcctattgcctcattgattgacacagcgttcgttggccatataggggcagttgaattggctgcagttggggtttcagcttctgtgtttaatctagtgtcaaaagcattcaatgttcctttacttaatgttactacatcctttgttgcggaggagcaggcactgattaggaaggaggaagagtccattctgagtgatgaaaatggaaaggaccaaagcaagaagctccttccttcagtatcaacttctttagcacttgctgcaactcttggaattgctgaaactgtggtgcttacgcttggctctggcattcttatgaatatcatgggtatacctgctgattctccgatgcgtggacctgctgagcagtttcttacattgagggcctttggtgctccagcaattgtgctcgcattagctgcacaaggcacctttcgtggatttttggatacaaagacacctctatatgctgttggtgtgggaaactttcttaatgccatattggatccaatattgatatttctttttggtcttggcattggtggtgctgcagttgctaccgttatctctgaatatttaatagctttcattctgctatggaaattgagtgacaaagtgctgctaatcccttccgaatttgatgggagaaaattttttagctatctgaaatccggtggtcttgtttctgctaggactttggctgtgtttataactgtgacactgtcaacatccgtggcagctcagcagggccctatacctatggcaggccatcaaatttgcatgcaagtctggttgtcggtttctttgctcaatgatgctttggcgcttgctggtcaggcacttcttgcccgtaattactccctgggaaactatgagcaagcacgccttgttatatatagagtgatacagattggtttaggagcaggaatcattttgtcaataatcttattctttgggtttggagcgttttctagtttatttagcacagattctgaagttctggatgttgcttggtcaggtatatggtttgttgctggatctcaaccagtgaatgctttggcatttgttattgatgggatttattatggggtatcagactttggatatgctgcttactcgatggttctagttggactagtttcttcaactttccttctggtggcggctccagtagggcttcctggagtctggactggattgtttattttcatggctttgcgtgttctagctggagtttggaggttgagcagtaaaagtgggccttgggatacaatctggtatagagatggagcagaagattgaccaacatgcattcagtactcagaagttccaacattcactcctcaggttaaaaaaccattttcagaatgatcagaaaatgattctctcaagagctctcttatatgagggcactaaattcctgcaaagagaatccagtatcactgcaggactatagtaaattattgaaatgtagcagccaattactgctaaccgattgccaaaatcttgctgattcaagtattgattgaatggccaatagaacagggagggagaaaattattgaatgaccagcctacagcttagagggtagtctttttgaccctctgttttttgttggaaatttgtatttattaggaaattgcacaattttgtatattttcattgctaaaggtagctgcaatgcatgtaagaataagtactctgacttgtccattgcagctattcaagttagttaggtgtgtactgtgtagtaattacaattttttaatagttttttacgtt

SEQ ID NO: 55252 - protein, 539 aa, Glycine max
  peptide (1)..(539): Ceres Seq. ID no. 15176923
  misc_feature (99)..(277): Pfam Name: MatE Pfam Description: MatE
  misc_feature (84)..(174): Homolog of NCBI NO: 20270057 NR Description: Putative membrane protein [Oryza sativa (japonica
  misc_feature (155)..(447): Homolog of NCBI NO: 20270057 NR Description: Putative membrane protein [Oryza sativa (japonica
  misc_feature (85)..(177): Homolog of NCBI NO: 19386721 NR Description: P0678F11.10 [Oryza sativa (japonica
  misc_feature (180)..(480): Homolog of NCBI NO: 19386721 NR Description: P0678F11.10 [Oryza sativa (japonica
  misc_feature (85)..(184): Homolog of NCBI NO: 25405456 NR Description: hypothetical protein F11M15.20 [imported] -
  misc_feature (164)..(520): Homolog of NCBI NO: 25405456 NR Description: hypothetical protein F11M15.20 [imported] -
  misc_feature (84)..(174): Homolog of NCBI NO: 37532300 NR Description: putative membrane protein
  misc_feature (155)..(523): Homolog of NCBI NO: 37532300 NR Description: putative membrane protein
  misc_feature (29)..(528): Homolog of NCBI NO: 7487160 NR Description: hypothetical protein At2g38330 [imported] -
  misc_feature (29)..(532): Homolog of NCBI NO: 30687474 NR Description: MATE efflux protein family [Arabidopsis thaliana]
MASSLSTTSFLCTHSLKSPTLKPLTKPHCFARFRARVRVPPKASSQNNNADNDSVETPSLQPSSPKPPYNSSSSLLRHFSNGWFKFDELGMEIVLIALPAALALAADPIASLIDTAFVGHIGAVELAAVGVSASVFNLVSKAFNVPLLNVTTSFVAEEQALIRKEEESILSDENGKDQSKKLLPSVSTSLALAATLGIAETVVLTLGSGILMNIMGIPADSPMRGPAEQFLTLRAFGAPAIVLALAAQGTFRGFLDTKTPLYAVGVGNFLNAILDPILIFLFGLGIGGAAVATVISEYLIAFILLWKLSDKVLLIPSEFDGRKFFSYLKSGGLVSARTLAVFITVTLSTSVAAQQGPIPMAGHQICMQVWLSVSLLNDALALAGQALLARNYSLGNYEQARLVIYRVIQIGLGAGIILSIILFFGFGAFSSLFSTDSEVLDVAWSGIWFVAGSQPVNALAFVIDGIYYGVSDFGYAAYSMVLVGLVSSTFLLVAAPVGLPGVWTGLFIFMALRVLAGVWRLSSKSGPWDTIWYRDGAED

SEQ ID NO: 55253 - protein, 449 aa, Glycine max
  peptide (1)..(449): Ceres Seq. ID no. 15176924
  misc_feature (9)..(187): Pfam Name: MatE Pfam Description: MatE
  misc_feature (1)..(84): Homolog of NCBI NO: 20270057 NR Description: Putative membrane protein [Oryza sativa (japonica
  misc_feature (65)..(357): Homolog of NCBI NO: 20270057 NR Description: Putative membrane protein [Oryza sativa (japonica
  misc_feature (1)..(87): Homolog of NCBI NO: 19386721 NR Description: P0678F11.10 [Oryza sativa (japonica
  misc_feature (90)..(390): Homolog of NCBI NO: 19386721 NR Description: P0678F11.10 [Oryza sativa (japonica
  misc_feature (1)..(94): Homolog of NCBI NO: 25405456 NR Description: hypothetical protein F11M15.20 [imported] -
  misc_feature (74)..(430): Homolog of NCBI NO: 25405456 NR Description: hypothetical protein F11M15.20 [imported] -
  misc_feature (1)..(84): Homolog of NCBI NO: 37532300 NR Description: putative membrane protein
  misc_feature (65)..(433): Homolog of NCBI NO: 37532300 NR Description: putative membrane protein
  misc_feature (1)..(438): Homolog of NCBI NO: 7487160 NR Description: hypothetical protein At2g38330 [imported] -
  misc_feature (1)..(442): Homolog of NCBI NO: 30687474 NR Description: MATE efflux protein family [Arabidopsis thaliana]
MEIVLIALPAALALAADPIASLIDTAFVGHIGAVELAAVGVSASVFNLVSKAFNVPLLNVTTSFVAEEQALIRKEEESILSDENGKDQSKKLLPSVSTSLALAATLGIAETVVLTLGSGILMNIMGIPADSPMRGPAEQFLTLRAFGAPAIVLALAAQGTFRGFLDTKTPLYAVGVGNFLNAILDPILIFLFGLGIGGAAVATVISEYLIAFILLWKLSDKVLLIPSEFDGRKFFSYLKSGGLVSARTLAVFITVTLSTSVAAQQGPIPMAGHQICMQVWLSVSLLNDALALAGQALLARNYSLGNYEQARLVIYRVIQIGLGAGIILSIILFFGFGAFSSLFSTDSEVLDVAWSGIWFVAGSQPVNALAFVIDGIYYGVSDFGYAAYSMVLVGLVSSTFLLVAAPVGLPGVWTGLFIFMALRVLAGVWRLSSKSGPWDTIWYRDGAED

SEQ ID NO: 55254 - protein, 328 aa, Glycine max
  peptide (1)..(328): Ceres Seq. ID no. 15176925
  misc_feature (1)..(66): Pfam Name: MatE Pfam Description: MatE
  misc_feature (54)..(194): Homolog of NCBI NO: 15233839 NR Description: hypothetical protein [Arabidopsis thaliana]
  misc_feature (1)..(75): Homolog of NCBI NO: 15233839 NR Description: hypothetical protein [Arabidopsis thaliana]
  misc_feature (1)..(167): Homolog of NCBI NO: 18403476 NR Description: expressed protein [Arabidopsis thaliana]
  misc_feature (1)..(317): Homolog of NCBI NO: 15231918 NR Description: MATE efflux protein family [Arabidopsis thaliana]
  misc_feature (1)..(236): Homolog of NCBI NO: 20270057 NR Description: Putative membrane protein [Oryza sativa (japonica
  misc_feature (1)..(269): Homolog of NCBI NO: 19386721 NR Description: P0678F11.10 [Oryza sativa (japonica
  misc_feature (1)..(309): Homolog of NCBI NO: 25405456 NR Description: hypothetical protein F11M15.20 [imported] -
  misc_feature (1)..(312): Homolog of NCBI NO: 37532300 NR Description: putative membrane protein
  misc_feature (1)..(317): Homolog of NCBI NO: 7487160 NR Description: hypothetical protein At2g38330 [imported] -
  misc_feature (1)..(321): Homolog of NCBI NO: 30687474 NR Description: MATE efflux protein family [Arabidopsis thaliana]
MNIMGIPADSPMRGPAEQFLTLRAFGAPAIVLALAAQGTFRGFLDTKTPLYAVGVGNFLNAILDPILIFLFGLGIGGAAVATVISEYLIAFILLWKLSDKVLLIPSEFDGRKFFSYLKSGGLVSARTLAVFITVTLSTSVAAQQGPIPMAGHQICMQVWLSVSLLNDALALAGQALLARNYSLGNYEQARLVIYRVIQIGLGAGIILSIILFFGFGAFSSLFSTDSEVLDVAWSGIWFVAGSQPVNALAFVIDGIYYGVSDFGYAAYSMVLVGLVSSTFLLVAAPVGLPGVWTGLFIFMALRVLAGVWRLSSKSGPWDTIWYRDGAED

SEQ ID NO: 55255 - DNA, 1747 bp, Glycine max
  misc_feature (1)..(1747): Ceres Seq. ID no. 15171005
aataaggctttcacatgtcagatgtgtgaactcagtgtcaatgaggttgatactgtacttctctgtgatgcttgtgaaaagggatttcacttgaagtgcctgcagccatcagtcttgagaggaattcataatagagttgattggcattgtatgaggtgcttgagtttaagtggtggaaagcctttgcctccaaaatatggtcgtgtcatgagatcctcaaacacaccgccaaaattgccctctaatacaggtggcgttcaaccatgttctgagaagaaagtagagaatatcgatccaaaggtcatcccacagacgttagcaacaaatgggagctctgttccaactgtttccggtggccatcacaatgttgagttgccatccgaatcaaagataccagataccaaagatatgcaagggactggcatttcatccaccattgaagctattgataagaagcctgatccaaagaactctatgaaatctcttagtgcagcttatagtccttccccttgcttgctaggtgaaaattctgctcaacaaataaattctaaggttttgactggtagagagacttcggaatctgagtctcttcctaaattatctgagctagctaagtgtgaaaatttgcaatcatcacaagattttcaagttgaacatacaatgtcacaagacaatgctgaagtatcatcagataaacatgttgacagtaatatgatgaataaccaacagaaggaatctcatggagaagaaaatttagtttatgatataaagcgtgatgaccaagatgctgcacttgaaaattctgttggaacttctggaactaatactgatggtagacagcactctgcattatcttcagatagttcacatgctgtagaatggattggtgatgtagtacaacttgtagatgagaaaaagtattaccaatcttgctgtgttgatggagtaacatataggctgcagggtcatgctcttttccccaccggccatgggaaactaactccttctaaactccagtctatgtgggaagattgcaaaactgggttaaagtgggttaaggtgacaaactgctactttcctgatgatttgcctgggaatattggtcatccgtgtatatctgaagtcaacgaggtttatgaatctaatagtgatagaactgaaatggctagctctattcgagggccatgtgaagtcctcccatctgataaatttaaacaagagaatgacaggcgatgtcagttacgaaatgaggaaagttctagagtgcagcccattttcctatgcaggtggttttatgatgaattcaagaagttatttcaacctgtaatcagttgattatgtcttgaacttatatgttttgtggttcctacatggtgccatttttgtggtatttggtggggcttcgaacaggatatttcttggatgggtaattaagcatgcattaagattcaattgagacccattataaggcacattgcagaagcattgcctcctcgtacagagtgttttatcatttcagcatgaattgcttttggtgtaaaatatgtaactgaatctgtggactgcttagtttagctttcgctttggtagttctttttctgatagatattcattctgtataattcttttttgggcattaggctctttaggcccaataattacattattatctttgaattagatcagtgtagttcccttagtttgctgaattgtaagatacttcatttgtacaaaagccatttcttct

SEQ ID NO: 55256 - protein, 444 aa, Glycine max
  peptide (1)..(444): Ceres Seq. ID no. 15171006
  misc_feature (5)..(56): Pfam Name: PHD-finger Pfam Description: PHD-finger
  misc_feature (1)..(104): Homolog of NCBI NO: 9294545 NR Description: contains similarity to bactericidal
  misc_feature (1)..(104): Homolog of NCBI NO: 30685716 NR Description: expressed protein [Arabidopsis thaliana]
  misc_feature (1)..(104): Homolog of NCBI NO: 30685722 NR Description: expressed protein [Arabidopsis thaliana]
  misc_feature (1)..(231): Homolog of NCBI NO: 15223606 NR Description: expressed protein [Arabidopsis thaliana]
  misc_feature (1)..(231): Homolog of NCBI NO: 9454550 NR Description: Hypothetical protein [Arabidopsis thaliana]
NKAFTCQMCELSVNEVDTVLLCDACEKGFHLKCLQPSVLRGIHNRVDWHCMRCLSLSGGKPLPPKYGRVMRSSNTPPKLPSNTGGVQPCSEKKVENIDPKVIPQTLATNGSSVPTVSGGHHNVELPSESKIPDTKDMQGTGISSTIEAIDKKPDPKNSMKSLSAAYSPSPCLLGENSAQQINSKVLTGRETSESESLPKLSELAKCENLQSSQDFQVEHTMSQDNAEVSSDKHVDSNMMNNQQKESHGEENLVYDIKRDDQDAALENSVGTSGTNTDGRQHSALSSDSSHAVEWIGDVVQLVDEKKYYQSCCVDGVTYRLQGHALFPTGHGKLTPSKLQSMWEDCKTGLKWVKVTNCYFPDDLPGNIGHPCISEVNEVYESNSDRTEMASSIRGPCEVLPSDKFKQENDRRCQLRNEESSRVQPIFLCRWFYDEFKKLFQPVIS

SEQ ID NO: 55257 - protein, 437 aa, Glycine max
  peptide (1)..(437): Ceres Seq. ID no. 15171007
  misc_feature (1)..(49): Pfam Name: PHD-finger Pfam Description: PHD-finger
  misc_feature (1)..(97): Homolog of NCBI NO: 9294545 NR Description: contains similarity to bactericidal
  misc_feature (1)..(97): Homolog of NCBI NO: 30685716 NR Description: expressed protein [Arabidopsis thaliana]
  misc_feature (1)..(97): Homolog of NCBI NO: 30685722 NR Description: expressed protein [Arabidopsis thaliana]
  misc_feature (1)..(224): Homolog of NCBI NO: 15223606 NR Description: expressed protein [Arabidopsis thaliana]
  misc_feature (1)..(224): Homolog of NCBI NO: 9454550 NR Description: Hypothetical protein [Arabidopsis thaliana]
MCELSVNEVDTVLLCDACEKGFHLKCLQPSVLRGIHNRVDWHCMRCLSLSGGKPLPPKYGRVMRSSNTPPKLPSNTGGVQPCSEKKVENIDPKVIPQTLATNGSSVPTVSGGHHNVELPSESKIPDTKDMQGTGISSTIEAIDKKPDPKNSMKSLSAAYSPSPCLLGENSAQQINSKVLTGRETSESESLPKLSELAKCENLQSSQDFQVEHTMSQDNAEVSSDKHVDSNMMNNQQKESHGEENLVYDIKRDDQDAALENSVGTSGTNTDGRQHSALSSDSSHAVEWIGDVVQLVDEKKYYQSCCVDGVTYRLQGHALFPTGHGKLTPSKLQSMWEDCKTGLKWVKVTNCYFPDDLPGNIGHPCISEVNEVYESNSDRTEMASSIRGPCEVLPSDKFKQENDRRCQLRNEESSRVQPIFLCRWFYDEFKKLFQPVIS

SEQ ID NO: 55258 - protein, 394 aa, Glycine max
  peptide (1)..(394): Ceres Seq. ID no. 15171008
  misc_feature (1)..(54): Homolog of NCBI NO: 9294545 NR Description: contains similarity to bactericidal
  misc_feature (1)..(54): Homolog of NCBI NO: 30685716 NR Description: expressed protein [Arabidopsis thaliana]
  misc_feature (1)..(54): Homolog of NCBI NO: 30685722 NR Description: expressed protein [Arabidopsis thaliana]
  misc_feature (1)..(181): Homolog of NCBI NO: 15223606 NR Description: expressed protein [Arabidopsis thaliana]
  misc_feature (1)..(181): Homolog of NCBI NO: 9454550 NR Description: Hypothetical protein [Arabidopsis thaliana]
MRCLSLSGGKPLPPKYGRVMRSSNTPPKLPSNTGGVQPCSEKKVENIDPKVIPQTLATNGSSVPTVSGGHHNVELPSESKIPDTKDMQGTGISSTIEAIDKKPDPKNSMKSLSAAYSPSPCLLGENSAQQINSKVLTGRETSESESLPKLSELAKCENLQSSQDFQVEHTMSQDNAEVSSDKHVDSNMMNNQQKESHGEENLVYDIKRDDQDAALENSVGTSGTNTDGRQHSALSSDSSHAVEWIGDVVQLVDEKKYYQSCCVDGVTYRLQGHALFPTGHGKLTPSKLQSMWEDCKTGLKWVKVTNCYFPDDLPGNIGHPCISEVNEVYESNSDRTEMASSIRGPCEVLPSDKFKQENDRRCQLRNEESSRVQPIFLCRWFYDEFKKLFQPVIS

SEQ ID NO: 55259 - DNA, 1592 bp, Glycine max
  misc_feature (1)..(1592): Ceres Seq. ID no. 14312423
ttttttacaaaacttggatcttttctttcttaaaaccaaaggcacgctgaagcctcacaatagtgcaagtgatcccaaccaggttggcaccccacacgctatcattcatctgcagcacaccaagagatatagatctagttccttatgtcattgccatatcaagttctcattttgaacaatgacatatggatgttttctaaaattctacaacttactcttagtggagactatttatggttggagaaaattccatgtcattgtttgatttgagaacttgttaacaaggatataaatagcttgatataggttttgtcctatttttctttgatcaactatgccttctttctttgcaatctcaatttacaattggtgtgattcttaataatactaattaattcccatgaattaattgtcagagcatggttgcaatgatggtgaagcatctttaggttcaccccttgctggacgattgtttgtgctagttggtgcgggaggtgcagggaaagcactggcatttggtgctaaaagcagaggagctcgtctagtcatctttgacattgattttggtataaaacaaaggcacatatgttgtctactataaaatttaattttcctttgattctctctcgtgatagagttgaagttttaccaacatcaacatacctgtcacaccttccaattactttccccaaaaagtgccacaaagggtaggtggggtgggtggaattacagaaacacccttacctcaatctgcataactttgatcaatcaagtttaatactacctttttttttgttacgtcaagtttaataccttgatgtagcatattatagtttttcacgaatttcactgttatacaaaaactgctctatatctagagattatgttgcattgacatgttttcttattctcttgtgttcaaaaagatagagcaaaatctcttgcttgtgctgtatttggtgaagctcagcctttcaaagagttggtcaactttcagccagagaaaggggcaattcttgcgaatgcaacacctgtaggaatgcatcccaatacagacagaattcctgtggcagaggctactttggaagactaccggttagtctttgatgctgtgtatactccaagaagaaccagattgttgaacgaagcggatgctgcaggagcaataactgtggctggggtagaaatgttcctaaggcaggccattggtcagttcaatcttttcactggcctagaagcacctgaagaatttatgcgggaaattgttttatccaaattttgaaggcgccgctttcataaattgatcctacaacttgaaggaggctgcatgcctgcacctatcaagaaattcttgtatcacattgcataacatttttctttaaaaaaaatcccttatttttagttgggacgacaactataatgcaacataataaattgaaataataggcaaaatagcaaaagttgttgtgggcgcagctgaaagacatggttcaacttaatttgtggttttaggaataaaaatgttgtgattctctgaagaagaaaaaaatgttgtcatagcttcataggtaatattaacttgggccttacac

SEQ ID NO: 55260 - protein, 80 aa, Glycine max
  peptide (1)..(80): Ceres Seq. ID no. 14312424
  misc_feature (1)..(65): Pfam Name: Shikimate / quinate 5-dehydrogenase Pfam Description: Shikimate / quinate 5-dehydrogenase
  misc_feature (1)..(77): Homolog of NCBI NO: 23051387 NR Description: hypothetical protein [Methanosarcina barkeri]
  misc_feature (1)..(74): Homolog of NCBI NO: 32474293 NR Description: 3-dehydroquinate dehydratase / shikimate
  misc_feature (1)..(77): Homolog of NCBI NO: 11499908 NR Description: shikimate 5-dehydrogenase (aroE)
  misc_feature (1)..(77): Homolog of NCBI NO: 20093557 NR Description: Shikimate 5-dehydrogenase [Methanopyrus kandleri
  misc_feature (1)..(77): Homolog of NCBI NO: 20093378 NR Description: shikimate 5-dehydrogenase [Methanosarcina
  misc_feature (1)..(74): Homolog of NCBI NO: 629688 NR Description: 3-dehydroquinate dehydratase (EC 4.2.1.10) /
  misc_feature (1)..(66): Homolog of NCBI NO: 34914828 NR Description: putative 3-dehydroquinate dehydratase / shikimate
  misc_feature (1)..(80): Homolog of NCBI NO: 15230703 NR Description: dehydroquinate dehydratase/shikimate
  misc_feature (1)..(76): Homolog of NCBI NO: 7436862 NR Description: 3-dehydroquinate dehydratase (EC 4.2.1.10) /
  misc_feature (1)..(75): Homolog of NCBI NO: 34914824 NR Description: putative 3-dehydroquinate dehydratase
MHPNTDRIPVAEATLEDYRLVFDAVYTPRRTRLLNEADAAGAITVAGVEMFLRQAIGQFNLFTGLEAPEEFMREIVLSKF

SEQ ID NO: 55261 - protein, 57 aa, Glycine max
  peptide (1)..(57): Ceres Seq. ID no. 14312425
FLQNLDLFFLKTKGTLKPHNSASDPNQVGTPHAIIHLQHTKRYRSSSLCHCHIKFSF

SEQ ID NO: 55262 - protein, 46 aa, Glycine max
  peptide (1)..(46): Ceres Seq. ID no. 14312426
MFSYSLVFKKIEQNLLLVLYLVKLSLSKSWSTFSQRKGQFLRMQHL

SEQ ID NO: 55263 - DNA, 1704 bp, Glycine max
  misc_feature (1)..(1704): Ceres Seq. ID no. 15169180
aactccctactaccagtattacccttctctctctctccctctttctctgttgggtcactcacattattaaaaataaccaccctcacacttcccaacgcttccttaaccatgagccacgccggcctctggcttccgccgcagttcctcgccggagaccctgacacaaccctttcgaactccgatttcagcttcccttccgagttcccctacgagttcggattgtcttctccggagagcagcgacgacggcgaagaggacttcttcgccggcctcagtcgccgactcggtcagacctcgcttcacgaaactcgcaagcaactctcatccactgtttcggagattccaaggaaaactcagggtttggtcggttcccctcagtccacgctcgccggaataggaagctggtccggtcggagcgccgtttccggcgacggaagccccaacgggtactcgcgtgtcccttcgccctcgacgacgccgtttgacgaaaacaacgacccctgggaagtgatttacgcagccgcagttcaaatcgcaaggatgaagatgaacaacaacaacaaccgagttccagcacagtatgattttcacaataatagaaggttactcactcatcattgccctaaccggagtttcaatcaggtcgtgagagcgaagcaacagtgtggttcggattggggaaggccaaccaagcctaataactatttggttcagcagcaacaggttaaggttcagagtagagcgcgtgagtttgggcacgagagtgtgaatgcgaaatgcactcgtccatctgcgtggcccccttcgcaagttcagcagcaaaacaaccgggtacagtttggcggatccgggtctagggttggtggatcttctgtgaaaagggggtgtggtggaactggggtgttcttgcctcgccattatgaaaccccttctgagccacgtcgccagaaaactggttgtgcgcctgttttgttaccagcaaaggtggttcatgctttgaacttgaatattgatgacttgaatgggactacccaaccgcgtttctcgaatgcttttgctacggattatgaagcgattttagcgaggagaaacgcgcttctcatgcaggagcagcagcagcagcagcagaggttaataagtgttcggcgagaagaggcagccaactatgaaattcgccttcctcaagagtggacttactgacaaaagaaggcacaaatttctcctaaggaatttgaagaaatttggaatagtctattttggttgttttgacagaagatgaaattgaagaatgtgtttgggctagtgtttaggttcaaataaaacatctagtttttctagggagaaaaaaaggttgcattgcagcttttgggacctggttttagtggaaggaaatagtgagaggatagtagttttaggcaaggcttctttttcctttttttaccctttttatagtaatattataagttgttgtaataagataggataagcgggtcgttttcatttgccttatggttatggtgatgacactgatggggctaaagcgcaaggtatggtatggttcaacgttggccaagtttcaagtccaagtgttgaaaattggtcgattacccatgtgtgcctttactgaaaatccctgctcattattatggtatatagtttgtaataagttatacttacaatgtaataaaattagctcttctatcg

SEQ ID NO: 55264 - protein, 399 aa, Glycine max
  peptide (1)..(399): Ceres Seq. ID no. 15169181
  misc_feature (264)..(374): Homolog of NCBI NO: 20160564 NR Description: P0414E03.8 [Oryza sativa (japonica
NSLLPVLPFSLSPSFSVGSLTLLKITTLTLPNASLTMSHAGLWLPPQFLAGDPDTTLSNSDFSFPSEFPYEFGLSSPESSDDGEEDFFAGLSRRLGQTSLHETRKQLSSTVSEIPRKTQGLVGSPQSTLAGIGSWSGRSAVSGDGSPNGYSRVPSPSTTPFDENNDPWEVIYAAAVQIARMKMNNNNNRVPAQYDFHNNRRLLTHHCPNRSFNQVVRAKQQCGSDWGRPTKPNNYLVQQQQVKVQSRAREFGHESVNAKCTRPSAWPPSQVQQQNNRVQFGGSGSRVGGSSVKRGCGGTGVFLPRHYETPSEPRRQKTGCAPVLLPAKVVHALNLNIDDLNGTTQPRFSNAFATDYEAILARRNALLMQEQQQQQQRLISVRREEAANYEIRLPQEWTY

SEQ ID NO: 55265 - protein, 363 aa, Glycine max
  peptide (1)..(363): Ceres Seq. ID no. 15169182
  misc_feature (228)..(338): Homolog of NCBI NO: 20160564 NR Description: P0414E03.8 [Oryza sativa (japonica
MSHAGLWLPPQFLAGDPDTTLSNSDFSFPSEFPYEFGLSSPESSDDGEEDFFAGLSRRLGQTSLHETRKQLSSTVSEIPRKTQGLVGSPQSTLAGIGSWSGRSAVSGDGSPNGYSRVPSPSTTPFDENNDPWEVIYAAAVQIARMKMNNNNNRVPAQYDFHNNRRLLTHHCPNRSFNQVVRAKQQCGSDWGRPTKPNNYLVQQQQVKVQSRAREFGHESVNAKCTRPSAWPPSQVQQQNNRVQFGGSGSRVGGSSVKRGCGGTGVFLPRHYETPSEPRRQKTGCAPVLLPAKVVHALNLNIDDLNGTTQPRFSNAFATDYEAILARRNALLMQEQQQQQQRLISVRREEAANYEIRLPQEWTY

SEQ ID NO: 55266 - protein, 219 aa, Glycine max
  peptide (1)..(219): Ceres Seq. ID no. 15169183
  misc_feature (84)..(194): Homolog of NCBI NO: 20160564 NR Description: P0414E03.8 [Oryza sativa (japonica
MKMNNNNNRVPAQYDFHNNRRLLTHHCPNRSFNQVVRAKQQCGSDWGRPTKPNNYLVQQQQVKVQSRAREFGHESVNAKCTRPSAWPPSQVQQQNNRVQFGGSGSRVGGSSVKRGCGGTGVFLPRHYETPSEPRRQKTGCAPVLLPAKVVHALNLNIDDLNGTTQPRFSNAFATDYEAILARRNALLMQEQQQQQQRLISVRREEAANYEIRLPQEWTY

SEQ ID NO: 55267 - DNA, 1422 bp, Glycine max
  misc_feature (1)..(1422): Ceres Seq. ID no. 15170968
acttctcagttctcactctcactccgtagaaagaaccctagaatcagaattctccgtctatgttgcagaagcagctacctccccccattgaggcctcttccgatgaagagcaacgaccttcctccaagcaacacacagaagaaggagtttcctcttcagaagaagcttcttcccaagaagaagacgacgacgaccaacctcccacccttcctctcgcttccgcaaacccccacccgaaaccgtcgtcctccgactccgacaccgacttcgagcccaccaaagtaaaacccaagcccacggaccaggcccagaagccccagccctcacccgcgccgcccaaatggggatccaagcgccctgcccagaacaacgcccctgccactgacccgaaacgcgcgaagaagaaattgaccaattcttcttccgccgctgccgcccacgagacggaggagaagtccggtggcggccaagcgaagttgtctcagagactcttcagcaaggaagacgaactcgccattcttaagggcatggctgagttcatttcgaagacgggccaagacccttacaagtacgccgatgccttccaaaatttcgttaagaattcgctccgcgtggaggcttcgagcaaccagatcaaggagaagatccgacggctgaagaagaagtttgaaactaaagcacagagagcgaagaaatgggaggaccctgagttctccaaatttcacgaccggactgtgtttgaattatcaaagaaggtttggggagaaggagccaatgggctggtggagaagccaaaacctaataatggaaaaagaaaaactgccaagactccaaagaaggatgctactagcaggaatgtagtagcaaaatctgaaactacaacactactggagtcgatggagttggaggagtgtgggaatgtaaatttgctttaccgcgaagtatctggtttcaaagaactgaatgaggatgagatgaagaggggattggcgttaattggagaatctaagaggaaagagttggagggcaagtggaggaaattgcgacttgctgagatggaactggttgcgaatcgctcactacttattggggagcagattaagttgatatttgaagcacttcagtaatccaacaactagggtttattgtgttaggtatcactttttgccttttcggtactgcctgccatatgtattgtggatcattgtaattttgtgtctatggtattgatatagtcttttttattaagtaggcagtgttgtttagttgttggccttgtgaaaatgtgccgcatagtcgtccatttcaggttctctttttcaattaagatgtgccatcattaactccagaaaatgccgaaattaaacacttaccattttgtgtagatatatgatggacacatcatggttatgtgtacgtttc

SEQ ID NO: 55268 - protein, 355 aa, Glycine max
  peptide (1)..(355): Ceres Seq. ID no. 15170969
  misc_feature (142)..(235): Pfam Name: Protein of unknown function, DUF573 Pfam Description: Protein of unknown function, DUF573
  misc_feature (11)..(353): Homolog of NCBI NO: 15236795 NR Description: expressed protein [Arabidopsis thaliana]
  misc_feature (142)..(355): Homolog of NCBI NO: 14423518 NR Description: putative protein [Arabidopsis thaliana]
  misc_feature (142)..(355): Homolog of NCBI NO: 24899707 NR Description: putative protein [Arabidopsis thaliana]
  misc_feature (17)..(334): Homolog of NCBI NO: 25350269 NR Description: protein T23J18.17 [imported] - Arabidopsis
  misc_feature (306)..(355): Homolog of NCBI NO: 14268476 NR Description: storekeeper protein [Solanum tuberosum]
  misc_feature (8)..(270): Homolog of NCBI NO: 14268476 NR Description: storekeeper protein [Solanum tuberosum]
  misc_feature (17)..(353): Homolog of NCBI NO: 15220413 NR Description: storekeeper protein -related [Arabidopsis
  misc_feature (8)..(353): Homolog of NCBI NO: 21593409 NR Description: unknown [Arabidopsis thaliana]
  misc_feature (8)..(353): Homolog of NCBI NO: 18407307 NR Description: expressed protein [Arabidopsis thaliana]
  misc_feature (8)..(355): Homolog of NCBI NO: 15234971 NR Description: expressed protein [Arabidopsis thaliana]
MLQKQLPPPIEASSDEEQRPSSKQHTEEGVSSSEEASSQEEDDDDQPPTLPLASANPHPKPSSSDSDTDFEPTKVKPKPTDQAQKPQPSPAPPKWGSKRPAQNNAPATDPKRAKKKLTNSSSAAAAHETEEKSGGGQAKLSQRLFSKEDELAILKGMAEFISKTGQDPYKYADAFQNFVKNSLRVEASSNQIKEKIRRLKKKFETKAQRAKKWEDPEFSKFHDRTVFELSKKVWGEGANGLVEKPKPNNGKRKTAKTPKKDATSRNVVAKSETTTLLESMELEECGNVNLLYREVSGFKELNEDEMKRGLALIGESKRKELEGKWRKLRLAEMELVANRSLLIGEQIKLIFEALQ

SEQ ID NO: 55269 - protein, 199 aa, Glycine max
  peptide (1)..(199): Ceres Seq. ID no. 15170970
  misc_feature (1)..(79): Pfam Name: Protein of unknown function, DUF573 Pfam Description: Protein of unknown function, DUF573
  misc_feature (1)..(197): Homolog of NCBI NO: 15236795 NR Description: expressed protein [Arabidopsis thaliana]
  misc_feature (1)..(199): Homolog of NCBI NO: 14423518 NR Description: putative protein [Arabidopsis thaliana]
  misc_feature (1)..(199): Homolog of NCBI NO: 24899707 NR Description: putative protein [Arabidopsis thaliana]
  misc_feature (1)..(178): Homolog of NCBI NO: 25350269 NR Description: protein T23J18.17 [imported] - Arabidopsis
  misc_feature (150)..(199): Homolog of NCBI NO: 14268476 NR Description: storekeeper protein [Solanum tuberosum]
  misc_feature (1)..(114): Homolog of NCBI NO: 14268476 NR Description: storekeeper protein [Solanum tuberosum]
  misc_feature (1)..(197): Homolog of NCBI NO: 15220413 NR Description: storekeeper protein -related [Arabidopsis
  misc_feature (1)..(197): Homolog of NCBI NO: 21593409 NR Description: unknown [Arabidopsis thaliana]
  misc_feature (1)..(197): Homolog of NCBI NO: 18407307 NR Description: expressed protein [Arabidopsis thaliana]
  misc_feature (1)..(199): Homolog of NCBI NO: 15234971 NR Description: expressed protein [Arabidopsis thaliana]
MAEFISKTGQDPYKYADAFQNFVKNSLRVEASSNQIKEKIRRLKKKFETKAQRAKKWEDPEFSKFHDRTVFELSKKVWGEGANGLVEKPKPNNGKRKTAKTPKKDATSRNVVAKSETTTLLESMELEECGNVNLLYREVSGFKELNEDEMKRGLALIGESKRKELEGKWRKLRLAEMELVANRSLLIGEQIKLIFEALQ

SEQ ID NO: 55270 - DNA, 1382 bp, Glycine max
  misc_feature (1)..(1382): Ceres Seq. ID no. 14312416
aaaaaacccctaaagtctcattcttcttccccgcagcgccgcacagactcatcaaactcgttgtgactgcagctgcacagattttcctcttctctgtgcctttgcgagaacgcgcgtttggtttcaattcaatggcgggaggtaaagcgaagaaggaaaaggggaagccccatcagcagcagaagcacatgccctaccaaggcggaatatcgttccacaaatcaaagggtcagcacattctcaagaaccccttgctcgtcgattccattgtggagaaggccggcgtcaagagcaccgacgtcatcctcgagatcggtcccgggaccggtaacttgacgaagaagcttctcgaagccggcaagaaggtcatcgccgtcgagatcgatccccggatggttctcgagctccagagacggttccagggtacccctcactccaatcgcctcacggttatccaaggtgatgtgttgaagactgaacttccttattttgacatttgtgttgcaaacattccctaccaaatatcttctcctctcacattcaagttactcaagcacgaacctgcttttagggctgcaatcataatgttccagagagaatttgccatgagactggttgctcagcccggtgataaactatattgtcgtctcacggtcaacactcaactacatgctcgagtcttccacctcctcaaagttggaagaaacaacttcaggccccctcccaaggtggattcctctgtggtgcgaattgagcccaggaaaccccgtattgaagttaagcaaaaggagtgggatgggtttttgcggatttgttttaacaggaagaacaaaacacttggttcgatatttaggcagaagagtgtgatctccttgcttgaaaaaaactataggactgtgcgggcactggaacttgggcaagaagattcactaaaggaagtggatgctaaaatggacttctctagttttggtgatgatcgaggtatggagatggatgatgatggagcagatgatgatgaaatggaagttgaggatggggaagcagatgaggtgcaatctgaattcaaggacaaggttttgggtgttctgaaagagggagattttgaagagaagaggtcatccaagctcacattgcaggaattcctatacctgctttctctgtttaacaaaactggcatacacttctattgattttagattatcaattttctcgatagtttcttccctatttaaatctacactattctttcaataggcttatcattattcagaagttttccaagagagagtgatatcaaaaactgttaactatttatgcattgtattttgttaagctccatcgtggatgtatactactctatataatctttaggaggtttgatc

SEQ ID NO: 55271 - protein, 395 aa, Glycine max
  peptide (1)..(395): Ceres Seq. ID no. 14312417
  misc_feature (71)..(298): Homolog of NCBI NO: 19112914 NR Description: dimethylase [Schizosaccharomyces pombe]
  misc_feature (355)..(394): Homolog of NCBI NO: 31209593 NR Description: ENSANGP00000016944 [Anopheles gambiae]
  misc_feature (68)..(333): Homolog of NCBI NO: 31209593 NR Description: ENSANGP00000016944 [Anopheles gambiae]
  misc_feature (356)..(394): Homolog of NCBI NO: 21313560 NR Description: RIKEN cDNA 1500031M22 [Mus musculus]
  misc_feature (45)..(333): Homolog of NCBI NO: 21313560 NR Description: RIKEN cDNA 1500031M22 [Mus musculus]
  misc_feature (356)..(394): Homolog of NCBI NO: 27151490 NR Description: Probable dimethyladenosine transferase
  misc_feature (47)..(333): Homolog of NCBI NO: 27151490 NR Description: Probable dimethyladenosine transferase
  misc_feature (356)..(394): Homolog of NCBI NO: 7657198 NR Description: putative dimethyladenosine transferase [Homo
  misc_feature (47)..(333): Homolog of NCBI NO: 7657198 NR Description: putative dimethyladenosine transferase [Homo
  misc_feature (44)..(394): Homolog of NCBI NO: 15226591 NR Description: dimethyladenosine transferase -related
KTPKVSFFFPAAPHRLIKLVVTAAAQIFLFSVPLRERAFGFNSMAGGKAKKEKGKPHQQQKHMPYQGGISFHKSKGQHILKNPLLVDSIVEKAGVKSTDVILEIGPGTGNLTKKLLEAGKKVIAVEIDPRMVLELQRRFQGTPHSNRLTVIQGDVLKTELPYFDICVANIPYQISSPLTFKLLKHEPAFRAAIIMFQREFAMRLVAQPGDKLYCRLTVNTQLHARVFHLLKVGRNNFRPPPKVDSSVVRIEPRKPRIEVKQKEWDGFLRICFNRKNKTLGSIFRQKSVISLLEKNYRTVRALELGQEDSLKEVDAKMDFSSFGDDRGMEMDDDGADDDEMEVEDGEADEVQSEFKDKVLGVLKEGDFEEKRSSKLTLQEFLYLLSLFNKTGIHFY

SEQ ID NO: 55272 - protein, 352 aa, Glycine max
  peptide (1)..(352): Ceres Seq. ID no. 14312418
  misc_feature (28)..(255): Homolog of NCBI NO: 19112914 NR Description: dimethylase [Schizosaccharomyces pombe]
  misc_feature (312)..(351): Homolog of NCBI NO: 31209593 NR Description: ENSANGP00000016944 [Anopheles gambiae]
  misc_feature (25)..(290): Homolog of NCBI NO: 31209593 NR Description: ENSANGP00000016944 [Anopheles gambiae]
  misc_feature (313)..(351): Homolog of NCBI NO: 21313560 NR Description: RIKEN cDNA 1500031M22 [Mus musculus]
  misc_feature (2)..(290): Homolog of NCBI NO: 21313560 NR Description: RIKEN cDNA 1500031M22 [Mus musculus]
  misc_feature (313)..(351): Homolog of NCBI NO: 27151490 NR Description: Probable dimethyladenosine transferase
  misc_feature (4)..(290): Homolog of NCBI NO: 27151490 NR Description: Probable dimethyladenosine transferase
  misc_feature (313)..(351): Homolog of NCBI NO: 7657198 NR Description: putative dimethyladenosine transferase [Homo
  misc_feature (4)..(290): Homolog of NCBI NO: 7657198 NR Description: putative dimethyladenosine transferase [Homo
  misc_feature (1)..(351): Homolog of NCBI NO: 15226591 NR Description: dimethyladenosine transferase -related
MAGGKAKKEKGKPHQQQKHMPYQGGISFHKSKGQHILKNPLLVDSIVEKAGVKSTDVILEIGPGTGNLTKKLLEAGKKVIAVEIDPRMVLELQRRFQGTPHSNRLTVIQGDVLKTELPYFDICVANIPYQISSPLTFKLLKHEPAFRAAIIMFQREFAMRLVAQPGDKLYCRLTVNTQLHARVFHLLKVGRNNFRPPPKVDSSVVRIEPRKPRIEVKQKEWDGFLRICFNRKNKTLGSIFRQKSVISLLEKNYRTVRALELGQEDSLKEVDAKMDFSSFGDDRGMEMDDDGADDDEMEVEDGEADEVQSEFKDKVLGVLKEGDFEEKRSSKLTLQEFLYLLSLFNKTGIHFY

SEQ ID NO: 55273 - protein, 333 aa, Glycine max
  peptide (1)..(333): Ceres Seq. ID no. 14312419
  misc_feature (9)..(236): Homolog of NCBI NO: 19112914 NR Description: dimethylase [Schizosaccharomyces pombe]
  misc_feature (293)..(332): Homolog of NCBI NO: 31209593 NR Description: ENSANGP00000016944 [Anopheles gambiae]
  misc_feature (6)..(271): Homolog of NCBI NO: 31209593 NR Description: ENSANGP00000016944 [Anopheles gambiae]
  misc_feature (294)..(332): Homolog of NCBI NO: 21313560 NR Description: RIKEN cDNA 1500031M22 [Mus musculus]
  misc_feature (1)..(271): Homolog of NCBI NO: 21313560 NR Description: RIKEN cDNA 1500031M22 [Mus musculus]
  misc_feature (294)..(332): Homolog of NCBI NO: 27151490 NR Description: Probable dimethyladenosine transferase
  misc_feature (1)..(271): Homolog of NCBI NO: 27151490 NR Description: Probable dimethyladenosine transferase
  misc_feature (294)..(332): Homolog of NCBI NO: 7657198 NR Description: putative dimethyladenosine transferase [Homo
  misc_feature (1)..(271): Homolog of NCBI NO: 7657198 NR Description: putative dimethyladenosine transferase [Homo
  misc_feature (1)..(332): Homolog of NCBI NO: 15226591 NR Description: dimethyladenosine transferase -related
MPYQGGISFHKSKGQHILKNPLLVDSIVEKAGVKSTDVILEIGPGTGNLTKKLLEAGKKVIAVEIDPRMVLELQRRFQGTPHSNRLTVIQGDVLKTELPYFDICVANIPYQISSPLTFKLLKHEPAFRAAIIMFQREFAMRLVAQPGDKLYCRLTVNTQLHARVFHLLKVGRNNFRPPPKVDSSVVRIEPRKPRIEVKQKEWDGFLRICFNRKNKTLGSIFRQKSVISLLEKNYRTVRALELGQEDSLKEVDAKMDFSSFGDDRGMEMDDDGADDDEMEVEDGEADEVQSEFKDKVLGVLKEGDFEEKRSSKLTLQEFLYLLSLFNKTGIHFY

SEQ ID NO: 55274 - DNA, 1687 bp, Glycine max
  misc_feature (1)..(1687): Ceres Seq. ID no. 14312347
gaagctatcacagctccagctcctggttccactttcgctcttcacaaaatgaaccgagtgataaagaagaccgtttcaaatatctgtgctctcaaggttccaagaaagtctttttgtagtactgagggtgtgaaagttgctggttgctctattccagaggtttccaatgaccatgagaagaagcaggctattagcaaagttattccacaatatgatattgctattgttggaggaggcatggttggcatggctttatcttttttcttggcaagtaatccaatgacaaagcagttgagtgttgcaattattgatagcaatccagctcttggaagtagcttgcacatcaagaaggaagatccccctgatccaagagtcagtacagtaactcctgcttctatttcttttctccaagatgctggtgcatggaaatatgttgagcaaaatagacgtgcttattttaatacaatgcaggtctgggattatactggtttggggtatgctagatatcatgcaagagatgtaaataaagactttctagggtgcgtggcagagaataaagtgctccataatgccttattgtcatgtgtaaaggattctgatttcaagacaacaatctatcctttgaggttaagttcaatgactttgaatacaagctctatgtctatggcggaggagaatccaacatccaaagaaccaccatctgctcaaggtcatggtgcagaactgcagcttagtgatggcagtagcatatatgcaaagttggtggttggcgctgatggaggaaaatcacatgttagggagttagcaggaatcaaaacaactggatggaattactcccagaatgcaataatctgcacggtggagcatacttatgaaaatgaatgtgcatggcaacgttttctaccaacaggtccaattgctcttttacccatgggtgataagtttagcaatattgtttggaccatgagcccaacagagtcaaataaccgcaagtcaattaccgaggaagaatttttaaaggatgtgaattatgctttagattatggacatggacctcatcctacatcaagcttatcaggaactcgagacgtgttctcttggtttaaaacggatgcaacactatcaactaatgaattctttgaaattcctccaaaagtaacaaggttggcatctgaaaggatggtgtttcctttgtctttaaggcatgccaattcctatgcattgaaacgtgtggttcttattggggatgcagcccacacagtccatcctcttgctggtcaaggagttaatttgggttttggagatgcattttctctttcaagaattattgcagaggggattgctttgggcactgatattggagaggtaaatatgttaaagaagtatgaagcagagagaaaaacagcaaatattatgatgatggcaatccttgatggcgtccaaaaagcctattctattgattttggaccttttaatattctgcgagctgcagccttccatggggcaaactatatatcaccactcaaaagaagtatcatttcctatgcttcaggggaacataaattacccattttcttctgaatacagaaatgtcatttaggttaagaagtggacctacaaaatgcagggtgagaatatcaactccctaacttatttaatatattcactttactttggagattaaaag

SEQ ID NO: 55275 - protein, 526 aa, Glycine max
  peptide (1)..(526): Ceres Seq. ID no. 14312348
  misc_feature (251)..(478): Pfam Name: Monooxygenase Pfam Description: Monooxygenase
  misc_feature (140)..(517): Homolog of NCBI NO: 34867391 NR Description: similar to Coq6 protein [Rattus norvegicus]
  misc_feature (71)..(517): Homolog of NCBI NO: 15680256 NR Description: Unknown (protein for MGC:23201) [Homo sapiens]
  misc_feature (71)..(517): Homolog of NCBI NO: 30047245 NR Description: Coq6 protein [Mus musculus]
  misc_feature (71)..(517): Homolog of NCBI NO: 26006706 NR Description: Ubiquinone biosynthesis monooxgenase COQ6
  misc_feature (71)..(517): Homolog of NCBI NO: 27369832 NR Description: coenzyme Q6 homolog [Mus musculus]
  misc_feature (71)..(517): Homolog of NCBI NO: 18848355 NR Description: Coq6 protein [Mus musculus]
  misc_feature (71)..(517): Homolog of NCBI NO: 32967305 NR Description: CGI-10 protein isoform a; CGI-10 protein [Homo
  misc_feature (62)..(525): Homolog of NCBI NO: 11994239 NR Description: gb|AAD27719.1~gene_id:MUJ8.10~similar to unknown
  misc_feature (36)..(525): Homolog of NCBI NO: 28376703 NR Description: putative oxygenase [Oryza sativa (japonica
  misc_feature (18)..(525): Homolog of NCBI NO: 30687388 NR Description: monooxygenase family [Arabidopsis thaliana]
EAITAPAPGSTFALHKMNRVIKKTVSNICALKVPRKSFCSTEGVKVAGCSIPEVSNDHEKKQAISKVIPQYDIAIVGGGMVGMALSFFLASNPMTKQLSVAIIDSNPALGSSLHIKKEDPPDPRVSTVTPASISFLQDAGAWKYVEQNRRAYFNTMQVWDYTGLGYARYHARDVNKDFLGCVAENKVLHNALLSCVKDSDFKTTIYPLRLSSMTLNTSSMSMAEENPTSKEPPSAQGHGAELQLSDGSSIYAKLVVGADGGKSHVRELAGIKTTGWNYSQNAIICTVEHTYENECAWQRFLPTGPIALLPMGDKFSNIVWTMSPTESNNRKSITEEEFLKDVNYALDYGHGPHPTSSLSGTRDVFSWFKTDATLSTNEFFEIPPKVTRLASERMVFPLSLRHANSYALKRVVLIGDAAHTVHPLAGQGVNLGFGDAFSLSRIIAEGIALGTDIGEVNMLKKYEAERKTANIMMMAILDGVQKAYSIDFGPFNILRAAAFHGANYISPLKRSIISYASGEHKLPIFF

SEQ ID NO: 55276 - protein, 510 aa, Glycine max
  peptide (1)..(510): Ceres Seq. ID no. 14312349
  misc_feature (235)..(462): Pfam Name: Monooxygenase Pfam Description: Monooxygenase
  misc_feature (124)..(501): Homolog of NCBI NO: 34867391 NR Description: similar to Coq6 protein [Rattus norvegicus]
  misc_feature (55)..(501): Homolog of NCBI NO: 15680256 NR Description: Unknown (protein for MGC:23201) [Homo sapiens]
  misc_feature (55)..(501): Homolog of NCBI NO: 27369832 NR Description: coenzyme Q6 homolog [Mus musculus]
  misc_feature (55)..(501): Homolog of NCBI NO: 30047245 NR Description: Coq6 protein [Mus musculus]
  misc_feature (55)..(501): Homolog of NCBI NO: 26006706 NR Description: Ubiquinone biosynthesis monooxgenase COQ6
  misc_feature (55)..(501): Homolog of NCBI NO: 18848355 NR Description: Coq6 protein [Mus musculus]
  misc_feature (55)..(501): Homolog of NCBI NO: 32967305 NR Description: CGI-10 protein isoform a; CGI-10 protein [Homo
  misc_feature (46)..(509): Homolog of NCBI NO: 11994239 NR Description: gb|AAD27719.1~gene_id:MUJ8.10~similar to unknown
  misc_feature (20)..(509): Homolog of NCBI NO: 28376703 NR Description: putative oxygenase [Oryza sativa (japonica
  misc_feature (2)..(509): Homolog of NCBI NO: 30687388 NR Description: monooxygenase family [Arabidopsis thaliana]
MNRVIKKTVSNICALKVPRKSFCSTEGVKVAGCSIPEVSNDHEKKQAISKVIPQYDIAIVGGGMVGMALSFFLASNPMTKQLSVAIIDSNPALGSSLHIKKEDPPDPRVSTVTPASISFLQDAGAWKYVEQNRRAYFNTMQVWDYTGLGYARYHARDVNKDFLGCVAENKVLHNALLSCVKDSDFKTTIYPLRLSSMTLNTSSMSMAEENPTSKEPPSAQGHGAELQLSDGSSIYAKLVVGADGGKSHVRELAGIKTTGWNYSQNAIICTVEHTYENECAWQRFLPTGPIALLPMGDKFSNIVWTMSPTESNNRKSITEEEFLKDVNYALDYGHGPHPTSSLSGTRDVFSWFKTDATLSTNEFFEIPPKVTRLASERMVFPLSLRHANSYALKRVVLIGDAAHTVHPLAGQGVNLGFGDAFSLSRIIAEGIALGTDIGEVNMLKKYEAERKTANIMMMAILDGVQKAYSIDFGPFNILRAAAFHGANYISPLKRSIISYASGEHKLPIFF

SEQ ID NO: 55277 - protein, 447 aa, Glycine max
  peptide (1)..(447): Ceres Seq. ID no. 14312350
  misc_feature (172)..(399): Pfam Name: Monooxygenase Pfam Description: Monooxygenase
  misc_feature (61)..(438): Homolog of NCBI NO: 34867391 NR Description: similar to Coq6 protein [Rattus norvegicus]
  misc_feature (1)..(438): Homolog of NCBI NO: 15680256 NR Description: Unknown (protein for MGC:23201) [Homo sapiens]
  misc_feature (1)..(438): Homolog of NCBI NO: 30047245 NR Description: Coq6 protein [Mus musculus]
  misc_feature (1)..(438): Homolog of NCBI NO: 27369832 NR Description: coenzyme Q6 homolog [Mus musculus]
  misc_feature (1)..(438): Homolog of NCBI NO: 26006706 NR Description: Ubiquinone biosynthesis monooxgenase COQ6
  misc_feature (1)..(438): Homolog of NCBI NO: 18848355 NR Description: Coq6 protein [Mus musculus]
  misc_feature (1)..(438): Homolog of NCBI NO: 32967305 NR Description: CGI-10 protein isoform a; CGI-10 protein [Homo
  misc_feature (1)..(446): Homolog of NCBI NO: 11994239 NR Description: gb|AAD27719.1~gene_id:MUJ8.10~similar to unknown
  misc_feature (1)..(446): Homolog of NCBI NO: 28376703 NR Description: putative oxygenase [Oryza sativa (japonica
  misc_feature (1)..(446): Homolog of NCBI NO: 30687388 NR Description: monooxygenase family [Arabidopsis thaliana]
MVGMALSFFLASNPMTKQLSVAIIDSNPALGSSLHIKKEDPPDPRVSTVTPASISFLQDAGAWKYVEQNRRAYFNTMQVWDYTGLGYARYHARDVNKDFLGCVAENKVLHNALLSCVKDSDFKTTIYPLRLSSMTLNTSSMSMAEENPTSKEPPSAQGHGAELQLSDGSSIYAKLVVGADGGKSHVRELAGIKTTGWNYSQNAIICTVEHTYENECAWQRFLPTGPIALLPMGDKFSNIVWTMSPTESNNRKSITEEEFLKDVNYALDYGHGPHPTSSLSGTRDVFSWFKTDATLSTNEFFEIPPKVTRLASERMVFPLSLRHANSYALKRVVLIGDAAHTVHPLAGQGVNLGFGDAFSLSRIIAEGIALGTDIGEVNMLKKYEAERKTANIMMMAILDGVQKAYSIDFGPFNILRAAAFHGANYISPLKRSIISYASGEHKLPIFF

SEQ ID NO: 55278 - DNA, 1159 bp, Glycine max
  misc_feature (1)..(1159): Ceres Seq. ID no. 14312351
aatagatgctcattcatgatcatacctatggctgctgtttcttgcgtgtttcttttctttctttcttgtctatttctaaaatccatatctcaagccagcgcccagataatgttaaccgaatcctgtgataataacagcaacggcacctataacaccaatctcaacacccttttatctactctctcttccaacactgaaattaactatggtttctacaacttctcatatggtcaaaatgaagacaaagttaacgccattgggctctgcagaggagaccttaagccagatgagtgtcgtagttgtctcaacgatgccagaagcaatctcacagtcaattgtccaaaccaggaggaagagaaagagggaattttgcaccttgacaaatgcatgttgcgctactcaaatcgctcaatatttagcgtcatggagacttctcctacgctttatatgtggaattccaccaatgcaaccgacgtggatcagttcaatcaggtgctccagaacctgatgaggactctaactgagagagctgcatcgggtgactctcgtcgtaagtatgcagagggaagttcgtctgctccaaattttcaaaccatacatggtcttgtgcagtgtactcctgatttgtctcagcaagactgcaaacaatgcttggatcgtgtggctatctcacaaatcccaagttgttgcaatggcaagatcatgggtggtaaagttcttacaccaagttgtaatactagattcgaaacttaccggcatcttccgtcttcaaaaggaaatagcgacgcgtcacgaactgtactcctcgtcgccatggcagtgctagtcgttagcgttgatttggtgctcggttttatctgaaatgaaaactcgccaacttcactgcagctattatctatatggaaataattcttggacactcttttattaaagtattaccaataccaactaccaatcttttttttacaacttacactgaaattgcctttttctttcagtatatacatcttgagatatataggaagagaagggagataagattgatgatgtaacatcacagattaaaaaaaaaagttagatagataaaatgaaaggcattattagtaggatgtttgtaaattatagatgtctgtcaccattctatatatatccaccgttt

SEQ ID NO: 55279 - protein, 286 aa, Glycine max
  peptide (1)..(286): Ceres Seq. ID no. 14312352
  misc_feature (199)..(250): Pfam Name: Domain of unknown function DUF26 Pfam Description: Domain of unknown function DUF26
  misc_feature (14)..(251): Homolog of NCBI NO: 24417476 NR Description: unknown [Arabidopsis thaliana]
  misc_feature (14)..(251): Homolog of NCBI NO: 13506745 NR Description: receptor-like protein kinase 4 [Arabidopsis
  misc_feature (14)..(251): Homolog of NCBI NO: 7488195 NR Description: probable serine/threonine-specific protein kinase
  misc_feature (10)..(282): Homolog of NCBI NO: 15236447 NR Description: receptor-like protein kinase, putative
  misc_feature (18)..(252): Homolog of NCBI NO: 22328852 NR Description: serine threonine kinase - like protein
  misc_feature (16)..(252): Homolog of NCBI NO: 15234824 NR Description: receptor-related protein kinase - like protein
  misc_feature (10)..(252): Homolog of NCBI NO: 18076589 NR Description: putative receptor-like serine-threonine protein
  misc_feature (40)..(252): Homolog of NCBI NO: 18076583 NR Description: putative receptor-like serine-threonine protein
  misc_feature (10)..(252): Homolog of NCBI NO: 18076585 NR Description: putative receptor-like serine-threonine protein
  misc_feature (10)..(250): Homolog of NCBI NO: 4530126 NR Description: receptor-like protein kinase homolog RK20-1
NRCSFMIIPMAAVSCVFLFFLSCLFLKSISQASAQIMLTESCDNNSNGTYNTNLNTLLSTLSSNTEINYGFYNFSYGQNEDKVNAIGLCRGDLKPDECRSCLNDARSNLTVNCPNQEEEKEGILHLDKCMLRYSNRSIFSVMETSPTLYMWNSTNATDVDQFNQVLQNLMRTLTERAASGDSRRKYAEGSSSAPNFQTIHGLVQCTPDLSQQDCKQCLDRVAISQIPSCCNGKIMGGKVLTPSCNTRFETYRHLPSSKGNSDASRTVLLVAMAVLVVSVDLVLGFI

SEQ ID NO: 55280 - protein, 281 aa, Glycine max
  peptide (1)..(281): Ceres Seq. ID no. 14312353
  misc_feature (194)..(245): Pfam Name: Domain of unknown function DUF26 Pfam Description: Domain of unknown function DUF26
  misc_feature (9)..(246): Homolog of NCBI NO: 24417476 NR Description: unknown [Arabidopsis thaliana]
  misc_feature (9)..(246): Homolog of NCBI NO: 13506745 NR Description: receptor-like protein kinase 4 [Arabidopsis
  misc_feature (9)..(246): Homolog of NCBI NO: 7488195 NR Description: probable serine/threonine-specific protein kinase
  misc_feature (5)..(277): Homolog of NCBI NO: 15236447 NR Description: receptor-like protein kinase, putative
  misc_feature (13)..(247): Homolog of NCBI NO: 22328852 NR Description: serine threonine kinase - like protein
  misc_feature (11)..(247): Homolog of NCBI NO: 15234824 NR Description: receptor-related protein kinase - like protein
  misc_feature (5)..(247): Homolog of NCBI NO: 18076589 NR Description: putative receptor-like serine-threonine protein
  misc_feature (35)..(247): Homolog of NCBI NO: 18076583 NR Description: putative receptor-like serine-threonine protein
  misc_feature (5)..(247): Homolog of NCBI NO: 18076585 NR Description: putative receptor-like serine-threonine protein
  misc_feature (5)..(245): Homolog of NCBI NO: 4530126 NR Description: receptor-like protein kinase homolog RK20-1
MIIPMAAVSCVFLFFLSCLFLKSISQASAQIMLTESCDNNSNGTYNTNLNTLLSTLSSNTEINYGFYNFSYGQNEDKVNAIGLCRGDLKPDECRSCLNDARSNLTVNCPNQEEEKEGILHLDKCMLRYSNRSIFSVMETSPTLYMWNSTNATDVDQFNQVLQNLMRTLTERAASGDSRRKYAEGSSSAPNFQTIHGLVQCTPDLSQQDCKQCLDRVAISQIPSCCNGKIMGGKVLTPSCNTRFETYRHLPSSKGNSDASRTVLLVAMAVLVVSVDLVLGFI

SEQ ID NO: 55281 - protein, 277 aa, Glycine max
  peptide (1)..(277): Ceres Seq. ID no. 14312354
  misc_feature (190)..(241): Pfam Name: Domain of unknown function DUF26 Pfam Description: Domain of unknown function DUF26
  misc_feature (5)..(242): Homolog of NCBI NO: 24417476 NR Description: unknown [Arabidopsis thaliana]
  misc_feature (5)..(242): Homolog of NCBI NO: 13506745 NR Description: receptor-like protein kinase 4 [Arabidopsis
  misc_feature (5)..(242): Homolog of NCBI NO: 7488195 NR Description: probable serine/threonine-specific protein kinase
  misc_feature (1)..(273): Homolog of NCBI NO: 15236447 NR Description: receptor-like protein kinase, putative
  misc_feature (9)..(243): Homolog of NCBI NO: 22328852 NR Description: serine threonine kinase - like protein
  misc_feature (7)..(243): Homolog of NCBI NO: 15234824 NR Description: receptor-related protein kinase - like protein
  misc_feature (1)..(243): Homolog of NCBI NO: 18076589 NR Description: putative receptor-like serine-threonine protein
  misc_feature (31)..(243): Homolog of NCBI NO: 18076583 NR Description: putative receptor-like serine-threonine protein
  misc_feature (1)..(243): Homolog of NCBI NO: 18076585 NR Description: putative receptor-like serine-threonine protein
  misc_feature (1)..(241): Homolog of NCBI NO: 4530126 NR Description: receptor-like protein kinase homolog RK20-1
MAAVSCVFLFFLSCLFLKSISQASAQIMLTESCDNNSNGTYNTNLNTLLSTLSSNTEINYGFYNFSYGQNEDKVNAIGLCRGDLKPDECRSCLNDARSNLTVNCPNQEEEKEGILHLDKCMLRYSNRSIFSVMETSPTLYMWNSTNATDVDQFNQVLQNLMRTLTERAASGDSRRKYAEGSSSAPNFQTIHGLVQCTPDLSQQDCKQCLDRVAISQIPSCCNGKIMGGKVLTPSCNTRFETYRHLPSSKGNSDASRTVLLVAMAVLVVSVDLVLGFI

SEQ ID NO: 55282 - DNA, 1448 bp, Glycine max
  misc_feature (1)..(1448): Ceres Seq. ID no. 15176246
gagaaaaaaaaggttaccccttttccatattttacctttcaaactctctctctctgtatgtatatataaagtctctttctcatgtttccttacttgggtgtagctttatttggtcatcaatttaattgcctgaccaaagtaaccatctcgttcccttttctgctttgttgaaatgccatgacagttcagatttgtaggaagcttattggaagaaaaatagctttgatatttggaaatgtctgaagtgagaaacaaagtggatttcatccagttgcttggacctgacatgtcaatcaagattctcacccatttggatgacccttgtgatcttattcgggtttcttctgtttccagttcttggcaccgatttgttattgaacatggcctctgcaagcaactttgcttgaaaatgtttcctgaaatatctggtgttgctcatataattgagcttgacaacattattgaaccactaagcaacactcttggcagttatgtaagttgggagtctcataagagaaatcatagagtctatgcatttttggcttctggtcttactcctatgaggaaaaattgcatctcaaaagccattagtgcatccagcactgataactaccctgaagaaagcattctacatacgttggagcctggggatagaactgaatatagagcatcatactggtcaagcaaaggggaaagcgatccttctgttcctgagactttagtttatgagctagcttcaaaattatgtcttgttacggagatttatgtccatccattccaagcatattttcagcatggcttccctatatattctgctaaggctgtccgattcagaatgggccattcgaaacacccaatggaattagagagtcctgtggacaacatggctgctaatcacgtcttgggcaataatcaattcatatggacatatacatcacctgaatttccaatgcttcaagaaaaccgcttgcaaaaattcaagctacctgaacctgttctgtgcattggaggtgtactgctagttgagctgttgggtagagttcaaaagcaagaaatggatgaattattctatatatgatggtgcagcatctctcatgttcaagttatgggacgactgctttttccggaatttgatgtcaaaattcatcattggtcaggaaagtgtaccttgaaatactgccctcaaacagattgttatatgtcttctccaacatcatcaccgagaagcaactcgagtaatccgtcacgcctgcggaccataacctcaagcataatgcagaggggtgtgagacgttgggagcaatttctcttgggtgcattgcttggtactggtcctgttgtagttgataatgaagatcaatgaaaaaaaaaaatgtaagtaataaagtacttccattctcaaatggaagatattggtcccaatatctgtatagcatggaatatgttga

SEQ ID NO: 55283 - protein, 280 aa, Glycine max
  peptide (1)..(280): Ceres Seq. ID no. 15176247
  misc_feature (14)..(57): Pfam Name: F-box domain Pfam Description: F-box domain
  misc_feature (233)..(280): Homolog of NCBI NO: 18308222 NR Description: unknown protein [Oryza sativa]
  misc_feature (31)..(205): Homolog of NCBI NO: 7452420 NR Description: hypothetical protein A_TM018A10.10 - Arabidopsis
  misc_feature (139)..(280): Homolog of NCBI NO: 28393062 NR Description: putative F-box protein [Arabidopsis thaliana]
  misc_feature (1)..(280): Homolog of NCBI NO: 31193913 NR Description: unknown protein [Oryza sativa (japonica
  misc_feature (8)..(280): Homolog of NCBI NO: 18411435 NR Description: F-box protein family [Arabidopsis thaliana]
MSEVRNKVDFIQLLGPDMSIKILTHLDDPCDLIRVSSVSSSWHRFVIEHGLCKQLCLKMFPEISGVAHIIELDNIIEPLSNTLGSYVSWESHKRNHRVYAFLASGLTPMRKNCISKAISASSTDNYPEESILHTLEPGDRTEYRASYWSSKGESDPSVPETLVYELASKLCLVTEIYVHPFQAYFQHGFPIYSAKAVRFRMGHSKHPMELESPVDNMAANHVLGNNQFIWTYTSPEFPMLQENRLQKFKLPEPVLCIGGVLLVELLGRVQKQEMDELFYI

SEQ ID NO: 55284 - protein, 263 aa, Glycine max
  peptide (1)..(263): Ceres Seq. ID no. 15176248
  misc_feature (1)..(40): Pfam Name: F-box domain Pfam Description: F-box domain
  misc_feature (216)..(263): Homolog of NCBI NO: 18308222 NR Description: unknown protein [Oryza sativa]
  misc_feature (14)..(188): Homolog of NCBI NO: 7452420 NR Description: hypothetical protein A_TM018A10.10 - Arabidopsis
  misc_feature (122)..(263): Homolog of NCBI NO: 28393062 NR Description: putative F-box protein [Arabidopsis thaliana]
  misc_feature (1)..(263): Homolog of NCBI NO: 31193913 NR Description: unknown protein [Oryza sativa (japonica
  misc_feature (1)..(263): Homolog of NCBI NO: 18411435 NR Description: F-box protein family [Arabidopsis thaliana]
MSIKILTHLDDPCDLIRVSSVSSSWHRFVIEHGLCKQLCLKMFPEISGVAHIIELDNIIEPLSNTLGSYVSWESHKRNHRVYAFLASGLTPMRKNCISKAISASSTDNYPEESILHTLEPGDRTEYRASYWSSKGESDPSVPETLVYELASKLCLVTEIYVHPFQAYFQHGFPIYSAKAVRFRMGHSKHPMELESPVDNMAANHVLGNNQFIWTYTSPEFPMLQENRLQKFKLPEPVLCIGGVLLVELLGRVQKQEMDELFYI

SEQ ID NO: 55285 - protein, 222 aa, Glycine max
  peptide (1)..(222): Ceres Seq. ID no. 15176249
  misc_feature (175)..(222): Homolog of NCBI NO: 18308222 NR Description: unknown protein [Oryza sativa]
  misc_feature (1)..(147): Homolog of NCBI NO: 7452420 NR Description: hypothetical protein A_TM018A10.10 - Arabidopsis
  misc_feature (81)..(222): Homolog of NCBI NO: 28393062 NR Description: putative F-box protein [Arabidopsis thaliana]
  misc_feature (1)..(222): Homolog of NCBI NO: 31193913 NR Description: unknown protein [Oryza sativa (japonica
  misc_feature (1)..(222): Homolog of NCBI NO: 18411435 NR Description: F-box protein family [Arabidopsis thaliana]
MFPEISGVAHIIELDNIIEPLSNTLGSYVSWESHKRNHRVYAFLASGLTPMRKNCISKAISASSTDNYPEESILHTLEPGDRTEYRASYWSSKGESDPSVPETLVYELASKLCLVTEIYVHPFQAYFQHGFPIYSAKAVRFRMGHSKHPMELESPVDNMAANHVLGNNQFIWTYTSPEFPMLQENRLQKFKLPEPVLCIGGVLLVELLGRVQKQEMDELFYI

SEQ ID NO: 55286 - DNA, 1213 bp, Glycine max
  misc_feature (1)..(1213): Ceres Seq. ID no. 14308095
caaggtgaattctctctctctctctctctctcaaatcatcctctgcttttctctttcttttctttgaattttcatggctgtagctactgcagtggccaaaggacaatattggacttataattgtgagagtagtcatggaggggatggctcccaattcatgtgcaaggccagttgtagagaagaaagcaaggccacaagagcaactgaattgtccaaggtgcaattcaaccaatacaaagttctgctactacaacaactacagcctcacacagccaagatacttctgcaagacttgtagaaggtattggacagaaggagggtctctgagaaacgttccagttggaggtggttcaagaaagaacaagaaggtctctgtgacagcttcatcatcaccaaaggttccagacctaaacccaccaaaccactcagctatctcatcacacaaccctaaaataatgcatggtggccaagatctcaatcttgctttcccagccatggaaaagtaccatcatcatggcatgtcaccttataacgttgagatgcaaaacagtaacaccaccactactcatcatcatcaccaaacctctccttcttgttctgctcctccagctaattctctttcagctcttgagctacttaggtccagcatggcatctaggggtttgaacccttatgctcctaattcttccttgatgccaaactcaacaaacaacaacaacaatgccctttacccatcagggtttcccatgcaagaagttaaacctagtcttaacttttcttcagttgatgggatcggaaataatagatcatatgatcaagagaggggtggtggcagagttttgttcccttttggagacgtcaaacagctttctgctgctgcaggtgctgctgatcaagtggaacaacaacaacaaggaaattcaactggttattggactggaatgattggtgaaggaacatggtaagaaagaaaaaaaaaagggaggacaaaggaaaattaagagaacatgcattaataacattatatttatatatcttttttttttattttggtcttccctttttttttctctttccacaatatggatatcatttggcagctgaagttgttcaggaactaacaataggacacacatggttaattatttctttgttttgtacacacctcctttgttttatttgagagaacgtaagaggattttacttctaaaag

SEQ ID NO: 55287 - protein, 276 aa, Glycine max
  peptide (1)..(276): Ceres Seq. ID no. 14308096
  misc_feature (19)..(80): Pfam Name: Dof domain, zinc finger Pfam Description: Dof domain, zinc finger
  misc_feature (15)..(171): Homolog of NCBI NO: 38344272 NR Description: OSJNBa0005N02.10 [Oryza sativa (japonica
  misc_feature (15)..(171): Homolog of NCBI NO: 4996640 NR Description: Dof zinc finger protein [Oryza sativa]
  misc_feature (15)..(182): Homolog of NCBI NO: 4996642 NR Description: Dof zinc finger protein [Oryza sativa]
  misc_feature (1)..(195): Homolog of NCBI NO: 7489130 NR Description: finger protein Dof - common tobacco (fragment)
  misc_feature (1)..(195): Homolog of NCBI NO: 7489124 NR Description: finger protein BBF1.1 - common tobacco (fragment)
  misc_feature (16)..(223): Homolog of NCBI NO: 30695501 NR Description: Dof zinc finger transcription factor (DAG1)
  misc_feature (16)..(223): Homolog of NCBI NO: 15228621 NR Description: Dof zinc finger transcription factor (DAG1)
  misc_feature (1)..(225): Homolog of NCBI NO: 30690446 NR Description: Dof zinc finger protein [Arabidopsis thaliana]
  misc_feature (1)..(225): Homolog of NCBI NO: 25352313 NR Description: probable DOF zinc finger protein
  misc_feature (1)..(225): Homolog of NCBI NO: 24211633 NR Description: DOF zinc finger protein DAG2 (Dof affecting
MEGMAPNSCARPVVEKKARPQEQLNCPRCNSTNTKFCYYNNYSLTQPRYFCKTCRRYWTEGGSLRNVPVGGGSRKNKKVSVTASSSPKVPDLNPPNHSAISSHNPKIMHGGQDLNLAFPAMEKYHHHGMSPYNVEMQNSNTTTTHHHHQTSPSCSAPPANSLSALELLRSSMASRGLNPYAPNSSLMPNSTNNNNNALYPSGFPMQEVKPSLNFSSVDGIGNNRSYDQERGGGRVLFPFGDVKQLSAAAGAADQVEQQQQGNSTGYWTGMIGEGTW

SEQ ID NO: 55288 - protein, 273 aa, Glycine max
  peptide (1)..(273): Ceres Seq. ID no. 14308097
  misc_feature (16)..(77): Pfam Name: Dof domain, zinc finger Pfam Description: Dof domain, zinc finger
  misc_feature (12)..(168): Homolog of NCBI NO: 38344272 NR Description: OSJNBa0005N02.10 [Oryza sativa (japonica
  misc_feature (12)..(168): Homolog of NCBI NO: 4996640 NR Description: Dof zinc finger protein [Oryza sativa]
  misc_feature (12)..(179): Homolog of NCBI NO: 4996642 NR Description: Dof zinc finger protein [Oryza sativa]
  misc_feature (1)..(192): Homolog of NCBI NO: 7489130 NR Description: finger protein Dof - common tobacco (fragment)
  misc_feature (1)..(192): Homolog of NCBI NO: 7489124 NR Description: finger protein BBF1.1 - common tobacco (fragment)
  misc_feature (13)..(220): Homolog of NCBI NO: 30695501 NR Description: Dof zinc finger transcription factor (DAG1)
  misc_feature (13)..(220): Homolog of NCBI NO: 15228621 NR Description: Dof zinc finger transcription factor (DAG1)
  misc_feature (1)..(222): Homolog of NCBI NO: 30690446 NR Description: Dof zinc finger protein [Arabidopsis thaliana]
  misc_feature (1)..(222): Homolog of NCBI NO: 25352313 NR Description: probable DOF zinc finger protein
  misc_feature (1)..(222): Homolog of NCBI NO: 24211633 NR Description: DOF zinc finger protein DAG2 (Dof affecting
MAPNSCARPVVEKKARPQEQLNCPRCNSTNTKFCYYNNYSLTQPRYFCKTCRRYWTEGGSLRNVPVGGGSRKNKKVSVTASSSPKVPDLNPPNHSAISSHNPKIMHGGQDLNLAFPAMEKYHHHGMSPYNVEMQNSNTTTTHHHHQTSPSCSAPPANSLSALELLRSSMASRGLNPYAPNSSLMPNSTNNNNNALYPSGFPMQEVKPSLNFSSVDGIGNNRSYDQERGGGRVLFPFGDVKQLSAAAGAADQVEQQQQGNSTGYWTGMIGEGTW

SEQ ID NO: 55289 - protein, 169 aa, Glycine max
  peptide (1)..(169): Ceres Seq. ID no. 14308098
  misc_feature (1)..(64): Homolog of NCBI NO: 38344272 NR Description: OSJNBa0005N02.10 [Oryza sativa (japonica
  misc_feature (1)..(64): Homolog of NCBI NO: 4996640 NR Description: Dof zinc finger protein [Oryza sativa]
  misc_feature (1)..(75): Homolog of NCBI NO: 4996642 NR Description: Dof zinc finger protein [Oryza sativa]
  misc_feature (1)..(88): Homolog of NCBI NO: 7489130 NR Description: finger protein Dof - common tobacco (fragment)
  misc_feature (1)..(88): Homolog of NCBI NO: 7489124 NR Description: finger protein BBF1.1 - common tobacco (fragment)
  misc_feature (1)..(116): Homolog of NCBI NO: 30695501 NR Description: Dof zinc finger transcription factor (DAG1)
  misc_feature (1)..(116): Homolog of NCBI NO: 15228621 NR Description: Dof zinc finger transcription factor (DAG1)
  misc_feature (1)..(118): Homolog of NCBI NO: 30690446 NR Description: Dof zinc finger protein [Arabidopsis thaliana]
  misc_feature (1)..(118): Homolog of NCBI NO: 25352313 NR Description: probable DOF zinc finger protein
  misc_feature (1)..(118): Homolog of NCBI NO: 24211633 NR Description: DOF zinc finger protein DAG2 (Dof affecting
MHGGQDLNLAFPAMEKYHHHGMSPYNVEMQNSNTTTTHHHHQTSPSCSAPPANSLSALELLRSSMASRGLNPYAPNSSLMPNSTNNNNNALYPSGFPMQEVKPSLNFSSVDGIGNNRSYDQERGGGRVLFPFGDVKQLSAAAGAADQVEQQQQGNSTGYWTGMIGEGTW

SEQ ID NO: 55290 - DNA, 1206 bp, Glycine max
  misc_feature (1)..(1206): Ceres Seq. ID no. 15170911
atcactctgttaaaagcttatcaacttttctctttctctctggcgaatatgctttcttggaaagttctcctcgtctccgccgccgtcttgttcgcggcgttaggcctcagagtctctcttccagtcgccgccaccaacctccctcttctttggagtttcttcctcttgtgtttcaagcctccttacctcttcgttgttctcaacgccatcatcatctccatcgtcgcttcttcacggtttcatcactcatcaaaccctcaatctccggagccaactcctccacgtgttgaatccatgcccgctcccaccgttccagaaccaccgcttttccaagtaaaagccgttctcgaagtggagaagaaagtaatcgaagaagatgttgtggcactaaagagaaaagactcgacggagattccatcgccggaggagaagccactggtgtctgctaggttcactcaccggaaattccttaaatccagttcagaaggtgggagagcgttgagagtggtggctaaggcaaaacgggacgagacgttggagagcacgtggaaggccataacggagggtcgatcaatgccattgagcaggcacatgaagaagtccgacatgtggcacaaccgcaacgtgaccccacaaccccaagagacattcaacgatgcactgagtgtgtcgtccgggaggctgcggaaagaaccctcgctgagtcaagacgagttgaatcgtcgcgtcgaagccttcatacaaaagttcaaccaagagatgaggctgcaaagacaacaatccttagaacagtacatgcagatgattaaccgcggtgccgcttaatctcaacctcaacataatcaatattttcattttacagaacaaaaaaacatatatagtgtaagtatttctgcaggtgtagacagtaggggtatttattttattgccatatattagtttatggttgggttaggctcatcatcattatttctttaatttgtttgttttgtgcctttatatgctccacataccaaaaatgtggttcatgttcaatatcaattagctagctagctagaaaacaaacacaccaaaaaaacacttcggggaacttaggattaatgttgttcctctttgtaatttttcggggtcattttttttagtcaaacctctttctctgtaattaataccatgaatgtaagcctgtaacgtttagtttgctattct

SEQ ID NO: 55291 - protein, 274 aa, Glycine max
  peptide (1)..(274): Ceres Seq. ID no. 15170912
  misc_feature (21)..(90): Pfam Name: Cotton fibre expressed protein Pfam Description: Cotton fibre expressed protein
  misc_feature (137)..(207): Homolog of NCBI NO: 34898720 NR Description: putative fiber protein [Oryza sativa (japonica
  misc_feature (132)..(264): Homolog of NCBI NO: 7484716 NR Description: fiber protein 1 [imported] - upland cotton
  misc_feature (17)..(104): Homolog of NCBI NO: 7484716 NR Description: fiber protein 1 [imported] - upland cotton
  misc_feature (164)..(273): Homolog of NCBI NO: 7484716 NR Description: fiber protein 1 [imported] - upland cotton
  misc_feature (48)..(105): Homolog of NCBI NO: 15239605 NR Description: cotton fiber expressed protein 1-related protein
  misc_feature (132)..(272): Homolog of NCBI NO: 15239605 NR Description: cotton fiber expressed protein 1-related protein
  misc_feature (18)..(90): Homolog of NCBI NO: 25373438 NR Description: hypothetical protein F11P17.2 [imported] -
  misc_feature (111)..(272): Homolog of NCBI NO: 25373438 NR Description: hypothetical protein F11P17.2 [imported] -
  misc_feature (17)..(90): Homolog of NCBI NO: 30696552 NR Description: cotton fiber expressed protein -related
  misc_feature (111)..(272): Homolog of NCBI NO: 30696552 NR Description: cotton fiber expressed protein -related
ITLLKAYQLFSFSLANMLSWKVLLVSAAVLFAALGLRVSLPVAATNLPLLWSFFLLCFKPPYLFVVLNAIIISIVASSRFHHSSNPQSPEPTPPRVESMPAPTVPEPPLFQVKAVLEVEKKVIEEDVVALKRKDSTEIPSPEEKPLVSARFTHRKFLKSSSEGGRALRVVAKAKRDETLESTWKAITEGRSMPLSRHMKKSDMWHNRNVTPQPQETFNDALSVSSGRLRKEPSLSQDELNRRVEAFIQKFNQEMRLQRQQSLEQYMQMINRGAA

SEQ ID NO: 55292 - protein, 258 aa, Glycine max
  peptide (1)..(258): Ceres Seq. ID no. 15170913
  misc_feature (5)..(74): Pfam Name: Cotton fibre expressed protein Pfam Description: Cotton fibre expressed protein
  misc_feature (121)..(191): Homolog of NCBI NO: 34898720 NR Description: putative fiber protein [Oryza sativa (japonica
  misc_feature (116)..(248): Homolog of NCBI NO: 7484716 NR Description: fiber protein 1 [imported] - upland cotton
  misc_feature (1)..(88): Homolog of NCBI NO: 7484716 NR Description: fiber protein 1 [imported] - upland cotton
  misc_feature (148)..(257): Homolog of NCBI NO: 7484716 NR Description: fiber protein 1 [imported] - upland cotton
  misc_feature (32)..(89): Homolog of NCBI NO: 15239605 NR Description: cotton fiber expressed protein 1-related protein
  misc_feature (116)..(256): Homolog of NCBI NO: 15239605 NR Description: cotton fiber expressed protein 1-related protein
  misc_feature (2)..(74): Homolog of NCBI NO: 25373438 NR Description: hypothetical protein F11P17.2 [imported] -
  misc_feature (95)..(256): Homolog of NCBI NO: 25373438 NR Description: hypothetical protein F11P17.2 [imported] -
  misc_feature (1)..(74): Homolog of NCBI NO: 30696552 NR Description: cotton fiber expressed protein -related
  misc_feature (95)..(256): Homolog of NCBI NO: 30696552 NR Description: cotton fiber expressed protein -related
MLSWKVLLVSAAVLFAALGLRVSLPVAATNLPLLWSFFLLCFKPPYLFVVLNAIIISIVASSRFHHSSNPQSPEPTPPRVESMPAPTVPEPPLFQVKAVLEVEKKVIEEDVVALKRKDSTEIPSPEEKPLVSARFTHRKFLKSSSEGGRALRVVAKAKRDETLESTWKAITEGRSMPLSRHMKKSDMWHNRNVTPQPQETFNDALSVSSGRLRKEPSLSQDELNRRVEAFIQKFNQEMRLQRQQSLEQYMQMINRGAA

SEQ ID NO: 55293 - protein, 176 aa, Glycine max
  peptide (1)..(176): Ceres Seq. ID no. 15170914
  misc_feature (13)..(169): Pfam Name: Cotton fibre expressed protein Pfam Description: Cotton fibre expressed protein
  misc_feature (19)..(159): Homolog of NCBI NO: 15220310 NR Description: expressed protein [Arabidopsis thaliana]
  misc_feature (1)..(136): Homolog of NCBI NO: 34898720 NR Description: putative fiber protein [Oryza sativa (japonica
  misc_feature (34)..(95): Homolog of NCBI NO: 7484718 NR Description: fiber protein 3 [imported] - upland cotton
  misc_feature (117)..(175): Homolog of NCBI NO: 34898720 NR Description: putative fiber protein [Oryza sativa (japonica
  misc_feature (39)..(109): Homolog of NCBI NO: 34898720 NR Description: putative fiber protein [Oryza sativa (japonica
  misc_feature (34)..(166): Homolog of NCBI NO: 7484716 NR Description: fiber protein 1 [imported] - upland cotton
  misc_feature (66)..(175): Homolog of NCBI NO: 7484716 NR Description: fiber protein 1 [imported] - upland cotton
  misc_feature (34)..(174): Homolog of NCBI NO: 15239605 NR Description: cotton fiber expressed protein 1-related protein
  misc_feature (13)..(174): Homolog of NCBI NO: 25373438 NR Description: hypothetical protein F11P17.2 [imported] -
  misc_feature (13)..(174): Homolog of NCBI NO: 30696552 NR Description: cotton fiber expressed protein -related
MPAPTVPEPPLFQVKAVLEVEKKVIEEDVVALKRKDSTEIPSPEEKPLVSARFTHRKFLKSSSEGGRALRVVAKAKRDETLESTWKAITEGRSMPLSRHMKKSDMWHNRNVTPQPQETFNDALSVSSGRLRKEPSLSQDELNRRVEAFIQKFNQEMRLQRQQSLEQYMQMINRGAA

SEQ ID NO: 55294 - DNA, 1301 bp, Glycine max
  misc_feature (1)..(1301): Ceres Seq. ID no. 14316263
aggatcacagtaggagataaggagagcattcaccattttcttgtggtttggtttcctagagacactaagtactcccatggaacaaaacaacaaaagccttgtttcttctaaattcttatgtttatgtttgttgatcaccttgatcagcattattgttgctccacaagcggaagcagcacgagcatttttcgtgtttggcgattcgcttgtagacaacgggaacaacaatttcttggccaccacggcgcgtgccgattcatatccttatggcattgattctgcatctcatagagcctctggtcgtttctccaatggcctcaacatgcctgaccttatcagtgagaaaattggctcagaacccacattaccatatttgagtccacagctcaatggtgaaaggctgcttgttggtgcaaactttgcttctgctgggataggaattctcaacgacactggaattcagtttataaacataatccgaattacagaacaattggcatacttcaaacagtatcagcagagggtgagtgcactaattggagaagagcagactcgaaatttagtgaacaaagcattggtgctcataaccttaggtggcaatgattttgtcaacaactattatttggttcctttctctgccagatcccgcgaatatgctcttccagactacgttgtcttcctcatttcggagtatcgtaaaattcttgcgaatctgtatgaattgggggcacgaagggttctagtgacaggcacgggaccactgggttgcgtgccagcagaattggctatgcacagccaaaacggagaatgtgcgactgagctgcaacgagccgttaacctgttcaatcctcaactcgtccaactactgcacgaacttaacactcaaattggctccgatgtcttcatttccgcaaacgccttcaccatgcatttggatttcgttagtaacccacaagcctatgggtttgtcacgtcaaaagtagcatgctgtggtcaaggagcatacaatggaatcggactctgcactccagcttcaaacttgtgcccaaacagggatttatatgcattttgggaccccttccatccatcagagagagcaaatagattgatcgtggataaattcatgactggatccaccgaatacatgcaccctatgaaccttagtacaattattgctttagattctacaacctaatgcaccattactgtatgagttgtcttcttttcttgtctatgcacacctagttcctacaagatattgtatttttcttgaatgtttaaaactatgacgttaattactc

SEQ ID NO: 55295 - protein, 372 aa, Glycine max
  peptide (1)..(372): Ceres Seq. ID no. 14316264
  misc_feature (37)..(348): Pfam Name: GDSL-like Lipase/Acylhydrolase Pfam Description: GDSL-like Lipase/Acylhydrolase
  misc_feature (36)..(365): Homolog of NCBI NO: 15227849 NR Description: GDSL-motif lipase/hydrolase protein [Arabidopsis
  misc_feature (27)..(196): Homolog of NCBI NO: 37789825 NR Description: putative GDSL-motif lipase [Vitis vinifera]
  misc_feature (22)..(368): Homolog of NCBI NO: 15238814 NR Description: GDSL-motif lipase/hydrolase protein [Arabidopsis
  misc_feature (16)..(370): Homolog of NCBI NO: 37535146 NR Description: putative early nodulin gene (Enod) related
  misc_feature (16)..(370): Homolog of NCBI NO: 22758315 NR Description: putative early nodulin gene (Enod) related
  misc_feature (11)..(370): Homolog of NCBI NO: 15235421 NR Description: GDSL-motif lipase/hydrolase protein [Arabidopsis
  misc_feature (16)..(372): Homolog of NCBI NO: 28071322 NR Description: P0705A05.30 [Oryza sativa (japonica
  misc_feature (18)..(369): Homolog of NCBI NO: 32489520 NR Description: OSJNBa0043L24.11 [Oryza sativa (japonica
  misc_feature (16)..(371): Homolog of NCBI NO: 15229265 NR Description: GDSL-motif lipase/hydrolase protein [Arabidopsis
  misc_feature (7)..(372): Homolog of NCBI NO: 15242808 NR Description: GDSL-motif lipase/hydrolase protein [Arabidopsis
MEQNNKSLVSSKFLCLCLLITLISIIVAPQAEAARAFFVFGDSLVDNGNNNFLATTARADSYPYGIDSASHRASGRFSNGLNMPDLISEKIGSEPTLPYLSPQLNGERLLVGANFASAGIGILNDTGIQFINIIRITEQLAYFKQYQQRVSALIGEEQTRNLVNKALVLITLGGNDFVNNYYLVPFSARSREYALPDYVVFLISEYRKILANLYELGARRVLVTGTGPLGCVPAELAMHSQNGECATELQRAVNLFNPQLVQLLHELNTQIGSDVFISANAFTMHLDFVSNPQAYGFVTSKVACCGQGAYNGIGLCTPASNLCPNRDLYAFWDPFHPSERANRLIVDKFMTGSTEYMHPMNLSTIIALDSTT

SEQ ID NO: 55296 - protein, 290 aa, Glycine max
  peptide (1)..(290): Ceres Seq. ID no. 14316265
  misc_feature (1)..(266): Pfam Name: GDSL-like Lipase/Acylhydrolase Pfam Description: GDSL-like Lipase/Acylhydrolase
  misc_feature (1)..(283): Homolog of NCBI NO: 15227849 NR Description: GDSL-motif lipase/hydrolase protein [Arabidopsis
  misc_feature (1)..(114): Homolog of NCBI NO: 37789825 NR Description: putative GDSL-motif lipase [Vitis vinifera]
  misc_feature (1)..(286): Homolog of NCBI NO: 15238814 NR Description: GDSL-motif lipase/hydrolase protein [Arabidopsis
  misc_feature (1)..(288): Homolog of NCBI NO: 37535146 NR Description: putative early nodulin gene (Enod) related
  misc_feature (1)..(288): Homolog of NCBI NO: 22758315 NR Description: putative early nodulin gene (Enod) related
  misc_feature (1)..(288): Homolog of NCBI NO: 15235421 NR Description: GDSL-motif lipase/hydrolase protein [Arabidopsis
  misc_feature (1)..(290): Homolog of NCBI NO: 28071322 NR Description: P0705A05.30 [Oryza sativa (japonica
  misc_feature (1)..(287): Homolog of NCBI NO: 32489520 NR Description: OSJNBa0043L24.11 [Oryza sativa (japonica
  misc_feature (1)..(289): Homolog of NCBI NO: 15229265 NR Description: GDSL-motif lipase/hydrolase protein [Arabidopsis
  misc_feature (1)..(290): Homolog of NCBI NO: 15242808 NR Description: GDSL-motif lipase/hydrolase protein [Arabidopsis
MPDLISEKIGSEPTLPYLSPQLNGERLLVGANFASAGIGILNDTGIQFINIIRITEQLAYFKQYQQRVSALIGEEQTRNLVNKALVLITLGGNDFVNNYYLVPFSARSREYALPDYVVFLISEYRKILANLYELGARRVLVTGTGPLGCVPAELAMHSQNGECATELQRAVNLFNPQLVQLLHELNTQIGSDVFISANAFTMHLDFVSNPQAYGFVTSKVACCGQGAYNGIGLCTPASNLCPNRDLYAFWDPFHPSERANRLIVDKFMTGSTEYMHPMNLSTIIALDSTT

SEQ ID NO: 55297 - DNA, 1624 bp, Glycine max
  misc_feature (1)..(1624): Ceres Seq. ID no. 15169199
gaagaaaaaataattaaaaatagaaaagatggtggaaagataatgtggatctgattcaaaccacacgattccacgaccttattttggagccgcggtggcggtagcggtggccggcgattgtagcggcgtaggagcaagaaatggttttatgttgtgaggaagattgttaagctgtgggaatatgtcattgagaagcatagtccgtgaactcaaggagatgagagatggaataggaagcacatcaaagcggggtgcagaaagcaagcatcggctcagtcggacaaagtcacatgtagctccagatgttcttgcaactccatttgaacctattcaacagggacaatgggcaaatctaccatcagaattgcttttggacataatccagagggtcgaagagagtgagacatcttggcctgcccgtgctgttgttgtcttttgtgcttcagtatgtaaatcatggaggtccattacaagagagattgtcaagactcctgaacaatgtggaaggatcacatttcccatttcattgaagcagccgggtccgcgtgattctccaatacagtgctttatcaggaggaacaaagaaacttctacatatctattgtactttggtctggttccatcagagaatgacagtaataagttgttattagctgccaaaaggataagaagggcaacaggctccggttttgtcatatccttggctgctgatgatttttctcgagccagcaacaaatatgttggtaaactaaggtctaactttttgggtaccaagttcaccgtatatgacagtcaagctccacatgattctgcaattcaatcaaattgtcaatctagtaggagatttcattctaagcaggtgtcaccaagagttccagcatgtagctatcttgtcagcactgtttcctacgagctgaatgtcctttgcactagagggccaagaagaatgcattgtgtcatgaactctatacctgtctcagctattcaggaaggaggcaacgccccaactccaacatctttccctcaaatatttgatgaacctttttctccatcaccagcactgaaagaaaaagctcaagtcacagatttaaactctgcaagcttatcagagccaccagtattgagccaaggctcaaccgagcaattagcactgaaaaacaaggctcccagatggcatgagcagctacagtgctggtgtctaaacttcaagggtcgcgtttcagtggcttctgttaagaactttcaacttgtagctgctgttgatccatctcataatatttctgccgaggagcaagaaaaggtaatcttgcagtttggaaagattggaaaagacatatttaccatggattactgttatccactctctactttccaagccttcgccatctgcttgagcagctttgacactaaacctgcctgtgaatgagaggtgttgcattactacattgtaatcgtcatctgctgagttgttgattgccaatcctggtggcatacagctgaaatcatagctgtgctgccgttggaatcccccccttataaattggttgttgattctggaatttattctgtcttttgttttgtggtcctgtaaaattaaattaaatgaagtttagtgaattctatg

SEQ ID NO: 55298 - protein, 414 aa, Glycine max
  peptide (1)..(414): Ceres Seq. ID no. 15169200
  misc_feature (119)..(414): Pfam Name: Tub family Pfam Description: Tub family
  misc_feature (281)..(372): Homolog of NCBI NO: 32480039 NR Description: OSJNBa0039K24.2 [Oryza sativa (japonica
  misc_feature (1)..(302): Homolog of NCBI NO: 32480039 NR Description: OSJNBa0039K24.2 [Oryza sativa (japonica
  misc_feature (298)..(414): Homolog of NCBI NO: 15223772 NR Description: F-box containing tubby family protein
  misc_feature (1)..(321): Homolog of NCBI NO: 15223772 NR Description: F-box containing tubby family protein
  misc_feature (1)..(414): Homolog of NCBI NO: 30690823 NR Description: F-box containing tubby family protein
  misc_feature (1)..(414): Homolog of NCBI NO: 25409071 NR Description: probable Tub family protein [imported] -
  misc_feature (1)..(414): Homolog of NCBI NO: 34899264 NR Description: contains ESTs
  misc_feature (1)..(414): Homolog of NCBI NO: 30793997 NR Description: putative F-box containing tubby family protein
  misc_feature (1)..(414): Homolog of NCBI NO: 30680328 NR Description: F-box containing tubby family protein
  misc_feature (1)..(414): Homolog of NCBI NO: 7635492 NR Description: tubby-like protein [Cicer arietinum]
MSLRSIVRELKEMRDGIGSTSKRGAESKHRLSRTKSHVAPDVLATPFEPIQQGQWANLPSELLLDIIQRVEESETSWPARAVVVFCASVCKSWRSITREIVKTPEQCGRITFPISLKQPGPRDSPIQCFIRRNKETSTYLLYFGLVPSENDSNKLLLAAKRIRRATGSGFVISLAADDFSRASNKYVGKLRSNFLGTKFTVYDSQAPHDSAIQSNCQSSRRFHSKQVSPRVPACSYLVSTVSYELNVLCTRGPRRMHCVMNSIPVSAIQEGGNAPTPTSFPQIFDEPFSPSPALKEKAQVTDLNSASLSEPPVLSQGSTEQLALKNKAPRWHEQLQCWCLNFKGRVSVASVKNFQLVAAVDPSHNISAEEQEKVILQFGKIGKDIFTMDYCYPLSTFQAFAICLSSFDTKPACE

SEQ ID NO: 55299 - protein, 402 aa, Glycine max
  peptide (1)..(402): Ceres Seq. ID no. 15169201
  misc_feature (107)..(402): Pfam Name: Tub family Pfam Description: Tub family
  misc_feature (269)..(360): Homolog of NCBI NO: 32480039 NR Description: OSJNBa0039K24.2 [Oryza sativa (japonica
  misc_feature (1)..(290): Homolog of NCBI NO: 32480039 NR Description: OSJNBa0039K24.2 [Oryza sativa (japonica
  misc_feature (286)..(402): Homolog of NCBI NO: 15223772 NR Description: F-box containing tubby family protein
  misc_feature (1)..(309): Homolog of NCBI NO: 15223772 NR Description: F-box containing tubby family protein
  misc_feature (1)..(402): Homolog of NCBI NO: 30690823 NR Description: F-box containing tubby family protein
  misc_feature (1)..(402): Homolog of NCBI NO: 25409071 NR Description: probable Tub family protein [imported] -
  misc_feature (1)..(402): Homolog of NCBI NO: 34899264 NR Description: contains ESTs
  misc_feature (1)..(402): Homolog of NCBI NO: 30793997 NR Description: putative F-box containing tubby family protein
  misc_feature (1)..(402): Homolog of NCBI NO: 30680328 NR Description: F-box containing tubby family protein
  misc_feature (1)..(402): Homolog of NCBI NO: 7635492 NR Description: tubby-like protein [Cicer arietinum]
MRDGIGSTSKRGAESKHRLSRTKSHVAPDVLATPFEPIQQGQWANLPSELLLDIIQRVEESETSWPARAVVVFCASVCKSWRSITREIVKTPEQCGRITFPISLKQPGPRDSPIQCFIRRNKETSTYLLYFGLVPSENDSNKLLLAAKRIRRATGSGFVISLAADDFSRASNKYVGKLRSNFLGTKFTVYDSQAPHDSAIQSNCQSSRRFHSKQVSPRVPACSYLVSTVSYELNVLCTRGPRRMHCVMNSIPVSAIQEGGNAPTPTSFPQIFDEPFSPSPALKEKAQVTDLNSASLSEPPVLSQGSTEQLALKNKAPRWHEQLQCWCLNFKGRVSVASVKNFQLVAAVDPSHNISAEEQEKVILQFGKIGKDIFTMDYCYPLSTFQAFAICLSSFDTKPACE

SEQ ID NO: 55300 - DNA, 1315 bp, Glycine max
  misc_feature (1)..(1315): Ceres Seq. ID no. 14308867
aacgaaacccgtcgtcaaagtgggtttccggcagagatcatatatcttctagggtgtccacctttgaaattcaatctccaattgagcatcacaaaccctagaaaatcgttccagatgaatacaaaatcgctccaaatcctggtgcactcaccggacctcggaatttcccttcaatccacaaccaaccacgaaaccctttccgatctcaaaaactctcttttccctcaatcacaccaatccttctacttcaccttcaatggcaaacccctccccgacaaaacccctctttcccaattcccccctctctccaccctctctctccgctcccgcctccttggcggcggcggagacggcggcgccaccggagccgagtcccgcgactgctacctcaacatgtacgccgacaagaagcccgacaaggtggaccccaatgaacagcgtctctccaagtggcacaattgcgccctctccaacgaacccttgagagagccctgcgtgatcgataaattggggaatatcttcaacaaggaagcgctggtggaagcgttgttggggaagaagcttcccaaggaatttgggcacatcaagggtttgaaggatatgattaatgttcagctttctgcgattcctggagcggatgatggggcaaagtttcagtgccctgttgcggggcttgaattcaacgggaagtataggtttttcgcgctgaggaattgtgggcatgttttgagtgcgaaggctctgagggaggttaagtcttcgtcgtgtttggtttgtcacaaggagtatgctgacgtggataaggttgtgctcaatgggagtgatgaggaggttgcggttttgagggagaggatggaggaggagaaagctaagattagggagaagaagagtaagaaggttaagaataatggtaatgatgacggtgtgagtttggaagggactaggttgagtggtactaagcatggtgttgatggtaagggtgtagagaaagcttcggctaaggtggaacgaaatgggaaggttggtaatggtaatgttggtgtgaatggtggtgctgctgctgctgccaagcgtttcaaggctgttgatctggccccggcgaatgctacaaaggatgtgtatgcttccatcttcacttcgtcgaggaagtctgagtttaaagaaacttatagctgtaggtctcttcctcttggaagaaactgattcaggtgtctggtatacagttgtctctactgttttattgttatccaatgtactgaattctagtttgtgcctttgtggttatataagtgattgacttttcctgtgaaaaaag

SEQ ID NO: 55301 - protein, 400 aa, Glycine max
  peptide (1)..(400): Ceres Seq. ID no. 14308868
  misc_feature (114)..(338): Pfam Name: Protein of unknown function, DUF602 Pfam Description: Protein of unknown function, DUF602
  misc_feature (177)..(385): Homolog of NCBI NO: 6563236 NR Description: protein x 0001 [Homo sapiens]
  misc_feature (194)..(380): Homolog of NCBI NO: 32484231 NR Description: Unknown (protein for MGC:64388) [Xenopus laevis]
  misc_feature (177)..(385): Homolog of NCBI NO: 30794468 NR Description: RIKEN cDNA 2410001C21 [Mus musculus]
  misc_feature (177)..(385): Homolog of NCBI NO: 34860845 NR Description: similar to 2410001C21Rik protein [Rattus
  misc_feature (115)..(387): Homolog of NCBI NO: 17505406 NR Description: putative N-myristoylated nuclear protein, with a
  misc_feature (115)..(387): Homolog of NCBI NO: 39582965 NR Description: Hypothetical protein CBG20397 [Caenorhabditis
  misc_feature (115)..(388): Homolog of NCBI NO: 19921112 NR Description: CG6443-PA [Drosophila melanogaster]
  misc_feature (115)..(303): Homolog of NCBI NO: 31197425 NR Description: ENSANGP00000002198 [Anopheles gambiae]
  misc_feature (105)..(400): Homolog of NCBI NO: 9759527 NR Description: gene_id:F2C19.3~ref|NP_057491.1~similar to
  misc_feature (45)..(400): Homolog of NCBI NO: 15242923 NR Description: expressed protein [Arabidopsis thaliana]
NETRRQSGFPAEIIYLLGCPPLKFNLQLSITNPRKSFQMNTKSLQILVHSPDLGISLQSTTNHETLSDLKNSLFPQSHQSFYFTFNGKPLPDKTPLSQFPPLSTLSLRSRLLGGGGDGGATGAESRDCYLNMYADKKPDKVDPNEQRLSKWHNCALSNEPLREPCVIDKLGNIFNKEALVEALLGKKLPKEFGHIKGLKDMINVQLSAIPGADDGAKFQCPVAGLEFNGKYRFFALRNCGHVLSAKALREVKSSSCLVCHKEYADVDKVVLNGSDEEVAVLRERMEEEKAKIREKKSKKVKNNGNDDGVSLEGTRLSGTKHGVDGKGVEKASAKVERNGKVGNGNVGVNGGAAAAAKRFKAVDLAPANATKDVYASIFTSSRKSEFKETYSCRSLPLGRN

SEQ ID NO: 55302 - protein, 362 aa, Glycine max
  peptide (1)..(362): Ceres Seq. ID no. 14308869
  misc_feature (76)..(300): Pfam Name: Protein of unknown function, DUF602 Pfam Description: Protein of unknown function, DUF602
  misc_feature (139)..(347): Homolog of NCBI NO: 6563236 NR Description: protein x 0001 [Homo sapiens]
  misc_feature (156)..(342): Homolog of NCBI NO: 32484231 NR Description: Unknown (protein for MGC:64388) [Xenopus laevis]
  misc_feature (139)..(347): Homolog of NCBI NO: 30794468 NR Description: RIKEN cDNA 2410001C21 [Mus musculus]
  misc_feature (139)..(347): Homolog of NCBI NO: 34860845 NR Description: similar to 2410001C21Rik protein [Rattus
  misc_feature (77)..(349): Homolog of NCBI NO: 17505406 NR Description: putative N-myristoylated nuclear protein, with a
  misc_feature (77)..(349): Homolog of NCBI NO: 39582965 NR Description: Hypothetical protein CBG20397 [Caenorhabditis
  misc_feature (77)..(350): Homolog of NCBI NO: 19921112 NR Description: CG6443-PA [Drosophila melanogaster]
  misc_feature (77)..(265): Homolog of NCBI NO: 31197425 NR Description: ENSANGP00000002198 [Anopheles gambiae]
  misc_feature (67)..(362): Homolog of NCBI NO: 9759527 NR Description: gene_id:F2C19.3~ref|NP_057491.1~similar to
  misc_feature (7)..(362): Homolog of NCBI NO: 15242923 NR Description: expressed protein [Arabidopsis thaliana]
MNTKSLQILVHSPDLGISLQSTTNHETLSDLKNSLFPQSHQSFYFTFNGKPLPDKTPLSQFPPLSTLSLRSRLLGGGGDGGATGAESRDCYLNMYADKKPDKVDPNEQRLSKWHNCALSNEPLREPCVIDKLGNIFNKEALVEALLGKKLPKEFGHIKGLKDMINVQLSAIPGADDGAKFQCPVAGLEFNGKYRFFALRNCGHVLSAKALREVKSSSCLVCHKEYADVDKVVLNGSDEEVAVLRERMEEEKAKIREKKSKKVKNNGNDDGVSLEGTRLSGTKHGVDGKGVEKASAKVERNGKVGNGNVGVNGGAAAAAKRFKAVDLAPANATKDVYASIFTSSRKSEFKETYSCRSLPLGRN

SEQ ID NO: 55303 - protein, 269 aa, Glycine max
  peptide (1)..(269): Ceres Seq. ID no. 14308870
  misc_feature (1)..(207): Pfam Name: Protein of unknown function, DUF602 Pfam Description: Protein of unknown function, DUF602
  misc_feature (46)..(254): Homolog of NCBI NO: 6563236 NR Description: protein x 0001 [Homo sapiens]
  misc_feature (63)..(249): Homolog of NCBI NO: 32484231 NR Description: Unknown (protein for MGC:64388) [Xenopus laevis]
  misc_feature (46)..(254): Homolog of NCBI NO: 30794468 NR Description: RIKEN cDNA 2410001C21 [Mus musculus]
  misc_feature (46)..(254): Homolog of NCBI NO: 34860845 NR Description: similar to 2410001C21Rik protein [Rattus
  misc_feature (1)..(256): Homolog of NCBI NO: 17505406 NR Description: putative N-myristoylated nuclear protein, with a
  misc_feature (1)..(256): Homolog of NCBI NO: 39582965 NR Description: Hypothetical protein CBG20397 [Caenorhabditis
  misc_feature (1)..(257): Homolog of NCBI NO: 19921112 NR Description: CG6443-PA [Drosophila melanogaster]
  misc_feature (1)..(172): Homolog of NCBI NO: 31197425 NR Description: ENSANGP00000002198 [Anopheles gambiae]
  misc_feature (1)..(269): Homolog of NCBI NO: 9759527 NR Description: gene_id:F2C19.3~ref|NP_057491.1~similar to
  misc_feature (1)..(269): Homolog of NCBI NO: 15242923 NR Description: expressed protein [Arabidopsis thaliana]
MYADKKPDKVDPNEQRLSKWHNCALSNEPLREPCVIDKLGNIFNKEALVEALLGKKLPKEFGHIKGLKDMINVQLSAIPGADDGAKFQCPVAGLEFNGKYRFFALRNCGHVLSAKALREVKSSSCLVCHKEYADVDKVVLNGSDEEVAVLRERMEEEKAKIREKKSKKVKNNGNDDGVSLEGTRLSGTKHGVDGKGVEKASAKVERNGKVGNGNVGVNGGAAAAAKRFKAVDLAPANATKDVYASIFTSSRKSEFKETYSCRSLPLGRN

SEQ ID NO: 55304 - DNA, 1142 bp, Glycine max
  misc_feature (1)..(1142): Ceres Seq. ID no. 15170370
attattttctcttcatcaatatgtgttgttagacaagtacagcatggctgccttgaaattattgggaaaattgcctgcttatgcaaacttaagcttctaagaattggtcaggaacattcatgttgaaaaggacaaaacactgggtagacttttggtagttgcaaaattcacatcatattttagctagcaagttgatttggaatttttattaattgacatacttgtggactttattttagtcaaagttgaaatttgacttgtttaaaaaatttatttctcttcattcctgtagataaatgccttatgcatggcattttatgctcgatctgaagaagctcgtcaaagtcatgctacacaaaattttgctttgagagcacttgcattggaagatgcactatctaaaggacttccaattgagacagaaatagcatctttgcagtcttatcttggaagcacagataaagattcagttttggatttggtgctagcatcccttcctgaagaaacacgaagcaacggcacagacacacaactgcagttaaagcagaagtttgatgccttaaaaggtagtgtaagacacttcagcttcttcccaccgggagggggaggtatgttggcacattctttggcacatgtagcatcctggttgaaggttagggaagacaatcaatctggtgatgggatcgaatctgtgatcaataaagttgaagtttatttggcagaaggaaaacttgctgaagcagcagcttgtctagaagaaagtgtgagaggcacacaagctgcagaaattgttgcaggttgggtgaggcaagcaagaaacagggctatttctgagcaagcagtgctgcttcttcaatcctatgccaattcccttagctttacatgattcttaaattttgaatatttacaaaaccatgtgaattcaatacatggcagagattatctttggcggattattccaacgggaattattgacctatgaggaaaaaaaataacgtttttgtttcataggagcagaaattagttgattctgtgaattctatgcaactccagtggcattggagttttgaccgaagtgatatcaggctctgtataattttgccttttgttttacctgaataacagaaatgttgcattgcaac

SEQ ID NO: 55305 - protein, 192 aa, Glycine max
  peptide (1)..(192): Ceres Seq. ID no. 15170371
  misc_feature (1)..(81): Homolog of NCBI NO: 7487220 NR Description: hypothetical protein T19P19.80 - Arabidopsis
  misc_feature (34)..(192): Homolog of NCBI NO: 7487220 NR Description: hypothetical protein T19P19.80 - Arabidopsis
  misc_feature (1)..(192): Homolog of NCBI NO: 32492176 NR Description: OSJNBb0034I13.6 [Oryza sativa (japonica
  misc_feature (1)..(192): Homolog of NCBI NO: 18420505 NR Description: expressed protein [Arabidopsis thaliana]
MAFYARSEEARQSHATQNFALRALALEDALSKGLPIETEIASLQSYLGSTDKDSVLDLVLASLPEETRSNGTDTQLQLKQKFDALKGSVRHFSFFPPGGGGMLAHSLAHVASWLKVREDNQSGDGIESVINKVEVYLAEGKLAEAAACLEESVRGTQAAEIVAGWVRQARNRAISEQAVLLLQSYANSLSFT

SEQ ID NO: 55306 - DNA, 1507 bp, Glycine max
  misc_feature (1)..(1507): Ceres Seq. ID no. 12607536
aggatgatctgggagctttgaggtagctatcttattgaaagagtaacttaacctctatgtgaatgtgtgtgtataagatcaatcccttgccatattagtttccctttgtattttgtctcacttaaagaaaataaaatattagatgggaagcgttttatctctttctctgttatgaattctattagcctgaaatgaattttctttttaagattatatggccgagtggctgagttgatttcaattgatataaacctctatttcccatatgatattttccaagcatgttttctactaaaagtattgtgatcactgacagaaaatgtttttaaaagttcatcgtttattgtattcaagagattttcccctagtatatgattggccgtttatatgtgattgctggacactggtgtttatgtagtaggtatactgtgaacattggagttaactttggatttgtgagcatcgggtagctcatttttattcaagtttgatataattttaatttgtttgttcatattttaatgtctacaagtgcaacccttaatctattagccattgatatgtcttgtctatattgttaaatttcttacacatctttttccacagccaataggtttggggaaaattgcaaagtttattaatgctgggaagatagattcttctgaactgattacaatgaaaacactaaaggttttatgactgttacctcacttcttctggaaatgcttttgcttcatgtgcttcctctcattcttctggtcattattattaccataggatgcaggggtactagggaagcaaatgaaagatggagtaagattgatggggcgtggttctgagcagatcaagtggccaattcatctagaggtatcaagggttactgttagggctaaggaagcagttgaagcagctggtgggtctgtgagaagggtgtattacaataagttgggcttgaaggcactggtgaagcctgagtggtttgaaaagaaaggaagattgctgcctaaagcagctagacctcctccaaagcaaaaggataaagttgatagcattggtcggttgcctgccccaacaaagccatttccatttttagttgaagcaagcaaggatcttccagttcagcatcttagttgaataactaacatttttggcaccagtttttaggattttgtaattctgtgtggtgcaaacgtctgactcacaagtttttcatgcagttcttgcaaatgctcaggtagttaattcaagaatgagataaatgaatttccttggggacaaatgaaagggagaatcttgtttattatttaatttcttttaaggatttgatcttcgtcactcagttgaaaagagagccttagtttcttgtgtatgtgtgcttggagtaggatcatagccccttcatgaagggaaaattgcaagaacagtntgcaatgtttaacttttctccggatatggatggnacttgtcaaatgacttggctgaattttaataaatggacgattgtttc

SEQ ID NO: 55307 - protein, 110 aa, Glycine max
  peptide (1)..(110): Ceres Seq. ID no. 12607537
  misc_feature (1)..(84): Homolog of NCBI NO: 32410177 NR Description: hypothetical protein [Neurospora crassa]
  misc_feature (1)..(79): Homolog of NCBI NO: 6324045 NR Description: Mitochondrial ribosomal protein MRPL10 (YmL10);
  misc_feature (1)..(99): Homolog of NCBI NO: 34015188 NR Description: putative ribosomal protein L15
  misc_feature (1)..(107): Homolog of NCBI NO: 15237756 NR Description: putative protein
MKDGVRLMGRGSEQIKWPIHLEVSRVTVRAKEAVEAAGGSVRRVYYNKLGLKALVKPEWFEKKGRLLPKAARPPPKQKDKVDSIGRLPAPTKPFPFLVEASKDLPVQHLS

SEQ ID NO: 55308 - protein, 103 aa, Glycine max
  peptide (1)..(103): Ceres Seq. ID no. 12607538
  misc_feature (1)..(77): Homolog of NCBI NO: 32410177 NR Description: hypothetical protein [Neurospora crassa]
  misc_feature (1)..(72): Homolog of NCBI NO: 6324045 NR Description: Mitochondrial ribosomal protein MRPL10 (YmL10);
  misc_feature (1)..(92): Homolog of NCBI NO: 34015188 NR Description: putative ribosomal protein L15
  misc_feature (1)..(100): Homolog of NCBI NO: 15237756 NR Description: putative protein
MGRGSEQIKWPIHLEVSRVTVRAKEAVEAAGGSVRRVYYNKLGLKALVKPEWFEKKGRLLPKAARPPPKQKDKVDSIGRLPAPTKPFPFLVEASKDLPVQHLS

SEQ ID NO: 55309 - DNA, 911 bp, Glycine max
  misc_feature (1)..(911): Ceres Seq. ID no. 12582051
cagctacgtaggcccccccccccaagaacaaaagcagttggcatcatttgatattccttatagagtaattgaatgtttcttgaggctttggtcatataaggtagtctaagagttataaggtggtgattaagggccggaagattgttgttttcactgctgtgaattttagttcccgcatacactattttcgggctcaggtctgttctatggctgcaagaaaaatgctaagtttagtgtttttaaaggaaaaacataccacttttagggttttatcatacttttgaaaactgttatggtgttaaatcctgtattgtttagctttatttcttatatatagagcattacccatataattttggattgtgggctaacctcctcagggaaaagctcctagtatggttgctagcaccccaaaagttccaaaatccccttggatgccttttcctttgcttcttgatgctatcagaaatcaggttcctcccaagggtatggatgtaatcaaaatatattatgaacaattcaggtcaaagcatatatcgcgggatgattttgtgaagatgctgaggttaatagttggagatggtctgttgagaactacaataacaaatcttcagttcaagataccttccggtggtgaattgaaaggctcaatcaagaaggaagtctgaggctgtatttctgtgaggtggagatctttctccttggagtcaattaatgtcaactttttgctggataaatcaaaatgaagttgtgatattgttatctcttaggcaaactatctttttcatttccttttgccatctttatttggacttgagacatacatgcaactagaactatattagagtttagtttgaactgttcgtgatcaggtgacctgtcaatcaatcctcttgtttatgttggatttc

SEQ ID NO: 55310 - protein, 90 aa, Glycine max
  peptide (1)..(90): Ceres Seq. ID no. 12582052
  misc_feature (1)..(73): Homolog of NCBI NO: 18403862 NR Description: expressed protein
  misc_feature (1)..(73): Homolog of NCBI NO: 15810143 NR Description: unknown protein [Arabidopsis thaliana]
  misc_feature (1)..(77): Homolog of NCBI NO: 37537150 NR Description: putative CEO protein [Oryza sativa (japonica
  misc_feature (1)..(77): Homolog of NCBI NO: 29126336 NR Description: putative CEO protein [Oryza sativa (japonica
  misc_feature (1)..(87): Homolog of NCBI NO: 11044957 NR Description: ceo protein [Arabidopsis thaliana]
  misc_feature (1)..(87): Homolog of NCBI NO: 25403152 NR Description: unknown protein [imported] - Arabidopsis thaliana
  misc_feature (1)..(87): Homolog of NCBI NO: 30692664 NR Description: expressed protein [Arabidopsis thaliana]
  misc_feature (1)..(87): Homolog of NCBI NO: 18398335 NR Description: expressed protein
  misc_feature (1)..(87): Homolog of NCBI NO: 14150488 NR Description: ATP8 [Arabidopsis thaliana]
MVASTPKVPKSPWMPFPLLLDAIRNQVPPKGMDVIKIYYEQFRSKHISRDDFVKMLRLIVGDGLLRTTITNLQFKIPSGGELKGSIKKEV

SEQ ID NO: 55311 - protein, 77 aa, Glycine max
  peptide (1)..(77): Ceres Seq. ID no. 12582053
  misc_feature (1)..(60): Homolog of NCBI NO: 18403862 NR Description: expressed protein
  misc_feature (1)..(60): Homolog of NCBI NO: 15810143 NR Description: unknown protein [Arabidopsis thaliana]
  misc_feature (1)..(64): Homolog of NCBI NO: 37537150 NR Description: putative CEO protein [Oryza sativa (japonica
  misc_feature (1)..(64): Homolog of NCBI NO: 29126336 NR Description: putative CEO protein [Oryza sativa (japonica
  misc_feature (1)..(74): Homolog of NCBI NO: 11044957 NR Description: ceo protein [Arabidopsis thaliana]
  misc_feature (1)..(74): Homolog of NCBI NO: 30692664 NR Description: expressed protein [Arabidopsis thaliana]
  misc_feature (1)..(74): Homolog of NCBI NO: 25403152 NR Description: unknown protein [imported] - Arabidopsis thaliana
  misc_feature (1)..(74): Homolog of NCBI NO: 18398335 NR Description: expressed protein
  misc_feature (1)..(74): Homolog of NCBI NO: 14150488 NR Description: ATP8 [Arabidopsis thaliana]
MPFPLLLDAIRNQVPPKGMDVIKIYYEQFRSKHISRDDFVKMLRLIVGDGLLRTTITNLQFKIPSGGELKGSIKKEV

SEQ ID NO: 55312 - protein, 59 aa, Glycine max
  peptide (1)..(59): Ceres Seq. ID no. 12582054
  misc_feature (1)..(42): Homolog of NCBI NO: 18403862 NR Description: expressed protein
  misc_feature (1)..(42): Homolog of NCBI NO: 15810143 NR Description: unknown protein [Arabidopsis thaliana]
  misc_feature (1)..(46): Homolog of NCBI NO: 37537150 NR Description: putative CEO protein [Oryza sativa (japonica
  misc_feature (1)..(46): Homolog of NCBI NO: 29126336 NR Description: putative CEO protein [Oryza sativa (japonica
  misc_feature (1)..(56): Homolog of NCBI NO: 11044957 NR Description: ceo protein [Arabidopsis thaliana]
  misc_feature (1)..(56): Homolog of NCBI NO: 30692664 NR Description: expressed protein [Arabidopsis thaliana]
  misc_feature (1)..(56): Homolog of NCBI NO: 25403152 NR Description: unknown protein [imported] - Arabidopsis thaliana
  misc_feature (1)..(56): Homolog of NCBI NO: 18398335 NR Description: expressed protein
  misc_feature (1)..(56): Homolog of NCBI NO: 14150488 NR Description: ATP8 [Arabidopsis thaliana]
MDVIKIYYEQFRSKHISRDDFVKMLRLIVGDGLLRTTITNLQFKIPSGGELKGSIKKEV

SEQ ID NO: 55313 - DNA, 1457 bp, Glycine max
  misc_feature (1)..(1457): Ceres Seq. ID no. 15170555
aaaagatataagcctaagctaagtggagacgctgttgccatttctgctcattgagtgaaagttccattgggcgtggtttaatggaagggatgaagcagcttgcgtacaacactgcggtgaagctcattctggctgcactcgaacacaacttgctccctgactttgtcaccaggagatatggtcgcttcatggcggctaacatccttcgctctggctacaaatcatcctccgaacttcaactctccgatctccttcactttgcgcattctctacaacagatgcccatagcaatcgacactgatgagacaaattctcaactttatgagttgcctaccgctttcttcaagttggtgctcggaaacaaactcaatttcagctgttgctatttcccttctgcctctatgacactggatgatgctgaagaagcaatgttgaaactgtgctgcgagagatcaaatttgaaagatggtcatacagtacttgatttgggatgcggttggggatcactggttttgtacattgccaagaagtacactaactgcagggttacaggaatcagctattcgacaactcaaaagacttatattgaggagaagtgccgggatcttcagctgcaaaatttgaatattatagttgctgatattggcacatttgaaatggaggcttcttacgacagaatattttccatagaaatgtttgagcatatgaagaactataaagatcttctcaagaagatatccaaatggatgaaagaggatagccttttatttgttcatatcatgtgccacaaagcatttgcctaccactttgaggacaaaaatgaagatgactggattacaagatacttctttgctggagcaactatgccttctgcaaatctacttctttatttccaagatgatgttacagtcatcaaccattggctagtaaatgggaaacactccgcacagaccagtgaagaatggctcaaaagaatggaccagaaaatgacttacatcaagccaattatggaatcaacgtatggcaaggattcagctaccaagtggactgcctattggagagcattcttcatagttggagcagaaacttttgcatataataacggtgaagaatggatgattgcacacttccttttcaaaaagaaataaaataagaccaaacctaatcttttaatttggctatttaagaatggcgttaaaagaagctgctaaacgaggttgcacccttcaatgatgttgcataattttatcagttaacttgttttaattggttgcttgtctgtattttttcctgtctcaatcctttgtcttcggcccctaatgttatggtgtagccattccagtcttgttttatcttaaatttagggaaagtccaattcaaccctcagaacttgggtcgaagggtcatgcatgtgctccctggttcataaactttaaaatatgcacttagacccctct

SEQ ID NO: 55314 - protein, 355 aa, Glycine max
  peptide (1)..(355): Ceres Seq. ID no. 15170556
  misc_feature (184)..(354): Pfam Name: Cyclopropane-fatty-acyl-phospholipid synthase Pfam Description: Cyclopropane-fatty-acyl-phospholipid synthase
  misc_feature (21)..(355): Homolog of NCBI NO: 21230783 NR Description: conserved hypothetical protein
  misc_feature (21)..(355): Homolog of NCBI NO: 21242125 NR Description: conserved hypothetical protein
  misc_feature (16)..(354): Homolog of NCBI NO: 39997416 NR Description: cyclopropane-fatty-acyl-phospholipid synthase,
  misc_feature (16)..(355): Homolog of NCBI NO: 33413898 NR Description: S-adenosyl-L-methionine:coclaurine
  misc_feature (12)..(355): Homolog of NCBI NO: 16754879 NR Description: coclaurine N-methyltransferase [Coptis japonica]
  misc_feature (67)..(355): Homolog of NCBI NO: 7486450 NR Description: hypothetical protein F4I10.50 - Arabidopsis
  misc_feature (1)..(355): Homolog of NCBI NO: 30689611 NR Description: expressed protein [Arabidopsis thaliana]
  misc_feature (1)..(355): Homolog of NCBI NO: 21593795 NR Description: coclaurine N-methyltransferase [Arabidopsis
  misc_feature (1)..(355): Homolog of NCBI NO: 18418151 NR Description: expressed protein [Arabidopsis thaliana]
  misc_feature (1)..(355): Homolog of NCBI NO: 26451688 NR Description: unknown protein [Arabidopsis thaliana]
MEGMKQLAYNTAVKLILAALEHNLLPDFVTRRYGRFMAANILRSGYKSSSELQLSDLLHFAHSLQQMPIAIDTDETNSQLYELPTAFFKLVLGNKLNFSCCYFPSASMTLDDAEEAMLKLCCERSNLKDGHTVLDLGCGWGSLVLYIAKKYTNCRVTGISYSTTQKTYIEEKCRDLQLQNLNIIVADIGTFEMEASYDRIFSIEMFEHMKNYKDLLKKISKWMKEDSLLFVHIMCHKAFAYHFEDKNEDDWITRYFFAGATMPSANLLLYFQDDVTVINHWLVNGKHSAQTSEEWLKRMDQKMTYIKPIMESTYGKDSATKWTAYWRAFFIVGAETFAYNNGEEWMIAHFLFKKK

SEQ ID NO: 55315 - protein, 352 aa, Glycine max
  peptide (1)..(352): Ceres Seq. ID no. 15170557
  misc_feature (181)..(351): Pfam Name: Cyclopropane-fatty-acyl-phospholipid synthase Pfam Description: Cyclopropane-fatty-acyl-phospholipid synthase
  misc_feature (18)..(352): Homolog of NCBI NO: 21230783 NR Description: conserved hypothetical protein
  misc_feature (18)..(352): Homolog of NCBI NO: 21242125 NR Description: conserved hypothetical protein
  misc_feature (13)..(351): Homolog of NCBI NO: 39997416 NR Description: cyclopropane-fatty-acyl-phospholipid synthase,
  misc_feature (13)..(352): Homolog of NCBI NO: 33413898 NR Description: S-adenosyl-L-methionine:coclaurine
  misc_feature (9)..(352): Homolog of NCBI NO: 16754879 NR Description: coclaurine N-methyltransferase [Coptis japonica]
  misc_feature (64)..(352): Homolog of NCBI NO: 7486450 NR Description: hypothetical protein F4I10.50 - Arabidopsis
  misc_feature (1)..(352): Homolog of NCBI NO: 30689611 NR Description: expressed protein [Arabidopsis thaliana]
  misc_feature (1)..(352): Homolog of NCBI NO: 21593795 NR Description: coclaurine N-methyltransferase [Arabidopsis
  misc_feature (1)..(352): Homolog of NCBI NO: 18418151 NR Description: expressed protein [Arabidopsis thaliana]
  misc_feature (1)..(352): Homolog of NCBI NO: 26451688 NR Description: unknown protein [Arabidopsis thaliana]
MKQLAYNTAVKLILAALEHNLLPDFVTRRYGRFMAANILRSGYKSSSELQLSDLLHFAHSLQQMPIAIDTDETNSQLYELPTAFFKLVLGNKLNFSCCYFPSASMTLDDAEEAMLKLCCERSNLKDGHTVLDLGCGWGSLVLYIAKKYTNCRVTGISYSTTQKTYIEEKCRDLQLQNLNIIVADIGTFEMEASYDRIFSIEMFEHMKNYKDLLKKISKWMKEDSLLFVHIMCHKAFAYHFEDKNEDDWITRYFFAGATMPSANLLLYFQDDVTVINHWLVNGKHSAQTSEEWLKRMDQKMTYIKPIMESTYGKDSATKWTAYWRAFFIVGAETFAYNNGEEWMIAHFLFKKK

SEQ ID NO: 55316 - protein, 319 aa, Glycine max
  peptide (1)..(319): Ceres Seq. ID no. 15170558
  misc_feature (148)..(318): Pfam Name: Cyclopropane-fatty-acyl-phospholipid synthase Pfam Description: Cyclopropane-fatty-acyl-phospholipid synthase
  misc_feature (1)..(319): Homolog of NCBI NO: 21230783 NR Description: conserved hypothetical protein
  misc_feature (1)..(319): Homolog of NCBI NO: 21242125 NR Description: conserved hypothetical protein
  misc_feature (1)..(318): Homolog of NCBI NO: 39997416 NR Description: cyclopropane-fatty-acyl-phospholipid synthase,
  misc_feature (1)..(319): Homolog of NCBI NO: 33413898 NR Description: S-adenosyl-L-methionine:coclaurine
  misc_feature (1)..(319): Homolog of NCBI NO: 16754879 NR Description: coclaurine N-methyltransferase [Coptis japonica]
  misc_feature (31)..(319): Homolog of NCBI NO: 7486450 NR Description: hypothetical protein F4I10.50 - Arabidopsis
  misc_feature (1)..(319): Homolog of NCBI NO: 30689611 NR Description: expressed protein [Arabidopsis thaliana]
  misc_feature (1)..(319): Homolog of NCBI NO: 21593795 NR Description: coclaurine N-methyltransferase [Arabidopsis
  misc_feature (1)..(319): Homolog of NCBI NO: 18418151 NR Description: expressed protein [Arabidopsis thaliana]
  misc_feature (1)..(319): Homolog of NCBI NO: 26451688 NR Description: unknown protein [Arabidopsis thaliana]
MAANILRSGYKSSSELQLSDLLHFAHSLQQMPIAIDTDETNSQLYELPTAFFKLVLGNKLNFSCCYFPSASMTLDDAEEAMLKLCCERSNLKDGHTVLDLGCGWGSLVLYIAKKYTNCRVTGISYSTTQKTYIEEKCRDLQLQNLNIIVADIGTFEMEASYDRIFSIEMFEHMKNYKDLLKKISKWMKEDSLLFVHIMCHKAFAYHFEDKNEDDWITRYFFAGATMPSANLLLYFQDDVTVINHWLVNGKHSAQTSEEWLKRMDQKMTYIKPIMESTYGKDSATKWTAYWRAFFIVGAETFAYNNGEEWMIAHFLFKKK

SEQ ID NO: 55317 - DNA, 1667 bp, Glycine max
  misc_feature (1)..(1667): Ceres Seq. ID no. 15178767
gagtgtcttgttctcgtttatggaggatcaaagcggagaagctgaaggagaagaacaacaaatacaaccttcactctttcattatttaataacaattattattctcaatgggcaagactcctttctcctttcgtcgctccgcctctcgccgccgccccaagaagaccgccgccccgccccctcctccctctccgccgcaacatccctacgcggccggattcgccgcctcacccgacgacaacaaccgtctcatcgccgccgccgccggcagcagcgccttgacgaaggcgaagaagaagaccggcaacgtccgcttgtggatgaggtttgaccggtccggccggtcagaactggtggagttggagaagaacgccatcgtccgccacgcagcgattcccgctagagacttgcgaattttgggccccgtcttctcccactcctccaacatcctcgctagagagaaagcaatggtggttaatttggagtttataaaggcaattgtgactgctgaagaagtgttattgcttgatcctcttcggcaggaggttcttccctttgttgagcaactcaggcaacagcttcctggcaaaagtcaacctaaacttctcggcggcacggaagagcaggaaggcgaaatgcatgtctctaatggaagacaatggttgcctacaccggaggcagccgatggtttgcagtctgagcttccgtttgagtttcaagttctggagattgctttggaggctgtgtgcacttatctggactcgaatgtggcggaccttgagcgaggtgcttaccctgtgttggatgaattggctaggaatgttagcaccaagaatcttgagcatgtgcggagtttaaagagtaatcttacgcggttgctggcacgagtgcagaaggtgcgagatgaaattgaacatctgttagatgacaatgaagatatggcacaactatatttgacaaggaagtggttgcagaatcaacaatttgaggaggctcatttgggtgccacaacctcaaataactttcctaatacctcacgttctgttcgtcaacttggttctatcagaagtgaaagtcttgtgaccagccattatgaggatgataacaatgtggaggacttggagatgttgcttgatgcatatttcatgcagttggatggaactcgtaacaaaatattatcagttagggagtatattgacgacactgaagactatgtcaacatccaacttgataaccaccgaaatgaacttattcagctgcagttgacgttgactattgcatcatttgctattgctattgaaactttgattgctggtgcatttggtatgaacattccttgtaacttatataacattgatggagtattttggcccttcgtttggaccacgtctgcggcttgcgtattacttttcttgcttattttagcatatgcaagatggaagaagttgctgggatcataaggcaaggctgttgtgtgacaattggcaatttgaatctccgcagcgagtgacctgaagaacagacacaaatgtgtcaccggagaagtggcttaggaagcaactatcttaatttctgacaaaaattgtaatagttgatgtataggatgttccaacattgcttttagcatcatatattttatagccgatactattcacagcatctttttt

SEQ ID NO: 55318 - protein, 450 aa, Glycine max
  peptide (1)..(450): Ceres Seq. ID no. 15178768
  misc_feature (51)..(174): Homolog of NCBI NO: 40539050 NR Description: putative  CorA-like Mg2+ transporter protein
  misc_feature (196)..(450): Homolog of NCBI NO: 40539050 NR Description: putative  CorA-like Mg2+ transporter protein
  misc_feature (53)..(424): Homolog of NCBI NO: 30698047 NR Description: expressed protein [Arabidopsis thaliana]
  misc_feature (53)..(450): Homolog of NCBI NO: 30698045 NR Description: expressed protein [Arabidopsis thaliana]
  misc_feature (7)..(448): Homolog of NCBI NO: 7487682 NR Description: hypothetical protein T5F17.30 - Arabidopsis
  misc_feature (60)..(448): Homolog of NCBI NO: 30688025 NR Description: expressed protein [Arabidopsis thaliana]
  misc_feature (60)..(448): Homolog of NCBI NO: 25360918 NR Description: MRS2-6 [Arabidopsis thaliana]
  misc_feature (121)..(449): Homolog of NCBI NO: 37536576 NR Description: putative CorA-like Mg2+ transporter protein
  misc_feature (9)..(450): Homolog of NCBI NO: 11282358 NR Description: hypothetical protein F17J16.20 - Arabidopsis
  misc_feature (1)..(450): Homolog of NCBI NO: 18411070 NR Description: expressed protein [Arabidopsis thaliana]
MGKTPFSFRRSASRRRPKKTAAPPPPPSPPQHPYAAGFAASPDDNNRLIAAAAGSSALTKAKKKTGNVRLWMRFDRSGRSELVELEKNAIVRHAAIPARDLRILGPVFSHSSNILAREKAMVVNLEFIKAIVTAEEVLLLDPLRQEVLPFVEQLRQQLPGKSQPKLLGGTEEQEGEMHVSNGRQWLPTPEAADGLQSELPFEFQVLEIALEAVCTYLDSNVADLERGAYPVLDELARNVSTKNLEHVRSLKSNLTRLLARVQKVRDEIEHLLDDNEDMAQLYLTRKWLQNQQFEEAHLGATTSNNFPNTSRSVRQLGSIRSESLVTSHYEDDNNVEDLEMLLDAYFMQLDGTRNKILSVREYIDDTEDYVNIQLDNHRNELIQLQLTLTIASFAIAIETLIAGAFGMNIPCNLYNIDGVFWPFVWTTSAACVLLFLLILAYARWKKLLGS

SEQ ID NO: 55319 - protein, 379 aa, Glycine max
  peptide (1)..(379): Ceres Seq. ID no. 15178769
  misc_feature (1)..(103): Homolog of NCBI NO: 40539050 NR Description: putative  CorA-like Mg2+ transporter protein
  misc_feature (125)..(379): Homolog of NCBI NO: 40539050 NR Description: putative  CorA-like Mg2+ transporter protein
  misc_feature (1)..(353): Homolog of NCBI NO: 30698047 NR Description: expressed protein [Arabidopsis thaliana]
  misc_feature (1)..(379): Homolog of NCBI NO: 30698045 NR Description: expressed protein [Arabidopsis thaliana]
  misc_feature (1)..(377): Homolog of NCBI NO: 7487682 NR Description: hypothetical protein T5F17.30 - Arabidopsis
  misc_feature (1)..(377): Homolog of NCBI NO: 30688025 NR Description: expressed protein [Arabidopsis thaliana]
  misc_feature (1)..(377): Homolog of NCBI NO: 25360918 NR Description: MRS2-6 [Arabidopsis thaliana]
  misc_feature (50)..(378): Homolog of NCBI NO: 37536576 NR Description: putative CorA-like Mg2+ transporter protein
  misc_feature (1)..(379): Homolog of NCBI NO: 11282358 NR Description: hypothetical protein F17J16.20 - Arabidopsis
  misc_feature (1)..(379): Homolog of NCBI NO: 18411070 NR Description: expressed protein [Arabidopsis thaliana]
MRFDRSGRSELVELEKNAIVRHAAIPARDLRILGPVFSHSSNILAREKAMVVNLEFIKAIVTAEEVLLLDPLRQEVLPFVEQLRQQLPGKSQPKLLGGTEEQEGEMHVSNGRQWLPTPEAADGLQSELPFEFQVLEIALEAVCTYLDSNVADLERGAYPVLDELARNVSTKNLEHVRSLKSNLTRLLARVQKVRDEIEHLLDDNEDMAQLYLTRKWLQNQQFEEAHLGATTSNNFPNTSRSVRQLGSIRSESLVTSHYEDDNNVEDLEMLLDAYFMQLDGTRNKILSVREYIDDTEDYVNIQLDNHRNELIQLQLTLTIASFAIAIETLIAGAFGMNIPCNLYNIDGVFWPFVWTTSAACVLLFLLILAYARWKKLLGS

SEQ ID NO: 55320 - protein, 330 aa, Glycine max
  peptide (1)..(330): Ceres Seq. ID no. 15178770
  misc_feature (1)..(54): Homolog of NCBI NO: 40539050 NR Description: putative  CorA-like Mg2+ transporter protein
  misc_feature (76)..(330): Homolog of NCBI NO: 40539050 NR Description: putative  CorA-like Mg2+ transporter protein
  misc_feature (1)..(304): Homolog of NCBI NO: 30698047 NR Description: expressed protein [Arabidopsis thaliana]
  misc_feature (1)..(330): Homolog of NCBI NO: 30698045 NR Description: expressed protein [Arabidopsis thaliana]
  misc_feature (1)..(328): Homolog of NCBI NO: 7487682 NR Description: hypothetical protein T5F17.30 - Arabidopsis
  misc_feature (1)..(328): Homolog of NCBI NO: 30688025 NR Description: expressed protein [Arabidopsis thaliana]
  misc_feature (1)..(328): Homolog of NCBI NO: 25360918 NR Description: MRS2-6 [Arabidopsis thaliana]
  misc_feature (1)..(329): Homolog of NCBI NO: 37536576 NR Description: putative CorA-like Mg2+ transporter protein
  misc_feature (1)..(330): Homolog of NCBI NO: 11282358 NR Description: hypothetical protein F17J16.20 - Arabidopsis
  misc_feature (1)..(330): Homolog of NCBI NO: 18411070 NR Description: expressed protein [Arabidopsis thaliana]
MVVNLEFIKAIVTAEEVLLLDPLRQEVLPFVEQLRQQLPGKSQPKLLGGTEEQEGEMHVSNGRQWLPTPEAADGLQSELPFEFQVLEIALEAVCTYLDSNVADLERGAYPVLDELARNVSTKNLEHVRSLKSNLTRLLARVQKVRDEIEHLLDDNEDMAQLYLTRKWLQNQQFEEAHLGATTSNNFPNTSRSVRQLGSIRSESLVTSHYEDDNNVEDLEMLLDAYFMQLDGTRNKILSVREYIDDTEDYVNIQLDNHRNELIQLQLTLTIASFAIAIETLIAGAFGMNIPCNLYNIDGVFWPFVWTTSAACVLLFLLILAYARWKKLLGS

SEQ ID NO: 55321 - DNA, 991 bp, Glycine max
  misc_feature (1)..(991): Ceres Seq. ID no. 12581874
cagctacgtaggccccccccccgaagagagtagcattcctatttcctagctagtgtatactccacaacagtacacagctgacagcacccatttagtaaacgtgagtagtgactaccaaagtttatctttccatactccactccgttcactttttagactttcttcgccgtttgtggaagatgaggttgtgtctgtgtttaacgttgttgctggttctggctagtgtggcaatgggagaagaagatgcagatcataataagcactccctaaaagccaagtcacacgcgcagatccagtgcacaatgtgttcctcttgtaacaacccttgcaaccaagttccatctccaccaccaccatctccttcctccaacaactgtcctccaccaccctctcctccttcctccggcggcggaggcgaaggagctccgtactattactccccgcctccaccctctcagtatacctactcctcaccacctcctcccgcatccaccggcggaggaatgtactactacactcctcccagcaacagaaactacccaagaccgccgccgcctaacccgattgtgccgtattttccgttctactactacagccctctgccgcccgggtccactgcagctcctccgccctccacggcctcctcgattctctgtgcacttgctttctcatcttttctattgttgttgctttgatagtaaatgtaagaaaagaaaaaaaatgaaggaaaatggtaggaataacggcgcatatttgcagatctagagattctgagggaaatgagagggaggtagaactgtacaagtgcacgtgaatttcccaatctgccctgcacacgtgaactgaagtaccagtattatgttttctctctgaatttcttgtgccaatgtagattcatctgcaatttgttaataatttttatttttatgtactattaatactagtaagtcgtatttcgttagtataaaaataaaataaattacaaagattt

SEQ ID NO: 55322 - protein, 171 aa, Glycine max
  peptide (1)..(171): Ceres Seq. ID no. 12581875
  misc_feature (54)..(152): Pfam Name: 7 transmembrane receptor (rhodopsin family) Pfam Description: 7 transmembrane receptor (rhodopsin family)
  misc_feature (55)..(149): Homolog of NCBI NO: 81870 NR Description: hydroxyproline-rich glycoprotein (clone Hyp3.6) -
  misc_feature (55)..(151): Homolog of NCBI NO: 7488998 NR Description: extensin class I (clone uG-18) - tomato
  misc_feature (55)..(151): Homolog of NCBI NO: 7488998 NR Description: extensin class I (clone uG-18) - tomato
  misc_feature (54)..(149): Homolog of NCBI NO: 7488674 NR Description: extensin homolog HRGP2 - soybean (fragment)
  misc_feature (55)..(151): Homolog of NCBI NO: 3204132 NR Description: extensin [Cicer arietinum]
  misc_feature (41)..(162): Homolog of NCBI NO: 34894212 NR Description: P0439B06.27 [Oryza sativa (japonica
  misc_feature (3)..(170): Homolog of NCBI NO: 34894480 NR Description: OJ1116_C07.3 [Oryza sativa (japonica
  misc_feature (38)..(161): Homolog of NCBI NO: 18397707 NR Description: expressed protein
  misc_feature (34)..(145): Homolog of NCBI NO: 15234820 NR Description: extensin like protein; protein id: At4g16140.1
  misc_feature (38)..(170): Homolog of NCBI NO: 18423010 NR Description: expressed protein
MRLCLCLTLLLVLASVAMGEEDADHNKHSLKAKSHAQIQCTMCSSCNNPCNQVPSPPPPSPSSNNCPPPPSPPSSGGGGEGAPYYYSPPPPSQYTYSSPPPPASTGGGMYYYTPPSNRNYPRPPPPNPIVPYFPFYYYSPLPPGSTAAPPPSTASSILCALAFSSFLLLLL

SEQ ID NO: 55323 - protein, 154 aa, Glycine max
  peptide (1)..(154): Ceres Seq. ID no. 12581876
  misc_feature (37)..(135): Pfam Name: 7 transmembrane receptor (rhodopsin family) Pfam Description: 7 transmembrane receptor (rhodopsin family)
  misc_feature (38)..(132): Homolog of NCBI NO: 81870 NR Description: hydroxyproline-rich glycoprotein (clone Hyp3.6) -
  misc_feature (38)..(134): Homolog of NCBI NO: 7488998 NR Description: extensin class I (clone uG-18) - tomato
  misc_feature (38)..(134): Homolog of NCBI NO: 7488998 NR Description: extensin class I (clone uG-18) - tomato
  misc_feature (37)..(132): Homolog of NCBI NO: 7488674 NR Description: extensin homolog HRGP2 - soybean (fragment)
  misc_feature (38)..(134): Homolog of NCBI NO: 3204132 NR Description: extensin [Cicer arietinum]
  misc_feature (24)..(145): Homolog of NCBI NO: 34894212 NR Description: P0439B06.27 [Oryza sativa (japonica
  misc_feature (1)..(153): Homolog of NCBI NO: 34894480 NR Description: OJ1116_C07.3 [Oryza sativa (japonica
  misc_feature (21)..(144): Homolog of NCBI NO: 18397707 NR Description: expressed protein
  misc_feature (17)..(128): Homolog of NCBI NO: 15234820 NR Description: extensin like protein; protein id: At4g16140.1
  misc_feature (21)..(153): Homolog of NCBI NO: 18423010 NR Description: expressed protein
MGEEDADHNKHSLKAKSHAQIQCTMCSSCNNPCNQVPSPPPPSPSSNNCPPPPSPPSSGGGGEGAPYYYSPPPPSQYTYSSPPPPASTGGGMYYYTPPSNRNYPRPPPPNPIVPYFPFYYYSPLPPGSTAAPPPSTASSILCALAFSSFLLLLL

SEQ ID NO: 55324 - protein, 130 aa, Glycine max
  peptide (1)..(130): Ceres Seq. ID no. 12581877
  misc_feature (13)..(111): Pfam Name: 7 transmembrane receptor (rhodopsin family) Pfam Description: 7 transmembrane receptor (rhodopsin family)
  misc_feature (14)..(108): Homolog of NCBI NO: 81870 NR Description: hydroxyproline-rich glycoprotein (clone Hyp3.6) -
  misc_feature (14)..(110): Homolog of NCBI NO: 7488998 NR Description: extensin class I (clone uG-18) - tomato
  misc_feature (14)..(110): Homolog of NCBI NO: 7488998 NR Description: extensin class I (clone uG-18) - tomato
  misc_feature (13)..(108): Homolog of NCBI NO: 7488674 NR Description: extensin homolog HRGP2 - soybean (fragment)
  misc_feature (14)..(110): Homolog of NCBI NO: 3204132 NR Description: extensin [Cicer arietinum]
  misc_feature (1)..(121): Homolog of NCBI NO: 34894212 NR Description: P0439B06.27 [Oryza sativa (japonica
  misc_feature (1)..(129): Homolog of NCBI NO: 34894480 NR Description: OJ1116_C07.3 [Oryza sativa (japonica
  misc_feature (1)..(120): Homolog of NCBI NO: 18397707 NR Description: expressed protein
  misc_feature (1)..(104): Homolog of NCBI NO: 15234820 NR Description: extensin like protein; protein id: At4g16140.1
  misc_feature (1)..(129): Homolog of NCBI NO: 18423010 NR Description: expressed protein
MCSSCNNPCNQVPSPPPPSPSSNNCPPPPSPPSSGGGGEGAPYYYSPPPPSQYTYSSPPPPASTGGGMYYYTPPSNRNYPRPPPPNPIVPYFPFYYYSPLPPGSTAAPPPSTASSILCALAFSSFLLLLL

SEQ ID NO: 55325 - DNA, 653 bp, Glycine max
  misc_feature (1)..(653): Ceres Seq. ID no. 15226569
gagaccaaacaaaacactgcacctggttaaggatagagtatagcatggcacagtctagttgcaaaactttggtgcagtggttggtagcagcattgctcattgccttgttgggtggtgcacaagctgttgcaatatgtaacatagactcaagtcaattaaacttgtgtcgtgctgcagttactggtcaaaaccctccaccaccggatgagaaatgttgtgcagttgttcgccaagccaatttgcgttgcctctgcagttacaagtctaccctaccttcatttggaataaaccccaaaaatgctttggccttgcctggtaaatgtggtctgcaatggcctcctaattgttgagtgtagtgaagcagtcaatgaaggtcacggactcatggtcattacaagcaccttagtcttcaatattgctttcaggtgtttcattaacactgaagataaattttaagacagcatttgatatctctcgaataacggtgcagtttattttaatcagtatgtaatgtccaaaagtttgctagcagatgtgtacgtgtattagtgtttgatgttgcagaggtatttgaagatatatcattactcttttccctctatatgtctagacctgtaatatgtataataaaatgtctggtttttggactctcc

SEQ ID NO: 55326 - protein, 115 aa, Glycine max; identical to SEQ ID NO: 54730
  peptide (1)..(115): Ceres Seq. ID no. 15226570
  misc_feature (45)..(115): Pfam Name: Protease inhibitor/seed storage/LTP family Pfam Description: Protease inhibitor/seed storage/LTP family
  misc_feature (18)..(115): Homolog of NCBI NO: 15238989 NR Description: protease inhibitor/seed storage/lipid transfer
  misc_feature (15)..(115): Homolog of NCBI NO: 34915244 NR Description: P0045F02.11 [Oryza sativa (japonica
  misc_feature (18)..(115): Homolog of NCBI NO: 21553364 NR Description: unknown [Arabidopsis thaliana]
  misc_feature (23)..(115): Homolog of NCBI NO: 18422920 NR Description: protease inhibitor/seed storage/lipid transfer
  misc_feature (27)..(115): Homolog of NCBI NO: 30696602 NR Description: protease inhibitor/seed storage/lipid transfer
  misc_feature (27)..(115): Homolog of NCBI NO: 9758178 NR Description: gene_id:MTE17.17~unknown protein [Arabidopsis
  misc_feature (15)..(115): Homolog of NCBI NO: 30696597 NR Description: protease inhibitor/seed storage/lipid transfer
  misc_feature (15)..(115): Homolog of NCBI NO: 9758173 NR Description: gene_id:MTE17.12~unknown protein [Arabidopsis
  misc_feature (15)..(115): Homolog of NCBI NO: 18423748 NR Description: protease inhibitor/seed storage/lipid transfer
  misc_feature (15)..(115): Homolog of NCBI NO: 2598597 NR Description: MtN5 [Medicago truncatula]

SEQ ID NO: 55327 - protein, 101 aa, Glycine max; identical to SEQ ID NO: 54731
  peptide (1)..(101): Ceres Seq. ID no. 15226571
  misc_feature (31)..(101): Pfam Name: Protease inhibitor/seed storage/LTP family Pfam Description: Protease inhibitor/seed storage/LTP family
  misc_feature (4)..(101): Homolog of NCBI NO: 15238989 NR Description: protease inhibitor/seed storage/lipid transfer
  misc_feature (1)..(101): Homolog of NCBI NO: 34915244 NR Description: P0045F02.11 [Oryza sativa (japonica
  misc_feature (4)..(101): Homolog of NCBI NO: 21553364 NR Description: unknown [Arabidopsis thaliana]
  misc_feature (9)..(101): Homolog of NCBI NO: 18422920 NR Description: protease inhibitor/seed storage/lipid transfer
  misc_feature (13)..(101): Homolog of NCBI NO: 30696602 NR Description: protease inhibitor/seed storage/lipid transfer
  misc_feature (13)..(101): Homolog of NCBI NO: 9758178 NR Description: gene_id:MTE17.17~unknown protein [Arabidopsis
  misc_feature (1)..(101): Homolog of NCBI NO: 30696597 NR Description: protease inhibitor/seed storage/lipid transfer
  misc_feature (1)..(101): Homolog of NCBI NO: 9758173 NR Description: gene_id:MTE17.12~unknown protein [Arabidopsis
  misc_feature (1)..(101): Homolog of NCBI NO: 18423748 NR Description: protease inhibitor/seed storage/lipid transfer
  misc_feature (1)..(101): Homolog of NCBI NO: 2598597 NR Description: MtN5 [Medicago truncatula]

SEQ ID NO: 55328 - DNA, 1402 bp, Glycine max
  misc_feature (1)..(1402): Ceres Seq. ID no. 15170986
agactcgcctcttgccctcaccggcgcggccaccaaacggtgcaacgccaccagcgtttattcacagatcacacggcggcgacgacctcccttaccagcgctttgtctcgaaaacgcgcatctttgactcacttcctcacaggcacggatcgcgctgcgccctccctcaccgacgtcaacgtgaccggcttctggtggcacatagcgcactgcactcgcacaaagccaacacttcctttgaactcacgcgttcctggtggagacccaaaagttcgaaactgaacattttcacaagctttcggagggcgttgatgagttcggtagctattttgctttcagagttctcaggtgcaaattagggttcttaaccatgagtattgattatttcaagcaggacattgatgaacttatcggtgaattcacccaggtgagtgacaggatgagtcaacaactttggctgagataaaaagagtatggctttctaggaagttctcctacatttatgaagctcgtccttctgccaacctggccttctttatgcaatcactgtatgctcattgtataggttacatggttggtaccgcaactttatctcacagattaggtggcctttactgcctctactgtctttatgagactcaaccatttaatccttcttttaaggtctatctatcccttggagaattaaagaaacttagaatccttgttgctgatgcaaaagcaaatgatattaaagtagcacttgctttagtaaaaagaatgcttgaaagaaacacattcctttttggctctgttgacttgatggaaggttgtgtcacagagacagtaaatgaactccaacaattacagaatgcccgtattcaagttgcatatgaaaagttatttgatagcacttcaattgacaactacatccagatggaccttggcttggaagttgaccttgatttgctgaagaaaaagtcatctggatatgccacggccaagaatgtggctattcaagaggcgagcaatattttagacgttgaaaacataaagcacttacaaaaagataaggaactgataggagatgttgtggagaaggttgctaacgactggcacgttcagaaacaaacattttataaacaaacaggattaggggacgatgcatatgagaaggaactggagcaattacttctagagcagcatccacatgatggaaactcttaaccaagattgaagatggacatctgggtcgtcgtggttacttttgcatggggaattcataattaatatccctgtttagatagtaggaggaaatgtgttccttttccagttattgctgctttaaacaagacaatgaaacaaaaaaaaaatgataaaatgtattatgcttcattttattcaacatttctatttttcttct

SEQ ID NO: 55329 - protein, 222 aa, Glycine max
  peptide (1)..(222): Ceres Seq. ID no. 15170987
  misc_feature (1)..(13): Homolog of NCBI NO: 11285706 NR Description: hypothetical protein T4D2_190.1 - Arabidopsis
  misc_feature (49)..(219): Homolog of NCBI NO: 11285706 NR Description: hypothetical protein T4D2_190.1 - Arabidopsis
  misc_feature (1)..(202): Homolog of NCBI NO: 37535650 NR Description: unknown protein [Oryza sativa (japonica
  misc_feature (1)..(219): Homolog of NCBI NO: 18409805 NR Description: expressed protein [Arabidopsis thaliana]
MQSLYAHCIGYMVGTATLSHRLGGLYCLYCLYETQPFNPSFKVYLSLGELKKLRILVADAKANDIKVALALVKRMLERNTFLFGSVDLMEGCVTETVNELQQLQNARIQVAYEKLFDSTSIDNYIQMDLGLEVDLDLLKKKSSGYATAKNVAIQEASNILDVENIKHLQKDKELIGDVVEKVANDWHVQKQTFYKQTGLGDDAYEKELEQLLLEQHPHDGNS

SEQ ID NO: 55330 - protein, 211 aa, Glycine max
  peptide (1)..(211): Ceres Seq. ID no. 15170988
  misc_feature (38)..(208): Homolog of NCBI NO: 11285706 NR Description: hypothetical protein T4D2_190.1 - Arabidopsis
  misc_feature (1)..(191): Homolog of NCBI NO: 37535650 NR Description: unknown protein [Oryza sativa (japonica
  misc_feature (1)..(208): Homolog of NCBI NO: 18409805 NR Description: expressed protein [Arabidopsis thaliana]
MVGTATLSHRLGGLYCLYCLYETQPFNPSFKVYLSLGELKKLRILVADAKANDIKVALALVKRMLERNTFLFGSVDLMEGCVTETVNELQQLQNARIQVAYEKLFDSTSIDNYIQMDLGLEVDLDLLKKKSSGYATAKNVAIQEASNILDVENIKHLQKDKELIGDVVEKVANDWHVQKQTFYKQTGLGDDAYEKELEQLLLEQHPHDGNS

SEQ ID NO: 55331 - protein, 148 aa, Glycine max
  peptide (1)..(148): Ceres Seq. ID no. 15170989
  misc_feature (1)..(145): Homolog of NCBI NO: 11285706 NR Description: hypothetical protein T4D2_190.1 - Arabidopsis
  misc_feature (1)..(128): Homolog of NCBI NO: 37535650 NR Description: unknown protein [Oryza sativa (japonica
  misc_feature (1)..(145): Homolog of NCBI NO: 18409805 NR Description: expressed protein [Arabidopsis thaliana]
MLERNTFLFGSVDLMEGCVTETVNELQQLQNARIQVAYEKLFDSTSIDNYIQMDLGLEVDLDLLKKKSSGYATAKNVAIQEASNILDVENIKHLQKDKELIGDVVEKVANDWHVQKQTFYKQTGLGDDAYEKELEQLLLEQHPHDGNS

SEQ ID NO: 55332 - DNA, 1459 bp, Glycine max
  misc_feature (1)..(1459): Ceres Seq. ID no. 15171040
aaatctgtgttgacaatgaaaatttttagcttagaaaatgatttagaagtgaggcattcaattggccttaccgatattgactttcaattgaaaactcatgttaacaatttacattaatgaatagatcaatagaaatggtttgttaagtattgttttatatattctattaagtgcctatatcttccctaagtacacttcacttaaaatgtctctcctcaaacattacaaattcagttgcatgcctaattttctttgaataaatctgtgctgatgtcacatactaatttctgtattttgcacatgcttcttatttgtcttagtttccttaagggttgcatgttcttaaaatatttagttaaatttcttctttgcaactgtcttcttatttttatacatggaacagaaagagataaaaacatagtgagtatatttatgaactgcaattttactgcagaacttaggcctggagtctgttggtgtgaaaatagctaaagatggagctatagaggttgatgaatactctcaaacatcagttccttcaatttgggcagttggagatgttacaaacaggataaatctcaccccagttgctttgatggagggaggggcattagtaaaaacactgtttcaggataacccaacaaaacctgattatagagctgttccttctgctgtattttctcaaccaccaattggacaagttggtcttactgaggaacaggctgtacaacaatatggagatattgacatcttcactgcaaattttaggccactgaaagctactctctctgggcttccagaccgtgtttttatgaaattagtagtctgtgcaaaaacaaacgaagttctaggtttgcatatgtgtggagacgatgctcctgaaattgtgcaggtttttagagttgctacagctgctctgtattgctttgataatgatacatgagttttcaattcatttgttatacatctgcttgatacccaggggtttgcagttgctcttaaagctcgcttgaccaaggctgactttgatgccactgtaggcattcacccaagtgccgctgaggaatttgttaccatgaggacacctactaggaagattcgaaagagtgaatcgtctgagggaaagtcgggttctgaagcaaaaactgcagcaggggtttaaacagcattacactgcttcaattgttatacttgaagaaaccagctggtgcctcaagttacctggcgggttgtcactgaatttagcgtggttgtcaaattgttgggaagacattcagaacaatcttccgcaactgagttttcagagcaatacatggaatatctcattgaggtcgtgtgtcatacttctcaagtcttgcagtgtaattatcagagttggggagcctggtaagggcgagtggaatttttggtgccattgtttgccatttgtaatttaacttgccagtcctttcatgtacag

SEQ ID NO: 55333 - protein, 115 aa, Glycine max
  peptide (1)..(115): Ceres Seq. ID no. 15171041
  misc_feature (23)..(107): Pfam Name: Pyridine nucleotide-disulphide oxidoreductase, Pfam Description: Pyridine nucleotide-disulphide oxidoreductase,
MEGGALVKTLFQDNPTKPDYRAVPSAVFSQPPIGQVGLTEEQAVQQYGDIDIFTANFRPLKATLSGLPDRVFMKLVVCAKTNEVLGLHMCGDDAPEIVQVFRVATAALYCFDNDT

SEQ ID NO: 55334 - protein, 73 aa, Glycine max
  peptide (1)..(73): Ceres Seq. ID no. 15171042
MSHTNFCILHMLLICLSFLKGCMFLKYLVKFLLCNCLLIFIHGTERDKNIVSIFMNCNFTAELRPGVCWCENS

SEQ ID NO: 55335 - protein, 63 aa, Glycine max
  peptide (1)..(63): Ceres Seq. ID no. 15171043
MLLICLSFLKGCMFLKYLVKFLLCNCLLIFIHGTERDKNIVSIFMNCNFTAELRPGVCWCENS

SEQ ID NO: 55336 - DNA, 1176 bp, Glycine max
  misc_feature (1)..(1176): Ceres Seq. ID no. 12607540
ccccccccccccaaaattttcacatctgattgaccttgatttcatgggtgatctaatgaaccatctagagagtacttgcttctggaagtagcaactcaggcaacacttctgacaagtgttctaaatgtttgaccgtatcggaacgtctccagtgttgcattgttgcttttaaagtgatgaggaacaatcttgatgccttgaatgttgatttacaggacttctttctccatctttacaatcttgtacttgaatacaggccaggaagagatcaaggagaggtgttagcagaagctttgaagataatgttgtgtgatgataagcaacacgacatgcagaagactgctgcatttataaaacgattagcaacgctttcactgtgtgttggatcagcagattccatggctgccttggtcacagtaaagcatcttcttcagaagaatgttaagtgcagaaatttattggaaaatgacattggagggggctctgtttcgggcacaattcataaatatctaccatattccacagatcccaatttaagtggtgcccttgcctcagtactttgggaactcaatcttttgtctagtcattatcatccagctatatcaacactggcctcgggcatttcaagcatgagtaatgcacataaccagatccttttatccaagtcctctcctcaacaagcttataaggaaatgtctctttgtctggaattatgtttcacacaatatattgacggtataaaattaaataacaagaagagacgtgcaaatggccctgctatttcaccttccattggttctacaacagttacgagttcatttgatgacaatgaattgcaaaggcaacttagttcccattttatggttcttcatgacataaaggagaatgaaaggttgagaaaggagttggataggactgctctatcactacagctatatgaacaatataagaaacacaagaaacgatcaaaaccaagtagatgatcagccattgctttgtgatgtgtatggccccataggtttcagttatgcagttacagttcatttccagtggagataattctcaaatgcgttcctcaaacgagttcacctcatttgagtgcatgaaatatggaggagagatattttttcaattgaagtaatgcaatgcaaaatgaacttgaggctatccttcttt

SEQ ID NO: 55337 - protein, 268 aa, Glycine max
  peptide (1)..(268): Ceres Seq. ID no. 12607541
  misc_feature (105)..(147): Pfam Name: CBF/Mak21 family Pfam Description: CBF/Mak21 family
  misc_feature (1)..(150): Homolog of NCBI NO: 21358345 NR Description: CG1234-PA [Drosophila melanogaster]
  misc_feature (1)..(196): Homolog of NCBI NO: 23956108 NR Description: cDNA sequence AF233884; cDNA sequence, AF233884
  misc_feature (1)..(195): Homolog of NCBI NO: 14039964 NR Description: hypothetical protein 1-2 [Cricetulus griseus]
  misc_feature (1)..(186): Homolog of NCBI NO: 20806097 NR Description: AD24 protein [Homo sapiens]
  misc_feature (1)..(201): Homolog of NCBI NO: 34877840 NR Description: similar to AD24 [Rattus norvegicus]
  misc_feature (1)..(196): Homolog of NCBI NO: 7208452 NR Description: unknown [Mus musculus]
  misc_feature (1)..(186): Homolog of NCBI NO: 10434534 NR Description: unnamed protein product [Homo sapiens]
  misc_feature (1)..(186): Homolog of NCBI NO: 10439934 NR Description: unnamed protein product [Homo sapiens]
  misc_feature (1)..(265): Homolog of NCBI NO: 15219298 NR Description: unknown protein; protein id: At1g79140.1
  misc_feature (1)..(265): Homolog of NCBI NO: 7487900 NR Description: hypothetical protein YUP8H12R.24 - Arabidopsis
MRNNLDALNVDLQDFFLHLYNLVLEYRPGRDQGEVLAEALKIMLCDDKQHDMQKTAAFIKRLATLSLCVGSADSMAALVTVKHLLQKNVKCRNLLENDIGGGSVSGTIHKYLPYSTDPNLSGALASVLWELNLLSSHYHPAISTLASGISSMSNAHNQILLSKSSPQQAYKEMSLCLELCFTQYIDGIKLNNKKRRANGPAISPSIGSTTVTSSFDDNELQRQLSSHFMVLHDIKENERLRKELDRTALSLQLYEQYKKHKKRSKPSR

SEQ ID NO: 55338 - protein, 226 aa, Glycine max
  peptide (1)..(226): Ceres Seq. ID no. 12607542
  misc_feature (63)..(105): Pfam Name: CBF/Mak21 family Pfam Description: CBF/Mak21 family
  misc_feature (1)..(108): Homolog of NCBI NO: 21358345 NR Description: CG1234-PA [Drosophila melanogaster]
  misc_feature (1)..(154): Homolog of NCBI NO: 23956108 NR Description: cDNA sequence AF233884; cDNA sequence, AF233884
  misc_feature (1)..(153): Homolog of NCBI NO: 14039964 NR Description: hypothetical protein 1-2 [Cricetulus griseus]
  misc_feature (1)..(144): Homolog of NCBI NO: 20806097 NR Description: AD24 protein [Homo sapiens]
  misc_feature (1)..(159): Homolog of NCBI NO: 34877840 NR Description: similar to AD24 [Rattus norvegicus]
  misc_feature (1)..(154): Homolog of NCBI NO: 7208452 NR Description: unknown [Mus musculus]
  misc_feature (1)..(144): Homolog of NCBI NO: 10434534 NR Description: unnamed protein product [Homo sapiens]
  misc_feature (1)..(144): Homolog of NCBI NO: 10439934 NR Description: unnamed protein product [Homo sapiens]
  misc_feature (1)..(223): Homolog of NCBI NO: 15219298 NR Description: unknown protein; protein id: At1g79140.1
  misc_feature (1)..(223): Homolog of NCBI NO: 7487900 NR Description: hypothetical protein YUP8H12R.24 - Arabidopsis
MLCDDKQHDMQKTAAFIKRLATLSLCVGSADSMAALVTVKHLLQKNVKCRNLLENDIGGGSVSGTIHKYLPYSTDPNLSGALASVLWELNLLSSHYHPAISTLASGISSMSNAHNQILLSKSSPQQAYKEMSLCLELCFTQYIDGIKLNNKKRRANGPAISPSIGSTTVTSSFDDNELQRQLSSHFMVLHDIKENERLRKELDRTALSLQLYEQYKKHKKRSKPSR

SEQ ID NO: 55339 - protein, 217 aa, Glycine max
  peptide (1)..(217): Ceres Seq. ID no. 12607543
  misc_feature (54)..(96): Pfam Name: CBF/Mak21 family Pfam Description: CBF/Mak21 family
  misc_feature (1)..(99): Homolog of NCBI NO: 21358345 NR Description: CG1234-PA [Drosophila melanogaster]
  misc_feature (1)..(145): Homolog of NCBI NO: 23956108 NR Description: cDNA sequence AF233884; cDNA sequence, AF233884
  misc_feature (1)..(144): Homolog of NCBI NO: 14039964 NR Description: hypothetical protein 1-2 [Cricetulus griseus]
  misc_feature (1)..(135): Homolog of NCBI NO: 20806097 NR Description: AD24 protein [Homo sapiens]
  misc_feature (1)..(150): Homolog of NCBI NO: 34877840 NR Description: similar to AD24 [Rattus norvegicus]
  misc_feature (1)..(145): Homolog of NCBI NO: 7208452 NR Description: unknown [Mus musculus]
  misc_feature (1)..(135): Homolog of NCBI NO: 10434534 NR Description: unnamed protein product [Homo sapiens]
  misc_feature (1)..(135): Homolog of NCBI NO: 10439934 NR Description: unnamed protein product [Homo sapiens]
  misc_feature (1)..(214): Homolog of NCBI NO: 15219298 NR Description: unknown protein; protein id: At1g79140.1
  misc_feature (1)..(214): Homolog of NCBI NO: 7487900 NR Description: hypothetical protein YUP8H12R.24 - Arabidopsis
MQKTAAFIKRLATLSLCVGSADSMAALVTVKHLLQKNVKCRNLLENDIGGGSVSGTIHKYLPYSTDPNLSGALASVLWELNLLSSHYHPAISTLASGISSMSNAHNQILLSKSSPQQAYKEMSLCLELCFTQYIDGIKLNNKKRRANGPAISPSIGSTTVTSSFDDNELQRQLSSHFMVLHDIKENERLRKELDRTALSLQLYEQYKKHKKRSKPSR

SEQ ID NO: 55340 - DNA, 1112 bp, Glycine max
  misc_feature (1)..(1112): Ceres Seq. ID no. 15172911
gatcgtgtgtttttctccatcttaaactgactgaaattgagttctccggtcgagcgttcttccacaaaccctaatgtcgtttcttgaagaatttcaagccaatttggattcactgccagttattcttcagaagaagtatgcgttgttgcgtgacctagataagagcttacatgatattcaaaggcaaaatgaacagcgttgtgaacaagaaattgaagatattaggcgaggagttaggtctggaaacatcacgcctgatacttcagtaattagattctctgatgaagcgcttgatgagcaaaatcatagtatcagggttgctgatgaaaaagtagccttggctgtccaggcatatgatttggtagatacacacatacaacatcttgatcagtatctgaaaaggtttggtgaggagattcggcgtgaaagagaaaatgctgcaataactggagtgcctgcttcaggttctgagggtaatacaaaatctggaaggggtaatgaaagtggtactggtagaggagggcgaaaaaaaacacgccaaacgactgtcacacccgcagcaacagaagcacaagccactgcaaacccaactggcatggatttagagttaccagttgatccaaatgaacccacatactgcttttgtaatcaagttagctatggagcgatggttgcatgtgataaccccaattgtaaaatagagtggtttcattttggttgtgttggcctgaaagaacaaccaaaaggaaaatggtactgttcgaattgtgcagcaaccaaaaatcggcgtagaggcaaatgaggctggcagaagaataagaataatgttaaaaatgattgaatgtgtatataaattttaatatctctagaagggagttatttatattgggcctagaagctttgttttcgtagctgttattaatcgggaaattatgaaagtacaaatttccaatgacttatagtggctgtgtttgtacattccgttggttttgtacacatttgaaagctatggttcttttttattgtagatctgggttgaaaaggcccggaattattgtgtgtatgtgactatgtgtgtaccatacaatgaagtttctgcactaattatagtt

SEQ ID NO: 55341 - protein, 242 aa, Glycine max
  peptide (1)..(242): Ceres Seq. ID no. 15172912
  misc_feature (188)..(233): Pfam Name: PHD-finger Pfam Description: PHD-finger
  misc_feature (3)..(239): Homolog of NCBI NO: 34858458 NR Description: similar to ING1-like protein
  misc_feature (132)..(239): Homolog of NCBI NO: 28278108 NR Description: Similar to inhibitor of growth family, member 3
  misc_feature (1)..(127): Homolog of NCBI NO: 28278108 NR Description: Similar to inhibitor of growth family, member 3
  misc_feature (129)..(239): Homolog of NCBI NO: 37682153 NR Description: inhibitor of growth family, member 3 [Danio rerio]
  misc_feature (1)..(127): Homolog of NCBI NO: 37682153 NR Description: inhibitor of growth family, member 3 [Danio rerio]
  misc_feature (3)..(240): Homolog of NCBI NO: 37590948 NR Description: Unknown (protein for MGC:76007) [Silurana
  misc_feature (3)..(240): Homolog of NCBI NO: 18644730 NR Description: p28 ING5 [Homo sapiens]
  misc_feature (76)..(242): Homolog of NCBI NO: 28393138 NR Description: putative PHD-finger protein [Arabidopsis thaliana]
  misc_feature (1)..(242): Homolog of NCBI NO: 29367421 NR Description: putative PHD-finger protein
  misc_feature (1)..(242): Homolog of NCBI NO: 18404002 NR Description: PHD-finger protein -related [Arabidopsis
MSFLEEFQANLDSLPVILQKKYALLRDLDKSLHDIQRQNEQRCEQEIEDIRRGVRSGNITPDTSVIRFSDEALDEQNHSIRVADEKVALAVQAYDLVDTHIQHLDQYLKRFGEEIRRERENAAITGVPASGSEGNTKSGRGNESGTGRGGRKKTRQTTVTPAATEAQATANPTGMDLELPVDPNEPTYCFCNQVSYGAMVACDNPNCKIEWFHFGCVGLKEQPKGKWYCSNCAATKNRRRGK

SEQ ID NO: 55342 - DNA, 1342 bp, Glycine max
  misc_feature (1)..(1342): Ceres Seq. ID no. 14310880
gacccgccaaaccattacaaaactaaacacccagctaccacattgtctagtatggctcttaatctcttaatttcaatcccattctttttactctttgtagtgaatccatttcactttgttgagccaagaaccttagaagtctccgagcatccattcaccagaactctccgaaaactcaaggacatcaacaagggacaaagggtgagaggcgtgggcgagctcaaaagctacctaaaaaaatttggctacctaacaacaaatgacaattcttcaaacaacaaccacttcgacaaaaacgttgagtttgctctcaaagaataccaagtgttccatcacttacgtcccacgggtcgtgtggatgccgaaaccatcaaaagaatgggcctcccacgttgtggtgtgcctgatattatcacccctcaaaaccataagcttaaggggttggtgattcttgcaaactatagcttcttctcgggttcaccaaaatgggaagagtctaaaagggcactaacctacacattcgtatcaagtgctaacgtgttgaggatgtatgatgtgaggctagcaacaaggaatgccttccaaagttgggcaagagcctctaacttcacatttatggaaatgccaagtgagtataataacctagctaacatagtcctagggtttcatcgtggggaccatggtgatgggtacccatttgatgggccgggccaggttttggcccacacttttgcaccacaagatggtaggttgcattttgatgctgatgaaccatggagcattgaatcaacaagctggaatgtaggaccaggatggaatgtgggttgggattggaggaggtgggtgcgtcctagatggcaaagccgaaggaccattgatttgcaaaccgtggctttgcatgaaataggtcaccttttagggctagggcatagtaacgttcccggctccattatgtatccctcttatgaaggggtaaagagggatctaactcaggatgatgtggatggcatacgggctctatatagattgcccaactagaacttgagaaatgttgttccacttgagttttgtgaaatagttgtcaagtgtaacaactaagccttggtgggttgttaacttaaattggttaagtagtgtgtttcgtaacaagttgatttgcattgatcgaggtttcttgaatcaataagtaggtgcttttatgttgattttattgttatcttatagtgactgtagatttctaatgtcttactagctatatgcttgaatgtttttatcttaaaagcaaatttactataaaacttagtgtaaaatttccaattcaacacagaagttactttttatt

SEQ ID NO: 55343 - protein, 345 aa, Glycine max
  peptide (1)..(345): Ceres Seq. ID no. 14310881
  misc_feature (156)..(261): Pfam Name: Matrixin Pfam Description: Matrixin
  misc_feature (293)..(343): Homolog of NCBI NO: 7159629 NR Description: matrix metalloproteinase [Cucumis sativus]
  misc_feature (22)..(265): Homolog of NCBI NO: 7159629 NR Description: matrix metalloproteinase [Cucumis sativus]
DPPNHYKTKHPATTLSSMALNLLISIPFFLLFVVNPFHFVEPRTLEVSEHPFTRTLRKLKDINKGQRVRGVGELKSYLKKFGYLTTNDNSSNNNHFDKNVEFALKEYQVFHHLRPTGRVDAETIKRMGLPRCGVPDIITPQNHKLKGLVILANYSFFSGSPKWEESKRALTYTFVSSANVLRMYDVRLATRNAFQSWARASNFTFMEMPSEYNNLANIVLGFHRGDHGDGYPFDGPGQVLAHTFAPQDGRLHFDADEPWSIESTSWNVGPGWNVGWDWRRWVRPRWQSRRTIDLQTVALHEIGHLLGLGHSNVPGSIMYPSYEGVKRDLTQDDVDGIRALYRLPN

SEQ ID NO: 55344 - protein, 328 aa, Glycine max
  peptide (1)..(328): Ceres Seq. ID no. 14310882
  misc_feature (139)..(244): Pfam Name: Matrixin Pfam Description: Matrixin
  misc_feature (276)..(326): Homolog of NCBI NO: 7159629 NR Description: matrix metalloproteinase [Cucumis sativus]
  misc_feature (5)..(248): Homolog of NCBI NO: 7159629 NR Description: matrix metalloproteinase [Cucumis sativus]
MALNLLISIPFFLLFVVNPFHFVEPRTLEVSEHPFTRTLRKLKDINKGQRVRGVGELKSYLKKFGYLTTNDNSSNNNHFDKNVEFALKEYQVFHHLRPTGRVDAETIKRMGLPRCGVPDIITPQNHKLKGLVILANYSFFSGSPKWEESKRALTYTFVSSANVLRMYDVRLATRNAFQSWARASNFTFMEMPSEYNNLANIVLGFHRGDHGDGYPFDGPGQVLAHTFAPQDGRLHFDADEPWSIESTSWNVGPGWNVGWDWRRWVRPRWQSRRTIDLQTVALHEIGHLLGLGHSNVPGSIMYPSYEGVKRDLTQDDVDGIRALYRLPN

SEQ ID NO: 55345 - protein, 219 aa, Glycine max
  peptide (1)..(219): Ceres Seq. ID no. 14310883
  misc_feature (30)..(135): Pfam Name: Matrixin Pfam Description: Matrixin
  misc_feature (167)..(217): Homolog of NCBI NO: 7159629 NR Description: matrix metalloproteinase [Cucumis sativus]
  misc_feature (1)..(139): Homolog of NCBI NO: 7159629 NR Description: matrix metalloproteinase [Cucumis sativus]
MGLPRCGVPDIITPQNHKLKGLVILANYSFFSGSPKWEESKRALTYTFVSSANVLRMYDVRLATRNAFQSWARASNFTFMEMPSEYNNLANIVLGFHRGDHGDGYPFDGPGQVLAHTFAPQDGRLHFDADEPWSIESTSWNVGPGWNVGWDWRRWVRPRWQSRRTIDLQTVALHEIGHLLGLGHSNVPGSIMYPSYEGVKRDLTQDDVDGIRALYRLPN

SEQ ID NO: 55346 - DNA, 1238 bp, Glycine max
  misc_feature (1)..(1238): Ceres Seq. ID no. 14316502
tatatgctctgtccaatgtgttctgtggtgtctttcacttttccctttccacagagcaggggtccacttggaattttaatatgtatgaaggatgaaccaataccatggtcatattttaccaacttaggttatattgttgatacatactgttgaggaactgcctgtgcagaattacaattagaagaattgtttatggacatatttgcaattagggagcaaattagcctaattttggaaatttggattaccaagttaatttatgtttaacatattaactactctttgaatttgaacattgattaccgattcttttttcttggcaaattactccctaaattagaaaaaagtttgccagaacttcagtaatgccaactaagcttttatgttataatcttggcttcaactgacttcttttatggaaggaatatcaggttcatatcttttagaaagccctggcgctgataactcatctccaaagttgccaacttcagatacaaatgagggttatgaaatcaaggaggcattgagagcacagatggaagtgcaaagtaaattacatttgcaagtggaggcagagaagcacttgcagattcgccaggatgcagaaaggagatacatggccatgctcgaaagagcttgcaagatgctggctgatcaatttattggtgccacagtcatagacacagacagccaaaagtttcaaggaattggaagcaaagcacctagaggtaccttggttgatcctcttggtttttactccatgccatccactgaggtggctggagtgaatgtcccagaagaagaaataccgctgagtctcccaccccaaagggctgattgttcaaccgaaagttgtttaacctcacatgagagttctggaggattggctttagaaggatctcctggcgagggaaaaaggaggatgcttggcatggactcgatggcagcacctttgatatggagtgaagctaagatgagaactcaagccatcaatgtagcccaaggtaatcttcctcaaggaataactaggtatggcatgtagggatggaaggtctacttgatggtttatcccggcatgatatataaacctttgggctttcattcattcctttttttataggtacttgaactcttcatgtcttgtaagttagtgagacataggtggaatcaattttacccctttgtaaattcaatctactctgtgactttaaaaattgcaaaaaactagctttgactat

SEQ ID NO: 55347 - protein, 208 aa, Glycine max
  peptide (1)..(208): Ceres Seq. ID no. 14316503
  misc_feature (11)..(154): Homolog of NCBI NO: 6223653 NR Description: transfactor-like [Arabidopsis thaliana]
  misc_feature (11)..(175): Homolog of NCBI NO: 11994231 NR Description: contains similarity to transfactor~gene_id:MUJ8.2
  misc_feature (11)..(175): Homolog of NCBI NO: 18404044 NR Description: transfactor -related [Arabidopsis thaliana]
  misc_feature (11)..(150): Homolog of NCBI NO: 18414049 NR Description: expressed protein [Arabidopsis thaliana]
  misc_feature (1)..(150): Homolog of NCBI NO: 7485694 NR Description: hypothetical protein F18A5.30 - Arabidopsis
  misc_feature (7)..(91): Homolog of NCBI NO: 29647444 NR Description: P0410E11.32 [Oryza sativa (japonica
MEGISGSYLLESPGADNSSPKLPTSDTNEGYEIKEALRAQMEVQSKLHLQVEAEKHLQIRQDAERRYMAMLERACKMLADQFIGATVIDTDSQKFQGIGSKAPRGTLVDPLGFYSMPSTEVAGVNVPEEEIPLSLPPQRADCSTESCLTSHESSGGLALEGSPGEGKRRMLGMDSMAAPLIWSEAKMRTQAINVAQGNLPQGITRYGM

SEQ ID NO: 55348 - protein, 168 aa, Glycine max
  peptide (1)..(168): Ceres Seq. ID no. 14316504
  misc_feature (1)..(114): Homolog of NCBI NO: 6223653 NR Description: transfactor-like [Arabidopsis thaliana]
  misc_feature (1)..(135): Homolog of NCBI NO: 11994231 NR Description: contains similarity to transfactor~gene_id:MUJ8.2
  misc_feature (1)..(135): Homolog of NCBI NO: 18404044 NR Description: transfactor -related [Arabidopsis thaliana]
  misc_feature (1)..(110): Homolog of NCBI NO: 18414049 NR Description: expressed protein [Arabidopsis thaliana]
  misc_feature (1)..(110): Homolog of NCBI NO: 7485694 NR Description: hypothetical protein F18A5.30 - Arabidopsis
  misc_feature (1)..(51): Homolog of NCBI NO: 29647444 NR Description: P0410E11.32 [Oryza sativa (japonica
MEVQSKLHLQVEAEKHLQIRQDAERRYMAMLERACKMLADQFIGATVIDTDSQKFQGIGSKAPRGTLVDPLGFYSMPSTEVAGVNVPEEEIPLSLPPQRADCSTESCLTSHESSGGLALEGSPGEGKRRMLGMDSMAAPLIWSEAKMRTQAINVAQGNLPQGITRYGM

SEQ ID NO: 55349 - protein, 141 aa, Glycine max
  peptide (1)..(141): Ceres Seq. ID no. 14316505
  misc_feature (1)..(87): Homolog of NCBI NO: 6223653 NR Description: transfactor-like [Arabidopsis thaliana]
  misc_feature (1)..(108): Homolog of NCBI NO: 11994231 NR Description: contains similarity to transfactor~gene_id:MUJ8.2
  misc_feature (1)..(108): Homolog of NCBI NO: 18404044 NR Description: transfactor -related [Arabidopsis thaliana]
  misc_feature (1)..(83): Homolog of NCBI NO: 18414049 NR Description: expressed protein [Arabidopsis thaliana]
  misc_feature (1)..(83): Homolog of NCBI NO: 7485694 NR Description: hypothetical protein F18A5.30 - Arabidopsis
  misc_feature (1)..(24): Homolog of NCBI NO: 29647444 NR Description: P0410E11.32 [Oryza sativa (japonica
MAMLERACKMLADQFIGATVIDTDSQKFQGIGSKAPRGTLVDPLGFYSMPSTEVAGVNVPEEEIPLSLPPQRADCSTESCLTSHESSGGLALEGSPGEGKRRMLGMDSMAAPLIWSEAKMRTQAINVAQGNLPQGITRYGM

SEQ ID NO: 55350 - DNA, 1266 bp, Glycine max
  misc_feature (1)..(1266): Ceres Seq. ID no. 14308430
gaagtcagactaaactcaataataggaaacacgcaacaagtgggggtggcgagcggaatatgatatatatgatatattgatatatcataacaataatcccaaaatattaagggtactgttttcgattcgatcaactcactcacgcgcacgcctttcattccattccattccgatgcgatgacgacgacgaattccctcttcttctcccttgactggcacaatgaattctatcctacctatcatgatttctaccttctcccccttttcgctctcttcttcccttcccttcgcttctttctcgaccgattcatattcgagaaagtggcgagacggttgattttcggaaaggggcatgcggcgctggactaccattcagacgagagaagaaaaaagattaggaaatttaaggaatcagcttggaaatgtgtttattatctttcagctgagattcttgctttgtctgtaacatacgatgaaccatggtttacaaatactagaaacttttgggtgggcccagggacccaggtctggccagatcaaaagatcaagttgaaattgaaggcagtctatatgtacgctgctggattttactcatactccatttttgctttgatattttgggaaacgaggcgctccgactttggagtgtccatgagtcatcatgttgctactgtaattctcattgttctgtcttacattttcaggtttgcacgtgttggatcagtggttttagcacttcatgatgctagcgatgtgtttctggagatagggaaaatgtccaaatacagtggtgctgaaactatggctagctttgcttttattctatttgttttatcttggatcatattgcgtctcatttactacccattctggattctttggagtacaagctatgaagttctgctcaccttggataaggaaaagcaccaagtggatggtccaatatattattatgtgttcaatagtcttctttactgcttgcttgttatgcatatttattggtgggtgctgatatttcggatgcttgttaaacaaatccaagcaagaggaaaagttagtgaagatgttcgatctgattcagaagatgaagatgaacatgaagattgagtagggaagcaaaagcacaatgtattctttaggcaaaggtgaatctaaaatgatgacaaattgttttacactctaacatgatgaatattgtcgtatgttatgtggatttattttatgttaaattgtccatattttattttatttttttataaaaaaaag

SEQ ID NO: 55351 - protein, 309 aa, Glycine max
  peptide (1)..(309): Ceres Seq. ID no. 14308431
  misc_feature (94)..(306): Pfam Name: Longevity-assurance protein (LAG1) Pfam Description: Longevity-assurance protein (LAG1)
  misc_feature (66)..(309): Homolog of NCBI NO: 24119257 NR Description: trh3 protein [Danio rerio]
  misc_feature (10)..(124): Homolog of NCBI NO: 8920562 NR Description: Contains similarity to LAG1 homolog 1 from
  misc_feature (19)..(305): Homolog of NCBI NO: 34901974 NR Description: unknown protein [Oryza sativa (japonica
  misc_feature (21)..(306): Homolog of NCBI NO: 7658241 NR Description: LAG1 homolog 2 [Arabidopsis thaliana]
  misc_feature (21)..(306): Homolog of NCBI NO: 15230323 NR Description: longevity factor-related protein [Arabidopsis
  misc_feature (10)..(239): Homolog of NCBI NO: 30683361 NR Description: longevity assurance protein -related [Arabidopsis
  misc_feature (1)..(309): Homolog of NCBI NO: 7688742 NR Description: ASC1 [Lycopersicon esculentum]
  misc_feature (10)..(309): Homolog of NCBI NO: 18404559 NR Description: LAG1 homolog 1 [Arabidopsis thaliana]
  misc_feature (10)..(309): Homolog of NCBI NO: 25518747 NR Description: hypothetical protein F13B4.7 - Arabidopsis
  misc_feature (11)..(309): Homolog of NCBI NO: 16974114 NR Description: putative resistance protein [Lycopersicon
MTTTNSLFFSLDWHNEFYPTYHDFYLLPLFALFFPSLRFFLDRFIFEKVARRLIFGKGHAALDYHSDERRKKIRKFKESAWKCVYYLSAEILALSVTYDEPWFTNTRNFWVGPGTQVWPDQKIKLKLKAVYMYAAGFYSYSIFALIFWETRRSDFGVSMSHHVATVILIVLSYIFRFARVGSVVLALHDASDVFLEIGKMSKYSGAETMASFAFILFVLSWIILRLIYYPFWILWSTSYEVLLTLDKEKHQVDGPIYYYVFNSLLYCLLVMHIYWWVLIFRMLVKQIQARGKVSEDVRSDSEDEDEHED

SEQ ID NO: 55352 - protein, 178 aa, Glycine max
  peptide (1)..(178): Ceres Seq. ID no. 14308432
  misc_feature (1)..(175): Pfam Name: Longevity-assurance protein (LAG1) Pfam Description: Longevity-assurance protein (LAG1)
  misc_feature (1)..(178): Homolog of NCBI NO: 27769146 NR Description: Similar to RIKEN cDNA 0610013I17 gene [Xenopus
  misc_feature (1)..(178): Homolog of NCBI NO: 24119257 NR Description: trh3 protein [Danio rerio]
  misc_feature (1)..(174): Homolog of NCBI NO: 34901974 NR Description: unknown protein [Oryza sativa (japonica
  misc_feature (1)..(175): Homolog of NCBI NO: 7658241 NR Description: LAG1 homolog 2 [Arabidopsis thaliana]
  misc_feature (1)..(175): Homolog of NCBI NO: 15230323 NR Description: longevity factor-related protein [Arabidopsis
  misc_feature (1)..(108): Homolog of NCBI NO: 30683361 NR Description: longevity assurance protein -related [Arabidopsis
  misc_feature (1)..(178): Homolog of NCBI NO: 7688742 NR Description: ASC1 [Lycopersicon esculentum]
  misc_feature (1)..(178): Homolog of NCBI NO: 18404559 NR Description: LAG1 homolog 1 [Arabidopsis thaliana]
  misc_feature (1)..(178): Homolog of NCBI NO: 25518747 NR Description: hypothetical protein F13B4.7 - Arabidopsis
  misc_feature (1)..(178): Homolog of NCBI NO: 16974114 NR Description: putative resistance protein [Lycopersicon
MYAAGFYSYSIFALIFWETRRSDFGVSMSHHVATVILIVLSYIFRFARVGSVVLALHDASDVFLEIGKMSKYSGAETMASFAFILFVLSWIILRLIYYPFWILWSTSYEVLLTLDKEKHQVDGPIYYYVFNSLLYCLLVMHIYWWVLIFRMLVKQIQARGKVSEDVRSDSEDEDEHED

SEQ ID NO: 55353 - DNA, 2098 bp, Glycine max
  misc_feature (1)..(2098): Ceres Seq. ID no. 14309715
tctctctctctctttctctctttctctctgtctagaatgcctctattctcctctgtcggtcacacacagcgatagatagataatagagaagagaagcattcataggcgccaattgtgagtgagagagaagtttctgttttttctacttttccatttttttgggagagatagagagagagagatctgattcttcaccataactgtcattgctttgcttctctcactcagcacaagttgacaagaagggcattgccatttcaatcccatacaaaaagcacacaccccaattcaccaccattttcctaaagcttcactcttttctctgctaagagaagaaagcaagaaagaaaaagccaaaatggttgaatctcagcccaagttcttcatcccggactcaatcaacggcgtgaatttcgacgtagcggcgcagattaagatggtgtgggaagtgatgaaggcgccactgatcgtgcctctgctgaacctggcagtgtacattagcctcgccatggcgctcatgctcttcatggagagggtctacatgggcattgtcatcatcctcgtcaagctcttctggaagaagccacaccagcgctacaagttcgagccactccaagacgacgaggaactcggcaactctaattaccccgtcgtgcttgtccagattccaatgttcaatgagaaagaggtgtacaaggtgtcgattggagcagcttgtaatctttcatggcctgcggatcgtctcgtcatccaagtgcttgatgattctactgaccctaccgtcaagcaaatggtggagatggaatgccagagatgggcaagtaagggcataaacatagtgtaccaaatcagagaaacaagaggagggtacaaagcgggtgctctaaaagaaggcctaaaacgtaactatgtgaaacactgtgagtacgtggcaattttcgatgcagatttcaggccagagccagattttctcagacgttccattcctttcttggtgggcaaccccgacattgctcttgttcaagctcgttggagatttgtgaattctgacgagtgcttattgacaagaatgcaagagatgtccctggattaccatttcacagtagagcaagaagttggatcagccactcatgctttcttcggtttcaacggaactgctggtatttggagaatagctgctatcaacgaagctggtgggtggaaagacagaacaacagtggaagatatggaccttgctgttcgtgctagtcttaggggatggaaatttttgtaccttggtgacctccaggccaaaagtgagcttcccagtactttgagagccttcagattccagcagcacagatggtcatgtggtcctgctaatttgttccgcaaaatggtgatggagattgtgaggaacaagaaagttaggttttggaagaaagtgtatgttatatacagctttttctttgttcgcaaaatcatcgcccacatggtcaccttcttcttctactgtgttgtgattccccttacaatcttggtcccagaggttcatgttccaatctggggagctgtttatattccttctgtcatcaccattctcaattcagttggaacaccaaggtccattcaccttctgttctattggatcctctttgagaatgtgatgtctttgcaccgtaccaaggcaacatttataggtctcttagagtatgggagggctaatgaatgggttgtgactgaaaaacttggtgactctgtcaataataataagaataaatcaggagatgctgccaagaagaataatgccatcaaggccacccccaaaaagactcgatccaaatttgttgaaagacttaatttactggagttgggatttgctgccttcctcttcgtatgtggatgctatgattatgttcatgggaaacacaactacttcatctacctcttccttcagaccttaacattctcaattgtaggatttggctacgttggcaccatcgtgtaaacctcgttgagccaaatttctcaagttacttaagtttcatcaatgttgtgtccatatttttctagtttctcctaaaaaaaaatacatcaaaagaggctgatttcttcaagc

SEQ ID NO: 55354 - protein, 542 aa, Glycine max
  peptide (1)..(542): Ceres Seq. ID no. 14309716
  misc_feature (135)..(278): Pfam Name: Glycosyl transferase Pfam Description: Glycosyl transferase
  misc_feature (18)..(542): Homolog of NCBI NO: 30694359 NR Description: glycosyltransferase family 2 [Arabidopsis
  misc_feature (21)..(542): Homolog of NCBI NO: 16519221 NR Description: cellulose synthase-like protein OsCslA6 [Oryza
  misc_feature (1)..(542): Homolog of NCBI NO: 18403914 NR Description: glycosyltransferase family 2 [Arabidopsis
  misc_feature (12)..(542): Homolog of NCBI NO: 30688411 NR Description: glycosyltransferase family 2 [Arabidopsis
  misc_feature (17)..(542): Homolog of NCBI NO: 34419204 NR Description: TPA: cellulose synthase-like A1
  misc_feature (10)..(542): Homolog of NCBI NO: 15237519 NR Description: glycosyltransferase family 2 [Arabidopsis
  misc_feature (27)..(542): Homolog of NCBI NO: 34148023 NR Description: glycosyltransferase 5 [Ipomoea trifida]
  misc_feature (4)..(542): Homolog of NCBI NO: 34148021 NR Description: glycosyltransferase 1 [Ipomoea trifida]
  misc_feature (4)..(542): Homolog of NCBI NO: 34148025 NR Description: glycosyltransferase 10 [Ipomoea trifida]
  misc_feature (6)..(542): Homolog of NCBI NO: 15242959 NR Description: glycosyltransferase family 2 [Arabidopsis
MVESQPKFFIPDSINGVNFDVAAQIKMVWEVMKAPLIVPLLNLAVYISLAMALMLFMERVYMGIVIILVKLFWKKPHQRYKFEPLQDDEELGNSNYPVVLVQIPMFNEKEVYKVSIGAACNLSWPADRLVIQVLDDSTDPTVKQMVEMECQRWASKGINIVYQIRETRGGYKAGALKEGLKRNYVKHCEYVAIFDADFRPEPDFLRRSIPFLVGNPDIALVQARWRFVNSDECLLTRMQEMSLDYHFTVEQEVGSATHAFFGFNGTAGIWRIAAINEAGGWKDRTTVEDMDLAVRASLRGWKFLYLGDLQAKSELPSTLRAFRFQQHRWSCGPANLFRKMVMEIVRNKKVRFWKKVYVIYSFFFVRKIIAHMVTFFFYCVVIPLTILVPEVHVPIWGAVYIPSVITILNSVGTPRSIHLLFYWILFENVMSLHRTKATFIGLLEYGRANEWVVTEKLGDSVNNNKNKSGDAAKKNNAIKATPKKTRSKFVERLNLLELGFAAFLFVCGCYDYVHGKHNYFIYLFLQTLTFSIVGFGYVGTIV

SEQ ID NO: 55355 - protein, 516 aa, Glycine max
  peptide (1)..(516): Ceres Seq. ID no. 14309717
  misc_feature (109)..(252): Pfam Name: Glycosyl transferase Pfam Description: Glycosyl transferase
  misc_feature (1)..(516): Homolog of NCBI NO: 30694359 NR Description: glycosyltransferase family 2 [Arabidopsis
  misc_feature (1)..(516): Homolog of NCBI NO: 16519221 NR Description: cellulose synthase-like protein OsCslA6 [Oryza
  misc_feature (1)..(516): Homolog of NCBI NO: 18403914 NR Description: glycosyltransferase family 2 [Arabidopsis
  misc_feature (1)..(516): Homolog of NCBI NO: 30688411 NR Description: glycosyltransferase family 2 [Arabidopsis
  misc_feature (1)..(516): Homolog of NCBI NO: 34419204 NR Description: TPA: cellulose synthase-like A1
  misc_feature (1)..(516): Homolog of NCBI NO: 15237519 NR Description: glycosyltransferase family 2 [Arabidopsis
  misc_feature (1)..(516): Homolog of NCBI NO: 34148023 NR Description: glycosyltransferase 5 [Ipomoea trifida]
  misc_feature (1)..(516): Homolog of NCBI NO: 34148021 NR Description: glycosyltransferase 1 [Ipomoea trifida]
  misc_feature (1)..(516): Homolog of NCBI NO: 34148025 NR Description: glycosyltransferase 10 [Ipomoea trifida]
  misc_feature (1)..(516): Homolog of NCBI NO: 15242959 NR Description: glycosyltransferase family 2 [Arabidopsis
MVWEVMKAPLIVPLLNLAVYISLAMALMLFMERVYMGIVIILVKLFWKKPHQRYKFEPLQDDEELGNSNYPVVLVQIPMFNEKEVYKVSIGAACNLSWPADRLVIQVLDDSTDPTVKQMVEMECQRWASKGINIVYQIRETRGGYKAGALKEGLKRNYVKHCEYVAIFDADFRPEPDFLRRSIPFLVGNPDIALVQARWRFVNSDECLLTRMQEMSLDYHFTVEQEVGSATHAFFGFNGTAGIWRIAAINEAGGWKDRTTVEDMDLAVRASLRGWKFLYLGDLQAKSELPSTLRAFRFQQHRWSCGPANLFRKMVMEIVRNKKVRFWKKVYVIYSFFFVRKIIAHMVTFFFYCVVIPLTILVPEVHVPIWGAVYIPSVITILNSVGTPRSIHLLFYWILFENVMSLHRTKATFIGLLEYGRANEWVVTEKLGDSVNNNKNKSGDAAKKNNAIKATPKKTRSKFVERLNLLELGFAAFLFVCGCYDYVHGKHNYFIYLFLQTLTFSIVGFGYVGTIV

SEQ ID NO: 55356 - protein, 511 aa, Glycine max
  peptide (1)..(511): Ceres Seq. ID no. 14309718
  misc_feature (104)..(247): Pfam Name: Glycosyl transferase Pfam Description: Glycosyl transferase
  misc_feature (1)..(511): Homolog of NCBI NO: 30694359 NR Description: glycosyltransferase family 2 [Arabidopsis
  misc_feature (1)..(511): Homolog of NCBI NO: 16519221 NR Description: cellulose synthase-like protein OsCslA6 [Oryza
  misc_feature (1)..(511): Homolog of NCBI NO: 18403914 NR Description: glycosyltransferase family 2 [Arabidopsis
  misc_feature (1)..(511): Homolog of NCBI NO: 30688411 NR Description: glycosyltransferase family 2 [Arabidopsis
  misc_feature (1)..(511): Homolog of NCBI NO: 34419204 NR Description: TPA: cellulose synthase-like A1
  misc_feature (1)..(511): Homolog of NCBI NO: 15237519 NR Description: glycosyltransferase family 2 [Arabidopsis
  misc_feature (1)..(511): Homolog of NCBI NO: 34148023 NR Description: glycosyltransferase 5 [Ipomoea trifida]
  misc_feature (1)..(511): Homolog of NCBI NO: 34148021 NR Description: glycosyltransferase 1 [Ipomoea trifida]
  misc_feature (1)..(511): Homolog of NCBI NO: 34148025 NR Description: glycosyltransferase 10 [Ipomoea trifida]
  misc_feature (1)..(511): Homolog of NCBI NO: 15242959 NR Description: glycosyltransferase family 2 [Arabidopsis
MKAPLIVPLLNLAVYISLAMALMLFMERVYMGIVIILVKLFWKKPHQRYKFEPLQDDEELGNSNYPVVLVQIPMFNEKEVYKVSIGAACNLSWPADRLVIQVLDDSTDPTVKQMVEMECQRWASKGINIVYQIRETRGGYKAGALKEGLKRNYVKHCEYVAIFDADFRPEPDFLRRSIPFLVGNPDIALVQARWRFVNSDECLLTRMQEMSLDYHFTVEQEVGSATHAFFGFNGTAGIWRIAAINEAGGWKDRTTVEDMDLAVRASLRGWKFLYLGDLQAKSELPSTLRAFRFQQHRWSCGPANLFRKMVMEIVRNKKVRFWKKVYVIYSFFFVRKIIAHMVTFFFYCVVIPLTILVPEVHVPIWGAVYIPSVITILNSVGTPRSIHLLFYWILFENVMSLHRTKATFIGLLEYGRANEWVVTEKLGDSVNNNKNKSGDAAKKNNAIKATPKKTRSKFVERLNLLELGFAAFLFVCGCYDYVHGKHNYFIYLFLQTLTFSIVGFGYVGTIV

SEQ ID NO: 55357 - DNA, 1635 bp, Glycine max
  misc_feature (1)..(1635): Ceres Seq. ID no. 14308417
gaaactccaacaaaaagacccaaagagtgtgtttttgcgcattcattcatttggtgatgtgcaacaagaacagtccttcttcttcggacattcaagcaacctctattatgaagaggacgcggaagccgaatagaaggtatcatcataataccacttcttcctcttcctcttcttcttcttcttcttcttcttcttcttcctccacgacgtcgtttaagccgcaccggcgcgggaacagaaccaagacgcggaagcccaagtttgtcagcctgcggcttcagttatccgatcctaagaaaaagatgaaaacaacccagcccaagcccaagcccaagcccaagcccaagcctaaggcccaacaacaagaacagcagcagcaacagccgcagctgaatctcttccctctccatccggaccaccatgacatgcacgaggagcagaacgtggcgcttctctttagctccgatggtggggccacactcaacggcctactggaggaggagacgactacgacggaggaagggtcgatgtcggtgctgacgtgtccggcggaggacaccgggaaccggctggtacggaaggcgatgcggcggagggagagcgaggaggggagtgaagagcggtgggtgtgctactcggaggtggtggaggagaagaaggaggccatggaggaggtcacgagttattgcgtcacgggggaaacgaagacgaagacgaagacgaaaacgccgtcgtttggattgttgtcgttgaagctggatcaccaggggatattgaatgcatggtctgataaaggctctctctacgtcgcggcggaggaggaggaggaggggggcccacagactgtccctgacatattcaatggtttcctttttcataatgttgcatgggacgggttggggagtggtggtgttgttgggaatgcatggaatgttcctgaaaattgtggggctaacaagactaatgtgaaggaagaaatgggttggaagttggggcagagagaggcaagtttgcagagatacaaggagaagaggcaaagcaggctcttctataagaaaatccgttatgaagttcgcaagctgaatgctgagaaacggcccaggatgaagggacgatttgtgaagagggaatgacaagtgtagaaggatagacacggttgataataagaatgttgtcatattacagcgttggaatagaagttttcgtgcctttggttttgggtagtgctgggaagctttttcttgatggatacgatataattaattatgcaatgtaaaatcccagtggtacaaatatgaacaccccgggaaaatctatattcagctgctgtgcgacacaacatgtaaggggcagtttctagacctttgattgaatgagtttgacaaagttttcacatgtgttttgatctcaatccaaggctttagaaacagtcaaaagcatgttgtacaagtacaactaccaaaaaaatgtataggttgttctaaagacttgtacaaattctctcacaaaatttaaatatttggaacatcaaacgaactggaaattgaaacattagtcagatcgtcaacactaggggagtgatctctaggaggaagtgttgtgtgactacaacctcccactgatatatcttggcat

SEQ ID NO: 55358 - protein, 376 aa, Glycine max
  peptide (1)..(376): Ceres Seq. ID no. 14308418
  misc_feature (339)..(376): Pfam Name: CCT motif Pfam Description: CCT motif
  misc_feature (308)..(375): Homolog of NCBI NO: 20260550 NR Description: unknown protein [Arabidopsis thaliana]
  misc_feature (200)..(375): Homolog of NCBI NO: 30694486 NR Description: CONSTANS B-box zinc finger family protein
  misc_feature (200)..(375): Homolog of NCBI NO: 17433068 NR Description: Hypothetical zinc finger protein constans-like 4
  misc_feature (332)..(376): Homolog of NCBI NO: 18390719 NR Description: expressed protein [Arabidopsis thaliana]
  misc_feature (279)..(371): Homolog of NCBI NO: 11357545 NR Description: hypothetical protein F18O22.160 - Arabidopsis
  misc_feature (279)..(376): Homolog of NCBI NO: 21554072 NR Description: unknown [Arabidopsis thaliana]
  misc_feature (79)..(313): Homolog of NCBI NO: 21554072 NR Description: unknown [Arabidopsis thaliana]
  misc_feature (79)..(313): Homolog of NCBI NO: 11357545 NR Description: hypothetical protein F18O22.160 - Arabidopsis
  misc_feature (279)..(376): Homolog of NCBI NO: 18417359 NR Description: expressed protein [Arabidopsis thaliana]
  misc_feature (19)..(313): Homolog of NCBI NO: 18417359 NR Description: expressed protein [Arabidopsis thaliana]
NSNKKTQRVCFCAFIHLVMCNKNSPSSSDIQATSIMKRTRKPNRRYHHNTTSSSSSSSSSSSSSSSSTTSFKPHRRGNRTKTRKPKFVSLRLQLSDPKKKMKTTQPKPKPKPKPKPKAQQQEQQQQQPQLNLFPLHPDHHDMHEEQNVALLFSSDGGATLNGLLEEETTTTEEGSMSVLTCPAEDTGNRLVRKAMRRRESEEGSEERWVCYSEVVEEKKEAMEEVTSYCVTGETKTKTKTKTPSFGLLSLKLDHQGILNAWSDKGSLYVAAEEEEEGGPQTVPDIFNGFLFHNVAWDGLGSGGVVGNAWNVPENCGANKTNVKEEMGWKLGQREASLQRYKEKRQSRLFYKKIRYEVRKLNAEKRPRMKGRFVKRE

SEQ ID NO: 55359 - protein, 358 aa, Glycine max
  peptide (1)..(358): Ceres Seq. ID no. 14308419
  misc_feature (321)..(358): Pfam Name: CCT motif Pfam Description: CCT motif
  misc_feature (290)..(357): Homolog of NCBI NO: 20260550 NR Description: unknown protein [Arabidopsis thaliana]
  misc_feature (182)..(357): Homolog of NCBI NO: 30694486 NR Description: CONSTANS B-box zinc finger family protein
  misc_feature (182)..(357): Homolog of NCBI NO: 17433068 NR Description: Hypothetical zinc finger protein constans-like 4
  misc_feature (314)..(358): Homolog of NCBI NO: 18390719 NR Description: expressed protein [Arabidopsis thaliana]
  misc_feature (261)..(353): Homolog of NCBI NO: 11357545 NR Description: hypothetical protein F18O22.160 - Arabidopsis
  misc_feature (261)..(358): Homolog of NCBI NO: 21554072 NR Description: unknown [Arabidopsis thaliana]
  misc_feature (61)..(295): Homolog of NCBI NO: 21554072 NR Description: unknown [Arabidopsis thaliana]
  misc_feature (61)..(295): Homolog of NCBI NO: 11357545 NR Description: hypothetical protein F18O22.160 - Arabidopsis
  misc_feature (261)..(358): Homolog of NCBI NO: 18417359 NR Description: expressed protein [Arabidopsis thaliana]
  misc_feature (1)..(295): Homolog of NCBI NO: 18417359 NR Description: expressed protein [Arabidopsis thaliana]
MCNKNSPSSSDIQATSIMKRTRKPNRRYHHNTTSSSSSSSSSSSSSSSSTTSFKPHRRGNRTKTRKPKFVSLRLQLSDPKKKMKTTQPKPKPKPKPKPKAQQQEQQQQQPQLNLFPLHPDHHDMHEEQNVALLFSSDGGATLNGLLEEETTTTEEGSMSVLTCPAEDTGNRLVRKAMRRRESEEGSEERWVCYSEVVEEKKEAMEEVTSYCVTGETKTKTKTKTPSFGLLSLKLDHQGILNAWSDKGSLYVAAEEEEEGGPQTVPDIFNGFLFHNVAWDGLGSGGVVGNAWNVPENCGANKTNVKEEMGWKLGQREASLQRYKEKRQSRLFYKKIRYEVRKLNAEKRPRMKGRFVKRE

SEQ ID NO: 55360 - protein, 341 aa, Glycine max
  peptide (1)..(341): Ceres Seq. ID no. 14308420
  misc_feature (304)..(341): Pfam Name: CCT motif Pfam Description: CCT motif
  misc_feature (273)..(340): Homolog of NCBI NO: 20260550 NR Description: unknown protein [Arabidopsis thaliana]
  misc_feature (165)..(340): Homolog of NCBI NO: 30694486 NR Description: CONSTANS B-box zinc finger family protein
  misc_feature (165)..(340): Homolog of NCBI NO: 17433068 NR Description: Hypothetical zinc finger protein constans-like 4
  misc_feature (297)..(341): Homolog of NCBI NO: 18390719 NR Description: expressed protein [Arabidopsis thaliana]
  misc_feature (244)..(336): Homolog of NCBI NO: 11357545 NR Description: hypothetical protein F18O22.160 - Arabidopsis
  misc_feature (244)..(341): Homolog of NCBI NO: 21554072 NR Description: unknown [Arabidopsis thaliana]
  misc_feature (44)..(278): Homolog of NCBI NO: 21554072 NR Description: unknown [Arabidopsis thaliana]
  misc_feature (44)..(278): Homolog of NCBI NO: 11357545 NR Description: hypothetical protein F18O22.160 - Arabidopsis
  misc_feature (244)..(341): Homolog of NCBI NO: 18417359 NR Description: expressed protein [Arabidopsis thaliana]
  misc_feature (1)..(278): Homolog of NCBI NO: 18417359 NR Description: expressed protein [Arabidopsis thaliana]
MKRTRKPNRRYHHNTTSSSSSSSSSSSSSSSSTTSFKPHRRGNRTKTRKPKFVSLRLQLSDPKKKMKTTQPKPKPKPKPKPKAQQQEQQQQQPQLNLFPLHPDHHDMHEEQNVALLFSSDGGATLNGLLEEETTTTEEGSMSVLTCPAEDTGNRLVRKAMRRRESEEGSEERWVCYSEVVEEKKEAMEEVTSYCVTGETKTKTKTKTPSFGLLSLKLDHQGILNAWSDKGSLYVAAEEEEEGGPQTVPDIFNGFLFHNVAWDGLGSGGVVGNAWNVPENCGANKTNVKEEMGWKLGQREASLQRYKEKRQSRLFYKKIRYEVRKLNAEKRPRMKGRFVKRE

SEQ ID NO: 55361 - DNA, 1853 bp, Glycine max
  misc_feature (1)..(1853): Ceres Seq. ID no. 15172472
gatttcaaagagagagagagagatttcacagaccaaattgcagaggacgacaaagttcacaacttcaaggaaaatcgaaatggcccaagtgagcagagtgcacaatcttgctcaaagcactcaaattttcggtcattcttccaatcccaacaaacccaaatcggcgaattcggtttcattgaggccacgcctttggggtccctcaaaatctcgcatcttggtgaacaaaactggaagccttatgggaaattttaatgcggggaagggaaattccggcatgtttaaggtttctgcctccgtcgccgccgccgcagagaagccttcgacggcgccggagatcgtgttggaacctatcaaagacatctcgggtaccatcacattgccagggtctaagtctctgtccaatcgaattttgcttcttgctgctctctctgagggaacaactgttatagacaacttgctgtacagcgaggatattcattacatgcttggtgcattaaggacccttggactgcgtgtggaagacgaccaaacaaccaaacaagcaattgtggaaggctgtgggggattgtttcccactattaaagaatctaaagatgaaatcaatttattccttggaaatgctggtactgcgatgcgtcctttgacagcagctgtagttgctgcaggtggaaatgcaagctacgtacttgatggagtgccccgaatgagagagaggccaattggggatttggttgctggtcttaagcagctcggtgcagatgttgattgctttcttggcacaaactgtccacctgttcgtgtaaatgggaagggaggacttcctggcggaaaggtgaaactgtctggatcagttagcagtcaatacctaactgctttgcttatggcggctcctttagctcttggcgatgtggaaattgagattgttgataaactgatttctgttccatatgttgaaatgactctgaagttgatggagcgttttggagtttctgtggaacacagtggtaattgggataagttcttggtccatggaggtcaaaagtacaagtctcctggcaatgcttttgttgaaggtgatgcttcaagtgccagttacttcctagctggtgcagcagttactggtgggactatcactgttaatggctgtggcacaagcagtttacagggagatgtaaaatttgctgaagttcttgaaaagatgggagctaaggttacatggtcagagaacagtgtcaccgttactggaccgccacaagattcttctggtcaaaaagtcttgcaaggcattgatgtcaatatgaacaagatgccagatgttgccatgactcttgccgttgtcgcactatttgctaatggtcaaactaccatcagagatgtggcaagttggagagttaaagagactgagaggatgatagcaatctgcacagaactcagaaagctaggagcaacagttgaagaaggtcctgattactgtgtgattactccacctgagaaattgaatgtcacagctatagacacatatgatgaccacagaatggccatggcattctctcttgctgcttgtggggatgttccagtaaccatcaaggatcctggttgcaccaggaagacatttcccgactactttgaagtccttgagaggttcacaaagcactaagcattttgtacattgagtaggaagagagagagagataaatactcacaaaacagtgagtatatgcatgacttgcttttgtttcttaacattcccttgtaagaacttgagataatttgtattgttggaaagagctattgattctgttgtatcaaagtaatttaatttccagtacagacttggctctaaaaaaaag

SEQ ID NO: 55362 - protein, 552 aa, Glycine max
  peptide (1)..(552): Ceres Seq. ID no. 15172473
  misc_feature (27)..(552): Homolog of NCBI NO: 18251236 NR Description: 5-enolpyruvylshikimate-3-phosphate synthase
  misc_feature (27)..(552): Homolog of NCBI NO: 1351978 NR Description: 3-phosphoshikimate 1-carboxyvinyltransferase, precursor (3-enolpyruvylshikimate-5-phosphate synthase) (EPSP
  misc_feature (27)..(552): Homolog of NCBI NO: 66618 NR Description: 3-phosphoshikimate 1-carboxyvinyltransferase (EC
  misc_feature (27)..(552): Homolog of NCBI NO: 15225450 NR Description: 3-phosphoshikimate 1-carboxyvinyltransferase
  misc_feature (27)..(552): Homolog of NCBI NO: 114165 NR Description: 3-phosphoshikimate 1-carboxyvinyltransferase 1, precursor (5-enolpyruvylshikimate-3-phosphate synthase 1) (EPSP
  misc_feature (27)..(552): Homolog of NCBI NO: 114174 NR Description: 3-phosphoshikimate 1-carboxyvinyltransferase, precursor (5-enolpyruvylshikimate-3-phosphate synthase) (EPSP
  misc_feature (27)..(552): Homolog of NCBI NO: 66619 NR Description: 3-phosphoshikimate 1-carboxyvinyltransferase (EC
  misc_feature (30)..(552): Homolog of NCBI NO: 114176 NR Description: 3-phosphoshikimate 1-carboxyvinyltransferase, precursor (5-enolpyruvylshikimate-3-phosphate synthase) (EPSP
  misc_feature (49)..(552): Homolog of NCBI NO: 16751567 NR Description: 5-enolpyruvylshikimate-3-phosphate synthase
  misc_feature (49)..(552): Homolog of NCBI NO: 16751569 NR Description: 5-enolpyruvylshikimate-3-phosphate synthase B
ISKREREISQTKLQRTTKFTTSRKIEMAQVSRVHNLAQSTQIFGHSSNPNKPKSANSVSLRPRLWGPSKSRILVNKTGSLMGNFNAGKGNSGMFKVSASVAAAAEKPSTAPEIVLEPIKDISGTITLPGSKSLSNRILLLAALSEGTTVIDNLLYSEDIHYMLGALRTLGLRVEDDQTTKQAIVEGCGGLFPTIKESKDEINLFLGNAGTAMRPLTAAVVAAGGNASYVLDGVPRMRERPIGDLVAGLKQLGADVDCFLGTNCPPVRVNGKGGLPGGKVKLSGSVSSQYLTALLMAAPLALGDVEIEIVDKLISVPYVEMTLKLMERFGVSVEHSGNWDKFLVHGGQKYKSPGNAFVEGDASSASYFLAGAAVTGGTITVNGCGTSSLQGDVKFAEVLEKMGAKVTWSENSVTVTGPPQDSSGQKVLQGIDVNMNKMPDVAMTLAVVALFANGQTTIRDVASWRVKETERMIAICTELRKLGATVEEGPDYCVITPPEKLNVTAIDTYDDHRMAMAFSLAACGDVPVTIKDPGCTRKTFPDYFEVLERFTKH

SEQ ID NO: 55363 - protein, 526 aa, Glycine max
  peptide (1)..(526): Ceres Seq. ID no. 15172474
  misc_feature (1)..(526): Homolog of NCBI NO: 18251236 NR Description: 5-enolpyruvylshikimate-3-phosphate synthase
  misc_feature (1)..(526): Homolog of NCBI NO: 1351978 NR Description: 3-phosphoshikimate 1-carboxyvinyltransferase, precursor (3-enolpyruvylshikimate-5-phosphate synthase) (EPSP
  misc_feature (1)..(526): Homolog of NCBI NO: 66618 NR Description: 3-phosphoshikimate 1-carboxyvinyltransferase (EC
  misc_feature (1)..(526): Homolog of NCBI NO: 15225450 NR Description: 3-phosphoshikimate 1-carboxyvinyltransferase
  misc_feature (1)..(526): Homolog of NCBI NO: 114165 NR Description: 3-phosphoshikimate 1-carboxyvinyltransferase 1, precursor (5-enolpyruvylshikimate-3-phosphate synthase 1) (EPSP
  misc_feature (1)..(526): Homolog of NCBI NO: 114174 NR Description: 3-phosphoshikimate 1-carboxyvinyltransferase, precursor (5-enolpyruvylshikimate-3-phosphate synthase) (EPSP
  misc_feature (1)..(526): Homolog of NCBI NO: 66619 NR Description: 3-phosphoshikimate 1-carboxyvinyltransferase (EC
  misc_feature (4)..(526): Homolog of NCBI NO: 114176 NR Description: 3-phosphoshikimate 1-carboxyvinyltransferase, precursor (5-enolpyruvylshikimate-3-phosphate synthase) (EPSP
  misc_feature (23)..(526): Homolog of NCBI NO: 16751567 NR Description: 5-enolpyruvylshikimate-3-phosphate synthase
  misc_feature (23)..(526): Homolog of NCBI NO: 16751569 NR Description: 5-enolpyruvylshikimate-3-phosphate synthase B
MAQVSRVHNLAQSTQIFGHSSNPNKPKSANSVSLRPRLWGPSKSRILVNKTGSLMGNFNAGKGNSGMFKVSASVAAAAEKPSTAPEIVLEPIKDISGTITLPGSKSLSNRILLLAALSEGTTVIDNLLYSEDIHYMLGALRTLGLRVEDDQTTKQAIVEGCGGLFPTIKESKDEINLFLGNAGTAMRPLTAAVVAAGGNASYVLDGVPRMRERPIGDLVAGLKQLGADVDCFLGTNCPPVRVNGKGGLPGGKVKLSGSVSSQYLTALLMAAPLALGDVEIEIVDKLISVPYVEMTLKLMERFGVSVEHSGNWDKFLVHGGQKYKSPGNAFVEGDASSASYFLAGAAVTGGTITVNGCGTSSLQGDVKFAEVLEKMGAKVTWSENSVTVTGPPQDSSGQKVLQGIDVNMNKMPDVAMTLAVVALFANGQTTIRDVASWRVKETERMIAICTELRKLGATVEEGPDYCVITPPEKLNVTAIDTYDDHRMAMAFSLAACGDVPVTIKDPGCTRKTFPDYFEVLERFTKH

SEQ ID NO: 55364 - protein, 472 aa, Glycine max
  peptide (1)..(472): Ceres Seq. ID no. 15172475
  misc_feature (1)..(472): Homolog of NCBI NO: 18251236 NR Description: 5-enolpyruvylshikimate-3-phosphate synthase
  misc_feature (1)..(472): Homolog of NCBI NO: 1351978 NR Description: 3-phosphoshikimate 1-carboxyvinyltransferase, precursor (3-enolpyruvylshikimate-5-phosphate synthase) (EPSP
  misc_feature (1)..(472): Homolog of NCBI NO: 66618 NR Description: 3-phosphoshikimate 1-carboxyvinyltransferase (EC
  misc_feature (1)..(472): Homolog of NCBI NO: 15225450 NR Description: 3-phosphoshikimate 1-carboxyvinyltransferase
  misc_feature (1)..(472): Homolog of NCBI NO: 114165 NR Description: 3-phosphoshikimate 1-carboxyvinyltransferase 1, precursor (5-enolpyruvylshikimate-3-phosphate synthase 1) (EPSP
  misc_feature (1)..(472): Homolog of NCBI NO: 114174 NR Description: 3-phosphoshikimate 1-carboxyvinyltransferase, precursor (5-enolpyruvylshikimate-3-phosphate synthase) (EPSP
  misc_feature (1)..(472): Homolog of NCBI NO: 66619 NR Description: 3-phosphoshikimate 1-carboxyvinyltransferase (EC
  misc_feature (1)..(472): Homolog of NCBI NO: 114176 NR Description: 3-phosphoshikimate 1-carboxyvinyltransferase, precursor (5-enolpyruvylshikimate-3-phosphate synthase) (EPSP
  misc_feature (1)..(472): Homolog of NCBI NO: 16751567 NR Description: 5-enolpyruvylshikimate-3-phosphate synthase
  misc_feature (1)..(472): Homolog of NCBI NO: 16751569 NR Description: 5-enolpyruvylshikimate-3-phosphate synthase B
MGNFNAGKGNSGMFKVSASVAAAAEKPSTAPEIVLEPIKDISGTITLPGSKSLSNRILLLAALSEGTTVIDNLLYSEDIHYMLGALRTLGLRVEDDQTTKQAIVEGCGGLFPTIKESKDEINLFLGNAGTAMRPLTAAVVAAGGNASYVLDGVPRMRERPIGDLVAGLKQLGADVDCFLGTNCPPVRVNGKGGLPGGKVKLSGSVSSQYLTALLMAAPLALGDVEIEIVDKLISVPYVEMTLKLMERFGVSVEHSGNWDKFLVHGGQKYKSPGNAFVEGDASSASYFLAGAAVTGGTITVNGCGTSSLQGDVKFAEVLEKMGAKVTWSENSVTVTGPPQDSSGQKVLQGIDVNMNKMPDVAMTLAVVALFANGQTTIRDVASWRVKETERMIAICTELRKLGATVEEGPDYCVITPPEKLNVTAIDTYDDHRMAMAFSLAACGDVPVTIKDPGCTRKTFPDYFEVLERFTKH

SEQ ID NO: 55365 - DNA, 1407 bp, Glycine max
  misc_feature (1)..(1407): Ceres Seq. ID no. 15226401
atgcaagtcgatcagttcgcccttaagaaataggcaacatcggttcgaatccgataccgataaagggctttttcctttttttttcggtatgccgctccgccagcaaggagcgaaagaaccaagtggtttgtggtaatgttagaatttgcacctatttgtatctatttagtgatcagtctgctagtttctttgatcttactcggtcttccttttctctttgcttccaatagttcgacctatccagaaaaattgtcggcctacgaatgtggtttcgatcctttcggtgatgccagaagtcgtttcgatatacgattttatcttgtttccattttatttattatttttgatctggaagtaacctttttctttccttgggcagtatctctcaacaagattgatctgtttggattttggtctatgatggcctttttattgattttgacgattggatttctctatgaatggaaaaggggtgctttggattgggagtaatcactagtgatagggcaaaaatagggaggaaggataaaggaaagagcgatgcctacattaaatcaattgattcgtcatggtagagaagaaaaacggcgcacggaccgtactcgagctttggatcaatgtccccagaagcaaggagtatgcctgcgtgttccaacgagaacaccgaaaaaaccaaattcagctctacgtaagatagccaaagtacgattgagcaatcgacatgatatatttgcttacattccgggcgaaggtcataatttgcaggaacattctatggtgttaataagaggaggtagagtgaaagatttgccaggtgtgaaattccattgtattcgaggagtcaaggatttgttgggaattccggatcgaagaagaggcagatccaaatatggtgcagaaaaacccaaatcgatatgaatggaggatgcccctggaacttcttttttttctcggtcaggagaggtacgaagtcactcgccctatatataatagaatagtgaaagcaggagaggtttagcggatcagtgaaaaaaatcttattctagtaagtcatttgtccgttgctggtcatcaatctccggtatcgattcccggttttcccgggcctactcccttaaagcttgttacggtattctcactccgatcgccccaatgaagggcaatctctatcccttctaactttattctgggatttcttattggcattggattttacaagtgagctaatcaccaaatgagcattaacccttataaagtaagctagtacaaggtagacttaagcaatctcattgccctgaaagaaagctcagtaggtggatcttctttccaggtcgcaggtggagagccggttgaaaggccttctgccaattgagaatgatccattaatataaaaaaaaaaaaaaaaaa

SEQ ID NO: 55366 - protein, 125 aa, Glycine max
  peptide (1)..(125): Ceres Seq. ID no. 15226402
  misc_feature (3)..(124): Homolog of NCBI NO: 266984 NR Description: 40S RIBOSOMAL PROTEIN S12, MITOCHONDRIAL
  misc_feature (1)..(125): Homolog of NCBI NO: 2500451 NR Description: MITOCHONDRIAL RIBOSOMAL PROTEIN S12
  misc_feature (1)..(125): Homolog of NCBI NO: 1351025 NR Description: Mitochondrial ribosomal protein S12
  misc_feature (1)..(123): Homolog of NCBI NO: 4106841 NR Description: ribosomal protein S12 [Solanum tuberosum]
  misc_feature (1)..(125): Homolog of NCBI NO: 37591094 NR Description: ribosomal protein S12 [Brassica napus]
  misc_feature (1)..(124): Homolog of NCBI NO: 2500448 NR Description: MITOCHONDRIAL RIBOSOMAL PROTEIN S12
  misc_feature (1)..(125): Homolog of NCBI NO: 13959705 NR Description: Mitochondrial ribosomal protein S12
  misc_feature (1)..(124): Homolog of NCBI NO: 38605685 NR Description: Mitochondrial ribosomal protein S12
  misc_feature (1)..(124): Homolog of NCBI NO: 2500449 NR Description: MITOCHONDRIAL RIBOSOMAL PROTEIN S12
  misc_feature (1)..(125): Homolog of NCBI NO: 2148022 NR Description: ribosomal protein S12 - Magnolia soulangeana
MPTLNQLIRHGREEKRRTDRTRALDQCPQKQGVCLRVPTRTPKKPNSALRKIAKVRLSNRHDIFAYIPGEGHNLQEHSMVLIRGGRVKDLPGVKFHCIRGVKDLLGIPDRRRGRSKYGAEKPKSI

SEQ ID NO: 55367 - protein, 118 aa, Glycine max
  peptide (1)..(118): Ceres Seq. ID no. 15226403
  misc_feature (37)..(117): Pfam Name: NADH-ubiquinone/plastoquinone oxidoreductase, chain 3 Pfam Description: NADH-ubiquinone/plastoquinone oxidoreductase,
  misc_feature (4)..(117): Homolog of NCBI NO: 33943533 NR Description: putative NADH dehydrogenase subunit 3 precursor
  misc_feature (1)..(118): Homolog of NCBI NO: 20198300 NR Description: hypothetical protein [Arabidopsis thaliana]
  misc_feature (1)..(118): Homolog of NCBI NO: 38605649 NR Description: NADH-ubiquinone oxidoreductase chain 3
MLEFAPICIYLVISLLVSLILLGLPFLFASNSSTYPEKLSAYECGFDPFGDARSRFDIRFYLVSILFIIFDLEVTFFFPWAVSLNKIDLFGFWSMMAFLLILTIGFLYEWKRGALDWE

SEQ ID NO: 55368 - DNA, 1181 bp, Glycine max
  misc_feature (1)..(1181): Ceres Seq. ID no. 15227214
gttatgttcttacaagttctatatatatatatatatatacatacatacgcatacttacttgagtcacttgtttaaatatttttctgtttcaaaaaattggaacctttcactgttgaattttgatgactacacccttggaacatgattacataggcttatcagaggctccatccatggagaaaagctgtgataagatatcctcttcagtttcctccaatctttcttctgaggatgagaacactacttcatctctgaacttcaaggagacagagctgaggcttggcctgccaggttgtgattctcctgagaacaacaacaaatcaggggtctctctttttggcaaggatttgcagaagaagaataatggctattcttctgcttcttcaactccttccaacaagaacctcaagaggggcttccctgatgccattagctcttcttcttcctcttctgggaaatggattttctcggcgagtgatgcagcaactgaagctgatttggaaagtggttctaatatctctggaggatgcaacaaagaggttggaatggttcctcactatgagaaaccagctcaagttgctgcaacaaatgaacatgctcctgctcctgctccaaaagcacaagttgtgggatggccaccaattcgatcttttcgaaagaacacgatgatggcttataatttggcaaaatgtgacaacgaagctgaggagaaatcaggagtaggttgtctttacgttaaggtcagcatggatggtgctccatatctcagaaaggttgatctgaaaacctacagcaactatattgaactttcttcagctcttgagaaaatgttcagctgctttaccattggtcaatgcaattctcgtgcacttcctgggaaagatggattaagtgagagtgcattcagggatcttgttgatggctctgaatatgttcttacatatgaagataaggaaggagactggatgcttgtgggtgatgtcccttggaaaatgttcactgagtcatgtaagaaactaaggataatgaaaggctctgaggcaatcgggctagctccaaggggtatggaaaaatttaggagccaatactagtacagaagattctgctccaccactgggtcattcactgaagcatataaagaaggtttagaggagaatttgagcttaataaaaaaataaaat

SEQ ID NO: 55369 - protein, 322 aa, Glycine max
  peptide (1)..(322): Ceres Seq. ID no. 15227215
  misc_feature (44)..(313): Pfam Name: AUX/IAA family Pfam Description: AUX/IAA family
  misc_feature (6)..(321): Homolog of NCBI NO: 16610193 NR Description: IAA9 protein [Nicotiana tabacum]
  misc_feature (6)..(109): Homolog of NCBI NO: 20269051 NR Description: aux/IAA protein [Populus tremula x Populus
  misc_feature (148)..(321): Homolog of NCBI NO: 20269051 NR Description: aux/IAA protein [Populus tremula x Populus
  misc_feature (26)..(321): Homolog of NCBI NO: 15235556 NR Description: AUX/IAA family [Arabidopsis thaliana]
  misc_feature (6)..(321): Homolog of NCBI NO: 20257219 NR Description: auxin-regulated protein [Zinnia elegans]
  misc_feature (6)..(321): Homolog of NCBI NO: 25989504 NR Description: Aux/IAA protein [Solanum tuberosum]
MTTPLEHDYIGLSEAPSMEKSCDKISSSVSSNLSSEDENTTSSLNFKETELRLGLPGCDSPENNNKSGVSLFGKDLQKKNNGYSSASSTPSNKNLKRGFPDAISSSSSSSGKWIFSASDAATEADLESGSNISGGCNKEVGMVPHYEKPAQVAATNEHAPAPAPKAQVVGWPPIRSFRKNTMMAYNLAKCDNEAEEKSGVGCLYVKVSMDGAPYLRKVDLKTYSNYIELSSALEKMFSCFTIGQCNSRALPGKDGLSESAFRDLVDGSEYVLTYEDKEGDWMLVGDVPWKMFTESCKKLRIMKGSEAIGLAPRGMEKFRSQY

SEQ ID NO: 55370 - protein, 305 aa, Glycine max
  peptide (1)..(305): Ceres Seq. ID no. 15227216
  misc_feature (27)..(296): Pfam Name: AUX/IAA family Pfam Description: AUX/IAA family
  misc_feature (1)..(304): Homolog of NCBI NO: 16610193 NR Description: IAA9 protein [Nicotiana tabacum]
  misc_feature (1)..(92): Homolog of NCBI NO: 20269051 NR Description: aux/IAA protein [Populus tremula x Populus
  misc_feature (131)..(304): Homolog of NCBI NO: 20269051 NR Description: aux/IAA protein [Populus tremula x Populus
  misc_feature (9)..(304): Homolog of NCBI NO: 15235556 NR Description: AUX/IAA family [Arabidopsis thaliana]
  misc_feature (1)..(304): Homolog of NCBI NO: 20257219 NR Description: auxin-regulated protein [Zinnia elegans]
  misc_feature (1)..(304): Homolog of NCBI NO: 25989504 NR Description: Aux/IAA protein [Solanum tuberosum]
MEKSCDKISSSVSSNLSSEDENTTSSLNFKETELRLGLPGCDSPENNNKSGVSLFGKDLQKKNNGYSSASSTPSNKNLKRGFPDAISSSSSSSGKWIFSASDAATEADLESGSNISGGCNKEVGMVPHYEKPAQVAATNEHAPAPAPKAQVVGWPPIRSFRKNTMMAYNLAKCDNEAEEKSGVGCLYVKVSMDGAPYLRKVDLKTYSNYIELSSALEKMFSCFTIGQCNSRALPGKDGLSESAFRDLVDGSEYVLTYEDKEGDWMLVGDVPWKMFTESCKKLRIMKGSEAIGLAPRGMEKFRSQY

SEQ ID NO: 55371 - protein, 181 aa, Glycine max
  peptide (1)..(181): Ceres Seq. ID no. 15227217
  misc_feature (1)..(172): Pfam Name: AUX/IAA family Pfam Description: AUX/IAA family
  misc_feature (1)..(180): Homolog of NCBI NO: 16610193 NR Description: IAA9 protein [Nicotiana tabacum]
  misc_feature (7)..(180): Homolog of NCBI NO: 20269051 NR Description: aux/IAA protein [Populus tremula x Populus
  misc_feature (1)..(180): Homolog of NCBI NO: 15235556 NR Description: AUX/IAA family [Arabidopsis thaliana]
  misc_feature (1)..(180): Homolog of NCBI NO: 20257219 NR Description: auxin-regulated protein [Zinnia elegans]
  misc_feature (1)..(180): Homolog of NCBI NO: 25989504 NR Description: Aux/IAA protein [Solanum tuberosum]
MVPHYEKPAQVAATNEHAPAPAPKAQVVGWPPIRSFRKNTMMAYNLAKCDNEAEEKSGVGCLYVKVSMDGAPYLRKVDLKTYSNYIELSSALEKMFSCFTIGQCNSRALPGKDGLSESAFRDLVDGSEYVLTYEDKEGDWMLVGDVPWKMFTESCKKLRIMKGSEAIGLAPRGMEKFRSQY

SEQ ID NO: 55372 - DNA, 1813 bp, Glycine max
  misc_feature (1)..(1813): Ceres Seq. ID no. 14308747
ggctcgttcgtttacctcaaacctcaaagaaaaaaaaaaacattgagttatcacttgttttcttttttgggaagacaaaaacattgagttcagcttctcacttccatggctgaggccagactctacgctcccccctctcaattggatattaagcaaattattttagaagcacagcatcgatggctacgtccggctgaaatttgtgcaattctcggtaattataagaagtttcgaattgctccagaacctgcacatatgccaccaagtggttcacttttcttatttgatcggaaggtgctgagacacttcagaaaggatggccataactggaggaagaaaaaagatggaaaaacagtgagagaagctcatgagagactaaaggctggaagtgtggatgtgttgcattgctactatgcccatggagaagaaaatgaaaattttcaaagacgcacgtattggttgcttgaagaggaactctctcacattgttctcgtccattatcgacaagtgaagggaaccaaggcgaattttacaagtgctaaagaaaatgaagaatctcttccttatgctcaacaaactgataaaattatgccccaaacagagatggacacttctttatcatctactcttcatccacatagttaccaggttccttcaaaaactgtcgatacaagcatgaacagtgcccaaacatcagaatatgaagaagctgaatctggtatttcttttgtgcgcattaataatttaaaatgttctgttttcaatttttcatatctagagggcattctgagtagcctttttgttgactttgttcttcgtatcactttcttgtgtgtatttaaattttttaactgtgtaatttttacagcattcaataaccatgcaagttctgagttttattctttcctcgagttacaacgccctgttgagaagatttcacctcaacctgctgatttttattctcctcggccactcataagtaaatttcttcattttaaattgtttttgagtttaactttgatgcattgtcagtttgtcactgtaaatttacattaccactctgtcatacattgtcgtatcattaaatgagtatgacttttttgaactaattttaagaatcaaacctttttaaatgttgtgacagtgcatgattgcatgatagtgtaaaaaactttacactaatattgcatcaaaaatcaaataccttgttatatatcttccatacatactggccttaatcaggaaagtctgtacctaacatgaatcatattattgaaactgggacagatgatcaagagaagttacctattattcctggggtgaattatatctcactcactcaagacaataaaaacaaagacattcttaatgctggattgacatatgaatccccaaaaccccttggcttttcctcatgggaaggtatcttagaaaataatgctggaagtcaacatgtgcattttcagcctttatttcctggaacacagcctgataacatgggaatcaatagcaatttttctcaaggagaagagataatggtgccatatttgaccaccagcattgctaagcagcatgagaatggaagtatcattaaagctgaaggaaattggcaggtttatgatgttgattctttacgcatgtccagttggcctatagatagtgcttattcaggctcaacatgtgaggtaagttgtagcaactgtgagcaggaagttaatgatgttgattttcagaaatccttggaacagtgtcttctacattcacacaaacaaaacaaggttctcatgcaaaatgatcttcaagaaaaactttt

SEQ ID NO: 55373 - protein, 327 aa, Glycine max
  peptide (1)..(327): Ceres Seq. ID no. 14308748
  misc_feature (14)..(145): Homolog of NCBI NO: 38344575 NR Description: OSJNBa0053B21.7 [Oryza sativa (japonica
  misc_feature (18)..(165): Homolog of NCBI NO: 1084392 NR Description: CG-1 protein - parsley (fragment)
  misc_feature (55)..(204): Homolog of NCBI NO: 25412096 NR Description: hypothetical protein At2g22300 [imported] -
  misc_feature (7)..(205): Homolog of NCBI NO: 20127124 NR Description: calmodulin-binding transcription activator
  misc_feature (9)..(175): Homolog of NCBI NO: 15242417 NR Description: calmodulin-binding protein [Arabidopsis thaliana]
  misc_feature (7)..(151): Homolog of NCBI NO: 30697970 NR Description: calmodulin-binding protein [Arabidopsis thaliana]
  misc_feature (1)..(214): Homolog of NCBI NO: 33146619 NR Description: putative anther ethylene-upregulated protein ER1
  misc_feature (1)..(206): Homolog of NCBI NO: 37533660 NR Description: putative calmodulin binding protein similar to
  misc_feature (1)..(203): Homolog of NCBI NO: 37991923 NR Description: putative calmodulin-binding transcription factor
  misc_feature (1)..(204): Homolog of NCBI NO: 30681670 NR Description: ethylene-induced calmodulin-binding protein,
MAEARLYAPPSQLDIKQIILEAQHRWLRPAEICAILGNYKKFRIAPEPAHMPPSGSLFLFDRKVLRHFRKDGHNWRKKKDGKTVREAHERLKAGSVDVLHCYYAHGEENENFQRRTYWLLEEELSHIVLVHYRQVKGTKANFTSAKENEESLPYAQQTDKIMPQTEMDTSLSSTLHPHSYQVPSKTVDTSMNSAQTSEYEEAESGISFVRINNLKCSVFNFSYLEGILSSLFVDFVLRITFLCVFKFFNCVIFTAFNNHASSEFYSFLELQRPVEKISPQPADFYSPRPLISKFLHFKLFLSLTLMHCQFVTVNLHYHSVIHCRIIK

SEQ ID NO: 55374 - protein, 277 aa, Glycine max
  peptide (1)..(277): Ceres Seq. ID no. 14308749
  misc_feature (1)..(95): Homolog of NCBI NO: 38344575 NR Description: OSJNBa0053B21.7 [Oryza sativa (japonica
  misc_feature (1)..(115): Homolog of NCBI NO: 1084392 NR Description: CG-1 protein - parsley (fragment)
  misc_feature (5)..(154): Homolog of NCBI NO: 25412096 NR Description: hypothetical protein At2g22300 [imported] -
  misc_feature (1)..(155): Homolog of NCBI NO: 20127124 NR Description: calmodulin-binding transcription activator
  misc_feature (1)..(125): Homolog of NCBI NO: 15242417 NR Description: calmodulin-binding protein [Arabidopsis thaliana]
  misc_feature (1)..(101): Homolog of NCBI NO: 30697970 NR Description: calmodulin-binding protein [Arabidopsis thaliana]
  misc_feature (1)..(164): Homolog of NCBI NO: 33146619 NR Description: putative anther ethylene-upregulated protein ER1
  misc_feature (1)..(156): Homolog of NCBI NO: 37533660 NR Description: putative calmodulin binding protein similar to
  misc_feature (1)..(153): Homolog of NCBI NO: 37991923 NR Description: putative calmodulin-binding transcription factor
  misc_feature (1)..(154): Homolog of NCBI NO: 30681670 NR Description: ethylene-induced calmodulin-binding protein,
MPPSGSLFLFDRKVLRHFRKDGHNWRKKKDGKTVREAHERLKAGSVDVLHCYYAHGEENENFQRRTYWLLEEELSHIVLVHYRQVKGTKANFTSAKENEESLPYAQQTDKIMPQTEMDTSLSSTLHPHSYQVPSKTVDTSMNSAQTSEYEEAESGISFVRINNLKCSVFNFSYLEGILSSLFVDFVLRITFLCVFKFFNCVIFTAFNNHASSEFYSFLELQRPVEKISPQPADFYSPRPLISKFLHFKLFLSLTLMHCQFVTVNLHYHSVIHCRIIK

SEQ ID NO: 55375 - protein, 184 aa, Glycine max
  peptide (1)..(184): Ceres Seq. ID no. 14308750
MNHIIETGTDDQEKLPIIPGVNYISLTQDNKNKDILNAGLTYESPKPLGFSSWEGILENNAGSQHVHFQPLFPGTQPDNMGINSNFSQGEEIMVPYLTTSIAKQHENGSIIKAEGNWQVYDVDSLRMSSWPIDSAYSGSTCEVSCSNCEQEVNDVDFQKSLEQCLLHSHKQNKVLMQNDLQEKL

SEQ ID NO: 55376 - DNA, 1240 bp, Glycine max
  misc_feature (1)..(1240): Ceres Seq. ID no. 14308709
tttcaattttgttttgcacactactatcaattattgggaggtaagggctagaaaacaagttgtatcaattccaattgtggacaccattatacatacatcaaattttgcatgtcacgtgtattcacagtttgaccttagtattcaattattgggaggggaggaaaggaaaacaaagttatttcaattccaattgttgacactactatacatataatttcacatttcatatttgtttatgaatttaatggtgatatgctaacaatataaaatagttttacactttcatccaatcatagatcaccatctacatgacttctacgatagttttgtaaaaatcaacaaacttattacaaattatagattataaatggatgacaatgtaaattagttttacacttttacattgtcaatacatatctttttctctcttcatttattgacattaattttcaattaaatttgcagtttttacctggggcatgtttgatatccaatgatggcacaaagaagatgtgtggtgatgatcatagggcatggtacactagggggtgtcctagcaaatatggttgggctgctctaataggccttgctctttacatcatattcttctcacctggcatgggaactgttccatgggttgtgaactcagagatctatcccttgaggtacagaggggtttgtggaggaatagcatccacaactgtttggatttccaacctcattgtttctgagtccttcttgtccctcacaaaagctctagggacagcatggacattcatgatgtttggaattgtggccattgtggcaatcttctttgtcattatttttgtgcctgagaccaaaggggttcctatggaggaagtggagaagatgctagaacaaagatctgtgcagttcaagttttgggagaagagagattctggctctgagaagcattgactcaaagaacaaaaaaaaaagcaaaattgtttgagtcatttttattagttttatagcttaaaatagtgaaattaagtggcttgtgaagttatggttatttgatgacaatgattgttctctctgggtaagatttggtgatagttagcattttagctctaatgtgtatgtagttgtctagatgattagttggattgatgaaaatccttatgaaattccttagaggattggaatatgagaattggtaataagctcttatttgtgatataatgaagaaaaaaagtgtatcaagaatttgatcttt

SEQ ID NO: 55377 - protein, 142 aa, Glycine max
  peptide (1)..(142): Ceres Seq. ID no. 14308710
  misc_feature (1)..(122): Pfam Name: Sugar (and other) transporter Pfam Description: Sugar (and other) transporter
  misc_feature (14)..(126): Homolog of NCBI NO: 38347452 NR Description: OSJNBa0076N16.21 [Oryza sativa (japonica
  misc_feature (18)..(142): Homolog of NCBI NO: 30689342 NR Description: sugar transporter family [Arabidopsis thaliana]
  misc_feature (18)..(142): Homolog of NCBI NO: 25308955 NR Description: probable membrane transporter [imported] -
  misc_feature (1)..(123): Homolog of NCBI NO: 15227479 NR Description: sugar transporter family [Arabidopsis thaliana]
  misc_feature (1)..(123): Homolog of NCBI NO: 15235767 NR Description: sugar transporter family [Arabidopsis thaliana]
  misc_feature (1)..(123): Homolog of NCBI NO: 9652186 NR Description: putative Na+/myo-inositol symporter
  misc_feature (1)..(142): Homolog of NCBI NO: 9652184 NR Description: putative Na+/myo-inositol symporter
  misc_feature (1)..(141): Homolog of NCBI NO: 32488451 NR Description: OSJNBa0004N05.8 [Oryza sativa (japonica
  misc_feature (1)..(135): Homolog of NCBI NO: 33146705 NR Description: putative proton myo-inositol transporter
  misc_feature (1)..(141): Homolog of NCBI NO: 15220697 NR Description: sugar transporter family [Arabidopsis thaliana]
MCGDDHRAWYTRGCPSKYGWAALIGLALYIIFFSPGMGTVPWVVNSEIYPLRYRGVCGGIASTTVWISNLIVSESFLSLTKALGTAWTFMMFGIVAIVAIFFVIIFVPETKGVPMEEVEKMLEQRSVQFKFWEKRDSGSEKH

SEQ ID NO: 55378 - protein, 106 aa, Glycine max
  peptide (1)..(106): Ceres Seq. ID no. 14308711
  misc_feature (1)..(86): Pfam Name: Sugar (and other) transporter Pfam Description: Sugar (and other) transporter
  misc_feature (1)..(90): Homolog of NCBI NO: 38347452 NR Description: OSJNBa0076N16.21 [Oryza sativa (japonica
  misc_feature (1)..(106): Homolog of NCBI NO: 30689342 NR Description: sugar transporter family [Arabidopsis thaliana]
  misc_feature (1)..(106): Homolog of NCBI NO: 25308955 NR Description: probable membrane transporter [imported] -
  misc_feature (1)..(87): Homolog of NCBI NO: 15227479 NR Description: sugar transporter family [Arabidopsis thaliana]
  misc_feature (1)..(87): Homolog of NCBI NO: 15235767 NR Description: sugar transporter family [Arabidopsis thaliana]
  misc_feature (1)..(87): Homolog of NCBI NO: 9652186 NR Description: putative Na+/myo-inositol symporter
  misc_feature (1)..(106): Homolog of NCBI NO: 9652184 NR Description: putative Na+/myo-inositol symporter
  misc_feature (1)..(105): Homolog of NCBI NO: 32488451 NR Description: OSJNBa0004N05.8 [Oryza sativa (japonica
  misc_feature (1)..(99): Homolog of NCBI NO: 33146705 NR Description: putative proton myo-inositol transporter
  misc_feature (1)..(105): Homolog of NCBI NO: 15220697 NR Description: sugar transporter family [Arabidopsis thaliana]
MGTVPWVVNSEIYPLRYRGVCGGIASTTVWISNLIVSESFLSLTKALGTAWTFMMFGIVAIVAIFFVIIFVPETKGVPMEEVEKMLEQRSVQFKFWEKRDSGSEKH

SEQ ID NO: 55379 - DNA, 1160 bp, Glycine max
  misc_feature (1)..(1160): Ceres Seq. ID no. 14310592
aaacgtgtttcatgaaatatctaacttttaaagagctcaatgtgtacaaactcattgtgagcggatgcaacgttaaataagagcatgaatagactcatgtctacacatctaactagagtagaagccaagacgcactgttctacaaattaaagaaaagactcctttatggataatatttatatcaaacaagcgttggtattgaaggaagttaagcatgtattccaaaagcttattggcgaggatcccatggagagtatgtatatggttgacactatccaaaggcttggcattgaacaccacttcgaagaggaaattgaagctgctcttcagaagcaacatttgatatttagcagtcatctcagtgattttgcgaataaccataaactttgtgaagttgcacttccattccgtttacttagacaaagaggccattatgttcttgcagatgtatttgacaacctgaagagtaacaaaaaagagtttagagaaaaacacggtgaagatgtgaagggtcttatttctctgtatgaggcaacccagctaggtattgaaggagaagacagtcttgatgatgcaggttacctctgccaccaacttcttcatgcatggctgacaagacatgaagagcataatgaagctatgtatgttgctaagactcttcagcatccgcttcattatgacttatcaagattcagggacgacacaagtatacttctaaatgatttcaagaccaagagagaatgggaatgcttagaggaacttgctgaaatcaattccagcatagttaggttcgtgaaccagaatgaaataactcaagtttacaaatggtggaaagaccttgggctgaacaatgaggtgaagttcgctagatatcaacctcttaaatggtacatgtggccaatggcatgcttcacagatccacgcttctcagagcaaaggattgagctcaccaaacctatctctctggtctacattattgatgacattttcgatgtttatgggacattagaccagcttactttatttacagatgctattaaaaggtattcaaatatatatatttctagtgtgtgcggcagacaatcaatagaattagcgatgccaacctagttagaatctttactcctattgtgatgcttaatcatgcaccttttacttac

SEQ ID NO: 55380 - protein, 314 aa, Glycine max
  peptide (1)..(314): Ceres Seq. ID no. 14310593
  misc_feature (7)..(175): Pfam Name: Terpene synthase, N-terminal domain Pfam Description: Terpene synthase, N-terminal domain
  misc_feature (1)..(302): Homolog of NCBI NO: 7448228 NR Description: germacrene C synthase, epidermal - tomato
  misc_feature (1)..(302): Homolog of NCBI NO: 7448227 NR Description: germacrene C synthase - tomato
  misc_feature (33)..(295): Homolog of NCBI NO: 18766934 NR Description: beta-caryophyllene synthase QHS1 [Artemisia annua]
  misc_feature (7)..(294): Homolog of NCBI NO: 14331015 NR Description: putative chloroplast terpene synthase [Quercus
  misc_feature (33)..(296): Homolog of NCBI NO: 25404336 NR Description: hypothetical protein T13M11.3 [imported] -
  misc_feature (33)..(296): Homolog of NCBI NO: 15220567 NR Description: terpene synthase/cyclase family [Arabidopsis
  misc_feature (10)..(296): Homolog of NCBI NO: 29468398 NR Description: linalool synthase [Arabidopsis thaliana]
  misc_feature (12)..(294): Homolog of NCBI NO: 30349140 NR Description: (E)-b-ocimene synthase [Antirrhinum majus]
  misc_feature (12)..(294): Homolog of NCBI NO: 30349144 NR Description: myrcene synthase 1e20 [Antirrhinum majus]
  misc_feature (12)..(294): Homolog of NCBI NO: 30349142 NR Description: myrcene synthase Oc15 [Antirrhinum majus]
MDNIYIKQALVLKEVKHVFQKLIGEDPMESMYMVDTIQRLGIEHHFEEEIEAALQKQHLIFSSHLSDFANNHKLCEVALPFRLLRQRGHYVLADVFDNLKSNKKEFREKHGEDVKGLISLYEATQLGIEGEDSLDDAGYLCHQLLHAWLTRHEEHNEAMYVAKTLQHPLHYDLSRFRDDTSILLNDFKTKREWECLEELAEINSSIVRFVNQNEITQVYKWWKDLGLNNEVKFARYQPLKWYMWPMACFTDPRFSEQRIELTKPISLVYIIDDIFDVYGTLDQLTLFTDAIKRYSNIYISSVCGRQSIELAMPT

SEQ ID NO: 55381 - protein, 287 aa, Glycine max
  peptide (1)..(287): Ceres Seq. ID no. 14310594
  misc_feature (1)..(148): Pfam Name: Terpene synthase, N-terminal domain Pfam Description: Terpene synthase, N-terminal domain
  misc_feature (1)..(275): Homolog of NCBI NO: 11934933 NR Description: sesquiterpene synthase 2 [Lycopersicon esculentum]
  misc_feature (1)..(275): Homolog of NCBI NO: 7448227 NR Description: germacrene C synthase - tomato
  misc_feature (6)..(268): Homolog of NCBI NO: 18766934 NR Description: beta-caryophyllene synthase QHS1 [Artemisia annua]
  misc_feature (1)..(267): Homolog of NCBI NO: 14331015 NR Description: putative chloroplast terpene synthase [Quercus
  misc_feature (6)..(269): Homolog of NCBI NO: 25404336 NR Description: hypothetical protein T13M11.3 [imported] -
  misc_feature (6)..(269): Homolog of NCBI NO: 15220567 NR Description: terpene synthase/cyclase family [Arabidopsis
  misc_feature (1)..(269): Homolog of NCBI NO: 29468398 NR Description: linalool synthase [Arabidopsis thaliana]
  misc_feature (1)..(267): Homolog of NCBI NO: 30349140 NR Description: (E)-b-ocimene synthase [Antirrhinum majus]
  misc_feature (1)..(267): Homolog of NCBI NO: 30349144 NR Description: myrcene synthase 1e20 [Antirrhinum majus]
  misc_feature (1)..(267): Homolog of NCBI NO: 30349142 NR Description: myrcene synthase Oc15 [Antirrhinum majus]
MESMYMVDTIQRLGIEHHFEEEIEAALQKQHLIFSSHLSDFANNHKLCEVALPFRLLRQRGHYVLADVFDNLKSNKKEFREKHGEDVKGLISLYEATQLGIEGEDSLDDAGYLCHQLLHAWLTRHEEHNEAMYVAKTLQHPLHYDLSRFRDDTSILLNDFKTKREWECLEELAEINSSIVRFVNQNEITQVYKWWKDLGLNNEVKFARYQPLKWYMWPMACFTDPRFSEQRIELTKPISLVYIIDDIFDVYGTLDQLTLFTDAIKRYSNIYISSVCGRQSIELAMPT

SEQ ID NO: 55382 - protein, 284 aa, Glycine max
  peptide (1)..(284): Ceres Seq. ID no. 14310595
  misc_feature (1)..(145): Pfam Name: Terpene synthase, N-terminal domain Pfam Description: Terpene synthase, N-terminal domain
  misc_feature (1)..(272): Homolog of NCBI NO: 7448228 NR Description: germacrene C synthase, epidermal - tomato
  misc_feature (1)..(272): Homolog of NCBI NO: 7448227 NR Description: germacrene C synthase - tomato
  misc_feature (3)..(265): Homolog of NCBI NO: 18766934 NR Description: beta-caryophyllene synthase QHS1 [Artemisia annua]
  misc_feature (1)..(264): Homolog of NCBI NO: 14331015 NR Description: putative chloroplast terpene synthase [Quercus
  misc_feature (3)..(266): Homolog of NCBI NO: 25404336 NR Description: hypothetical protein T13M11.3 [imported] -
  misc_feature (3)..(266): Homolog of NCBI NO: 15220567 NR Description: terpene synthase/cyclase family [Arabidopsis
  misc_feature (1)..(266): Homolog of NCBI NO: 29468398 NR Description: linalool synthase [Arabidopsis thaliana]
  misc_feature (1)..(264): Homolog of NCBI NO: 30349140 NR Description: (E)-b-ocimene synthase [Antirrhinum majus]
  misc_feature (1)..(264): Homolog of NCBI NO: 30349144 NR Description: myrcene synthase 1e20 [Antirrhinum majus]
  misc_feature (1)..(264): Homolog of NCBI NO: 30349142 NR Description: myrcene synthase Oc15 [Antirrhinum majus]
MYMVDTIQRLGIEHHFEEEIEAALQKQHLIFSSHLSDFANNHKLCEVALPFRLLRQRGHYVLADVFDNLKSNKKEFREKHGEDVKGLISLYEATQLGIEGEDSLDDAGYLCHQLLHAWLTRHEEHNEAMYVAKTLQHPLHYDLSRFRDDTSILLNDFKTKREWECLEELAEINSSIVRFVNQNEITQVYKWWKDLGLNNEVKFARYQPLKWYMWPMACFTDPRFSEQRIELTKPISLVYIIDDIFDVYGTLDQLTLFTDAIKRYSNIYISSVCGRQSIELAMPT

SEQ ID NO: 55383 - DNA, 1275 bp, Glycine max
  misc_feature (1)..(1275): Ceres Seq. ID no. 15170220
gattccatgcacattaatttattaattatatatgtaactctctccatcgatcagaattcattcagagaagtgagagttaaagatggaagggatagagcaccaaacactgaacgtgaatggcataaacatgcacatagccgagaagggtgaaggcccattgatcctcttcatccatggcttccccgacctatggtactcctggcgccaccagatcacagctcttgcctccctaggttaccgctgcgtggcgccggaccttcgtgggtacggcgacactgacgtgccggccaaccccacagcctacaccagcctccacgtcgtcggcgacctcgttgggcttctcgacgcgatcgtcggcgacgaggagaaggtgtttgtggtgggtcatgactggggtgcaatgactgcatggtctctttccctctatcgccccgaacgaatcagggctcttgttaacttgagcgttgttttcactccccgaaaccccaagagaaaaccccttgacactttaagagcagtgtacggaaatgactactatatctgcagatttcaggagcctggggaaatagaagctgagtttgcacagatcggcactgcaagagttctgaaggaattcctgacataccgcaaccctggtccactttatctaccaaagggtaaagcgtttgcacatccaactgattctcccatagcgttgccctcatggctatctgaagaagaatgtgactactatgccagtaaatatgacaagactggcttcacagggggattgaactactacagaaatttggatctaaattgggagctgacagcatcgtggactggtgctcaagtgaaagttccagttaagtttatagtgggtgatctagacctgacctataatgcaccaggagccaaggaatacattcacaaaggtgggttcaagagagatgtgccgcttctggaggatgtggttgttcttgaaggggctggtcactttctccatcaagaaaggcctgatgaaatcagcaaccacatttacgatttctttaagaaattctgatatgcctatgctcatgttggatgtgtctccctttgttcttggtttcattgaacggccttgttcttgctggctgagtggctgggtctgtattctcatagtggatgtgcatgcgtccatcgaaaactcttgctgagtgtgttttctcagtgtctgctcgtgtttttatataaataaatgtaaaaagtgtgtaaaaatcgttttacaaatttatcgtaaaaataacattactaaag

SEQ ID NO: 55384 - protein, 319 aa, Glycine max
  peptide (1)..(319): Ceres Seq. ID no. 15170221
  misc_feature (52)..(314): Pfam Name: alpha/beta hydrolase fold Pfam Description: alpha/beta hydrolase fold
  misc_feature (1)..(306): Homolog of NCBI NO: 25407540 NR Description: probable epoxide hydrolase [imported] -
  misc_feature (1)..(319): Homolog of NCBI NO: 7489256 NR Description: probable epoxide hydrolase (EC 3.3.2.3) (clone
  misc_feature (1)..(319): Homolog of NCBI NO: 30683476 NR Description: epoxide hydrolase, putative [Arabidopsis thaliana]
  misc_feature (1)..(319): Homolog of NCBI NO: 18411917 NR Description: epoxide hydrolase, putative [Arabidopsis
  misc_feature (1)..(319): Homolog of NCBI NO: 407942 NR Description: epoxide hydrolase
  misc_feature (1)..(319): Homolog of NCBI NO: 7489255 NR Description: probable epoxide hydrolase (EC 3.3.2.3) (clone
  misc_feature (1)..(319): Homolog of NCBI NO: 7489254 NR Description: probable epoxide hydrolase (EC 3.3.2.3) (clone
MEGIEHQTLNVNGINMHIAEKGEGPLILFIHGFPDLWYSWRHQITALASLGYRCVAPDLRGYGDTDVPANPTAYTSLHVVGDLVGLLDAIVGDEEKVFVVGHDWGAMTAWSLSLYRPERIRALVNLSVVFTPRNPKRKPLDTLRAVYGNDYYICRFQEPGEIEAEFAQIGTARVLKEFLTYRNPGPLYLPKGKAFAHPTDSPIALPSWLSEEECDYYASKYDKTGFTGGLNYYRNLDLNWELTASWTGAQVKVPVKFIVGDLDLTYNAPGAKEYIHKGGFKRDVPLLEDVVVLEGAGHFLHQERPDEISNHIYDFFKKF

SEQ ID NO: 55385 - protein, 304 aa, Glycine max
  peptide (1)..(304): Ceres Seq. ID no. 15170222
  misc_feature (37)..(299): Pfam Name: alpha/beta hydrolase fold Pfam Description: alpha/beta hydrolase fold
  misc_feature (1)..(291): Homolog of NCBI NO: 25407540 NR Description: probable epoxide hydrolase [imported] -
  misc_feature (1)..(304): Homolog of NCBI NO: 7489256 NR Description: probable epoxide hydrolase (EC 3.3.2.3) (clone
  misc_feature (1)..(304): Homolog of NCBI NO: 30683476 NR Description: epoxide hydrolase, putative [Arabidopsis thaliana]
  misc_feature (1)..(304): Homolog of NCBI NO: 18411917 NR Description: epoxide hydrolase, putative [Arabidopsis
  misc_feature (1)..(304): Homolog of NCBI NO: 407942 NR Description: epoxide hydrolase
  misc_feature (1)..(304): Homolog of NCBI NO: 7489255 NR Description: probable epoxide hydrolase (EC 3.3.2.3) (clone
  misc_feature (1)..(304): Homolog of NCBI NO: 7489254 NR Description: probable epoxide hydrolase (EC 3.3.2.3) (clone
MHIAEKGEGPLILFIHGFPDLWYSWRHQITALASLGYRCVAPDLRGYGDTDVPANPTAYTSLHVVGDLVGLLDAIVGDEEKVFVVGHDWGAMTAWSLSLYRPERIRALVNLSVVFTPRNPKRKPLDTLRAVYGNDYYICRFQEPGEIEAEFAQIGTARVLKEFLTYRNPGPLYLPKGKAFAHPTDSPIALPSWLSEEECDYYASKYDKTGFTGGLNYYRNLDLNWELTASWTGAQVKVPVKFIVGDLDLTYNAPGAKEYIHKGGFKRDVPLLEDVVVLEGAGHFLHQERPDEISNHIYDFFKKF

SEQ ID NO: 55386 - protein, 213 aa, Glycine max
  peptide (1)..(213): Ceres Seq. ID no. 15170223
  misc_feature (1)..(208): Pfam Name: alpha/beta hydrolase fold Pfam Description: alpha/beta hydrolase fold
  misc_feature (1)..(200): Homolog of NCBI NO: 25407540 NR Description: probable epoxide hydrolase [imported] -
  misc_feature (1)..(213): Homolog of NCBI NO: 7489256 NR Description: probable epoxide hydrolase (EC 3.3.2.3) (clone
  misc_feature (1)..(213): Homolog of NCBI NO: 30683476 NR Description: epoxide hydrolase, putative [Arabidopsis thaliana]
  misc_feature (1)..(213): Homolog of NCBI NO: 18411917 NR Description: epoxide hydrolase, putative [Arabidopsis
  misc_feature (1)..(213): Homolog of NCBI NO: 407942 NR Description: epoxide hydrolase
  misc_feature (1)..(213): Homolog of NCBI NO: 7489255 NR Description: probable epoxide hydrolase (EC 3.3.2.3) (clone
  misc_feature (1)..(213): Homolog of NCBI NO: 7489254 NR Description: probable epoxide hydrolase (EC 3.3.2.3) (clone
MTAWSLSLYRPERIRALVNLSVVFTPRNPKRKPLDTLRAVYGNDYYICRFQEPGEIEAEFAQIGTARVLKEFLTYRNPGPLYLPKGKAFAHPTDSPIALPSWLSEEECDYYASKYDKTGFTGGLNYYRNLDLNWELTASWTGAQVKVPVKFIVGDLDLTYNAPGAKEYIHKGGFKRDVPLLEDVVVLEGAGHFLHQERPDEISNHIYDFFKKF

SEQ ID NO: 55387 - DNA, 1550 bp, Glycine max
  misc_feature (1)..(1550): Ceres Seq. ID no. 15170509
tgatagaagacatggataaagaaattgttcgaagagaatcagcgacagagcctgcggaacagagcaggttatggtcccgtgaggatataaagaaagttttacaagaaaataagaggctcgtgaatttgacaagtttaattttggacgagtgtgatagtttaacagagatatcagatgtatcttgtctctcaaatttggaaattttgtcatttagagagcgtcggaatttatttagaattcaccattcagttggtttattggaaaagcttaaaatcttggatgctgaaggttgcccagagcttaagagttttccaccgttgaagttgacctctcttgaaagccttgatctttcgtattgttccaatctcgagagttttcctgaaatattaggaaagatggaaaatataacacgacttcacttgattggattttccataagaaaactcccaccttcatttcgaaatcttactcggcttaaagtgttatatgtgggaaccgaaactactccgttaatggactttgatgttgccaccctcatttcgaacatctgcatgatgtcagaactgtttgaaattgcagcaaacagtttgcaatggaggctatggcctgacgatgcttgtttgcaatggaggctatggcctgacgattttttgaaattgacctctcttctgaattcaagcattgaatttctttgtcacggcgacctgtcagatgagcttcttcggctatttctgtcatgttttgtaaatgtgataaatttagagctaaaagggagtaaattaacagttattcccgaatgcatcaaagaatgccgctttttatctacccctaaattgaatggttgcgatcgtcttcaagaaattagagggattcctccaaacttgaaaagattctctgcaatagcatgcccagacttgacttcctcaagcataagcatgttgctgaatcaggaactgcacgaggctggagacacctactttagtttgccaatagtaaagattccagagtggtttgagtgccagagtcgggaaccgtcaatttttttctggttccgtaacgaattcccagccataactgtttgcattgttgagtcacattttaaggaatattccaatgatctggttctcagcgtgatcattaataagaaacataaacataaacaaagagaaatattcgattcagtgatcctgatcctgatccttttagaaagagaaaaatttgtagttcagaggttggggttggggaaaaagcaaagattagtaggcagtgaagttgttgagacacaatttgtagagcagcaacaacatatgggtttttttctcacacgtgtagaactgggcactatcacttgtaatgtctcgctgctccggcaatcaataattggatgaaagagagaattcaagttcagcagtacgtggcatggtatcaacgctgacaaaagacaacactgtaagtagccctactgattcttgttgtctagtcaagtttggttttagatattctattttgttttggattcaataaaaatagatcgagcatttcaatctctt

SEQ ID NO: 55388 - protein, 461 aa, Glycine max
  peptide (1)..(461): Ceres Seq. ID no. 15170510
IEDMDKEIVRRESATEPAEQSRLWSREDIKKVLQENKRLVNLTSLILDECDSLTEISDVSCLSNLEILSFRERRNLFRIHHSVGLLEKLKILDAEGCPELKSFPPLKLTSLESLDLSYCSNLESFPEILGKMENITRLHLIGFSIRKLPPSFRNLTRLKVLYVGTETTPLMDFDVATLISNICMMSELFEIAANSLQWRLWPDDACLQWRLWPDDFLKLTSLLNSSIEFLCHGDLSDELLRLFLSCFVNVINLELKGSKLTVIPECIKECRFLSTPKLNGCDRLQEIRGIPPNLKRFSAIACPDLTSSSISMLLNQELHEAGDTYFSLPIVKIPEWFECQSREPSIFFWFRNEFPAITVCIVESHFKEYSNDLVLSVIINKKHKHKQREIFDSVILILILLEREKFVVQRLGLGKKQRLVGSEVVETQFVEQQQHMGFFLTRVELGTITCNVSLLRQSIIG

SEQ ID NO: 55389 - protein, 458 aa, Glycine max
  peptide (1)..(458): Ceres Seq. ID no. 15170511
MDKEIVRRESATEPAEQSRLWSREDIKKVLQENKRLVNLTSLILDECDSLTEISDVSCLSNLEILSFRERRNLFRIHHSVGLLEKLKILDAEGCPELKSFPPLKLTSLESLDLSYCSNLESFPEILGKMENITRLHLIGFSIRKLPPSFRNLTRLKVLYVGTETTPLMDFDVATLISNICMMSELFEIAANSLQWRLWPDDACLQWRLWPDDFLKLTSLLNSSIEFLCHGDLSDELLRLFLSCFVNVINLELKGSKLTVIPECIKECRFLSTPKLNGCDRLQEIRGIPPNLKRFSAIACPDLTSSSISMLLNQELHEAGDTYFSLPIVKIPEWFECQSREPSIFFWFRNEFPAITVCIVESHFKEYSNDLVLSVIINKKHKHKQREIFDSVILILILLEREKFVVQRLGLGKKQRLVGSEVVETQFVEQQQHMGFFLTRVELGTITCNVSLLRQSIIG

SEQ ID NO: 55390 - protein, 330 aa, Glycine max
  peptide (1)..(330): Ceres Seq. ID no. 15170512
MENITRLHLIGFSIRKLPPSFRNLTRLKVLYVGTETTPLMDFDVATLISNICMMSELFEIAANSLQWRLWPDDACLQWRLWPDDFLKLTSLLNSSIEFLCHGDLSDELLRLFLSCFVNVINLELKGSKLTVIPECIKECRFLSTPKLNGCDRLQEIRGIPPNLKRFSAIACPDLTSSSISMLLNQELHEAGDTYFSLPIVKIPEWFECQSREPSIFFWFRNEFPAITVCIVESHFKEYSNDLVLSVIINKKHKHKQREIFDSVILILILLEREKFVVQRLGLGKKQRLVGSEVVETQFVEQQQHMGFFLTRVELGTITCNVSLLRQSIIG

SEQ ID NO: 55391 - DNA, 1381 bp, Glycine max
  misc_feature (1)..(1381): Ceres Seq. ID no. 15171016
aaatgtcttaaggttcagggtttacaaaacgaaaaggcatatttttgtttttctttcatcttatacacggcaaaatttattcagaagtttcatttataaacctctatatgttctgcccctgcttgttgctggatttacttggttgtgttaaattctttgtttttagtattttgatatttagacacatgtaattgctggttctatagcctctggcaaaacccagtcgaagtgtattgcctttgtttttatcccccctcctttggtggaccgttgcctaaattgtgagcctagctttggatgtccaaggtgttttctatttcattgatcattaaatgtttatgtatttgttttatgcagtaatttgtttacaaattccaactggtttgccttccaagatgacagaattggtgatgcacctgggggcacatcatcctctgagatgatggatgagataaaattgaatgcagttgcaaatagtggtagcaacagtagtgatgatgaggtagtggttggagaggatgaagaattggctgacagcaaaaatactgtgaatggtacatctagcttaagtgcagacttctttagtggattgactgccagtgattccatgaatgggggcactttaaactttgaaagtgagaagacaagtccttcaaatgatatgggattcttcaggtttgaggcaccagacaacgaggacttgtttggagataggcctttacctgattgggttggatggggtgaaccatcagaaatgcaagatgctggctcaagtatgaacccctttctggataatgacgagtctggtaggcctcaagtaggcagccctaatcttagttctccttcaaatggggaatccgtaccttcaaatgggttgccaactactagcgattctatcaatgggaacagtgactcaagtccaacatctgtagcggtaccctcgctatttgaagaggatgtggaatttgtaggtgtagaattagaaggtacagagaaggcaatggaccaggctctcaaagaagggatagttggggaagcaggaccattgaaaagaaacgtagtctcaaaagttccagataaggaaaattctgaagaaggcagtcctggtgtgaaggagttcaacgatgcaaattactggagggttgacaacgaggttgctgttctagagtgatggacaaattggtaaatcttgcttccattgtttgtctgtatgaaaatttggatcaacgccaaggttatgcaacaaattagtgtacagtatttttgtttccattatgttctgtttctgttgtttcatcattgttagatattaaggttgtttattaatttgaagttttgcctctacctgcaagagacttaaagggaattcccacatttattg

SEQ ID NO: 55392 - protein, 243 aa, Glycine max
  peptide (1)..(243): Ceres Seq. ID no. 15171017
  misc_feature (1)..(145): Homolog of NCBI NO: 25370580 NR Description: protein T6D22.8 [imported] - Arabidopsis thaliana
  misc_feature (1)..(42): Homolog of NCBI NO: 30680443 NR Description: expressed protein [Arabidopsis thaliana]
  misc_feature (168)..(243): Homolog of NCBI NO: 30680443 NR Description: expressed protein [Arabidopsis thaliana]
  misc_feature (1)..(145): Homolog of NCBI NO: 30680443 NR Description: expressed protein [Arabidopsis thaliana]
  misc_feature (1)..(46): Homolog of NCBI NO: 15230633 NR Description: expressed protein [Arabidopsis thaliana]
  misc_feature (129)..(243): Homolog of NCBI NO: 15230633 NR Description: expressed protein [Arabidopsis thaliana]
  misc_feature (1)..(75): Homolog of NCBI NO: 15226390 NR Description: expressed protein [Arabidopsis thaliana]
  misc_feature (102)..(243): Homolog of NCBI NO: 15226390 NR Description: expressed protein [Arabidopsis thaliana]
  misc_feature (1)..(75): Homolog of NCBI NO: 22531158 NR Description: unknown protein [Arabidopsis thaliana]
  misc_feature (102)..(243): Homolog of NCBI NO: 22531158 NR Description: unknown protein [Arabidopsis thaliana]
MMDEIKLNAVANSGSNSSDDEVVVGEDEELADSKNTVNGTSSLSADFFSGLTASDSMNGGTLNFESEKTSPSNDMGFFRFEAPDNEDLFGDRPLPDWVGWGEPSEMQDAGSSMNPFLDNDESGRPQVGSPNLSSPSNGESVPSNGLPTTSDSINGNSDSSPTSVAVPSLFEEDVEFVGVELEGTEKAMDQALKEGIVGEAGPLKRNVVSKVPDKENSEEGSPGVKEFNDANYWRVDNEVAVLE

SEQ ID NO: 55393 - protein, 242 aa, Glycine max
  peptide (1)..(242): Ceres Seq. ID no. 15171018
  misc_feature (1)..(144): Homolog of NCBI NO: 25370580 NR Description: protein T6D22.8 [imported] - Arabidopsis thaliana
  misc_feature (1)..(41): Homolog of NCBI NO: 30680443 NR Description: expressed protein [Arabidopsis thaliana]
  misc_feature (167)..(242): Homolog of NCBI NO: 30680443 NR Description: expressed protein [Arabidopsis thaliana]
  misc_feature (1)..(144): Homolog of NCBI NO: 30680443 NR Description: expressed protein [Arabidopsis thaliana]
  misc_feature (1)..(45): Homolog of NCBI NO: 15230633 NR Description: expressed protein [Arabidopsis thaliana]
  misc_feature (128)..(242): Homolog of NCBI NO: 15230633 NR Description: expressed protein [Arabidopsis thaliana]
  misc_feature (1)..(74): Homolog of NCBI NO: 15226390 NR Description: expressed protein [Arabidopsis thaliana]
  misc_feature (101)..(242): Homolog of NCBI NO: 15226390 NR Description: expressed protein [Arabidopsis thaliana]
  misc_feature (1)..(74): Homolog of NCBI NO: 22531158 NR Description: unknown protein [Arabidopsis thaliana]
  misc_feature (101)..(242): Homolog of NCBI NO: 22531158 NR Description: unknown protein [Arabidopsis thaliana]
MDEIKLNAVANSGSNSSDDEVVVGEDEELADSKNTVNGTSSLSADFFSGLTASDSMNGGTLNFESEKTSPSNDMGFFRFEAPDNEDLFGDRPLPDWVGWGEPSEMQDAGSSMNPFLDNDESGRPQVGSPNLSSPSNGESVPSNGLPTTSDSINGNSDSSPTSVAVPSLFEEDVEFVGVELEGTEKAMDQALKEGIVGEAGPLKRNVVSKVPDKENSEEGSPGVKEFNDANYWRVDNEVAVLE

SEQ ID NO: 55394 - protein, 187 aa, Glycine max
  peptide (1)..(187): Ceres Seq. ID no. 15171019
  misc_feature (132)..(187): Homolog of NCBI NO: 26451998 NR Description: unknown protein [Arabidopsis thaliana]
  misc_feature (112)..(187): Homolog of NCBI NO: 25370580 NR Description: protein T6D22.8 [imported] - Arabidopsis thaliana
  misc_feature (1)..(89): Homolog of NCBI NO: 25370580 NR Description: protein T6D22.8 [imported] - Arabidopsis thaliana
  misc_feature (112)..(187): Homolog of NCBI NO: 30680443 NR Description: expressed protein [Arabidopsis thaliana]
  misc_feature (1)..(89): Homolog of NCBI NO: 30680443 NR Description: expressed protein [Arabidopsis thaliana]
  misc_feature (73)..(187): Homolog of NCBI NO: 15230633 NR Description: expressed protein [Arabidopsis thaliana]
  misc_feature (1)..(19): Homolog of NCBI NO: 15226390 NR Description: expressed protein [Arabidopsis thaliana]
  misc_feature (46)..(187): Homolog of NCBI NO: 15226390 NR Description: expressed protein [Arabidopsis thaliana]
  misc_feature (1)..(19): Homolog of NCBI NO: 22531158 NR Description: unknown protein [Arabidopsis thaliana]
  misc_feature (46)..(187): Homolog of NCBI NO: 22531158 NR Description: unknown protein [Arabidopsis thaliana]
MNGGTLNFESEKTSPSNDMGFFRFEAPDNEDLFGDRPLPDWVGWGEPSEMQDAGSSMNPFLDNDESGRPQVGSPNLSSPSNGESVPSNGLPTTSDSINGNSDSSPTSVAVPSLFEEDVEFVGVELEGTEKAMDQALKEGIVGEAGPLKRNVVSKVPDKENSEEGSPGVKEFNDANYWRVDNEVAVLE

SEQ ID NO: 55395 - DNA, 488 bp, Glycine max
  misc_feature (1)..(488): Ceres Seq. ID no. 15169930
atgggcgagatattgaaagctagtggtgctagctattcttcagttgtgaagacaacgatcatgttggctgatctgcaggatttcaataaagtaaacgagatctatggcaaatatttcccggcgccagcacctgcacgatcaacctaccaagtggcggcgctgccactgaatgcccggattgagattgagtgcatcgctgctctctaatcagatcatccaaccactcattaaatcatcaataagcacccaggaatttgtggtagaggtacctgtaccagttcagtgtctgaaaactgcgggtaacaaacctttgtgtcccggataagtgatgtgtgtgtgtgtgtgtgtgagtgaacagtgcatctagtaggagaattgttgcgtggtttgttacttggattcttcgctctttagacaagaagtaccatggcatcaacatcaatagcctactgttttcttcccaataagaatgaattggcttccccaac

SEQ ID NO: 55396 - protein, 68 aa, Glycine max
  peptide (1)..(68): Ceres Seq. ID no. 15169931
  misc_feature (1)..(68): Pfam Name: Endoribonuclease L-PSP Pfam Description: Endoribonuclease L-PSP
  misc_feature (1)..(66): Homolog of NCBI NO: 25148896 NR Description: endoribonuclease (15.2 kD) (3H299)
  misc_feature (1)..(66): Homolog of NCBI NO: 25148891 NR Description: endoribonuclease precursor (3H299)
  misc_feature (1)..(66): Homolog of NCBI NO: 39579795 NR Description: Hypothetical protein CBG24261 [Caenorhabditis
  misc_feature (1)..(66): Homolog of NCBI NO: 31616050 NR Description: Chain A, Crystal Structure Of A Human P14.5, A Inhibitor Reveals Different Mode Of Ligand Binding Near The
  misc_feature (1)..(66): Homolog of NCBI NO: 30584193 NR Description: Homo sapiens translational inhibitor protein
  misc_feature (1)..(66): Homolog of NCBI NO: 5032215 NR Description: translational inhibitor protein p14.5 [Homo
  misc_feature (1)..(68): Homolog of NCBI NO: 15231137 NR Description: translational inhibitor protein -related
  misc_feature (1)..(68): Homolog of NCBI NO: 9294558 NR Description: contains similarity to protein translation
  misc_feature (1)..(68): Homolog of NCBI NO: 29420485 NR Description: translation-inhibitor protein [Gentiana triflora]
  misc_feature (1)..(68): Homolog of NCBI NO: 23617012 NR Description: putative translational inhibitor protein
MGEILKASGASYSSVVKTTIMLADLQDFNKVNEIYGKYFPAPAPARSTYQVAALPLNARIEIECIAAL

SEQ ID NO: 55397 - protein, 51 aa, Glycine max
  peptide (1)..(51): Ceres Seq. ID no. 15169932
MPGLRLSASLLSNQIIQPLIKSSISTQEFVVEVPVPVQCLKTAGNKPLCPG

SEQ ID NO: 55398 - protein, 48 aa, Glycine max
  peptide (1)..(48): Ceres Seq. ID no. 15169933
  misc_feature (1)..(46): Homolog of NCBI NO: 25148896 NR Description: endoribonuclease (15.2 kD) (3H299)
  misc_feature (1)..(46): Homolog of NCBI NO: 25148891 NR Description: endoribonuclease precursor (3H299)
  misc_feature (1)..(46): Homolog of NCBI NO: 39579795 NR Description: Hypothetical protein CBG24261 [Caenorhabditis
  misc_feature (1)..(46): Homolog of NCBI NO: 30584193 NR Description: Homo sapiens translational inhibitor protein
  misc_feature (1)..(46): Homolog of NCBI NO: 31616050 NR Description: Chain A, Crystal Structure Of A Human P14.5, A Inhibitor Reveals Different Mode Of Ligand Binding Near The
  misc_feature (1)..(46): Homolog of NCBI NO: 5032215 NR Description: translational inhibitor protein p14.5 [Homo
  misc_feature (1)..(48): Homolog of NCBI NO: 15231137 NR Description: translational inhibitor protein -related
  misc_feature (1)..(48): Homolog of NCBI NO: 9294558 NR Description: contains similarity to protein translation
  misc_feature (1)..(48): Homolog of NCBI NO: 29420485 NR Description: translation-inhibitor protein [Gentiana triflora]
  misc_feature (1)..(48): Homolog of NCBI NO: 23617012 NR Description: putative translational inhibitor protein
MLADLQDFNKVNEIYGKYFPAPAPARSTYQVAALPLNARIEIECIAAL

SEQ ID NO: 55399 - DNA, 2232 bp, Glycine max
  misc_feature (1)..(2232): Ceres Seq. ID no. 14308370
tttttttttacaacgcttgactgcaattggataaatatttttgatgttgtagaattaaaattagagtttcatctcctaatttatactgcaatgcaaagtcaaattttggagtaaacactaggttgtagttttttgttttcttaacaaatctttattgtgtgaaataccaaaactccaattcaaacaacaaaatgataccaaaaacatttcaggaattgcatgtacttttttcgttttcaatttaaaaaattaaaaaatgctttaattattaatatctctttgatttcttagagggatttggttgcatggtcagtggattactaatatgatttaacgaaggatagttctttgtaaattcttgatgcctgccccgtgtgttagtttactttctgatgtagaagaagattatgattagcagaacaacattgaaaattttgacttaaagaaagtagaggaacaagcagcagagttggagaaggatttgattgtcaaggaacttgaaacgcttgacgtgcttgaagaattaggagctaccaagaggattgtggaggacttgaagcagcagttacaaaaggaggctatgaaatgtttagcaactcgagatgtaaattcatatgaagaagctggaactcctgttattaaggagaaggatgaggaaaattgtggaaatattgtcaatgatgaagaacaggtgatgcaaattccaagcccatgctctatgtcatcatcacctgatatgatcttaatggagttgaaaaaagccaaattgaatctaggcaaaactataaatgaacttggggtgatacaatcctcgattgaatctttgaataagaagatgaagaaggagaaaaattttctggagaggacacgtgaaaagctagcatcaaagtttgcagcagaatctgctcaagagagggtccaagagcaaacaagattgaatccaccggcccctcatgtagagttcacctttggtaaccctgcaaataatttcaattctgattctgggcagtgcaatggaatggcagagacaagaagacctgaaccttcaaagcccttaagtgtatatgaagaatatggatttagtgttaaaactgctgagataaggtggcttgcggctaaaaagatggaagaagctgcaagggcagcagaagctattgctcttgctgaaatcaaggctctatctaatgcccagagatctttaggatttgttctgccagaacctgagaaagtcacttttgcttttggagagcgctctcccctaaaccccaaggctcagatacccaaggagtcaaccttgaagaaggtaatagattccaagtttcaaattgatgaaacaaaaatttctaagctgacaattttgaagaagttggaggaagcagctgaagaagttctacacagcaaacaagtcttgacagatgctttaaacagaattgaaactgcaaacagaaagcaacatgctgctaaggaggctctaaggagatggattccagaggatgatatgaaggagtatagcactattaattgcaacaagtttaatcaaactggaatttatcaagattctctgcaggatgtaaccaggtcaacaacagcaaacaatgatccaaagcctgctttaaggcccacaatttcaatgagagatgtacttagcagaaagcaggttcctgaaggatatgctacaagaaaggagatggaagagcacactgaacggcaaaaggtagcgttgagtcaaatgcttcaagcattgagggaagatctaactcttccaccaaagactgagaaagatgggaacaatcagaagccgtacgtagcacagaggaagaaatttggattcattcaaatatcactccccttggcaaagccaaataagaaaaggggatgaaatttcgatcctcaatccctatgcatggatgaatagccactacccatgcatctttatgttttcccatgccattctttattggttcatgtgttcacactttcatttgtttatgtagaagtttgagtgggtgtttgattctgtaaaatatatgttgtgcttgagtgattggcttataattctgtagctagctttaatggagctagtagattatgttgctattgttggatgcattggagtgatgaggaatttatccatagggtaggaaggtttttatcattggattgataatcttattgttagaagtatgatctatcatgtggttgtaccaatatataaaattatatttgttgatt

SEQ ID NO: 55400 - protein, 432 aa, Glycine max
  peptide (1)..(432): Ceres Seq. ID no. 14308371
  misc_feature (53)..(281): Pfam Name: Plant protein of unknown function (DUF827) Pfam Description: Plant protein of unknown function (DUF827)
  misc_feature (1)..(357): Homolog of NCBI NO: 15234171 NR Description: hypothetical protein [Arabidopsis thaliana]
  misc_feature (1)..(308): Homolog of NCBI NO: 15225334 NR Description: expressed protein [Arabidopsis thaliana]
  misc_feature (1)..(99): Homolog of NCBI NO: 4433618 NR Description: putative myosin heavy chain [Dendrobium grex
  misc_feature (185)..(369): Homolog of NCBI NO: 15228874 NR Description: expressed protein [Arabidopsis thaliana]
  misc_feature (1)..(185): Homolog of NCBI NO: 15228874 NR Description: expressed protein [Arabidopsis thaliana]
  misc_feature (1)..(385): Homolog of NCBI NO: 33146426 NR Description: myosin heavy chain-like [Oryza sativa (japonica
  misc_feature (1)..(41): Homolog of NCBI NO: 15224495 NR Description: expressed protein [Arabidopsis thaliana]
  misc_feature (53)..(431): Homolog of NCBI NO: 15224495 NR Description: expressed protein [Arabidopsis thaliana]
  misc_feature (1)..(71): Homolog of NCBI NO: 15226689 NR Description: hypothetical protein [Arabidopsis thaliana]
  misc_feature (77)..(431): Homolog of NCBI NO: 15226689 NR Description: hypothetical protein [Arabidopsis thaliana]
MKCLATRDVNSYEEAGTPVIKEKDEENCGNIVNDEEQVMQIPSPCSMSSSPDMILMELKKAKLNLGKTINELGVIQSSIESLNKKMKKEKNFLERTREKLASKFAAESAQERVQEQTRLNPPAPHVEFTFGNPANNFNSDSGQCNGMAETRRPEPSKPLSVYEEYGFSVKTAEIRWLAAKKMEEAARAAEAIALAEIKALSNAQRSLGFVLPEPEKVTFAFGERSPLNPKAQIPKESTLKKVIDSKFQIDETKISKLTILKKLEEAAEEVLHSKQVLTDALNRIETANRKQHAAKEALRRWIPEDDMKEYSTINCNKFNQTGIYQDSLQDVTRSTTANNDPKPALRPTISMRDVLSRKQVPEGYATRKEMEEHTERQKVALSQMLQALREDLTLPPKTEKDGNNQKPYVAQRKKFGFIQISLPLAKPNKKRG

SEQ ID NO: 55401 - protein, 394 aa, Glycine max
  peptide (1)..(394): Ceres Seq. ID no. 14308372
  misc_feature (15)..(243): Pfam Name: Plant protein of unknown function (DUF827) Pfam Description: Plant protein of unknown function (DUF827)
  misc_feature (1)..(113): Homolog of NCBI NO: 15226689 NR Description: hypothetical protein [Arabidopsis thaliana]
  misc_feature (1)..(319): Homolog of NCBI NO: 15234171 NR Description: hypothetical protein [Arabidopsis thaliana]
  misc_feature (1)..(270): Homolog of NCBI NO: 15225334 NR Description: expressed protein [Arabidopsis thaliana]
  misc_feature (1)..(61): Homolog of NCBI NO: 4433618 NR Description: putative myosin heavy chain [Dendrobium grex
  misc_feature (147)..(331): Homolog of NCBI NO: 15228874 NR Description: expressed protein [Arabidopsis thaliana]
  misc_feature (1)..(147): Homolog of NCBI NO: 15228874 NR Description: expressed protein [Arabidopsis thaliana]
  misc_feature (1)..(347): Homolog of NCBI NO: 33146426 NR Description: myosin heavy chain-like [Oryza sativa (japonica
  misc_feature (15)..(393): Homolog of NCBI NO: 15224495 NR Description: expressed protein [Arabidopsis thaliana]
  misc_feature (1)..(33): Homolog of NCBI NO: 15226689 NR Description: hypothetical protein [Arabidopsis thaliana]
  misc_feature (39)..(393): Homolog of NCBI NO: 15226689 NR Description: hypothetical protein [Arabidopsis thaliana]
MQIPSPCSMSSSPDMILMELKKAKLNLGKTINELGVIQSSIESLNKKMKKEKNFLERTREKLASKFAAESAQERVQEQTRLNPPAPHVEFTFGNPANNFNSDSGQCNGMAETRRPEPSKPLSVYEEYGFSVKTAEIRWLAAKKMEEAARAAEAIALAEIKALSNAQRSLGFVLPEPEKVTFAFGERSPLNPKAQIPKESTLKKVIDSKFQIDETKISKLTILKKLEEAAEEVLHSKQVLTDALNRIETANRKQHAAKEALRRWIPEDDMKEYSTINCNKFNQTGIYQDSLQDVTRSTTANNDPKPALRPTISMRDVLSRKQVPEGYATRKEMEEHTERQKVALSQMLQALREDLTLPPKTEKDGNNQKPYVAQRKKFGFIQISLPLAKPNKKRG

SEQ ID NO: 55402 - protein, 386 aa, Glycine max
  peptide (1)..(386): Ceres Seq. ID no. 14308373
  misc_feature (7)..(235): Pfam Name: Plant protein of unknown function (DUF827) Pfam Description: Plant protein of unknown function (DUF827)
  misc_feature (1)..(105): Homolog of NCBI NO: 15226689 NR Description: hypothetical protein [Arabidopsis thaliana]
  misc_feature (1)..(311): Homolog of NCBI NO: 15234171 NR Description: hypothetical protein [Arabidopsis thaliana]
  misc_feature (1)..(262): Homolog of NCBI NO: 15225334 NR Description: expressed protein [Arabidopsis thaliana]
  misc_feature (1)..(53): Homolog of NCBI NO: 4433618 NR Description: putative myosin heavy chain [Dendrobium grex
  misc_feature (139)..(323): Homolog of NCBI NO: 15228874 NR Description: expressed protein [Arabidopsis thaliana]
  misc_feature (1)..(139): Homolog of NCBI NO: 15228874 NR Description: expressed protein [Arabidopsis thaliana]
  misc_feature (1)..(339): Homolog of NCBI NO: 33146426 NR Description: myosin heavy chain-like [Oryza sativa (japonica
  misc_feature (7)..(385): Homolog of NCBI NO: 15224495 NR Description: expressed protein [Arabidopsis thaliana]
  misc_feature (1)..(25): Homolog of NCBI NO: 15226689 NR Description: hypothetical protein [Arabidopsis thaliana]
  misc_feature (31)..(385): Homolog of NCBI NO: 15226689 NR Description: hypothetical protein [Arabidopsis thaliana]
MSSSPDMILMELKKAKLNLGKTINELGVIQSSIESLNKKMKKEKNFLERTREKLASKFAAESAQERVQEQTRLNPPAPHVEFTFGNPANNFNSDSGQCNGMAETRRPEPSKPLSVYEEYGFSVKTAEIRWLAAKKMEEAARAAEAIALAEIKALSNAQRSLGFVLPEPEKVTFAFGERSPLNPKAQIPKESTLKKVIDSKFQIDETKISKLTILKKLEEAAEEVLHSKQVLTDALNRIETANRKQHAAKEALRRWIPEDDMKEYSTINCNKFNQTGIYQDSLQDVTRSTTANNDPKPALRPTISMRDVLSRKQVPEGYATRKEMEEHTERQKVALSQMLQALREDLTLPPKTEKDGNNQKPYVAQRKKFGFIQISLPLAKPNKKRG

SEQ ID NO: 55403 - DNA, 1245 bp, Glycine max
  misc_feature (1)..(1245): Ceres Seq. ID no. 14308278
gaagcaaacaagagcatatggatctgtggagcctaaatgcctaaaccatgctgctcaatgcacaagcattactataagacaaacctcgccaaccccggaccggacgccaaccggtccaaccaaacatcacaccggttcgaaccggccttttccttccttatatcaatcactctcctacatccccccacttcatcaagctccaattatcaactctttcaaaagggagaagaaaaggaaaggaaacaaaacgcacaaaggattattatagcaatggcagaacaaaaccaaaaccagacaactgaagctggaaggcaccaagaggttggccacaagagccttctccagagtgatgctctttaccagtatattctggagaccagtgtctacccaagagaacctgaatccatgaaagaactgagagagttgacagcaaaacacccatggaacatcatgacaacctctgcagacgaagggcaattcttgaacatgctccttaagctcatcaatgccaagaacaccatggaaattggtgtctacactggatattcacttcttgccaccgctctcgctcttcctgaagatggaaagatcttggccatggatattaacagggagaattatgaattgggtttgccagtaattaagaaagctggtgttgaccacaaaattgaattcagagaaggtcctgctctcccagttcttgatgaaatggttaaagatgagaagaaccatgggagctatgacttcatctttgtggacgcagacaaggacaactacctcaactaccacaagaggttgatagagcttgtcaaagttgggggagtgatcgggtacgacaacaccctatggaacggctctgtggtggcacccccagatgctcctctcaggaagtacgttagatactacagggacttcgtgctcgagctcaacaaggcactcgctgtggaccccaggatcgagatttgcatgctcccggttggtgatggaatcactatatgccgtcggatcaagtgattctgattttctgataatcacacaatcgtggaccaagaccaccgttgcttcttctgcaccctagtgatgattggtcatcattgagtggcacctgctaatgcatttaaaagcaatcgatattttccttttatttttttttcttcaaaatatttgtgtttgtacttttcttttctctattattcatgtggaaaacggtggacaattaattatatgcaaatgactttttttctc

SEQ ID NO: 55404 - protein, 325 aa, Glycine max
  peptide (1)..(325): Ceres Seq. ID no. 14308279
  misc_feature (112)..(324): Pfam Name: O-methyltransferase Pfam Description: O-methyltransferase
  misc_feature (92)..(324): Homolog of NCBI NO: 2511737 NR Description: caffeoyl-CoA 3-O-methyltransferase 5 [Nicotiana
  misc_feature (79)..(324): Homolog of NCBI NO: 30580381 NR Description: Caffeoyl-CoA O-methyltransferase 2
  misc_feature (79)..(325): Homolog of NCBI NO: 13249171 NR Description: caffeoyl-CoA 3-O-methyltransferase
  misc_feature (81)..(324): Homolog of NCBI NO: 21595512 NR Description: caffeoyl-CoA O-methyltransferase-like protein
  misc_feature (89)..(324): Homolog of NCBI NO: 3023437 NR Description: Caffeoyl-CoA O-methyltransferase
  misc_feature (81)..(324): Homolog of NCBI NO: 15235213 NR Description: caffeoyl-CoA 3-O-methyltransferase
  misc_feature (79)..(325): Homolog of NCBI NO: 30580333 NR Description: Caffeoyl-CoA O-methyltransferase 1
  misc_feature (79)..(325): Homolog of NCBI NO: 3023436 NR Description: Caffeoyl-CoA O-methyltransferase
  misc_feature (79)..(325): Homolog of NCBI NO: 30580334 NR Description: Caffeoyl-CoA O-methyltransferase 2
  misc_feature (79)..(325): Homolog of NCBI NO: 30580341 NR Description: Caffeoyl-CoA O-methyltransferase
MPKPCCSMHKHYYKTNLANPGPDANRSNQTSHRFEPAFSFLISITLLHPPTSSSSNYQLFQKGEEKERKQNAQRIIIAMAEQNQNQTTEAGRHQEVGHKSLLQSDALYQYILETSVYPREPESMKELRELTAKHPWNIMTTSADEGQFLNMLLKLINAKNTMEIGVYTGYSLLATALALPEDGKILAMDINRENYELGLPVIKKAGVDHKIEFREGPALPVLDEMVKDEKNHGSYDFIFVDADKDNYLNYHKRLIELVKVGGVIGYDNTLWNGSVVAPPDAPLRKYVRYYRDFVLELNKALAVDPRIEICMLPVGDGITICRRIK

SEQ ID NO: 55405 - protein, 318 aa, Glycine max
  peptide (1)..(318): Ceres Seq. ID no. 14308280
  misc_feature (105)..(317): Pfam Name: O-methyltransferase Pfam Description: O-methyltransferase
  misc_feature (85)..(317): Homolog of NCBI NO: 2511737 NR Description: caffeoyl-CoA 3-O-methyltransferase 5 [Nicotiana
  misc_feature (72)..(317): Homolog of NCBI NO: 30580381 NR Description: Caffeoyl-CoA O-methyltransferase 2
  misc_feature (72)..(318): Homolog of NCBI NO: 13249171 NR Description: caffeoyl-CoA 3-O-methyltransferase
  misc_feature (74)..(317): Homolog of NCBI NO: 21595512 NR Description: caffeoyl-CoA O-methyltransferase-like protein
  misc_feature (82)..(317): Homolog of NCBI NO: 3023437 NR Description: Caffeoyl-CoA O-methyltransferase
  misc_feature (74)..(317): Homolog of NCBI NO: 15235213 NR Description: caffeoyl-CoA 3-O-methyltransferase
  misc_feature (72)..(318): Homolog of NCBI NO: 30580333 NR Description: Caffeoyl-CoA O-methyltransferase 1
  misc_feature (72)..(318): Homolog of NCBI NO: 3023436 NR Description: Caffeoyl-CoA O-methyltransferase
  misc_feature (72)..(318): Homolog of NCBI NO: 30580334 NR Description: Caffeoyl-CoA O-methyltransferase 2
  misc_feature (72)..(318): Homolog of NCBI NO: 30580341 NR Description: Caffeoyl-CoA O-methyltransferase
MHKHYYKTNLANPGPDANRSNQTSHRFEPAFSFLISITLLHPPTSSSSNYQLFQKGEEKERKQNAQRIIIAMAEQNQNQTTEAGRHQEVGHKSLLQSDALYQYILETSVYPREPESMKELRELTAKHPWNIMTTSADEGQFLNMLLKLINAKNTMEIGVYTGYSLLATALALPEDGKILAMDINRENYELGLPVIKKAGVDHKIEFREGPALPVLDEMVKDEKNHGSYDFIFVDADKDNYLNYHKRLIELVKVGGVIGYDNTLWNGSVVAPPDAPLRKYVRYYRDFVLELNKALAVDPRIEICMLPVGDGITICRRIK

SEQ ID NO: 55406 - protein, 247 aa, Glycine max
  peptide (1)..(247): Ceres Seq. ID no. 14308281
  misc_feature (34)..(246): Pfam Name: O-methyltransferase Pfam Description: O-methyltransferase
  misc_feature (14)..(246): Homolog of NCBI NO: 2511737 NR Description: caffeoyl-CoA 3-O-methyltransferase 5 [Nicotiana
  misc_feature (1)..(246): Homolog of NCBI NO: 30580381 NR Description: Caffeoyl-CoA O-methyltransferase 2
  misc_feature (1)..(247): Homolog of NCBI NO: 13249171 NR Description: caffeoyl-CoA 3-O-methyltransferase
  misc_feature (3)..(246): Homolog of NCBI NO: 21595512 NR Description: caffeoyl-CoA O-methyltransferase-like protein
  misc_feature (11)..(246): Homolog of NCBI NO: 3023437 NR Description: Caffeoyl-CoA O-methyltransferase
  misc_feature (3)..(246): Homolog of NCBI NO: 15235213 NR Description: caffeoyl-CoA 3-O-methyltransferase
  misc_feature (1)..(247): Homolog of NCBI NO: 30580333 NR Description: Caffeoyl-CoA O-methyltransferase 1
  misc_feature (1)..(247): Homolog of NCBI NO: 3023436 NR Description: Caffeoyl-CoA O-methyltransferase
  misc_feature (1)..(247): Homolog of NCBI NO: 30580334 NR Description: Caffeoyl-CoA O-methyltransferase 2
  misc_feature (1)..(247): Homolog of NCBI NO: 30580341 NR Description: Caffeoyl-CoA O-methyltransferase
MAEQNQNQTTEAGRHQEVGHKSLLQSDALYQYILETSVYPREPESMKELRELTAKHPWNIMTTSADEGQFLNMLLKLINAKNTMEIGVYTGYSLLATALALPEDGKILAMDINRENYELGLPVIKKAGVDHKIEFREGPALPVLDEMVKDEKNHGSYDFIFVDADKDNYLNYHKRLIELVKVGGVIGYDNTLWNGSVVAPPDAPLRKYVRYYRDFVLELNKALAVDPRIEICMLPVGDGITICRRIK

SEQ ID NO: 55407 - DNA, 1159 bp, Glycine max
  misc_feature (1)..(1159): Ceres Seq. ID no. 14308351
tttgctatatctgattgcagcaagtaaaaatgagctcagcaagatgattgagctgcagaaagaaatggaaatgctccttcaaaatgcgaaaggggaactgcaaagtaaagattcacttcttaagccattgaaacaaagtgacacacttgccctttccataactgatattcaagaagtttccagctctagtagtcatctttctattcattcgaatatacaatatgttcaaccagagtcaaaaagcgatacggttcctaatcggtttctggaatataacactagcgaacaagatgaatgtgcagaagagataaatgagctccgggcagaatttgaaattgagttgcagcgcttgcagttgtatttggatggagaagctggatttgatgatgcacaacaagagggagtcaaggtaactcttgaggattctagttcaaaaagccatagttcaagttttggtgaaataataatggaacctcaaggagcaacttatgatgtatcttttggagttcctccaattgaattggagagaaggttgcatgaactgcttgaagcaagactggaagaacggatatcagagctggagtctgcattagaatgtaagacgcaaaagcttattaagaaagagatagaggttacttggtggaaagacactgcacaacttatctcacaacatgttccagaaacttctcggttcacttttccacttgatcctgatatttctttgaagttgagtcaacttgtaggatagtttttatgaaagagtgatgttgattaagccatcaaaatattgttatcagcagtacagtttcatgacctgttgtttcttgttcttcaaaattttggtttagtcctctggagtaaatagtggtttggaggatgattttaaatgagagaacagaaattgaagggagtcaaaattgttttccattgtagagcaatacacaagatgtgtaaaaactgaaaatgttggagtcttttgagatttattcttatgttaagattggagttgggtgactgtagtaagctactgcagtgaaatttgttggatgcaacaaaactcaagcatttgactccctgcagctatttatagacaatcgcatctatattagcttgtaagatccttatcttgttcaaagacagtataattttctttcaccat

SEQ ID NO: 55408 - protein, 248 aa, Glycine max
  peptide (1)..(248): Ceres Seq. ID no. 14308352
  misc_feature (78)..(240): Homolog of NCBI NO: 7486317 NR Description: hypothetical protein F28M20.10 - Arabidopsis
  misc_feature (78)..(240): Homolog of NCBI NO: 18417879 NR Description: WRKY family transcription factor [Arabidopsis
  misc_feature (1)..(232): Homolog of NCBI NO: 15238287 NR Description: hypothetical protein [Arabidopsis thaliana]
LLYLIAASKNELSKMIELQKEMEMLLQNAKGELQSKDSLLKPLKQSDTLALSITDIQEVSSSSSHLSIHSNIQYVQPESKSDTVPNRFLEYNTSEQDECAEEINELRAEFEIELQRLQLYLDGEAGFDDAQQEGVKVTLEDSSSKSHSSSFGEIIMEPQGATYDVSFGVPPIELERRLHELLEARLEERISELESALECKTQKLIKKEIEVTWWKDTAQLISQHVPETSRFTFPLDPDISLKLSQLVG

SEQ ID NO: 55409 - protein, 234 aa, Glycine max
  peptide (1)..(234): Ceres Seq. ID no. 14308353
  misc_feature (64)..(226): Homolog of NCBI NO: 7486317 NR Description: hypothetical protein F28M20.10 - Arabidopsis
  misc_feature (64)..(226): Homolog of NCBI NO: 18417879 NR Description: WRKY family transcription factor [Arabidopsis
  misc_feature (1)..(218): Homolog of NCBI NO: 15238287 NR Description: hypothetical protein [Arabidopsis thaliana]
MIELQKEMEMLLQNAKGELQSKDSLLKPLKQSDTLALSITDIQEVSSSSSHLSIHSNIQYVQPESKSDTVPNRFLEYNTSEQDECAEEINELRAEFEIELQRLQLYLDGEAGFDDAQQEGVKVTLEDSSSKSHSSSFGEIIMEPQGATYDVSFGVPPIELERRLHELLEARLEERISELESALECKTQKLIKKEIEVTWWKDTAQLISQHVPETSRFTFPLDPDISLKLSQLVG

SEQ ID NO: 55410 - protein, 227 aa, Glycine max
  peptide (1)..(227): Ceres Seq. ID no. 14308354
  misc_feature (57)..(219): Homolog of NCBI NO: 7486317 NR Description: hypothetical protein F28M20.10 - Arabidopsis
  misc_feature (57)..(219): Homolog of NCBI NO: 18417879 NR Description: WRKY family transcription factor [Arabidopsis
  misc_feature (1)..(211): Homolog of NCBI NO: 15238287 NR Description: hypothetical protein [Arabidopsis thaliana]
MEMLLQNAKGELQSKDSLLKPLKQSDTLALSITDIQEVSSSSSHLSIHSNIQYVQPESKSDTVPNRFLEYNTSEQDECAEEINELRAEFEIELQRLQLYLDGEAGFDDAQQEGVKVTLEDSSSKSHSSSFGEIIMEPQGATYDVSFGVPPIELERRLHELLEARLEERISELESALECKTQKLIKKEIEVTWWKDTAQLISQHVPETSRFTFPLDPDISLKLSQLVG

SEQ ID NO: 55411 - DNA, 1742 bp, Glycine max
  misc_feature (1)..(1742): Ceres Seq. ID no. 12581696
cagctacgtaggccccccccccagaatgctctctgcaaccaaggaacatgaatatcacaagactacagggaggtgtgaatgtcagcagtagtgacaatcccaaacctaaaagtttaggtccagaaagttcaaatggttcagcccatgtggatcatccatctagagagttccagattgcagttagcagcaataggaaggtagtgaacgggagtacctgtagttctgttaggacaacagtaaatgaatttagtgaacgggaaatgccttacatgactaatgccaatgcttccatcattgtgaaggatgattttgataatgtcacaactacctctcaaaggattgaagatcatatggttaaggataggttagccttaaatgatgacgacttgggatccattgaaggagatatgtgtgcttcttcaacaggagttgtaagagtgcaatcaagaaagaaagctgagatgttcctagttcgaacagatggattttcttgtaccagagaaaaagtgactgaatcttctttggctttcactcatcctagcacccagcagcagatgcttatgtggaagtctatgccaaagaatgtgttattgttgaaaaagctgggggaagaactaatggaagaagcaaaaatggttgcttcttttctttatcaccaagagaaaatgaatgttcttgtggaacctgatgtgcatgacatatttgctagaattccaggctttggatttgttcagaccttctatagtcaagataccagtgatctacatgagaaagtcgattttgtggcatgcttgggtggagatggcgttatactgcatgcgtcaaatctattcagagatgctgttccccctattgtgtcatttaaccttggctcccttggttttctgacttctcatgattttgaagattacaagcaagacctacgacaagtcatccatggaaataatacacgagatggtgtgtatattactcttagaatgcgcctccgatgtgaaatttttcgtaaaggtaaagcaatgccagggaaagtatttgacatcctcaatgaggttgttgttgatcggggttctaatccatacctttcaaagattgaatgctatgaacatgatcgacttataaccaaagtacaaggtgatggagtcattgtggccacccctacaggaagtactgcctattctacagctgccggaggttccatggtccatcctaatgtcccttgcatactgtttaccccaatctgtccacattcactctcatttaggccagttatacttccagattctgctcaactagaattaaagattccggaagatgctagaagtaatgcctgggtttcatttgatgggaagagaaggcagcaactctcgagaggcgattctgtccgaatatcgatgagccagcatccccttccaactgttaacaagtttgaccaaacgggtgattggttcagtagcttgattcgctgcctaaattggaatgagaggcttgatcaaaaggctctgtgatgcatgtgaaagtgaagaacagatatgcattaccctaacgtgaggatagggcttctataattactgtacagcttgtacattgagattacagaacttagatatatagcagatacctacactttattacattggctaccattgtgaagatagggtttgccaatgttttttcaacatgtcataatggcaagatgctgttgtatatacatttataaaatgtagtaatttttttttaatctt

SEQ ID NO: 55412 - protein, 485 aa, Glycine max
  peptide (1)..(485): Ceres Seq. ID no. 12581697
  misc_feature (329)..(482): Homolog of NCBI NO: 10434887 NR Description: unnamed protein product [Homo sapiens]
  misc_feature (329)..(482): Homolog of NCBI NO: 12804579 NR Description: Similar to hypothetical protein FLJ13052 [Homo
  misc_feature (329)..(482): Homolog of NCBI NO: 8480400 NR Description: Putative inorganic polyphosphate/ATP-NAD kinase
  misc_feature (169)..(334): Homolog of NCBI NO: 12804579 NR Description: Similar to hypothetical protein FLJ13052 [Homo
  misc_feature (169)..(334): Homolog of NCBI NO: 10434887 NR Description: unnamed protein product [Homo sapiens]
  misc_feature (169)..(334): Homolog of NCBI NO: 8480400 NR Description: Putative inorganic polyphosphate/ATP-NAD kinase
  misc_feature (329)..(482): Homolog of NCBI NO: 37589440 NR Description: Unknown (protein for MGC:68997) [Xenopus laevis]
  misc_feature (156)..(322): Homolog of NCBI NO: 37589440 NR Description: Unknown (protein for MGC:68997) [Xenopus laevis]
  misc_feature (110)..(485): Homolog of NCBI NO: 25518500 NR Description: hypothetical protein F8K7.5 - Arabidopsis
  misc_feature (110)..(485): Homolog of NCBI NO: 18395013 NR Description: expressed protein
MNITRLQGGVNVSSSDNPKPKSLGPESSNGSAHVDHPSREFQIAVSSNRKVVNGSTCSSVRTTVNEFSEREMPYMTNANASIIVKDDFDNVTTTSQRIEDHMVKDRLALNDDDLGSIEGDMCASSTGVVRVQSRKKAEMFLVRTDGFSCTREKVTESSLAFTHPSTQQQMLMWKSMPKNVLLLKKLGEELMEEAKMVASFLYHQEKMNVLVEPDVHDIFARIPGFGFVQTFYSQDTSDLHEKVDFVACLGGDGVILHASNLFRDAVPPIVSFNLGSLGFLTSHDFEDYKQDLRQVIHGNNTRDGVYITLRMRLRCEIFRKGKAMPGKVFDILNEVVVDRGSNPYLSKIECYEHDRLITKVQGDGVIVATPTGSTAYSTAAGGSMVHPNVPCILFTPICPHSLSFRPVILPDSAQLELKIPEDARSNAWVSFDGKRRQQLSRGDSVRISMSQHPLPTVNKFDQTGDWFSSLIRCLNWNERLDQKAL

SEQ ID NO: 55413 - protein, 414 aa, Glycine max
  peptide (1)..(414): Ceres Seq. ID no. 12581698
  misc_feature (258)..(411): Homolog of NCBI NO: 12804579 NR Description: Similar to hypothetical protein FLJ13052 [Homo
  misc_feature (258)..(411): Homolog of NCBI NO: 10434887 NR Description: unnamed protein product [Homo sapiens]
  misc_feature (258)..(411): Homolog of NCBI NO: 8480400 NR Description: Putative inorganic polyphosphate/ATP-NAD kinase
  misc_feature (98)..(263): Homolog of NCBI NO: 12804579 NR Description: Similar to hypothetical protein FLJ13052 [Homo
  misc_feature (98)..(263): Homolog of NCBI NO: 10434887 NR Description: unnamed protein product [Homo sapiens]
  misc_feature (98)..(263): Homolog of NCBI NO: 8480400 NR Description: Putative inorganic polyphosphate/ATP-NAD kinase
  misc_feature (258)..(411): Homolog of NCBI NO: 37589440 NR Description: Unknown (protein for MGC:68997) [Xenopus laevis]
  misc_feature (85)..(251): Homolog of NCBI NO: 37589440 NR Description: Unknown (protein for MGC:68997) [Xenopus laevis]
  misc_feature (39)..(414): Homolog of NCBI NO: 25518500 NR Description: hypothetical protein F8K7.5 - Arabidopsis
  misc_feature (39)..(414): Homolog of NCBI NO: 18395013 NR Description: expressed protein
MPYMTNANASIIVKDDFDNVTTTSQRIEDHMVKDRLALNDDDLGSIEGDMCASSTGVVRVQSRKKAEMFLVRTDGFSCTREKVTESSLAFTHPSTQQQMLMWKSMPKNVLLLKKLGEELMEEAKMVASFLYHQEKMNVLVEPDVHDIFARIPGFGFVQTFYSQDTSDLHEKVDFVACLGGDGVILHASNLFRDAVPPIVSFNLGSLGFLTSHDFEDYKQDLRQVIHGNNTRDGVYITLRMRLRCEIFRKGKAMPGKVFDILNEVVVDRGSNPYLSKIECYEHDRLITKVQGDGVIVATPTGSTAYSTAAGGSMVHPNVPCILFTPICPHSLSFRPVILPDSAQLELKIPEDARSNAWVSFDGKRRQQLSRGDSVRISMSQHPLPTVNKFDQTGDWFSSLIRCLNWNERLDQKAL

SEQ ID NO: 55414 - protein, 411 aa, Glycine max
  peptide (1)..(411): Ceres Seq. ID no. 12581699
  misc_feature (255)..(408): Homolog of NCBI NO: 12804579 NR Description: Similar to hypothetical protein FLJ13052 [Homo
  misc_feature (255)..(408): Homolog of NCBI NO: 10434887 NR Description: unnamed protein product [Homo sapiens]
  misc_feature (255)..(408): Homolog of NCBI NO: 8480400 NR Description: Putative inorganic polyphosphate/ATP-NAD kinase
  misc_feature (95)..(260): Homolog of NCBI NO: 12804579 NR Description: Similar to hypothetical protein FLJ13052 [Homo
  misc_feature (95)..(260): Homolog of NCBI NO: 10434887 NR Description: unnamed protein product [Homo sapiens]
  misc_feature (95)..(260): Homolog of NCBI NO: 8480400 NR Description: Putative inorganic polyphosphate/ATP-NAD kinase
  misc_feature (255)..(408): Homolog of NCBI NO: 37589440 NR Description: Unknown (protein for MGC:68997) [Xenopus laevis]
  misc_feature (82)..(248): Homolog of NCBI NO: 37589440 NR Description: Unknown (protein for MGC:68997) [Xenopus laevis]
  misc_feature (36)..(411): Homolog of NCBI NO: 25518500 NR Description: hypothetical protein F8K7.5 - Arabidopsis
  misc_feature (36)..(411): Homolog of NCBI NO: 18395013 NR Description: expressed protein
MTNANASIIVKDDFDNVTTTSQRIEDHMVKDRLALNDDDLGSIEGDMCASSTGVVRVQSRKKAEMFLVRTDGFSCTREKVTESSLAFTHPSTQQQMLMWKSMPKNVLLLKKLGEELMEEAKMVASFLYHQEKMNVLVEPDVHDIFARIPGFGFVQTFYSQDTSDLHEKVDFVACLGGDGVILHASNLFRDAVPPIVSFNLGSLGFLTSHDFEDYKQDLRQVIHGNNTRDGVYITLRMRLRCEIFRKGKAMPGKVFDILNEVVVDRGSNPYLSKIECYEHDRLITKVQGDGVIVATPTGSTAYSTAAGGSMVHPNVPCILFTPICPHSLSFRPVILPDSAQLELKIPEDARSNAWVSFDGKRRQQLSRGDSVRISMSQHPLPTVNKFDQTGDWFSSLIRCLNWNERLDQKAL

SEQ ID NO: 55415 - DNA, 1552 bp, Glycine max
  misc_feature (1)..(1552): Ceres Seq. ID no. 15172321
gtgagttaattgcatttgcagagagagagagagagagagggggaagacggttgtggggattcgatgggggccaccgttcactcgccgctagtcacttatgcttccgtcatatctctgcttacactctgtcctccgtttgtcatacttctatggtacaccatgactcttgctgacggatctgtttccgagacattccattatttaaggcagaatgggttgcagggtttgctacatatatggcccacccccactcccaccgcctgcaaaatcattgcagtctatgctgcatttgaggcagcacttcagcttcttcttcccgggaaaaccgtttacggccctatttctccaaccggccaccgacctgtctacaaggcaaatggtctgcaagcctattttgtcaccttgattacttattttgctctctggtggtttgggatattcaaccctacgattgtttatcatcatttgggagaaatttattcagctctcatcttcggcagctttctcttctgtgttttcttgtacatcaagggtcatttggcaccgtcttctacagattctggctcatctggaaacttaatcattgatttttactgggggatggaactttatccacgcattggaaaacattttgacataaaagtcttcacaaactgcagatttggaatgatgtcatgggctgttcttgcactgacctactgcataaagcagtatgaagaaaatggaaaagtagcggactcaatgcttgtaaatactgcattaatgctggtatatgttaccaagtttttctggtgggaagctggatattggagcacaatggatattgcacatgatcgagctggattttatatttgctggggttgcttggtgtgggttccatctgtttatacgtctcctggaatgtaccttgtcaaccatcctgtaaatcttggcatcaagctagcgctctcaattttagtagctggcattctttgcatatacatcaactatgattgtgacaggcaaaggcaagaatttcgtaggacaaatggaaaaggcacagtctggggaaaagctccttcaaagatagaggccacatatactactacttctggggaaactaaaagaagccttcttttaacctctggatggtggggattatctcgtcactttcattatgtccctgaaatactggcagctttcttctggacagtcccagctcttttcgaacattttttgccttacttctacgtgatatttcttaccatccttctctttgatcgagcaaaacgagatgatgatcgttgcagatccaagtatggcaagtactggaaactatattgcgacaaggtaccttacagaatcattccaggaatatactgaagaatgattatcgaaaacggcttatctggagtcccccaacttaaaattaaaaaccaaggacgccatctgtagctttatattgtttggtgcctccttaagacacgtggtagattagactttcgctgagagctaattattgaattattgaaccggattttttaagctaatgtcgagacttgatttcggctcc

SEQ ID NO: 55416 - protein, 432 aa, Glycine max
  peptide (1)..(432): Ceres Seq. ID no. 15172322
  misc_feature (4)..(432): Pfam Name: Ergosterol biosynthesis ERG4/ERG24 family Pfam Description: Ergosterol biosynthesis ERG4/ERG24 family
  misc_feature (13)..(432): Homolog of NCBI NO: 4503321 NR Description: 7-dehydrocholesterol reductase
  misc_feature (13)..(432): Homolog of NCBI NO: 3171089 NR Description: 7-dehydrocholesterol reductase [Homo sapiens]
  misc_feature (51)..(432): Homolog of NCBI NO: 11693158 NR Description: 7-dehydrocholesterol reductase [Rattus
  misc_feature (1)..(432): Homolog of NCBI NO: 6681179 NR Description: 7-dehydrocholesterol reductase [Mus musculus]
  misc_feature (13)..(432): Homolog of NCBI NO: 27924199 NR Description: Similar to 7-dehydrocholesterol reductase
  misc_feature (51)..(432): Homolog of NCBI NO: 38969866 NR Description: 7-dehydrocholesterol reductase [Silurana
  misc_feature (18)..(429): Homolog of NCBI NO: 29654463 NR Description: ergosterol biosynthesis ERG4/ERG24 family protein
  misc_feature (1)..(432): Homolog of NCBI NO: 1245182 NR Description: sterol delta-7 reductase
  misc_feature (1)..(432): Homolog of NCBI NO: 15222967 NR Description: sterol delta-7 reductase (7-dehydrocholesterol
  misc_feature (4)..(432): Homolog of NCBI NO: 39726086 NR Description: sterol delta-7 reductase [Tropaeolum majus]
MGATVHSPLVTYASVISLLTLCPPFVILLWYTMTLADGSVSETFHYLRQNGLQGLLHIWPTPTPTACKIIAVYAAFEAALQLLLPGKTVYGPISPTGHRPVYKANGLQAYFVTLITYFALWWFGIFNPTIVYHHLGEIYSALIFGSFLFCVFLYIKGHLAPSSTDSGSSGNLIIDFYWGMELYPRIGKHFDIKVFTNCRFGMMSWAVLALTYCIKQYEENGKVADSMLVNTALMLVYVTKFFWWEAGYWSTMDIAHDRAGFYICWGCLVWVPSVYTSPGMYLVNHPVNLGIKLALSILVAGILCIYINYDCDRQRQEFRRTNGKGTVWGKAPSKIEATYTTTSGETKRSLLLTSGWWGLSRHFHYVPEILAAFFWTVPALFEHFLPYFYVIFLTILLFDRAKRDDDRCRSKYGKYWKLYCDKVPYRIIPGIY

SEQ ID NO: 55417 - protein, 400 aa, Glycine max
  peptide (1)..(400): Ceres Seq. ID no. 15172323
  misc_feature (1)..(400): Pfam Name: Ergosterol biosynthesis ERG4/ERG24 family Pfam Description: Ergosterol biosynthesis ERG4/ERG24 family
  misc_feature (1)..(400): Homolog of NCBI NO: 4503321 NR Description: 7-dehydrocholesterol reductase
  misc_feature (1)..(400): Homolog of NCBI NO: 3171089 NR Description: 7-dehydrocholesterol reductase [Homo sapiens]
  misc_feature (19)..(400): Homolog of NCBI NO: 11693158 NR Description: 7-dehydrocholesterol reductase [Rattus
  misc_feature (1)..(400): Homolog of NCBI NO: 6681179 NR Description: 7-dehydrocholesterol reductase [Mus musculus]
  misc_feature (1)..(400): Homolog of NCBI NO: 27924199 NR Description: Similar to 7-dehydrocholesterol reductase
  misc_feature (19)..(400): Homolog of NCBI NO: 38969866 NR Description: 7-dehydrocholesterol reductase [Silurana
  misc_feature (1)..(397): Homolog of NCBI NO: 29654463 NR Description: ergosterol biosynthesis ERG4/ERG24 family protein
  misc_feature (1)..(400): Homolog of NCBI NO: 1245182 NR Description: sterol delta-7 reductase
  misc_feature (1)..(400): Homolog of NCBI NO: 15222967 NR Description: sterol delta-7 reductase (7-dehydrocholesterol
  misc_feature (1)..(400): Homolog of NCBI NO: 39726086 NR Description: sterol delta-7 reductase [Tropaeolum majus]
MTLADGSVSETFHYLRQNGLQGLLHIWPTPTPTACKIIAVYAAFEAALQLLLPGKTVYGPISPTGHRPVYKANGLQAYFVTLITYFALWWFGIFNPTIVYHHLGEIYSALIFGSFLFCVFLYIKGHLAPSSTDSGSSGNLIIDFYWGMELYPRIGKHFDIKVFTNCRFGMMSWAVLALTYCIKQYEENGKVADSMLVNTALMLVYVTKFFWWEAGYWSTMDIAHDRAGFYICWGCLVWVPSVYTSPGMYLVNHPVNLGIKLALSILVAGILCIYINYDCDRQRQEFRRTNGKGTVWGKAPSKIEATYTTTSGETKRSLLLTSGWWGLSRHFHYVPEILAAFFWTVPALFEHFLPYFYVIFLTILLFDRAKRDDDRCRSKYGKYWKLYCDKVPYRIIPGIY

SEQ ID NO: 55418 - protein, 253 aa, Glycine max
  peptide (1)..(253): Ceres Seq. ID no. 15172324
  misc_feature (1)..(253): Pfam Name: Ergosterol biosynthesis ERG4/ERG24 family Pfam Description: Ergosterol biosynthesis ERG4/ERG24 family
  misc_feature (1)..(253): Homolog of NCBI NO: 20138066 NR Description: 7-dehydrocholesterol reductase (7-DHC reductase)
  misc_feature (1)..(253): Homolog of NCBI NO: 3171089 NR Description: 7-dehydrocholesterol reductase [Homo sapiens]
  misc_feature (1)..(253): Homolog of NCBI NO: 11693158 NR Description: 7-dehydrocholesterol reductase [Rattus
  misc_feature (1)..(253): Homolog of NCBI NO: 6681179 NR Description: 7-dehydrocholesterol reductase [Mus musculus]
  misc_feature (1)..(253): Homolog of NCBI NO: 27924199 NR Description: Similar to 7-dehydrocholesterol reductase
  misc_feature (1)..(253): Homolog of NCBI NO: 38969866 NR Description: 7-dehydrocholesterol reductase [Silurana
  misc_feature (1)..(250): Homolog of NCBI NO: 29654463 NR Description: ergosterol biosynthesis ERG4/ERG24 family protein
  misc_feature (1)..(253): Homolog of NCBI NO: 1245182 NR Description: sterol delta-7 reductase
  misc_feature (1)..(253): Homolog of NCBI NO: 15222967 NR Description: sterol delta-7 reductase (7-dehydrocholesterol
  misc_feature (1)..(253): Homolog of NCBI NO: 39726086 NR Description: sterol delta-7 reductase [Tropaeolum majus]
MELYPRIGKHFDIKVFTNCRFGMMSWAVLALTYCIKQYEENGKVADSMLVNTALMLVYVTKFFWWEAGYWSTMDIAHDRAGFYICWGCLVWVPSVYTSPGMYLVNHPVNLGIKLALSILVAGILCIYINYDCDRQRQEFRRTNGKGTVWGKAPSKIEATYTTTSGETKRSLLLTSGWWGLSRHFHYVPEILAAFFWTVPALFEHFLPYFYVIFLTILLFDRAKRDDDRCRSKYGKYWKLYCDKVPYRIIPGIY

SEQ ID NO: 55419 - DNA, 1212 bp, Glycine max
  misc_feature (1)..(1212): Ceres Seq. ID no. 12607856
agaactaaggctgaaggaccagccaattgcggaagtaagaaatctacgtgaaaatccacaaggggatgaatgtccaaatataatctctgaaaatattcttaagtgtttatcaaacattatcttgagaatgagtgctgcaaaaaatttggattctacagctgatgtaccaccctttaggactccaaaatctaaaaactgtgtagaaggaagtgagttttgggatccttatagtatctgtttggaatttggaaagagggatagtggtccattcaagcaattacgttcaattgaagctaaatcattcgatccaaaacgaactgcaaagtctttgtttttactgcatcggttgaagcttcttctgagaaaactagcttgtgtcaacatcgagaacctcaaccaccaggagaagcttgccttctggatcaacatctacaattcatgtatgatgaatgcgtacctagaaaagggtataccagagagtcctgaaatggttgttgcgctgatgcacaaggcaacgataaatgtgggtggacacttgctaagtgcaacaactatagaacattgcattttaagacttccttatcactggaaatttacattatcgaagggagggaaaaatcatgaaacttatggactggaattgtcagaacctctagtgacatttgctctatcctgtggaacttggtcctctcctgctgtgagaatttacagagcatctcaggttgagaacgaacttgaaatggcaaaaaaagaatatttgcagactgcagttggaatttcgatatcaaagttccttatcccgaagttgctggattggtatttactggactttgcaaaagacttggaatcattgctggattggatatgcctccaactaccaagtgatgtggggaaagaagccattaagttccttgagaaaagaaaaaccgagcccctctcacaatatgtacagattatgccatatgagttcaattttagatacttgctttgcacatagtttttcttctatttctgtaatgttttattgattatgtggataggatacgatttgtaaacagctttagatcatacatatagtaagcatgcaaatgccatttgttcttttctcacttttaatagattttttaaaatgccttattaactgaagtgaacatgggaagttggagtatagaattgggtcataaatataatccttccatgtttttgatgctc

SEQ ID NO: 55420 - protein, 331 aa, Glycine max
  peptide (1)..(331): Ceres Seq. ID no. 12607857
  misc_feature (117)..(253): Pfam Name: Protein of unknown function, DUF547 Pfam Description: Protein of unknown function, DUF547
  misc_feature (13)..(329): Homolog of NCBI NO: 15230524 NR Description: hypothetical protein; protein id: At3g12540.1
  misc_feature (62)..(294): Homolog of NCBI NO: 30697420 NR Description: expressed protein [Arabidopsis thaliana]
  misc_feature (62)..(294): Homolog of NCBI NO: 15983811 NR Description: AT5g60720/mup24_130 [Arabidopsis thaliana]
  misc_feature (25)..(329): Homolog of NCBI NO: 34895788 NR Description: P0434B04.9 [Oryza sativa (japonica
  misc_feature (62)..(329): Homolog of NCBI NO: 31193902 NR Description: unknown protein [Oryza sativa (japonica
  misc_feature (13)..(329): Homolog of NCBI NO: 9294368 NR Description: gb|AAB97123.1~gene_id:T16H11.2~similar to unknown
  misc_feature (25)..(329): Homolog of NCBI NO: 15225527 NR Description: hypothetical protein; protein id: At2g39690.1
  misc_feature (74)..(329): Homolog of NCBI NO: 30690854 NR Description: expressed protein [Arabidopsis thaliana]
  misc_feature (74)..(329): Homolog of NCBI NO: 25407787 NR Description: hypothetical protein AT4g37080 [imported] -
  misc_feature (3)..(328): Homolog of NCBI NO: 15239037 NR Description: putative protein; protein id: At5g42690.1
ELRLKDQPIAEVRNLRENPQGDECPNIISENILKCLSNIILRMSAAKNLDSTADVPPFRTPKSKNCVEGSEFWDPYSICLEFGKRDSGPFKQLRSIEAKSFDPKRTAKSLFLLHRLKLLLRKLACVNIENLNHQEKLAFWINIYNSCMMNAYLEKGIPESPEMVVALMHKATINVGGHLLSATTIEHCILRLPYHWKFTLSKGGKNHETYGLELSEPLVTFALSCGTWSSPAVRIYRASQVENELEMAKKEYLQTAVGISISKFLIPKLLDWYLLDFAKDLESLLDWICLQLPSDVGKEAIKFLEKRKTEPLSQYVQIMPYEFNFRYLLCT

SEQ ID NO: 55421 - protein, 289 aa, Glycine max
  peptide (1)..(289): Ceres Seq. ID no. 12607858
  misc_feature (75)..(211): Pfam Name: Protein of unknown function, DUF547 Pfam Description: Protein of unknown function, DUF547
  misc_feature (1)..(287): Homolog of NCBI NO: 15230524 NR Description: hypothetical protein; protein id: At3g12540.1
  misc_feature (20)..(252): Homolog of NCBI NO: 30697420 NR Description: expressed protein [Arabidopsis thaliana]
  misc_feature (20)..(252): Homolog of NCBI NO: 15983811 NR Description: AT5g60720/mup24_130 [Arabidopsis thaliana]
  misc_feature (1)..(287): Homolog of NCBI NO: 34895788 NR Description: P0434B04.9 [Oryza sativa (japonica
  misc_feature (20)..(287): Homolog of NCBI NO: 31193902 NR Description: unknown protein [Oryza sativa (japonica
  misc_feature (1)..(287): Homolog of NCBI NO: 9294368 NR Description: gb|AAB97123.1~gene_id:T16H11.2~similar to unknown
  misc_feature (1)..(287): Homolog of NCBI NO: 15225527 NR Description: hypothetical protein; protein id: At2g39690.1
  misc_feature (32)..(287): Homolog of NCBI NO: 30690854 NR Description: expressed protein [Arabidopsis thaliana]
  misc_feature (32)..(287): Homolog of NCBI NO: 25407787 NR Description: hypothetical protein AT4g37080 [imported] -
  misc_feature (1)..(286): Homolog of NCBI NO: 15239037 NR Description: putative protein; protein id: At5g42690.1
MSAAKNLDSTADVPPFRTPKSKNCVEGSEFWDPYSICLEFGKRDSGPFKQLRSIEAKSFDPKRTAKSLFLLHRLKLLLRKLACVNIENLNHQEKLAFWINIYNSCMMNAYLEKGIPESPEMVVALMHKATINVGGHLLSATTIEHCILRLPYHWKFTLSKGGKNHETYGLELSEPLVTFALSCGTWSSPAVRIYRASQVENELEMAKKEYLQTAVGISISKFLIPKLLDWYLLDFAKDLESLLDWICLQLPSDVGKEAIKFLEKRKTEPLSQYVQIMPYEFNFRYLLCT

SEQ ID NO: 55422 - protein, 184 aa, Glycine max
  peptide (1)..(184): Ceres Seq. ID no. 12607859
  misc_feature (1)..(106): Pfam Name: Protein of unknown function, DUF547 Pfam Description: Protein of unknown function, DUF547
  misc_feature (1)..(182): Homolog of NCBI NO: 15230524 NR Description: hypothetical protein; protein id: At3g12540.1
  misc_feature (1)..(147): Homolog of NCBI NO: 30697420 NR Description: expressed protein [Arabidopsis thaliana]
  misc_feature (1)..(147): Homolog of NCBI NO: 15983811 NR Description: AT5g60720/mup24_130 [Arabidopsis thaliana]
  misc_feature (1)..(182): Homolog of NCBI NO: 34895788 NR Description: P0434B04.9 [Oryza sativa (japonica
  misc_feature (1)..(182): Homolog of NCBI NO: 31193902 NR Description: unknown protein [Oryza sativa (japonica
  misc_feature (1)..(182): Homolog of NCBI NO: 9294368 NR Description: gb|AAB97123.1~gene_id:T16H11.2~similar to unknown
  misc_feature (1)..(182): Homolog of NCBI NO: 15225527 NR Description: hypothetical protein; protein id: At2g39690.1
  misc_feature (1)..(182): Homolog of NCBI NO: 30690854 NR Description: expressed protein [Arabidopsis thaliana]
  misc_feature (1)..(182): Homolog of NCBI NO: 25407787 NR Description: hypothetical protein AT4g37080 [imported] -
  misc_feature (1)..(181): Homolog of NCBI NO: 15239037 NR Description: putative protein; protein id: At5g42690.1
MMNAYLEKGIPESPEMVVALMHKATINVGGHLLSATTIEHCILRLPYHWKFTLSKGGKNHETYGLELSEPLVTFALSCGTWSSPAVRIYRASQVENELEMAKKEYLQTAVGISISKFLIPKLLDWYLLDFAKDLESLLDWICLQLPSDVGKEAIKFLEKRKTEPLSQYVQIMPYEFNFRYLLCT

SEQ ID NO: 55423 - DNA, 1469 bp, Glycine max
  misc_feature (1)..(1469): Ceres Seq. ID no. 15169228
gactctcttcttacttcccctttctctctgtctctaaaaaccctttttttctctctctttcacacacaccaaccagactcgatcagtggtggcagatagagagagacatgatgtcaacttccggcgccggcaggtacatggcttttccgccgtctccgtccgcgcctccgtcgccgcacctctccggtcttcgctccactcccctctccgacccggacaaatatctagctgagttgttgggagaacgtaacaagcttagtcccttcatggctgtgcttcctcactgctttcgattgtttaaccaagaaattttgcgtgtaaccacgctgatggggaatgcatcagttttaggtcaaagtgggcttgaacacgctagccccctggctactggaggaatattttcaaatggaggtgccgatgtgaacggatgggcatcacgatttcaatcagaaagacccagcttgttacagtcctcatcaacacaaaactggctgagtccacaaggtagctcatctggtattattgttaaaaagacggtcagagtagatattcctgtggacgcatatcctaattttaactttgttggtcgcctcctaggccctagaggaaactctctaaagcgtgtagaagcaagtactgagtgtcgtgtcttgatcaggggccgaggtagcattaaggatccagctagggaggaaatgatgagaggaaaacctgggtatgagcatctgaatgaacctctccacattctagttgaggcagaattaccagttgaaatagtagatgctcgcctgatgcaggcacgtgaaatacttgaagatttgctcaaaccggtggatgaatctcaggatttctacaagaagcagcaacttcgggagctagcaatgctgaatggcactcttcgtgaggagggttctcccatgtctggttctgtttcacccttccacaacagccttggtatgaagagggccaagaccagggggtaaattatcctaaagggtgagagggattttggagcttgtgttaattttctacatcatcacttaccgtgccacaggtaatgctgtcaacgaatgccctgatctgcgatcggggcactggcatcatagtgccagttctaacttgttctatgtgcagtgtgtttatattgagtttgggggaggtttaaagatggtagcacgtagtaaaggtccaattgagtttggtgaatttgcttttatagtgttggttaaggtttggttagatattcaccaaatctgtctatactactattatatggggttatatttgctgataaaaaaaaatatggggttatatttaagcttgcaataacagttttgatatgtttttggtattttctgcgaggaaggtaatgttaatggtttgtacccagattgtgaggcagataaatatctacttcaatgcgtctatgggtgacattttgtagtatctaatttagattataaattcgc

SEQ ID NO: 55424 - protein, 326 aa, Glycine max
  peptide (1)..(326): Ceres Seq. ID no. 15169229
  misc_feature (180)..(235): Pfam Name: KH domain Pfam Description: KH domain
  misc_feature (37)..(324): Homolog of NCBI NO: 22329449 NR Description: KH domain quaking protein, putative [Arabidopsis
  misc_feature (51)..(324): Homolog of NCBI NO: 15224909 NR Description: KH domain protein [Arabidopsis thaliana]
  misc_feature (51)..(323): Homolog of NCBI NO: 34900448 NR Description: contains EST C27129(C51039)~similar to
  misc_feature (51)..(324): Homolog of NCBI NO: 40645104 NR Description: hypothetical protein [Nicotiana tabacum]
  misc_feature (40)..(324): Homolog of NCBI NO: 30680583 NR Description: KH domain protein [Arabidopsis thaliana]
  misc_feature (40)..(324): Homolog of NCBI NO: 12322716 NR Description: unknown protein; 28504-31237 [Arabidopsis
  misc_feature (65)..(325): Homolog of NCBI NO: 19424087 NR Description: putative RNA-binding protein [Arabidopsis
  misc_feature (40)..(325): Homolog of NCBI NO: 20268733 NR Description: unknown protein [Arabidopsis thaliana]
  misc_feature (40)..(326): Homolog of NCBI NO: 15236738 NR Description: KH domain protein [Arabidopsis thaliana]
  misc_feature (41)..(325): Homolog of NCBI NO: 15241136 NR Description: KH domain protein [Arabidopsis thaliana]
LSSYFPFLSVSKNPFFLSLSHTPTRLDQWWQIERDMMSTSGAGRYMAFPPSPSAPPSPHLSGLRSTPLSDPDKYLAELLGERNKLSPFMAVLPHCFRLFNQEILRVTTLMGNASVLGQSGLEHASPLATGGIFSNGGADVNGWASRFQSERPSLLQSSSTQNWLSPQGSSSGIIVKKTVRVDIPVDAYPNFNFVGRLLGPRGNSLKRVEASTECRVLIRGRGSIKDPAREEMMRGKPGYEHLNEPLHILVEAELPVEIVDARLMQAREILEDLLKPVDESQDFYKKQQLRELAMLNGTLREEGSPMSGSVSPFHNSLGMKRAKTRG

SEQ ID NO: 55425 - protein, 291 aa, Glycine max
  peptide (1)..(291): Ceres Seq. ID no. 15169230
  misc_feature (145)..(200): Pfam Name: KH domain Pfam Description: KH domain
  misc_feature (2)..(289): Homolog of NCBI NO: 22329449 NR Description: KH domain quaking protein, putative [Arabidopsis
  misc_feature (16)..(289): Homolog of NCBI NO: 15224909 NR Description: KH domain protein [Arabidopsis thaliana]
  misc_feature (16)..(288): Homolog of NCBI NO: 34900448 NR Description: contains EST C27129(C51039)~similar to
  misc_feature (16)..(289): Homolog of NCBI NO: 40645104 NR Description: hypothetical protein [Nicotiana tabacum]
  misc_feature (5)..(289): Homolog of NCBI NO: 30680583 NR Description: KH domain protein [Arabidopsis thaliana]
  misc_feature (5)..(289): Homolog of NCBI NO: 12322716 NR Description: unknown protein; 28504-31237 [Arabidopsis
  misc_feature (30)..(290): Homolog of NCBI NO: 19424087 NR Description: putative RNA-binding protein [Arabidopsis
  misc_feature (5)..(290): Homolog of NCBI NO: 20268733 NR Description: unknown protein [Arabidopsis thaliana]
  misc_feature (5)..(291): Homolog of NCBI NO: 15236738 NR Description: KH domain protein [Arabidopsis thaliana]
  misc_feature (6)..(290): Homolog of NCBI NO: 15241136 NR Description: KH domain protein [Arabidopsis thaliana]
MMSTSGAGRYMAFPPSPSAPPSPHLSGLRSTPLSDPDKYLAELLGERNKLSPFMAVLPHCFRLFNQEILRVTTLMGNASVLGQSGLEHASPLATGGIFSNGGADVNGWASRFQSERPSLLQSSSTQNWLSPQGSSSGIIVKKTVRVDIPVDAYPNFNFVGRLLGPRGNSLKRVEASTECRVLIRGRGSIKDPAREEMMRGKPGYEHLNEPLHILVEAELPVEIVDARLMQAREILEDLLKPVDESQDFYKKQQLRELAMLNGTLREEGSPMSGSVSPFHNSLGMKRAKTRG

SEQ ID NO: 55426 - protein, 290 aa, Glycine max
  peptide (1)..(290): Ceres Seq. ID no. 15169231
  misc_feature (144)..(199): Pfam Name: KH domain Pfam Description: KH domain
  misc_feature (1)..(288): Homolog of NCBI NO: 22329449 NR Description: KH domain quaking protein, putative [Arabidopsis
  misc_feature (15)..(288): Homolog of NCBI NO: 15224909 NR Description: KH domain protein [Arabidopsis thaliana]
  misc_feature (15)..(287): Homolog of NCBI NO: 34900448 NR Description: contains EST C27129(C51039)~similar to
  misc_feature (15)..(288): Homolog of NCBI NO: 40645104 NR Description: hypothetical protein [Nicotiana tabacum]
  misc_feature (4)..(288): Homolog of NCBI NO: 30680583 NR Description: KH domain protein [Arabidopsis thaliana]
  misc_feature (4)..(288): Homolog of NCBI NO: 12322716 NR Description: unknown protein; 28504-31237 [Arabidopsis
  misc_feature (29)..(289): Homolog of NCBI NO: 19424087 NR Description: putative RNA-binding protein [Arabidopsis
  misc_feature (4)..(289): Homolog of NCBI NO: 20268733 NR Description: unknown protein [Arabidopsis thaliana]
  misc_feature (4)..(290): Homolog of NCBI NO: 15236738 NR Description: KH domain protein [Arabidopsis thaliana]
  misc_feature (5)..(289): Homolog of NCBI NO: 15241136 NR Description: KH domain protein [Arabidopsis thaliana]
MSTSGAGRYMAFPPSPSAPPSPHLSGLRSTPLSDPDKYLAELLGERNKLSPFMAVLPHCFRLFNQEILRVTTLMGNASVLGQSGLEHASPLATGGIFSNGGADVNGWASRFQSERPSLLQSSSTQNWLSPQGSSSGIIVKKTVRVDIPVDAYPNFNFVGRLLGPRGNSLKRVEASTECRVLIRGRGSIKDPAREEMMRGKPGYEHLNEPLHILVEAELPVEIVDARLMQAREILEDLLKPVDESQDFYKKQQLRELAMLNGTLREEGSPMSGSVSPFHNSLGMKRAKTRG

SEQ ID NO: 55427 - DNA, 1458 bp, Glycine max
  misc_feature (1)..(1458): Ceres Seq. ID no. 14309703
gcgattcggtaccatccatcatcgccgttttcaaattcttcaattttcaccatcaattccctttcgcctctctcaatcgatataatttttttgcagagtttgggatttcagggttttggacgatgaacgtgggcgacctaaacaaggtttgggaaatcagggctctgaagaggaaacccgcggctgaagaagccacgaagatgttggaaaagatcgccaaacaggtccaacccatcatgcgcaaacacaaatggaggatcaaacttctctctgaaatgtgcccaagcaatccacgtcttctggggttgaatgttggagctggtatacatgtgaagttgcggctacggagaccgaacagggatttggacttctacccgtttgatcaggttctggatacgatgcttcatgagctttgccataatgcccatggccctcataatgccaacttctacaagctctgggatgaacttagaaaggaatgtgaagagttgatggctaagggaataagtggtgctggggagggatttgatcttccaggaaggcgtttaggtggttattcccgtcaacctccactttcatccctccgtaaaactgcactggaagctgcagaaaaaagagtacaattgggatctcttcttccgtctgggccaaaacgtctaggtggtgatagtgttataatgagggcccttagtccagtacaagctgctgcaatggctgcagaacggagattacaggatgacgtatggtgtggttctcaatcttgtgaaaatttggatcatgaagatgttgactatgaagttgctgagaacatcgtgcataagggggaaaatgtgggaagctcaagacaaacagacaattctactctaccttcgaatctgttatctcgaaaaagaagtcaggataccaattcaagtttacctgctaagtcatcatctagtacttctgaatttgtagatttgactatggatacaccgaaaagtagacctgacaaggagcatcaaactggacctaaacgaagatgcggtggatcagaaagcttttcacattctcaatcaaattatcaggcaggatctagttcagcaaatttatcaagtgtatctgggcgacattctgaagaatctggaatgtgggagtgtacaatgtgcactctgttgaataaaagattggctcccatatgtgagttgtgtggcactcaacagccaaaagattttagtaccaaatgcaacacttggtcttgtaaattctgtacgttggaaaacaatgtgaagttggagaagtgctcagcctgtgatcagtggagatactctcatggcccatcagtgtcaatccgagcacccaaccttggtacatagaagagctgcgtagtttgcttaatggagcacttttgatccatttttggctttagtctttacaaaattgcattactttctccaccaatctatttatttttggtttctt

SEQ ID NO: 55428 - protein, 449 aa, Glycine max
  peptide (1)..(449): Ceres Seq. ID no. 14309704
  misc_feature (371)..(401): Pfam Name: Zn-finger in Ran binding protein and others Pfam Description: Zn-finger in Ran binding protein and others
  misc_feature (44)..(163): Homolog of NCBI NO: 22327362 NR Description: expressed protein [Arabidopsis thaliana]
  misc_feature (63)..(207): Homolog of NCBI NO: 9957265 NR Description: ORF556 [Trypanosoma brucei]
  misc_feature (59)..(210): Homolog of NCBI NO: 19075821 NR Description: putative Zn-protease [Schizosaccharomyces pombe]
  misc_feature (48)..(170): Homolog of NCBI NO: 23507896 NR Description: hypothetical protein [Plasmodium falciparum 3D7]
  misc_feature (342)..(446): Homolog of NCBI NO: 14719278 NR Description: hypothetical protein 4 [Zea mays]
  misc_feature (49)..(293): Homolog of NCBI NO: 6321926 NR Description: weak suppressor of smt3; Wss1p [Saccharomyces
  misc_feature (56)..(251): Homolog of NCBI NO: 40746554 NR Description: hypothetical protein AN0304.2 [Aspergillus
  misc_feature (41)..(310): Homolog of NCBI NO: 14719278 NR Description: hypothetical protein 4 [Zea mays]
  misc_feature (21)..(449): Homolog of NCBI NO: 8778309 NR Description: F14J16.17 [Arabidopsis thaliana]
  misc_feature (21)..(449): Homolog of NCBI NO: 18405600 NR Description: expressed protein [Arabidopsis thaliana]
DSVPSIIAVFKFFNFHHQFPFASLNRYNFFAEFGISGFWTMNVGDLNKVWEIRALKRKPAAEEATKMLEKIAKQVQPIMRKHKWRIKLLSEMCPSNPRLLGLNVGAGIHVKLRLRRPNRDLDFYPFDQVLDTMLHELCHNAHGPHNANFYKLWDELRKECEELMAKGISGAGEGFDLPGRRLGGYSRQPPLSSLRKTALEAAEKRVQLGSLLPSGPKRLGGDSVIMRALSPVQAAAMAAERRLQDDVWCGSQSCENLDHEDVDYEVAENIVHKGENVGSSRQTDNSTLPSNLLSRKRSQDTNSSLPAKSSSSTSEFVDLTMDTPKSRPDKEHQTGPKRRCGGSESFSHSQSNYQAGSSSANLSSVSGRHSEESGMWECTMCTLLNKRLAPICELCGTQQPKDFSTKCNTWSCKFCTLENNVKLEKCSACDQWRYSHGPSVSIRAPNLGT

SEQ ID NO: 55429 - protein, 409 aa, Glycine max
  peptide (1)..(409): Ceres Seq. ID no. 14309705
  misc_feature (331)..(361): Pfam Name: Zn-finger in Ran binding protein and others Pfam Description: Zn-finger in Ran binding protein and others
  misc_feature (4)..(123): Homolog of NCBI NO: 22327362 NR Description: expressed protein [Arabidopsis thaliana]
  misc_feature (23)..(167): Homolog of NCBI NO: 9957265 NR Description: ORF556 [Trypanosoma brucei]
  misc_feature (19)..(170): Homolog of NCBI NO: 19075821 NR Description: putative Zn-protease [Schizosaccharomyces pombe]
  misc_feature (8)..(130): Homolog of NCBI NO: 23507896 NR Description: hypothetical protein [Plasmodium falciparum 3D7]
  misc_feature (302)..(406): Homolog of NCBI NO: 14719278 NR Description: hypothetical protein 4 [Zea mays]
  misc_feature (9)..(253): Homolog of NCBI NO: 6321926 NR Description: weak suppressor of smt3; Wss1p [Saccharomyces
  misc_feature (16)..(211): Homolog of NCBI NO: 40746554 NR Description: hypothetical protein AN0304.2 [Aspergillus
  misc_feature (1)..(270): Homolog of NCBI NO: 14719278 NR Description: hypothetical protein 4 [Zea mays]
  misc_feature (1)..(409): Homolog of NCBI NO: 8778309 NR Description: F14J16.17 [Arabidopsis thaliana]
  misc_feature (1)..(409): Homolog of NCBI NO: 18405600 NR Description: expressed protein [Arabidopsis thaliana]
MNVGDLNKVWEIRALKRKPAAEEATKMLEKIAKQVQPIMRKHKWRIKLLSEMCPSNPRLLGLNVGAGIHVKLRLRRPNRDLDFYPFDQVLDTMLHELCHNAHGPHNANFYKLWDELRKECEELMAKGISGAGEGFDLPGRRLGGYSRQPPLSSLRKTALEAAEKRVQLGSLLPSGPKRLGGDSVIMRALSPVQAAAMAAERRLQDDVWCGSQSCENLDHEDVDYEVAENIVHKGENVGSSRQTDNSTLPSNLLSRKRSQDTNSSLPAKSSSSTSEFVDLTMDTPKSRPDKEHQTGPKRRCGGSESFSHSQSNYQAGSSSANLSSVSGRHSEESGMWECTMCTLLNKRLAPICELCGTQQPKDFSTKCNTWSCKFCTLENNVKLEKCSACDQWRYSHGPSVSIRAPNLGT

SEQ ID NO: 55430 - protein, 383 aa, Glycine max
  peptide (1)..(383): Ceres Seq. ID no. 14309706
  misc_feature (305)..(335): Pfam Name: Zn-finger in Ran binding protein and others Pfam Description: Zn-finger in Ran binding protein and others
  misc_feature (1)..(97): Homolog of NCBI NO: 22327362 NR Description: expressed protein [Arabidopsis thaliana]
  misc_feature (1)..(141): Homolog of NCBI NO: 9957265 NR Description: ORF556 [Trypanosoma brucei]
  misc_feature (1)..(144): Homolog of NCBI NO: 19075821 NR Description: putative Zn-protease [Schizosaccharomyces pombe]
  misc_feature (1)..(104): Homolog of NCBI NO: 23507896 NR Description: hypothetical protein [Plasmodium falciparum 3D7]
  misc_feature (276)..(380): Homolog of NCBI NO: 14719278 NR Description: hypothetical protein 4 [Zea mays]
  misc_feature (1)..(227): Homolog of NCBI NO: 6321926 NR Description: weak suppressor of smt3; Wss1p [Saccharomyces
  misc_feature (1)..(185): Homolog of NCBI NO: 40746554 NR Description: hypothetical protein AN0304.2 [Aspergillus
  misc_feature (1)..(244): Homolog of NCBI NO: 14719278 NR Description: hypothetical protein 4 [Zea mays]
  misc_feature (1)..(383): Homolog of NCBI NO: 8778309 NR Description: F14J16.17 [Arabidopsis thaliana]
  misc_feature (1)..(383): Homolog of NCBI NO: 18405600 NR Description: expressed protein [Arabidopsis thaliana]
MLEKIAKQVQPIMRKHKWRIKLLSEMCPSNPRLLGLNVGAGIHVKLRLRRPNRDLDFYPFDQVLDTMLHELCHNAHGPHNANFYKLWDELRKECEELMAKGISGAGEGFDLPGRRLGGYSRQPPLSSLRKTALEAAEKRVQLGSLLPSGPKRLGGDSVIMRALSPVQAAAMAAERRLQDDVWCGSQSCENLDHEDVDYEVAENIVHKGENVGSSRQTDNSTLPSNLLSRKRSQDTNSSLPAKSSSSTSEFVDLTMDTPKSRPDKEHQTGPKRRCGGSESFSHSQSNYQAGSSSANLSSVSGRHSEESGMWECTMCTLLNKRLAPICELCGTQQPKDFSTKCNTWSCKFCTLENNVKLEKCSACDQWRYSHGPSVSIRAPNLGT

SEQ ID NO: 55431 - DNA, 1246 bp, Glycine max
  misc_feature (1)..(1246): Ceres Seq. ID no. 14313583
acaagcatctctgttcagagcctcattaagtttttctctctttcacttatttattgactctccataagcccttcaaacctctctctattcctctctactagtcaccttctcccttccattcactccacttcttaacacccccaaacagaacaacggcagagcaagcagccagaaaaatggtgttgctgtccaaagcaacaacagaacaatactcctacatcaagaactacatgccaactgcattctcctcaacaattcccatagtggacctctccaaacccgatgcaaagaccctcatagtgaaggcttgtgaggagtttggattcttcaaagtcatcaaccatggtgttcccattgaagctatatcccaattggaatccgaagccttcaagttcttctctatgccactcaatgagaaggaaaaagcagggcctcccaaaccatttgggtgtctattaaacagttacatgtcttctgtgagaaaaatggcatgcgagattcttgagttgatggcagaaggattgaagattcagcaaaagaatgtgtttagcaagcttctgatggataaacagagtgactctgttttcagggtgaatcactaccctgcttgtcctgaacttgccgtgaatggtcagaacttgattgggttcggagaacatacagacccacaaatcatttctttacttaggtccaacaacacttcaggccttcagatttttcttagagatggaaactggatttcagtcccacctgatcacaaatctttcttcataaatgttggtgattctcttcaggttatgaccaatggaagatttcggagtgtgagacatagagttttggcaaatggatttaagtctaggctctcaatgatttactttggaggtccacctttgagtgaaaaaatagcgccattaccttctctcatgaaaggaaaagaaagcttatataaagaatttacgtggtttgagtacaagaattcaacctatggttcaagattggctgataataggcttggacattttgagagaattgttgcttgataatatgtagagaattatgggggcacttgtcaatacaaaatgggggttacaatagtctatatactataaatgttttttctttttcttttttctactttaaggttatttatcaattagaatgcctcacagatataggacaacgcatacaccccttttgcttcaacactagtgaatgcatctgatgtagttaacaatggagatttgat

SEQ ID NO: 55432 - protein, 287 aa, Glycine max
  peptide (1)..(287): Ceres Seq. ID no. 14313584
  misc_feature (133)..(237): Pfam Name: 2OG-Fe(II) oxygenase superfamily Pfam Description: 2OG-Fe(II) oxygenase superfamily
  misc_feature (1)..(91): Homolog of NCBI NO: 1666096 NR Description: dioxygenase [Marah macrocarpus]
  misc_feature (87)..(287): Homolog of NCBI NO: 1666096 NR Description: dioxygenase [Marah macrocarpus]
  misc_feature (6)..(91): Homolog of NCBI NO: 5579094 NR Description: gibberellin 2-oxidase [Pisum sativum]
  misc_feature (90)..(287): Homolog of NCBI NO: 5579094 NR Description: gibberellin 2-oxidase [Pisum sativum]
  misc_feature (1)..(91): Homolog of NCBI NO: 6478202 NR Description: gibberellin 2 beta-hydroxylase [Pisum sativum]
  misc_feature (1)..(91): Homolog of NCBI NO: 6446413 NR Description: gibberellin 2-beta-hydroxylase [Pisum sativum]
  misc_feature (90)..(287): Homolog of NCBI NO: 6478202 NR Description: gibberellin 2 beta-hydroxylase [Pisum sativum]
  misc_feature (90)..(287): Homolog of NCBI NO: 6446413 NR Description: gibberellin 2-beta-hydroxylase [Pisum sativum]
MVLLSKATTEQYSYIKNYMPTAFSSTIPIVDLSKPDAKTLIVKACEEFGFFKVINHGVPIEAISQLESEAFKFFSMPLNEKEKAGPPKPFGCLLNSYMSSVRKMACEILELMAEGLKIQQKNVFSKLLMDKQSDSVFRVNHYPACPELAVNGQNLIGFGEHTDPQIISLLRSNNTSGLQIFLRDGNWISVPPDHKSFFINVGDSLQVMTNGRFRSVRHRVLANGFKSRLSMIYFGGPPLSEKIAPLPSLMKGKESLYKEFTWFEYKNSTYGSRLADNRLGHFERIVA

SEQ ID NO: 55433 - protein, 269 aa, Glycine max
  peptide (1)..(269): Ceres Seq. ID no. 14313585
  misc_feature (115)..(219): Pfam Name: 2OG-Fe(II) oxygenase superfamily Pfam Description: 2OG-Fe(II) oxygenase superfamily
  misc_feature (1)..(73): Homolog of NCBI NO: 1666096 NR Description: dioxygenase [Marah macrocarpus]
  misc_feature (69)..(269): Homolog of NCBI NO: 1666096 NR Description: dioxygenase [Marah macrocarpus]
  misc_feature (1)..(73): Homolog of NCBI NO: 5579094 NR Description: gibberellin 2-oxidase [Pisum sativum]
  misc_feature (72)..(269): Homolog of NCBI NO: 5579094 NR Description: gibberellin 2-oxidase [Pisum sativum]
  misc_feature (1)..(73): Homolog of NCBI NO: 6478202 NR Description: gibberellin 2 beta-hydroxylase [Pisum sativum]
  misc_feature (1)..(73): Homolog of NCBI NO: 6446413 NR Description: gibberellin 2-beta-hydroxylase [Pisum sativum]
  misc_feature (72)..(269): Homolog of NCBI NO: 6478202 NR Description: gibberellin 2 beta-hydroxylase [Pisum sativum]
  misc_feature (72)..(269): Homolog of NCBI NO: 6446413 NR Description: gibberellin 2-beta-hydroxylase [Pisum sativum]
MPTAFSSTIPIVDLSKPDAKTLIVKACEEFGFFKVINHGVPIEAISQLESEAFKFFSMPLNEKEKAGPPKPFGCLLNSYMSSVRKMACEILELMAEGLKIQQKNVFSKLLMDKQSDSVFRVNHYPACPELAVNGQNLIGFGEHTDPQIISLLRSNNTSGLQIFLRDGNWISVPPDHKSFFINVGDSLQVMTNGRFRSVRHRVLANGFKSRLSMIYFGGPPLSEKIAPLPSLMKGKESLYKEFTWFEYKNSTYGSRLADNRLGHFERIVA

SEQ ID NO: 55434 - protein, 212 aa, Glycine max
  peptide (1)..(212): Ceres Seq. ID no. 14313586
  misc_feature (58)..(162): Pfam Name: 2OG-Fe(II) oxygenase superfamily Pfam Description: 2OG-Fe(II) oxygenase superfamily
  misc_feature (1)..(16): Homolog of NCBI NO: 1666096 NR Description: dioxygenase [Marah macrocarpus]
  misc_feature (12)..(212): Homolog of NCBI NO: 1666096 NR Description: dioxygenase [Marah macrocarpus]
  misc_feature (1)..(16): Homolog of NCBI NO: 5579094 NR Description: gibberellin 2-oxidase [Pisum sativum]
  misc_feature (15)..(212): Homolog of NCBI NO: 5579094 NR Description: gibberellin 2-oxidase [Pisum sativum]
  misc_feature (1)..(16): Homolog of NCBI NO: 6478202 NR Description: gibberellin 2 beta-hydroxylase [Pisum sativum]
  misc_feature (1)..(16): Homolog of NCBI NO: 6446413 NR Description: gibberellin 2-beta-hydroxylase [Pisum sativum]
  misc_feature (15)..(212): Homolog of NCBI NO: 6478202 NR Description: gibberellin 2 beta-hydroxylase [Pisum sativum]
  misc_feature (15)..(212): Homolog of NCBI NO: 6446413 NR Description: gibberellin 2-beta-hydroxylase [Pisum sativum]
MPLNEKEKAGPPKPFGCLLNSYMSSVRKMACEILELMAEGLKIQQKNVFSKLLMDKQSDSVFRVNHYPACPELAVNGQNLIGFGEHTDPQIISLLRSNNTSGLQIFLRDGNWISVPPDHKSFFINVGDSLQVMTNGRFRSVRHRVLANGFKSRLSMIYFGGPPLSEKIAPLPSLMKGKESLYKEFTWFEYKNSTYGSRLADNRLGHFERIVA

SEQ ID NO: 55435 - DNA, 1456 bp, Glycine max
  misc_feature (1)..(1456): Ceres Seq. ID no. 14310495
agggtgtagtaccgttagaagcgagtccttctacggtccttgcctctgttcagtttcattcactcctcactgtaaaacctagcaagccaaaatcacaaccattccaagtgcatgtgaaatcgcaggtttaaggtttccgtttctccatgcaatgtatcgtgtgtgttccatttgtcgctttgactttcgttctcatttcctttgaccgttaatctcggcttttcttgcggaaagtaactgttggctgatcataaatggcgcccaatccaagagtggtggcggcctttacggcaatggcgaatctcgggattcatgaatcaaaagtgaaaccagtgttgaagaaactgcttaaattgtatgataagaactgggcactcattgaagaagagagttatagggccctggctgatgcaatatttgaggaggaagagaataaggtgaatgagccagaccagaataataaaaacaagaacggagttgtggacgatgaagaagctcatacgcatggggagcctgtgcgacctttgaagaggttgcgtttgagaggccaagagggtcaatctttgcgccctctgactagcagtggccccagctcagctgcatttccgttgaaagcgcctaaattagaagatggggcagtgcccgagagtagttccagacggcagcctcaaagcatggctgcattatctgatggaaatgcaaggattggtgctcgtcatgttcccccacaagatgctgttgtcgacaagggaaagaaacctatatcacctcaacttactcccagagcgagaaggtcccttgcagagccaacagttgaagcaggagctgctctgttggcaaataacaaaatgcctcatccatttattttgatcaagcccaaggatgagcctgttgatggtataccagattatgagattccccttgcagtgattcctcctgaaccatcaagtggaggagactctctaatgggtgcagctggaaagaaagattgccatgacactgtggtatcacagtgcagagatgaaaacgttgaacatgaatatgtttttccttcctcaaattaagaagcaacttctaatgtagatgtagctttgtcgtctatgggtgaggaacaatctgtaaagataacacaaactgatgatgtttcaaaggaatctgagaccaatgactcacctattgtcagaggaaacaaagattcggtcattgcaaatggatcaatcagtgttgagtcttctgccatggctgaacttcaagttcctagttctataccctgctcgagtgatctggataatgctgtaccagctcccaagaaggttggaatgaatggtttcttacaaagtgatagtggaaaggagctggagcatcctataatcccaaattcacgtactttagtggttgttccaaaacatcagcttactaatgatgatgtaagggcagttcatgatgttaatgacct

SEQ ID NO: 55436 - protein, 269 aa, Glycine max
  peptide (1)..(269): Ceres Seq. ID no. 14310496
  misc_feature (1)..(269): Homolog of NCBI NO: 25406765 NR Description: hypothetical protein [imported] - Arabidopsis
  misc_feature (1)..(83): Homolog of NCBI NO: 7485871 NR Description: hypothetical protein F20D22.16 - Arabidopsis
  misc_feature (1)..(134): Homolog of NCBI NO: 18422394 NR Description: SET-domain transcriptional regulator family
  misc_feature (1)..(134): Homolog of NCBI NO: 9758558 NR Description: gb|AAD10665.1~gene_id:MRH10.10~strong similarity
  misc_feature (1)..(134): Homolog of NCBI NO: 15290521 NR Description: SET domain protein SUVR2 [Arabidopsis thaliana]
MAPNPRVVAAFTAMANLGIHESKVKPVLKKLLKLYDKNWALIEEESYRALADAIFEEEENKVNEPDQNNKNKNGVVDDEEAHTHGEPVRPLKRLRLRGQEGQSLRPLTSSGPSSAAFPLKAPKLEDGAVPESSSRRQPQSMAALSDGNARIGARHVPPQDAVVDKGKKPISPQLTPRARRSLAEPTVEAGAALLANNKMPHPFILIKPKDEPVDGIPDYEIPLAVIPPEPSSGGDSLMGAAGKKDCHDTVVSQCRDENVEHEYVFPSSN

SEQ ID NO: 55437 - protein, 256 aa, Glycine max
  peptide (1)..(256): Ceres Seq. ID no. 14310497
  misc_feature (1)..(256): Homolog of NCBI NO: 25406765 NR Description: hypothetical protein [imported] - Arabidopsis
  misc_feature (1)..(70): Homolog of NCBI NO: 7485871 NR Description: hypothetical protein F20D22.16 - Arabidopsis
  misc_feature (1)..(121): Homolog of NCBI NO: 18422394 NR Description: SET-domain transcriptional regulator family
  misc_feature (1)..(121): Homolog of NCBI NO: 9758558 NR Description: gb|AAD10665.1~gene_id:MRH10.10~strong similarity
  misc_feature (1)..(121): Homolog of NCBI NO: 15290521 NR Description: SET domain protein SUVR2 [Arabidopsis thaliana]
MANLGIHESKVKPVLKKLLKLYDKNWALIEEESYRALADAIFEEEENKVNEPDQNNKNKNGVVDDEEAHTHGEPVRPLKRLRLRGQEGQSLRPLTSSGPSSAAFPLKAPKLEDGAVPESSSRRQPQSMAALSDGNARIGARHVPPQDAVVDKGKKPISPQLTPRARRSLAEPTVEAGAALLANNKMPHPFILIKPKDEPVDGIPDYEIPLAVIPPEPSSGGDSLMGAAGKKDCHDTVVSQCRDENVEHEYVFPSSN

SEQ ID NO: 55438 - DNA, 1819 bp, Glycine max
  misc_feature (1)..(1819): Ceres Seq. ID no. 15176361
gatatcctctctctctctctctctctctgaacaagacccagccagccgttagggaaatcaagcacagctcaatcattgaatcttagcataaacacatacagaagaaggaaaagtggcaccctgggaggagctgatattgaaggagggtttggaagaaaaagaattttgttttgagatatatatacatatatgtgcaagtgcataggaaattaacacaaaaagatgacatggtgcaatgactctgatgaggatagggttattgaatcaacgacgccaacaataactattactcctaacactgatggcataaagctcaccgaagaaattagaaccataacatgcccctcgtgcggccataacattgaattcaaagatcagggtggaatccatgacttgccggggttaccagctggagtgaagtttgacccaaatgaccaagaaatattagaacatttggaggcaaaagtggcgtctgatgcatgcaagcttcatccccttattgacgagttcataccaacgcttgaaggcgaaaatgggatctgttatacacacccagaaaagctaccaggtgttagcaaagatggacagatccgccacttctttcacaggccctcaaaagcatacacaactggaacgaggaaaagaagaaaagttcacactgatgatgaaggaagtgaaacaagatggcacaaaacgggaaaaactagagcagtttttgcagcagccggtggtgcagtaaaaggttttaagaaaatactagtactctacaccaactatggaagacaaaagaagcctgagaaaactaattgggtgatgcatcaataccatcttggcagtactgaagaagagaaagatggagaattagttgtttcaaaggtcttctatcagacacaacctagacaatgtggcaatcccattataataaaggattcatacgaaaaaatgttgaatgatggaagtggccaagacaacattaatatatcattaatacctaaaactactgcaactcttttggattgctacactgctccttacatagattatgatcacgtccatgtgagtcataacagggaaagttcctcacaactaattattcccagctcggttgttcaagttgatggctcttatattcgcttaacaatggatgcaaagaaagcaagatttgaaagtaacactgggaagagattctaggcagagcagcaatgacaaagacttgcatataaatgttctccatattgtttcctttactaattgatcagtacgtaacattatttatatgtgggattagaatgaaggaatttcaagggttggaaaaataagttggcttccttattaagatcaatatggtgcaggcatggtggacttaatttcccataattgaccctggttgaagttgagagacaagcaagttaggtatatatatttgcggtactgtagtttgattttaattttagggtacatgtatattcgtaaaatgtgcttatagatattacaatagtagcagggatatcgtttattgactactcttcagaactatagtcagtctatatactgtattttgtctagaattgaattttgcaccccctcaatcctgaaaaaaatgctgagatgtttcattattattatattatgcgtgtcagctacttaatttgctgggaagtttgtcccttgtagttttcccccctgttttctttgaaaggtcgattgtaaaataaggtgaagacagtagatttatcttatttatggttctaaattgcggttccttgtagtttttctccctctttccaattagtgatgcggattgcagctactatgactc

SEQ ID NO: 55439 - protein, 322 aa, Glycine max
  peptide (1)..(322): Ceres Seq. ID no. 15176362
  misc_feature (61)..(204): Pfam Name: No apical meristem (NAM) protein Pfam Description: No apical meristem (NAM) protein
  misc_feature (40)..(227): Homolog of NCBI NO: 30689293 NR Description: No apical meristem (NAM) protein family
  misc_feature (40)..(227): Homolog of NCBI NO: 12320749 NR Description: unknown protein [Arabidopsis thaliana]
  misc_feature (64)..(228): Homolog of NCBI NO: 34906416 NR Description: P0710E05.22 [Oryza sativa (japonica
  misc_feature (40)..(228): Homolog of NCBI NO: 15241889 NR Description: No apical meristem (NAM) protein family
  misc_feature (40)..(228): Homolog of NCBI NO: 15233497 NR Description: No apical meristem (NAM) protein family
  misc_feature (53)..(230): Homolog of NCBI NO: 6560767 NR Description: F3M18.9 [Arabidopsis thaliana]
  misc_feature (1)..(229): Homolog of NCBI NO: 34911014 NR Description: OJ1125_C04.12 [Oryza sativa (japonica
  misc_feature (1)..(230): Homolog of NCBI NO: 21554371 NR Description: NAM protein, putative [Arabidopsis thaliana]
  misc_feature (1)..(230): Homolog of NCBI NO: 18396807 NR Description: No apical meristem (NAM) protein family
  misc_feature (1)..(232): Homolog of NCBI NO: 15235314 NR Description: No apical meristem (NAM) protein family
MTWCNDSDEDRVIESTTPTITITPNTDGIKLTEEIRTITCPSCGHNIEFKDQGGIHDLPGLPAGVKFDPNDQEILEHLEAKVASDACKLHPLIDEFIPTLEGENGICYTHPEKLPGVSKDGQIRHFFHRPSKAYTTGTRKRRKVHTDDEGSETRWHKTGKTRAVFAAAGGAVKGFKKILVLYTNYGRQKKPEKTNWVMHQYHLGSTEEEKDGELVVSKVFYQTQPRQCGNPIIIKDSYEKMLNDGSGQDNINISLIPKTTATLLDCYTAPYIDYDHVHVSHNRESSSQLIIPSSVVQVDGSYIRLTMDAKKARFESNTGKRF

SEQ ID NO: 55440 - DNA, 1164 bp, Glycine max
  misc_feature (1)..(1164): Ceres Seq. ID no. 12506279
gtagcttggagcggtgttacggtgacagagtgagagtgagagtgagaaatgggtctgctttctaacagagtggagagacatgagatcaagcctggtgatcacatctacacttacagagccgttttcacctattcccatcatggcatttttgttgggggaagcaaggttgtacatttcagacctgaaaggaacttaaagtcaatgactgagacatcatcaaactgggatgatccaacatcaaacccatgtccaacctttcctgattgtggattcagacagccaaactgtggtgtagtcctttcctgcttagactgtttccttcgaaatgggtctctttactgttttgagtatgaggtttcaccatctgttttcctcagcagaataaggggtggcacatgcactactgcatcagctgacccaccagagactgttattcatcgagcaatgtatcttcttcaaaacggctttggtaattataatgtttttcagaacaattgtgaggattttgccttgtactgcaaaactggtcttttgatacaagacaagcaaggggttggaagaagtggccaagcttcttctgttattggtgctccattggctgcaatgatcacttctcctctcaagttgttaatgccaagtcctgttggtgttgctactgtaacagcaggtatgtactgcatgagcagatatgcaactgacattggtgtcagaagtgatgtgatcaaggtgccagtggaagacttggctgtgaaccttggatggacttgtcaagaggaggagatagctgaacatgaaacttcagacagacagattactaccagatgatttagcattgctctttatccttgttatggacatgaaactgttgcatgtgtcactggagttatacactagttcatagcagatttgtcttcattcatgcttatatcttttgtaattggtgtctagttattcaagttgtgtatgagatggaaatgcaataatattattacctacagtagtaactacaatgtgatgtattcctctgagacaaattttcttctggttgcctataataatgcaacatctacctactacagtgtgatgtattcctctgtgatgtattcctctgattgaaccatcttgttgtgtatcatagaaaatcaagttgaattctattttgct

SEQ ID NO: 55441 - protein, 258 aa, Glycine max
  peptide (1)..(258): Ceres Seq. ID no. 12506280
  misc_feature (97)..(178): Pfam Name: NC domain Pfam Description: NC domain
  misc_feature (1)..(232): Homolog of NCBI NO: 15237327 NR Description: putative protein; protein id: At5g16330.1
  misc_feature (32)..(236): Homolog of NCBI NO: 9758417 NR Description: gb|AAF32477.1~gene_id:MHF15.11~similar to unknown
  misc_feature (172)..(237): Homolog of NCBI NO: 15237330 NR Description: putative protein; protein id: At5g16360.1
  misc_feature (1)..(194): Homolog of NCBI NO: 15237330 NR Description: putative protein; protein id: At5g16360.1
  misc_feature (1)..(249): Homolog of NCBI NO: 21594170 NR Description: unknown [Arabidopsis thaliana]
  misc_feature (1)..(249): Homolog of NCBI NO: 18396282 NR Description: expressed protein
  misc_feature (1)..(236): Homolog of NCBI NO: 18415178 NR Description: putative protein
  misc_feature (1)..(237): Homolog of NCBI NO: 22328196 NR Description: unknown protein; protein id: At4g00905.1
  misc_feature (1)..(252): Homolog of NCBI NO: 21592684 NR Description: unknown [Arabidopsis thaliana]
  misc_feature (1)..(252): Homolog of NCBI NO: 18378812 NR Description: Expressed protein
MGLLSNRVERHEIKPGDHIYTYRAVFTYSHHGIFVGGSKVVHFRPERNLKSMTETSSNWDDPTSNPCPTFPDCGFRQPNCGVVLSCLDCFLRNGSLYCFEYEVSPSVFLSRIRGGTCTTASADPPETVIHRAMYLLQNGFGNYNVFQNNCEDFALYCKTGLLIQDKQGVGRSGQASSVIGAPLAAMITSPLKLLMPSPVGVATVTAGMYCMSRYATDIGVRSDVIKVPVEDLAVNLGWTCQEEEIAEHETSDRQITTR

SEQ ID NO: 55442 - protein, 207 aa, Glycine max
  peptide (1)..(207): Ceres Seq. ID no. 12506281
  misc_feature (46)..(127): Pfam Name: NC domain Pfam Description: NC domain
  misc_feature (1)..(181): Homolog of NCBI NO: 15237327 NR Description: putative protein; protein id: At5g16330.1
  misc_feature (1)..(185): Homolog of NCBI NO: 9758417 NR Description: gb|AAF32477.1~gene_id:MHF15.11~similar to unknown
  misc_feature (121)..(186): Homolog of NCBI NO: 15237330 NR Description: putative protein; protein id: At5g16360.1
  misc_feature (1)..(143): Homolog of NCBI NO: 15237330 NR Description: putative protein; protein id: At5g16360.1
  misc_feature (1)..(198): Homolog of NCBI NO: 21594170 NR Description: unknown [Arabidopsis thaliana]
  misc_feature (1)..(198): Homolog of NCBI NO: 18396282 NR Description: expressed protein
  misc_feature (1)..(185): Homolog of NCBI NO: 18415178 NR Description: putative protein
  misc_feature (1)..(186): Homolog of NCBI NO: 22328196 NR Description: unknown protein; protein id: At4g00905.1
  misc_feature (1)..(201): Homolog of NCBI NO: 21592684 NR Description: unknown [Arabidopsis thaliana]
  misc_feature (1)..(201): Homolog of NCBI NO: 18378812 NR Description: Expressed protein
MTETSSNWDDPTSNPCPTFPDCGFRQPNCGVVLSCLDCFLRNGSLYCFEYEVSPSVFLSRIRGGTCTTASADPPETVIHRAMYLLQNGFGNYNVFQNNCEDFALYCKTGLLIQDKQGVGRSGQASSVIGAPLAAMITSPLKLLMPSPVGVATVTAGMYCMSRYATDIGVRSDVIKVPVEDLAVNLGWTCQEEEIAEHETSDRQITTR

SEQ ID NO: 55443 - DNA, 1925 bp, Glycine max
  misc_feature (1)..(1925): Ceres Seq. ID no. 15175771
ttcgttttcaacaggcagggcatttgggagtgtctttgtttcccttcttgccctgtatgatatgagtgcttgattcgttgtcttcaaatcctgcaaggccagaggaagcaatcaactcaaacgacaccatgtctggaactatgtctccaaaaggttctttcaagaagaaagcaatcaatgcctcaaacatgctgaggaattctttgaccaggaagggtaggcgaagcagtaaggtcatgtccgttgaaatcgaggatgtccacgatgctgaggagttgaaaattgttgacgagttccgtcaagctcttattttggacgaacttcttcctgcaaaacacgatgattatcatatgatgcttagattcctgaaggctaggaaatttgatatcgagaaaacaaagcaaatgtggtctgaaatgctcaaatggaggaaggaatttggtgctgacaccatcacggaggacttcgaattcaaagaacttgatgaagtcttgcaatattatccccaaggccatcatggagtggacaaagatggaagacctgtgtacatagagagattaggccaagtcgatgccacgaagatgatgcaagtcacaaccatggatcgctacatcaaataccacgtaaaggagtttgagaggacatttgatgttaagtttgcagcttgttcaattgctgcaaagaagcacatagatcaaagtacaactatcctggacgtgcagggagtggggcttaaaagcttcagcaaacatgctagggaacttgttactcgccttcagaagattgacggtgacaactatccagagaccttgaatcgcatgttcatcatcaatgcaggttctggatttaggatactgtggaacaccgtaaaatcattccttgatcctaagaccacggcaaaaatcaatgttcttggcaacaagtatgacaccaaattgctagaaataattgatgcaagtgagttgcctgaatttttaggaggcacttgtacatgtgctgatcaaggaggctgtatgcgctctgataagggcccatggaaggatgcagaagtaatgaggatggttcagaatggtgatcacaaatgttcaaaaaaaagtgcctcacaaggcgaggaagagaaagaaaattctgaggaacacaagacttccaaattggaggcaaatcacaccccccagctttctccagttgttgaagaagaggtccctgctactaaaacttcccagcccttatcaccgatggctgataaatctgctgtgaaaaaagttgatgagaaagcttccaagcctaaggacttagcccctacagctgataaaactgcagcatcaactgagttttcgactgtgatgaaacgcatggctgagttggaggagaaaatcgtcaccatcaataataagcccactgctatgccacctgagaaggagcaaatgctgaatgcaactataactcgagccgatgacttggagaaacaacttttggctaccaagaaggctctggaggattcacttgttaagcaagaagagctttcggcttatcttgacaaaaagaagaagaagaagaagaagagatttttcttcttttaaagagcaaatccgtggatgcccaaacaagaggtccagatattaacgggaaattagcttttagtttctgcctttcaggagacttcccaaatgccccccttacatcaatgttcaacatgcgaactagtaaatattcaaaacgatcagaagagaagcatttgctcaaaatatatgaattatgataatcagaattttggtctctattaggataggacttactctctatgtgtagtatatatatatagggctatggcgatctgcacattatgcaaagcctgctctattattatgtacgtacagaatcaatcaatatctagtacaaaattagagagtatgacaatatgtttg

SEQ ID NO: 55444 - protein, 483 aa, Glycine max
  peptide (1)..(483): Ceres Seq. ID no. 15175772
  misc_feature (126)..(312): Pfam Name: CRAL/TRIO domain Pfam Description: CRAL/TRIO domain
  misc_feature (5)..(478): Homolog of NCBI NO: 18419847 NR Description: hosphatidylinositol/phophatidylcholine transfer
  misc_feature (388)..(480): Homolog of NCBI NO: 14486705 NR Description: phosphatidylinositol transfer-like protein III
  misc_feature (9)..(426): Homolog of NCBI NO: 14486705 NR Description: phosphatidylinositol transfer-like protein III
  misc_feature (381)..(477): Homolog of NCBI NO: 15236152 NR Description: hypothetical protein [Arabidopsis thaliana]
  misc_feature (10)..(344): Homolog of NCBI NO: 15236152 NR Description: hypothetical protein [Arabidopsis thaliana]
  misc_feature (373)..(483): Homolog of NCBI NO: 18399733 NR Description: phosphatidylinositol phophatidylcholine transfer
  misc_feature (10)..(344): Homolog of NCBI NO: 18399733 NR Description: phosphatidylinositol phophatidylcholine transfer
  misc_feature (398)..(477): Homolog of NCBI NO: 14517816 NR Description: phosphatidylinositol transfer-like protein II
  misc_feature (1)..(381): Homolog of NCBI NO: 14517816 NR Description: phosphatidylinositol transfer-like protein II
  misc_feature (10)..(480): Homolog of NCBI NO: 14486707 NR Description: phosphatidylinositol transfer-like protein IV
MSGTMSPKGSFKKKAINASNMLRNSLTRKGRRSSKVMSVEIEDVHDAEELKIVDEFRQALILDELLPAKHDDYHMMLRFLKARKFDIEKTKQMWSEMLKWRKEFGADTITEDFEFKELDEVLQYYPQGHHGVDKDGRPVYIERLGQVDATKMMQVTTMDRYIKYHVKEFERTFDVKFAACSIAAKKHIDQSTTILDVQGVGLKSFSKHARELVTRLQKIDGDNYPETLNRMFIINAGSGFRILWNTVKSFLDPKTTAKINVLGNKYDTKLLEIIDASELPEFLGGTCTCADQGGCMRSDKGPWKDAEVMRMVQNGDHKCSKKSASQGEEEKENSEEHKTSKLEANHTPQLSPVVEEEVPATKTSQPLSPMADKSAVKKVDEKASKPKDLAPTADKTAASTEFSTVMKRMAELEEKIVTINNKPTAMPPEKEQMLNATITRADDLEKQLLATKKALEDSLVKQEELSAYLDKKKKKKKKRFFFF

SEQ ID NO: 55445 - protein, 479 aa, Glycine max
  peptide (1)..(479): Ceres Seq. ID no. 15175773
  misc_feature (122)..(308): Pfam Name: CRAL/TRIO domain Pfam Description: CRAL/TRIO domain
  misc_feature (1)..(474): Homolog of NCBI NO: 18419847 NR Description: hosphatidylinositol/phophatidylcholine transfer
  misc_feature (384)..(476): Homolog of NCBI NO: 14486705 NR Description: phosphatidylinositol transfer-like protein III
  misc_feature (5)..(422): Homolog of NCBI NO: 14486705 NR Description: phosphatidylinositol transfer-like protein III
  misc_feature (377)..(473): Homolog of NCBI NO: 15236152 NR Description: hypothetical protein [Arabidopsis thaliana]
  misc_feature (6)..(340): Homolog of NCBI NO: 15236152 NR Description: hypothetical protein [Arabidopsis thaliana]
  misc_feature (369)..(479): Homolog of NCBI NO: 18399733 NR Description: phosphatidylinositol phophatidylcholine transfer
  misc_feature (6)..(340): Homolog of NCBI NO: 18399733 NR Description: phosphatidylinositol phophatidylcholine transfer
  misc_feature (394)..(473): Homolog of NCBI NO: 14517816 NR Description: phosphatidylinositol transfer-like protein II
  misc_feature (1)..(377): Homolog of NCBI NO: 14517816 NR Description: phosphatidylinositol transfer-like protein II
  misc_feature (6)..(476): Homolog of NCBI NO: 14486707 NR Description: phosphatidylinositol transfer-like protein IV
MSPKGSFKKKAINASNMLRNSLTRKGRRSSKVMSVEIEDVHDAEELKIVDEFRQALILDELLPAKHDDYHMMLRFLKARKFDIEKTKQMWSEMLKWRKEFGADTITEDFEFKELDEVLQYYPQGHHGVDKDGRPVYIERLGQVDATKMMQVTTMDRYIKYHVKEFERTFDVKFAACSIAAKKHIDQSTTILDVQGVGLKSFSKHARELVTRLQKIDGDNYPETLNRMFIINAGSGFRILWNTVKSFLDPKTTAKINVLGNKYDTKLLEIIDASELPEFLGGTCTCADQGGCMRSDKGPWKDAEVMRMVQNGDHKCSKKSASQGEEEKENSEEHKTSKLEANHTPQLSPVVEEEVPATKTSQPLSPMADKSAVKKVDEKASKPKDLAPTADKTAASTEFSTVMKRMAELEEKIVTINNKPTAMPPEKEQMLNATITRADDLEKQLLATKKALEDSLVKQEELSAYLDKKKKKKKKRFFFF

SEQ ID NO: 55446 - protein, 463 aa, Glycine max
  peptide (1)..(463): Ceres Seq. ID no. 15175774
  misc_feature (106)..(292): Pfam Name: CRAL/TRIO domain Pfam Description: CRAL/TRIO domain
  misc_feature (1)..(458): Homolog of NCBI NO: 18419847 NR Description: hosphatidylinositol/phophatidylcholine transfer
  misc_feature (368)..(460): Homolog of NCBI NO: 14486705 NR Description: phosphatidylinositol transfer-like protein III
  misc_feature (1)..(406): Homolog of NCBI NO: 14486705 NR Description: phosphatidylinositol transfer-like protein III
  misc_feature (361)..(457): Homolog of NCBI NO: 15236152 NR Description: hypothetical protein [Arabidopsis thaliana]
  misc_feature (1)..(324): Homolog of NCBI NO: 15236152 NR Description: hypothetical protein [Arabidopsis thaliana]
  misc_feature (353)..(463): Homolog of NCBI NO: 18399733 NR Description: phosphatidylinositol phophatidylcholine transfer
  misc_feature (1)..(324): Homolog of NCBI NO: 18399733 NR Description: phosphatidylinositol phophatidylcholine transfer
  misc_feature (378)..(457): Homolog of NCBI NO: 14517816 NR Description: phosphatidylinositol transfer-like protein II
  misc_feature (1)..(361): Homolog of NCBI NO: 14517816 NR Description: phosphatidylinositol transfer-like protein II
  misc_feature (1)..(460): Homolog of NCBI NO: 14486707 NR Description: phosphatidylinositol transfer-like protein IV
MLRNSLTRKGRRSSKVMSVEIEDVHDAEELKIVDEFRQALILDELLPAKHDDYHMMLRFLKARKFDIEKTKQMWSEMLKWRKEFGADTITEDFEFKELDEVLQYYPQGHHGVDKDGRPVYIERLGQVDATKMMQVTTMDRYIKYHVKEFERTFDVKFAACSIAAKKHIDQSTTILDVQGVGLKSFSKHARELVTRLQKIDGDNYPETLNRMFIINAGSGFRILWNTVKSFLDPKTTAKINVLGNKYDTKLLEIIDASELPEFLGGTCTCADQGGCMRSDKGPWKDAEVMRMVQNGDHKCSKKSASQGEEEKENSEEHKTSKLEANHTPQLSPVVEEEVPATKTSQPLSPMADKSAVKKVDEKASKPKDLAPTADKTAASTEFSTVMKRMAELEEKIVTINNKPTAMPPEKEQMLNATITRADDLEKQLLATKKALEDSLVKQEELSAYLDKKKKKKKKRFFFF

SEQ ID NO: 55447 - DNA, 1139 bp, Glycine max
  misc_feature (1)..(1139): Ceres Seq. ID no. 15170037
aaataaaaataacaaagcgatccaaaaaaacacacaaacaacaatcaccatgggagaggaagtagacactgcttttgtccaagcaccagaacacaggccaaaatcctcagtgatcgtggcagaaggaatccctctgattgatctctctcccataaactaccaaaacgaagacaccctcttggattcttctatcgaaaacttagtcaaagaaataggcagtgcttgcaagaaatggggtttctttcaggtgatcaatcacaaggtgcctttggataaacgagagaggattgaagaggctgcaaaaaagttctttgcacttggtttagaggaaaagttgaaggtgagaagggatgcggttaacgtgttgggttactttgaagcagaacataccaagaacgttagggactggaaagagatctatgatttcaatgttcaggaacccacttttataccaccctcagatgaaccagatgatgaggaaaacgttcagttccaatgggataaccggtggcctcagaatcctcctgagttcaaagaagcatgccaagagtatgcacaagaagtggagaaacttgcttataagttgatggaacttgttgcactgagcttaggcttagtgccaaataggttccgcgggtatttcacacataacacgagcaatatccgtctgaatcattatccagcttgcccctaccctcatctggctcttggactcggacgccacaaggacactggtgtcttgactgtgcttgctcaagatgacactggtggtctagaagttaggagaaaatcagatggagagtggattcgagtcaagcccattttcaattccttcatcatcaatgtcggtgatatgatccaggtttggagcaatgatgcttatgagagtgtagaacacagggttatggtgaactctgagaaggataggttttcaattccattctttctgaaaccagcactctacactgatgtgaagcccttggaagagttgctagatgatagaaaccctcctatatatagaccagtcaactggggtaagttccgctctgcaagaatgcgaagtaattttgccaaatccaaagttgaaaacctccaaatttatgatttcaagtttcctagtaactgagtcagagtccata

SEQ ID NO: 55448 - protein, 374 aa, Glycine max
  peptide (1)..(374): Ceres Seq. ID no. 15170038
  misc_feature (218)..(318): Pfam Name: 2OG-Fe(II) oxygenase superfamily Pfam Description: 2OG-Fe(II) oxygenase superfamily
  misc_feature (71)..(364): Homolog of NCBI NO: 15224472 NR Description: oxidoreductase, 2OG-Fe(II) oxygenase family
  misc_feature (24)..(124): Homolog of NCBI NO: 15418964 NR Description: gibberellin 3-beta-hydroxylase 1 [Solanum
  misc_feature (170)..(353): Homolog of NCBI NO: 15418964 NR Description: gibberellin 3-beta-hydroxylase 1 [Solanum
  misc_feature (62)..(273): Homolog of NCBI NO: 18103924 NR Description: putative oxylase protein [Pinus pinaster]
  misc_feature (243)..(370): Homolog of NCBI NO: 40253917 NR Description: putative Isopenicillin N synthase and related
  misc_feature (18)..(178): Homolog of NCBI NO: 40253917 NR Description: putative Isopenicillin N synthase and related
  misc_feature (19)..(288): Homolog of NCBI NO: 30685157 NR Description: flavonol synthase family [Arabidopsis thaliana]
  misc_feature (19)..(370): Homolog of NCBI NO: 21593702 NR Description: unknown [Arabidopsis thaliana]
  misc_feature (19)..(370): Homolog of NCBI NO: 18402081 NR Description: flavonol synthase family [Arabidopsis thaliana]
  misc_feature (17)..(370): Homolog of NCBI NO: 18402079 NR Description: oxidoreductase, 2OG-Fe(II) oxygenase family
NKNNKAIQKNTQTTITMGEEVDTAFVQAPEHRPKSSVIVAEGIPLIDLSPINYQNEDTLLDSSIENLVKEIGSACKKWGFFQVINHKVPLDKRERIEEAAKKFFALGLEEKLKVRRDAVNVLGYFEAEHTKNVRDWKEIYDFNVQEPTFIPPSDEPDDEENVQFQWDNRWPQNPPEFKEACQEYAQEVEKLAYKLMELVALSLGLVPNRFRGYFTHNTSNIRLNHYPACPYPHLALGLGRHKDTGVLTVLAQDDTGGLEVRRKSDGEWIRVKPIFNSFIINVGDMIQVWSNDAYESVEHRVMVNSEKDRFSIPFFLKPALYTDVKPLEELLDDRNPPIYRPVNWGKFRSARMRSNFAKSKVENLQIYDFKFPSN

SEQ ID NO: 55449 - protein, 358 aa, Glycine max
  peptide (1)..(358): Ceres Seq. ID no. 15170039
  misc_feature (202)..(302): Pfam Name: 2OG-Fe(II) oxygenase superfamily Pfam Description: 2OG-Fe(II) oxygenase superfamily
  misc_feature (55)..(348): Homolog of NCBI NO: 15224472 NR Description: oxidoreductase, 2OG-Fe(II) oxygenase family
  misc_feature (8)..(108): Homolog of NCBI NO: 15418964 NR Description: gibberellin 3-beta-hydroxylase 1 [Solanum
  misc_feature (154)..(337): Homolog of NCBI NO: 15418964 NR Description: gibberellin 3-beta-hydroxylase 1 [Solanum
  misc_feature (46)..(257): Homolog of NCBI NO: 18103924 NR Description: putative oxylase protein [Pinus pinaster]
  misc_feature (227)..(354): Homolog of NCBI NO: 40253917 NR Description: putative Isopenicillin N synthase and related
  misc_feature (2)..(162): Homolog of NCBI NO: 40253917 NR Description: putative Isopenicillin N synthase and related
  misc_feature (3)..(272): Homolog of NCBI NO: 30685157 NR Description: flavonol synthase family [Arabidopsis thaliana]
  misc_feature (3)..(354): Homolog of NCBI NO: 21593702 NR Description: unknown [Arabidopsis thaliana]
  misc_feature (3)..(354): Homolog of NCBI NO: 18402081 NR Description: flavonol synthase family [Arabidopsis thaliana]
  misc_feature (1)..(354): Homolog of NCBI NO: 18402079 NR Description: oxidoreductase, 2OG-Fe(II) oxygenase family
MGEEVDTAFVQAPEHRPKSSVIVAEGIPLIDLSPINYQNEDTLLDSSIENLVKEIGSACKKWGFFQVINHKVPLDKRERIEEAAKKFFALGLEEKLKVRRDAVNVLGYFEAEHTKNVRDWKEIYDFNVQEPTFIPPSDEPDDEENVQFQWDNRWPQNPPEFKEACQEYAQEVEKLAYKLMELVALSLGLVPNRFRGYFTHNTSNIRLNHYPACPYPHLALGLGRHKDTGVLTVLAQDDTGGLEVRRKSDGEWIRVKPIFNSFIINVGDMIQVWSNDAYESVEHRVMVNSEKDRFSIPFFLKPALYTDVKPLEELLDDRNPPIYRPVNWGKFRSARMRSNFAKSKVENLQIYDFKFPSN

SEQ ID NO: 55450 - DNA, 1323 bp, Glycine max
  misc_feature (1)..(1323): Ceres Seq. ID no. 14308664
attatgtttattattttcttaaatcacaaacttatcttttgcttctctctcatcactccactaccccttcttcctctttatatctcttgtgtctataataacctaatccattctacgcgatcatatatcatatcccccgattcctttttcccaccctctcaccatgactcatccctactgctctaatgacttgaatgcttggtttgacctcaattctccatgccttttttccaattcttcatcaccttgctccaataacccaccattctactttcctactactaatattagttaccgtcataactgcacaaataatggcatctcttttactcagcatattcaatcttctcccagctcctttcctcctccaaaagaagcacttactcttaacctaagccccgcaagaggtgaagatcttgatcttgaatcttccttcagtgccatgaaagtcaacaaagagaaggagaaagaattactaagcatcatgtcttctaataataactctttggatgatgaaactgtgacggtggctttgcacttagggcttccaagcactactgctacttcatcagctgatttaacttcaaacatgtactcagaaaaagaagaaaaagccacttttgcttctgagtattctccgactagaattaacaagggtcagtattggatccctacccctgctcaaattctgatcggtccaacacggttctcatgccccctttgttgcaagacgttcaacagatacaacaacatgcagatgcatatgtgggggcatggatctcaatatagaaaggggccagagtctctaaggggaactcaaccaacagcaatgcttagactcccttgctattgctgtgcacaaggatgcaagaacaacattgaccatccaagagcaaagccactcaaagactttaggaccctccaaacccattacaagagaaagcatggaatcaagcctttcatgtgtagaaaatgttgcaaagcatttgctgtgaggggtgattggaggactcacgagaaaaactgtgggaagctatggtattgctcttgtgggtccgattttaagcacaagagatctctcaaagatcatatcaaggcatttgggaatggacatagagcttatggaatcgactcatgtcttgatcaagatgatgaaccgggctcagaaattgagcaggaaaataatgaatctttaatttccaatcatagttgacgtgtaatttcaactatgaagactagacaattgaggattctcatgttttgaactaattaaattgttgactatgactaccatctctaattaacgagttctccactcccccc

SEQ ID NO: 55451 - protein, 349 aa, Glycine max
  peptide (1)..(349): Ceres Seq. ID no. 14308665
  misc_feature (292)..(317): Pfam Name: Zinc finger, C2H2 type Pfam Description: Zinc finger, C2H2 type
  misc_feature (116)..(320): Homolog of NCBI NO: 30693123 NR Description: transparent testa 1 (TT1) protein [Arabidopsis
  misc_feature (116)..(320): Homolog of NCBI NO: 18253283 NR Description: transparent testa 1 [Arabidopsis thaliana]
  misc_feature (97)..(342): Homolog of NCBI NO: 15222242 NR Description: zinc finger protein -related [Arabidopsis
  misc_feature (167)..(339): Homolog of NCBI NO: 30685975 NR Description: DNA-binding protein -related [Arabidopsis
  misc_feature (167)..(339): Homolog of NCBI NO: 9294415 NR Description: zinc finger-like protein [Arabidopsis thaliana]
  misc_feature (1)..(338): Homolog of NCBI NO: 15223781 NR Description: expressed protein [Arabidopsis thaliana]
  misc_feature (1)..(156): Homolog of NCBI NO: 28973719 NR Description: putative zinc finger protein [Arabidopsis
  misc_feature (1)..(156): Homolog of NCBI NO: 15230370 NR Description: zinc finger - like protein [Arabidopsis thaliana]
  misc_feature (160)..(342): Homolog of NCBI NO: 28973719 NR Description: putative zinc finger protein [Arabidopsis
  misc_feature (160)..(342): Homolog of NCBI NO: 15230370 NR Description: zinc finger - like protein [Arabidopsis thaliana]
MTHPYCSNDLNAWFDLNSPCLFSNSSSPCSNNPPFYFPTTNISYRHNCTNNGISFTQHIQSSPSSFPPPKEALTLNLSPARGEDLDLESSFSAMKVNKEKEKELLSIMSSNNNSLDDETVTVALHLGLPSTTATSSADLTSNMYSEKEEKATFASEYSPTRINKGQYWIPTPAQILIGPTRFSCPLCCKTFNRYNNMQMHMWGHGSQYRKGPESLRGTQPTAMLRLPCYCCAQGCKNNIDHPRAKPLKDFRTLQTHYKRKHGIKPFMCRKCCKAFAVRGDWRTHEKNCGKLWYCSCGSDFKHKRSLKDHIKAFGNGHRAYGIDSCLDQDDEPGSEIEQENNESLISNHS

SEQ ID NO: 55452 - protein, 256 aa, Glycine max
  peptide (1)..(256): Ceres Seq. ID no. 14308666
  misc_feature (199)..(224): Pfam Name: Zinc finger, C2H2 type Pfam Description: Zinc finger, C2H2 type
  misc_feature (23)..(227): Homolog of NCBI NO: 30693123 NR Description: transparent testa 1 (TT1) protein [Arabidopsis
  misc_feature (23)..(227): Homolog of NCBI NO: 18253283 NR Description: transparent testa 1 [Arabidopsis thaliana]
  misc_feature (4)..(249): Homolog of NCBI NO: 15222242 NR Description: zinc finger protein -related [Arabidopsis
  misc_feature (74)..(246): Homolog of NCBI NO: 30685975 NR Description: DNA-binding protein -related [Arabidopsis
  misc_feature (74)..(246): Homolog of NCBI NO: 9294415 NR Description: zinc finger-like protein [Arabidopsis thaliana]
  misc_feature (1)..(245): Homolog of NCBI NO: 15223781 NR Description: expressed protein [Arabidopsis thaliana]
  misc_feature (1)..(63): Homolog of NCBI NO: 28973719 NR Description: putative zinc finger protein [Arabidopsis
  misc_feature (1)..(63): Homolog of NCBI NO: 15230370 NR Description: zinc finger - like protein [Arabidopsis thaliana]
  misc_feature (67)..(249): Homolog of NCBI NO: 28973719 NR Description: putative zinc finger protein [Arabidopsis
  misc_feature (67)..(249): Homolog of NCBI NO: 15230370 NR Description: zinc finger - like protein [Arabidopsis thaliana]
MKVNKEKEKELLSIMSSNNNSLDDETVTVALHLGLPSTTATSSADLTSNMYSEKEEKATFASEYSPTRINKGQYWIPTPAQILIGPTRFSCPLCCKTFNRYNNMQMHMWGHGSQYRKGPESLRGTQPTAMLRLPCYCCAQGCKNNIDHPRAKPLKDFRTLQTHYKRKHGIKPFMCRKCCKAFAVRGDWRTHEKNCGKLWYCSCGSDFKHKRSLKDHIKAFGNGHRAYGIDSCLDQDDEPGSEIEQENNESLISNHS

SEQ ID NO: 55453 - protein, 242 aa, Glycine max
  peptide (1)..(242): Ceres Seq. ID no. 14308667
  misc_feature (185)..(210): Pfam Name: Zinc finger, C2H2 type Pfam Description: Zinc finger, C2H2 type
  misc_feature (9)..(213): Homolog of NCBI NO: 30693123 NR Description: transparent testa 1 (TT1) protein [Arabidopsis
  misc_feature (9)..(213): Homolog of NCBI NO: 18253283 NR Description: transparent testa 1 [Arabidopsis thaliana]
  misc_feature (1)..(235): Homolog of NCBI NO: 15222242 NR Description: zinc finger protein -related [Arabidopsis
  misc_feature (60)..(232): Homolog of NCBI NO: 30685975 NR Description: DNA-binding protein -related [Arabidopsis
  misc_feature (60)..(232): Homolog of NCBI NO: 9294415 NR Description: zinc finger-like protein [Arabidopsis thaliana]
  misc_feature (1)..(231): Homolog of NCBI NO: 15223781 NR Description: expressed protein [Arabidopsis thaliana]
  misc_feature (1)..(49): Homolog of NCBI NO: 28973719 NR Description: putative zinc finger protein [Arabidopsis
  misc_feature (1)..(49): Homolog of NCBI NO: 15230370 NR Description: zinc finger - like protein [Arabidopsis thaliana]
  misc_feature (53)..(235): Homolog of NCBI NO: 28973719 NR Description: putative zinc finger protein [Arabidopsis
  misc_feature (53)..(235): Homolog of NCBI NO: 15230370 NR Description: zinc finger - like protein [Arabidopsis thaliana]
MSSNNNSLDDETVTVALHLGLPSTTATSSADLTSNMYSEKEEKATFASEYSPTRINKGQYWIPTPAQILIGPTRFSCPLCCKTFNRYNNMQMHMWGHGSQYRKGPESLRGTQPTAMLRLPCYCCAQGCKNNIDHPRAKPLKDFRTLQTHYKRKHGIKPFMCRKCCKAFAVRGDWRTHEKNCGKLWYCSCGSDFKHKRSLKDHIKAFGNGHRAYGIDSCLDQDDEPGSEIEQENNESLISNHS

SEQ ID NO: 55454 - DNA, 1802 bp, Glycine max
  misc_feature (1)..(1802): Ceres Seq. ID no. 15225119
gtcagctacgtaggccccccccccccaaaaaattagaaaatcaaaagcagtcattcgaccaggaacacgcacgcttgagcaaagaactgtcgaataatgccgatacaatcgctgaattgcgaaaagaaatcgctcgattgatgggcgaaaatgagaaactattgaaaaatcaagccgttgctattcaaccagagagtacaagtaacagagacgatgagatccagaaattagaaaaaattgtgaatgaattacgtgaggaaaaggcaaatatggaagccgaattacaggtgctaaacgatcaagtcattaaaaacttagaaattgaagaccgaatcaagagcaccgtttttgaacttgacacaaagaacattgaaatcgccgaattgaaaaatagtttacaacaaattaaagagaatcaaaatgtgccacctgcggctatagatccgaccacgcaacaacaaatcgctgaattaaccgcaaaattgctagagaaagacgcactgcaccagtctaacatcgatttattgaatgcccaatggcaacaagtggttgatcaaaaatgtgctgaagtagcagacagttggcgtcatcatttgcaattgaaagaggaagaattcgcagccgtggaaagcgatttacgtgagaaaatgctacaacttgagcaacaatcgaataccagttcaacaacacctgaaacacaaaatacacctacctctggtgattcacgatcaaatatccaagaatcacctgaactcaaatctgacattgcgaacgccgatcaaagtgaactcgttaaaacgatgcaaagtgcattggagcaacaggaactggaaatagtttcgcttaaagaacagttggccattcgcagtgctgaatatgcccgaattgctgcgtccgtcgacccgtatgccatgaaatccacatcgagtaacagtttccaatcggttagtcaaacagaagaaactccatcgaaaggaaatgaattggatttggcactttatatgctacatcaacgtgatatgcggtgcgaagaactaaccgaagaagtgatacacttgctggaggaacgtgatacactacagctgaaactatcgaattccattcgccagattgaggagttcaaacagcgaactggagctgatgccaccgatgcatctgaagcaggcagcagcagtccggttaaatcaaacccagcttcgagcgatgcacagtcctcacacgatggcagttttaatgaacagtcacaaaatttggatttgaaattatctgaattgcacaaagtcagtcattctcgtgataaaaccctaaaggaggagcgtgaccaacggcgtcgtcaaatgaatgtattccaaaaagatgtagcaaacatgccacctgaagcgattgccgaactgtttggacccgatttcaagccaaatacacgaaacacccaaaatgcatcgtcgatgctgatggattggctgtggggacgaagtgataatgaaccacacaactgatgttccatatttaaatcattcaacttctgccaggtgcacgactacagtttgatttgtttctcttttaatctgaaacgattcggttttgatgtgggtgatctgttctttattagaaacgactcgtttaacgacctcaaattaaagtagttgcacttcaaaatcaacatgaattattaaaagccaatatttgaacgtaaaaacacataagcaaaaaaaaatcattcaatttacctgagaagaaaaaaaattatatttgtttttagattttatgatttatcgttaaatgtaaaataataaaaaatattg

SEQ ID NO: 55455 - protein, 497 aa, Glycine max
  peptide (1)..(497): Ceres Seq. ID no. 15225120
  misc_feature (10)..(446): Pfam Name: Myosin tail Pfam Description: Myosin tail
  misc_feature (9)..(459): Homolog of NCBI NO: 17553764 NR Description: protein kinase beta like (3E511) [Caenorhabditis
  misc_feature (62)..(459): Homolog of NCBI NO: 32566158 NR Description: M protein repeat and RepA / Rep+ protein KID
  misc_feature (62)..(459): Homolog of NCBI NO: 7508662 NR Description: hypothetical protein T28C6.7 - Caenorhabditis
  misc_feature (10)..(464): Homolog of NCBI NO: 28830050 NR Description: similar to Entamoeba histolytica. Myosin heavy
  misc_feature (9)..(377): Homolog of NCBI NO: 25408221 NR Description: probable myosin heavy chain [imported] -
  misc_feature (12)..(376): Homolog of NCBI NO: 15217624 NR Description: expressed protein [Arabidopsis thaliana]
  misc_feature (11)..(490): Homolog of NCBI NO: 31204359 NR Description: ENSANGP00000017337 [Anopheles gambiae]
  misc_feature (10)..(494): Homolog of NCBI NO: 17933552 NR Description: lava lamp CG6450-PC [Drosophila melanogaster]
  misc_feature (11)..(494): Homolog of NCBI NO: 21428694 NR Description: SD02391p [Drosophila melanogaster]
QLRRPPPPKKLENQKQSFDQEHARLSKELSNNADTIAELRKEIARLMGENEKLLKNQAVAIQPESTSNRDDEIQKLEKIVNELREEKANMEAELQVLNDQVIKNLEIEDRIKSTVFELDTKNIEIAELKNSLQQIKENQNVPPAAIDPTTQQQIAELTAKLLEKDALHQSNIDLLNAQWQQVVDQKCAEVADSWRHHLQLKEEEFAAVESDLREKMLQLEQQSNTSSTTPETQNTPTSGDSRSNIQESPELKSDIANADQSELVKTMQSALEQQELEIVSLKEQLAIRSAEYARIAASVDPYAMKSTSSNSFQSVSQTEETPSKGNELDLALYMLHQRDMRCEELTEEVIHLLEERDTLQLKLSNSIRQIEEFKQRTGADATDASEAGSSSPVKSNPASSDAQSSHDGSFNEQSQNLDLKLSELHKVSHSRDKTLKEERDQRRRQMNVFQKDVANMPPEAIAELFGPDFKPNTRNTQNASSMLMDWLWGRSDNEPHN

SEQ ID NO: 55456 - protein, 451 aa, Glycine max
  peptide (1)..(451): Ceres Seq. ID no. 15225121
  misc_feature (1)..(400): Pfam Name: Myosin tail Pfam Description: Myosin tail
  misc_feature (1)..(413): Homolog of NCBI NO: 17553764 NR Description: protein kinase beta like (3E511) [Caenorhabditis
  misc_feature (16)..(413): Homolog of NCBI NO: 32566158 NR Description: M protein repeat and RepA / Rep+ protein KID
  misc_feature (16)..(413): Homolog of NCBI NO: 7508662 NR Description: hypothetical protein T28C6.7 - Caenorhabditis
  misc_feature (1)..(418): Homolog of NCBI NO: 28830050 NR Description: similar to Entamoeba histolytica. Myosin heavy
  misc_feature (1)..(331): Homolog of NCBI NO: 25408221 NR Description: probable myosin heavy chain [imported] -
  misc_feature (1)..(330): Homolog of NCBI NO: 15217624 NR Description: expressed protein [Arabidopsis thaliana]
  misc_feature (1)..(444): Homolog of NCBI NO: 31204359 NR Description: ENSANGP00000017337 [Anopheles gambiae]
  misc_feature (1)..(448): Homolog of NCBI NO: 17933552 NR Description: lava lamp CG6450-PC [Drosophila melanogaster]
  misc_feature (1)..(448): Homolog of NCBI NO: 21428694 NR Description: SD02391p [Drosophila melanogaster]
MGENEKLLKNQAVAIQPESTSNRDDEIQKLEKIVNELREEKANMEAELQVLNDQVIKNLEIEDRIKSTVFELDTKNIEIAELKNSLQQIKENQNVPPAAIDPTTQQQIAELTAKLLEKDALHQSNIDLLNAQWQQVVDQKCAEVADSWRHHLQLKEEEFAAVESDLREKMLQLEQQSNTSSTTPETQNTPTSGDSRSNIQESPELKSDIANADQSELVKTMQSALEQQELEIVSLKEQLAIRSAEYARIAASVDPYAMKSTSSNSFQSVSQTEETPSKGNELDLALYMLHQRDMRCEELTEEVIHLLEERDTLQLKLSNSIRQIEEFKQRTGADATDASEAGSSSPVKSNPASSDAQSSHDGSFNEQSQNLDLKLSELHKVSHSRDKTLKEERDQRRRQMNVFQKDVANMPPEAIAELFGPDFKPNTRNTQNASSMLMDWLWGRSDNEPHN

SEQ ID NO: 55457 - protein, 408 aa, Glycine max
  peptide (1)..(408): Ceres Seq. ID no. 15225122
  misc_feature (1)..(357): Pfam Name: Myosin tail Pfam Description: Myosin tail
  misc_feature (1)..(370): Homolog of NCBI NO: 17553764 NR Description: protein kinase beta like (3E511) [Caenorhabditis
  misc_feature (1)..(370): Homolog of NCBI NO: 32566158 NR Description: M protein repeat and RepA / Rep+ protein KID
  misc_feature (1)..(370): Homolog of NCBI NO: 7508662 NR Description: hypothetical protein T28C6.7 - Caenorhabditis
  misc_feature (1)..(375): Homolog of NCBI NO: 28830050 NR Description: similar to Entamoeba histolytica. Myosin heavy
  misc_feature (1)..(288): Homolog of NCBI NO: 25408221 NR Description: probable myosin heavy chain [imported] -
  misc_feature (1)..(287): Homolog of NCBI NO: 15217624 NR Description: expressed protein [Arabidopsis thaliana]
  misc_feature (1)..(401): Homolog of NCBI NO: 31204359 NR Description: ENSANGP00000017337 [Anopheles gambiae]
  misc_feature (1)..(405): Homolog of NCBI NO: 17933552 NR Description: lava lamp CG6450-PC [Drosophila melanogaster]
  misc_feature (1)..(405): Homolog of NCBI NO: 21428694 NR Description: SD02391p [Drosophila melanogaster]
MEAELQVLNDQVIKNLEIEDRIKSTVFELDTKNIEIAELKNSLQQIKENQNVPPAAIDPTTQQQIAELTAKLLEKDALHQSNIDLLNAQWQQVVDQKCAEVADSWRHHLQLKEEEFAAVESDLREKMLQLEQQSNTSSTTPETQNTPTSGDSRSNIQESPELKSDIANADQSELVKTMQSALEQQELEIVSLKEQLAIRSAEYARIAASVDPYAMKSTSSNSFQSVSQTEETPSKGNELDLALYMLHQRDMRCEELTEEVIHLLEERDTLQLKLSNSIRQIEEFKQRTGADATDASEAGSSSPVKSNPASSDAQSSHDGSFNEQSQNLDLKLSELHKVSHSRDKTLKEERDQRRRQMNVFQKDVANMPPEAIAELFGPDFKPNTRNTQNASSMLMDWLWGRSDNEPHN

SEQ ID NO: 55458 - DNA, 1782 bp, Glycine max
  misc_feature (1)..(1782): Ceres Seq. ID no. 15175681
agaactcctacttcaccaaactttcagatgcctcctccctattgggatccacaatctgctgcaaacatcaatccagactttatgggaatgaattacttggattctattgtagaacttcagaagcagacacagatgctcactttggagaatcaaatagatgctgtaaaaactgggactggaggaatcgccaacgatcactatggcttagacgcttctgctgccaatttgggtgggagaaggttttctgaatttccaatgaagatgtgtcactatttcaacaaaggattctgtaagcatggaactagctgcagattctatcatgggcaagttgtccctgagaatttctctcagatgcatgcaaatgatgctattggtgaggatcaggtgatttccccagggtcactggctcagttagagtctgaaattattgagctcctaagagcaaaaggcggtccaatgtcaattgcttccctgccaatggcatactacgataaatataaaaaggtactgcaagcagatggttatttaactgagagtcagaggcatggtaagtctggctatagtttgacaaagcttcttgcacgactgaaaaatagtattcagctaataggcagacctcatgggcagcattcagtggttctggcagaagattctcccacacaaatgcaaaagggagattttgctcgaaatatcagtgcttcataccaaatatatctgacgttcccagctgacagcactttcacagaggatgatgtctcaaactacttcaacacttttggacctgttgcagatgtcagaattccaaaccagcagagaaggatgtttggatttgtgacatttgttcattcagaaactgtcaaaagtgttttggataaggggaatccccattgtgttcggggttctcgggtgcttgtgaaaccttaccgggagaaggcaaaggttaatgaaaggaagtacacagatagaattgagcaccctatttgttattcaccacactatgtagatatggacgctgaacttaactcaattccaagaagttttgggagccattgatccattaggagacacttacaactaattgaacaggaagagcaggagcaagctcttgaacgtcagagaagtcttgcacagctgcattttgcccaaaaatctttcttcagttcacctcattttggcttctccatggatgagtcaaggatttcagatgatcacttcaatttccagccagcagaagaatctttcagttttccactgcatgtcaaatccaggcatacagactccaattactctgatgaggacagcaatgaaggactcaatctcccggacagtccatttgcatttccactagatagatagtgggatgtaaacattcatagtttcagacacatacaagaaatatagagttcaaacagatccaggccaatggtagcagctttcttttgatacataatacagttcttctattgaactatttctcaattagtacagcaatttagtcaaaattccagcaagtacatacacgctgaagaagagacatgggaagaatttcctcttaacaattgggattggtggcattaacagaagtttaatgatacatgtaagaaggttatagtttttaattacagacaggtggcaaaaggtttgaattttagatcgtatagttgggttttattcatgaagtcatcggtggatgaaaagaactaagcgtattattgtacacagttttaattagattgaaggacctcttagaatccgtgtctactcactgtgaaccgctttaac

SEQ ID NO: 55459 - protein, 350 aa, Glycine max
  peptide (1)..(350): Ceres Seq. ID no. 15175682
  misc_feature (249)..(305): Pfam Name: RNA recognition motif. (a.k.a. RRM, RBD, or RNP domain) Pfam Description: RNA recognition motif. (a.k.a. RRM, RBD, or RNP
  misc_feature (233)..(350): Homolog of NCBI NO: 19423979 NR Description: unknown protein [Arabidopsis thaliana]
  misc_feature (87)..(159): Homolog of NCBI NO: 33146675 NR Description: putative DAZ associated protein 1
  misc_feature (221)..(350): Homolog of NCBI NO: 33146675 NR Description: putative DAZ associated protein 1
  misc_feature (89)..(107): Homolog of NCBI NO: 21594547 NR Description: unknown [Arabidopsis thaliana]
  misc_feature (89)..(107): Homolog of NCBI NO: 15231090 NR Description: RNA recognition motif (RRM)-containing protein
  misc_feature (233)..(350): Homolog of NCBI NO: 21594547 NR Description: unknown [Arabidopsis thaliana]
  misc_feature (233)..(350): Homolog of NCBI NO: 15231090 NR Description: RNA recognition motif (RRM)-containing protein
  misc_feature (82)..(314): Homolog of NCBI NO: 27817837 NR Description: OJ1127_E01.5 [Oryza sativa (japonica
  misc_feature (17)..(292): Homolog of NCBI NO: 15231722 NR Description: RNA recognition motif (RRM)-containing protein
  misc_feature (39)..(350): Homolog of NCBI NO: 15224480 NR Description: RNA recognition motif (RRM)-containing protein
RTPTSPNFQMPPPYWDPQSAANINPDFMGMNYLDSIVELQKQTQMLTLENQIDAVKTGTGGIANDHYGLDASAANLGGRRFSEFPMKMCHYFNKGFCKHGTSCRFYHGQVVPENFSQMHANDAIGEDQVISPGSLAQLESEIIELLRAKGGPMSIASLPMAYYDKYKKVLQADGYLTESQRHGKSGYSLTKLLARLKNSIQLIGRPHGQHSVVLAEDSPTQMQKGDFARNISASYQIYLTFPADSTFTEDDVSNYFNTFGPVADVRIPNQQRRMFGFVTFVHSETVKSVLDKGNPHCVRGSRVLVKPYREKAKVNERKYTDRIEHPICYSPHYVDMDAELNSIPRSFGSH

SEQ ID NO: 55460 - protein, 341 aa, Glycine max
  peptide (1)..(341): Ceres Seq. ID no. 15175683
  misc_feature (240)..(296): Pfam Name: RNA recognition motif. (a.k.a. RRM, RBD, or RNP domain) Pfam Description: RNA recognition motif. (a.k.a. RRM, RBD, or RNP
  misc_feature (224)..(341): Homolog of NCBI NO: 19423979 NR Description: unknown protein [Arabidopsis thaliana]
  misc_feature (78)..(150): Homolog of NCBI NO: 33146675 NR Description: putative DAZ associated protein 1
  misc_feature (212)..(341): Homolog of NCBI NO: 33146675 NR Description: putative DAZ associated protein 1
  misc_feature (80)..(98): Homolog of NCBI NO: 21594547 NR Description: unknown [Arabidopsis thaliana]
  misc_feature (80)..(98): Homolog of NCBI NO: 15231090 NR Description: RNA recognition motif (RRM)-containing protein
  misc_feature (224)..(341): Homolog of NCBI NO: 21594547 NR Description: unknown [Arabidopsis thaliana]
  misc_feature (224)..(341): Homolog of NCBI NO: 15231090 NR Description: RNA recognition motif (RRM)-containing protein
  misc_feature (73)..(305): Homolog of NCBI NO: 27817837 NR Description: OJ1127_E01.5 [Oryza sativa (japonica
  misc_feature (8)..(283): Homolog of NCBI NO: 15231722 NR Description: RNA recognition motif (RRM)-containing protein
  misc_feature (30)..(341): Homolog of NCBI NO: 15224480 NR Description: RNA recognition motif (RRM)-containing protein
MPPPYWDPQSAANINPDFMGMNYLDSIVELQKQTQMLTLENQIDAVKTGTGGIANDHYGLDASAANLGGRRFSEFPMKMCHYFNKGFCKHGTSCRFYHGQVVPENFSQMHANDAIGEDQVISPGSLAQLESEIIELLRAKGGPMSIASLPMAYYDKYKKVLQADGYLTESQRHGKSGYSLTKLLARLKNSIQLIGRPHGQHSVVLAEDSPTQMQKGDFARNISASYQIYLTFPADSTFTEDDVSNYFNTFGPVADVRIPNQQRRMFGFVTFVHSETVKSVLDKGNPHCVRGSRVLVKPYREKAKVNERKYTDRIEHPICYSPHYVDMDAELNSIPRSFGSH

SEQ ID NO: 55461 - protein, 323 aa, Glycine max
  peptide (1)..(323): Ceres Seq. ID no. 15175684
  misc_feature (222)..(278): Pfam Name: RNA recognition motif. (a.k.a. RRM, RBD, or RNP domain) Pfam Description: RNA recognition motif. (a.k.a. RRM, RBD, or RNP
  misc_feature (206)..(323): Homolog of NCBI NO: 19423979 NR Description: unknown protein [Arabidopsis thaliana]
  misc_feature (60)..(132): Homolog of NCBI NO: 33146675 NR Description: putative DAZ associated protein 1
  misc_feature (194)..(323): Homolog of NCBI NO: 33146675 NR Description: putative DAZ associated protein 1
  misc_feature (62)..(80): Homolog of NCBI NO: 21594547 NR Description: unknown [Arabidopsis thaliana]
  misc_feature (62)..(80): Homolog of NCBI NO: 15231090 NR Description: RNA recognition motif (RRM)-containing protein
  misc_feature (206)..(323): Homolog of NCBI NO: 21594547 NR Description: unknown [Arabidopsis thaliana]
  misc_feature (206)..(323): Homolog of NCBI NO: 15231090 NR Description: RNA recognition motif (RRM)-containing protein
  misc_feature (55)..(287): Homolog of NCBI NO: 27817837 NR Description: OJ1127_E01.5 [Oryza sativa (japonica
  misc_feature (1)..(265): Homolog of NCBI NO: 15231722 NR Description: RNA recognition motif (RRM)-containing protein
  misc_feature (12)..(323): Homolog of NCBI NO: 15224480 NR Description: RNA recognition motif (RRM)-containing protein
MGMNYLDSIVELQKQTQMLTLENQIDAVKTGTGGIANDHYGLDASAANLGGRRFSEFPMKMCHYFNKGFCKHGTSCRFYHGQVVPENFSQMHANDAIGEDQVISPGSLAQLESEIIELLRAKGGPMSIASLPMAYYDKYKKVLQADGYLTESQRHGKSGYSLTKLLARLKNSIQLIGRPHGQHSVVLAEDSPTQMQKGDFARNISASYQIYLTFPADSTFTEDDVSNYFNTFGPVADVRIPNQQRRMFGFVTFVHSETVKSVLDKGNPHCVRGSRVLVKPYREKAKVNERKYTDRIEHPICYSPHYVDMDAELNSIPRSFGSH

SEQ ID NO: 55462 - DNA, 1735 bp, Glycine max
  misc_feature (1)..(1735): Ceres Seq. ID no. 14315110
gtgagtgtttttgttcctcaatcaatctaattctcccatttctcttccaatggcgtcttctctttccaccaaaccattctcagccgacgctctctccgccttcgcttctctcaattccgatctcggatccctctcccccgcctacctccgactctcactccgtcctcgtcttcccaagagacttcacatacaggcggctgggagtacctatggaaatcactttcgtgttacaacatatggggaatcacatggaggaggtgttggttgtgttattgatggatgtcctcctcgccttcctctctctgaagctgatatgcaagtggatcttgacagaaggaggccaggtcagagccgaattacaactcctagaaaggagactgatacatgtaaaatattttcaggagtttccgaaggaatcactactggaactccaattcatgtatctgtacccaatactgatcaaagaggacatgactatagcgagatggcagtagcttataggccctcccatgcagatgctacctatgacatgaagtatggtgtcagatcagttcagggtggtggtagatcttctgcaagagaaacaattggaagggttgcttctggtgctgttgctaagaaaatccttaaagaattttctggaactgagattctggcctatgtctctcaagttcataagattgttcttccagaggaccttattgatcatgacactctgactcttgatcagattgagagtaacattgttcgatgtccagacccggagtatgcagagaagatgatatctgcaattgatgctgtgcgagtgagaggtgattctgttggtggtgttgtgacatgcattgtgaggaactgtccacgaggtctcggttcaccagtatttgacaaacttgaagctgagctggctaaagctgcaatgtcattgcctgcaaccaagggctttcagtttggtagtgggtttgcaggcacctttttgactgggagtgaacacaatgatgagttctatatagatgaacatggaaacacaagaacaagaacaaatcgctctggtgggatacagggtggaatttccaatggggaaatcattaatatgagaatagctttcaagccaacatcaacaattggaaagaagcaaaagactgtgactcgagataaaaaagaaacagagtttatagcccgtggtcgccatgatccttgtgttgtcccaagagctgtacctatggtagaagcaatggtagctttggttcttgtggaccaattgatggcacaatatgcgcagtgtaatctttttcccgtaaactcagatttgcaagaacccttggtgcccatactacggccagaagaagcgctcctctgaagaggaagggggtccataaatcagtaattggcctttgataaaatcttccttatggctagtgtttaattgacacggttaattcactttgatgacaagtccaagtgaacattgtggcagatatttttgcgggtgcaatctatcgttttgtattaatgtaagttaaactatgttttcttttcctctcttcttctattttcattctgagggtgaacattgtttctagtaaaccttgttgcaaaagcagagatagatgtattcttaaagtgaactgatattaaaaattgtaagaaacgtatcagtttttggtcttaataagtgttgctctgctttgcaataaatgaaagctttggcaactttaactggctgttcacattatgt

SEQ ID NO: 55463 - protein, 435 aa, Glycine max
  peptide (1)..(435): Ceres Seq. ID no. 14315111
  misc_feature (58)..(408): Pfam Name: Chorismate synthase Pfam Description: Chorismate synthase
  misc_feature (51)..(413): Homolog of NCBI NO: 23126882 NR Description: hypothetical protein [Nostoc punctiforme]
  misc_feature (51)..(413): Homolog of NCBI NO: 17228292 NR Description: chorismate synthase [Nostoc sp. PCC 7120]
  misc_feature (51)..(413): Homolog of NCBI NO: 22298006 NR Description: chorismate synthase [Thermosynechococcus
  misc_feature (51)..(412): Homolog of NCBI NO: 23039390 NR Description: hypothetical protein [Trichodesmium erythraeum
  misc_feature (51)..(411): Homolog of NCBI NO: 16330007 NR Description: chorismate synthase [Synechocystis sp. PCC 6803]
  misc_feature (1)..(424): Homolog of NCBI NO: 114182 NR Description: Chorismate synthase, chloroplast precursor
  misc_feature (1)..(426): Homolog of NCBI NO: 2492953 NR Description: Chorismate synthase 2, chloroplast precursor
  misc_feature (2)..(433): Homolog of NCBI NO: 12229700 NR Description: Chorismate synthase, chloroplast precursor
  misc_feature (1)..(433): Homolog of NCBI NO: 2492952 NR Description: Chorismate synthase 1, chloroplast precursor
  misc_feature (2)..(433): Homolog of NCBI NO: 18402389 NR Description: chorismate synthase
MASSLSTKPFSADALSAFASLNSDLGSLSPAYLRLSLRPRLPKRLHIQAAGSTYGNHFRVTTYGESHGGGVGCVIDGCPPRLPLSEADMQVDLDRRRPGQSRITTPRKETDTCKIFSGVSEGITTGTPIHVSVPNTDQRGHDYSEMAVAYRPSHADATYDMKYGVRSVQGGGRSSARETIGRVASGAVAKKILKEFSGTEILAYVSQVHKIVLPEDLIDHDTLTLDQIESNIVRCPDPEYAEKMISAIDAVRVRGDSVGGVVTCIVRNCPRGLGSPVFDKLEAELAKAAMSLPATKGFQFGSGFAGTFLTGSEHNDEFYIDEHGNTRTRTNRSGGIQGGISNGEIINMRIAFKPTSTIGKKQKTVTRDKKETEFIARGRHDPCVVPRAVPMVEAMVALVLVDQLMAQYAQCNLFPVNSDLQEPLVPILRPEEALL

SEQ ID NO: 55464 - protein, 347 aa, Glycine max
  peptide (1)..(347): Ceres Seq. ID no. 14315112
  misc_feature (1)..(320): Pfam Name: Chorismate synthase Pfam Description: Chorismate synthase
  misc_feature (1)..(325): Homolog of NCBI NO: 23126882 NR Description: hypothetical protein [Nostoc punctiforme]
  misc_feature (1)..(325): Homolog of NCBI NO: 17228292 NR Description: chorismate synthase [Nostoc sp. PCC 7120]
  misc_feature (1)..(325): Homolog of NCBI NO: 22298006 NR Description: chorismate synthase [Thermosynechococcus
  misc_feature (1)..(324): Homolog of NCBI NO: 23039390 NR Description: hypothetical protein [Trichodesmium erythraeum
  misc_feature (1)..(323): Homolog of NCBI NO: 16330007 NR Description: chorismate synthase [Synechocystis sp. PCC 6803]
  misc_feature (1)..(336): Homolog of NCBI NO: 114182 NR Description: Chorismate synthase, chloroplast precursor
  misc_feature (1)..(338): Homolog of NCBI NO: 2492953 NR Description: Chorismate synthase 2, chloroplast precursor
  misc_feature (1)..(345): Homolog of NCBI NO: 12229700 NR Description: Chorismate synthase, chloroplast precursor
  misc_feature (1)..(345): Homolog of NCBI NO: 2492952 NR Description: Chorismate synthase 1, chloroplast precursor
  misc_feature (1)..(345): Homolog of NCBI NO: 18402389 NR Description: chorismate synthase
MQVDLDRRRPGQSRITTPRKETDTCKIFSGVSEGITTGTPIHVSVPNTDQRGHDYSEMAVAYRPSHADATYDMKYGVRSVQGGGRSSARETIGRVASGAVAKKILKEFSGTEILAYVSQVHKIVLPEDLIDHDTLTLDQIESNIVRCPDPEYAEKMISAIDAVRVRGDSVGGVVTCIVRNCPRGLGSPVFDKLEAELAKAAMSLPATKGFQFGSGFAGTFLTGSEHNDEFYIDEHGNTRTRTNRSGGIQGGISNGEIINMRIAFKPTSTIGKKQKTVTRDKKETEFIARGRHDPCVVPRAVPMVEAMVALVLVDQLMAQYAQCNLFPVNSDLQEPLVPILRPEEALL

SEQ ID NO: 55465 - protein, 290 aa, Glycine max
  peptide (1)..(290): Ceres Seq. ID no. 14315113
  misc_feature (1)..(263): Pfam Name: Chorismate synthase Pfam Description: Chorismate synthase
  misc_feature (1)..(268): Homolog of NCBI NO: 23126882 NR Description: hypothetical protein [Nostoc punctiforme]
  misc_feature (1)..(268): Homolog of NCBI NO: 17228292 NR Description: chorismate synthase [Nostoc sp. PCC 7120]
  misc_feature (1)..(268): Homolog of NCBI NO: 22298006 NR Description: chorismate synthase [Thermosynechococcus
  misc_feature (1)..(267): Homolog of NCBI NO: 23039390 NR Description: hypothetical protein [Trichodesmium erythraeum
  misc_feature (1)..(266): Homolog of NCBI NO: 16330007 NR Description: chorismate synthase [Synechocystis sp. PCC 6803]
  misc_feature (1)..(279): Homolog of NCBI NO: 114182 NR Description: Chorismate synthase, chloroplast precursor
  misc_feature (1)..(281): Homolog of NCBI NO: 2492953 NR Description: Chorismate synthase 2, chloroplast precursor
  misc_feature (1)..(288): Homolog of NCBI NO: 12229700 NR Description: Chorismate synthase, chloroplast precursor
  misc_feature (1)..(288): Homolog of NCBI NO: 2492952 NR Description: Chorismate synthase 1, chloroplast precursor
  misc_feature (1)..(288): Homolog of NCBI NO: 18402389 NR Description: chorismate synthase
MAVAYRPSHADATYDMKYGVRSVQGGGRSSARETIGRVASGAVAKKILKEFSGTEILAYVSQVHKIVLPEDLIDHDTLTLDQIESNIVRCPDPEYAEKMISAIDAVRVRGDSVGGVVTCIVRNCPRGLGSPVFDKLEAELAKAAMSLPATKGFQFGSGFAGTFLTGSEHNDEFYIDEHGNTRTRTNRSGGIQGGISNGEIINMRIAFKPTSTIGKKQKTVTRDKKETEFIARGRHDPCVVPRAVPMVEAMVALVLVDQLMAQYAQCNLFPVNSDLQEPLVPILRPEEALL

SEQ ID NO: 55466 - DNA, 1694 bp, Glycine max
  misc_feature (1)..(1694): Ceres Seq. ID no. 15175690
gaccaaaaaataattaggaaaaaaataaaaagatggaaagataatgtggttccgattcaaaccacacgattccacgaccttattatggagccgcggtggcggtagcggtggccggcgattataacggcggaggagtaagagatggttgtgttgtgaggaagattggtaagctgtgggaacatgtcgttgagaagcatagtccgtgaactcaaggagatgagagatggaattggcagcacatcaaagcggggtgcagaaagcaagcattggctcagtcggacaaagtcacatgtagcaccagatattcttgctactccatttgaacctattcaacagggacaatgggcaaatctaccatcagaattgcttctggacataatccagaggatcgaagagagtgagacatcttggcctgcccgtgctgttgttgtcttttgtgcttcagtatgtaaatcatggaggtccattacaagagagattgtcaagactcctgaacaatgtggaaggatcacatttcccatttcattgaagcagccgggtccgcgtgattctccaatacagtgctttatcaggaggaacaaagaaacttctacatatctattgtactttggtctggttccatcagagaatgacggtaataagttgttattagctgccaaaaggataagaagggcaacggacactgactttatcatatccttggctgcagatgatttttctcgagccagcaacaaatatgttggtaaactaaggtctaattttttaggtaccaagttcaccatatttgacagtcaagctccaaatgatgttgcaattcaaccaaattgtcaatctagtaggagatttcattctaagcaggtgtcaccaagacttccagcttgtaattatcttgttagcactgtttcctacgagctgaatgtcctatgcactagagggccaagaagaatgtactgtgtcatgaactccatacctgtctcagctattcaggaaggcggcaatgccccaactccagcatcttaccctcaaatatttgatgaacatttttctccatcaccagcactgaaagaaaaagttccagtcacagatttaaactctgcaagcttatcagagccaccagtatcgagccaatgctcagccgagcaattagcactgaaaaacagggctcccagatggcatgagcagcttcagtgctggtgcctaaacttcaagggtcgtgtttcagtggcttctgttaagaactttcaacttgtagctgttgttgatccatctcataatatttctgctgaggagcaagaaaaggtaatcttgcagtttggaaagattggaaaagacatattcaccatggattactgttatccgctctctaccttccaagcctttgccatctgcttgagcagctttgacactaaacctgcctgtgaatgagaagcgttacattactacattgtaattgacatctgctgagttgctggttgtcaatcatggtggcatgcagctgaaaatcatagctgttctgccgttagtattttccccttgaattggttgctgattctggaatttgttcaatctgttgtttcgtggtcctgtaaaattaaaattaaatgaagtttagtgaattctgtaatatatatgtttctggtgttcctcactcacgaatactttgatctgcttaaatactgagttttcagttgccg

SEQ ID NO: 55467 - protein, 414 aa, Glycine max
  peptide (1)..(414): Ceres Seq. ID no. 15175691
  misc_feature (119)..(414): Pfam Name: Tub family Pfam Description: Tub family
  misc_feature (1)..(414): Homolog of NCBI NO: 18400968 NR Description: F-box containing tubby family protein
  misc_feature (1)..(414): Homolog of NCBI NO: 5689214 NR Description: tubby-like protein [Lemna paucicostata]
  misc_feature (363)..(414): Homolog of NCBI NO: 38637048 NR Description: putative chain A, C-terminal domain of mouse
  misc_feature (1)..(373): Homolog of NCBI NO: 38637048 NR Description: putative chain A, C-terminal domain of mouse
  misc_feature (1)..(414): Homolog of NCBI NO: 34899264 NR Description: contains ESTs
  misc_feature (1)..(414): Homolog of NCBI NO: 30690823 NR Description: F-box containing tubby family protein
  misc_feature (1)..(414): Homolog of NCBI NO: 25409071 NR Description: probable Tub family protein [imported] -
  misc_feature (1)..(414): Homolog of NCBI NO: 30793997 NR Description: putative F-box containing tubby family protein
  misc_feature (1)..(414): Homolog of NCBI NO: 30680328 NR Description: F-box containing tubby family protein
  misc_feature (1)..(414): Homolog of NCBI NO: 7635492 NR Description: tubby-like protein [Cicer arietinum]
MSLRSIVRELKEMRDGIGSTSKRGAESKHWLSRTKSHVAPDILATPFEPIQQGQWANLPSELLLDIIQRIEESETSWPARAVVVFCASVCKSWRSITREIVKTPEQCGRITFPISLKQPGPRDSPIQCFIRRNKETSTYLLYFGLVPSENDGNKLLLAAKRIRRATDTDFIISLAADDFSRASNKYVGKLRSNFLGTKFTIFDSQAPNDVAIQPNCQSSRRFHSKQVSPRLPACNYLVSTVSYELNVLCTRGPRRMYCVMNSIPVSAIQEGGNAPTPASYPQIFDEHFSPSPALKEKVPVTDLNSASLSEPPVSSQCSAEQLALKNRAPRWHEQLQCWCLNFKGRVSVASVKNFQLVAVVDPSHNISAEEQEKVILQFGKIGKDIFTMDYCYPLSTFQAFAICLSSFDTKPACE

SEQ ID NO: 55468 - protein, 402 aa, Glycine max
  peptide (1)..(402): Ceres Seq. ID no. 15175692
  misc_feature (107)..(402): Pfam Name: Tub family Pfam Description: Tub family
  misc_feature (1)..(402): Homolog of NCBI NO: 18400968 NR Description: F-box containing tubby family protein
  misc_feature (1)..(402): Homolog of NCBI NO: 5689214 NR Description: tubby-like protein [Lemna paucicostata]
  misc_feature (351)..(402): Homolog of NCBI NO: 38637048 NR Description: putative chain A, C-terminal domain of mouse
  misc_feature (1)..(361): Homolog of NCBI NO: 38637048 NR Description: putative chain A, C-terminal domain of mouse
  misc_feature (1)..(402): Homolog of NCBI NO: 34899264 NR Description: contains ESTs
  misc_feature (1)..(402): Homolog of NCBI NO: 30690823 NR Description: F-box containing tubby family protein
  misc_feature (1)..(402): Homolog of NCBI NO: 25409071 NR Description: probable Tub family protein [imported] -
  misc_feature (1)..(402): Homolog of NCBI NO: 30793997 NR Description: putative F-box containing tubby family protein
  misc_feature (1)..(402): Homolog of NCBI NO: 30680328 NR Description: F-box containing tubby family protein
  misc_feature (1)..(402): Homolog of NCBI NO: 7635492 NR Description: tubby-like protein [Cicer arietinum]
MRDGIGSTSKRGAESKHWLSRTKSHVAPDILATPFEPIQQGQWANLPSELLLDIIQRIEESETSWPARAVVVFCASVCKSWRSITREIVKTPEQCGRITFPISLKQPGPRDSPIQCFIRRNKETSTYLLYFGLVPSENDGNKLLLAAKRIRRATDTDFIISLAADDFSRASNKYVGKLRSNFLGTKFTIFDSQAPNDVAIQPNCQSSRRFHSKQVSPRLPACNYLVSTVSYELNVLCTRGPRRMYCVMNSIPVSAIQEGGNAPTPASYPQIFDEHFSPSPALKEKVPVTDLNSASLSEPPVSSQCSAEQLALKNRAPRWHEQLQCWCLNFKGRVSVASVKNFQLVAVVDPSHNISAEEQEKVILQFGKIGKDIFTMDYCYPLSTFQAFAICLSSFDTKPACE

SEQ ID NO: 55469 - DNA, 1286 bp, Glycine max
  misc_feature (1)..(1286): Ceres Seq. ID no. 14308536
aaaacccaaaacctcttcttcttactctcttacgttaattcttcgttgtctatgatggcattggatatgattgatgttgttcccaggacgaggatggaagaagaaaatatagcaatacaagaagcagcttccgctgggttaaagagcatggagcatctcattcgtctcctttctccttcttcttctcttcacaacaacgttaataatctcaatctcaaccacctcgactgctccgaaatcaccggcttcactgtctccaagttcaaacaagtcatcaaccttctcaaccgcaccggccacgcccgcttccgccgctctccaccccaagcccaagcccaagcccaagcccaagcccaagcccaaactaatcctcaaccacaacctcagatccaacaacaagggttcagtttagatttcgtgaagcccaccattctaaactcaaagcccatcaacaaagacgaaactttgactctttcaacaacctcttcttccttcatgtcctccgtcaccaacgacgccagcgtctccgacggcaagatcggacctttcctccctccctccgccgccaaaccccctctctcctccgcccaccggaaaaagtgccgcgacgccgccgcagcactctccgccaaaccctcctgccactgctccaagaaaaggaaatcacgcgtgaaacgaacgattcgggtgccggcgataagctcaaagatcgcagatatcccaccggacgagtattcgtggagaaaatacggtcaaaaaccgatcaagggctcaccttaccctcgagggtactacaagtgcagcaccgtgagagggtgtccggcgaggaagcacgtggagcgagcgcaggatgaccccaagatgctaatagtgacttacgagggtgagcaccgtcacgtgctgccgttaacttccgccgccggcgttagtttcggccattgagttaatcgacggcgtcttttggaaacttgacgggggacgttaaatgagcgtcggatcgtgaagtaacggcggatgcgaacaaggatcgattcggttcgaggacggaaaaagaaaagtggcaactaaagtcaactttcgcgttgtggaatgattttgttgacgaggacttttgtgtaaatttgaccccaagtaaagtagtgcaggtctcaaagaatgaaaattatagtgatctcatctgtttttctttatttctattttttttttaaaagagacatttatttatttatttatttgatgttagagttgaattggttgaaggatggggctgcaataattttcttggt

SEQ ID NO: 55470 - protein, 313 aa, Glycine max
  peptide (1)..(313): Ceres Seq. ID no. 14308537
  misc_feature (241)..(301): Pfam Name: WRKY DNA -binding domain Pfam Description: WRKY DNA -binding domain
  misc_feature (19)..(150): Homolog of NCBI NO: 4680251 NR Description: transcription factor
  misc_feature (29)..(302): Homolog of NCBI NO: 38175580 NR Description: putative DNA-binding protein NtWRKY3
  misc_feature (19)..(150): Homolog of NCBI NO: 7488950 NR Description: DNA-binding protein WRKY3 - parsley
  misc_feature (156)..(299): Homolog of NCBI NO: 7488950 NR Description: DNA-binding protein WRKY3 - parsley
  misc_feature (30)..(148): Homolog of NCBI NO: 10798760 NR Description: WRKY transcription factor Nt-SubD48 [Nicotiana
  misc_feature (137)..(306): Homolog of NCBI NO: 10798760 NR Description: WRKY transcription factor Nt-SubD48 [Nicotiana
  misc_feature (75)..(299): Homolog of NCBI NO: 4894963 NR Description: DNA-binding protein WRKY3 [Avena sativa]
  misc_feature (19)..(307): Homolog of NCBI NO: 38346908 NR Description: OSJNBb0015N08.8 [Oryza sativa (japonica
  misc_feature (156)..(301): Homolog of NCBI NO: 4760596 NR Description: DNA-binding protein NtWRKY3 [Nicotiana tabacum]
  misc_feature (24)..(168): Homolog of NCBI NO: 4760596 NR Description: DNA-binding protein NtWRKY3 [Nicotiana tabacum]
KTQNLFFLLSYVNSSLSMMALDMIDVVPRTRMEEENIAIQEAASAGLKSMEHLIRLLSPSSSLHNNVNNLNLNHLDCSEITGFTVSKFKQVINLLNRTGHARFRRSPPQAQAQAQAQAQAQTNPQPQPQIQQQGFSLDFVKPTILNSKPINKDETLTLSTTSSSFMSSVTNDASVSDGKIGPFLPPSAAKPPLSSAHRKKCRDAAAALSAKPSCHCSKKRKSRVKRTIRVPAISSKIADIPPDEYSWRKYGQKPIKGSPYPRGYYKCSTVRGCPARKHVERAQDDPKMLIVTYEGEHRHVLPLTSAAGVSFGH

SEQ ID NO: 55471 - protein, 296 aa, Glycine max
  peptide (1)..(296): Ceres Seq. ID no. 14308538
  misc_feature (224)..(284): Pfam Name: WRKY DNA -binding domain Pfam Description: WRKY DNA -binding domain
  misc_feature (2)..(133): Homolog of NCBI NO: 4680251 NR Description: transcription factor
  misc_feature (12)..(285): Homolog of NCBI NO: 38175580 NR Description: putative DNA-binding protein NtWRKY3
  misc_feature (2)..(133): Homolog of NCBI NO: 7488950 NR Description: DNA-binding protein WRKY3 - parsley
  misc_feature (139)..(282): Homolog of NCBI NO: 7488950 NR Description: DNA-binding protein WRKY3 - parsley
  misc_feature (13)..(131): Homolog of NCBI NO: 10798760 NR Description: WRKY transcription factor Nt-SubD48 [Nicotiana
  misc_feature (120)..(289): Homolog of NCBI NO: 10798760 NR Description: WRKY transcription factor Nt-SubD48 [Nicotiana
  misc_feature (58)..(282): Homolog of NCBI NO: 4894963 NR Description: DNA-binding protein WRKY3 [Avena sativa]
  misc_feature (2)..(290): Homolog of NCBI NO: 38346908 NR Description: OSJNBb0015N08.8 [Oryza sativa (japonica
  misc_feature (139)..(284): Homolog of NCBI NO: 4760596 NR Description: DNA-binding protein NtWRKY3 [Nicotiana tabacum]
  misc_feature (7)..(151): Homolog of NCBI NO: 4760596 NR Description: DNA-binding protein NtWRKY3 [Nicotiana tabacum]
MMALDMIDVVPRTRMEEENIAIQEAASAGLKSMEHLIRLLSPSSSLHNNVNNLNLNHLDCSEITGFTVSKFKQVINLLNRTGHARFRRSPPQAQAQAQAQAQAQTNPQPQPQIQQQGFSLDFVKPTILNSKPINKDETLTLSTTSSSFMSSVTNDASVSDGKIGPFLPPSAAKPPLSSAHRKKCRDAAAALSAKPSCHCSKKRKSRVKRTIRVPAISSKIADIPPDEYSWRKYGQKPIKGSPYPRGYYKCSTVRGCPARKHVERAQDDPKMLIVTYEGEHRHVLPLTSAAGVSFGH

SEQ ID NO: 55472 - protein, 295 aa, Glycine max
  peptide (1)..(295): Ceres Seq. ID no. 14308539
  misc_feature (223)..(283): Pfam Name: WRKY DNA -binding domain Pfam Description: WRKY DNA -binding domain
  misc_feature (1)..(132): Homolog of NCBI NO: 4680251 NR Description: transcription factor
  misc_feature (11)..(284): Homolog of NCBI NO: 38175580 NR Description: putative DNA-binding protein NtWRKY3
  misc_feature (1)..(132): Homolog of NCBI NO: 7488950 NR Description: DNA-binding protein WRKY3 - parsley
  misc_feature (138)..(281): Homolog of NCBI NO: 7488950 NR Description: DNA-binding protein WRKY3 - parsley
  misc_feature (12)..(130): Homolog of NCBI NO: 10798760 NR Description: WRKY transcription factor Nt-SubD48 [Nicotiana
  misc_feature (119)..(288): Homolog of NCBI NO: 10798760 NR Description: WRKY transcription factor Nt-SubD48 [Nicotiana
  misc_feature (57)..(281): Homolog of NCBI NO: 4894963 NR Description: DNA-binding protein WRKY3 [Avena sativa]
  misc_feature (1)..(289): Homolog of NCBI NO: 38346908 NR Description: OSJNBb0015N08.8 [Oryza sativa (japonica
  misc_feature (138)..(283): Homolog of NCBI NO: 4760596 NR Description: DNA-binding protein NtWRKY3 [Nicotiana tabacum]
  misc_feature (6)..(150): Homolog of NCBI NO: 4760596 NR Description: DNA-binding protein NtWRKY3 [Nicotiana tabacum]
MALDMIDVVPRTRMEEENIAIQEAASAGLKSMEHLIRLLSPSSSLHNNVNNLNLNHLDCSEITGFTVSKFKQVINLLNRTGHARFRRSPPQAQAQAQAQAQAQTNPQPQPQIQQQGFSLDFVKPTILNSKPINKDETLTLSTTSSSFMSSVTNDASVSDGKIGPFLPPSAAKPPLSSAHRKKCRDAAAALSAKPSCHCSKKRKSRVKRTIRVPAISSKIADIPPDEYSWRKYGQKPIKGSPYPRGYYKCSTVRGCPARKHVERAQDDPKMLIVTYEGEHRHVLPLTSAAGVSFGH

SEQ ID NO: 55473 - DNA, 1118 bp, Glycine max
  misc_feature (1)..(1118): Ceres Seq. ID no. 14312730
ttattagtttctatataaatataaggacttaaatattaagtctatcaggaacaacatatatatgctcatcccttctcctctggtttacaaagttctctttaagctgtggtgaagaaagtcatgatcaactaatatttactttatcactgcctctcaaactagaggttttatttggttactttctcattgagcatgtcaataaaagtttgtctatagagacccttattacgctattgcttgcaggtaatggatgagtatgacgagcaatccgaggttgctgaccgacttagaatcagggtatttctcttctattctcttgattactatttactgagtatcaaatgaaacttaatctggataaaactgacctacctcccttggagacagctaagtatcagccatcaggttaatctaaatgtttgttggccaacttgtcttcaatgttccgtggttagtcttcatttgcatgatttctctagtttactctaattaactggtgcacatgccattttcgttttgggtctggtttatcttggcattgctttttatgattatctctaaaactatctttactttcttcacctctcttttatggttaattccatcttcttcctatccgcgatatagatatcggttgtgcatcatttttgctactagctactgcatgtaatcactacactttctagtattcatgctttatgatatgttgaatatgaagcggaaacaaactgatgcaggccgtgcctcttttccacttctacaaagatggggtcctgttggaagcattcccaaccagagacaaagataggattcttgcagctattctcaagtactcatctcttgaagctgaagatatcttaggttaacatcaagagatggggtcatggcaccctcggggactgttgtgcactgcagggaaattagtaaatttttgtacgtgacaaagttcattaaacagcatgttgtatacacaaaataaaatactttagtcctgtcagcctaattcactttgttaggataggatattttcttgcaaaatatctagtgaagagtttaatgtacactacgatacgccttctctttctccagaggtcataaataaaattttcattctgctt

SEQ ID NO: 55474 - protein, 55 aa, Glycine max
  peptide (1)..(55): Ceres Seq. ID no. 14312731
MPFSFWVWFILALLFMIISKTIFTFFTSLLWLIPSSSYPRYRYRLCIIFATSYCM

SEQ ID NO: 55475 - protein, 44 aa, Glycine max
  peptide (1)..(44): Ceres Seq. ID no. 14312732
  misc_feature (1)..(36): Pfam Name: Thioredoxin Pfam Description: Thioredoxin
  misc_feature (1)..(39): Homolog of NCBI NO: 25406995 NR Description: hypothetical protein [imported] - Arabidopsis
  misc_feature (1)..(39): Homolog of NCBI NO: 18390799 NR Description: thioredoxin family [Arabidopsis thaliana]
MQAVPLFHFYKDGVLLEAFPTRDKDRILAAILKYSSLEAEDILG

SEQ ID NO: 55476 - protein, 40 aa, Glycine max
  peptide (1)..(40): Ceres Seq. ID no. 14312733
MIISKTIFTFFTSLLWLIPSSSYPRYRYRLCIIFATSYCM

SEQ ID NO: 55477 - DNA, 1426 bp, Glycine max
  misc_feature (1)..(1426): Ceres Seq. ID no. 14308148
aatttttttttcattcaaggacaacatgtagagtttttttatagcaactacgggccagaaaaatgtagagtaaacattatggatcaattcataaacattttttcacgtggggaggaaaatgtgagttgtgatttagtgaataaaattttaacaatatatcaaattgttacacaactgatcatggaccttgcctgagcctgaaccatcattttttttaagttagagctttaagaatacagcaggacataatgtttttcttggagtaggagaatgtgaggttggcagtggaaagatgcctgttgcatttactgtctcttgatctgtgattgttttttggtccctttattaataaaattgagttgagagtcatgactacaggagctgaaactattcactgagcagtcttagtaatatatacattaacaaaaggtaatatacgtatacagactttatatttttattttttcaatttaagcgtcctatacttcagtgacagactagtgtgtggttttttataacttccaatttatcttccgagcttgaccgttgattctacattgcagagggaaaaatcccatgaattggttagagtgacaagtcccatggtctactagtctttattctttaccaagtaacatacatagtatcttcaacaaggacttatctgcatacattgtggcactaaaattcattttatatcgtaaatttgaaacccaagacatgtatagacatctcagctgcacagtgagactaatggtgggtaagcattctcacatgcgtgggagaaaaaaggaaagatttacttgttttaagtatatattaatttatttggtctctccttttaaaatcttctcccagggagcaaattttgctgatgttatacaaatgactgacatctttgaggggagtattattcggagtgctagaaggcttgacgagtttttgaatcagttgcgtgctgctgctaatgcagttggagaggctgacttggagaagaaatttgcagctgcaagtgaaagccttcgacgaggtattatgtttgcaaattctttgtatctgtgacttgtttttctccagaccttacgttatatctcacggtcattccggctggctgaaagtttactttcccatccaaccttttggcatgcacccacttccttctcttaaaagctttctggtgtaaatatttgtatgctgtcactaatggtaaagggtgtgaatatagagtgatagaaaaatctggtcaatagatagaaaattccggtcaataaaggttcatcttgagagtcgcagatcattcatttatttaccttcagaacctctagtctgtctggggcttgaggagtgagggtgccgaagatatttgtttgtaatttgctgaaaaattttcaatacaaattttgattgatagttcattattttagtg

SEQ ID NO: 55478 - protein, 113 aa, Glycine max
  peptide (1)..(113): Ceres Seq. ID no. 14308149
  misc_feature (44)..(113): Homolog of NCBI NO: 28829653 NR Description: similar to Homo sapiens (Human). Hypothetical
  misc_feature (36)..(113): Homolog of NCBI NO: 39104516 NR Description: mKIAA0052 protein [Mus musculus]
  misc_feature (24)..(113): Homolog of NCBI NO: 31231980 NR Description: ENSANGP00000020973 [Anopheles gambiae]
  misc_feature (36)..(113): Homolog of NCBI NO: 15928685 NR Description: 2610528A15Rik protein [Mus musculus]
  misc_feature (36)..(113): Homolog of NCBI NO: 34783197 NR Description: Unknown (protein for IMAGE:4849317) [Homo sapiens]
  misc_feature (36)..(113): Homolog of NCBI NO: 21619317 NR Description: Similar to KIAA0052 protein [Homo sapiens]
  misc_feature (36)..(113): Homolog of NCBI NO: 34854226 NR Description: similar to RIKEN cDNA 2610528A15 [Rattus
  misc_feature (36)..(113): Homolog of NCBI NO: 25307597 NR Description: hypothetical protein At2g06990 [imported] -
  misc_feature (36)..(113): Homolog of NCBI NO: 18396436 NR Description: RNA helicase (HUA enhancer 2/HEN2) [Arabidopsis
  misc_feature (36)..(113): Homolog of NCBI NO: 16024936 NR Description: HUA enhancer 2 [Arabidopsis thaliana]
MYRHLSCTVRLMVGKHSHMRGRKKERFTCFKYILIYLVSPFKIFSQGANFADVIQMTDIFEGSIIRSARRLDEFLNQLRAAANAVGEADLEKKFAAASESLRRGIMFANSLYL

SEQ ID NO: 55479 - protein, 102 aa, Glycine max
  peptide (1)..(102): Ceres Seq. ID no. 14308150
  misc_feature (33)..(102): Homolog of NCBI NO: 28829653 NR Description: similar to Homo sapiens (Human). Hypothetical
  misc_feature (25)..(102): Homolog of NCBI NO: 39104516 NR Description: mKIAA0052 protein [Mus musculus]
  misc_feature (13)..(102): Homolog of NCBI NO: 31231980 NR Description: ENSANGP00000020973 [Anopheles gambiae]
  misc_feature (25)..(102): Homolog of NCBI NO: 15928685 NR Description: 2610528A15Rik protein [Mus musculus]
  misc_feature (25)..(102): Homolog of NCBI NO: 34783197 NR Description: Unknown (protein for IMAGE:4849317) [Homo sapiens]
  misc_feature (25)..(102): Homolog of NCBI NO: 21619317 NR Description: Similar to KIAA0052 protein [Homo sapiens]
  misc_feature (25)..(102): Homolog of NCBI NO: 34854226 NR Description: similar to RIKEN cDNA 2610528A15 [Rattus
  misc_feature (25)..(102): Homolog of NCBI NO: 25307597 NR Description: hypothetical protein At2g06990 [imported] -
  misc_feature (25)..(102): Homolog of NCBI NO: 18396436 NR Description: RNA helicase (HUA enhancer 2/HEN2) [Arabidopsis
  misc_feature (25)..(102): Homolog of NCBI NO: 16024936 NR Description: HUA enhancer 2 [Arabidopsis thaliana]
MVGKHSHMRGRKKERFTCFKYILIYLVSPFKIFSQGANFADVIQMTDIFEGSIIRSARRLDEFLNQLRAAANAVGEADLEKKFAAASESLRRGIMFANSLYL

SEQ ID NO: 55480 - protein, 95 aa, Glycine max
  peptide (1)..(95): Ceres Seq. ID no. 14308151
  misc_feature (26)..(95): Homolog of NCBI NO: 28829653 NR Description: similar to Homo sapiens (Human). Hypothetical
  misc_feature (18)..(95): Homolog of NCBI NO: 39104516 NR Description: mKIAA0052 protein [Mus musculus]
  misc_feature (6)..(95): Homolog of NCBI NO: 31231980 NR Description: ENSANGP00000020973 [Anopheles gambiae]
  misc_feature (18)..(95): Homolog of NCBI NO: 15928685 NR Description: 2610528A15Rik protein [Mus musculus]
  misc_feature (18)..(95): Homolog of NCBI NO: 34783197 NR Description: Unknown (protein for IMAGE:4849317) [Homo sapiens]
  misc_feature (18)..(95): Homolog of NCBI NO: 21619317 NR Description: Similar to KIAA0052 protein [Homo sapiens]
  misc_feature (18)..(95): Homolog of NCBI NO: 34854226 NR Description: similar to RIKEN cDNA 2610528A15 [Rattus
  misc_feature (18)..(95): Homolog of NCBI NO: 25307597 NR Description: hypothetical protein At2g06990 [imported] -
  misc_feature (18)..(95): Homolog of NCBI NO: 18396436 NR Description: RNA helicase (HUA enhancer 2/HEN2) [Arabidopsis
  misc_feature (18)..(95): Homolog of NCBI NO: 16024936 NR Description: HUA enhancer 2 [Arabidopsis thaliana]
MRGRKKERFTCFKYILIYLVSPFKIFSQGANFADVIQMTDIFEGSIIRSARRLDEFLNQLRAAANAVGEADLEKKFAAASESLRRGIMFANSLYL

SEQ ID NO: 55481 - DNA, 1182 bp, Glycine max
  misc_feature (1)..(1182): Ceres Seq. ID no. 15169220
ttacttggaagatgggaagcagggacgccttcattgtcttgtttgcggcactggcactggcaggtctgcaaaagattttccagatatgcatgctctcattatgcacacatacaacccagataatgccgattcacgtattgatcatttgggattacacaaagctctgtgtgttttaatgcgttggaactactcaaagcctcctgataactcaaaggcatatcagtttttacctgctgatgaagcagcagcaaatcaggatgatctgatcatgtggccacctttggtgatcattcataacacaaataccggaaaaaatagagatggtcgtatggagggtttgggaaacaaaatgatggataataaaattagagagcttggatttgtgggtggcaaatcaaagtcattatacggaagagatggtcatttgggcataacactggttaaatttgctggggaccaatcaggctttaaggaggccattcgacttgctgaacactttgagaaggaaaaccatggacgcaaggattgggaccgtgtgcagtcacaaacattaggaaaggatgatgagaataatgcaaaccttgtgaaggtggatgagaaaaaagtagataaaaggagggttttgtatggctatcttgggactgcttttgatcttgacaaagttgattttgacacaaggaagaaggctttcatagagagcaggagagaatacaaaccacccatgtagtttttggactatacatgggaatggctatgtaaaatggaatacatggaaagtttttccagttgcattataatcccgattcctgaagatgataaaaagcttttatgtattgtgctgaccatttcatgtacaataggaggcagcattgccatcatttttattttattccacataatttatgctgaattttcctgccatagtaatatttaggcacattaagaagatttgtttgtctttccaccatctgacaacctggaacgcactactcacttaaagtcaatgactggaatctaaagtcttggtcttgtcctcgcttttctccatgttgtctgggaactgtttgtttacagtttagattttttcaattacaatggtggggcatggaaatttgtacgcatgatttcctgccaactctgtaaatccctcattagtagccctcctagtagttgattgtttgt

SEQ ID NO: 55482 - protein, 241 aa, Glycine max
  peptide (1)..(241): Ceres Seq. ID no. 15169221
  misc_feature (85)..(195): Pfam Name: XS domain Pfam Description: XS domain
  misc_feature (15)..(182): Homolog of NCBI NO: 20467991 NR Description: putative transcription factor X1 [Triticum
  misc_feature (6)..(182): Homolog of NCBI NO: 34912988 NR Description: putative transcription factor X1
  misc_feature (110)..(236): Homolog of NCBI NO: 15081713 NR Description: AT3g22430/MCB17_17 [Arabidopsis thaliana]
  misc_feature (59)..(236): Homolog of NCBI NO: 30686649 NR Description: expressed protein [Arabidopsis thaliana]
  misc_feature (1)..(239): Homolog of NCBI NO: 22773240 NR Description: Hypothetical protein [Oryza sativa (japonica
  misc_feature (34)..(236): Homolog of NCBI NO: 9293880 NR Description: gene_id:MCB17.19~unknown protein [Arabidopsis
YLEDGKQGRLHCLVCGTGTGRSAKDFPDMHALIMHTYNPDNADSRIDHLGLHKALCVLMRWNYSKPPDNSKAYQFLPADEAAANQDDLIMWPPLVIIHNTNTGKNRDGRMEGLGNKMMDNKIRELGFVGGKSKSLYGRDGHLGITLVKFAGDQSGFKEAIRLAEHFEKENHGRKDWDRVQSQTLGKDDENNANLVKVDEKKVDKRRVLYGYLGTAFDLDKVDFDTRKKAFIESRREYKPPM

SEQ ID NO: 55483 - protein, 213 aa, Glycine max
  peptide (1)..(213): Ceres Seq. ID no. 15169222
  misc_feature (57)..(167): Pfam Name: XS domain Pfam Description: XS domain
  misc_feature (1)..(154): Homolog of NCBI NO: 20467991 NR Description: putative transcription factor X1 [Triticum
  misc_feature (1)..(154): Homolog of NCBI NO: 34912988 NR Description: putative transcription factor X1
  misc_feature (82)..(208): Homolog of NCBI NO: 15081713 NR Description: AT3g22430/MCB17_17 [Arabidopsis thaliana]
  misc_feature (31)..(208): Homolog of NCBI NO: 30686649 NR Description: expressed protein [Arabidopsis thaliana]
  misc_feature (1)..(211): Homolog of NCBI NO: 22773240 NR Description: Hypothetical protein [Oryza sativa (japonica
  misc_feature (6)..(208): Homolog of NCBI NO: 9293880 NR Description: gene_id:MCB17.19~unknown protein [Arabidopsis
MHALIMHTYNPDNADSRIDHLGLHKALCVLMRWNYSKPPDNSKAYQFLPADEAAANQDDLIMWPPLVIIHNTNTGKNRDGRMEGLGNKMMDNKIRELGFVGGKSKSLYGRDGHLGITLVKFAGDQSGFKEAIRLAEHFEKENHGRKDWDRVQSQTLGKDDENNANLVKVDEKKVDKRRVLYGYLGTAFDLDKVDFDTRKKAFIESRREYKPPM

SEQ ID NO: 55484 - protein, 208 aa, Glycine max
  peptide (1)..(208): Ceres Seq. ID no. 15169223
  misc_feature (52)..(162): Pfam Name: XS domain Pfam Description: XS domain
  misc_feature (1)..(149): Homolog of NCBI NO: 20467991 NR Description: putative transcription factor X1 [Triticum
  misc_feature (1)..(149): Homolog of NCBI NO: 34912988 NR Description: putative transcription factor X1
  misc_feature (77)..(203): Homolog of NCBI NO: 15081713 NR Description: AT3g22430/MCB17_17 [Arabidopsis thaliana]
  misc_feature (26)..(203): Homolog of NCBI NO: 30686649 NR Description: expressed protein [Arabidopsis thaliana]
  misc_feature (1)..(206): Homolog of NCBI NO: 22773240 NR Description: Hypothetical protein [Oryza sativa (japonica
  misc_feature (1)..(203): Homolog of NCBI NO: 9293880 NR Description: gene_id:MCB17.19~unknown protein [Arabidopsis
MHTYNPDNADSRIDHLGLHKALCVLMRWNYSKPPDNSKAYQFLPADEAAANQDDLIMWPPLVIIHNTNTGKNRDGRMEGLGNKMMDNKIRELGFVGGKSKSLYGRDGHLGITLVKFAGDQSGFKEAIRLAEHFEKENHGRKDWDRVQSQTLGKDDENNANLVKVDEKKVDKRRVLYGYLGTAFDLDKVDFDTRKKAFIESRREYKPPM

SEQ ID NO: 55485 - DNA, 1628 bp, Glycine max
  misc_feature (1)..(1628): Ceres Seq. ID no. 14308813
agtgcagtgtgaagtgcgtataatccatattctcatggcttccgttgcattcagaaacctaaattctaagcgcttccttttctctttgcatttcacaaatgctaattaccattcactctctcgtggaacttgcaccgtcatatcccaaaactgcaataatgcatttcctttggagctcgtttctctacggagatccttagccactttcgctcgaacaaagccccatcttaacgtgggcacaattgggcatgttgatcatgggaaaaccacactgactgctgcaattaccaaggtgctagctgaagaaggtaaagctaaggccattgcctttgaggacatagacaaggctcccgaggagaagaagagagggattactattgcgactgctcatgtagagtacgagacagcaaagaggcactatgcccatgttgattgcccaggacatgcagactatgttaagaacatgataactggagctgcacaaatggatggtggaattcttgtcgtttctgctcctgatgggccaatgcctcaaacaaaggaacatatactgcttgctcgtcaggttggtgtgccatcattggtctgctttctaaataaggttgatgctgttgatgatccagagttgcttgaacttgtggaaatggagcttcgtgaactgcttaatttctacaaatttcctggggatgatattccaattgtacgaggttctgctctggctgcattgcagggaactaatgaagaacttggaaagaaggctatcttaaaactaatggatgctgtggatgaatacatttcggatcctgtgcggcaacttgacaaacctttcttaatgccagtagaagatgttttctcaattcaggggcgtggaactgttgtgactggtcgtgttgaacaaggcaccatcaaagtaggtgaggaggttgaagtattgggactaacacagagtggacctttgaagactactgtaactggtgtggaaatgttcaagaaaattttggatcgaggggaagctggtgataatgtgggacttcttctacgtggtctgaagcgcgatgatgtacagagaggaatggtcgtgaccaagcctggtgcatttaaaacatataagaagtttgaagcagagatttatgttctctcaaaagatgaaggtggccgtcatactgcttttttctctaattataagccacagttttacttgaggactgcagatgttaccggaaaggtggaattaccggaaagtgttaagatggttatgcctggtgataatgtgactgctacttttgagctgatatcacctgttcctcttgaaataggacaaagatttgctttgagagagggaggcagaacagttggtgcaggagttgtttccaaagtgatggcctaggatgttggtctaaattctacaacatcttttgtaatttgtaaataagttgagtagggactgagagctatgttctaggaggattctatggtgtgactattttttgacacttggtgcgctggttccgtttcaatgtgttttgttttgtttattttagagaattatactagttcattatgtttttcgtggaccagagggaaaatggttcaaattttttggtttagttaataatgtcaatttcttc

SEQ ID NO: 55486 - protein, 461 aa, Glycine max
  peptide (1)..(461): Ceres Seq. ID no. 14308814
  misc_feature (73)..(269): Pfam Name: Elongation factor Tu GTP binding domain Pfam Description: Elongation factor Tu GTP binding domain
  misc_feature (61)..(460): Homolog of NCBI NO: 459241 NR Description: chloroplast elongation factor TuB(EF-TuB)
  misc_feature (69)..(460): Homolog of NCBI NO: 22998293 NR Description: hypothetical protein [Magnetococcus sp. MC-1]
  misc_feature (69)..(460): Homolog of NCBI NO: 22966124 NR Description: hypothetical protein [Rhodospirillum rubrum]
  misc_feature (67)..(459): Homolog of NCBI NO: 23108387 NR Description: hypothetical protein [Novosphingobium
  misc_feature (67)..(460): Homolog of NCBI NO: 23054529 NR Description: hypothetical protein [Geobacter metallireducens]
  misc_feature (57)..(460): Homolog of NCBI NO: 22966137 NR Description: hypothetical protein [Rhodospirillum rubrum]
  misc_feature (64)..(461): Homolog of NCBI NO: 11181616 NR Description: translational elongation factor EF-TuM [Zea mays]
  misc_feature (56)..(459): Homolog of NCBI NO: 18001149 NR Description: translational elongation factor Tu [Oryza sativa]
  misc_feature (61)..(460): Homolog of NCBI NO: 1149571 NR Description: mitochondrial elongation factor Tu [Arabidopsis
  misc_feature (12)..(460): Homolog of NCBI NO: 15236220 NR Description: elongation factor Tu (EF-Tu), putative
VQCEVRIIHILMASVAFRNLNSKRFLFSLHFTNANYHSLSRGTCTVISQNCNNAFPLELVSLRRSLATFARTKPHLNVGTIGHVDHGKTTLTAAITKVLAEEGKAKAIAFEDIDKAPEEKKRGITIATAHVEYETAKRHYAHVDCPGHADYVKNMITGAAQMDGGILVVSAPDGPMPQTKEHILLARQVGVPSLVCFLNKVDAVDDPELLELVEMELRELLNFYKFPGDDIPIVRGSALAALQGTNEELGKKAILKLMDAVDEYISDPVRQLDKPFLMPVEDVFSIQGRGTVVTGRVEQGTIKVGEEVEVLGLTQSGPLKTTVTGVEMFKKILDRGEAGDNVGLLLRGLKRDDVQRGMVVTKPGAFKTYKKFEAEIYVLSKDEGGRHTAFFSNYKPQFYLRTADVTGKVELPESVKMVMPGDNVTATFELISPVPLEIGQRFALREGGRTVGAGVVSKVMA

SEQ ID NO: 55487 - protein, 450 aa, Glycine max
  peptide (1)..(450): Ceres Seq. ID no. 14308815
  misc_feature (62)..(258): Pfam Name: Elongation factor Tu GTP binding domain Pfam Description: Elongation factor Tu GTP binding domain
  misc_feature (50)..(449): Homolog of NCBI NO: 459241 NR Description: chloroplast elongation factor TuB(EF-TuB)
  misc_feature (58)..(449): Homolog of NCBI NO: 22998293 NR Description: hypothetical protein [Magnetococcus sp. MC-1]
  misc_feature (58)..(449): Homolog of NCBI NO: 22966124 NR Description: hypothetical protein [Rhodospirillum rubrum]
  misc_feature (56)..(448): Homolog of NCBI NO: 23108387 NR Description: hypothetical protein [Novosphingobium
  misc_feature (56)..(449): Homolog of NCBI NO: 23054529 NR Description: hypothetical protein [Geobacter metallireducens]
  misc_feature (46)..(449): Homolog of NCBI NO: 22966137 NR Description: hypothetical protein [Rhodospirillum rubrum]
  misc_feature (53)..(450): Homolog of NCBI NO: 11181616 NR Description: translational elongation factor EF-TuM [Zea mays]
  misc_feature (45)..(448): Homolog of NCBI NO: 18001149 NR Description: translational elongation factor Tu [Oryza sativa]
  misc_feature (50)..(449): Homolog of NCBI NO: 1149571 NR Description: mitochondrial elongation factor Tu [Arabidopsis
  misc_feature (1)..(449): Homolog of NCBI NO: 15236220 NR Description: elongation factor Tu (EF-Tu), putative
MASVAFRNLNSKRFLFSLHFTNANYHSLSRGTCTVISQNCNNAFPLELVSLRRSLATFARTKPHLNVGTIGHVDHGKTTLTAAITKVLAEEGKAKAIAFEDIDKAPEEKKRGITIATAHVEYETAKRHYAHVDCPGHADYVKNMITGAAQMDGGILVVSAPDGPMPQTKEHILLARQVGVPSLVCFLNKVDAVDDPELLELVEMELRELLNFYKFPGDDIPIVRGSALAALQGTNEELGKKAILKLMDAVDEYISDPVRQLDKPFLMPVEDVFSIQGRGTVVTGRVEQGTIKVGEEVEVLGLTQSGPLKTTVTGVEMFKKILDRGEAGDNVGLLLRGLKRDDVQRGMVVTKPGAFKTYKKFEAEIYVLSKDEGGRHTAFFSNYKPQFYLRTADVTGKVELPESVKMVMPGDNVTATFELISPVPLEIGQRFALREGGRTVGAGVVSKVMA

SEQ ID NO: 55488 - protein, 307 aa, Glycine max
  peptide (1)..(307): Ceres Seq. ID no. 14308816
  misc_feature (1)..(115): Pfam Name: Elongation factor Tu GTP binding domain Pfam Description: Elongation factor Tu GTP binding domain
  misc_feature (1)..(306): Homolog of NCBI NO: 459241 NR Description: chloroplast elongation factor TuB(EF-TuB)
  misc_feature (1)..(306): Homolog of NCBI NO: 22998293 NR Description: hypothetical protein [Magnetococcus sp. MC-1]
  misc_feature (1)..(306): Homolog of NCBI NO: 22966124 NR Description: hypothetical protein [Rhodospirillum rubrum]
  misc_feature (1)..(305): Homolog of NCBI NO: 23108387 NR Description: hypothetical protein [Novosphingobium
  misc_feature (1)..(306): Homolog of NCBI NO: 23054529 NR Description: hypothetical protein [Geobacter metallireducens]
  misc_feature (1)..(306): Homolog of NCBI NO: 22966137 NR Description: hypothetical protein [Rhodospirillum rubrum]
  misc_feature (1)..(307): Homolog of NCBI NO: 11181616 NR Description: translational elongation factor EF-TuM [Zea mays]
  misc_feature (1)..(305): Homolog of NCBI NO: 18001149 NR Description: translational elongation factor Tu [Oryza sativa]
  misc_feature (1)..(306): Homolog of NCBI NO: 1149571 NR Description: mitochondrial elongation factor Tu [Arabidopsis
  misc_feature (1)..(306): Homolog of NCBI NO: 15236220 NR Description: elongation factor Tu (EF-Tu), putative
MITGAAQMDGGILVVSAPDGPMPQTKEHILLARQVGVPSLVCFLNKVDAVDDPELLELVEMELRELLNFYKFPGDDIPIVRGSALAALQGTNEELGKKAILKLMDAVDEYISDPVRQLDKPFLMPVEDVFSIQGRGTVVTGRVEQGTIKVGEEVEVLGLTQSGPLKTTVTGVEMFKKILDRGEAGDNVGLLLRGLKRDDVQRGMVVTKPGAFKTYKKFEAEIYVLSKDEGGRHTAFFSNYKPQFYLRTADVTGKVELPESVKMVMPGDNVTATFELISPVPLEIGQRFALREGGRTVGAGVVSKVMA

SEQ ID NO: 55489 - DNA, 1772 bp, Glycine max
  misc_feature (1)..(1772): Ceres Seq. ID no. 15177814
aatgtaatgtaatgcagcaaagagggaaaggtaacaaccgtagatccaggagtttctcaaggtcccgtctcgctgttgaaggcacttagccacacacacacacccaccgctttcagctatggatgagcgtcacattcagaaatcttactggcttcagcattccgccgatctctccgtcgaggcaatgatgctcgattccaaagccgctcatctcgacaaagaagagagacccgaggtgctttccctattacctccattcgaaggcaagtccgttattgagcttggtgctggtattggtcgatttactggtgaattggctctgaaagctggtcaattgcttgctgtggacttcattgacactgctatcaagaagaatgaaaccatcaatggacaccacaaccatgtcaaattcttgtgtgctgatgtcacatctccaaatatgtcaaataacgtttctgaaggatccgttgacgtcgttttctcaaattggttacttatgtatctctcagatattgaggttgaaaaattagctgaaaggatggtcagatggttaaaagatggtggatatatattctttagagaatcttgtttccaccaatctggagattcaaagagaaaatacaaccctactcactacagggaacccagattttataccaaggtatttaaagagtgccatatgagtgataatactgggaattcctttgagctttctcttgtgggatgtaaatgcattggagcttatgttcgaaataagaagaatcaaaaccagatttgctggatatggcagaaagttaggtcacaagatgataggggtttccagcgcttcttggatagagttgaatacagccacaagagtattttacgatatgaacggatgtatggcccaggctttgtgagcactggtggacttgaaacgacaaaggagtttgtggcaaagctgggactaaagcctggtcagaaagttctggatgttggttgtggtgttgggggaggtgatttctacatggctgagaattttgatgttgaggttattggcattgacctctccataaacatgatttctcttgctattgaacgtgctattggactgaactacgctgttgaatttgattgtgcggattgctatagaaaaacatatcctgagaatacatttgatgtaatatacactcgggacaccatgctgcacgtcaaagataaaccaacattattcagatcattttacaagtggttgaagcctggaggaaaaattctaatcacagattactgcaaaagtgctggaagtccatctttagaatttgctgagtacataaaaaaaggaggatattatctccatgacattaaagcgtataggcagatgcttgaggatgcgggatttgatgatgtcattgccgaggatcgaactgatcagtttgtgaacacgctacagcaggagttaaatgcccttgagaacaagaaggacgattttattggtgacttcagcgaggaagactacaatgagattgtcgaaagatggaaggcaaagcagaccaggggtgcatctagagagcagatgtggggcttgttcattgccaagaaaaattgacatgctttattgctatcatatgccttgttctagctatatttaattcctgtgtggccggaatagttatctgtgtcttttatgttggtttaagattcatagctgctttcgaattagaatgacgatctgctgagaggagaatgctcttcgatttgaataacaatggtcacttgccattggcttccttgct

SEQ ID NO: 55490 - protein, 488 aa, Glycine max
  peptide (1)..(488): Ceres Seq. ID no. 15177815
  misc_feature (116)..(487): Homolog of NCBI NO: 39582205 NR Description: Hypothetical protein CBG08775 [Caenorhabditis
  misc_feature (1)..(487): Homolog of NCBI NO: 28436074 NR Description: phosphoethanolamine N-methyltransferase [Suaeda
  misc_feature (12)..(487): Homolog of NCBI NO: 15221909 NR Description: phosphoethanolamine N-methyltransferase -related
  misc_feature (2)..(488): Homolog of NCBI NO: 24212080 NR Description: Putative phosphoethanolamine N-methyltransferase 3
  misc_feature (2)..(488): Homolog of NCBI NO: 15219502 NR Description: phosphoethanolamine N-methyltransferase -related
  misc_feature (2)..(488): Homolog of NCBI NO: 9294501 NR Description: methyl transferase-like protein [Arabidopsis
  misc_feature (2)..(488): Homolog of NCBI NO: 20260388 NR Description: unknown protein [Arabidopsis thaliana]
  misc_feature (3)..(488): Homolog of NCBI NO: 32478660 NR Description: phosphoethanolamine N-methyltransferase [Brassica
  misc_feature (2)..(488): Homolog of NCBI NO: 30684743 NR Description: phosphoethanolamine N-methyltransferase, putative
  misc_feature (1)..(487): Homolog of NCBI NO: 24212082 NR Description: Phosphoethanolamine N-methyltransferase
MDERHIQKSYWLQHSADLSVEAMMLDSKAAHLDKEERPEVLSLLPPFEGKSVIELGAGIGRFTGELALKAGQLLAVDFIDTAIKKNETINGHHNHVKFLCADVTSPNMSNNVSEGSVDVVFSNWLLMYLSDIEVEKLAERMVRWLKDGGYIFFRESCFHQSGDSKRKYNPTHYREPRFYTKVFKECHMSDNTGNSFELSLVGCKCIGAYVRNKKNQNQICWIWQKVRSQDDRGFQRFLDRVEYSHKSILRYERMYGPGFVSTGGLETTKEFVAKLGLKPGQKVLDVGCGVGGGDFYMAENFDVEVIGIDLSINMISLAIERAIGLNYAVEFDCADCYRKTYPENTFDVIYTRDTMLHVKDKPTLFRSFYKWLKPGGKILITDYCKSAGSPSLEFAEYIKKGGYYLHDIKAYRQMLEDAGFDDVIAEDRTDQFVNTLQQELNALENKKDDFIGDFSEEDYNEIVERWKAKQTRGASREQMWGLFIAKKN

SEQ ID NO: 55491 - protein, 466 aa, Glycine max
  peptide (1)..(466): Ceres Seq. ID no. 15177816
  misc_feature (94)..(465): Homolog of NCBI NO: 39582205 NR Description: Hypothetical protein CBG08775 [Caenorhabditis
  misc_feature (1)..(465): Homolog of NCBI NO: 28436074 NR Description: phosphoethanolamine N-methyltransferase [Suaeda
  misc_feature (1)..(465): Homolog of NCBI NO: 15221909 NR Description: phosphoethanolamine N-methyltransferase -related
  misc_feature (1)..(466): Homolog of NCBI NO: 24212080 NR Description: Putative phosphoethanolamine N-methyltransferase 3
  misc_feature (1)..(466): Homolog of NCBI NO: 15219502 NR Description: phosphoethanolamine N-methyltransferase -related
  misc_feature (1)..(466): Homolog of NCBI NO: 9294501 NR Description: methyl transferase-like protein [Arabidopsis
  misc_feature (1)..(466): Homolog of NCBI NO: 20260388 NR Description: unknown protein [Arabidopsis thaliana]
  misc_feature (1)..(466): Homolog of NCBI NO: 32478660 NR Description: phosphoethanolamine N-methyltransferase [Brassica
  misc_feature (1)..(466): Homolog of NCBI NO: 30684743 NR Description: phosphoethanolamine N-methyltransferase, putative
  misc_feature (1)..(465): Homolog of NCBI NO: 24212082 NR Description: Phosphoethanolamine N-methyltransferase
MMLDSKAAHLDKEERPEVLSLLPPFEGKSVIELGAGIGRFTGELALKAGQLLAVDFIDTAIKKNETINGHHNHVKFLCADVTSPNMSNNVSEGSVDVVFSNWLLMYLSDIEVEKLAERMVRWLKDGGYIFFRESCFHQSGDSKRKYNPTHYREPRFYTKVFKECHMSDNTGNSFELSLVGCKCIGAYVRNKKNQNQICWIWQKVRSQDDRGFQRFLDRVEYSHKSILRYERMYGPGFVSTGGLETTKEFVAKLGLKPGQKVLDVGCGVGGGDFYMAENFDVEVIGIDLSINMISLAIERAIGLNYAVEFDCADCYRKTYPENTFDVIYTRDTMLHVKDKPTLFRSFYKWLKPGGKILITDYCKSAGSPSLEFAEYIKKGGYYLHDIKAYRQMLEDAGFDDVIAEDRTDQFVNTLQQELNALENKKDDFIGDFSEEDYNEIVERWKAKQTRGASREQMWGLFIAKKN

SEQ ID NO: 55492 - protein, 465 aa, Glycine max
  peptide (1)..(465): Ceres Seq. ID no. 15177817
  misc_feature (93)..(464): Homolog of NCBI NO: 39582205 NR Description: Hypothetical protein CBG08775 [Caenorhabditis
  misc_feature (1)..(464): Homolog of NCBI NO: 28436074 NR Description: phosphoethanolamine N-methyltransferase [Suaeda
  misc_feature (1)..(464): Homolog of NCBI NO: 15221909 NR Description: phosphoethanolamine N-methyltransferase -related
  misc_feature (1)..(465): Homolog of NCBI NO: 24212080 NR Description: Putative phosphoethanolamine N-methyltransferase 3
  misc_feature (1)..(465): Homolog of NCBI NO: 15219502 NR Description: phosphoethanolamine N-methyltransferase -related
  misc_feature (1)..(465): Homolog of NCBI NO: 9294501 NR Description: methyl transferase-like protein [Arabidopsis
  misc_feature (1)..(465): Homolog of NCBI NO: 20260388 NR Description: unknown protein [Arabidopsis thaliana]
  misc_feature (1)..(465): Homolog of NCBI NO: 32478660 NR Description: phosphoethanolamine N-methyltransferase [Brassica
  misc_feature (1)..(465): Homolog of NCBI NO: 30684743 NR Description: phosphoethanolamine N-methyltransferase, putative
  misc_feature (1)..(464): Homolog of NCBI NO: 24212082 NR Description: Phosphoethanolamine N-methyltransferase
MLDSKAAHLDKEERPEVLSLLPPFEGKSVIELGAGIGRFTGELALKAGQLLAVDFIDTAIKKNETINGHHNHVKFLCADVTSPNMSNNVSEGSVDVVFSNWLLMYLSDIEVEKLAERMVRWLKDGGYIFFRESCFHQSGDSKRKYNPTHYREPRFYTKVFKECHMSDNTGNSFELSLVGCKCIGAYVRNKKNQNQICWIWQKVRSQDDRGFQRFLDRVEYSHKSILRYERMYGPGFVSTGGLETTKEFVAKLGLKPGQKVLDVGCGVGGGDFYMAENFDVEVIGIDLSINMISLAIERAIGLNYAVEFDCADCYRKTYPENTFDVIYTRDTMLHVKDKPTLFRSFYKWLKPGGKILITDYCKSAGSPSLEFAEYIKKGGYYLHDIKAYRQMLEDAGFDDVIAEDRTDQFVNTLQQELNALENKKDDFIGDFSEEDYNEIVERWKAKQTRGASREQMWGLFIAKKN

SEQ ID NO: 55493 - DNA, 1107 bp, Glycine max
  misc_feature (1)..(1107): Ceres Seq. ID no. 14312769
tctagattcacaagtactatcaaagcatatgaagaataaatcatcgtgcgattttatggttccttctaatcataactactctgttaggctgagtccaatatgttgtaagctatcagaaagtgggattgaggagaaccacacgagcacgagcacgggcgagaggccctctaagatcaaggacaggatggaggagtacaatatagctatgaagaaaatgatgaggaacccttatgagtatcaccatgatctgggtatgaattatactcttataacggacaatttgattgttggctcccaaccacagaaacctgaagacatagatcacctcaaaaaggaagagggtgtggcatacattttaaacttgcaacaagataacgatgttgagtattggggagtagacttgcagtcaataataagaaggtctcgtgaacttgaaattagccacacaaggagaccggcaaaagactttgatccagattccttgcaaaatgaactacctaaagcagtctcatccttagaatgggcaatttctgagggaaaaggaagagtttatgtgcattgtacggctggacttggaagagctccagcggtggcaattgcttatttgttctggttttgtgacatgaatctaaatgaagcatatgatatgctaacttcaaagagaccttgtggaccaaataaaagagcaatacgtggcgctacttatgatttggctaagaatgatccttggaaggagccatttgagactcttccagaatatgcatttgaggatatagcagattgggaaaggaacttgattcaagatcgtgcccgctcccttcgtggaatttgacaacttcggtttctacttatctgagattcctacataggttgccacccttgctgggatggtatcaggtgccatgatactgctcaagttggagatattttttcaagcatattcatactgatatgggcacatagcttacaacgtgtacgaaatattcagtatagtacagactatagagtggtaaataatcaattttgcgaataatgcaccataattgtagacgtcctaataatatctgagagtgcaaaatgcctagttgatctattggtctgtcaaag

SEQ ID NO: 55494 - protein, 276 aa, Glycine max
  peptide (1)..(276): Ceres Seq. ID no. 14312770
  misc_feature (86)..(222): Pfam Name: Dual specificity phosphatase, catalytic domain Pfam Description: Dual specificity phosphatase, catalytic domain
  misc_feature (62)..(237): Homolog of NCBI NO: 6016710 NR Description: unknown protein [Arabidopsis thaliana]
  misc_feature (62)..(237): Homolog of NCBI NO: 21592520 NR Description: unknown [Arabidopsis thaliana]
  misc_feature (62)..(237): Homolog of NCBI NO: 18395843 NR Description: expressed protein [Arabidopsis thaliana]
  misc_feature (57)..(237): Homolog of NCBI NO: 14970762 NR Description: protein tyrosine phosphatase [Lycopersicon
  misc_feature (48)..(258): Homolog of NCBI NO: 21536905 NR Description: unknown [Arabidopsis thaliana]
  misc_feature (48)..(237): Homolog of NCBI NO: 11288831 NR Description: hypothetical protein F4F15.290 - Arabidopsis
  misc_feature (48)..(258): Homolog of NCBI NO: 16612246 NR Description: AT3g52180/F4F15_290 [Arabidopsis thaliana]
  misc_feature (48)..(258): Homolog of NCBI NO: 18409505 NR Description: expressed protein [Arabidopsis thaliana]
  misc_feature (10)..(275): Homolog of NCBI NO: 18399058 NR Description: expressed protein [Arabidopsis thaliana]
  misc_feature (10)..(275): Homolog of NCBI NO: 21592631 NR Description: unknown [Arabidopsis thaliana]
LDSQVLSKHMKNKSSCDFMVPSNHNYSVRLSPICCKLSESGIEENHTSTSTGERPSKIKDRMEEYNIAMKKMMRNPYEYHHDLGMNYTLITDNLIVGSQPQKPEDIDHLKKEEGVAYILNLQQDNDVEYWGVDLQSIIRRSRELEISHTRRPAKDFDPDSLQNELPKAVSSLEWAISEGKGRVYVHCTAGLGRAPAVAIAYLFWFCDMNLNEAYDMLTSKRPCGPNKRAIRGATYDLAKNDPWKEPFETLPEYAFEDIADWERNLIQDRARSLRGI

SEQ ID NO: 55495 - protein, 267 aa, Glycine max
  peptide (1)..(267): Ceres Seq. ID no. 14312771
  misc_feature (77)..(213): Pfam Name: Dual specificity phosphatase, catalytic domain Pfam Description: Dual specificity phosphatase, catalytic domain
  misc_feature (53)..(228): Homolog of NCBI NO: 6016710 NR Description: unknown protein [Arabidopsis thaliana]
  misc_feature (53)..(228): Homolog of NCBI NO: 21592520 NR Description: unknown [Arabidopsis thaliana]
  misc_feature (53)..(228): Homolog of NCBI NO: 18395843 NR Description: expressed protein [Arabidopsis thaliana]
  misc_feature (48)..(228): Homolog of NCBI NO: 14970762 NR Description: protein tyrosine phosphatase [Lycopersicon
  misc_feature (39)..(249): Homolog of NCBI NO: 21536905 NR Description: unknown [Arabidopsis thaliana]
  misc_feature (39)..(228): Homolog of NCBI NO: 11288831 NR Description: hypothetical protein F4F15.290 - Arabidopsis
  misc_feature (39)..(249): Homolog of NCBI NO: 16612246 NR Description: AT3g52180/F4F15_290 [Arabidopsis thaliana]
  misc_feature (39)..(249): Homolog of NCBI NO: 18409505 NR Description: expressed protein [Arabidopsis thaliana]
  misc_feature (1)..(266): Homolog of NCBI NO: 18399058 NR Description: expressed protein [Arabidopsis thaliana]
  misc_feature (1)..(266): Homolog of NCBI NO: 21592631 NR Description: unknown [Arabidopsis thaliana]
MKNKSSCDFMVPSNHNYSVRLSPICCKLSESGIEENHTSTSTGERPSKIKDRMEEYNIAMKKMMRNPYEYHHDLGMNYTLITDNLIVGSQPQKPEDIDHLKKEEGVAYILNLQQDNDVEYWGVDLQSIIRRSRELEISHTRRPAKDFDPDSLQNELPKAVSSLEWAISEGKGRVYVHCTAGLGRAPAVAIAYLFWFCDMNLNEAYDMLTSKRPCGPNKRAIRGATYDLAKNDPWKEPFETLPEYAFEDIADWERNLIQDRARSLRGI

SEQ ID NO: 55496 - protein, 258 aa, Glycine max
  peptide (1)..(258): Ceres Seq. ID no. 14312772
  misc_feature (68)..(204): Pfam Name: Dual specificity phosphatase, catalytic domain Pfam Description: Dual specificity phosphatase, catalytic domain
  misc_feature (44)..(219): Homolog of NCBI NO: 6016710 NR Description: unknown protein [Arabidopsis thaliana]
  misc_feature (44)..(219): Homolog of NCBI NO: 21592520 NR Description: unknown [Arabidopsis thaliana]
  misc_feature (44)..(219): Homolog of NCBI NO: 18395843 NR Description: expressed protein [Arabidopsis thaliana]
  misc_feature (39)..(219): Homolog of NCBI NO: 14970762 NR Description: protein tyrosine phosphatase [Lycopersicon
  misc_feature (30)..(240): Homolog of NCBI NO: 21536905 NR Description: unknown [Arabidopsis thaliana]
  misc_feature (30)..(219): Homolog of NCBI NO: 11288831 NR Description: hypothetical protein F4F15.290 - Arabidopsis
  misc_feature (30)..(240): Homolog of NCBI NO: 16612246 NR Description: AT3g52180/F4F15_290 [Arabidopsis thaliana]
  misc_feature (30)..(240): Homolog of NCBI NO: 18409505 NR Description: expressed protein [Arabidopsis thaliana]
  misc_feature (1)..(257): Homolog of NCBI NO: 18399058 NR Description: expressed protein [Arabidopsis thaliana]
  misc_feature (1)..(257): Homolog of NCBI NO: 21592631 NR Description: unknown [Arabidopsis thaliana]
MVPSNHNYSVRLSPICCKLSESGIEENHTSTSTGERPSKIKDRMEEYNIAMKKMMRNPYEYHHDLGMNYTLITDNLIVGSQPQKPEDIDHLKKEEGVAYILNLQQDNDVEYWGVDLQSIIRRSRELEISHTRRPAKDFDPDSLQNELPKAVSSLEWAISEGKGRVYVHCTAGLGRAPAVAIAYLFWFCDMNLNEAYDMLTSKRPCGPNKRAIRGATYDLAKNDPWKEPFETLPEYAFEDIADWERNLIQDRARSLRGI

SEQ ID NO: 55497 - DNA, 1522 bp, Glycine max
  misc_feature (1)..(1522): Ceres Seq. ID no. 15169061
atagagaaccaaaacgcgacgcaattgcactttttcttcttctttcgcagctcagaatcgctcaaacaatgacagaggatagcagcgttagggtttcttcttccgacaaaacctccgcggccaacgatgcttcgcagacgcggcagagaaagaagagaaagtgggatcaaccggcggagtcattgatgccagttgggatggcagttcctggagcactccctttgagcaatgccgtgtctcttggaggggttgcatttcctgccatggctccgatgatctccggagctcttttgaggaatcctctggcagcttcttctcagcttccgcaacacacagttgcagctgctgttgccgcacaaaaattgaatcaacaaaagatccaagatgaattaataattgctcgagaaattgtcataaatgatgcagagtcttctgttcgctacaagttgacaaaacgccagacacaagaggagatccagaggtgcactggtgccatagttataactagggggaagtatcggctacctaatgcgccacatgatggagggaagccgctgtatcttcacatctctgcaggagctcatataaaagagacagcagaacggattttagctgttgatcgtgctgctgcaatgattgaagaaatgctcaaacaggagcaaaattcacagtcaatttcttccgcctcaccttctgctttggttaatatactgaagatgctgagtacatgcgtgtttttgggctttgatgctgatccttctttgaacattgttgctcgtatacgtggaccaaatgtaagcccttccctacccaattgatttatctagtcactcttggaggttgggttcatctatgacctgatgtggtttagtctgccacattttattagacaattgccacagtctagaagttttttttggtctcttttgattgtgatgtgaccccttggtcatctgctgtttttgttttcatactattctagtctttcactcactaggattacctgtgtctttgttctcaacttatgatttgatggtgcgaaaatacttgggtgttactaggagtactgattttccaagagttgattaagcaataaaagggaggactggggagactggaagagtgttgttacagtttatggttacatgagaaatactaggaacacactcttttaaacacaccctcttttatttgttgaaatttattgaaaatgactaaattttgtgtgtctcacatcatatttaatgattctctctcttgattttgtagtttcaataatttttaaccaattagagagtgtgtttctagcacttctcatgtttacatatggcattgtaatacttgttaggtgctgaaagtgatattcagatggatggaattggaaaatggttcttctgatgacttttgaagcacattttgtatgtgaatactttaatccaagagactggggtgaaagtatgtccacacatacactcaatcacaagtcacaagaacaaatgatgcttatcaaatatttctttac

SEQ ID NO: 55498 - protein, 271 aa, Glycine max
  peptide (1)..(271): Ceres Seq. ID no. 15169062
  misc_feature (50)..(236): Homolog of NCBI NO: 28277613 NR Description: Similar to KIAA0907 protein [Danio rerio]
  misc_feature (50)..(216): Homolog of NCBI NO: 21362269 NR Description: RIKEN cDNA 2810403A07 [Mus musculus]
  misc_feature (50)..(216): Homolog of NCBI NO: 13879294 NR Description: RIKEN cDNA 2810403A07 [Mus musculus]
  misc_feature (50)..(216): Homolog of NCBI NO: 31281048 NR Description: BLOM7 alpha [Homo sapiens]
  misc_feature (50)..(216): Homolog of NCBI NO: 7662372 NR Description: KIAA0907 protein [Homo sapiens]
  misc_feature (50)..(216): Homolog of NCBI NO: 40788982 NR Description: KIAA0907 protein [Homo sapiens]
  misc_feature (50)..(216): Homolog of NCBI NO: 26350189 NR Description: unnamed protein product [Mus musculus]
  misc_feature (50)..(216): Homolog of NCBI NO: 31281052 NR Description: BLOM7 gamma [Homo sapiens]
  misc_feature (50)..(216): Homolog of NCBI NO: 20072609 NR Description: Similar to KIAA0907 protein [Homo sapiens]
  misc_feature (111)..(264): Homolog of NCBI NO: 11994521 NR Description: gene_id:MUO10.12~unknown protein [Arabidopsis
REPKRDAIALFLLLSQLRIAQTMTEDSSVRVSSSDKTSAANDASQTRQRKKRKWDQPAESLMPVGMAVPGALPLSNAVSLGGVAFPAMAPMISGALLRNPLAASSQLPQHTVAAAVAAQKLNQQKIQDELIIAREIVINDAESSVRYKLTKRQTQEEIQRCTGAIVITRGKYRLPNAPHDGGKPLYLHISAGAHIKETAERILAVDRAAAMIEEMLKQEQNSQSISSASPSALVNILKMLSTCVFLGFDADPSLNIVARIRGPNVSPSLPN

SEQ ID NO: 55499 - protein, 249 aa, Glycine max
  peptide (1)..(249): Ceres Seq. ID no. 15169063
  misc_feature (28)..(214): Homolog of NCBI NO: 28277613 NR Description: Similar to KIAA0907 protein [Danio rerio]
  misc_feature (28)..(194): Homolog of NCBI NO: 21362269 NR Description: RIKEN cDNA 2810403A07 [Mus musculus]
  misc_feature (28)..(194): Homolog of NCBI NO: 13879294 NR Description: RIKEN cDNA 2810403A07 [Mus musculus]
  misc_feature (28)..(194): Homolog of NCBI NO: 31281048 NR Description: BLOM7 alpha [Homo sapiens]
  misc_feature (28)..(194): Homolog of NCBI NO: 7662372 NR Description: KIAA0907 protein [Homo sapiens]
  misc_feature (28)..(194): Homolog of NCBI NO: 40788982 NR Description: KIAA0907 protein [Homo sapiens]
  misc_feature (28)..(194): Homolog of NCBI NO: 26350189 NR Description: unnamed protein product [Mus musculus]
  misc_feature (28)..(194): Homolog of NCBI NO: 31281052 NR Description: BLOM7 gamma [Homo sapiens]
  misc_feature (28)..(194): Homolog of NCBI NO: 20072609 NR Description: Similar to KIAA0907 protein [Homo sapiens]
  misc_feature (89)..(242): Homolog of NCBI NO: 11994521 NR Description: gene_id:MUO10.12~unknown protein [Arabidopsis
MTEDSSVRVSSSDKTSAANDASQTRQRKKRKWDQPAESLMPVGMAVPGALPLSNAVSLGGVAFPAMAPMISGALLRNPLAASSQLPQHTVAAAVAAQKLNQQKIQDELIIAREIVINDAESSVRYKLTKRQTQEEIQRCTGAIVITRGKYRLPNAPHDGGKPLYLHISAGAHIKETAERILAVDRAAAMIEEMLKQEQNSQSISSASPSALVNILKMLSTCVFLGFDADPSLNIVARIRGPNVSPSLPN

SEQ ID NO: 55500 - protein, 210 aa, Glycine max
  peptide (1)..(210): Ceres Seq. ID no. 15169064
  misc_feature (1)..(175): Homolog of NCBI NO: 28277613 NR Description: Similar to KIAA0907 protein [Danio rerio]
  misc_feature (1)..(155): Homolog of NCBI NO: 21362269 NR Description: RIKEN cDNA 2810403A07 [Mus musculus]
  misc_feature (1)..(155): Homolog of NCBI NO: 13879294 NR Description: RIKEN cDNA 2810403A07 [Mus musculus]
  misc_feature (1)..(155): Homolog of NCBI NO: 31281048 NR Description: BLOM7 alpha [Homo sapiens]
  misc_feature (1)..(155): Homolog of NCBI NO: 7662372 NR Description: KIAA0907 protein [Homo sapiens]
  misc_feature (1)..(155): Homolog of NCBI NO: 40788982 NR Description: KIAA0907 protein [Homo sapiens]
  misc_feature (1)..(155): Homolog of NCBI NO: 26350189 NR Description: unnamed protein product [Mus musculus]
  misc_feature (1)..(155): Homolog of NCBI NO: 31281052 NR Description: BLOM7 gamma [Homo sapiens]
  misc_feature (1)..(155): Homolog of NCBI NO: 20072609 NR Description: Similar to KIAA0907 protein [Homo sapiens]
  misc_feature (50)..(203): Homolog of NCBI NO: 11994521 NR Description: gene_id:MUO10.12~unknown protein [Arabidopsis
MPVGMAVPGALPLSNAVSLGGVAFPAMAPMISGALLRNPLAASSQLPQHTVAAAVAAQKLNQQKIQDELIIAREIVINDAESSVRYKLTKRQTQEEIQRCTGAIVITRGKYRLPNAPHDGGKPLYLHISAGAHIKETAERILAVDRAAAMIEEMLKQEQNSQSISSASPSALVNILKMLSTCVFLGFDADPSLNIVARIRGPNVSPSLPN

SEQ ID NO: 55501 - DNA, 1494 bp, Glycine max
  misc_feature (1)..(1494): Ceres Seq. ID no. 14313336
attagaatcttggaatatactaatagacatgaatatttttataaatattaatagtagattatataacaacttgaaatttattgcagagatctaaattgtggtaattttaaggtaaccgaaaatgcacacttggtttctcaaaaacaattctctgatttctctctttctgtatctctatcatctctctttcttttcaattatacattttatttctgagtagctacatctaccttgttgcagaacttctaggtctgaaaacaggttatttcagtttaagacaaattaaagctgctactaataactttgacccagcaaataagataggtgaaggaggctttggaccagtattcaagggtgtactatcagatggtgctgtgattgctgttaagcagctctcctccaaatcaaagcaagggaatcgtgaattcatcaatgaaataggcatgatatctgctttgcagcatccaaaccttgtgaaactttatggctgctgcattgaaggaaaccagctgctgctagtatatcagtacatggagaacaatagtcttgctcgtgcactttttggtaaagaacatgagaggatgcaattggactggcccagaagaatgcaaatttgtctgggtatagcaaagggcttagcttatcttcataaggaatcaaggttgaaaatagtgcacagggatattaaggcaaccaatgtcttacttgataaacatctgcatgccaagatctctgactttggtttagccaaacttgatgaagaagagaatactcatatcagcacaagaatagctgggacaattggttacatggctcctgagtatgctatgaggggttacttgactgacaaagcagatgtctatagctttggaattgtagctttagagattgttagtggaaagagcaacacaaattataggccaaaggaggagtttgtatatcttttagattgggcctatgttctccaagagcaaggaaaccttctggagctggtggatccaagtcttggttcaaagtactcctcagaagaggccatgagaatgctgctgttagcactcttgtgcaccaacccttctcccactcttagaccatgtatgtcatcagtagtgagcatgcttgagggaaaaactccaattcaagcaccaataattaaacgcggtgacagtgcagaagatgtaagatttaaagcctttgagatgctatcacaagacagtcaaactcatgtctcttctgcattctcagaagaaagtatagagcaaagaagcaaatcaatggggggaccatggcttgactcctccatatcacttccaagtagaattgattaggcttcaaccgatcaacttattagatattccaattatgtgtgatttgcaagtcggggaagttaactcattaaattttaattcatagttgcttgctatatgtatggtggtttaaaggctattaatggaggtttccaacaaaaggggtaatttcatttggaattttattaag

SEQ ID NO: 55502 - protein, 293 aa, Glycine max
  peptide (1)..(293): Ceres Seq. ID no. 14313337
  misc_feature (1)..(269): Homolog of NCBI NO: 25405986 NR Description: protein F12M16.30 [imported] - Arabidopsis
  misc_feature (1)..(269): Homolog of NCBI NO: 15220901 NR Description: leucine-rich repeat transmembrane protein kinase,
  misc_feature (1)..(293): Homolog of NCBI NO: 15231938 NR Description: receptor-related serine/threonine kinase
  misc_feature (1)..(293): Homolog of NCBI NO: 11994595 NR Description: receptor-like serine/threonine kinase
  misc_feature (1)..(266): Homolog of NCBI NO: 25406989 NR Description: hypothetical protein [imported] - Arabidopsis
  misc_feature (1)..(266): Homolog of NCBI NO: 15222473 NR Description: leucine-rich repeat transmembrane protein kinase,
  misc_feature (1)..(291): Homolog of NCBI NO: 25405628 NR Description: hypothetical protein T3F20.25 [imported] -
  misc_feature (1)..(291): Homolog of NCBI NO: 15220789 NR Description: receptor-related serine/threonine kinase
  misc_feature (1)..(291): Homolog of NCBI NO: 25405630 NR Description: hypothetical protein T3F20.24 [imported] -
  misc_feature (1)..(291): Homolog of NCBI NO: 15220790 NR Description: receptor-related serine/threonine kinase
MISALQHPNLVKLYGCCIEGNQLLLVYQYMENNSLARALFGKEHERMQLDWPRRMQICLGIAKGLAYLHKESRLKIVHRDIKATNVLLDKHLHAKISDFGLAKLDEEENTHISTRIAGTIGYMAPEYAMRGYLTDKADVYSFGIVALEIVSGKSNTNYRPKEEFVYLLDWAYVLQEQGNLLELVDPSLGSKYSSEEAMRMLLLALLCTNPSPTLRPCMSSVVSMLEGKTPIQAPIIKRGDSAEDVRFKAFEMLSQDSQTHVSSAFSEESIEQRSKSMGGPWLDSSISLPSRID

SEQ ID NO: 55503 - protein, 264 aa, Glycine max
  peptide (1)..(264): Ceres Seq. ID no. 14313338
  misc_feature (1)..(240): Homolog of NCBI NO: 25405986 NR Description: protein F12M16.30 [imported] - Arabidopsis
  misc_feature (1)..(240): Homolog of NCBI NO: 15220901 NR Description: leucine-rich repeat transmembrane protein kinase,
  misc_feature (1)..(264): Homolog of NCBI NO: 15231938 NR Description: receptor-related serine/threonine kinase
  misc_feature (1)..(264): Homolog of NCBI NO: 11994595 NR Description: receptor-like serine/threonine kinase
  misc_feature (1)..(237): Homolog of NCBI NO: 25406989 NR Description: hypothetical protein [imported] - Arabidopsis
  misc_feature (1)..(237): Homolog of NCBI NO: 15222473 NR Description: leucine-rich repeat transmembrane protein kinase,
  misc_feature (1)..(262): Homolog of NCBI NO: 25405628 NR Description: hypothetical protein T3F20.25 [imported] -
  misc_feature (1)..(262): Homolog of NCBI NO: 15220789 NR Description: receptor-related serine/threonine kinase
  misc_feature (1)..(262): Homolog of NCBI NO: 25405630 NR Description: hypothetical protein T3F20.24 [imported] -
  misc_feature (1)..(262): Homolog of NCBI NO: 15220790 NR Description: receptor-related serine/threonine kinase
MENNSLARALFGKEHERMQLDWPRRMQICLGIAKGLAYLHKESRLKIVHRDIKATNVLLDKHLHAKISDFGLAKLDEEENTHISTRIAGTIGYMAPEYAMRGYLTDKADVYSFGIVALEIVSGKSNTNYRPKEEFVYLLDWAYVLQEQGNLLELVDPSLGSKYSSEEAMRMLLLALLCTNPSPTLRPCMSSVVSMLEGKTPIQAPIIKRGDSAEDVRFKAFEMLSQDSQTHVSSAFSEESIEQRSKSMGGPWLDSSISLPSRID

SEQ ID NO: 55504 - protein, 247 aa, Glycine max
  peptide (1)..(247): Ceres Seq. ID no. 14313339
  misc_feature (1)..(223): Homolog of NCBI NO: 25405986 NR Description: protein F12M16.30 [imported] - Arabidopsis
  misc_feature (1)..(223): Homolog of NCBI NO: 15220901 NR Description: leucine-rich repeat transmembrane protein kinase,
  misc_feature (1)..(247): Homolog of NCBI NO: 15231938 NR Description: receptor-related serine/threonine kinase
  misc_feature (1)..(247): Homolog of NCBI NO: 11994595 NR Description: receptor-like serine/threonine kinase
  misc_feature (1)..(220): Homolog of NCBI NO: 25406989 NR Description: hypothetical protein [imported] - Arabidopsis
  misc_feature (1)..(220): Homolog of NCBI NO: 15222473 NR Description: leucine-rich repeat transmembrane protein kinase,
  misc_feature (1)..(245): Homolog of NCBI NO: 25405628 NR Description: hypothetical protein T3F20.25 [imported] -
  misc_feature (1)..(245): Homolog of NCBI NO: 15220789 NR Description: receptor-related serine/threonine kinase
  misc_feature (1)..(245): Homolog of NCBI NO: 25405630 NR Description: hypothetical protein T3F20.24 [imported] -
  misc_feature (1)..(245): Homolog of NCBI NO: 15220790 NR Description: receptor-related serine/threonine kinase
MQLDWPRRMQICLGIAKGLAYLHKESRLKIVHRDIKATNVLLDKHLHAKISDFGLAKLDEEENTHISTRIAGTIGYMAPEYAMRGYLTDKADVYSFGIVALEIVSGKSNTNYRPKEEFVYLLDWAYVLQEQGNLLELVDPSLGSKYSSEEAMRMLLLALLCTNPSPTLRPCMSSVVSMLEGKTPIQAPIIKRGDSAEDVRFKAFEMLSQDSQTHVSSAFSEESIEQRSKSMGGPWLDSSISLPSRID

SEQ ID NO: 55505 - DNA, 535 bp, Glycine max
  misc_feature (1)..(535): Ceres Seq. ID no. 13594104
ggcatcatcacagacatggnnntctctgcctctgcaattcagcgggctcaagtgctccccactctcatcttcttctctcttctttaaaccttctctttggacccaacaatcccaaaagcgcgtttcaattaccattgcgaactcaatagcaatagccaatgcgcagaacaaagagagagcgaggcttaagaaactcttcgaagaagcctacgagagatgccgcaatgctccaatggaaggtgtctccttcaccatcgaagacttcactgctgctcttgacaagtacgacttcgattctgaagttggcggcaagattaaaggcactgtgttctacacagataacaatggagcagttgttgatatcactgcaaagtcttcggcatatttgccactgcaagaggcgtgcatccacagggttaagcatgttgaagaagcaggcttagttcctgggttcaaagaggagtttttgatcattggtgagaactcaatagatgatagcttggtcttgagtttaaggtctcttcagtttgacctt

SEQ ID NO: 55506 - protein, 178 aa, Glycine max
  peptide (1)..(178): Ceres Seq. ID no. 13594105
  misc_feature (98)..(172): Pfam Name: S1 RNA binding domain Pfam Description: S1 RNA binding domain
  misc_feature (74)..(176): Homolog of NCBI NO: 23128852 NR Description: hypothetical protein [Nostoc punctiforme]
  misc_feature (74)..(176): Homolog of NCBI NO: 17227632 NR Description: 30S ribosomal protein S1 [Nostoc sp. PCC 7120]
  misc_feature (74)..(176): Homolog of NCBI NO: 33860870 NR Description: 30S ribosomal protein S1, homolog A
  misc_feature (77)..(176): Homolog of NCBI NO: 23040654 NR Description: hypothetical protein [Trichodesmium erythraeum
  misc_feature (72)..(176): Homolog of NCBI NO: 33866517 NR Description: 30S ribosomal protein S1, homolog A
  misc_feature (74)..(176): Homolog of NCBI NO: 1173225 NR Description: 30S ribosomal protein S1
  misc_feature (67)..(176): Homolog of NCBI NO: 33863935 NR Description: 30S ribosomal protein S1, homolog A
  misc_feature (81)..(176): Homolog of NCBI NO: 16330162 NR Description: 30S ribosomal protein S1 [Synechocystis sp. PCC
  misc_feature (8)..(177): Homolog of NCBI NO: 133872 NR Description: 30S ribosomal protein S1, chloroplast precursor
  misc_feature (8)..(177): Homolog of NCBI NO: 30692346 NR Description: ribosomal protein S1 [Arabidopsis thaliana]
  misc_feature (7)..(7): Xaa is any aa, unknown or other
ASSQTWXSLPLQFSGLKCSPLSSSSLFFKPSLWTQQSQKRVSITIANSIAIANAQNKERARLKKLFEEAYERCRNAPMEGVSFTIEDFTAALDKYDFDSEVGGKIKGTVFYTDNNGAVVDITAKSSAYLPLQEACIHRVKHVEEAGLVPGFKEEFLIIGENSIDDSLVLSLRSLQFDL

SEQ ID NO: 55507 - protein, 101 aa, Glycine max
  peptide (1)..(101): Ceres Seq. ID no. 13594106
  misc_feature (21)..(95): Pfam Name: S1 RNA binding domain Pfam Description: S1 RNA binding domain
  misc_feature (1)..(99): Homolog of NCBI NO: 23128852 NR Description: hypothetical protein [Nostoc punctiforme]
  misc_feature (1)..(99): Homolog of NCBI NO: 17227632 NR Description: 30S ribosomal protein S1 [Nostoc sp. PCC 7120]
  misc_feature (1)..(99): Homolog of NCBI NO: 33860870 NR Description: 30S ribosomal protein S1, homolog A
  misc_feature (1)..(99): Homolog of NCBI NO: 23040654 NR Description: hypothetical protein [Trichodesmium erythraeum
  misc_feature (1)..(99): Homolog of NCBI NO: 33866517 NR Description: 30S ribosomal protein S1, homolog A
  misc_feature (1)..(99): Homolog of NCBI NO: 1173225 NR Description: 30S ribosomal protein S1
  misc_feature (1)..(99): Homolog of NCBI NO: 33863935 NR Description: 30S ribosomal protein S1, homolog A
  misc_feature (4)..(99): Homolog of NCBI NO: 16330162 NR Description: 30S ribosomal protein S1 [Synechocystis sp. PCC
  misc_feature (1)..(100): Homolog of NCBI NO: 133872 NR Description: 30S ribosomal protein S1, chloroplast precursor
  misc_feature (1)..(100): Homolog of NCBI NO: 30692346 NR Description: ribosomal protein S1 [Arabidopsis thaliana]
MEGVSFTIEDFTAALDKYDFDSEVGGKIKGTVFYTDNNGAVVDITAKSSAYLPLQEACIHRVKHVEEAGLVPGFKEEFLIIGENSIDDSLVLSLRSLQFDL

SEQ ID NO: 55508 - protein, 94 aa, Glycine max
  peptide (1)..(94): Ceres Seq. ID no. 13594107
MRRTKRERGLRNSSKKPTRDAAMLQWKVSPSPSKTSLLLLTSTTSILKLAARLKALCSTQITMEQLLISLQSLRHICHCKRRASTGLSMLKKQA

SEQ ID NO: 55509 - DNA, 824 bp, Glycine max
  misc_feature (1)..(824): Ceres Seq. ID no. 12467471
atcagcaaatcctcttcagtttctgcatctctaatacttcaactcactgtattatcttgagtaattttgcagagaagtaaaatatgagcaggccaggagactggaattgcaggtcgtgccagcacctgaactttcagaggagagactcatgccagcgatgtggggactcaaaatatggagatagagttgttgattttggtggttttggaggaagaggagggtcctcatttggtttaactggctcagatgttcgccccggcgactggtactgtgctgctgctaactgtggtgcacacaactttgctagccgctcaagctgcttcaagtgtggtgctttcaaggatgacttggctggaggaggctataacagttctgacatcttgcgctccagagcttttggtggcagtggaagacctggatggaaatctggtgattggatatgcagcagatcaggatgcaatgagcacaactttgctagcagaatggaatgttttaaatgcagtgctcccagggacacgtactagaaaaaatgagtttatcctagcaagaaaggctacattaattaatggagatgctgcaagatttctttattaatttctttgggatgttgaagacagtgtgaattctgaaaaggtggtttaaaatcccatgttacagagaagctagccagctgcatcccttagggtctttctcagatttacctcaagagctacaacaatgttgttttggtgctttaaactactttctttagttttggcgttagagagttcatttattgtatggtgcgtggttttcttaaatgaatatgaatctcttttcttgtc

SEQ ID NO: 55510 - protein, 146 aa, Glycine max
  peptide (1)..(146): Ceres Seq. ID no. 12467472
  misc_feature (114)..(144): Pfam Name: Zn-finger in Ran binding protein and others Pfam Description: Zn-finger in Ran binding protein and others
  misc_feature (1)..(90): Homolog of NCBI NO: 34913970 NR Description: B1110C07.23 [Oryza sativa (japonica
  misc_feature (1)..(61): Homolog of NCBI NO: 27368046 NR Description: zinc finger protein [Gossypium hirsutum]
  misc_feature (33)..(144): Homolog of NCBI NO: 15239445 NR Description: putative protein; protein id: At5g25490.1
  misc_feature (1)..(116): Homolog of NCBI NO: 15239445 NR Description: putative protein; protein id: At5g25490.1
  misc_feature (5)..(144): Homolog of NCBI NO: 15225776 NR Description: putative second messenger-dependent protein kinase
  misc_feature (1)..(144): Homolog of NCBI NO: 5679336 NR Description: putative zinc finger protein [Oryza sativa]
  misc_feature (1)..(144): Homolog of NCBI NO: 5803246 NR Description: ESTs AU077984(C62969),D41648(S4289), correspond to a region of the predicted gene.~Similar to putative
  misc_feature (3)..(145): Homolog of NCBI NO: 28849863 NR Description: zinc finger transcription factor ZFP30
  misc_feature (1)..(144): Homolog of NCBI NO: 21595771 NR Description: putative zinc finger protein [Arabidopsis
  misc_feature (1)..(144): Homolog of NCBI NO: 15232662 NR Description: putative zinc finger protein
MSRPGDWNCRSCQHLNFQRRDSCQRCGDSKYGDRVVDFGGFGGRGGSSFGLTGSDVRPGDWYCAAANCGAHNFASRSSCFKCGAFKDDLAGGGYNSSDILRSRAFGGSGRPGWKSGDWICSRSGCNEHNFASRMECFKCSAPRDTY

SEQ ID NO: 55511 - protein, 115 aa, Glycine max
  peptide (1)..(115): Ceres Seq. ID no. 12467473
MFAPATGTVLLLTVVHTTLLAAQAASSVVLSRMTWLEEAITVLTSCAPELLVAVEDLDGNLVIGYAADQDAMSTTLLAEWNVLNAVLPGTRTRKNEFILARKATLINGDAARFLY

SEQ ID NO: 55512 - protein, 83 aa, Glycine max
  peptide (1)..(83): Ceres Seq. ID no. 12467474
MTWLEEAITVLTSCAPELLVAVEDLDGNLVIGYAADQDAMSTTLLAEWNVLNAVLPGTRTRKNEFILARKATLINGDAARFLY

SEQ ID NO: 55513 - DNA, 1347 bp, Glycine max
  misc_feature (1)..(1347): Ceres Seq. ID no. 14307573
gaatgaagcgattattgattagtacaaaaaaaaaaaaaaaaaagagaattttggggagcactcatcaaccatggtgatgttgtttgcacacacagattcagtagtcactcactagttctcggagaaaaccaagtgtcagtaataactaacaagcaaaacagaaaagaatacggattcgattcggagagatcaaccatgaagaacgaccacaacaacaacaacaacaacagcgccgagcatagcaaagacactaccgttggaatcctagattcccgattcaaccagaccctcagaaatgttcaagggttactcaagggtcgtaacattcctggtaaaatattattgagccagagggttgaatctcccgattacacaagcttatcctcaccgacttatataaggagctcctcatacagtgaaactggcacaagtgaccagacatctgagacggtagaggaggaagttcacagtacaagtaaaccatttggtattcccaatgacaataagttaaaaatatcagcatccaatgtagagagctcatccgaagaagtccggaaatcttccatgggtgcaagagctacagattctgcaagagttatgaagttcactaaggtgctttcagagacaatggttaaattagagaaattgcgtgaattttcttggagtggtgttccagattatatgcgtcctacagtgtggagacttctcttgggatatgcaccacctaattcagatagaagggagggagttttgaaaaggaagcgccttgagtatcttgactgtgtttctcagtattatgatattcctgatacagaacgctcggatgatgagatcaatatgcttcgccagattgctgttgattgtccaagaactgtacctgaagtttcattctttcaacaacagcaagttcagaaatcattggagcgtattctgtacacatgggccattcggcatcctgcaagtggatatgttcaggggataaatgatcttgttacgccatttttagttgttttcctatcagaatacttggaagggggcatagataattggtcaatgtctgatttatcttcagatgaaatctctaatatagaggccgactgctattggtgcttgtcaaagttgcttgatggtatgcaagaccattatacgtttgcccaaccaggaattcaaaggcttgtttttaagttgaaggaattggtcaggaggattgatggtaacttttttctcttaccgaacctcagttttaggaaaatataactacatttggctaaattattctctcactctatattaatgctctctcttatttcacattgtggagataccgagagattaggataaaattgc

SEQ ID NO: 55514 - protein, 353 aa, Glycine max
  peptide (1)..(353): Ceres Seq. ID no. 14307574
  misc_feature (108)..(339): Homolog of NCBI NO: 25008320 NR Description: TBC1 domain family protein C22orf4 homolog
  misc_feature (108)..(339): Homolog of NCBI NO: 13874508 NR Description: hypothetical protein [Macaca fascicularis]
  misc_feature (92)..(339): Homolog of NCBI NO: 22507409 NR Description: chromosome 22 open reading frame 4; putative
  misc_feature (130)..(339): Homolog of NCBI NO: 40068063 NR Description: chromosome 6 open reading frame 197 [Homo
  misc_feature (130)..(339): Homolog of NCBI NO: 31616088 NR Description: dJ744I24.2 (novel protein (containing FLJ20337))
  misc_feature (130)..(339): Homolog of NCBI NO: 25008321 NR Description: TBC1 domain family protein C22orf4-like
  misc_feature (130)..(339): Homolog of NCBI NO: 38348532 NR Description: Unknown (protein for MGC:61359) [Mus musculus]
  misc_feature (130)..(339): Homolog of NCBI NO: 37181052 NR Description: TBC domain-containing protein [Rattus norvegicus]
  misc_feature (142)..(339): Homolog of NCBI NO: 25408101 NR Description: hypothetical protein At2g30710 [imported] -
  misc_feature (25)..(339): Homolog of NCBI NO: 18402435 NR Description: expressed protein [Arabidopsis thaliana]
MKNDHNNNNNNSAEHSKDTTVGILDSRFNQTLRNVQGLLKGRNIPGKILLSQRVESPDYTSLSSPTYIRSSSYSETGTSDQTSETVEEEVHSTSKPFGIPNDNKLKISASNVESSSEEVRKSSMGARATDSARVMKFTKVLSETMVKLEKLREFSWSGVPDYMRPTVWRLLLGYAPPNSDRREGVLKRKRLEYLDCVSQYYDIPDTERSDDEINMLRQIAVDCPRTVPEVSFFQQQQVQKSLERILYTWAIRHPASGYVQGINDLVTPFLVVFLSEYLEGGIDNWSMSDLSSDEISNIEADCYWCLSKLLDGMQDHYTFAQPGIQRLVFKLKELVRRIDGNFFLLPNLSFRKI

SEQ ID NO: 55515 - protein, 230 aa, Glycine max
  peptide (1)..(230): Ceres Seq. ID no. 14307575
  misc_feature (1)..(216): Homolog of NCBI NO: 25008320 NR Description: TBC1 domain family protein C22orf4 homolog
  misc_feature (1)..(216): Homolog of NCBI NO: 13874508 NR Description: hypothetical protein [Macaca fascicularis]
  misc_feature (1)..(216): Homolog of NCBI NO: 22507409 NR Description: chromosome 22 open reading frame 4; putative
  misc_feature (7)..(216): Homolog of NCBI NO: 40068063 NR Description: chromosome 6 open reading frame 197 [Homo
  misc_feature (7)..(216): Homolog of NCBI NO: 31616088 NR Description: dJ744I24.2 (novel protein (containing FLJ20337))
  misc_feature (7)..(216): Homolog of NCBI NO: 25008321 NR Description: TBC1 domain family protein C22orf4-like
  misc_feature (7)..(216): Homolog of NCBI NO: 38348532 NR Description: Unknown (protein for MGC:61359) [Mus musculus]
  misc_feature (7)..(216): Homolog of NCBI NO: 37181052 NR Description: TBC domain-containing protein [Rattus norvegicus]
  misc_feature (19)..(216): Homolog of NCBI NO: 25408101 NR Description: hypothetical protein At2g30710 [imported] -
  misc_feature (1)..(216): Homolog of NCBI NO: 18402435 NR Description: expressed protein [Arabidopsis thaliana]
MGARATDSARVMKFTKVLSETMVKLEKLREFSWSGVPDYMRPTVWRLLLGYAPPNSDRREGVLKRKRLEYLDCVSQYYDIPDTERSDDEINMLRQIAVDCPRTVPEVSFFQQQQVQKSLERILYTWAIRHPASGYVQGINDLVTPFLVVFLSEYLEGGIDNWSMSDLSSDEISNIEADCYWCLSKLLDGMQDHYTFAQPGIQRLVFKLKELVRRIDGNFFLLPNLSFRKI

SEQ ID NO: 55516 - protein, 219 aa, Glycine max
  peptide (1)..(219): Ceres Seq. ID no. 14307576
  misc_feature (1)..(205): Homolog of NCBI NO: 25008320 NR Description: TBC1 domain family protein C22orf4 homolog
  misc_feature (1)..(205): Homolog of NCBI NO: 13874508 NR Description: hypothetical protein [Macaca fascicularis]
  misc_feature (1)..(205): Homolog of NCBI NO: 22507409 NR Description: chromosome 22 open reading frame 4; putative
  misc_feature (1)..(205): Homolog of NCBI NO: 31616088 NR Description: dJ744I24.2 (novel protein (containing FLJ20337))
  misc_feature (1)..(205): Homolog of NCBI NO: 40068063 NR Description: chromosome 6 open reading frame 197 [Homo
  misc_feature (1)..(205): Homolog of NCBI NO: 25008321 NR Description: TBC1 domain family protein C22orf4-like
  misc_feature (1)..(205): Homolog of NCBI NO: 38348532 NR Description: Unknown (protein for MGC:61359) [Mus musculus]
  misc_feature (1)..(205): Homolog of NCBI NO: 37181052 NR Description: TBC domain-containing protein [Rattus norvegicus]
  misc_feature (8)..(205): Homolog of NCBI NO: 25408101 NR Description: hypothetical protein At2g30710 [imported] -
  misc_feature (1)..(205): Homolog of NCBI NO: 18402435 NR Description: expressed protein [Arabidopsis thaliana]
MKFTKVLSETMVKLEKLREFSWSGVPDYMRPTVWRLLLGYAPPNSDRREGVLKRKRLEYLDCVSQYYDIPDTERSDDEINMLRQIAVDCPRTVPEVSFFQQQQVQKSLERILYTWAIRHPASGYVQGINDLVTPFLVVFLSEYLEGGIDNWSMSDLSSDEISNIEADCYWCLSKLLDGMQDHYTFAQPGIQRLVFKLKELVRRIDGNFFLLPNLSFRKI

SEQ ID NO: 55517 - DNA, 622 bp, Glycine max
  misc_feature (1)..(622): Ceres Seq. ID no. 14307522
attttgatttgtcagttttattggtttgctgaatagaagtaggattagaaatcatgaggatcaatagccaatgatattttgtaagtgataggaactactggacctgggggaggcagttgggactcaaagccgaggtctttcccaagaacttattgatatgcttccaacctcaaagtacaaatttggtagtttattcaagagaaaaaattctgggaaaaggtgtgtaatttgtcagatgacatacagaagaggtgaccagcaaatgaaattgccatgcagccatgtctatcatggtgaatgcatcaccaagtggcttagcattaacaagaaatgtcctgtttgcaacactgaggtttttggcgaggaatcaacgcattagcatcaaggtggcaaaagaggatcctttttgctctattaatttttgcttctcatccaactcaccctctccctcccattctcttttttaagttttaattttttacacgtaggtaggtgtagtatgaagaactatggcagctctcacacaatatatgttttgtttactagaaacaacctattggagtcgcatcttcttgtggttaatgtgtgattttgtgtgtattcatgcaatatatattctctt

SEQ ID NO: 55518 - protein, 73 aa, Glycine max
  peptide (1)..(73): Ceres Seq. ID no. 14307523
  misc_feature (22)..(62): Pfam Name: Zinc finger, C3HC4 type (RING finger) Pfam Description: Zinc finger, C3HC4 type (RING finger)
  misc_feature (1)..(71): Homolog of NCBI NO: 20466428 NR Description: Pspzf zinc finger protein-like [Arabidopsis
  misc_feature (1)..(71): Homolog of NCBI NO: 10129643 NR Description: Pspzf zinc finger protein-like [Arabidopsis
  misc_feature (1)..(66): Homolog of NCBI NO: 15240204 NR Description: zinc finger (C3HC4-type RING finger) protein
  misc_feature (1)..(65): Homolog of NCBI NO: 15232746 NR Description: zinc-finger protein-related protein [Arabidopsis
  misc_feature (1)..(68): Homolog of NCBI NO: 34898016 NR Description: ESTs C26000(C11448),AU082130(C11448) correspond a region of the predicted gene.~Similar to mRNA for zinc-finger
  misc_feature (1)..(66): Homolog of NCBI NO: 10334499 NR Description: hypothetical protein [Cicer arietinum]
  misc_feature (1)..(66): Homolog of NCBI NO: 21536693 NR Description: unknown [Arabidopsis thaliana]
  misc_feature (1)..(66): Homolog of NCBI NO: 18402411 NR Description: zinc finger (C3HC4-type RING finger) protein
  misc_feature (1)..(68): Homolog of NCBI NO: 38567912 NR Description: OSJNBa0088I22.8 [Oryza sativa (japonica
  misc_feature (1)..(73): Homolog of NCBI NO: 22331928 NR Description: zinc finger (C3HC4-type RING finger) protein
MLPTSKYKFGSLFKRKNSGKRCVICQMTYRRGDQQMKLPCSHVYHGECITKWLSINKKCPVCNTEVFGEESTH

SEQ ID NO: 55519 - protein, 61 aa, Glycine max
  peptide (1)..(61): Ceres Seq. ID no. 14307524
MSIMVNASPSGLALTRNVLFATLRFLARNQRISIKVAKEDPFCSINFCFSSNSPSPSHSLF

SEQ ID NO: 55520 - protein, 58 aa, Glycine max
  peptide (1)..(58): Ceres Seq. ID no. 14307525
MVNASPSGLALTRNVLFATLRFLARNQRISIKVAKEDPFCSINFCFSSNSPSPSHSLF

SEQ ID NO: 55521 - DNA, 1160 bp, Glycine max
  misc_feature (1)..(1160): Ceres Seq. ID no. 13589868
tctctctttcactctttctccgagaacaaaaaaaaaaacgtgattcgctcttctcttcgaataaaccacaaaaccaacaaacgagaagaggagtgagagaagatggggttgtcgttcacgaagctgttcagcaggttgtttgcgaagaaggaaatgaggattctgatggtaggtctcgatgctgctggtaagacaaccatcttgtacaagctcaagcttggagaaatcgtcaccaccatccccaccatcggatttaatgttgagactgtggagtacaagaacatcagcttcactgtgtgggatgttggtggtcaggacaagatccgtcctctgtggaggcattatttccagaacactcagggtctcatttttgtggttgatagcaatgatagggatcgagtggttgaggcaagggatgagttgcacaggatgttgaatgaggatgaacttagagatgctgttttgcttgtttttgccaacaagcaagatcttcctaatgcaatgaatgctgcagaaataactgacaagcttggacttcattcactccgtcaacgccactggtatatccaaagcacttgtgcaacttctggagagggtctctatgagggtttggactggctttctaacaacattgccagcaaggcatgagacatttgaaaatttttggtcttgtctggtgatttcctgctgagtatggcggttcttggagaaagatgcttatcctttcttgtcaatgttgtaatagcagaatgcttgctagaagtattctcttcttttgtgtaacttgggtttgtatgattgcttaaattagctaatacttttagctataattggaactcttggatcctcttgtgcgtgccttgtttgtgttcattttgttagtttgatttttggttgaatatttccgtgcgttttgttcttggagtgcttgttggtgatgatagttgaatgaggattagaaaattgcgccagtttttgctcttgggccaagagtcacctgttcaaatattgtctttgcgaaattccagttcagatagacttggtacctgtttgttttaaagttgagcagacctaattttgatagaattggttaattatttattgtgattcagatgtgtgtctaaattaattatagtaataaagtttatattgaaacatgc

SEQ ID NO: 55522 - protein, 181 aa, Glycine max
  peptide (1)..(181): Ceres Seq. ID no. 13589869
  misc_feature (4)..(177): Pfam Name: ADP-ribosylation factor family Pfam Description: ADP-ribosylation factor family
  misc_feature (1)..(180): Homolog of NCBI NO: 15241463 NR Description: ADP-ribosylation factor ARF1, putative
  misc_feature (1)..(181): Homolog of NCBI NO: 25294169 NR Description: ADP-ribosylation factor [imported] - pepper
  misc_feature (1)..(181): Homolog of NCBI NO: 1703380 NR Description: ADP-RIBOSYLATION FACTOR
  misc_feature (1)..(180): Homolog of NCBI NO: 6573751 NR Description: F20B24.7 [Arabidopsis thaliana]
  misc_feature (1)..(181): Homolog of NCBI NO: 15223164 NR Description: ADP-ribosylation factor 1 (ARF1), putative
  misc_feature (1)..(181): Homolog of NCBI NO: 1703375 NR Description: ADP-RIBOSYLATION FACTOR 1
  misc_feature (1)..(181): Homolog of NCBI NO: 15226521 NR Description: ADP-ribosylation factor 1 (ARF1) [Arabidopsis
  misc_feature (1)..(181): Homolog of NCBI NO: 30681825 NR Description: ADP-ribosylation factor, putative [Arabidopsis
  misc_feature (1)..(181): Homolog of NCBI NO: 11131026 NR Description: ADP-ribosylation factor
  misc_feature (1)..(181): Homolog of NCBI NO: 39653273 NR Description: ADP-ribosylation factor [Medicago sativa]
MGLSFTKLFSRLFAKKEMRILMVGLDAAGKTTILYKLKLGEIVTTIPTIGFNVETVEYKNISFTVWDVGGQDKIRPLWRHYFQNTQGLIFVVDSNDRDRVVEARDELHRMLNEDELRDAVLLVFANKQDLPNAMNAAEITDKLGLHSLRQRHWYIQSTCATSGEGLYEGLDWLSNNIASKA

SEQ ID NO: 55523 - protein, 164 aa, Glycine max; identical to SEQ ID NO: 22740
  peptide (1)..(164): Ceres Seq. ID no. 13589870
  misc_feature (1)..(160): Pfam Name: ADP-ribosylation factor family Pfam Description: ADP-ribosylation factor family
  misc_feature (1)..(163): Homolog of NCBI NO: 15241463 NR Description: ADP-ribosylation factor ARF1, putative
  misc_feature (1)..(164): Homolog of NCBI NO: 25294169 NR Description: ADP-ribosylation factor [imported] - pepper
  misc_feature (1)..(164): Homolog of NCBI NO: 1703380 NR Description: ADP-RIBOSYLATION FACTOR
  misc_feature (1)..(163): Homolog of NCBI NO: 6573751 NR Description: F20B24.7 [Arabidopsis thaliana]
  misc_feature (1)..(164): Homolog of NCBI NO: 15223164 NR Description: ADP-ribosylation factor 1 (ARF1), putative
  misc_feature (1)..(164): Homolog of NCBI NO: 1703375 NR Description: ADP-RIBOSYLATION FACTOR 1
  misc_feature (1)..(164): Homolog of NCBI NO: 15226521 NR Description: ADP-ribosylation factor 1 (ARF1) [Arabidopsis
  misc_feature (1)..(164): Homolog of NCBI NO: 30681825 NR Description: ADP-ribosylation factor, putative [Arabidopsis
  misc_feature (1)..(164): Homolog of NCBI NO: 11131026 NR Description: ADP-ribosylation factor
  misc_feature (1)..(164): Homolog of NCBI NO: 39653273 NR Description: ADP-ribosylation factor [Medicago sativa]

SEQ ID NO: 55524 - protein, 160 aa, Glycine max; identical to SEQ ID NO: 22741
  peptide (1)..(160): Ceres Seq. ID no. 13589871
  misc_feature (1)..(156): Pfam Name: ADP-ribosylation factor family Pfam Description: ADP-ribosylation factor family
  misc_feature (1)..(159): Homolog of NCBI NO: 15241463 NR Description: ADP-ribosylation factor ARF1, putative
  misc_feature (1)..(160): Homolog of NCBI NO: 25294169 NR Description: ADP-ribosylation factor [imported] - pepper
  misc_feature (1)..(160): Homolog of NCBI NO: 1703380 NR Description: ADP-RIBOSYLATION FACTOR
  misc_feature (1)..(159): Homolog of NCBI NO: 6573751 NR Description: F20B24.7 [Arabidopsis thaliana]
  misc_feature (1)..(160): Homolog of NCBI NO: 15223164 NR Description: ADP-ribosylation factor 1 (ARF1), putative
  misc_feature (1)..(160): Homolog of NCBI NO: 1703375 NR Description: ADP-RIBOSYLATION FACTOR 1
  misc_feature (1)..(160): Homolog of NCBI NO: 15226521 NR Description: ADP-ribosylation factor 1 (ARF1) [Arabidopsis
  misc_feature (1)..(160): Homolog of NCBI NO: 30681825 NR Description: ADP-ribosylation factor, putative [Arabidopsis
  misc_feature (1)..(160): Homolog of NCBI NO: 11131026 NR Description: ADP-ribosylation factor
  misc_feature (1)..(160): Homolog of NCBI NO: 39653273 NR Description: ADP-ribosylation factor [Medicago sativa]

SEQ ID NO: 55525 - DNA, 1575 bp, Glycine max
  misc_feature (1)..(1575): Ceres Seq. ID no. 14303790
gtcattgacttcatcaactctttgcaggacgatgagtactcctccagttgttgagcgcgtttcagaatgcttcatcaagccgcagcactccaaccatgaatcaaaccaaatctgctacttaacaccttgggatattgctatgttgtctgctcactatatccaaaagggccttctcttcaagaagccctcatcaccacttgttagtcacaataatttcatagagaacctgttgcagaagctcaagcactctctttctctcaccctcttccatttctatcctttggctggtcgccttgtcacccaccaaacccatgaccctcccttctatgctgttttcgttgattgcaacaacagtgatggagccagattcatccatgcaactttagatatgaccatatctgatatcctctctcccgttgacgttccacccattgttcaatcattgtttgaccaccacaaagctgtcaaccatgacggtcacacaatgccgttgttgtccgtccaagtcactgaatttgtggatggtgttttcataggttgttccatgaaccacactcttggtgatggcacttcttattggaatttcttcaacacatggtctcagatctttcaagttcaaggccatgaacatgatgttcccatttcgcacccacccattcacaatcgctggtttccagagggttgcggtccattaatcaaccttcccttcaaacatcacgacgattttataaacagatatgaaacaccgttgctgagagagagaatcttccacttctcagcagagtctattgcaaaactgaaagcaaaggctaactcggagtgcaacacaaccaaaatctcatcgttccaatcattatcggcacttgtttggagatgcataactcgtgcgcggcgcttgccgtatgatcaaagaacaagttgcaagttgtccgcaaacaacagaacaagaatggaaccaccactgcctcaggagtactttggaaactcaatttatacactgaatgcaggaaccgccacctcagggaaattgcttgagaatggtataggttgggcagcatggaagttgcacaaatcggttgtaaaccataacgacagagcggtgttggaaacgctcaaagagtggttagagagtcctctgatatatgatcttggtcgttattttgacccgtactgtgtgatgatgggtagctcacccaggttcaacatgtatgggaatgagtttggaatgggaaaggcagttgcacttagaagtgggtatgccaacaaatttgatggaaaagtaacatcatacccaggccatgaaggaggaggaagcgtagatttggaagtgtgtctttcgccagctgtaatgagtgcactggaatcggacgaggagttcatgaatattgctctagtttctgtttacaatcctctctagtcattattcactgttacttccatcgcccccataataatcatttgtcctagaataatccgttatctttaattagtattattttaaaatatatcatgttaatgtgttttatgtattgtgaattcatatatcatataataacaacacgtgatttattttgt

SEQ ID NO: 55526 - protein, 471 aa, Glycine max
  peptide (1)..(471): Ceres Seq. ID no. 14303791
  misc_feature (17)..(460): Pfam Name: Transferase family Pfam Description: Transferase family
  misc_feature (276)..(469): Homolog of NCBI NO: 15240918 NR Description: transferase family [Arabidopsis thaliana]
  misc_feature (17)..(275): Homolog of NCBI NO: 15240918 NR Description: transferase family [Arabidopsis thaliana]
  misc_feature (277)..(460): Homolog of NCBI NO: 21666314 NR Description: AER [Nicotiana tabacum]
  misc_feature (20)..(273): Homolog of NCBI NO: 21666314 NR Description: AER [Nicotiana tabacum]
  misc_feature (13)..(459): Homolog of NCBI NO: 34899602 NR Description: N-hydroxycinnamoyl benzoyltransferase-like
  misc_feature (12)..(458): Homolog of NCBI NO: 24413968 NR Description: N-hydroxycinnamoyl/benzoyltransferase-like
  misc_feature (12)..(462): Homolog of NCBI NO: 15241433 NR Description: hydroxycinnamoyl benzoyltransferase-related
  misc_feature (12)..(462): Homolog of NCBI NO: 15241431 NR Description: hydroxycinnamoyl benzoyltransferase-related
  misc_feature (12)..(462): Homolog of NCBI NO: 15240871 NR Description: hydroxycinnamoyl benzoyltransferase-related
  misc_feature (11)..(462): Homolog of NCBI NO: 15239072 NR Description: hydroxycinnamoyl benzoyltransferase-related
SLTSSTLCRTMSTPPVVERVSECFIKPQHSNHESNQICYLTPWDIAMLSAHYIQKGLLFKKPSSPLVSHNNFIENLLQKLKHSLSLTLFHFYPLAGRLVTHQTHDPPFYAVFVDCNNSDGARFIHATLDMTISDILSPVDVPPIVQSLFDHHKAVNHDGHTMPLLSVQVTEFVDGVFIGCSMNHTLGDGTSYWNFFNTWSQIFQVQGHEHDVPISHPPIHNRWFPEGCGPLINLPFKHHDDFINRYETPLLRERIFHFSAESIAKLKAKANSECNTTKISSFQSLSALVWRCITRARRLPYDQRTSCKLSANNRTRMEPPLPQEYFGNSIYTLNAGTATSGKLLENGIGWAAWKLHKSVVNHNDRAVLETLKEWLESPLIYDLGRYFDPYCVMMGSSPRFNMYGNEFGMGKAVALRSGYANKFDGKVTSYPGHEGGGSVDLEVCLSPAVMSALESDEEFMNIALVSVYNPL

SEQ ID NO: 55527 - protein, 461 aa, Glycine max
  peptide (1)..(461): Ceres Seq. ID no. 14303792
  misc_feature (7)..(450): Pfam Name: Transferase family Pfam Description: Transferase family
  misc_feature (266)..(459): Homolog of NCBI NO: 15240918 NR Description: transferase family [Arabidopsis thaliana]
  misc_feature (7)..(265): Homolog of NCBI NO: 15240918 NR Description: transferase family [Arabidopsis thaliana]
  misc_feature (267)..(450): Homolog of NCBI NO: 21666314 NR Description: AER [Nicotiana tabacum]
  misc_feature (10)..(263): Homolog of NCBI NO: 21666314 NR Description: AER [Nicotiana tabacum]
  misc_feature (3)..(449): Homolog of NCBI NO: 34899602 NR Description: N-hydroxycinnamoyl benzoyltransferase-like
  misc_feature (2)..(448): Homolog of NCBI NO: 24413968 NR Description: N-hydroxycinnamoyl/benzoyltransferase-like
  misc_feature (2)..(452): Homolog of NCBI NO: 15241433 NR Description: hydroxycinnamoyl benzoyltransferase-related
  misc_feature (2)..(452): Homolog of NCBI NO: 15241431 NR Description: hydroxycinnamoyl benzoyltransferase-related
  misc_feature (2)..(452): Homolog of NCBI NO: 15240871 NR Description: hydroxycinnamoyl benzoyltransferase-related
  misc_feature (1)..(452): Homolog of NCBI NO: 15239072 NR Description: hydroxycinnamoyl benzoyltransferase-related
MSTPPVVERVSECFIKPQHSNHESNQICYLTPWDIAMLSAHYIQKGLLFKKPSSPLVSHNNFIENLLQKLKHSLSLTLFHFYPLAGRLVTHQTHDPPFYAVFVDCNNSDGARFIHATLDMTISDILSPVDVPPIVQSLFDHHKAVNHDGHTMPLLSVQVTEFVDGVFIGCSMNHTLGDGTSYWNFFNTWSQIFQVQGHEHDVPISHPPIHNRWFPEGCGPLINLPFKHHDDFINRYETPLLRERIFHFSAESIAKLKAKANSECNTTKISSFQSLSALVWRCITRARRLPYDQRTSCKLSANNRTRMEPPLPQEYFGNSIYTLNAGTATSGKLLENGIGWAAWKLHKSVVNHNDRAVLETLKEWLESPLIYDLGRYFDPYCVMMGSSPRFNMYGNEFGMGKAVALRSGYANKFDGKVTSYPGHEGGGSVDLEVCLSPAVMSALESDEEFMNIALVSVYNPL

SEQ ID NO: 55528 - protein, 425 aa, Glycine max
  peptide (1)..(425): Ceres Seq. ID no. 14303793
  misc_feature (1)..(414): Pfam Name: Transferase family Pfam Description: Transferase family
  misc_feature (230)..(423): Homolog of NCBI NO: 15240918 NR Description: transferase family [Arabidopsis thaliana]
  misc_feature (1)..(229): Homolog of NCBI NO: 15240918 NR Description: transferase family [Arabidopsis thaliana]
  misc_feature (231)..(414): Homolog of NCBI NO: 21666314 NR Description: AER [Nicotiana tabacum]
  misc_feature (1)..(227): Homolog of NCBI NO: 21666314 NR Description: AER [Nicotiana tabacum]
  misc_feature (1)..(413): Homolog of NCBI NO: 34899602 NR Description: N-hydroxycinnamoyl benzoyltransferase-like
  misc_feature (1)..(412): Homolog of NCBI NO: 24413968 NR Description: N-hydroxycinnamoyl/benzoyltransferase-like
  misc_feature (1)..(416): Homolog of NCBI NO: 15241433 NR Description: hydroxycinnamoyl benzoyltransferase-related
  misc_feature (1)..(416): Homolog of NCBI NO: 15241431 NR Description: hydroxycinnamoyl benzoyltransferase-related
  misc_feature (1)..(416): Homolog of NCBI NO: 15240871 NR Description: hydroxycinnamoyl benzoyltransferase-related
  misc_feature (1)..(416): Homolog of NCBI NO: 15239072 NR Description: hydroxycinnamoyl benzoyltransferase-related
MLSAHYIQKGLLFKKPSSPLVSHNNFIENLLQKLKHSLSLTLFHFYPLAGRLVTHQTHDPPFYAVFVDCNNSDGARFIHATLDMTISDILSPVDVPPIVQSLFDHHKAVNHDGHTMPLLSVQVTEFVDGVFIGCSMNHTLGDGTSYWNFFNTWSQIFQVQGHEHDVPISHPPIHNRWFPEGCGPLINLPFKHHDDFINRYETPLLRERIFHFSAESIAKLKAKANSECNTTKISSFQSLSALVWRCITRARRLPYDQRTSCKLSANNRTRMEPPLPQEYFGNSIYTLNAGTATSGKLLENGIGWAAWKLHKSVVNHNDRAVLETLKEWLESPLIYDLGRYFDPYCVMMGSSPRFNMYGNEFGMGKAVALRSGYANKFDGKVTSYPGHEGGGSVDLEVCLSPAVMSALESDEEFMNIALVSVYNPL

SEQ ID NO: 55529 - DNA, 1619 bp, Glycine max
  misc_feature (1)..(1619): Ceres Seq. ID no. 14310427
agaatctgtgacacagtctgatgggattattggtatacaaagcactgagacagtcaatgcaagaatggaagagggatatcatcatgcatccacatctacacagaccagtccagatgaaaatgggatgaaaaatattcaaccagagcaactggaaatacaagaaatggggagaagagagagtgcattaggcaaagatatagagcaacaacctaccctcctagaggagtatcacttgaggaataaatcagaaagaagccctgcaacttatatatctagtcatgactttactgagaatagccattttcctgaaggaaaagaggcacttaatggtgctatggaggagttaaaagatggttacatttctgagaatgggaaactggttcttgatttcttgcaagccatccatgctgcagagaaaaggcaggctgacttagatgcacatgcttttaacgaagagaagaaagtgttaaaggaaaaatatgaaaagaagttgaaagatgcagctgccagagaacttatgctcgctgaggaggctgcaatgttggacagggagctaaaaagagagagagcaaaagcatcccttgctatcaagtcacttcaagaaaagatggaagagaaactgaagacagaactagaacaaaaggagattgaaactgatttgaagtttaaacaaactcaggaattagcaaaggcagagttaaatgcagccatagcaaatgagaaggcagctcaaattgaaaaaatggctgaagcaaatgttaatataaatgccttatgcatggcattttatgctcgatctgaagaagctcgtcaaagtcatgctacacaaaattttgctttgagagcacttgcattggaagatgcactatctaaaggacttccaattgagacagaaatagcatctttgcagtcttatcttggaagcacagataaagattcagttttggatttggtgctagcatcccttcctgaagaaacacgaagcaacggcacagacacacaactgcagttaaagcagaagtttgatgccttaaaaggtagtgtaagacacttcagcttcttcccaccgggagggggaggtatgttggcacattctttggcacatgtagcatcctggttgaaggttagggaagacaatcaatctggtgatgggatcgaatctgtgatcaataaagttgaagtttatttggcagaaggaaaacttgctgaagcagcagcttgtctagaagaaagtgtgagaggcacacaagctgcagaaattgttgcaggttgggtgaggcaagcaagaaacagggctatttctgagcaagcagtgctgcttcttcaatcctatgccaattcccttagctttacatgattctcaaattttgaatatttacaaaaccatgtgaattcaatacatggcagagattatctttggcggattattccaacgggaattattgacctatgaggaaaaaaaataacgtttttgtttcataggagcagaaattagttgattctgtgaattctatgcaactccagtggcattggagttttgaccgaagtgatatcaggctctgtataattttgccttttgttttacctgaataacagaaatgttgcattgcaacatattg

SEQ ID NO: 55530 - protein, 451 aa, Glycine max
  peptide (1)..(451): Ceres Seq. ID no. 14310428
  misc_feature (49)..(345): Pfam Name: Myosin tail Pfam Description: Myosin tail
  misc_feature (141)..(445): Homolog of NCBI NO: 32409187 NR Description: hypothetical protein [Neurospora crassa]
  misc_feature (150)..(445): Homolog of NCBI NO: 40739918 NR Description: hypothetical protein AN3843.2 [Aspergillus
  misc_feature (18)..(451): Homolog of NCBI NO: 7487220 NR Description: hypothetical protein T19P19.80 - Arabidopsis
  misc_feature (102)..(451): Homolog of NCBI NO: 32492176 NR Description: OSJNBb0034I13.6 [Oryza sativa (japonica
  misc_feature (59)..(451): Homolog of NCBI NO: 18420505 NR Description: expressed protein [Arabidopsis thaliana]
ESVTQSDGIIGIQSTETVNARMEEGYHHASTSTQTSPDENGMKNIQPEQLEIQEMGRRESALGKDIEQQPTLLEEYHLRNKSERSPATYISSHDFTENSHFPEGKEALNGAMEELKDGYISENGKLVLDFLQAIHAAEKRQADLDAHAFNEEKKVLKEKYEKKLKDAAARELMLAEEAAMLDRELKRERAKASLAIKSLQEKMEEKLKTELEQKEIETDLKFKQTQELAKAELNAAIANEKAAQIEKMAEANVNINALCMAFYARSEEARQSHATQNFALRALALEDALSKGLPIETEIASLQSYLGSTDKDSVLDLVLASLPEETRSNGTDTQLQLKQKFDALKGSVRHFSFFPPGGGGMLAHSLAHVASWLKVREDNQSGDGIESVINKVEVYLAEGKLAEAAACLEESVRGTQAAEIVAGWVRQARNRAISEQAVLLLQSYANSLSFT

SEQ ID NO: 55531 - protein, 430 aa, Glycine max
  peptide (1)..(430): Ceres Seq. ID no. 14310429
  misc_feature (28)..(324): Pfam Name: Myosin tail Pfam Description: Myosin tail
  misc_feature (120)..(424): Homolog of NCBI NO: 32409187 NR Description: hypothetical protein [Neurospora crassa]
  misc_feature (129)..(424): Homolog of NCBI NO: 40739918 NR Description: hypothetical protein AN3843.2 [Aspergillus
  misc_feature (1)..(430): Homolog of NCBI NO: 7487220 NR Description: hypothetical protein T19P19.80 - Arabidopsis
  misc_feature (81)..(430): Homolog of NCBI NO: 32492176 NR Description: OSJNBb0034I13.6 [Oryza sativa (japonica
  misc_feature (38)..(430): Homolog of NCBI NO: 18420505 NR Description: expressed protein [Arabidopsis thaliana]
MEEGYHHASTSTQTSPDENGMKNIQPEQLEIQEMGRRESALGKDIEQQPTLLEEYHLRNKSERSPATYISSHDFTENSHFPEGKEALNGAMEELKDGYISENGKLVLDFLQAIHAAEKRQADLDAHAFNEEKKVLKEKYEKKLKDAAARELMLAEEAAMLDRELKRERAKASLAIKSLQEKMEEKLKTELEQKEIETDLKFKQTQELAKAELNAAIANEKAAQIEKMAEANVNINALCMAFYARSEEARQSHATQNFALRALALEDALSKGLPIETEIASLQSYLGSTDKDSVLDLVLASLPEETRSNGTDTQLQLKQKFDALKGSVRHFSFFPPGGGGMLAHSLAHVASWLKVREDNQSGDGIESVINKVEVYLAEGKLAEAAACLEESVRGTQAAEIVAGWVRQARNRAISEQAVLLLQSYANSLSFT

SEQ ID NO: 55532 - protein, 410 aa, Glycine max
  peptide (1)..(410): Ceres Seq. ID no. 14310430
  misc_feature (8)..(304): Pfam Name: Myosin tail Pfam Description: Myosin tail
  misc_feature (100)..(404): Homolog of NCBI NO: 32409187 NR Description: hypothetical protein [Neurospora crassa]
  misc_feature (109)..(404): Homolog of NCBI NO: 40739918 NR Description: hypothetical protein AN3843.2 [Aspergillus
  misc_feature (1)..(410): Homolog of NCBI NO: 7487220 NR Description: hypothetical protein T19P19.80 - Arabidopsis
  misc_feature (61)..(410): Homolog of NCBI NO: 32492176 NR Description: OSJNBb0034I13.6 [Oryza sativa (japonica
  misc_feature (18)..(410): Homolog of NCBI NO: 18420505 NR Description: expressed protein [Arabidopsis thaliana]
MKNIQPEQLEIQEMGRRESALGKDIEQQPTLLEEYHLRNKSERSPATYISSHDFTENSHFPEGKEALNGAMEELKDGYISENGKLVLDFLQAIHAAEKRQADLDAHAFNEEKKVLKEKYEKKLKDAAARELMLAEEAAMLDRELKRERAKASLAIKSLQEKMEEKLKTELEQKEIETDLKFKQTQELAKAELNAAIANEKAAQIEKMAEANVNINALCMAFYARSEEARQSHATQNFALRALALEDALSKGLPIETEIASLQSYLGSTDKDSVLDLVLASLPEETRSNGTDTQLQLKQKFDALKGSVRHFSFFPPGGGGMLAHSLAHVASWLKVREDNQSGDGIESVINKVEVYLAEGKLAEAAACLEESVRGTQAAEIVAGWVRQARNRAISEQAVLLLQSYANSLSFT

SEQ ID NO: 55533 - DNA, 942 bp, Glycine max
  misc_feature (1)..(942): Ceres Seq. ID no. 15170072
aacagaccttctacttttgcgaacagctgttagacttgagttgagtcacagtcatcgtctgttcaggatcatattcacgccccctctctctctctctctctctctctctctcttactttgtgtctttctatctctctcttcaattccaaaaccctacccccatccaattccaattcaccctcaatcatgggttctgaaggttccactgtcgtcgttcctaggaacttcagattattggaagagcttgagagaggtgagaagggaattggagatggaactgttagctatggaatggatgatgctgatgatatctacatgcagtcctggactgggactattattggtccccctggtactgttcatgaagggcgtatataccagctgaaattattttgtggcaaggattatccagacaatccaccaactgttagatttcagactaggattaacatgacttgtgtcaaccaagaaactggagtggttgagccacatttgtttcctatgcttgctaattggcaaagagagtgtacaatggaagacattttgatgcaattgaagaaagaaatgatatctccacaaaatcggaagctagctcagccacctgaaggcaatgaagatggcaggattgaccaaaaggggcttgctctgagatgttgtgtcatgtaattcaggtgagaaccaaagaataataatgtaaataattcaatagataatccttttgtgggttaactcatttataaatgtaattatggaccattcgcttatgtaacatggagcaattaaagagcgactacgaatccttgaaaatttatagtcaatcgtgttgaagctgattttactgtggtttctaatttggaagtgtgtatacattcatctgtgtaggtgtgaaccgtatgcacactttgatcctaatattgtgggataacattcaatttatcattg

SEQ ID NO: 55534 - protein, 159 aa, Glycine max
  peptide (1)..(159): Ceres Seq. ID no. 15170073
  misc_feature (1)..(141): Homolog of NCBI NO: 32488709 NR Description: OSJNBa0088H09.10 [Oryza sativa (japonica
  misc_feature (1)..(141): Homolog of NCBI NO: 30686662 NR Description: ubiquitin-conjugating enzyme family [Arabidopsis
  misc_feature (1)..(141): Homolog of NCBI NO: 18404032 NR Description: ubiquitin-conjugating enzyme family [Arabidopsis
  misc_feature (1)..(141): Homolog of NCBI NO: 30693656 NR Description: ubiquitin-conjugating enzyme family [Arabidopsis
  misc_feature (1)..(141): Homolog of NCBI NO: 18409633 NR Description: ubiquitin-conjugating enzyme family [Arabidopsis
  misc_feature (1)..(159): Homolog of NCBI NO: 25326240 NR Description: protein F26F24.10 [imported] - Arabidopsis
  misc_feature (1)..(159): Homolog of NCBI NO: 21593918 NR Description: E2, ubiquitin-conjugating enzyme, putative
  misc_feature (1)..(159): Homolog of NCBI NO: 18409647 NR Description: ubiquitin-conjugating enzyme family [Arabidopsis
  misc_feature (10)..(159): Homolog of NCBI NO: 13324790 NR Description: putative DNA-binding protein [Oryza sativa]
  misc_feature (1)..(159): Homolog of NCBI NO: 18395221 NR Description: ubiquitin-conjugating enzyme family [Arabidopsis
MGSEGSTVVVPRNFRLLEELERGEKGIGDGTVSYGMDDADDIYMQSWTGTIIGPPGTVHEGRIYQLKLFCGKDYPDNPPTVRFQTRINMTCVNQETGVVEPHLFPMLANWQRECTMEDILMQLKKEMISPQNRKLAQPPEGNEDGRIDQKGLALRCCVM

SEQ ID NO: 55535 - protein, 127 aa, Glycine max
  peptide (1)..(127): Ceres Seq. ID no. 15170074
TDLLLLRTAVRLELSHSHRLFRIIFTPPLSLSLSLSLLLCVFLSLSSIPKPYPHPIPIHPQSWVLKVPLSSFLGTSDYWKSLREVRRELEMELLAMEWMMLMISTCSPGLGLLLVPLVLFMKGVYTS

SEQ ID NO: 55536 - protein, 124 aa, Glycine max
  peptide (1)..(124): Ceres Seq. ID no. 15170075
  misc_feature (1)..(106): Homolog of NCBI NO: 32488709 NR Description: OSJNBa0088H09.10 [Oryza sativa (japonica
  misc_feature (1)..(106): Homolog of NCBI NO: 30686662 NR Description: ubiquitin-conjugating enzyme family [Arabidopsis
  misc_feature (1)..(106): Homolog of NCBI NO: 18404032 NR Description: ubiquitin-conjugating enzyme family [Arabidopsis
  misc_feature (1)..(106): Homolog of NCBI NO: 30693656 NR Description: ubiquitin-conjugating enzyme family [Arabidopsis
  misc_feature (1)..(106): Homolog of NCBI NO: 18409633 NR Description: ubiquitin-conjugating enzyme family [Arabidopsis
  misc_feature (1)..(124): Homolog of NCBI NO: 25326240 NR Description: protein F26F24.10 [imported] - Arabidopsis
  misc_feature (1)..(124): Homolog of NCBI NO: 21593918 NR Description: E2, ubiquitin-conjugating enzyme, putative
  misc_feature (1)..(124): Homolog of NCBI NO: 18409647 NR Description: ubiquitin-conjugating enzyme family [Arabidopsis
  misc_feature (1)..(124): Homolog of NCBI NO: 13324790 NR Description: putative DNA-binding protein [Oryza sativa]
  misc_feature (1)..(124): Homolog of NCBI NO: 18395221 NR Description: ubiquitin-conjugating enzyme family [Arabidopsis
MDDADDIYMQSWTGTIIGPPGTVHEGRIYQLKLFCGKDYPDNPPTVRFQTRINMTCVNQETGVVEPHLFPMLANWQRECTMEDILMQLKKEMISPQNRKLAQPPEGNEDGRIDQKGLALRCCVM

SEQ ID NO: 55537 - DNA, 539 bp, Glycine max
  misc_feature (1)..(539): Ceres Seq. ID no. 15226994
tcagctacgtaggccccccccccatgcttcatgttgcgtaaatgggtatcctctgaacatgaaagttctcagttagaagatgagaatgtgcagtcacaagatggtagtagtgtcaaatcttctggacttgtagaaaatgctgaagttcaaaatgagcgatccaagtccttgtcaatttttggagttttaatttccccaaagcttcgagcctcccagctgtcatttgagaaagcactagagacactcatagaaatagccaatatgcaatcgtcattgttatattcttttcaccaacttcgaagggtggaagataccaaagaataaaaaagtaccagctctttcaggtgtttgtgtcaaataataaattactgcggttgacaggctgacaatatcacaaggggttacattattttcctaaataaaattctcttatctttccctccacctaaagaggagagagacaagaaaattactagcaaagtctttggaatatgttattgattttatgaggaactaatgaagatgagtttttttttccc

SEQ ID NO: 55538 - protein, 97 aa, Glycine max
  peptide (1)..(97): Ceres Seq. ID no. 15226995
  misc_feature (10)..(90): Homolog of NCBI NO: 32488295 NR Description: OSJNBb0065L13.4 [Oryza sativa (japonica
  misc_feature (12)..(89): Homolog of NCBI NO: 15218031 NR Description: expressed protein [Arabidopsis thaliana]
MLRKWVSSEHESSQLEDENVQSQDGSSVKSSGLVENAEVQNERSKSLSIFGVLISPKLRASQLSFEKALETLIEIANMQSSLLYSFHQLRRVEDTKE

SEQ ID NO: 55539 - DNA, 2640 bp, Glycine max
  misc_feature (1)..(2640): Ceres Seq. ID no. 15176110
gagtgaacaaattccgcggcatacaatccagccgcaagggcatctgggtattgcaggaagtgaattgcccttctgtattgatagaagcagggttcatgtccaacccatctgatatgtccaatctgaagagcactgcttaccagcagaaaatggccggcgctatattgaccggtatccagcaatatttatcggctcatgaaaatcaaaccaccttcattccggtagatactaccatagaagtgaaagtaaaagatacggctgctcatcctttgtttgtagttgacggagaaaaaatgggtcggaagggtttgaaagaattaaaactggatccaaatgatattgacaatattagtgttttaaaagatgaggccgcctttaaaaagtatggcgaggaaggcaaaaacggagttgtagagatcaccactaaaaagcaagtagctgactctacaacgacaaagcagcatagtaaagctgatctgatgatgaaaaaattgaatgagctgaaaaaagataatgagaaatcttatttcgagattgatggtaaatccgtcatcactaccaaaagcgggcagacggtttggatagaagttgtcacagacctggtattggtagacggaaagcgggtgagtgttgacgaacttaacacatcatacaagcgaaatgattttgttgaggccgctggaaacgattattcaaaaaaataccacaaaggaatattgttactatccacacgcacacattcaattaaagaaatacaaaaaatgctggcagtaaactaaactgctgatcattcgattattttttcttctttcgcttctttgaaggatggtatatttcaatagcttgtttgataagttgcaatagttcctcttgctgaatattagcaggatcaacaacaggttcagcgaatgccagcactttctctaaagtgaggtcttttgtataaggagaacctttcaatacagcgccgaacatgcttactgccgcagcgaattggtaagcatgttcggctttttcaattgctatgggttgattagatgctgtaaatgcatgatgcataaaagatgcgctgtcgggaagctggtagcgcaaatcaatggaggccaggttttccgttgatgaatgagtagttgccggttctatttcaaacaaagccatcagggcatgcccactgccgatttctccaccttccaattcacgggtactgtcgttcaaagcggttctcttgttgtcaaagccaatcaggcggtaggttttgacaaggttgggattgaagcgaacgataaccgttgcattgttggcaacagcatataatgtttgtgtgaattcagttaccaatactttttgtgcttcgcctaaatgatccagataagcaaaattgccattgccttttttagccagcacttccagcttgctgtctttataattgcccatgcctactcccaggcaagtaaggtaaataccgcttttgcgatattgaacaatcaggtcttccagctctttttccgatgattgtcccacattgaaatccccatcggtagccagtatcaccctattgttgccattgcgcatataagtgtgcgaagccaatgcataagcctgctggatggctccggcgcccggtgtatcacccgcagcactcagcgaatcgatgactgctttgatctttttcttttcagcgcctcctgttggcgccaatgcaatgcgcacattgccgccgtaagtcatgatactgatggtatcctgcggacgtaaattatctgccagtaacttgaatgccgactgcagcaaggggagccggttgggcttatccatcgagccagacacatcgatcaaaaaaacaagattggaaggaggcacactgtcaagttgcaattgcggtgcatgaatatgaaggtacagcagttgatgttcctgctgccaggggcaggatgtaacggttgtctggcaggtaaaggcacgggaattttcagcagcagggtaactgaaataattgagcatttcttcaatgcggatcgcatgcacaggcacccgcatattattgtgaatgaaacgacggatattactataagaagctttgtcgatgttcagtgcaaaacctgtttccggatattgcgatgcctgaataaaacggttttccataatgtcgctgtagctctcgcccattacagaagcaggtacaactggttctgtttggagatggttggtgagagagctgagcctggccctgtaaaaatttgccaactcaggctgcattttcaaaacaaagaactggggcttcctggtatcgatggcagtacgcagggtatcataaccttcgtaagacaatgtgatggtatcaatgagcctggaagaagggatgccaaagctgcccaggttgccggtataatatggataagtgccggtgcttgccaattgtatgcgtacgccctgtaataaacgcccctgctcatccttcacttctccacgcaggtaattctgccccatgagcaggcagggaagtaaacaagcaagtaataaccaggcgacagctttcatctgtatgcatggatttactacaatttactgaaaaaagcgcgtatttacacgctaggcatctgttttgagctggtataattcgcggatattcctgcccaggcc

SEQ ID NO: 55540 - protein, 258 aa, Glycine max
  peptide (1)..(258): Ceres Seq. ID no. 15176111
  misc_feature (1)..(63): Pfam Name: N-acetylmuramoyl-L-alanine amidase Pfam Description: N-acetylmuramoyl-L-alanine amidase
VNKFRGIQSSRKGIWVLQEVNCPSVLIEAGFMSNPSDMSNLKSTAYQQKMAGAILTGIQQYLSAHENQTTFIPVDTTIEVKVKDTAAHPLFVVDGEKMGRKGLKELKLDPNDIDNISVLKDEAAFKKYGEEGKNGVVEITTKKQVADSTTTKQHSKADLMMKKLNELKKDNEKSYFEIDGKSVITTKSGQTVWIEVVTDLVLVDGKRVSVDELNTSYKRNDFVEAAGNDYSKKYHKGILLLSTRTHSIKEIQKMLAVN

SEQ ID NO: 55541 - protein, 227 aa, Glycine max
  peptide (1)..(227): Ceres Seq. ID no. 15176112
MSNPSDMSNLKSTAYQQKMAGAILTGIQQYLSAHENQTTFIPVDTTIEVKVKDTAAHPLFVVDGEKMGRKGLKELKLDPNDIDNISVLKDEAAFKKYGEEGKNGVVEITTKKQVADSTTTKQHSKADLMMKKLNELKKDNEKSYFEIDGKSVITTKSGQTVWIEVVTDLVLVDGKRVSVDELNTSYKRNDFVEAAGNDYSKKYHKGILLLSTRTHSIKEIQKMLAVN

SEQ ID NO: 55542 - protein, 221 aa, Glycine max
  peptide (1)..(221): Ceres Seq. ID no. 15176113
MSNLKSTAYQQKMAGAILTGIQQYLSAHENQTTFIPVDTTIEVKVKDTAAHPLFVVDGEKMGRKGLKELKLDPNDIDNISVLKDEAAFKKYGEEGKNGVVEITTKKQVADSTTTKQHSKADLMMKKLNELKKDNEKSYFEIDGKSVITTKSGQTVWIEVVTDLVLVDGKRVSVDELNTSYKRNDFVEAAGNDYSKKYHKGILLLSTRTHSIKEIQKMLAVN

SEQ ID NO: 55543 - DNA, 1006 bp, Glycine max
  misc_feature (1)..(1006): Ceres Seq. ID no. 15169858
aattcacttccgctaacacgcaattcacaaatcacaaatcacaaatcacaaatcacaaaggtcttttcatttctgctgattatcctcttcagccgccatggaatcggaggctgtcttgaacctcttcgattcttgctggtttgaggttaacattttgaagacaaattcaagtcctcacatatcaattacaagttataacgaaagtttagattatgagataaaagaagaagaagaagaagaagaagaaccaaagctacccttgatccgaaccagccacaccagatccatgagtgaccaattatccatgataacgacaagcttcaaccatgattctctgtcaccagactcagtgcttcttctccatccaaagctccaaatcatactctcaggaaaagaagccactgactcagaatctgatgaggtgttgtgtcccaagaagaacaaaaaaatctcaagcaatggaactaggaagaggagggagagcaagagtttgtcagaccttgaatttgaggagctaaaagggttcatggatctgggttttgttttctcagaggaggataaagactcaagcttggcttcaattattcctgggttgcaaaggctagggaaaaaggaagaggaaaaagaagaagatgatgattgtgatgagataagtgttccaaggccttacctttctgaagcatgggaggttcaggaatgtgataggagaaaaaaagagaaccctttggtgaattggaaaatgcctgctatcaacaatgaaactgacatgaaagaaagtctcagatggtgggctcacactgttgcttccactgtcagatgatgatgaacttcttcataatccaaaaattttcttctttttctttcgtttcatatatacattttccttgttcttttttcaatttttctatgtatttattcccttttctaaaattttttctggaatctggcattccacaaaatttgttacatgtaattttagataaaaagagaggaaatttcattttgc

SEQ ID NO: 55544 - protein, 240 aa, Glycine max
  peptide (1)..(240): Ceres Seq. ID no. 15169859
  misc_feature (58)..(240): Homolog of NCBI NO: 30689349 NR Description: expressed protein [Arabidopsis thaliana]
  misc_feature (130)..(240): Homolog of NCBI NO: 34904512 NR Description: OSJNBa0010K01.19 [Oryza sativa (japonica
  misc_feature (1)..(240): Homolog of NCBI NO: 15227995 NR Description: expressed protein [Arabidopsis thaliana]
MESEAVLNLFDSCWFEVNILKTNSSPHISITSYNESLDYEIKEEEEEEEEPKLPLIRTSHTRSMSDQLSMITTSFNHDSLSPDSVLLLHPKLQIILSGKEATDSESDEVLCPKKNKKISSNGTRKRRESKSLSDLEFEELKGFMDLGFVFSEEDKDSSLASIIPGLQRLGKKEEEKEEDDDCDEISVPRPYLSEAWEVQECDRRKKENPLVNWKMPAINNETDMKESLRWWAHTVASTVR

SEQ ID NO: 55545 - protein, 177 aa, Glycine max
  peptide (1)..(177): Ceres Seq. ID no. 15169860
  misc_feature (1)..(177): Homolog of NCBI NO: 30689349 NR Description: expressed protein [Arabidopsis thaliana]
  misc_feature (67)..(177): Homolog of NCBI NO: 34904512 NR Description: OSJNBa0010K01.19 [Oryza sativa (japonica
  misc_feature (1)..(177): Homolog of NCBI NO: 15227995 NR Description: expressed protein [Arabidopsis thaliana]
MSDQLSMITTSFNHDSLSPDSVLLLHPKLQIILSGKEATDSESDEVLCPKKNKKISSNGTRKRRESKSLSDLEFEELKGFMDLGFVFSEEDKDSSLASIIPGLQRLGKKEEEKEEDDDCDEISVPRPYLSEAWEVQECDRRKKENPLVNWKMPAINNETDMKESLRWWAHTVASTVR

SEQ ID NO: 55546 - protein, 171 aa, Glycine max
  peptide (1)..(171): Ceres Seq. ID no. 15169861
  misc_feature (1)..(171): Homolog of NCBI NO: 30689349 NR Description: expressed protein [Arabidopsis thaliana]
  misc_feature (61)..(171): Homolog of NCBI NO: 34904512 NR Description: OSJNBa0010K01.19 [Oryza sativa (japonica
  misc_feature (1)..(171): Homolog of NCBI NO: 15227995 NR Description: expressed protein [Arabidopsis thaliana]
MITTSFNHDSLSPDSVLLLHPKLQIILSGKEATDSESDEVLCPKKNKKISSNGTRKRRESKSLSDLEFEELKGFMDLGFVFSEEDKDSSLASIIPGLQRLGKKEEEKEEDDDCDEISVPRPYLSEAWEVQECDRRKKENPLVNWKMPAINNETDMKESLRWWAHTVASTVR

SEQ ID NO: 55547 - DNA, 1782 bp, Glycine max
  misc_feature (1)..(1782): Ceres Seq. ID no. 15176457
cgagacttcttttttcttgtgatgacaattcacaaaacaccaaagttaatcaaacaacgttctatgatggttgtgggatgccgacaccattaacaaacgggaagtgcggtttaggacctccatgatcaacaagaacatgctagagctactcagctagttactattttttttatctgtaagaattgaagacaaattatctcttacatgctcaatagactaagctagctagtataagaaaaggccctctctgccctactcctttttcactacactttctcacccactacactacactatgtttccccagccatggatcttcttgatagctaccatcattgcaatttcactgttcatgtcctcactggttgagtcatttccagtagctgataaggtcaaatccttgcctgaacagtcacctgtttccttccaacaatttgctggctttgtacccgttgatgacaagaaccagagagctcttttttactactttgttgaagcagaaaccaaccctgcttcaaagcctctagttctctggctcaatggagggcctggttgtacatctgtaggagttggagccttcacagaacatggtccttttgttacaaatcaaggagaagctattgagaaaaatcagtatagttggaacaaagaggcaaacattttgtacctagagtcaccagcaggcgttggattctcttactctctcaatttgtcattttataaaacactgaacgatgaaatcacagcccgagacagtctggttttcctgcggcgctggtttgccaagttcccagaatacaagaatagagatttttatataacgggagagagttatggaggtcactatgtacctcaacttgctgaactcataattaagagtaaagtgaatttcaacctaaagggcatagcaataggaaaccctcttctggatttcgacactgatatgaatgcagtcgatgaatattactggtctcatggaataataagtgattatgcatacaaaatcaggacctctctatgtaactcgtctagagtattaagagaatacttcagtggccaaatttccaaagattgtcttgttgcagctcaaaaagtctcagaagaatattcttttacaaatttcatcgacccatattacgttgttggggagaaatgtctttcttacaatgtttctcaggcaggttttcttagggagacgctaaattcagggatgtttcagtttaggaactctcattatgtgcttcaaacagaagaacctgaccagcaagttgatgagtgtaatttgaaatattcagagatgtacttgaacaggaaagatgtgcagaaggctctccatgcccggctggagggaaccaccaaatatcgtttgtgcagcaagattgtacaaacaaattatgacccattgaacagagagataccaacaattaatgttgtcggcttccttgtaaaatcaggtcttcgagtcatcgtatacagtggggatcaagactctgtgattccattcatgggcacgagaagattggttgatagactagcaaagacactaggacttaaaacaaccctgccttacagtgcctggtttgtggacaagcaggttggaggatggacaaaagtttatggcaatcacctcacgtacaccacaataagaggagcttcacatggcactccagctactcaaccaaagagatcttttgttttgtttaatgcgtttcttcaagggaaaccactccctaaagcatgaaaaatttaatgcttagttaataaatgtcattgccatataag

SEQ ID NO: 55548 - protein, 481 aa, Glycine max
  peptide (1)..(481): Ceres Seq. ID no. 15176458
  misc_feature (37)..(303): Pfam Name: Serine carboxypeptidase Pfam Description: Serine carboxypeptidase
  misc_feature (316)..(479): Homolog of NCBI NO: 38347156 NR Description: OSJNBa0039C07.2 [Oryza sativa (japonica
  misc_feature (31)..(295): Homolog of NCBI NO: 38347156 NR Description: OSJNBa0039C07.2 [Oryza sativa (japonica
  misc_feature (317)..(480): Homolog of NCBI NO: 25289793 NR Description: probable serine carboxypeptidase II
  misc_feature (9)..(303): Homolog of NCBI NO: 25289793 NR Description: probable serine carboxypeptidase II
  misc_feature (315)..(480): Homolog of NCBI NO: 18396647 NR Description: serine carboxypeptidase -related [Arabidopsis
  misc_feature (1)..(295): Homolog of NCBI NO: 18396647 NR Description: serine carboxypeptidase -related [Arabidopsis
  misc_feature (317)..(480): Homolog of NCBI NO: 25289785 NR Description: probable serine carboxypeptidase II
  misc_feature (1)..(303): Homolog of NCBI NO: 25289785 NR Description: probable serine carboxypeptidase II
  misc_feature (317)..(480): Homolog of NCBI NO: 30685740 NR Description: serine carboxypeptidase -related [Arabidopsis
  misc_feature (9)..(363): Homolog of NCBI NO: 30685740 NR Description: serine carboxypeptidase -related [Arabidopsis
MFPQPWIFLIATIIAISLFMSSLVESFPVADKVKSLPEQSPVSFQQFAGFVPVDDKNQRALFYYFVEAETNPASKPLVLWLNGGPGCTSVGVGAFTEHGPFVTNQGEAIEKNQYSWNKEANILYLESPAGVGFSYSLNLSFYKTLNDEITARDSLVFLRRWFAKFPEYKNRDFYITGESYGGHYVPQLAELIIKSKVNFNLKGIAIGNPLLDFDTDMNAVDEYYWSHGIISDYAYKIRTSLCNSSRVLREYFSGQISKDCLVAAQKVSEEYSFTNFIDPYYVVGEKCLSYNVSQAGFLRETLNSGMFQFRNSHYVLQTEEPDQQVDECNLKYSEMYLNRKDVQKALHARLEGTTKYRLCSKIVQTNYDPLNREIPTINVVGFLVKSGLRVIVYSGDQDSVIPFMGTRRLVDRLAKTLGLKTTLPYSAWFVDKQVGGWTKVYGNHLTYTTIRGASHGTPATQPKRSFVLFNAFLQGKPLPKA

SEQ ID NO: 55549 - protein, 462 aa, Glycine max
  peptide (1)..(462): Ceres Seq. ID no. 15176459
  misc_feature (18)..(284): Pfam Name: Serine carboxypeptidase Pfam Description: Serine carboxypeptidase
  misc_feature (297)..(460): Homolog of NCBI NO: 38347156 NR Description: OSJNBa0039C07.2 [Oryza sativa (japonica
  misc_feature (12)..(276): Homolog of NCBI NO: 38347156 NR Description: OSJNBa0039C07.2 [Oryza sativa (japonica
  misc_feature (298)..(461): Homolog of NCBI NO: 25289793 NR Description: probable serine carboxypeptidase II
  misc_feature (1)..(284): Homolog of NCBI NO: 25289793 NR Description: probable serine carboxypeptidase II
  misc_feature (296)..(461): Homolog of NCBI NO: 18396647 NR Description: serine carboxypeptidase -related [Arabidopsis
  misc_feature (1)..(276): Homolog of NCBI NO: 18396647 NR Description: serine carboxypeptidase -related [Arabidopsis
  misc_feature (298)..(461): Homolog of NCBI NO: 25289785 NR Description: probable serine carboxypeptidase II
  misc_feature (1)..(284): Homolog of NCBI NO: 25289785 NR Description: probable serine carboxypeptidase II
  misc_feature (298)..(461): Homolog of NCBI NO: 30685740 NR Description: serine carboxypeptidase -related [Arabidopsis
  misc_feature (1)..(344): Homolog of NCBI NO: 30685740 NR Description: serine carboxypeptidase -related [Arabidopsis
MSSLVESFPVADKVKSLPEQSPVSFQQFAGFVPVDDKNQRALFYYFVEAETNPASKPLVLWLNGGPGCTSVGVGAFTEHGPFVTNQGEAIEKNQYSWNKEANILYLESPAGVGFSYSLNLSFYKTLNDEITARDSLVFLRRWFAKFPEYKNRDFYITGESYGGHYVPQLAELIIKSKVNFNLKGIAIGNPLLDFDTDMNAVDEYYWSHGIISDYAYKIRTSLCNSSRVLREYFSGQISKDCLVAAQKVSEEYSFTNFIDPYYVVGEKCLSYNVSQAGFLRETLNSGMFQFRNSHYVLQTEEPDQQVDECNLKYSEMYLNRKDVQKALHARLEGTTKYRLCSKIVQTNYDPLNREIPTINVVGFLVKSGLRVIVYSGDQDSVIPFMGTRRLVDRLAKTLGLKTTLPYSAWFVDKQVGGWTKVYGNHLTYTTIRGASHGTPATQPKRSFVLFNAFLQGKPLPKA

SEQ ID NO: 55550 - protein, 265 aa, Glycine max
  peptide (1)..(265): Ceres Seq. ID no. 15176460
  misc_feature (1)..(87): Pfam Name: Serine carboxypeptidase Pfam Description: Serine carboxypeptidase
  misc_feature (100)..(263): Homolog of NCBI NO: 38347156 NR Description: OSJNBa0039C07.2 [Oryza sativa (japonica
  misc_feature (1)..(79): Homolog of NCBI NO: 38347156 NR Description: OSJNBa0039C07.2 [Oryza sativa (japonica
  misc_feature (101)..(264): Homolog of NCBI NO: 25289793 NR Description: probable serine carboxypeptidase II
  misc_feature (1)..(87): Homolog of NCBI NO: 25289793 NR Description: probable serine carboxypeptidase II
  misc_feature (99)..(264): Homolog of NCBI NO: 18396647 NR Description: serine carboxypeptidase -related [Arabidopsis
  misc_feature (1)..(79): Homolog of NCBI NO: 18396647 NR Description: serine carboxypeptidase -related [Arabidopsis
  misc_feature (101)..(264): Homolog of NCBI NO: 25289785 NR Description: probable serine carboxypeptidase II
  misc_feature (1)..(87): Homolog of NCBI NO: 25289785 NR Description: probable serine carboxypeptidase II
  misc_feature (101)..(264): Homolog of NCBI NO: 30685740 NR Description: serine carboxypeptidase -related [Arabidopsis
  misc_feature (1)..(147): Homolog of NCBI NO: 30685740 NR Description: serine carboxypeptidase -related [Arabidopsis
MNAVDEYYWSHGIISDYAYKIRTSLCNSSRVLREYFSGQISKDCLVAAQKVSEEYSFTNFIDPYYVVGEKCLSYNVSQAGFLRETLNSGMFQFRNSHYVLQTEEPDQQVDECNLKYSEMYLNRKDVQKALHARLEGTTKYRLCSKIVQTNYDPLNREIPTINVVGFLVKSGLRVIVYSGDQDSVIPFMGTRRLVDRLAKTLGLKTTLPYSAWFVDKQVGGWTKVYGNHLTYTTIRGASHGTPATQPKRSFVLFNAFLQGKPLPKA

SEQ ID NO: 55551 - DNA, 1322 bp, Glycine max
  misc_feature (1)..(1322): Ceres Seq. ID no. 15225507
tcacagatgaacaaagtcacagctagaagctctcaagaaatgtcttccaagaggcaccactttcattggacaaataaggttgggactgaggatggcgaagttcccacttcagaatcattctcaacactcatcaaagaggagaaaaaacatgaagacaaggtttctattgttgctgctgctgccgaggcaacaaaagcaccagcatctcatgtaacaaggaagaagaagctgcaagcagtggcagtctcaagaatccggtctgtgctcaccgtgttcaacaacaacagcaacaacaaccgatcctcgaactcatctttaggcctcggctcgcgcgtggtcggaaccttattcggctatcgacgagggcacgtgcactttgcattccagaaggaccccacttcccagccagccttcctcatagagctggctacgccaataagtgttcttgttcgcgagatggcgtccgggttggtcagaattgcccttgaatgtgacaaggagaaagaaacagagaagaaacatgtgaggctgcttgaagagcctctgtggaggacttactgcaatggcaagaagtgtggctttgccaccagaagagagtgtggaccaaaggattgggatgttctcaaagcagttgaaccaatttcaatgggtgctggtgttttgccaggaaataatagtaataataataataatagtggagctgaagcagtagggtcagagggtgaaatcatgtacatgagggcaaagtttgagagaattgttgggtccagagactctgaagctttctacatgatgaatcctgatagcaatggtgctcctgaactcagtgtttacttgcttagagtctagcaaccttgcaagcttgcaagatctctgtttattatacttaattttcctctttgttttgggttattggtatactacttgcttagctcttcaatcatgaacatggttgatctagtcttctccagatttttctttttttcatgtagtatattaagtgggtttacttttttttttgttagaataggtgagtaggctaagtaaggaagacggggggagatagtgggtaaccaatactttacagcattgtggtgtgtggggggtgggtcatgaaaggtgtatatgtgtaattttttttccctttccaatccttttaattaatgatatgagggatggaggttaatgcaagtcatcattgtcttggcatttttagttggttgaaatagcttttgatcatttcatcatgtcatcttattgtgaaattgccctcttcgccgttatgtactaattgcttgtcgattaatcaattaattccctat

SEQ ID NO: 55552 - protein, 282 aa, Glycine max
  peptide (1)..(282): Ceres Seq. ID no. 15225508
  misc_feature (111)..(172): Pfam Name: Protein of unknown function, DUF617 Pfam Description: Protein of unknown function, DUF617
  misc_feature (97)..(282): Homolog of NCBI NO: 15227126 NR Description: hypothetical protein [Arabidopsis thaliana]
  misc_feature (109)..(282): Homolog of NCBI NO: 15240220 NR Description: hypothetical protein [Arabidopsis thaliana]
  misc_feature (102)..(282): Homolog of NCBI NO: 18405770 NR Description: expressed protein [Arabidopsis thaliana]
  misc_feature (102)..(282): Homolog of NCBI NO: 21593037 NR Description: unknown [Arabidopsis thaliana]
  misc_feature (176)..(282): Homolog of NCBI NO: 34911646 NR Description: P0039G05.26 [Oryza sativa (japonica
  misc_feature (3)..(168): Homolog of NCBI NO: 34911646 NR Description: P0039G05.26 [Oryza sativa (japonica
  misc_feature (3)..(282): Homolog of NCBI NO: 15230862 NR Description: expressed protein [Arabidopsis thaliana]
  misc_feature (2)..(282): Homolog of NCBI NO: 11994755 NR Description: gb|AAB84348.1~gene_id:T5M7.9~similar to unknown
  misc_feature (165)..(282): Homolog of NCBI NO: 15237221 NR Description: expressed protein [Arabidopsis thaliana]
  misc_feature (11)..(172): Homolog of NCBI NO: 15237221 NR Description: expressed protein [Arabidopsis thaliana]
SQMNKVTARSSQEMSSKRHHFHWTNKVGTEDGEVPTSESFSTLIKEEKKHEDKVSIVAAAAEATKAPASHVTRKKKLQAVAVSRIRSVLTVFNNNSNNNRSSNSSLGLGSRVVGTLFGYRRGHVHFAFQKDPTSQPAFLIELATPISVLVREMASGLVRIALECDKEKETEKKHVRLLEEPLWRTYCNGKKCGFATRRECGPKDWDVLKAVEPISMGAGVLPGNNSNNNNNSGAEAVGSEGEIMYMRAKFERIVGSRDSEAFYMMNPDSNGAPELSVYLLRV

SEQ ID NO: 55553 - protein, 280 aa, Glycine max
  peptide (1)..(280): Ceres Seq. ID no. 15225509
  misc_feature (109)..(170): Pfam Name: Protein of unknown function, DUF617 Pfam Description: Protein of unknown function, DUF617
  misc_feature (95)..(280): Homolog of NCBI NO: 15227126 NR Description: hypothetical protein [Arabidopsis thaliana]
  misc_feature (107)..(280): Homolog of NCBI NO: 15240220 NR Description: hypothetical protein [Arabidopsis thaliana]
  misc_feature (100)..(280): Homolog of NCBI NO: 18405770 NR Description: expressed protein [Arabidopsis thaliana]
  misc_feature (100)..(280): Homolog of NCBI NO: 21593037 NR Description: unknown [Arabidopsis thaliana]
  misc_feature (174)..(280): Homolog of NCBI NO: 34911646 NR Description: P0039G05.26 [Oryza sativa (japonica
  misc_feature (1)..(166): Homolog of NCBI NO: 34911646 NR Description: P0039G05.26 [Oryza sativa (japonica
  misc_feature (1)..(280): Homolog of NCBI NO: 15230862 NR Description: expressed protein [Arabidopsis thaliana]
  misc_feature (1)..(280): Homolog of NCBI NO: 11994755 NR Description: gb|AAB84348.1~gene_id:T5M7.9~similar to unknown
  misc_feature (163)..(280): Homolog of NCBI NO: 15237221 NR Description: expressed protein [Arabidopsis thaliana]
  misc_feature (9)..(170): Homolog of NCBI NO: 15237221 NR Description: expressed protein [Arabidopsis thaliana]
MNKVTARSSQEMSSKRHHFHWTNKVGTEDGEVPTSESFSTLIKEEKKHEDKVSIVAAAAEATKAPASHVTRKKKLQAVAVSRIRSVLTVFNNNSNNNRSSNSSLGLGSRVVGTLFGYRRGHVHFAFQKDPTSQPAFLIELATPISVLVREMASGLVRIALECDKEKETEKKHVRLLEEPLWRTYCNGKKCGFATRRECGPKDWDVLKAVEPISMGAGVLPGNNSNNNNNSGAEAVGSEGEIMYMRAKFERIVGSRDSEAFYMMNPDSNGAPELSVYLLRV

SEQ ID NO: 55554 - protein, 269 aa, Glycine max
  peptide (1)..(269): Ceres Seq. ID no. 15225510
  misc_feature (98)..(159): Pfam Name: Protein of unknown function, DUF617 Pfam Description: Protein of unknown function, DUF617
  misc_feature (84)..(269): Homolog of NCBI NO: 15227126 NR Description: hypothetical protein [Arabidopsis thaliana]
  misc_feature (96)..(269): Homolog of NCBI NO: 15240220 NR Description: hypothetical protein [Arabidopsis thaliana]
  misc_feature (89)..(269): Homolog of NCBI NO: 18405770 NR Description: expressed protein [Arabidopsis thaliana]
  misc_feature (89)..(269): Homolog of NCBI NO: 21593037 NR Description: unknown [Arabidopsis thaliana]
  misc_feature (163)..(269): Homolog of NCBI NO: 34911646 NR Description: P0039G05.26 [Oryza sativa (japonica
  misc_feature (1)..(155): Homolog of NCBI NO: 34911646 NR Description: P0039G05.26 [Oryza sativa (japonica
  misc_feature (1)..(269): Homolog of NCBI NO: 15230862 NR Description: expressed protein [Arabidopsis thaliana]
  misc_feature (1)..(269): Homolog of NCBI NO: 11994755 NR Description: gb|AAB84348.1~gene_id:T5M7.9~similar to unknown
  misc_feature (152)..(269): Homolog of NCBI NO: 15237221 NR Description: expressed protein [Arabidopsis thaliana]
  misc_feature (1)..(159): Homolog of NCBI NO: 15237221 NR Description: expressed protein [Arabidopsis thaliana]
MSSKRHHFHWTNKVGTEDGEVPTSESFSTLIKEEKKHEDKVSIVAAAAEATKAPASHVTRKKKLQAVAVSRIRSVLTVFNNNSNNNRSSNSSLGLGSRVVGTLFGYRRGHVHFAFQKDPTSQPAFLIELATPISVLVREMASGLVRIALECDKEKETEKKHVRLLEEPLWRTYCNGKKCGFATRRECGPKDWDVLKAVEPISMGAGVLPGNNSNNNNNSGAEAVGSEGEIMYMRAKFERIVGSRDSEAFYMMNPDSNGAPELSVYLLRV

SEQ ID NO: 55555 - DNA, 1427 bp, Glycine max
  misc_feature (1)..(1427): Ceres Seq. ID no. 14302555
tctttccttctatctgacacacagagtcgccgactgactctgcactctgcaacagatgaagcacccaacatggcctcgcacctcctcttctcccttctcctctcttcctttctccaaccgttccgaattcttcaccacgcgcctctgcgcgcgtcctccgctgccgtcccctcccggcgccggcgacttctcggcgctcccctacgacgtgctggcgaagatcgccgcctccttcgacgaccccaacctccgcgcggcgtcactggtgtgccgcgcctggtgcgaggcgctgcggccgctgcgggaggccatggcgctgctcctctgggggaagcgcttcaagcacggccaccgtggcgtcggccccaaccccgatagggccctcgactccttcatcaaagccgccgcgcgcggctccgccctcgccatggtcgacgccggcctcatctactgggagcgaggcgagaagcccaaggccatggagttttatcataaggctgcggaactcggaaacccttctgcgcagtgcaatttgggactttcctatctccaagctgaacctccgaacactgagctagctgtcaaatggttacataaagcttctgtttgtgggaatgttcgtgcccagtaccagcttgcgctttgtctgcatcgcggtggtgggagggtccgtagcaatctgaaagaagctgctaaatggtatatgaaagctgcagagggtgggtatgtccgtgccatgtacaatatctccttgtgcttctcctttggggaaggactgacacgtaatcatcaactagcaagaaaatggatgaagcgggctgcggatcgtgggcatagtaaagctcaatttgagcatggacttgctctcttttctgagggagacatgatgaaggctgtggtttacttggaacttgctactcgtgctggtgaaaaaggtgctgctcatgtcaagaatgcagttcttcatcggctttcatcagcttcacgtgatcacgccatgcatctagctaacagttggcgtgcattgccatcaagttgagccaatccttatgttggtttgtgatgaagaagttgcatgaccttggtcggtggcatcagaagagtgaagtcaactaagaatacctaagcatagaaacaaggaaagcaggaggagctgactaagaaactacctttgcctgctaatcctgactatagtggttttcctataatataaagaaaactagttggtgggcgtttgtaaaagctagttgaatttgaatcctttgtaaaacgccccattgactagttgcaagttcctctcaagttccccttacaactgtgcagggtagaatgtggtgggcgttttttgtcataagtggcatctagaaaattgcaacgtcatatactcatattactccatattatataggatgaatgactgattaagt

SEQ ID NO: 55556 - protein, 327 aa, Glycine max
  peptide (1)..(327): Ceres Seq. ID no. 14302556
  misc_feature (124)..(255): Pfam Name: TPR repeat region Pfam Description: TPR repeat region
  misc_feature (92)..(292): Homolog of NCBI NO: 6851089 NR Description: SEL1L [Homo sapiens]
  misc_feature (92)..(292): Homolog of NCBI NO: 9967440 NR Description: SEL1L [Mesocricetus auratus]
  misc_feature (73)..(299): Homolog of NCBI NO: 26247143 NR Description: Hypothetical protein [Escherichia coli CFT073]
  misc_feature (92)..(300): Homolog of NCBI NO: 22999260 NR Description: hypothetical protein [Magnetococcus sp. MC-1]
  misc_feature (92)..(300): Homolog of NCBI NO: 22999260 NR Description: hypothetical protein [Magnetococcus sp. MC-1]
  misc_feature (92)..(312): Homolog of NCBI NO: 22999260 NR Description: hypothetical protein [Magnetococcus sp. MC-1]
  misc_feature (78)..(274): Homolog of NCBI NO: 39997985 NR Description: conserved hypothetical protein [Geobacter
  misc_feature (34)..(322): Homolog of NCBI NO: 38344482 NR Description: OSJNBa0022H21.17 [Oryza sativa (japonica
  misc_feature (20)..(325): Homolog of NCBI NO: 25406056 NR Description: hypothetical protein F5A18.23 [imported] -
  misc_feature (20)..(325): Homolog of NCBI NO: 18409624 NR Description: F-box protein family [Arabidopsis thaliana]
MKHPTWPRTSSSPFSSLPFSNRSEFFTTRLCARPPLPSPPGAGDFSALPYDVLAKIAASFDDPNLRAASLVCRAWCEALRPLREAMALLLWGKRFKHGHRGVGPNPDRALDSFIKAAARGSALAMVDAGLIYWERGEKPKAMEFYHKAAELGNPSAQCNLGLSYLQAEPPNTELAVKWLHKASVCGNVRAQYQLALCLHRGGGRVRSNLKEAAKWYMKAAEGGYVRAMYNISLCFSFGEGLTRNHQLARKWMKRAADRGHSKAQFEHGLALFSEGDMMKAVVYLELATRAGEKGAAHVKNAVLHRLSSASRDHAMHLANSWRALPSS

SEQ ID NO: 55557 - protein, 242 aa, Glycine max
  peptide (1)..(242): Ceres Seq. ID no. 14302557
  misc_feature (39)..(170): Pfam Name: TPR repeat region Pfam Description: TPR repeat region
  misc_feature (7)..(207): Homolog of NCBI NO: 6851089 NR Description: SEL1L [Homo sapiens]
  misc_feature (7)..(207): Homolog of NCBI NO: 9967440 NR Description: SEL1L [Mesocricetus auratus]
  misc_feature (1)..(214): Homolog of NCBI NO: 26247143 NR Description: Hypothetical protein [Escherichia coli CFT073]
  misc_feature (7)..(215): Homolog of NCBI NO: 22999260 NR Description: hypothetical protein [Magnetococcus sp. MC-1]
  misc_feature (7)..(215): Homolog of NCBI NO: 22999260 NR Description: hypothetical protein [Magnetococcus sp. MC-1]
  misc_feature (7)..(227): Homolog of NCBI NO: 22999260 NR Description: hypothetical protein [Magnetococcus sp. MC-1]
  misc_feature (1)..(189): Homolog of NCBI NO: 39997985 NR Description: conserved hypothetical protein [Geobacter
  misc_feature (1)..(237): Homolog of NCBI NO: 38344482 NR Description: OSJNBa0022H21.17 [Oryza sativa (japonica
  misc_feature (1)..(240): Homolog of NCBI NO: 25406056 NR Description: hypothetical protein F5A18.23 [imported] -
  misc_feature (1)..(240): Homolog of NCBI NO: 18409624 NR Description: F-box protein family [Arabidopsis thaliana]
MALLLWGKRFKHGHRGVGPNPDRALDSFIKAAARGSALAMVDAGLIYWERGEKPKAMEFYHKAAELGNPSAQCNLGLSYLQAEPPNTELAVKWLHKASVCGNVRAQYQLALCLHRGGGRVRSNLKEAAKWYMKAAEGGYVRAMYNISLCFSFGEGLTRNHQLARKWMKRAADRGHSKAQFEHGLALFSEGDMMKAVVYLELATRAGEKGAAHVKNAVLHRLSSASRDHAMHLANSWRALPSS

SEQ ID NO: 55558 - protein, 203 aa, Glycine max
  peptide (1)..(203): Ceres Seq. ID no. 14302558
  misc_feature (1)..(131): Pfam Name: TPR repeat region Pfam Description: TPR repeat region
  misc_feature (1)..(168): Homolog of NCBI NO: 6851089 NR Description: SEL1L [Homo sapiens]
  misc_feature (1)..(168): Homolog of NCBI NO: 9967440 NR Description: SEL1L [Mesocricetus auratus]
  misc_feature (1)..(175): Homolog of NCBI NO: 26247143 NR Description: Hypothetical protein [Escherichia coli CFT073]
  misc_feature (1)..(176): Homolog of NCBI NO: 22999260 NR Description: hypothetical protein [Magnetococcus sp. MC-1]
  misc_feature (1)..(176): Homolog of NCBI NO: 22999260 NR Description: hypothetical protein [Magnetococcus sp. MC-1]
  misc_feature (1)..(188): Homolog of NCBI NO: 22999260 NR Description: hypothetical protein [Magnetococcus sp. MC-1]
  misc_feature (1)..(150): Homolog of NCBI NO: 39997985 NR Description: conserved hypothetical protein [Geobacter
  misc_feature (1)..(198): Homolog of NCBI NO: 38344482 NR Description: OSJNBa0022H21.17 [Oryza sativa (japonica
  misc_feature (1)..(201): Homolog of NCBI NO: 25406056 NR Description: hypothetical protein F5A18.23 [imported] -
  misc_feature (1)..(201): Homolog of NCBI NO: 18409624 NR Description: F-box protein family [Arabidopsis thaliana]
MVDAGLIYWERGEKPKAMEFYHKAAELGNPSAQCNLGLSYLQAEPPNTELAVKWLHKASVCGNVRAQYQLALCLHRGGGRVRSNLKEAAKWYMKAAEGGYVRAMYNISLCFSFGEGLTRNHQLARKWMKRAADRGHSKAQFEHGLALFSEGDMMKAVVYLELATRAGEKGAAHVKNAVLHRLSSASRDHAMHLANSWRALPSS

SEQ ID NO: 55559 - DNA, 1482 bp, Glycine max
  misc_feature (1)..(1482): Ceres Seq. ID no. 15176941
gataagtaattaaatcaagaatcttctaagattaacaaatggtgcatataggttgtatgatagtcatcttttttcctttaccattgttataacataatcatcacattggtgatattaattggcaggattgtttggagttataagagacccaaaatttagacttggtcattatgatgagtatggatataactcatttgtatttattacctttggacactactttctaccattcttggcaggcaagtttttgtttgggatgacattgtttattgtgcttttgatatacaaatggagaaaaaggcatttgtcaatatatgaaaatattgaaaattatctggaacaaaataacctgatgcctattggatactcatacaaagaaattaagaagatggctagaggtttcaaggagaaattgggtggaggaggctatggcattgtattcaagggaaagttgcatagtgggccttctgtggcaattaaaatgctacataaagcaaaaggtagcggccaagactttattagtgaaattgcaacaattggaagaatacatcatcaaaatgtagtacaactaattggatattgtgttgaaggctcaaaacgtgcccttgtttatgaattcatgcccaatggatctcttgacaaatttatttttcccaaagatggaaatatacatttaacatatgacgaaatatataatatagcaattggagtagctcgtgggattgcttatctccatcatgggtgtgagatgaaaattttgcattttgatatcaaaccccataacatccttcttgatgaaacattcaccccaaaggtctctgactttggattggcaaaactatatccaatagataatagcattgtgactaggacagaggcaagagggacaattggatatatggctccagaattattttatggaaatattggaggaatatcccacaaggctgatgtttatagctttgggatgcttttgatagatatgacaaataagaggaagaacccaaatccccatgcagatgatcattcaagtcaactttactttcctacttggatttataatcaacttggaaaagagacagatatagaaatggaaggtgtcacagaggaggaaaagaagatgatcattgtttcactttggtgtatacagttgaaaccaagcgatcgcccctcaatgaacaaagtagtggaaatgcttgaaggagatattgaaagcctggaaatacctccaaagccttctctatatccacatgatacaatggaaaatgatcaaagcatctactctagtcaaacaatgtcaacggacttcattagttcttctagttattccaaggaaattgtgactaatcctttggtagaggatgttatttgataatgcacagtagttatgtatttgtattcaccttattgtcttaaacacctgttcatctgtaatatttattttatctaaaagatttcctattgttttatctttcaaagttc

SEQ ID NO: 55560 - protein, 371 aa, Glycine max
  peptide (1)..(371): Ceres Seq. ID no. 15176942
  misc_feature (1)..(327): Homolog of NCBI NO: 13377502 NR Description: LRK33 [Triticum aestivum]
  misc_feature (1)..(329): Homolog of NCBI NO: 34895300 NR Description: putative receptor kinase [Oryza sativa (japonica
  misc_feature (1)..(364): Homolog of NCBI NO: 8575488 NR Description: receptor-like kinase [Oryza sativa]
  misc_feature (1)..(327): Homolog of NCBI NO: 7489698 NR Description: receptor kinase homolog LRK10 - wheat
  misc_feature (1)..(327): Homolog of NCBI NO: 34895258 NR Description: putative receptor kinase [Oryza sativa (japonica
  misc_feature (1)..(327): Homolog of NCBI NO: 7716485 NR Description: receptor-like protein kinase [Oryza sativa]
  misc_feature (1)..(327): Homolog of NCBI NO: 34895226 NR Description: putative receptor kinase [Oryza sativa (japonica
  misc_feature (1)..(327): Homolog of NCBI NO: 8575482 NR Description: receptor-like kinase [Oryza sativa]
  misc_feature (1)..(327): Homolog of NCBI NO: 5679314 NR Description: receptor kinase [Oryza sativa]
  misc_feature (1)..(364): Homolog of NCBI NO: 34895254 NR Description: putative receptor kinase [Oryza sativa (japonica
MTLFIVLLIYKWRKRHLSIYENIENYLEQNNLMPIGYSYKEIKKMARGFKEKLGGGGYGIVFKGKLHSGPSVAIKMLHKAKGSGQDFISEIATIGRIHHQNVVQLIGYCVEGSKRALVYEFMPNGSLDKFIFPKDGNIHLTYDEIYNIAIGVARGIAYLHHGCEMKILHFDIKPHNILLDETFTPKVSDFGLAKLYPIDNSIVTRTEARGTIGYMAPELFYGNIGGISHKADVYSFGMLLIDMTNKRKNPNPHADDHSSQLYFPTWIYNQLGKETDIEMEGVTEEEKKMIIVSLWCIQLKPSDRPSMNKVVEMLEGDIESLEIPPKPSLYPHDTMENDQSIYSSQTMSTDFISSSSYSKEIVTNPLVEDVI

SEQ ID NO: 55561 - protein, 339 aa, Glycine max
  peptide (1)..(339): Ceres Seq. ID no. 15176943
  misc_feature (1)..(295): Homolog of NCBI NO: 13377502 NR Description: LRK33 [Triticum aestivum]
  misc_feature (1)..(297): Homolog of NCBI NO: 34895300 NR Description: putative receptor kinase [Oryza sativa (japonica
  misc_feature (1)..(332): Homolog of NCBI NO: 8575488 NR Description: receptor-like kinase [Oryza sativa]
  misc_feature (1)..(295): Homolog of NCBI NO: 7489698 NR Description: receptor kinase homolog LRK10 - wheat
  misc_feature (1)..(295): Homolog of NCBI NO: 34895258 NR Description: putative receptor kinase [Oryza sativa (japonica
  misc_feature (1)..(295): Homolog of NCBI NO: 7716485 NR Description: receptor-like protein kinase [Oryza sativa]
  misc_feature (1)..(295): Homolog of NCBI NO: 34895226 NR Description: putative receptor kinase [Oryza sativa (japonica
  misc_feature (1)..(295): Homolog of NCBI NO: 8575482 NR Description: receptor-like kinase [Oryza sativa]
  misc_feature (1)..(295): Homolog of NCBI NO: 5679314 NR Description: receptor kinase [Oryza sativa]
  misc_feature (1)..(332): Homolog of NCBI NO: 34895254 NR Description: putative receptor kinase [Oryza sativa (japonica
MPIGYSYKEIKKMARGFKEKLGGGGYGIVFKGKLHSGPSVAIKMLHKAKGSGQDFISEIATIGRIHHQNVVQLIGYCVEGSKRALVYEFMPNGSLDKFIFPKDGNIHLTYDEIYNIAIGVARGIAYLHHGCEMKILHFDIKPHNILLDETFTPKVSDFGLAKLYPIDNSIVTRTEARGTIGYMAPELFYGNIGGISHKADVYSFGMLLIDMTNKRKNPNPHADDHSSQLYFPTWIYNQLGKETDIEMEGVTEEEKKMIIVSLWCIQLKPSDRPSMNKVVEMLEGDIESLEIPPKPSLYPHDTMENDQSIYSSQTMSTDFISSSSYSKEIVTNPLVEDVI

SEQ ID NO: 55562 - protein, 327 aa, Glycine max
  peptide (1)..(327): Ceres Seq. ID no. 15176944
  misc_feature (1)..(283): Homolog of NCBI NO: 13377502 NR Description: LRK33 [Triticum aestivum]
  misc_feature (1)..(285): Homolog of NCBI NO: 34895300 NR Description: putative receptor kinase [Oryza sativa (japonica
  misc_feature (1)..(320): Homolog of NCBI NO: 8575488 NR Description: receptor-like kinase [Oryza sativa]
  misc_feature (1)..(283): Homolog of NCBI NO: 7489698 NR Description: receptor kinase homolog LRK10 - wheat
  misc_feature (1)..(283): Homolog of NCBI NO: 34895258 NR Description: putative receptor kinase [Oryza sativa (japonica
  misc_feature (1)..(283): Homolog of NCBI NO: 7716485 NR Description: receptor-like protein kinase [Oryza sativa]
  misc_feature (1)..(283): Homolog of NCBI NO: 8575482 NR Description: receptor-like kinase [Oryza sativa]
  misc_feature (1)..(283): Homolog of NCBI NO: 34895226 NR Description: putative receptor kinase [Oryza sativa (japonica
  misc_feature (1)..(283): Homolog of NCBI NO: 5679314 NR Description: receptor kinase [Oryza sativa]
  misc_feature (1)..(320): Homolog of NCBI NO: 34895254 NR Description: putative receptor kinase [Oryza sativa (japonica
MARGFKEKLGGGGYGIVFKGKLHSGPSVAIKMLHKAKGSGQDFISEIATIGRIHHQNVVQLIGYCVEGSKRALVYEFMPNGSLDKFIFPKDGNIHLTYDEIYNIAIGVARGIAYLHHGCEMKILHFDIKPHNILLDETFTPKVSDFGLAKLYPIDNSIVTRTEARGTIGYMAPELFYGNIGGISHKADVYSFGMLLIDMTNKRKNPNPHADDHSSQLYFPTWIYNQLGKETDIEMEGVTEEEKKMIIVSLWCIQLKPSDRPSMNKVVEMLEGDIESLEIPPKPSLYPHDTMENDQSIYSSQTMSTDFISSSSYSKEIVTNPLVEDVI

SEQ ID NO: 55563 - DNA, 1282 bp, Glycine max
  misc_feature (1)..(1282): Ceres Seq. ID no. 15226408
agcacaaatcaaactgtgtgttctttgattgtgaagaaaaagctttgatgcaataggtaccatgatggtaggctctctgatcagcaaatggctttgctgcaatatcagcgtgaaaatcttcattttttgagtgaggagattcttcgattgcaagagtgtctaagcaaatatgagggaactgatgatcggagcacaccacaggttgaccttgcccatctactagctgctcgtgatcaagagttacggacactttctgcagagatgaaccaagtgcaatctgagttgaggcttgcccgttccttgattgctgaaagggactcagagatccaacatgttcgcacgaccaacaaccaggtatctcactggatttactaatactgaaaagtgtatgtgctttgactgcaaggtgcttacagtaaacatcctaacagtatgtagaagagaatgaaagactaagagctatcttaggggaatggagcacccgggctgccaaggtatttattattcatatctgcaataaatgcgaacagctaccaactgttacaatatatactccatccggtcttaatttataagcaaaaaagacatgtttcacacttattaagaaaattagttaattttattaaattgtgtcattttcaattaaaaaataaacattttctaaactatatttcattgaaacttgatatcaagcataaaaaaaagtctttgaccttaataaatgaagaatattttagagagaatctcattaaataagacataggtaattaagatttgtttatatttaagacacaaaaataagaaacatgcccagttcgtgttgagcatttaacactacagtattatattcgagaccagaggttgagtacttcggttgggttttgttgttgtgaaagtatattctgcttaaaccttttattatcaatgattaaagcttgagcgagcactggaggctgagcggatgtcaactcttgaattacaaaggaaactttcaacgcttagaagtcaatcatatacagcagatgaagcaaacgaacttggagcttaactcacttgcaggcaaatatggaacatgcccagttcgtgttgttgagcatttaaccttgttctcacaatttaaaaagaacacttagacgtgtgtccaaggtaccgtcactattgtggagagattcaatgtacatattagcttcaaatagggttttatttttgttaagagaaattcaaattgatgtaatttaattgagttatcgtgcgccattgttctccaaaaaaaaaaaaaaaa

SEQ ID NO: 55564 - protein, 95 aa, Glycine max
  peptide (1)..(95): Ceres Seq. ID no. 15226409
  misc_feature (1)..(90): Homolog of NCBI NO: 25411202 NR Description: hypothetical protein At2g06010 [imported] -
  misc_feature (1)..(89): Homolog of NCBI NO: 20453094 NR Description: At2g06010/F5K7.23 [Arabidopsis thaliana]
  misc_feature (1)..(89): Homolog of NCBI NO: 18396221 NR Description: expressed protein [Arabidopsis thaliana]
  misc_feature (1)..(18): Homolog of NCBI NO: 15242018 NR Description: expressed protein [Arabidopsis thaliana]
  misc_feature (17)..(89): Homolog of NCBI NO: 15242018 NR Description: expressed protein [Arabidopsis thaliana]
MALLQYQRENLHFLSEEILRLQECLSKYEGTDDRSTPQVDLAHLLAARDQELRTLSAEMNQVQSELRLARSLIAERDSEIQHVRTTNNQVSHWIY

SEQ ID NO: 55565 - DNA, 1238 bp, Glycine max
  misc_feature (1)..(1238): Ceres Seq. ID no. 14312789
tttcaccgatttcatgttgtgtacttggagaccaatgcgaaatgctgccaaaattttgtcaaatttaacaaaatagaattaaccctgatgtatgaagctaccataaaagacggtcttcccaaatgggatagggccacacctataataaaaaagtgagattttcatgcatcgaataactttgagagtatgaccgagttattacttagatggatcgaagttggatgaatgaaagtcgcatcagcccagaatatgaggaaggcgtcgagcaattcttacaatttgcttcagaaagaggtcaaccggatgaagatggaaaatattattgtccttgcatcaattgtttgaatgaaagacgacaaatactggatgacatacgagagcatctgttgtgtgatggaattaagaggaattatacgacgtggatatggcatggtgaaatgacagacatgcagagtgggcaacaatccgaaccgtttgatgtagaaatgggagatcgcttggaggatatgattcgtgaccttggacaagagtcttttcagcaagcacatgcccctatgtatgatacattacaaactgattcaaagaaacctttgtatccggggtgcaagaattcgttgacgctgttgtcggcagttttaagtctggttaatatcaaagccagatatgggtggagtgacaaaaactttagttcactgcttcaagtagtgcacgacatgcttccagaggaaaacacattgcctaaaagttactatcaagcaaagaaaatattgtgtcccatgggtatggagtatcagaagattcatgtttgcccgaatgattgcatattatacagacatcaatttcaagaaatgtacaataagaatctatgtttgtattcaatagtgctttgaaaggacttgacgatactcaacaaagtaaatccaagactcctgctaggtggattgttgttaaatgtaatagacaaaaaggaagcactgagtgtgagtattacgtcatgcattggatgtcaactataatcttaggaaatttccagaataattgggaaatgtatttcactgatcctagaccattggaaccagaaagattgaaggcacttcgcaaccagtgggcaaagtactatttgaaagtgaaaaatgaaacttaggatgtttagacaatcttgtaattgtagtttatatttacttaatttacaattcatgtctcaacattaaatatgttttaaattcatagtaattagt

SEQ ID NO: 55566 - protein, 227 aa, Glycine max
  peptide (1)..(227): Ceres Seq. ID no. 14312790
  misc_feature (169)..(222): Pfam Name: Transposase family tnp2 Pfam Description: Transposase family tnp2
  misc_feature (1)..(77): Homolog of NCBI NO: 38345570 NR Description: OSJNBa0027H06.6 [Oryza sativa (japonica
  misc_feature (98)..(215): Homolog of NCBI NO: 38345570 NR Description: OSJNBa0027H06.6 [Oryza sativa (japonica
  misc_feature (1)..(77): Homolog of NCBI NO: 38345997 NR Description: OSJNBa0073L13.7 [Oryza sativa (japonica
  misc_feature (98)..(215): Homolog of NCBI NO: 38345997 NR Description: OSJNBa0073L13.7 [Oryza sativa (japonica
  misc_feature (1)..(221): Homolog of NCBI NO: 38344518 NR Description: OSJNBa0016N04.11 [Oryza sativa (japonica
  misc_feature (1)..(221): Homolog of NCBI NO: 38344499 NR Description: OSJNBa0013A04.15 [Oryza sativa (japonica
  misc_feature (1)..(77): Homolog of NCBI NO: 32489782 NR Description: OSJNBb0018A10.13 [Oryza sativa (japonica
  misc_feature (98)..(215): Homolog of NCBI NO: 32489782 NR Description: OSJNBb0018A10.13 [Oryza sativa (japonica
  misc_feature (1)..(77): Homolog of NCBI NO: 34894078 NR Description: putative retrotransposable elements TNP2 protein
  misc_feature (98)..(215): Homolog of NCBI NO: 34894078 NR Description: putative retrotransposable elements TNP2 protein
MDRSWMNESRISPEYEEGVEQFLQFASERGQPDEDGKYYCPCINCLNERRQILDDIREHLLCDGIKRNYTTWIWHGEMTDMQSGQQSEPFDVEMGDRLEDMIRDLGQESFQQAHAPMYDTLQTDSKKPLYPGCKNSLTLLSAVLSLVNIKARYGWSDKNFSSLLQVVHDMLPEENTLPKSYYQAKKILCPMGMEYQKIHVCPNDCILYRHQFQEMYNKNLCLYSIVL

SEQ ID NO: 55567 - protein, 222 aa, Glycine max
  peptide (1)..(222): Ceres Seq. ID no. 14312791
  misc_feature (164)..(217): Pfam Name: Transposase family tnp2 Pfam Description: Transposase family tnp2
  misc_feature (1)..(72): Homolog of NCBI NO: 38345570 NR Description: OSJNBa0027H06.6 [Oryza sativa (japonica
  misc_feature (93)..(210): Homolog of NCBI NO: 38345570 NR Description: OSJNBa0027H06.6 [Oryza sativa (japonica
  misc_feature (1)..(72): Homolog of NCBI NO: 38345997 NR Description: OSJNBa0073L13.7 [Oryza sativa (japonica
  misc_feature (93)..(210): Homolog of NCBI NO: 38345997 NR Description: OSJNBa0073L13.7 [Oryza sativa (japonica
  misc_feature (1)..(216): Homolog of NCBI NO: 38344518 NR Description: OSJNBa0016N04.11 [Oryza sativa (japonica
  misc_feature (1)..(216): Homolog of NCBI NO: 38344499 NR Description: OSJNBa0013A04.15 [Oryza sativa (japonica
  misc_feature (1)..(72): Homolog of NCBI NO: 32489782 NR Description: OSJNBb0018A10.13 [Oryza sativa (japonica
  misc_feature (93)..(210): Homolog of NCBI NO: 32489782 NR Description: OSJNBb0018A10.13 [Oryza sativa (japonica
  misc_feature (1)..(72): Homolog of NCBI NO: 34894078 NR Description: putative retrotransposable elements TNP2 protein
  misc_feature (93)..(210): Homolog of NCBI NO: 34894078 NR Description: putative retrotransposable elements TNP2 protein
MNESRISPEYEEGVEQFLQFASERGQPDEDGKYYCPCINCLNERRQILDDIREHLLCDGIKRNYTTWIWHGEMTDMQSGQQSEPFDVEMGDRLEDMIRDLGQESFQQAHAPMYDTLQTDSKKPLYPGCKNSLTLLSAVLSLVNIKARYGWSDKNFSSLLQVVHDMLPEENTLPKSYYQAKKILCPMGMEYQKIHVCPNDCILYRHQFQEMYNKNLCLYSIVL

SEQ ID NO: 55568 - protein, 150 aa, Glycine max
  peptide (1)..(150): Ceres Seq. ID no. 14312792
  misc_feature (92)..(145): Pfam Name: Transposase family tnp2 Pfam Description: Transposase family tnp2
  misc_feature (21)..(138): Homolog of NCBI NO: 38346477 NR Description: OSJNBa0021F22.10 [Oryza sativa (japonica
  misc_feature (21)..(138): Homolog of NCBI NO: 34909086 NR Description: putative retrotransposable elements TNP2
  misc_feature (21)..(138): Homolog of NCBI NO: 34898838 NR Description: OJ1058_A12.17 [Oryza sativa (japonica
  misc_feature (21)..(138): Homolog of NCBI NO: 21740606 NR Description: OSJNBb0089K24.2 [Oryza sativa (japonica
  misc_feature (21)..(138): Homolog of NCBI NO: 38345570 NR Description: OSJNBa0027H06.6 [Oryza sativa (japonica
  misc_feature (21)..(138): Homolog of NCBI NO: 38345997 NR Description: OSJNBa0073L13.7 [Oryza sativa (japonica
  misc_feature (1)..(144): Homolog of NCBI NO: 38344518 NR Description: OSJNBa0016N04.11 [Oryza sativa (japonica
  misc_feature (1)..(144): Homolog of NCBI NO: 38344499 NR Description: OSJNBa0013A04.15 [Oryza sativa (japonica
  misc_feature (21)..(138): Homolog of NCBI NO: 32489782 NR Description: OSJNBb0018A10.13 [Oryza sativa (japonica
  misc_feature (21)..(138): Homolog of NCBI NO: 34894078 NR Description: putative retrotransposable elements TNP2 protein
MTDMQSGQQSEPFDVEMGDRLEDMIRDLGQESFQQAHAPMYDTLQTDSKKPLYPGCKNSLTLLSAVLSLVNIKARYGWSDKNFSSLLQVVHDMLPEENTLPKSYYQAKKILCPMGMEYQKIHVCPNDCILYRHQFQEMYNKNLCLYSIVL

SEQ ID NO: 55569 - DNA, 1694 bp, Glycine max
  misc_feature (1)..(1694): Ceres Seq. ID no. 15171476
agagttaagagagccatatatcatggggtactatttggtattcgttggtgtgttcttgtggtgtgccatggctagtcacattaatggactagccatgatggatggaaagttaatgagttcctcggcaaataattatgactatggagatgctcttggcaaagccatcttgttttttgaaggacaacgctcggggaacttgcccgccacccaaagagtgaagtggaggggagactccgctctctctgatggcaaacttcaaaacgtggatttgattggaggatattacgatgctggagataacgtcaagtttggatggccaatggcatttacaactagcttattgagttgggctgctgtagagtacgagagtgagatatcttcggtgaaccagcttggttacctccacagtgctattcattggggcgcagactttatactgagagcccacacttccccaaccaccctctatacacaggtgggagatgggaacgctgatcacaattgttgggagcgcccggaagacatggatacagcaagggcagtgtacaagatagatgctaattccccgggaactgaagccgcagctgagtctgctgctgctcttgctgctgcttcaattgtcttcaagaaaatagatgccaattattcctccacgctattaagcaagtcaaaatcactgtttgattttgcagacaagtataggggttcttactcgggttcttgtccattctattgctcgtactcaggttaccaggatgaactgttatgggctgcttcttggctatataaggcgagtggagaaagcaagtacttgagttactccataggcaaccaaggttggagtcaggcggtgtctgaattcagctgggataacaaatatgttggagctcagacattactaacggaggaattctatggtgggaagaaagacttggccaagtttaagagtgacgttgaatcatttatatgttcagtgatgccagcaagtagctctctacagattaaaacaactcctggtgggcttctatttactagagacagcagtaatttgcaatatgccacgagctcaaccatggtgctattcattttctctaaaatcctaaacagaaatcacattgatagaatacattgtggttctgcgcttttcaccccgtctcagattagagcctttgcaaaaacacaggtggactacatactaggaagcaatccgatgaagatgtcttacatggtgggatttggcagtaaatacccaaagcaattacatcacagaggctcatccatcccttcaatcaatgttcatccgaccaaggtgggttgcaatgatggtctctcagtttattacaattctgctaatccaaatccaaatactcatgtgggtgcgattgttggaggccccgattcaaatgaccgattcagtgatgcaagatctgactattcccacagcgaacctaccacctacatgaatgctgctttcgtggcttcagtgtctgctttgcttggcaaaacgaccgatcgaaaccaaattcaggactctgcagtttccccatatcgatgctagggaaactaatgaagttaattaatgtaacataatcaccgattatatatgtgtcagtggtactagttatttaccctgccatatattgaaactccacttttatgggctggtataataaaatcatacgtactgttttacc

SEQ ID NO: 55570 - protein, 518 aa, Glycine max
  peptide (1)..(518): Ceres Seq. ID no. 15171477
  misc_feature (46)..(498): Pfam Name: Glycosyl hydrolase family 9 Pfam Description: Glycosyl hydrolase family 9
  misc_feature (30)..(502): Homolog of NCBI NO: 30681176 NR Description: glycosyl hydrolase family 9 [Arabidopsis thaliana]
  misc_feature (46)..(504): Homolog of NCBI NO: 7488977 NR Description: cellulase (EC 3.2.1.4) Cel1 precursor - tomato
  misc_feature (32)..(502): Homolog of NCBI NO: 15236526 NR Description: glycosyl hydrolase family 9 [Arabidopsis
  misc_feature (46)..(518): Homolog of NCBI NO: 1655543 NR Description: cellulase; endo-beta-1,4-glucanase [Capsicum
  misc_feature (46)..(518): Homolog of NCBI NO: 1363496 NR Description: cellulase (EC 3.2.1.4) 3D precursor - pepper
  misc_feature (16)..(505): Homolog of NCBI NO: 1076692 NR Description: cellulase (EC 3.2.1.4) - European elder (fragment)
  misc_feature (16)..(505): Homolog of NCBI NO: 575404 NR Description: cellulase [Sambucus nigra]
  misc_feature (8)..(502): Homolog of NCBI NO: 228690 NR Description: abscission cellulase
  misc_feature (8)..(502): Homolog of NCBI NO: 1346225 NR Description: Endoglucanase precursor (Endo-1,4-beta-glucanase)
  misc_feature (8)..(502): Homolog of NCBI NO: 1039431 NR Description: cellulase [Phaseolus vulgaris]
ELREPYIMGYYLVFVGVFLWCAMASHINGLAMMDGKLMSSSANNYDYGDALGKAILFFEGQRSGNLPATQRVKWRGDSALSDGKLQNVDLIGGYYDAGDNVKFGWPMAFTTSLLSWAAVEYESEISSVNQLGYLHSAIHWGADFILRAHTSPTTLYTQVGDGNADHNCWERPEDMDTARAVYKIDANSPGTEAAAESAAALAAASIVFKKIDANYSSTLLSKSKSLFDFADKYRGSYSGSCPFYCSYSGYQDELLWAASWLYKASGESKYLSYSIGNQGWSQAVSEFSWDNKYVGAQTLLTEEFYGGKKDLAKFKSDVESFICSVMPASSSLQIKTTPGGLLFTRDSSNLQYATSSTMVLFIFSKILNRNHIDRIHCGSALFTPSQIRAFAKTQVDYILGSNPMKMSYMVGFGSKYPKQLHHRGSSIPSINVHPTKVGCNDGLSVYYNSANPNPNTHVGAIVGGPDSNDRFSDARSDYSHSEPTTYMNAAFVASVSALLGKTTDRNQIQDSAVSPYRC

SEQ ID NO: 55571 - protein, 511 aa, Glycine max
  peptide (1)..(511): Ceres Seq. ID no. 15171478
  misc_feature (39)..(491): Pfam Name: Glycosyl hydrolase family 9 Pfam Description: Glycosyl hydrolase family 9
  misc_feature (23)..(495): Homolog of NCBI NO: 30681176 NR Description: glycosyl hydrolase family 9 [Arabidopsis thaliana]
  misc_feature (39)..(497): Homolog of NCBI NO: 7488977 NR Description: cellulase (EC 3.2.1.4) Cel1 precursor - tomato
  misc_feature (25)..(495): Homolog of NCBI NO: 15236526 NR Description: glycosyl hydrolase family 9 [Arabidopsis
  misc_feature (39)..(511): Homolog of NCBI NO: 1655543 NR Description: cellulase; endo-beta-1,4-glucanase [Capsicum
  misc_feature (39)..(511): Homolog of NCBI NO: 1363496 NR Description: cellulase (EC 3.2.1.4) 3D precursor - pepper
  misc_feature (9)..(498): Homolog of NCBI NO: 1076692 NR Description: cellulase (EC 3.2.1.4) - European elder (fragment)
  misc_feature (9)..(498): Homolog of NCBI NO: 575404 NR Description: cellulase [Sambucus nigra]
  misc_feature (1)..(495): Homolog of NCBI NO: 228690 NR Description: abscission cellulase
  misc_feature (1)..(495): Homolog of NCBI NO: 1346225 NR Description: Endoglucanase precursor (Endo-1,4-beta-glucanase)
  misc_feature (1)..(495): Homolog of NCBI NO: 1039431 NR Description: cellulase [Phaseolus vulgaris]
MGYYLVFVGVFLWCAMASHINGLAMMDGKLMSSSANNYDYGDALGKAILFFEGQRSGNLPATQRVKWRGDSALSDGKLQNVDLIGGYYDAGDNVKFGWPMAFTTSLLSWAAVEYESEISSVNQLGYLHSAIHWGADFILRAHTSPTTLYTQVGDGNADHNCWERPEDMDTARAVYKIDANSPGTEAAAESAAALAAASIVFKKIDANYSSTLLSKSKSLFDFADKYRGSYSGSCPFYCSYSGYQDELLWAASWLYKASGESKYLSYSIGNQGWSQAVSEFSWDNKYVGAQTLLTEEFYGGKKDLAKFKSDVESFICSVMPASSSLQIKTTPGGLLFTRDSSNLQYATSSTMVLFIFSKILNRNHIDRIHCGSALFTPSQIRAFAKTQVDYILGSNPMKMSYMVGFGSKYPKQLHHRGSSIPSINVHPTKVGCNDGLSVYYNSANPNPNTHVGAIVGGPDSNDRFSDARSDYSHSEPTTYMNAAFVASVSALLGKTTDRNQIQDSAVSPYRC

SEQ ID NO: 55572 - protein, 496 aa, Glycine max
  peptide (1)..(496): Ceres Seq. ID no. 15171479
  misc_feature (24)..(476): Pfam Name: Glycosyl hydrolase family 9 Pfam Description: Glycosyl hydrolase family 9
  misc_feature (8)..(480): Homolog of NCBI NO: 30681176 NR Description: glycosyl hydrolase family 9 [Arabidopsis thaliana]
  misc_feature (24)..(482): Homolog of NCBI NO: 7488977 NR Description: cellulase (EC 3.2.1.4) Cel1 precursor - tomato
  misc_feature (10)..(480): Homolog of NCBI NO: 15236526 NR Description: glycosyl hydrolase family 9 [Arabidopsis
  misc_feature (24)..(496): Homolog of NCBI NO: 1655543 NR Description: cellulase; endo-beta-1,4-glucanase [Capsicum
  misc_feature (24)..(496): Homolog of NCBI NO: 1363496 NR Description: cellulase (EC 3.2.1.4) 3D precursor - pepper
  misc_feature (1)..(483): Homolog of NCBI NO: 1076692 NR Description: cellulase (EC 3.2.1.4) - European elder (fragment)
  misc_feature (1)..(483): Homolog of NCBI NO: 575404 NR Description: cellulase [Sambucus nigra]
  misc_feature (1)..(480): Homolog of NCBI NO: 228690 NR Description: abscission cellulase
  misc_feature (1)..(480): Homolog of NCBI NO: 1346225 NR Description: Endoglucanase precursor (Endo-1,4-beta-glucanase)
  misc_feature (1)..(480): Homolog of NCBI NO: 1039431 NR Description: cellulase [Phaseolus vulgaris]
MASHINGLAMMDGKLMSSSANNYDYGDALGKAILFFEGQRSGNLPATQRVKWRGDSALSDGKLQNVDLIGGYYDAGDNVKFGWPMAFTTSLLSWAAVEYESEISSVNQLGYLHSAIHWGADFILRAHTSPTTLYTQVGDGNADHNCWERPEDMDTARAVYKIDANSPGTEAAAESAAALAAASIVFKKIDANYSSTLLSKSKSLFDFADKYRGSYSGSCPFYCSYSGYQDELLWAASWLYKASGESKYLSYSIGNQGWSQAVSEFSWDNKYVGAQTLLTEEFYGGKKDLAKFKSDVESFICSVMPASSSLQIKTTPGGLLFTRDSSNLQYATSSTMVLFIFSKILNRNHIDRIHCGSALFTPSQIRAFAKTQVDYILGSNPMKMSYMVGFGSKYPKQLHHRGSSIPSINVHPTKVGCNDGLSVYYNSANPNPNTHVGAIVGGPDSNDRFSDARSDYSHSEPTTYMNAAFVASVSALLGKTTDRNQIQDSAVSPYRC

SEQ ID NO: 55573 - DNA, 1141 bp, Glycine max
  misc_feature (1)..(1141): Ceres Seq. ID no. 14312777
aaaaaaaaaaaaaacgcgcactctatataagtgcattttttccctttctctttcatcaaattgtgcttgtgattgtctttgtatcacgaaaactatacgattcgattccttgttttcaatggacaccttcttcaattctcaatcttcttcttcttcgagaagccgctggagttacgatactctcaagaatttccgtgagatctctccgctggttcagaatcacatcaaacgggtttattttacgttatgttgcgctgtggtggctgctgctgttggagcttttcttcatgttctgtggaacattgggggttttctcaccacgttggcttccattggaagcatggtttggttgctatctacaccccctgttgaagagcaaaagaggttgtctctgttgatggcttcggccttgtttcagggcgcttccattggacctctgattgatttggctattgccattgatcctagccttattgttagtgcatttgtggcaacttctttggcttttgcttgcttctctgcggcagctttagttgcaaggcgtagggagtacctctaccttggtggtttgctttcttctgggctgtccattcttatgtggttgcactttgcttcctctctctttgggggctcaattgcactcttcaagtttgagctgtactttgggcttttggtgtttgtgggctacgttatagtagacactcaagaaattattgaaagggctcactttggtgacctggattatgtgaagcatgcattgacattgttcactgatttggctgcaatctttgtgcgaattcttattataatgttgaagaattcatctgagagaaatgagaagaagaagaaaaggagagattagtaggctgaccgaccgactcgagctcaggcttctctacagtaatttagtttgtggagaatacataattagctgtttagatgatgttggtcccttgtgtagttagttagctatgtgtttgctgtaatggtaaatgtcaggatttcttttaaacatcttcatatgtatttgccaatatcataatgtgtcgtataacatcataccttggtttaagcagcatgttgacgaaaccttcactaaattttatttttgggtttagtttattttatacattaagtggac

SEQ ID NO: 55574 - protein, 286 aa, Glycine max
  peptide (1)..(286): Ceres Seq. ID no. 14312778
  misc_feature (65)..(274): Pfam Name: Uncharacterised protein family UPF0005 Pfam Description: Uncharacterised protein family UPF0005
  misc_feature (57)..(282): Homolog of NCBI NO: 26331690 NR Description: unnamed protein product [Mus musculus]
  misc_feature (57)..(282): Homolog of NCBI NO: 21311961 NR Description: testis enhanced gene transcript; Bax inhibitor-1
  misc_feature (56)..(283): Homolog of NCBI NO: 15236582 NR Description: Bax inhibitor-1 (BI1) family [Arabidopsis
  misc_feature (40)..(285): Homolog of NCBI NO: 13940165 NR Description: BAX inhibitor 1 [Hordeum vulgare subsp. vulgare]
  misc_feature (40)..(285): Homolog of NCBI NO: 12229685 NR Description: Bax inhibitor-1 (BI-1) (OsBI-1)
  misc_feature (39)..(284): Homolog of NCBI NO: 17981376 NR Description: bax inhibitor-like protein [Brassica oleracea]
  misc_feature (39)..(286): Homolog of NCBI NO: 14719274 NR Description: Bax inhibitor 1 [Brassica napus]
  misc_feature (39)..(286): Homolog of NCBI NO: 15238017 NR Description: Bax inhibitor-1 (BI-1), putative [Arabidopsis
  misc_feature (39)..(286): Homolog of NCBI NO: 21593125 NR Description: Bax inhibitor-1 like [Arabidopsis thaliana]
  misc_feature (39)..(286): Homolog of NCBI NO: 14719276 NR Description: Bax inhibitor 1 [Nicotiana tabacum]
KKKKTRTLYKCIFSLSLSSNCACDCLCITKTIRFDSLFSMDTFFNSQSSSSSRSRWSYDTLKNFREISPLVQNHIKRVYFTLCCAVVAAAVGAFLHVLWNIGGFLTTLASIGSMVWLLSTPPVEEQKRLSLLMASALFQGASIGPLIDLAIAIDPSLIVSAFVATSLAFACFSAAALVARRREYLYLGGLLSSGLSILMWLHFASSLFGGSIALFKFELYFGLLVFVGYVIVDTQEIIERAHFGDLDYVKHALTLFTDLAAIFVRILIIMLKNSSERNEKKKKRRD

SEQ ID NO: 55575 - protein, 247 aa, Glycine max
  peptide (1)..(247): Ceres Seq. ID no. 14312779
  misc_feature (26)..(235): Pfam Name: Uncharacterised protein family UPF0005 Pfam Description: Uncharacterised protein family UPF0005
  misc_feature (18)..(243): Homolog of NCBI NO: 26331690 NR Description: unnamed protein product [Mus musculus]
  misc_feature (18)..(243): Homolog of NCBI NO: 21311961 NR Description: testis enhanced gene transcript; Bax inhibitor-1
  misc_feature (17)..(244): Homolog of NCBI NO: 15236582 NR Description: Bax inhibitor-1 (BI1) family [Arabidopsis
  misc_feature (1)..(246): Homolog of NCBI NO: 13940165 NR Description: BAX inhibitor 1 [Hordeum vulgare subsp. vulgare]
  misc_feature (1)..(246): Homolog of NCBI NO: 12229685 NR Description: Bax inhibitor-1 (BI-1) (OsBI-1)
  misc_feature (1)..(245): Homolog of NCBI NO: 17981376 NR Description: bax inhibitor-like protein [Brassica oleracea]
  misc_feature (1)..(247): Homolog of NCBI NO: 14719274 NR Description: Bax inhibitor 1 [Brassica napus]
  misc_feature (1)..(247): Homolog of NCBI NO: 15238017 NR Description: Bax inhibitor-1 (BI-1), putative [Arabidopsis
  misc_feature (1)..(247): Homolog of NCBI NO: 21593125 NR Description: Bax inhibitor-1 like [Arabidopsis thaliana]
  misc_feature (1)..(247): Homolog of NCBI NO: 14719276 NR Description: Bax inhibitor 1 [Nicotiana tabacum]
MDTFFNSQSSSSSRSRWSYDTLKNFREISPLVQNHIKRVYFTLCCAVVAAAVGAFLHVLWNIGGFLTTLASIGSMVWLLSTPPVEEQKRLSLLMASALFQGASIGPLIDLAIAIDPSLIVSAFVATSLAFACFSAAALVARRREYLYLGGLLSSGLSILMWLHFASSLFGGSIALFKFELYFGLLVFVGYVIVDTQEIIERAHFGDLDYVKHALTLFTDLAAIFVRILIIMLKNSSERNEKKKKRRD

SEQ ID NO: 55576 - protein, 173 aa, Glycine max
  peptide (1)..(173): Ceres Seq. ID no. 14312780
  misc_feature (1)..(161): Pfam Name: Uncharacterised protein family UPF0005 Pfam Description: Uncharacterised protein family UPF0005
  misc_feature (1)..(169): Homolog of NCBI NO: 26331690 NR Description: unnamed protein product [Mus musculus]
  misc_feature (1)..(169): Homolog of NCBI NO: 21311961 NR Description: testis enhanced gene transcript; Bax inhibitor-1
  misc_feature (1)..(170): Homolog of NCBI NO: 15236582 NR Description: Bax inhibitor-1 (BI1) family [Arabidopsis
  misc_feature (1)..(172): Homolog of NCBI NO: 13940165 NR Description: BAX inhibitor 1 [Hordeum vulgare subsp. vulgare]
  misc_feature (1)..(172): Homolog of NCBI NO: 12229685 NR Description: Bax inhibitor-1 (BI-1) (OsBI-1)
  misc_feature (1)..(171): Homolog of NCBI NO: 17981376 NR Description: bax inhibitor-like protein [Brassica oleracea]
  misc_feature (1)..(173): Homolog of NCBI NO: 14719274 NR Description: Bax inhibitor 1 [Brassica napus]
  misc_feature (1)..(173): Homolog of NCBI NO: 15238017 NR Description: Bax inhibitor-1 (BI-1), putative [Arabidopsis
  misc_feature (1)..(173): Homolog of NCBI NO: 21593125 NR Description: Bax inhibitor-1 like [Arabidopsis thaliana]
  misc_feature (1)..(173): Homolog of NCBI NO: 14719276 NR Description: Bax inhibitor 1 [Nicotiana tabacum]
MVWLLSTPPVEEQKRLSLLMASALFQGASIGPLIDLAIAIDPSLIVSAFVATSLAFACFSAAALVARRREYLYLGGLLSSGLSILMWLHFASSLFGGSIALFKFELYFGLLVFVGYVIVDTQEIIERAHFGDLDYVKHALTLFTDLAAIFVRILIIMLKNSSERNEKKKKRRD

SEQ ID NO: 55577 - DNA, 1551 bp, Glycine max
  misc_feature (1)..(1551): Ceres Seq. ID no. 14308437
gggagagaaaaacgaagagtgagtcaccgttccgtgttcccgccgagtcggtataaacgagtgagcgagtcacaactcaccgcgctgcatggaccctctagaagctttggtcgcccaaatccaagggctttcgagcactcccggcgacctcactcgcctccacagtgttctgaagcaagccgatgactcgctccgatccgagtcaagtcgcctcgctccgattctcacccagctcgacccctccattcattccctcgggtttctctacatcctagaagcttcaatgaccgatccggtaaccaaaacgcaggctgagaccgtcgttccgatcgttactaggtttattggcgcttgcagcccggagcagattcgcttagcgcctgataaatttttatctgtctgtaagaggttaaaggatcaagtgatgctgctggaagctccgatacggggtgtggctcctttgttcactgctcttcggaaacttcaggtctccacagaacacttgactccactacactcagagtttcttctgctgtgcttgttggcaaagtgctacaaaactggtctatccattttggatgatgatgtttttgaagtagaccaaccacgagacctttttctctactgttattatggaggtatgatatgcattggacagaagcgctttcagaaggcattggacctcctgcataatgttgtaactgctcccatgtctaccataaatgctatagctgttgaagcttacaaaaagtatatattggtttctctcattcgtcatggacagttctcaaccagtcttcctaagtattcttcttcgactgctcaaaggaacctgaagaacttttgtcagccttacgtcgaattggctaatagttatggcactggacaaattgaagaactagaggcatatgccagggcaaatgcagagaagtttgaatctgacaacaaccttggactggttaatcaggttgtatcatccatgtataagcggaatattcagagattgacccagacatacttgaccctttctctccatgatatagccagcacagtgcagttaaatagccccaaagaagctgaaatgcatgtgctacaaatgattcaggatggcgaaatatatgcaactatcaaccagaaggatggaatggtgagattcttggaggatcctgaacagtataaaacctgtgaaatgattgaacatattgattcatcaatccaaagaataatggcactctcaaggaaacttactgcgacagacgaacaaatttcatgcgatcagttgtatttgtctaaggctggaagagagagacaaagatatgactttgatgactttgacgttccacaaaagttcaacatttaaggggctaggaatgatggaagtagatctggttatggtccatcacccgtttcctttatcttttgttattcctggttctgagagtgggggagtgttttatttcagtcccaaatggaagagtgcttgttctgaggatgttgaattgtctcaacttattaactatataaaatctataactgattctttgcacattt

SEQ ID NO: 55578 - protein, 423 aa, Glycine max
  peptide (1)..(423): Ceres Seq. ID no. 14308438
  misc_feature (254)..(358): Pfam Name: PCI domain Pfam Description: PCI domain
  misc_feature (4)..(403): Homolog of NCBI NO: 27696965 NR Description: Similar to COP9 (constitutive photomorphogenic)
  misc_feature (4)..(403): Homolog of NCBI NO: 6753488 NR Description: COP9 (constitutive photomorphogenic), subunit 3
  misc_feature (4)..(403): Homolog of NCBI NO: 34870793 NR Description: similar to COP9 constitutive photomorphogenic
  misc_feature (4)..(403): Homolog of NCBI NO: 23238222 NR Description: COP9 constitutive photomorphogenic homolog
  misc_feature (4)..(403): Homolog of NCBI NO: 28279587 NR Description: Similar to COP9 constitutive photomorphogenic
  misc_feature (4)..(403): Homolog of NCBI NO: 39795809 NR Description: Unknown (protein for MGC:77615) [Danio rerio]
  misc_feature (185)..(405): Homolog of NCBI NO: 1001955 NR Description: unknown protein
  misc_feature (1)..(377): Homolog of NCBI NO: 11290078 NR Description: hypothetical protein F18O22.40 - Arabidopsis
  misc_feature (1)..(423): Homolog of NCBI NO: 18417330 NR Description: COP9 complex subunit 3, FUS11 [Arabidopsis
  misc_feature (1)..(423): Homolog of NCBI NO: 16930463 NR Description: AT5g14250/F18O22_40 [Arabidopsis thaliana]
MDPLEALVAQIQGLSSTPGDLTRLHSVLKQADDSLRSESSRLAPILTQLDPSIHSLGFLYILEASMTDPVTKTQAETVVPIVTRFIGACSPEQIRLAPDKFLSVCKRLKDQVMLLEAPIRGVAPLFTALRKLQVSTEHLTPLHSEFLLLCLLAKCYKTGLSILDDDVFEVDQPRDLFLYCYYGGMICIGQKRFQKALDLLHNVVTAPMSTINAIAVEAYKKYILVSLIRHGQFSTSLPKYSSSTAQRNLKNFCQPYVELANSYGTGQIEELEAYARANAEKFESDNNLGLVNQVVSSMYKRNIQRLTQTYLTLSLHDIASTVQLNSPKEAEMHVLQMIQDGEIYATINQKDGMVRFLEDPEQYKTCEMIEHIDSSIQRIMALSRKLTATDEQISCDQLYLSKAGRERQRYDFDDFDVPQKFNI

SEQ ID NO: 55579 - protein, 358 aa, Glycine max
  peptide (1)..(358): Ceres Seq. ID no. 14308439
  misc_feature (189)..(293): Pfam Name: PCI domain Pfam Description: PCI domain
  misc_feature (1)..(338): Homolog of NCBI NO: 27696965 NR Description: Similar to COP9 (constitutive photomorphogenic)
  misc_feature (1)..(338): Homolog of NCBI NO: 6753488 NR Description: COP9 (constitutive photomorphogenic), subunit 3
  misc_feature (1)..(338): Homolog of NCBI NO: 34870793 NR Description: similar to COP9 constitutive photomorphogenic
  misc_feature (1)..(338): Homolog of NCBI NO: 23238222 NR Description: COP9 constitutive photomorphogenic homolog
  misc_feature (1)..(338): Homolog of NCBI NO: 28279587 NR Description: Similar to COP9 constitutive photomorphogenic
  misc_feature (1)..(338): Homolog of NCBI NO: 39795809 NR Description: Unknown (protein for MGC:77615) [Danio rerio]
  misc_feature (120)..(340): Homolog of NCBI NO: 1001955 NR Description: unknown protein
  misc_feature (1)..(312): Homolog of NCBI NO: 11290078 NR Description: hypothetical protein F18O22.40 - Arabidopsis
  misc_feature (1)..(358): Homolog of NCBI NO: 18417330 NR Description: COP9 complex subunit 3, FUS11 [Arabidopsis
  misc_feature (1)..(358): Homolog of NCBI NO: 16930463 NR Description: AT5g14250/F18O22_40 [Arabidopsis thaliana]
MTDPVTKTQAETVVPIVTRFIGACSPEQIRLAPDKFLSVCKRLKDQVMLLEAPIRGVAPLFTALRKLQVSTEHLTPLHSEFLLLCLLAKCYKTGLSILDDDVFEVDQPRDLFLYCYYGGMICIGQKRFQKALDLLHNVVTAPMSTINAIAVEAYKKYILVSLIRHGQFSTSLPKYSSSTAQRNLKNFCQPYVELANSYGTGQIEELEAYARANAEKFESDNNLGLVNQVVSSMYKRNIQRLTQTYLTLSLHDIASTVQLNSPKEAEMHVLQMIQDGEIYATINQKDGMVRFLEDPEQYKTCEMIEHIDSSIQRIMALSRKLTATDEQISCDQLYLSKAGRERQRYDFDDFDVPQKFNI

SEQ ID NO: 55580 - protein, 311 aa, Glycine max
  peptide (1)..(311): Ceres Seq. ID no. 14308440
  misc_feature (142)..(246): Pfam Name: PCI domain Pfam Description: PCI domain
  misc_feature (1)..(291): Homolog of NCBI NO: 27696965 NR Description: Similar to COP9 (constitutive photomorphogenic)
  misc_feature (1)..(291): Homolog of NCBI NO: 6753488 NR Description: COP9 (constitutive photomorphogenic), subunit 3
  misc_feature (1)..(291): Homolog of NCBI NO: 34870793 NR Description: similar to COP9 constitutive photomorphogenic
  misc_feature (1)..(291): Homolog of NCBI NO: 23238222 NR Description: COP9 constitutive photomorphogenic homolog
  misc_feature (1)..(291): Homolog of NCBI NO: 28279587 NR Description: Similar to COP9 constitutive photomorphogenic
  misc_feature (1)..(291): Homolog of NCBI NO: 39795809 NR Description: Unknown (protein for MGC:77615) [Danio rerio]
  misc_feature (73)..(293): Homolog of NCBI NO: 1001955 NR Description: unknown protein
  misc_feature (1)..(265): Homolog of NCBI NO: 11290078 NR Description: hypothetical protein F18O22.40 - Arabidopsis
  misc_feature (1)..(311): Homolog of NCBI NO: 18417330 NR Description: COP9 complex subunit 3, FUS11 [Arabidopsis
  misc_feature (1)..(311): Homolog of NCBI NO: 16930463 NR Description: AT5g14250/F18O22_40 [Arabidopsis thaliana]
MLLEAPIRGVAPLFTALRKLQVSTEHLTPLHSEFLLLCLLAKCYKTGLSILDDDVFEVDQPRDLFLYCYYGGMICIGQKRFQKALDLLHNVVTAPMSTINAIAVEAYKKYILVSLIRHGQFSTSLPKYSSSTAQRNLKNFCQPYVELANSYGTGQIEELEAYARANAEKFESDNNLGLVNQVVSSMYKRNIQRLTQTYLTLSLHDIASTVQLNSPKEAEMHVLQMIQDGEIYATINQKDGMVRFLEDPEQYKTCEMIEHIDSSIQRIMALSRKLTATDEQISCDQLYLSKAGRERQRYDFDDFDVPQKFNI

SEQ ID NO: 55581 - DNA, 1508 bp, Glycine max
  misc_feature (1)..(1508): Ceres Seq. ID no. 15176748
ggaagaaagagagaaggtataagcagccgttttttctgttggtatatgaaggtggtgaaggaagaagaagaagaatggtgacggaccaagatatagcgaaaggggtggagtccctactgcgtcactctgacccaaactccataactacggtaaacggcgtcgttcagcagctggaggccaaactagggttagacctctctcacaaggccagtttcatcagagaccagatcgatcatcttctccggtcacagccacagacatttgctcctcaccctcctccacttcacaaagactattttgcccctcacacccaactgcacttcccaaccacccactttgctccccattttgccctccatgacgagatcaacttcctgcagcacccccaccctcctccaccgcgtaaagtcgagacctttcctcctcaaaatgttgcccctcctcaagtgcccaaagaaagtgtgcaaactggaagcaaaagaagaggtggtgctggtggtctaaacaaagtttgtggtgtttctcctgaacttcaggcggttgttggtgagccggcaatgccaagaactgaaattgtgaggcagctgtgggcatacataaagaaaaacaacctccaagatcctggtaacaaaagaaagataatttgtgatgatgccctgcgtttggtatttgagacagactgcaccgatatgttcaagatgaatcagttgctagctaaacacattatcccacttggtcctacaaaggagtcacaggctaaacgagtgaaggtggatactgaaattaagactgaaagtgctgaacctgctccatctaccgtggcaatatctgaagcgcttgccaaatttttgggcactgagggaagagagatgcaacagtctgaagccataagacttgtttgggagtacatcaagcttcaccatttggaggatcctttaaattcaatggtgatattatgcgatgcaaagcttcaagagctacttggatgtgaaagcatttctgctttaggaataccagagatgttagcacgtcatcatctatttaaacagtctgacacccgttagtgctgatcaattattgccatataagggtatgatctgcacaaaacgctggttatatgtttctgctcgttgctagatcgtataggaactttttacttattcctgtcacttcatttatctctttgttcactgacgtatgtaaactgtatgttgtctgacggttattaggttggttgtttagaatgacaatgtataccttgagctaggcaagaagtatattgtatttaatatatgccctttaggttacccgtgcattttattttatcagttctcaatgtctaacctcaactggctgatcgaattagtgatacttttgtacattgagatacaccaactactctgaaatgcaccttgtttttaccaaattttgtgaaaaatctcttggctttacatacatgagccgtgtgcagacttacatctaatctgaagtttctaatgtatacttat

SEQ ID NO: 55582 - protein, 353 aa, Glycine max
  peptide (1)..(353): Ceres Seq. ID no. 15176749
  misc_feature (25)..(82): Homolog of NCBI NO: 25405318 NR Description: hypothetical protein F13F21.4 [imported] -
  misc_feature (159)..(262): Homolog of NCBI NO: 25405318 NR Description: hypothetical protein F13F21.4 [imported] -
  misc_feature (25)..(82): Homolog of NCBI NO: 15222765 NR Description: hypothetical protein [Arabidopsis thaliana]
  misc_feature (159)..(264): Homolog of NCBI NO: 15222765 NR Description: hypothetical protein [Arabidopsis thaliana]
  misc_feature (25)..(82): Homolog of NCBI NO: 15230276 NR Description: hypothetical protein [Arabidopsis thaliana]
  misc_feature (150)..(346): Homolog of NCBI NO: 15230276 NR Description: hypothetical protein [Arabidopsis thaliana]
  misc_feature (92)..(350): Homolog of NCBI NO: 32488657 NR Description: OSJNBa0087O24.7 [Oryza sativa (japonica
  misc_feature (41)..(309): Homolog of NCBI NO: 7486830 NR Description: hypothetical protein T10I14.190 - Arabidopsis
  misc_feature (41)..(350): Homolog of NCBI NO: 18415906 NR Description: expressed protein [Arabidopsis thaliana]
  misc_feature (41)..(350): Homolog of NCBI NO: 21537175 NR Description: unknown [Arabidopsis thaliana]
KKERRYKQPFFLLVYEGGEGRRRRMVTDQDIAKGVESLLRHSDPNSITTVNGVVQQLEAKLGLDLSHKASFIRDQIDHLLRSQPQTFAPHPPPLHKDYFAPHTQLHFPTTHFAPHFALHDEINFLQHPHPPPPRKVETFPPQNVAPPQVPKESVQTGSKRRGGAGGLNKVCGVSPELQAVVGEPAMPRTEIVRQLWAYIKKNNLQDPGNKRKIICDDALRLVFETDCTDMFKMNQLLAKHIIPLGPTKESQAKRVKVDTEIKTESAEPAPSTVAISEALAKFLGTEGREMQQSEAIRLVWEYIKLHHLEDPLNSMVILCDAKLQELLGCESISALGIPEMLARHHLFKQSDTR

SEQ ID NO: 55583 - protein, 329 aa, Glycine max; identical to SEQ ID NO: 54862
  peptide (1)..(329): Ceres Seq. ID no. 15176750
  misc_feature (1)..(58): Homolog of NCBI NO: 25405318 NR Description: hypothetical protein F13F21.4 [imported] -
  misc_feature (135)..(238): Homolog of NCBI NO: 25405318 NR Description: hypothetical protein F13F21.4 [imported] -
  misc_feature (1)..(58): Homolog of NCBI NO: 15222765 NR Description: hypothetical protein [Arabidopsis thaliana]
  misc_feature (135)..(240): Homolog of NCBI NO: 15222765 NR Description: hypothetical protein [Arabidopsis thaliana]
  misc_feature (1)..(58): Homolog of NCBI NO: 15230276 NR Description: hypothetical protein [Arabidopsis thaliana]
  misc_feature (126)..(322): Homolog of NCBI NO: 15230276 NR Description: hypothetical protein [Arabidopsis thaliana]
  misc_feature (68)..(326): Homolog of NCBI NO: 32488657 NR Description: OSJNBa0087O24.7 [Oryza sativa (japonica
  misc_feature (17)..(285): Homolog of NCBI NO: 7486830 NR Description: hypothetical protein T10I14.190 - Arabidopsis
  misc_feature (17)..(326): Homolog of NCBI NO: 18415906 NR Description: expressed protein [Arabidopsis thaliana]
  misc_feature (17)..(326): Homolog of NCBI NO: 21537175 NR Description: unknown [Arabidopsis thaliana]

SEQ ID NO: 55584 - DNA, 1256 bp, Glycine max
  misc_feature (1)..(1256): Ceres Seq. ID no. 14316326
aattccacctcacattccttatcttccttcttcttttcaatcgtcgtcgattttcagtttccgattatgagaatctgatttcagaattcaaaaaaagaaaaagaaaaagaaaaaatgaacacgttaatctcaccgccttctacaaaccgttaccttggtggggtcccttactctttcctctctccgcttcgaaacatcaccaccaaccttaaccttccgaggttccattccacggttgctaccaacttcttgtcacactctccggttcttgccacactctccgcacgtgccacttctgatgaagtagacacgcaaacagtggttgaggaacttgcagaggagaagaaagtggaagagaacaccaacgaggacaacacatccactttttcttctcctattgacaaagaacttaaaaaggttgctcagaagactgctgctacctttgcaccaagggcttccacggctacaaaaaaccctgcagtgcccggaacggttctgtacagtgtttttgaggttcaagggtatgtttcaatgttgttggggggagctttgtcttttaatctcatcttcccttctgatgaacctgacatttggagattaatgggaatgtggtccatttggatgttcacaattccttcattacgagctcgagattgctcaaagaatgagaaagaagctctcaactatctttttctcctcatcccattgatcaatgttataatcccattcttttggaagtcctttgctgttgtttggtcagcagatgtagtagccttcttgggaatgtacgcatggaagtttggatggcttcagagaacggattaaggaacccaaacttggttgttaacagttatcaaggcttgttggctcgtctttcgcatggatctcaattttatgacacacaccaatgagatgtgacattccttgtagcacttcatggtccccaactcctggatgagtgatttctcatggagtagcctttgcatctacaagggcagtaagataccgacgttgcatccttcctattatcaaatgaagagaatgctataggtcgttttcaaaagttttgcatattgtattatcgccgtgtctcacattgcagaaaatttgaaatttcagaatgtaatcaagaatctcccaaagatgaaatataacgtagtcatgatatgtagattttgcatcagaggtggttgagattttagttttcaaatgcaattttcgaaataaaacatttgataaaaatagagttgaaattc

SEQ ID NO: 55585 - protein, 236 aa, Glycine max
  peptide (1)..(236): Ceres Seq. ID no. 14316327
  misc_feature (80)..(232): Homolog of NCBI NO: 25370849 NR Description: hypothetical protein At2g48070 [imported] -
  misc_feature (80)..(236): Homolog of NCBI NO: 18407519 NR Description: expressed protein [Arabidopsis thaliana]
MNTLISPPSTNRYLGGVPYSFLSPLRNITTNLNLPRFHSTVATNFLSHSPVLATLSARATSDEVDTQTVVEELAEEKKVEENTNEDNTSTFSSPIDKELKKVAQKTAATFAPRASTATKNPAVPGTVLYSVFEVQGYVSMLLGGALSFNLIFPSDEPDIWRLMGMWSIWMFTIPSLRARDCSKNEKEALNYLFLLIPLINVIIPFFWKSFAVVWSADVVAFLGMYAWKFGWLQRTD

SEQ ID NO: 55586 - DNA, 1404 bp, Glycine max
  misc_feature (1)..(1404): Ceres Seq. ID no. 14313317
tttttacttttatttatttttaccgtgcccacattgtaaaatagagaagttaattgataacactacatgccacacatttgagcgcataagtaccaacataagcatgtgatgaagtgggtacgaggggagaagttgaaagttgaaacaacagtcactctctattagattagatcagcagtgtaaggtaattctgtgtgagactggtcctctctgcaaactgtgttttgggacgaagatattgtaattttgcacccttggcttttaacgcacaattggaaacccccacatggcccatatctgaattgacaaaatacaaattagttgcagcacttaaaagcctctttttttcagcaacttcagtgggttctcacaactaattaacaacttgatagtacaatataaacaaatcaaaatgaaataagctaaggtgaatttactttaactcgcgcgtgaaccgatcaacactaaccctataggcatgtaaaaagttgtttcaggtaatgttaaatgaatactgaatgtgtagttgtgtattcttctatatatgttttaaactgatattgctcacgttatataacgttttggctaaactcatatttttatgtattgttcaatcaatgttacatgtttcatggttgtttcaattatttgccagccccctcctgtggtaacagtagttctcaaagttcgaatgcattgtgaagcatgtgctcaagttatacaaaagcgaatccgcaagattcaaggagtagagtcagtggagacaagcttgggaaatgatcaagtcatagtaaaaggtgtgattgacccagcaaagcttgttgattatgtgtacaagaggaccaaaaagcaagcttctattgtgaaagaggaggaaaaggaaaagaaggaagaagaggagaaaaaggaagagaaagaaaaagagaaaaaagaaggtgaagaaagcaagggagaagatgctgaagagggtgatactaaaactgacatcaagcgaagtgaatactggccattaaggtcctacgttgactacgttgactacccttatgctcctcagattttcagtgatgagaacccaaatgcatgcactgtaatgtagatcagtctattgtactaactcggtattttttagtagctgatcaactgaagcaacttgtgctgtgctgagtcgttggagcgtggaataagatgcatggttgtgaatatttcaaggctttgtatatgatttccacggcatccctcagagttggcattctatatatggagatggatgccttgtttcttatgtttatgagctttctacgtatttccttgccaaagggtggctagaatcagttgtgttagtgtgtactgaatttcggcctacaacttcaattatgtacctataatgatggcattaattaatag

SEQ ID NO: 55587 - protein, 164 aa, Glycine max
  peptide (1)..(164): Ceres Seq. ID no. 14313318
  misc_feature (76)..(162): Pfam Name: Hsp90 protein Pfam Description: Hsp90 protein
  misc_feature (20)..(133): Homolog of NCBI NO: 38344582 NR Description: OSJNBa0053B21.14 [Oryza sativa (japonica
  misc_feature (18)..(133): Homolog of NCBI NO: 4097547 NR Description: ATFP3 [Arabidopsis thaliana]
  misc_feature (18)..(133): Homolog of NCBI NO: 18424719 NR Description: copper chaperone (CCH)-related [Arabidopsis
  misc_feature (18)..(133): Homolog of NCBI NO: 9758294 NR Description: contains similarity to ATFP3~gene_id:MLE2.16
  misc_feature (18)..(163): Homolog of NCBI NO: 37532382 NR Description: putative ATFP3 [Oryza sativa (japonica
MYCSINVTCFMVVSIICQPPPVVTVVLKVRMHCEACAQVIQKRIRKIQGVESVETSLGNDQVIVKGVIDPAKLVDYVYKRTKKQASIVKEEEKEKKEEEEKKEEKEKEKKEGEESKGEDAEEGDTKTDIKRSEYWPLRSYVDYVDYPYAPQIFSDENPNACTVM

SEQ ID NO: 55588 - protein, 154 aa, Glycine max
  peptide (1)..(154): Ceres Seq. ID no. 14313319
  misc_feature (66)..(152): Pfam Name: Hsp90 protein Pfam Description: Hsp90 protein
  misc_feature (10)..(123): Homolog of NCBI NO: 38344582 NR Description: OSJNBa0053B21.14 [Oryza sativa (japonica
  misc_feature (8)..(123): Homolog of NCBI NO: 4097547 NR Description: ATFP3 [Arabidopsis thaliana]
  misc_feature (8)..(123): Homolog of NCBI NO: 18424719 NR Description: copper chaperone (CCH)-related [Arabidopsis
  misc_feature (8)..(123): Homolog of NCBI NO: 9758294 NR Description: contains similarity to ATFP3~gene_id:MLE2.16
  misc_feature (8)..(153): Homolog of NCBI NO: 37532382 NR Description: putative ATFP3 [Oryza sativa (japonica
MVVSIICQPPPVVTVVLKVRMHCEACAQVIQKRIRKIQGVESVETSLGNDQVIVKGVIDPAKLVDYVYKRTKKQASIVKEEEKEKKEEEEKKEEKEKEKKEGEESKGEDAEEGDTKTDIKRSEYWPLRSYVDYVDYPYAPQIFSDENPNACTVM

SEQ ID NO: 55589 - protein, 134 aa, Glycine max
  peptide (1)..(134): Ceres Seq. ID no. 14313320
  misc_feature (46)..(132): Pfam Name: Hsp90 protein Pfam Description: Hsp90 protein
  misc_feature (1)..(103): Homolog of NCBI NO: 38344582 NR Description: OSJNBa0053B21.14 [Oryza sativa (japonica
  misc_feature (1)..(103): Homolog of NCBI NO: 4097547 NR Description: ATFP3 [Arabidopsis thaliana]
  misc_feature (1)..(103): Homolog of NCBI NO: 18424719 NR Description: copper chaperone (CCH)-related [Arabidopsis
  misc_feature (1)..(103): Homolog of NCBI NO: 9758294 NR Description: contains similarity to ATFP3~gene_id:MLE2.16
  misc_feature (1)..(133): Homolog of NCBI NO: 37532382 NR Description: putative ATFP3 [Oryza sativa (japonica
MHCEACAQVIQKRIRKIQGVESVETSLGNDQVIVKGVIDPAKLVDYVYKRTKKQASIVKEEEKEKKEEEEKKEEKEKEKKEGEESKGEDAEEGDTKTDIKRSEYWPLRSYVDYVDYPYAPQIFSDENPNACTVM

SEQ ID NO: 55590 - DNA, 1350 bp, Glycine max
  misc_feature (1)..(1350): Ceres Seq. ID no. 12364854
cagctacgtaggccccccccccccgatgaaaccatgctgttgcaaagaaaggatggcaagattacagctggtactacgaatgctaaagtttcccatttaatggagtccatcgagaaagattatgtctttgtcaattcccatttcgcatcattggaggctttctctgactactttgaagcatctgtgcaagatagttcctcgcacaggatttctctgtttccttcaaagaggactaatatggaggttagagatgcaaaacaaacaaaggatctgccctcttcctccactgaaggattagaaaatttaaaaagcaataaacttgaggcatgtgcagcttcctgtgaatttgctgccttaaggaaagaacatcaaatttccccactgcacccttcaaacaggttacagttgttgcatcagtatgtgcagatcattgctgaactttcacaagaaaagtataacacaggactgtatctagagtctcttgcagttgagttggtggttttggctatatggaaacagactctagaaatttgtagctcttggatggcctcaattacaaagagtgagttgcctggaagcagttcagctaatgaatccatatctgccagagatattaacttgccacagtctacagaacagaaaataaattttagtgatccttcatctatctccctgtgggccaaacatgagtttattgatgcagttgatcgtgctgagaaactatcatgtcatgttcaaaatatggataaggcaactgagatgccagatgcaatggaaattatattccaaaaagctctcttaattgggacaagtggtgctgtagatgaatatatggagatcagagatagggctgctgcatcttactcaaaagcgatgcttctactttcatttattgtggcagaagcagagaaccttccactgaacccaccattttcacttgttgccactaataaggagcgaatctcacaatatattcacagcttgcagtctcgtaaagaatcttcatcagagtcctcttcaaagaaagtgcttatacttttatcaaagtaaattactggtttttatagtttgtcttttcatcaccacttttggaatcggtgaagcaatttgttgctgacatcaatgttgacttcctgtgatgagtgcagacgagagactacctttgacagataccatgttgtatatagatagatagatataacctatcatggccttgtaaggggactttgcctttactgcatgatttcatgtatagaatgttatttctttgacatggaatttgtaaatagtgtatagctcatagtcttttacaattttgaaaccactatgatcaatcaattgaaatttctc

SEQ ID NO: 55591 - protein, 349 aa, Glycine max
  peptide (1)..(349): Ceres Seq. ID no. 12364855
  misc_feature (35)..(331): Homolog of NCBI NO: 11357820 NR Description: hypothetical protein F5K20.230 - Arabidopsis
  misc_feature (35)..(331): Homolog of NCBI NO: 26452168 NR Description: unknown protein [Arabidopsis thaliana]
  misc_feature (29)..(331): Homolog of NCBI NO: 30687274 NR Description: protein kinase family [Arabidopsis thaliana]
  misc_feature (29)..(331): Homolog of NCBI NO: 30687278 NR Description: protein kinase family [Arabidopsis thaliana]
  misc_feature (29)..(331): Homolog of NCBI NO: 20268768 NR Description: unknown protein [Arabidopsis thaliana]
  misc_feature (29)..(331): Homolog of NCBI NO: 25408568 NR Description: hypothetical protein At2g37850 [imported] -
  misc_feature (34)..(331): Homolog of NCBI NO: 34902042 NR Description: putative S_TKc, Serine/Threonine protein kinases,
  misc_feature (17)..(280): Homolog of NCBI NO: 34902242 NR Description: Putative serine/threonine protein kinase
  misc_feature (100)..(332): Homolog of NCBI NO: 11358841 NR Description: serine/threonine-protein kinase-like protein -
  misc_feature (87)..(332): Homolog of NCBI NO: 18412205 NR Description: serine/threonine-protein kinase-like protein
QLRRPPPPDETMLLQRKDGKITAGTTNAKVSHLMESIEKDYVFVNSHFASLEAFSDYFEASVQDSSSHRISLFPSKRTNMEVRDAKQTKDLPSSSTEGLENLKSNKLEACAASCEFAALRKEHQISPLHPSNRLQLLHQYVQIIAELSQEKYNTGLYLESLAVELVVLAIWKQTLEICSSWMASITKSELPGSSSANESISARDINLPQSTEQKINFSDPSSISLWAKHEFIDAVDRAEKLSCHVQNMDKATEMPDAMEIIFQKALLIGTSGAVDEYMEIRDRAAASYSKAMLLLSFIVAEAENLPLNPPFSLVATNKERISQYIHSLQSRKESSSESSSKKVLILLSK

SEQ ID NO: 55592 - protein, 338 aa, Glycine max
  peptide (1)..(338): Ceres Seq. ID no. 12364856
  misc_feature (24)..(320): Homolog of NCBI NO: 11357820 NR Description: hypothetical protein F5K20.230 - Arabidopsis
  misc_feature (24)..(320): Homolog of NCBI NO: 26452168 NR Description: unknown protein [Arabidopsis thaliana]
  misc_feature (18)..(320): Homolog of NCBI NO: 30687274 NR Description: protein kinase family [Arabidopsis thaliana]
  misc_feature (18)..(320): Homolog of NCBI NO: 30687278 NR Description: protein kinase family [Arabidopsis thaliana]
  misc_feature (18)..(320): Homolog of NCBI NO: 20268768 NR Description: unknown protein [Arabidopsis thaliana]
  misc_feature (18)..(320): Homolog of NCBI NO: 25408568 NR Description: hypothetical protein At2g37850 [imported] -
  misc_feature (23)..(320): Homolog of NCBI NO: 34902042 NR Description: putative S_TKc, Serine/Threonine protein kinases,
  misc_feature (6)..(269): Homolog of NCBI NO: 34902242 NR Description: Putative serine/threonine protein kinase
  misc_feature (89)..(321): Homolog of NCBI NO: 11358841 NR Description: serine/threonine-protein kinase-like protein -
  misc_feature (76)..(321): Homolog of NCBI NO: 18412205 NR Description: serine/threonine-protein kinase-like protein
MLLQRKDGKITAGTTNAKVSHLMESIEKDYVFVNSHFASLEAFSDYFEASVQDSSSHRISLFPSKRTNMEVRDAKQTKDLPSSSTEGLENLKSNKLEACAASCEFAALRKEHQISPLHPSNRLQLLHQYVQIIAELSQEKYNTGLYLESLAVELVVLAIWKQTLEICSSWMASITKSELPGSSSANESISARDINLPQSTEQKINFSDPSSISLWAKHEFIDAVDRAEKLSCHVQNMDKATEMPDAMEIIFQKALLIGTSGAVDEYMEIRDRAAASYSKAMLLLSFIVAEAENLPLNPPFSLVATNKERISQYIHSLQSRKESSSESSSKKVLILLSK

SEQ ID NO: 55593 - protein, 316 aa, Glycine max
  peptide (1)..(316): Ceres Seq. ID no. 12364857
  misc_feature (2)..(298): Homolog of NCBI NO: 11357820 NR Description: hypothetical protein F5K20.230 - Arabidopsis
  misc_feature (2)..(298): Homolog of NCBI NO: 26452168 NR Description: unknown protein [Arabidopsis thaliana]
  misc_feature (1)..(298): Homolog of NCBI NO: 30687274 NR Description: protein kinase family [Arabidopsis thaliana]
  misc_feature (1)..(298): Homolog of NCBI NO: 30687278 NR Description: protein kinase family [Arabidopsis thaliana]
  misc_feature (1)..(298): Homolog of NCBI NO: 20268768 NR Description: unknown protein [Arabidopsis thaliana]
  misc_feature (1)..(298): Homolog of NCBI NO: 25408568 NR Description: hypothetical protein At2g37850 [imported] -
  misc_feature (1)..(298): Homolog of NCBI NO: 34902042 NR Description: putative S_TKc, Serine/Threonine protein kinases,
  misc_feature (1)..(247): Homolog of NCBI NO: 34902242 NR Description: Putative serine/threonine protein kinase
  misc_feature (67)..(299): Homolog of NCBI NO: 11358841 NR Description: serine/threonine-protein kinase-like protein -
  misc_feature (54)..(299): Homolog of NCBI NO: 18412205 NR Description: serine/threonine-protein kinase-like protein
MESIEKDYVFVNSHFASLEAFSDYFEASVQDSSSHRISLFPSKRTNMEVRDAKQTKDLPSSSTEGLENLKSNKLEACAASCEFAALRKEHQISPLHPSNRLQLLHQYVQIIAELSQEKYNTGLYLESLAVELVVLAIWKQTLEICSSWMASITKSELPGSSSANESISARDINLPQSTEQKINFSDPSSISLWAKHEFIDAVDRAEKLSCHVQNMDKATEMPDAMEIIFQKALLIGTSGAVDEYMEIRDRAAASYSKAMLLLSFIVAEAENLPLNPPFSLVATNKERISQYIHSLQSRKESSSESSSKKVLILLSK

SEQ ID NO: 55594 - DNA, 1253 bp, Glycine max
  misc_feature (1)..(1253): Ceres Seq. ID no. 15176208
gggcatcccttgtctgtcgtttggcatcatatttcaaaggaggctcagaatagctggtcgacacgccagccagatccacaaatcggaaagaatcagagcgccgtcaaaaaccgccgtccacggcggtgaaactcgccttcgaatccagagcctctctcggttcctcactcttctcacatcgagcgcaacgccaaaaaatcgaatttcacgatggaagagttggagcagtggaaggaacaactttctcacttcgctaacctagctttggatcgtcttctcgaggttcctccgaatcagctctacgcagctgctgcaatcgtgattttcacaacgctgcttcttctctcaattcggttgttcaagcgtgcgaagtcaaacactgttgtgttggccgggctcagcgggagtggaaaaactgttatcttctatcagcttagggatggctctactcatcagggtactgttacatcaatggagcctaatgaaggcacttttattcttcacaacgagaaaacaaggaagggcaagataaaacctgttcatgttgttgatgttcctgggcattctcggcttcgacccaaactggatgagtacttgcctcaagcagctgggatagtttttgtggtagatgctttggactttttaccaaactgccgtgctgcttcagagtacctttatgatctattgactaaaggaagtgttgtgaggaagaagattccagtgcttattctctgcaacaaaacagacaaagtcactgctcatactaaagagtttatccgaaaacagatggagaaggaaatagacaaattacgggcatcaaggagtgcaatatcagcagctgacattgcaaatgagttcaccctgggggtacccggtgagccatttttttttacccagtgctctaacaaagtgacaactgcagatgcttctggtttaactggggaaatatctcagctggaagagtttatcagagaacatgtaaagcaatagctggatgttgtgtttaaacttgcggatttttgctgaattgaatgaatgtgtagtgttgttcttcttggttgctatttctttgatttcaaagaactgtctggataagaagaggcaaaaaagagaaaaaggtgttttggggtggggcttggggtgttcggagtaggaatcatgatgttgggatcaataaggatttacttcattgcaagccctggtattttgattggactataatgatttatctaattgtatcgatacttttattt

SEQ ID NO: 55595 - protein, 259 aa, Glycine max
  peptide (1)..(259): Ceres Seq. ID no. 15176209
  misc_feature (42)..(198): Pfam Name: ADP-ribosylation factor family Pfam Description: ADP-ribosylation factor family
  misc_feature (32)..(244): Homolog of NCBI NO: 27721301 NR Description: similar to signal recognition particle receptor,
  misc_feature (32)..(253): Homolog of NCBI NO: 12842535 NR Description: unnamed protein product [Mus musculus]
  misc_feature (32)..(253): Homolog of NCBI NO: 6678137 NR Description: signal recognition particle receptor, B subunit
  misc_feature (21)..(253): Homolog of NCBI NO: 28574941 NR Description: Signal recognition particle receptor beta
  misc_feature (34)..(240): Homolog of NCBI NO: 38174090 NR Description: Unknown (protein for MGC:75930) [Silurana
  misc_feature (37)..(256): Homolog of NCBI NO: 23509141 NR Description: hypothetical protein [Plasmodium falciparum 3D7]
  misc_feature (34)..(240): Homolog of NCBI NO: 32450191 NR Description: Unknown (protein for MGC:64420) [Xenopus laevis]
  misc_feature (1)..(253): Homolog of NCBI NO: 31218892 NR Description: ENSANGP00000020947 [Anopheles gambiae]
  misc_feature (1)..(258): Homolog of NCBI NO: 15224229 NR Description: signal recognition particle receptor beta subunit
  misc_feature (1)..(258): Homolog of NCBI NO: 15239201 NR Description: signal recognition particle receptor beta
MEELEQWKEQLSHFANLALDRLLEVPPNQLYAAAAIVIFTTLLLLSIRLFKRAKSNTVVLAGLSGSGKTVIFYQLRDGSTHQGTVTSMEPNEGTFILHNEKTRKGKIKPVHVVDVPGHSRLRPKLDEYLPQAAGIVFVVDALDFLPNCRAASEYLYDLLTKGSVVRKKIPVLILCNKTDKVTAHTKEFIRKQMEKEIDKLRASRSAISAADIANEFTLGVPGEPFFFTQCSNKVTTADASGLTGEISQLEEFIREHVKQ

SEQ ID NO: 55596 - protein, 172 aa, Glycine max
  peptide (1)..(172): Ceres Seq. ID no. 15176210
  misc_feature (1)..(111): Pfam Name: ADP-ribosylation factor family Pfam Description: ADP-ribosylation factor family
  misc_feature (1)..(157): Homolog of NCBI NO: 27721301 NR Description: similar to signal recognition particle receptor,
  misc_feature (1)..(166): Homolog of NCBI NO: 12842535 NR Description: unnamed protein product [Mus musculus]
  misc_feature (1)..(166): Homolog of NCBI NO: 6678137 NR Description: signal recognition particle receptor, B subunit
  misc_feature (1)..(166): Homolog of NCBI NO: 28574941 NR Description: Signal recognition particle receptor beta
  misc_feature (1)..(153): Homolog of NCBI NO: 38174090 NR Description: Unknown (protein for MGC:75930) [Silurana
  misc_feature (1)..(169): Homolog of NCBI NO: 23509141 NR Description: hypothetical protein [Plasmodium falciparum 3D7]
  misc_feature (1)..(153): Homolog of NCBI NO: 32450191 NR Description: Unknown (protein for MGC:64420) [Xenopus laevis]
  misc_feature (1)..(166): Homolog of NCBI NO: 31218892 NR Description: ENSANGP00000020947 [Anopheles gambiae]
  misc_feature (1)..(171): Homolog of NCBI NO: 15224229 NR Description: signal recognition particle receptor beta subunit
  misc_feature (1)..(171): Homolog of NCBI NO: 15239201 NR Description: signal recognition particle receptor beta
MEPNEGTFILHNEKTRKGKIKPVHVVDVPGHSRLRPKLDEYLPQAAGIVFVVDALDFLPNCRAASEYLYDLLTKGSVVRKKIPVLILCNKTDKVTAHTKEFIRKQMEKEIDKLRASRSAISAADIANEFTLGVPGEPFFFTQCSNKVTTADASGLTGEISQLEEFIREHVKQ

SEQ ID NO: 55597 - DNA, 1388 bp, Glycine max
  misc_feature (1)..(1388): Ceres Seq. ID no. 14308274
gaagaaaacatctagctgaagattccaatcggagctcagaaaaaagaaacctaatcgccgatcgcgtcgccgtcgcgccgaaagtcaccggactactgcctgcttctaaatagcttataatcttatctgaagatagagatatcatcatgggagaggtggcagtaatgcattctgagcctctgcagtttgattgcaatgacatgaagcatatcactgagaaagatgtatataatctattgtcaaacgaagagcacatacttggagaagaatcaagtcaatcatcaaatgacaaaaagatcaatgatttgagagagagaggatacatgaagtatggatgtcaacattaccgaagaagatgccgtattagggccccctgttgtgatgagatttttgattgccgccattgtcacaatgaggcaaaaaataatatcaacattgaccagaagcatagacacgatattccccgccatcaagttaaacaggtgatatgttctctttgtgagacagaacaagaggttcagcaaaattgtattaactgtggcgtttgtatgggcaagtacttctgtgggacgtgtaagctctttgatgatgatgtatctaagcagcagtatcattgcagtggctgtggaatttgcagaactggaggatgtgaaaatttcttccactgccacaaatgtggttgttgctactcaactcagctgaaaaacagccacccttgcgtggaaggagcaatgcatcatgattgccccatttgctttgagtatttgtttgaatctgtgaatgatgtcactgttctgctctgtggacatacaatacataagagctgcctaaaggaaatgagggaacatttccagtatgcatgccctctctgcttgaagtcggtttgtgatatgtcaaaggtttgggagaaatttgacttggagattgctgctacaccaatgcctgaaccgtatcaaaacaaaatggtttggatcctttgcaatgattgtggcaaaagttctcacgtgcagttccatcttgttgctcaaaagtgcttgaactgcaagtcctacaacacacgggaaacaagaggctgagcaagtggtaatggttatttataggaccacttttgctctcacttcattgctgtgtaggtgtagtggcaatccaagtgcatcctttattgaggaaaatgcatgtgggaattgtcatttaattgcaggcaggccgaaccacatccaagagaaaaacggtttatcacgttgatgtggtgtcgagggtagtgtagagtcagcaattgtcgtgttggttatttcgtgttggggaaacccttttagtgttccagtgttcactcctgtaatgtttgtttgggattaatgccaactttcaaattagctgttactttatag

SEQ ID NO: 55598 - protein, 309 aa, Glycine max
  peptide (1)..(309): Ceres Seq. ID no. 14308275
  misc_feature (64)..(147): Pfam Name: CHY zinc finger Pfam Description: CHY zinc finger
  misc_feature (63)..(309): Homolog of NCBI NO: 13386058 NR Description: androgen receptor N-terminal-interacting protein
  misc_feature (48)..(305): Homolog of NCBI NO: 11358168 NR Description: hypothetical protein T20O10.70 - Arabidopsis
  misc_feature (48)..(305): Homolog of NCBI NO: 30695702 NR Description: expressed protein [Arabidopsis thaliana]
  misc_feature (48)..(305): Homolog of NCBI NO: 30102616 NR Description: At3g62970 [Arabidopsis thaliana]
  misc_feature (52)..(305): Homolog of NCBI NO: 15238890 NR Description: expressed protein [Arabidopsis thaliana]
  misc_feature (61)..(309): Homolog of NCBI NO: 37535002 NR Description: putative PGPD14 protein (pollen germination
  misc_feature (56)..(309): Homolog of NCBI NO: 21593716 NR Description: PGPD14 protein [Arabidopsis thaliana]
  misc_feature (44)..(309): Homolog of NCBI NO: 15237169 NR Description: PGPD14 protein [Arabidopsis thaliana]
  misc_feature (42)..(309): Homolog of NCBI NO: 4105798 NR Description: PGPD14 [Petunia x hybrida]
  misc_feature (21)..(306): Homolog of NCBI NO: 34910658 NR Description: putative PGPD14 protein (pollen germination
MGEVAVMHSEPLQFDCNDMKHITEKDVYNLLSNEEHILGEESSQSSNDKKINDLRERGYMKYGCQHYRRRCRIRAPCCDEIFDCRHCHNEAKNNINIDQKHRHDIPRHQVKQVICSLCETEQEVQQNCINCGVCMGKYFCGTCKLFDDDVSKQQYHCSGCGICRTGGCENFFHCHKCGCCYSTQLKNSHPCVEGAMHHDCPICFEYLFESVNDVTVLLCGHTIHKSCLKEMREHFQYACPLCLKSVCDMSKVWEKFDLEIAATPMPEPYQNKMVWILCNDCGKSSHVQFHLVAQKCLNCKSYNTRETRG

SEQ ID NO: 55599 - protein, 303 aa, Glycine max
  peptide (1)..(303): Ceres Seq. ID no. 14308276
  misc_feature (58)..(141): Pfam Name: CHY zinc finger Pfam Description: CHY zinc finger
  misc_feature (57)..(303): Homolog of NCBI NO: 13386058 NR Description: androgen receptor N-terminal-interacting protein
  misc_feature (42)..(299): Homolog of NCBI NO: 11358168 NR Description: hypothetical protein T20O10.70 - Arabidopsis
  misc_feature (42)..(299): Homolog of NCBI NO: 30695702 NR Description: expressed protein [Arabidopsis thaliana]
  misc_feature (42)..(299): Homolog of NCBI NO: 30102616 NR Description: At3g62970 [Arabidopsis thaliana]
  misc_feature (46)..(299): Homolog of NCBI NO: 15238890 NR Description: expressed protein [Arabidopsis thaliana]
  misc_feature (55)..(303): Homolog of NCBI NO: 37535002 NR Description: putative PGPD14 protein (pollen germination
  misc_feature (50)..(303): Homolog of NCBI NO: 21593716 NR Description: PGPD14 protein [Arabidopsis thaliana]
  misc_feature (38)..(303): Homolog of NCBI NO: 15237169 NR Description: PGPD14 protein [Arabidopsis thaliana]
  misc_feature (36)..(303): Homolog of NCBI NO: 4105798 NR Description: PGPD14 [Petunia x hybrida]
  misc_feature (15)..(300): Homolog of NCBI NO: 34910658 NR Description: putative PGPD14 protein (pollen germination
MHSEPLQFDCNDMKHITEKDVYNLLSNEEHILGEESSQSSNDKKINDLRERGYMKYGCQHYRRRCRIRAPCCDEIFDCRHCHNEAKNNINIDQKHRHDIPRHQVKQVICSLCETEQEVQQNCINCGVCMGKYFCGTCKLFDDDVSKQQYHCSGCGICRTGGCENFFHCHKCGCCYSTQLKNSHPCVEGAMHHDCPICFEYLFESVNDVTVLLCGHTIHKSCLKEMREHFQYACPLCLKSVCDMSKVWEKFDLEIAATPMPEPYQNKMVWILCNDCGKSSHVQFHLVAQKCLNCKSYNTRETRG

SEQ ID NO: 55600 - protein, 291 aa, Glycine max
  peptide (1)..(291): Ceres Seq. ID no. 14308277
  misc_feature (46)..(129): Pfam Name: CHY zinc finger Pfam Description: CHY zinc finger
  misc_feature (45)..(291): Homolog of NCBI NO: 13386058 NR Description: androgen receptor N-terminal-interacting protein
  misc_feature (30)..(287): Homolog of NCBI NO: 11358168 NR Description: hypothetical protein T20O10.70 - Arabidopsis
  misc_feature (30)..(287): Homolog of NCBI NO: 30695702 NR Description: expressed protein [Arabidopsis thaliana]
  misc_feature (30)..(287): Homolog of NCBI NO: 30102616 NR Description: At3g62970 [Arabidopsis thaliana]
  misc_feature (34)..(287): Homolog of NCBI NO: 15238890 NR Description: expressed protein [Arabidopsis thaliana]
  misc_feature (43)..(291): Homolog of NCBI NO: 37535002 NR Description: putative PGPD14 protein (pollen germination
  misc_feature (38)..(291): Homolog of NCBI NO: 21593716 NR Description: PGPD14 protein [Arabidopsis thaliana]
  misc_feature (26)..(291): Homolog of NCBI NO: 15237169 NR Description: PGPD14 protein [Arabidopsis thaliana]
  misc_feature (24)..(291): Homolog of NCBI NO: 4105798 NR Description: PGPD14 [Petunia x hybrida]
  misc_feature (3)..(288): Homolog of NCBI NO: 34910658 NR Description: putative PGPD14 protein (pollen germination
MKHITEKDVYNLLSNEEHILGEESSQSSNDKKINDLRERGYMKYGCQHYRRRCRIRAPCCDEIFDCRHCHNEAKNNINIDQKHRHDIPRHQVKQVICSLCETEQEVQQNCINCGVCMGKYFCGTCKLFDDDVSKQQYHCSGCGICRTGGCENFFHCHKCGCCYSTQLKNSHPCVEGAMHHDCPICFEYLFESVNDVTVLLCGHTIHKSCLKEMREHFQYACPLCLKSVCDMSKVWEKFDLEIAATPMPEPYQNKMVWILCNDCGKSSHVQFHLVAQKCLNCKSYNTRETRG

SEQ ID NO: 55601 - DNA, 1314 bp, Glycine max
  misc_feature (1)..(1314): Ceres Seq. ID no. 14312844
aaggaataagtttgcacaccgaaggaagtaggaagtattgctcagttactttccatgatgtctaatttcgtttccaattagactcgtatttctagacttgcgggacagagctgccctcgagaaaatattttcaaccaataagtttgatgctgtgatacattttgctgggcttaaggcagtgggtgaaagcgtggataaaccactgctctactttgacaacaacttgatagggacaatcgttctatttgaagtcatggctgcccacggatgcaagaagcttgtgttctcatcttcagcaactgtatatggctggccaaaggaggtcccatgtaccgaagagttccctttgtcagcgacaaacccatatggacgaaccaagcttatcatcgaagaaatttgtcgtgatatctaccgtgcagattctgattggaaagttatactgttgagatacttcaacccagttggtgcacatcccagtggttatattggtgaagatcctcgtggaattccaaacaatctcatgccctttgttcaacaagtggcagttggcagacgccctgcattgactgtttttggaaacgattataaaacaactgacggcactggagttcgtgattacattcatgttcttgatttagcagatgggcatattgcggcattgcgtaaactcaatgatcctaaaataggttgtgaggtttataacttgggaacaggaaagggaacatctgttttggagatggtaaacgcttttgaacaggcctctggaaagaaaattccacttgcaatggctggtcggagacctggagatgctgaaattgtttatgcatcaacagagaaagcggaaagagaacttaattggaagactaaatatagcatcgatgatatgtgccgcgatcaatggaattgggctagcaaaaacccttatggctatggtgcatctgcagattcctccaattgatgtcgatgattgtcggatatagtatatatgttctcttttggggtctttttgaaccctgtcgcccaataggtccctaaagtttttctttagctattctaaggtggaagttaaatcatttcctagtttattatgaattataataaagtggtaaataagtagtggtttagtttacttagcgattctttaggttccaactcacagaatattgaatgggtattctctcatgttcttcatgaacatgactgcatcctgttttgtaaatctaaaccacacattatagagtatgactaaccggtataatcttaccttacctcattatccataataaagttttacatagcattatatgctaaaag

SEQ ID NO: 55602 - protein, 234 aa, Glycine max
  peptide (1)..(234): Ceres Seq. ID no. 14312845
  misc_feature (1)..(223): Pfam Name: NAD dependent epimerase/dehydratase family Pfam Description: NAD dependent epimerase/dehydratase family
  misc_feature (1)..(233): Homolog of NCBI NO: 40253348 NR Description: putative UDP-glucose 4-epimerase
  misc_feature (1)..(233): Homolog of NCBI NO: 15217653 NR Description: UDP-glucose 4-epimerase (UDP-galactose
  misc_feature (1)..(234): Homolog of NCBI NO: 21715990 NR Description: UDP-glucose 4-epimerase [Oryza sativa (japonica
  misc_feature (1)..(233): Homolog of NCBI NO: 32130594 NR Description: UDP-glucose-4-epimerase [Zea mays]
  misc_feature (1)..(234): Homolog of NCBI NO: 21553659 NR Description: UDP-galactose 4-epimerase-like protein
  misc_feature (1)..(234): Homolog of NCBI NO: 15236988 NR Description: UDP-glucose 4-epimerase (UDP-galactose
  misc_feature (1)..(234): Homolog of NCBI NO: 21536846 NR Description: UDPglucose 4-epimerase-like protein [Arabidopsis
  misc_feature (1)..(234): Homolog of NCBI NO: 12643850 NR Description: Probable UDP-glucose 4-epimerase At4g10960
  misc_feature (1)..(234): Homolog of NCBI NO: 15236663 NR Description: UDP-glucose 4-epimerase (UDP-galactose
  misc_feature (1)..(234): Homolog of NCBI NO: 11386775 NR Description: UDP-glucose 4-epimerase GEPI48 (Galactowaldenase)
MAAHGCKKLVFSSSATVYGWPKEVPCTEEFPLSATNPYGRTKLIIEEICRDIYRADSDWKVILLRYFNPVGAHPSGYIGEDPRGIPNNLMPFVQQVAVGRRPALTVFGNDYKTTDGTGVRDYIHVLDLADGHIAALRKLNDPKIGCEVYNLGTGKGTSVLEMVNAFEQASGKKIPLAMAGRRPGDAEIVYASTEKAERELNWKTKYSIDDMCRDQWNWASKNPYGYGASADSSN

SEQ ID NO: 55603 - protein, 145 aa, Glycine max
  peptide (1)..(145): Ceres Seq. ID no. 14312846
  misc_feature (1)..(134): Pfam Name: NAD dependent epimerase/dehydratase family Pfam Description: NAD dependent epimerase/dehydratase family
  misc_feature (1)..(144): Homolog of NCBI NO: 40253348 NR Description: putative UDP-glucose 4-epimerase
  misc_feature (1)..(144): Homolog of NCBI NO: 15217653 NR Description: UDP-glucose 4-epimerase (UDP-galactose
  misc_feature (1)..(145): Homolog of NCBI NO: 21715990 NR Description: UDP-glucose 4-epimerase [Oryza sativa (japonica
  misc_feature (1)..(144): Homolog of NCBI NO: 32130594 NR Description: UDP-glucose-4-epimerase [Zea mays]
  misc_feature (1)..(145): Homolog of NCBI NO: 21553659 NR Description: UDP-galactose 4-epimerase-like protein
  misc_feature (1)..(145): Homolog of NCBI NO: 15236988 NR Description: UDP-glucose 4-epimerase (UDP-galactose
  misc_feature (1)..(145): Homolog of NCBI NO: 21536846 NR Description: UDPglucose 4-epimerase-like protein [Arabidopsis
  misc_feature (1)..(145): Homolog of NCBI NO: 12643850 NR Description: Probable UDP-glucose 4-epimerase At4g10960
  misc_feature (1)..(145): Homolog of NCBI NO: 15236663 NR Description: UDP-glucose 4-epimerase (UDP-galactose
  misc_feature (1)..(145): Homolog of NCBI NO: 11386775 NR Description: UDP-glucose 4-epimerase GEPI48 (Galactowaldenase)
MPFVQQVAVGRRPALTVFGNDYKTTDGTGVRDYIHVLDLADGHIAALRKLNDPKIGCEVYNLGTGKGTSVLEMVNAFEQASGKKIPLAMAGRRPGDAEIVYASTEKAERELNWKTKYSIDDMCRDQWNWASKNPYGYGASADSSN

SEQ ID NO: 55604 - DNA, 1378 bp, Glycine max
  misc_feature (1)..(1378): Ceres Seq. ID no. 15226111
cagctacgtaggccccccccccaaaacttgagtatgagaagcagcttgttgatgatgatcaggtgaaaatgaatcatttcaaatcctttcttatttcttaaattttaatctaaaaaaattacatatttattatttttctttgaaccaactgcaattgttcaaatgcttcttccattatgcaatattaaccagttactaatacaactatgaattttgttttattaaaagtgtttattgcttcataagtaggtagctttactctggccattcttgatattaattcctttttgatatttattgtgttaaattgttgcttgtaattagcaaatattggaagaatgttgaacctcaaccgtatctagatattcatgttgatactcgtagcagccatggataataagtccacacagcatatatgttaccactgttacttgtatttgctatttgtgcaatgcttcatttgaagcttaaaagtctcatttggatagtcaattttagtcttgatgctcgatatttttgactaaattctagtttctgaattgtaggatcagcaagcagagacaacaacttttagatttgaaaagaatatgaaagatgtaggtgtgggttcaatgttagaggcacctgaatctcctgtggaatggcctctgcaattcaagcagcagcaaagagaaatagtggaactgtggcaagcctgcaaggtatcattgttccacaggacttacttctttcttttattcaggggtgatccaactgactccatatacnnnnnaggtggagtttagaagattatctttcctcaaagaaacatttgccagtggaaatcagtccatgaacgcttcaaggttctctttctctcttgtttctgtcacatgagcatctgatatgcatggtgcttaatgttgactgacatacatgtgtttgtttggggaaacagcgcgaagggtgttcagcgggagagagaggtgctggtcaagcttatgcagagaaggctatccgaggaagagaggaagaatctcttcagcaagtggggcattgaattggattcaaagcgccggaggaagcagctggcgaatcgcatatggagcagcaccgatatgaatcacatcgtggagagtgctgcggttgttgcaaagttattgagctttacagggctgaaggagatgtttggccttagcttctcaccacatacctgggcgtctcttttttaggccaccaaatttattcttattttaattacctaatccctgtcaagtgtgaatactcagtctcttagatacattacaacctgtatttcaacgagttaagaacaatttctagtataacataacatgttctgctcgtttcattttgcctattaatcaatatgttttccgct

SEQ ID NO: 55605 - protein, 103 aa, Glycine max
  peptide (1)..(103): Ceres Seq. ID no. 15226112
  misc_feature (12)..(95): Homolog of NCBI NO: 34914660 NR Description: putative kinesin [Oryza sativa (japonica
  misc_feature (13)..(98): Homolog of NCBI NO: 15238979 NR Description: kinesin heavy chain-related protein [Arabidopsis
  misc_feature (15)..(80): Homolog of NCBI NO: 10177425 NR Description: kinesin heavy chain DNA binding protein-like
  misc_feature (12)..(96): Homolog of NCBI NO: 15234898 NR Description: kinesin like protein [Arabidopsis thaliana]
  misc_feature (15)..(95): Homolog of NCBI NO: 30698217 NR Description: kinesin heavy chain DNA binding protein-related
  misc_feature (12)..(95): Homolog of NCBI NO: 30693419 NR Description: expressed protein [Arabidopsis thaliana]
  misc_feature (13)..(96): Homolog of NCBI NO: 15208447 NR Description: kinesin heavy chain [Zea mays]
  misc_feature (12)..(96): Homolog of NCBI NO: 15208467 NR Description: kinesin heavy chain [Zea mays]
  misc_feature (12)..(96): Homolog of NCBI NO: 38344976 NR Description: OSJNBa0011L07.1 [Oryza sativa (japonica
  misc_feature (12)..(96): Homolog of NCBI NO: 38567877 NR Description: OSJNBa0091D06.23 [Oryza sativa (japonica
MLTDIHVFVWGNSAKGVQREREVLVKLMQRRLSEEERKNLFSKWGIELDSKRRRKQLANRIWSSTDMNHIVESAAVVAKLLSFTGLKEMFGLSFSPHTWASLF

SEQ ID NO: 55606 - protein, 76 aa, Glycine max
  peptide (1)..(76): Ceres Seq. ID no. 15226113
  misc_feature (1)..(68): Homolog of NCBI NO: 34914660 NR Description: putative kinesin [Oryza sativa (japonica
  misc_feature (1)..(71): Homolog of NCBI NO: 15238979 NR Description: kinesin heavy chain-related protein [Arabidopsis
  misc_feature (1)..(53): Homolog of NCBI NO: 10177425 NR Description: kinesin heavy chain DNA binding protein-like
  misc_feature (1)..(69): Homolog of NCBI NO: 15234898 NR Description: kinesin like protein [Arabidopsis thaliana]
  misc_feature (1)..(68): Homolog of NCBI NO: 30698217 NR Description: kinesin heavy chain DNA binding protein-related
  misc_feature (1)..(68): Homolog of NCBI NO: 30693419 NR Description: expressed protein [Arabidopsis thaliana]
  misc_feature (1)..(69): Homolog of NCBI NO: 15208447 NR Description: kinesin heavy chain [Zea mays]
  misc_feature (1)..(69): Homolog of NCBI NO: 15208467 NR Description: kinesin heavy chain [Zea mays]
  misc_feature (1)..(69): Homolog of NCBI NO: 38344976 NR Description: OSJNBa0011L07.1 [Oryza sativa (japonica
  misc_feature (1)..(69): Homolog of NCBI NO: 38567877 NR Description: OSJNBa0091D06.23 [Oryza sativa (japonica
MQRRLSEEERKNLFSKWGIELDSKRRRKQLANRIWSSTDMNHIVESAAVVAKLLSFTGLKEMFGLSFSPHTWASLF

SEQ ID NO: 55607 - protein, 65 aa, Glycine max
  peptide (1)..(65): Ceres Seq. ID no. 15226114
  misc_feature (1)..(65): Homolog of NCBI NO: 34914660 NR Description: putative kinesin [Oryza sativa (japonica
  misc_feature (23)..(65): Homolog of NCBI NO: 15238979 NR Description: kinesin heavy chain-related protein [Arabidopsis
  misc_feature (1)..(60): Homolog of NCBI NO: 10177425 NR Description: kinesin heavy chain DNA binding protein-like
  misc_feature (22)..(65): Homolog of NCBI NO: 15234898 NR Description: kinesin like protein [Arabidopsis thaliana]
  misc_feature (1)..(60): Homolog of NCBI NO: 30698217 NR Description: kinesin heavy chain DNA binding protein-related
  misc_feature (1)..(60): Homolog of NCBI NO: 30693419 NR Description: expressed protein [Arabidopsis thaliana]
  misc_feature (1)..(60): Homolog of NCBI NO: 15208447 NR Description: kinesin heavy chain [Zea mays]
  misc_feature (1)..(60): Homolog of NCBI NO: 15208467 NR Description: kinesin heavy chain [Zea mays]
  misc_feature (1)..(60): Homolog of NCBI NO: 38344976 NR Description: OSJNBa0011L07.1 [Oryza sativa (japonica
  misc_feature (1)..(60): Homolog of NCBI NO: 38567877 NR Description: OSJNBa0091D06.23 [Oryza sativa (japonica
  misc_feature (61)..(61): Xaa is any aa, unknown or other
  misc_feature (62)..(62): Xaa is any aa, unknown or other
MKDVGVGSMLEAPESPVEWPLQFKQQQREIVELWQACKVSLFHRTYFFLLFRGDPTDSIYXXGGV

SEQ ID NO: 55608 - DNA, 1217 bp, Glycine max
  misc_feature (1)..(1217): Ceres Seq. ID no. 15176204
ggagtgagaatagccatgtctacttcaaagagcgtcagcagttctagtgaagatgacaatgaacttagaagagggccttggactcttgaagaggataatttgctctcccaatatatttctagtcatggagaagggcgatggaatttgctagctaaacgttcaggattaaagcgaactgggaaaagttgcagattaaggtggctaaattatctaaagccagatgtaaaacggggaaatttaaccccacaagagcaacttataatcctcgaactccactcaaagtggggaaacaggtggtcaaaaattgcacaaaatttgccaggcagaacagacaatgaaatcaagaactattggagaactaggattcagaaacaggcaagacatttgaaaattgacactgacagcagagagtttcaggaacttgttaggcgtttctggatgcctagattgcttcaaaaagccaaagaatcatcttcttcagccatgtcaattcaaaaccaggcaactcctatgccttttgatggtgtttctcagcattcaactgttgggaccataccatcacattcacacaccccttggcagggaccttgtatgaatgaagctggtcccacttacatggaccaacatgagcagaactcagactctgaacacaacaatggttcatgcatctccttgtctgagtcagcaaattttccaaaagtgcctcagcattttggacgcaccaccatcacccaatatcatgccttgaataacaatgactttggcaccttcacatatgacggctacaatgtaagcaacaatgtctatgagatggacaacttcaaaacgcctactacaagggtggctgaggatgcgcaatacccaactggtgattgtcaaatggtaggaagcaattgggtaaacagcgattttgcatgtaacatgtggaacatggatgaattgtggcaatttagcaagttacaaaaataagattttagggtttggtttttttggagttaccaagactctatctttggtgatgttattattgttatcatgaactgttgattagctactaccaaattaattaatacagatggtgattgttttctgtacatctgttttgcattactctgttttgcaatttgtattgattgagaaaagtcattaattagtcactagttcaaaacacaaacagttggagattgagtgctaataaagatttcgtaaatataaag

SEQ ID NO: 55609 - protein, 322 aa, Glycine max
  peptide (1)..(322): Ceres Seq. ID no. 15176205
  misc_feature (77)..(122): Pfam Name: Myb-like DNA-binding domain Pfam Description: Myb-like DNA-binding domain
  misc_feature (11)..(181): Homolog of NCBI NO: 14249015 NR Description: myb-like transcription factor Myb 5 [Gossypium
  misc_feature (11)..(181): Homolog of NCBI NO: 23476307 NR Description: myb-like transcription factor 5 [Gossypioides
  misc_feature (21)..(172): Homolog of NCBI NO: 19073328 NR Description: typical P-type R2R3 Myb protein [Sorghum bicolor]
  misc_feature (9)..(210): Homolog of NCBI NO: 34898110 NR Description: putative typical P-type R2R3 Myb protein
  misc_feature (4)..(318): Homolog of NCBI NO: 7446185 NR Description: dehydration-induced myb-related protein Cpm7 -
  misc_feature (9)..(158): Homolog of NCBI NO: 18395645 NR Description: myb family transcription factor(MYB116)
  misc_feature (2)..(318): Homolog of NCBI NO: 7446184 NR Description: myb-related protein Cpm5 - Craterostigma
  misc_feature (7)..(160): Homolog of NCBI NO: 15221373 NR Description: myb family transcription factor [Arabidopsis
  misc_feature (2)..(318): Homolog of NCBI NO: 7446183 NR Description: ABA-induced myb-related protein Cpm10 -
  misc_feature (4)..(187): Homolog of NCBI NO: 34895506 NR Description: putative myb-related transcription factor
GVRIAMSTSKSVSSSSEDDNELRRGPWTLEEDNLLSQYISSHGEGRWNLLAKRSGLKRTGKSCRLRWLNYLKPDVKRGNLTPQEQLIILELHSKWGNRWSKIAQNLPGRTDNEIKNYWRTRIQKQARHLKIDTDSREFQELVRRFWMPRLLQKAKESSSSAMSIQNQATPMPFDGVSQHSTVGTIPSHSHTPWQGPCMNEAGPTYMDQHEQNSDSEHNNGSCISLSESANFPKVPQHFGRTTITQYHALNNNDFGTFTYDGYNVSNNVYEMDNFKTPTTRVAEDAQYPTGDCQMVGSNWVNSDFACNMWNMDELWQFSKLQK

SEQ ID NO: 55610 - protein, 317 aa, Glycine max
  peptide (1)..(317): Ceres Seq. ID no. 15176206
  misc_feature (72)..(117): Pfam Name: Myb-like DNA-binding domain Pfam Description: Myb-like DNA-binding domain
  misc_feature (6)..(176): Homolog of NCBI NO: 14249015 NR Description: myb-like transcription factor Myb 5 [Gossypium
  misc_feature (6)..(176): Homolog of NCBI NO: 23476307 NR Description: myb-like transcription factor 5 [Gossypioides
  misc_feature (16)..(167): Homolog of NCBI NO: 19073328 NR Description: typical P-type R2R3 Myb protein [Sorghum bicolor]
  misc_feature (4)..(205): Homolog of NCBI NO: 34898110 NR Description: putative typical P-type R2R3 Myb protein
  misc_feature (1)..(313): Homolog of NCBI NO: 7446185 NR Description: dehydration-induced myb-related protein Cpm7 -
  misc_feature (4)..(153): Homolog of NCBI NO: 18395645 NR Description: myb family transcription factor(MYB116)
  misc_feature (1)..(313): Homolog of NCBI NO: 7446184 NR Description: myb-related protein Cpm5 - Craterostigma
  misc_feature (2)..(155): Homolog of NCBI NO: 15221373 NR Description: myb family transcription factor [Arabidopsis
  misc_feature (1)..(313): Homolog of NCBI NO: 7446183 NR Description: ABA-induced myb-related protein Cpm10 -
  misc_feature (1)..(182): Homolog of NCBI NO: 34895506 NR Description: putative myb-related transcription factor
MSTSKSVSSSSEDDNELRRGPWTLEEDNLLSQYISSHGEGRWNLLAKRSGLKRTGKSCRLRWLNYLKPDVKRGNLTPQEQLIILELHSKWGNRWSKIAQNLPGRTDNEIKNYWRTRIQKQARHLKIDTDSREFQELVRRFWMPRLLQKAKESSSSAMSIQNQATPMPFDGVSQHSTVGTIPSHSHTPWQGPCMNEAGPTYMDQHEQNSDSEHNNGSCISLSESANFPKVPQHFGRTTITQYHALNNNDFGTFTYDGYNVSNNVYEMDNFKTPTTRVAEDAQYPTGDCQMVGSNWVNSDFACNMWNMDELWQFSKLQK

SEQ ID NO: 55611 - protein, 176 aa, Glycine max
  peptide (1)..(176): Ceres Seq. ID no. 15176207
  misc_feature (1)..(35): Homolog of NCBI NO: 14249015 NR Description: myb-like transcription factor Myb 5 [Gossypium
  misc_feature (1)..(35): Homolog of NCBI NO: 23476307 NR Description: myb-like transcription factor 5 [Gossypioides
  misc_feature (1)..(26): Homolog of NCBI NO: 19073328 NR Description: typical P-type R2R3 Myb protein [Sorghum bicolor]
  misc_feature (1)..(64): Homolog of NCBI NO: 34898110 NR Description: putative typical P-type R2R3 Myb protein
  misc_feature (1)..(172): Homolog of NCBI NO: 7446185 NR Description: dehydration-induced myb-related protein Cpm7 -
  misc_feature (1)..(12): Homolog of NCBI NO: 18395645 NR Description: myb family transcription factor(MYB116)
  misc_feature (1)..(172): Homolog of NCBI NO: 7446184 NR Description: myb-related protein Cpm5 - Craterostigma
  misc_feature (1)..(14): Homolog of NCBI NO: 15221373 NR Description: myb family transcription factor [Arabidopsis
  misc_feature (1)..(172): Homolog of NCBI NO: 7446183 NR Description: ABA-induced myb-related protein Cpm10 -
  misc_feature (1)..(41): Homolog of NCBI NO: 34895506 NR Description: putative myb-related transcription factor
MPRLLQKAKESSSSAMSIQNQATPMPFDGVSQHSTVGTIPSHSHTPWQGPCMNEAGPTYMDQHEQNSDSEHNNGSCISLSESANFPKVPQHFGRTTITQYHALNNNDFGTFTYDGYNVSNNVYEMDNFKTPTTRVAEDAQYPTGDCQMVGSNWVNSDFACNMWNMDELWQFSKLQK

SEQ ID NO: 55612 - DNA, 1158 bp, Glycine max
  misc_feature (1)..(1158): Ceres Seq. ID no. 14316324
aatcccaagagagttggaaaacaaagtatagagtgaaagaatgggtgagaaaagcaagattttgatcataggaggcaccggctacatcggcaaacatatagtggaagcaagcgcaaaggctggaaatcccacttttgctttggtgagggaatccacactctctgacccctccaaggcacaactcatccacaattttgaggctttgggcgttaatttggtccgcggggatctgtacgatcatgagaagttggtgaaagctatcaagcaagtagatgtcgtcatatccacgctgggtcacctgcagcttgccgatcagctcaagatcatcgctgccattaaggaagccggtaatgttaagaggtttttcccttcggaattcggtaacgacgtggatcgtgtccatgccgtggaaccagcaaaatctgcattagctatcaaagcccaaattcgacgcagcattgaagccgaaggcatcccctatacgtacgtttccagcaactacttcgctggctattttcttcccacattagcacaaccaggtgcttttgctccacctccacccaaagacaaagtcattatcttgggcgatggaaatcctaaagcaattttcaacaaggaagaggacattggaacctacaccatcagggctgtggatgaccctaggacattgaacaagattctctacctcaggccccctaagaacatttactcgttcaacgagcttgtggccttgtgggagaacaagattggcaagaccctcgaaaaaatttatgtaccagaggagaaggttctcaaggacatcgaagaggcacctcttccaatcaatgtggtattagcaatcaaccactcagtgttcgtgaagggtgaccacaccaactttgagattgagccatctttcggggttgaggcttctgagttgtacccggatgtcaactacaccaccgtggaagaataccttggtcagttcgcttgagaatttaaaaggagaaagatgctcttgtgatcggatatttaaataatctgagttgttgatttggagagtggaagattgtgttttatgtcaaaagatcgctatgtgatgtaatcttgcctttcatgtgtagaatgttcctacttgaatggttgaaaaataataaatgacttacgagttgagataac

SEQ ID NO: 55613 - protein, 310 aa, Glycine max
  peptide (1)..(310): Ceres Seq. ID no. 14316325
  misc_feature (4)..(309): Pfam Name: Isoflavone reductase Pfam Description: Isoflavone reductase
  misc_feature (1)..(308): Homolog of NCBI NO: 6525021 NR Description: isoflavone reductase-like NAD(P)H-dependent
  misc_feature (1)..(309): Homolog of NCBI NO: 7578895 NR Description: phenylcoumaran benzylic ether reductase homolog
  misc_feature (1)..(309): Homolog of NCBI NO: 3243234 NR Description: isoflavone reductase related protein [Pyrus
  misc_feature (1)..(302): Homolog of NCBI NO: 7484603 NR Description: 2'-hydroxyisoflavone reductase (EC 1.3.1.45) -
  misc_feature (1)..(302): Homolog of NCBI NO: 4731376 NR Description: isoflavone reductase homolog Bet v 6.0101 [Betula
  misc_feature (1)..(309): Homolog of NCBI NO: 10764491 NR Description: allergenic isoflavone reductase-like protein Bet
MGEKSKILIIGGTGYIGKHIVEASAKAGNPTFALVRESTLSDPSKAQLIHNFEALGVNLVRGDLYDHEKLVKAIKQVDVVISTLGHLQLADQLKIIAAIKEAGNVKRFFPSEFGNDVDRVHAVEPAKSALAIKAQIRRSIEAEGIPYTYVSSNYFAGYFLPTLAQPGAFAPPPPKDKVIILGDGNPKAIFNKEEDIGTYTIRAVDDPRTLNKILYLRPPKNIYSFNELVALWENKIGKTLEKIYVPEEKVLKDIEEAPLPINVVLAINHSVFVKGDHTNFEIEPSFGVEASELYPDVNYTTVEEYLGQFA

SEQ ID NO: 55614 - DNA, 1298 bp, Glycine max
  misc_feature (1)..(1298): Ceres Seq. ID no. 14308787
gatcagcaccaattaaagaagaaatatgggaaatgaaggtattatgaatggtgttacccccgggaaggctaccatattagctcttggcaaggctttccctcatcagcttgtcatgcaagagtatttagttgatggatatttcagggacacaaactgtgacagtcctgaactcaagcagaagctcactagactttgcaagacaaccacagtgaaaacaaggtatgtggtaatgtcagaggagatactgaaaaagtatccagaacttgcggctgaaggcatccccacagtaaagcaacgactagagatatgcaatgaggcagtgacagaaatggccattgaagcttcccaagcttgcatcaacaactggggtggatctttatcagacataacacacttagtttatgtgtcatccagtgaagctagattacccggtggtgacctttacctagccaaaggactaggactgagccctgatactcaacgagtcatgctctattttgctggttgttcgggaggcgtggccggcttacgtgttgcgaaagacatagctgagaacaaccctggaagccgagtgctgattgctacctcagaaactacaattattgggttcaagccaccaagtgcagatagaccttatgatctagttggggtggcactctttggggatggtgctggtgcaatgataattggctcagacccaatattggagtctgagaagcctctctttgagcttcacactgcagttcaggagtttttgccacacactgagaagaaaatagatgggaggctgacagaagaaggaataagcttcaagttagcaagggaacttcctcaaataattgaagacaatgttgaaggattctgtgacaagttaataagtgttgttgggtttgagaacaaggagtacaacaagatgttttgggctgttcatccggggggtcctgccatcttgaaccgcattgaaaagaggcttgatttgttgccagagaagctgagtgcaagtagaagggctctcatggattatggcaatgctagcagtaacaccattgtgtatgtgcttgagtatatgatagaggaaggtctcaagattagaaaggatgccagaggagatcttgaatggggcttaatacttgcttttggaccagggattacatttgagggaattcttgccaggaacttgtgtgcttgatgatattattatcacaagatgtgtttatgtgatacgtgactccatcaaaagcatattcaagactataatgatcaaaagaagaaaagtcttaaataaaaactttaaccgt

SEQ ID NO: 55615 - protein, 387 aa, Glycine max
  peptide (1)..(387): Ceres Seq. ID no. 14308788
  misc_feature (1)..(225): Pfam Name: Chalcone and stilbene synthases, N-terminal domain Pfam Description: Chalcone and stilbene synthases, N-terminal
  misc_feature (2)..(385): Homolog of NCBI NO: 7433785 NR Description: chalcone synthase homolog - rice
  misc_feature (2)..(385): Homolog of NCBI NO: 37535500 NR Description: anther-specific protein YY2
  misc_feature (13)..(385): Homolog of NCBI NO: 15236691 NR Description: chalcone and stilbene synthase family
  misc_feature (13)..(385): Homolog of NCBI NO: 21554288 NR Description: putative chalcone synthase [Arabidopsis thaliana]
  misc_feature (20)..(385): Homolog of NCBI NO: 7433783 NR Description: anther-specific protein - wood tobacco
  misc_feature (13)..(385): Homolog of NCBI NO: 15217605 NR Description: chalcone and stilbene synthase family
  misc_feature (12)..(385): Homolog of NCBI NO: 7433790 NR Description: chalcone synthase homolog ChS1 - Monterey pine
  misc_feature (1)..(387): Homolog of NCBI NO: 34902722 NR Description: putative chalcone synthase
  misc_feature (1)..(385): Homolog of NCBI NO: 7433787 NR Description: anther-specific protein homolog T11I11.90 -
  misc_feature (1)..(385): Homolog of NCBI NO: 18418528 NR Description: chalcone and stilbene synthase family
MGNEGIMNGVTPGKATILALGKAFPHQLVMQEYLVDGYFRDTNCDSPELKQKLTRLCKTTTVKTRYVVMSEEILKKYPELAAEGIPTVKQRLEICNEAVTEMAIEASQACINNWGGSLSDITHLVYVSSSEARLPGGDLYLAKGLGLSPDTQRVMLYFAGCSGGVAGLRVAKDIAENNPGSRVLIATSETTIIGFKPPSADRPYDLVGVALFGDGAGAMIIGSDPILESEKPLFELHTAVQEFLPHTEKKIDGRLTEEGISFKLARELPQIIEDNVEGFCDKLISVVGFENKEYNKMFWAVHPGGPAILNRIEKRLDLLPEKLSASRRALMDYGNASSNTIVYVLEYMIEEGLKIRKDARGDLEWGLILAFGPGITFEGILARNLCA

SEQ ID NO: 55616 - protein, 381 aa, Glycine max
  peptide (1)..(381): Ceres Seq. ID no. 14308789
  misc_feature (1)..(219): Pfam Name: Chalcone and stilbene synthases, N-terminal domain Pfam Description: Chalcone and stilbene synthases, N-terminal
  misc_feature (1)..(379): Homolog of NCBI NO: 7433785 NR Description: chalcone synthase homolog - rice
  misc_feature (1)..(379): Homolog of NCBI NO: 37535500 NR Description: anther-specific protein YY2
  misc_feature (7)..(379): Homolog of NCBI NO: 15236691 NR Description: chalcone and stilbene synthase family
  misc_feature (7)..(379): Homolog of NCBI NO: 21554288 NR Description: putative chalcone synthase [Arabidopsis thaliana]
  misc_feature (14)..(379): Homolog of NCBI NO: 7433783 NR Description: anther-specific protein - wood tobacco
  misc_feature (7)..(379): Homolog of NCBI NO: 15217605 NR Description: chalcone and stilbene synthase family
  misc_feature (6)..(379): Homolog of NCBI NO: 7433790 NR Description: chalcone synthase homolog ChS1 - Monterey pine
  misc_feature (1)..(381): Homolog of NCBI NO: 34902722 NR Description: putative chalcone synthase
  misc_feature (1)..(379): Homolog of NCBI NO: 7433787 NR Description: anther-specific protein homolog T11I11.90 -
  misc_feature (1)..(379): Homolog of NCBI NO: 18418528 NR Description: chalcone and stilbene synthase family
MNGVTPGKATILALGKAFPHQLVMQEYLVDGYFRDTNCDSPELKQKLTRLCKTTTVKTRYVVMSEEILKKYPELAAEGIPTVKQRLEICNEAVTEMAIEASQACINNWGGSLSDITHLVYVSSSEARLPGGDLYLAKGLGLSPDTQRVMLYFAGCSGGVAGLRVAKDIAENNPGSRVLIATSETTIIGFKPPSADRPYDLVGVALFGDGAGAMIIGSDPILESEKPLFELHTAVQEFLPHTEKKIDGRLTEEGISFKLARELPQIIEDNVEGFCDKLISVVGFENKEYNKMFWAVHPGGPAILNRIEKRLDLLPEKLSASRRALMDYGNASSNTIVYVLEYMIEEGLKIRKDARGDLEWGLILAFGPGITFEGILARNLCA

SEQ ID NO: 55617 - protein, 358 aa, Glycine max
  peptide (1)..(358): Ceres Seq. ID no. 14308790
  misc_feature (1)..(196): Pfam Name: Chalcone and stilbene synthases, N-terminal domain Pfam Description: Chalcone and stilbene synthases, N-terminal
  misc_feature (1)..(356): Homolog of NCBI NO: 7433785 NR Description: chalcone synthase homolog - rice
  misc_feature (1)..(356): Homolog of NCBI NO: 37535500 NR Description: anther-specific protein YY2
  misc_feature (1)..(356): Homolog of NCBI NO: 15236691 NR Description: chalcone and stilbene synthase family
  misc_feature (1)..(356): Homolog of NCBI NO: 21554288 NR Description: putative chalcone synthase [Arabidopsis thaliana]
  misc_feature (1)..(356): Homolog of NCBI NO: 7433783 NR Description: anther-specific protein - wood tobacco
  misc_feature (1)..(356): Homolog of NCBI NO: 15217605 NR Description: chalcone and stilbene synthase family
  misc_feature (1)..(356): Homolog of NCBI NO: 7433790 NR Description: chalcone synthase homolog ChS1 - Monterey pine
  misc_feature (1)..(358): Homolog of NCBI NO: 34902722 NR Description: putative chalcone synthase
  misc_feature (1)..(356): Homolog of NCBI NO: 7433787 NR Description: anther-specific protein homolog T11I11.90 -
  misc_feature (1)..(356): Homolog of NCBI NO: 18418528 NR Description: chalcone and stilbene synthase family
MQEYLVDGYFRDTNCDSPELKQKLTRLCKTTTVKTRYVVMSEEILKKYPELAAEGIPTVKQRLEICNEAVTEMAIEASQACINNWGGSLSDITHLVYVSSSEARLPGGDLYLAKGLGLSPDTQRVMLYFAGCSGGVAGLRVAKDIAENNPGSRVLIATSETTIIGFKPPSADRPYDLVGVALFGDGAGAMIIGSDPILESEKPLFELHTAVQEFLPHTEKKIDGRLTEEGISFKLARELPQIIEDNVEGFCDKLISVVGFENKEYNKMFWAVHPGGPAILNRIEKRLDLLPEKLSASRRALMDYGNASSNTIVYVLEYMIEEGLKIRKDARGDLEWGLILAFGPGITFEGILARNLCA

SEQ ID NO: 55618 - DNA, 1670 bp, Glycine max
  misc_feature (1)..(1670): Ceres Seq. ID no. 14308851
ggcgaaacactcccctttgccgctgttgttgttgctgcaccaccgaacaacttcccctgtaaatcgcgtttcgtttgtgcaaggttttaaaagatggctgatgctgaggacattcaacctcttgttgttgataatggaactggaatggtcaaggctggttttgcaggtgatgatgctcctagggccgtgttccccagcattattgggagaccacgccatactggtgtaatggttgggatgggtcagaaggatgcttacgtgggtgatgaagcccaatcaaaaaggggtatactcaccttgaagtatcctatagagcatggcatagtcagcaactgggacgatatggagaagatttggcatcacacattttacaatgagctacgtgttgcccctgaagaacaccccgtacttcttaccgaggcaccactcaatcccaaggccaacagagagaagatgacccaaattatgtttgagactttcaatgtgcctgccatgtatgttgcaattcaggctgtcttgtctctgtatgccagtggacgtactacaggtattgtgcttgattctggtgatggtgtgagccacacggtgcccatatatgaagggtatgctcttcctcatgcaattcttcggttggaccttgctggccgtgatttaacagagtacttggtgaaaatccttaccgagagaggatactccttcagcacctctgccgaaaaggaaattgtccgtgatgtgaaggagaaattggcatacgtggcccttgatttcgaacaagaaatggagactactaagagtagttctgcagtggaaaagagctatgaattgcctgatggacaggtcattacaataggttctgagagattccgttgcccagaagtactgttccagccttctctgattggtatggaagctactggaattcatgaaacgacatacaattccatcatgaaatgtgatgttgatattaggaaggatctgtatggaaacatcgtgcttagtggagggtctactatgtttccgggaattgctgatcgcatgagcaaggaaattagtgctcttgcacccagtagcatgaaaatcaaggtggttgcacctcctgagagaaagtacagtgtctggattggtggttctatcttggcatcacttagcaccttccaacagatgtggatctccaagggtgaatatgatgaatctgggccagccatcgttcatcggaagtgcttctaaagttgggtcaagtcgagctggatggtgatcaagttcttcatgcacccagtcctgtgccatatttcagtaaagtttggttgacttatttggtatttgaagctttgggtttttaatagatatatctagtttaatgaatggatttgtaagttgagtatgttataagtttctccgttaggtcaccttggaagccagactttttatgctattggcggatggtattggaactttgtaggttctgcttggtttggtttttccttttattcgattttcatgttgtggccaagaattaggtgcctcgagttaggaggacgatagtctaagcatcttttctcacagggatttttgagtcagtttctgtttatatttattatatgcataattggtttttatgtttgcagtacactcagaaatcagaatgtttttattgtttgaggtgattaaag

SEQ ID NO: 55619 - protein, 377 aa, Glycine max
  peptide (1)..(377): Ceres Seq. ID no. 14308852
  misc_feature (1)..(377): Pfam Name: Actin Pfam Description: Actin
  misc_feature (1)..(377): Homolog of NCBI NO: 15229955 NR Description: actin 11 (ACT11) [Arabidopsis thaliana]
  misc_feature (1)..(377): Homolog of NCBI NO: 23955912 NR Description: actin [Stevia rebaudiana]
  misc_feature (1)..(377): Homolog of NCBI NO: 32186894 NR Description: actin [Gossypium hirsutum]
  misc_feature (1)..(377): Homolog of NCBI NO: 11276971 NR Description: actin isoform B [imported] - Mimosa pudica
  misc_feature (1)..(377): Homolog of NCBI NO: 34541966 NR Description: actin [Trifolium pratense]
  misc_feature (1)..(377): Homolog of NCBI NO: 11276968 NR Description: actin [imported] - Picea rubens
  misc_feature (1)..(377): Homolog of NCBI NO: 9965319 NR Description: actin [Setaria italica]
  misc_feature (1)..(377): Homolog of NCBI NO: 231505 NR Description: ACTIN 101
  misc_feature (1)..(377): Homolog of NCBI NO: 32186906 NR Description: actin [Gossypium hirsutum]
  misc_feature (1)..(377): Homolog of NCBI NO: 7960247 NR Description: actin-like protein [Phalaenopsis sp. 'True Lady']
MADAEDIQPLVVDNGTGMVKAGFAGDDAPRAVFPSIIGRPRHTGVMVGMGQKDAYVGDEAQSKRGILTLKYPIEHGIVSNWDDMEKIWHHTFYNELRVAPEEHPVLLTEAPLNPKANREKMTQIMFETFNVPAMYVAIQAVLSLYASGRTTGIVLDSGDGVSHTVPIYEGYALPHAILRLDLAGRDLTEYLVKILTERGYSFSTSAEKEIVRDVKEKLAYVALDFEQEMETTKSSSAVEKSYELPDGQVITIGSERFRCPEVLFQPSLIGMEATGIHETTYNSIMKCDVDIRKDLYGNIVLSGGSTMFPGIADRMSKEISALAPSSMKIKVVAPPERKYSVWIGGSILASLSTFQQMWISKGEYDESGPAIVHRKCF

SEQ ID NO: 55620 - protein, 360 aa, Glycine max
  peptide (1)..(360): Ceres Seq. ID no. 14308853
  misc_feature (1)..(360): Pfam Name: Actin Pfam Description: Actin
  misc_feature (1)..(360): Homolog of NCBI NO: 15229955 NR Description: actin 11 (ACT11) [Arabidopsis thaliana]
  misc_feature (1)..(360): Homolog of NCBI NO: 23955912 NR Description: actin [Stevia rebaudiana]
  misc_feature (1)..(360): Homolog of NCBI NO: 32186894 NR Description: actin [Gossypium hirsutum]
  misc_feature (1)..(360): Homolog of NCBI NO: 11276968 NR Description: actin [imported] - Picea rubens
  misc_feature (1)..(360): Homolog of NCBI NO: 34541966 NR Description: actin [Trifolium pratense]
  misc_feature (1)..(360): Homolog of NCBI NO: 11276971 NR Description: actin isoform B [imported] - Mimosa pudica
  misc_feature (1)..(360): Homolog of NCBI NO: 9965319 NR Description: actin [Setaria italica]
  misc_feature (1)..(360): Homolog of NCBI NO: 231505 NR Description: ACTIN 101
  misc_feature (1)..(360): Homolog of NCBI NO: 32186906 NR Description: actin [Gossypium hirsutum]
  misc_feature (1)..(360): Homolog of NCBI NO: 7960247 NR Description: actin-like protein [Phalaenopsis sp. 'True Lady']
MVKAGFAGDDAPRAVFPSIIGRPRHTGVMVGMGQKDAYVGDEAQSKRGILTLKYPIEHGIVSNWDDMEKIWHHTFYNELRVAPEEHPVLLTEAPLNPKANREKMTQIMFETFNVPAMYVAIQAVLSLYASGRTTGIVLDSGDGVSHTVPIYEGYALPHAILRLDLAGRDLTEYLVKILTERGYSFSTSAEKEIVRDVKEKLAYVALDFEQEMETTKSSSAVEKSYELPDGQVITIGSERFRCPEVLFQPSLIGMEATGIHETTYNSIMKCDVDIRKDLYGNIVLSGGSTMFPGIADRMSKEISALAPSSMKIKVVAPPERKYSVWIGGSILASLSTFQQMWISKGEYDESGPAIVHRKCF

SEQ ID NO: 55621 - protein, 332 aa, Glycine max
  peptide (1)..(332): Ceres Seq. ID no. 14308854
  misc_feature (1)..(332): Pfam Name: Actin Pfam Description: Actin
  misc_feature (1)..(332): Homolog of NCBI NO: 15229955 NR Description: actin 11 (ACT11) [Arabidopsis thaliana]
  misc_feature (1)..(332): Homolog of NCBI NO: 23955912 NR Description: actin [Stevia rebaudiana]
  misc_feature (1)..(332): Homolog of NCBI NO: 32186894 NR Description: actin [Gossypium hirsutum]
  misc_feature (1)..(332): Homolog of NCBI NO: 9965319 NR Description: actin [Setaria italica]
  misc_feature (1)..(332): Homolog of NCBI NO: 11276968 NR Description: actin [imported] - Picea rubens
  misc_feature (1)..(332): Homolog of NCBI NO: 34541966 NR Description: actin [Trifolium pratense]
  misc_feature (1)..(332): Homolog of NCBI NO: 11276971 NR Description: actin isoform B [imported] - Mimosa pudica
  misc_feature (1)..(332): Homolog of NCBI NO: 231505 NR Description: ACTIN 101
  misc_feature (1)..(332): Homolog of NCBI NO: 32186906 NR Description: actin [Gossypium hirsutum]
  misc_feature (1)..(332): Homolog of NCBI NO: 7960247 NR Description: actin-like protein [Phalaenopsis sp. 'True Lady']
MVGMGQKDAYVGDEAQSKRGILTLKYPIEHGIVSNWDDMEKIWHHTFYNELRVAPEEHPVLLTEAPLNPKANREKMTQIMFETFNVPAMYVAIQAVLSLYASGRTTGIVLDSGDGVSHTVPIYEGYALPHAILRLDLAGRDLTEYLVKILTERGYSFSTSAEKEIVRDVKEKLAYVALDFEQEMETTKSSSAVEKSYELPDGQVITIGSERFRCPEVLFQPSLIGMEATGIHETTYNSIMKCDVDIRKDLYGNIVLSGGSTMFPGIADRMSKEISALAPSSMKIKVVAPPERKYSVWIGGSILASLSTFQQMWISKGEYDESGPAIVHRKCF

SEQ ID NO: 55622 - DNA, 1632 bp, Glycine max
  misc_feature (1)..(1632): Ceres Seq. ID no. 14312785
actgtcataacataagagtcgtggacgcggttggctgttgctgtctacggttccaacttccaagttacaagcttcacccattttataaaagttacggttcggttccgctgcattcgtgctttctagcaacacaaaatgagcgccatctctttcagttccacccatttgcacagttggaaaaatcccaaggggtttggaaaggtgagaaagcaacgagatgggaagctacttgtcaagtgttccagcaagagtgggaacccaacttcattgcaaaatggggttcgtgttggtgttcttggagctagtggctacactggttctgaggttatgcgactcttggctaatcatccacagtttgggattgcactgatgactgctgataggaaagctgggcagccaatctcttctgtattcccacatttgagcactcgggacttgccagatttgattgcaataaaggatgcaaacttttctgatgtggatgctgtattctgttgtttgcctcatggaactactcaggaaattattaaaggcctaccaaagcacttgaagattgttgatctttctgcagattttcgtctaaaagatctttctgagtatgaagagtggtatggtcagccgcatagagcaccagatttgcagaaagaagctatatatggattaacagaggttttaagggaggaaataaagaatgcacgtctagttgctaatcctggttgttatccaacttctgttcaacttcctcttgtcccattgataaaggctagtcttattgagcttaaaaatattatcattgatgctaaatctggtgtgagtggagcagggcgcagtgccaaagaaaatttattgttcactgaagtaactgaaggtctcaattcttatggtgttaccctacatcgccatgttcctgaaattgagcagggacttgctgatgcttcaggttcaaaagtaactgttagttttacaccacatctaattccaatgagccgtggtatgtaatcaactatttatgtggaaatggctccaggagtgagaattgaggacctgtaccagcaactgaagctctcatatgagaatgaagaatttgtttttgtgttggaaaatggagtcattcctcgaactcacagcgttaaagggactaattactgtttaatcaatgtttttccagaccgaattcctggaagagcaatcattatatctgttattgataatctagtgaagggagcttcaggtcaagctttacaaaaccttaatttgttaatgggatttccagaaaatttgggacttcattacctgcctctttttccatagagtagttgtcttgtccaactagagctccaattctgcagtcacagttccaccaaaatacttgatggagcagaggaaatattttcaagttatgtattttcgttctctagattgtaatgtgagattcttcaagaatttagaagggaattgattatggcattggcagggatactatagcaatttctgtcttttttgtcctttgttttgatctgtaatgttagaaatcactgaaggtggtggcgtgtagttttccaagtttgggttttggtttatttgtaatgccaatattttagtggactatgaaatcaccatctcaagtttttg

SEQ ID NO: 55623 - protein, 287 aa, Glycine max
  peptide (1)..(287): Ceres Seq. ID no. 14312786
  misc_feature (204)..(287): Pfam Name: Semialdehyde dehydrogenase, dimerisation domain Pfam Description: Semialdehyde dehydrogenase, dimerisation domain
  misc_feature (49)..(287): Homolog of NCBI NO: 23054526 NR Description: hypothetical protein [Geobacter metallireducens]
  misc_feature (51)..(287): Homolog of NCBI NO: 22956652 NR Description: hypothetical protein [Rhodobacter sphaeroides]
  misc_feature (50)..(287): Homolog of NCBI NO: 28376951 NR Description: N-acetyl-gamma-glutamyl-phosphate reductase (N-acetyl-glutamate semialdehyde dehydrogenase) (NAGSA
  misc_feature (50)..(287): Homolog of NCBI NO: 6714965 NR Description: N-acetyl-gamma-glutamyl-phosphate reductase
  misc_feature (117)..(287): Homolog of NCBI NO: 23013472 NR Description: hypothetical protein [Magnetospirillum
  misc_feature (49)..(287): Homolog of NCBI NO: 22968389 NR Description: hypothetical protein [Rhodospirillum rubrum]
  misc_feature (46)..(287): Homolog of NCBI NO: 25284367 NR Description: hypothetical protein At2g19940 [imported] -
  misc_feature (39)..(287): Homolog of NCBI NO: 37535658 NR Description: putative N-acetyl-gamma-glutamyl-phosphate
  misc_feature (46)..(287): Homolog of NCBI NO: 18399202 NR Description: N-acetyl-gamma-glutamyl-phosphate reductase
  misc_feature (46)..(287): Homolog of NCBI NO: 16604368 NR Description: At2g19940/F6F22.3 [Arabidopsis thaliana]
MSAISFSSTHLHSWKNPKGFGKVRKQRDGKLLVKCSSKSGNPTSLQNGVRVGVLGASGYTGSEVMRLLANHPQFGIALMTADRKAGQPISSVFPHLSTRDLPDLIAIKDANFSDVDAVFCCLPHGTTQEIIKGLPKHLKIVDLSADFRLKDLSEYEEWYGQPHRAPDLQKEAIYGLTEVLREEIKNARLVANPGCYPTSVQLPLVPLIKASLIELKNIIIDAKSGVSGAGRSAKENLLFTEVTEGLNSYGVTLHRHVPEIEQGLADASGSKVTVSFTPHLIPMSRGM

SEQ ID NO: 55624 - protein, 223 aa, Glycine max
  peptide (1)..(223): Ceres Seq. ID no. 14312787
  misc_feature (140)..(223): Pfam Name: Semialdehyde dehydrogenase, dimerisation domain Pfam Description: Semialdehyde dehydrogenase, dimerisation domain
  misc_feature (1)..(223): Homolog of NCBI NO: 23054526 NR Description: hypothetical protein [Geobacter metallireducens]
  misc_feature (1)..(223): Homolog of NCBI NO: 22956652 NR Description: hypothetical protein [Rhodobacter sphaeroides]
  misc_feature (1)..(223): Homolog of NCBI NO: 28376951 NR Description: N-acetyl-gamma-glutamyl-phosphate reductase (N-acetyl-glutamate semialdehyde dehydrogenase) (NAGSA
  misc_feature (1)..(223): Homolog of NCBI NO: 6714965 NR Description: N-acetyl-gamma-glutamyl-phosphate reductase
  misc_feature (53)..(223): Homolog of NCBI NO: 23013472 NR Description: hypothetical protein [Magnetospirillum
  misc_feature (1)..(223): Homolog of NCBI NO: 22968389 NR Description: hypothetical protein [Rhodospirillum rubrum]
  misc_feature (1)..(223): Homolog of NCBI NO: 25284367 NR Description: hypothetical protein At2g19940 [imported] -
  misc_feature (1)..(223): Homolog of NCBI NO: 37535658 NR Description: putative N-acetyl-gamma-glutamyl-phosphate
  misc_feature (1)..(223): Homolog of NCBI NO: 18399202 NR Description: N-acetyl-gamma-glutamyl-phosphate reductase
  misc_feature (1)..(223): Homolog of NCBI NO: 16604368 NR Description: At2g19940/F6F22.3 [Arabidopsis thaliana]
MRLLANHPQFGIALMTADRKAGQPISSVFPHLSTRDLPDLIAIKDANFSDVDAVFCCLPHGTTQEIIKGLPKHLKIVDLSADFRLKDLSEYEEWYGQPHRAPDLQKEAIYGLTEVLREEIKNARLVANPGCYPTSVQLPLVPLIKASLIELKNIIIDAKSGVSGAGRSAKENLLFTEVTEGLNSYGVTLHRHVPEIEQGLADASGSKVTVSFTPHLIPMSRGM

SEQ ID NO: 55625 - protein, 209 aa, Glycine max
  peptide (1)..(209): Ceres Seq. ID no. 14312788
  misc_feature (126)..(209): Pfam Name: Semialdehyde dehydrogenase, dimerisation domain Pfam Description: Semialdehyde dehydrogenase, dimerisation domain
  misc_feature (1)..(209): Homolog of NCBI NO: 23054526 NR Description: hypothetical protein [Geobacter metallireducens]
  misc_feature (1)..(209): Homolog of NCBI NO: 22956652 NR Description: hypothetical protein [Rhodobacter sphaeroides]
  misc_feature (1)..(209): Homolog of NCBI NO: 28376951 NR Description: N-acetyl-gamma-glutamyl-phosphate reductase (N-acetyl-glutamate semialdehyde dehydrogenase) (NAGSA
  misc_feature (1)..(209): Homolog of NCBI NO: 6714965 NR Description: N-acetyl-gamma-glutamyl-phosphate reductase
  misc_feature (39)..(209): Homolog of NCBI NO: 23013472 NR Description: hypothetical protein [Magnetospirillum
  misc_feature (1)..(209): Homolog of NCBI NO: 22968389 NR Description: hypothetical protein [Rhodospirillum rubrum]
  misc_feature (1)..(209): Homolog of NCBI NO: 25284367 NR Description: hypothetical protein At2g19940 [imported] -
  misc_feature (1)..(209): Homolog of NCBI NO: 37535658 NR Description: putative N-acetyl-gamma-glutamyl-phosphate
  misc_feature (1)..(209): Homolog of NCBI NO: 18399202 NR Description: N-acetyl-gamma-glutamyl-phosphate reductase
  misc_feature (1)..(209): Homolog of NCBI NO: 16604368 NR Description: At2g19940/F6F22.3 [Arabidopsis thaliana]
MTADRKAGQPISSVFPHLSTRDLPDLIAIKDANFSDVDAVFCCLPHGTTQEIIKGLPKHLKIVDLSADFRLKDLSEYEEWYGQPHRAPDLQKEAIYGLTEVLREEIKNARLVANPGCYPTSVQLPLVPLIKASLIELKNIIIDAKSGVSGAGRSAKENLLFTEVTEGLNSYGVTLHRHVPEIEQGLADASGSKVTVSFTPHLIPMSRGM

SEQ ID NO: 55626 - DNA, 1213 bp, Glycine max
  misc_feature (1)..(1213): Ceres Seq. ID no. 15224566
ggaacaccaatacaacacgcctaagccaaacccaaatccaccgctctttattttcgtcttttctacccttcccggatcccaatccctaatctttctaccactctcactccaaaaatctctaattttttcatctgggaagatcggttgacgaatcgaggatccgatcgcttgcgaggaactagggtttcaatcgatcgcatcacacacaaacaatcatgtttagccggatgttcggtaaacctaaacaggaaaccaatgctgttgccactttggacaagctaaacgagacacttgaaatgctggagaaaaaggagaaagtgctccttaaaaaggtggcagcggaagttgaaaaggccaaagaattcacaagggggaagaacaaaagggcggcaatacaatgtctgaagaggaagaggttatatgaacagcaaatagagcagcttggaaatttccagttgcgtattcatgaccagatgatattgttggaaggtgctaaagctaccactgaaacagtagatgcattaagaactggagcagctgctatgaaggctatgcaaaaagcaacgaatattgatgatgttgacaagaccatggatgagatcaatgaacagaccgagaacatgaaacagattcaggatgcattgtcagctccaattggtgcagctgctgattttgacgaggacgaattggaagcagaacttgaagaattggagggtgctgagttggaagaacagcttcttcagccagcaactacagctcctgcagccccagtgcaggtcccagctgggcgccaacctactcgcccagttcctgcaaagcgaactcctgaagaagatgaattggcagctttgcaggctgagatggcactttgagcagaattttgcaggcattttttgtgtgcatgatgcgtggcttcaatgaggaattgtaaccactattacgtggattcctactcgcttatctgtgaaattattgagctggccagaggatgtatataaaaggtgaaaaaaaaaaggatcataaaagtcgttcaaaacttatttactattattttggatgagttcgaacccccctttccattatacgtaacaattattgatgcatttggctatcttatattttatgtggtcgagtttaacatggtcagtttaatcaatgtatatcttaaacatgctacaacgaagtataaggaataagaatttggttagccaac

SEQ ID NO: 55627 - protein, 218 aa, Glycine max
  peptide (1)..(218): Ceres Seq. ID no. 15224567
  misc_feature (18)..(196): Pfam Name: SNF7 Pfam Description: SNF7
  misc_feature (19)..(208): Homolog of NCBI NO: 28827795 NR Description: Snf7 homologue associated with Alix 1 [Homo
  misc_feature (4)..(218): Homolog of NCBI NO: 28850339 NR Description: similar to C56C10.3.p
  misc_feature (19)..(208): Homolog of NCBI NO: 28077049 NR Description: RIKEN cDNA 2010012F05 [Mus musculus]
  misc_feature (2)..(218): Homolog of NCBI NO: 19115183 NR Description: similar to yeast Snf7 protein involved in glucose
  misc_feature (1)..(215): Homolog of NCBI NO: 31212691 NR Description: ENSANGP00000020979 [Anopheles gambiae]
  misc_feature (1)..(208): Homolog of NCBI NO: 28278647 NR Description: Similar to RIKEN cDNA 2010012F05 gene [Danio
  misc_feature (1)..(214): Homolog of NCBI NO: 28277855 NR Description: Unknown (protein for MGC:56112) [Danio rerio]
  misc_feature (1)..(218): Homolog of NCBI NO: 15224854 NR Description: copia-related retroelement pol polyprotein
  misc_feature (3)..(218): Homolog of NCBI NO: 21594892 NR Description: copia-like retroelement pol polyprotein
  misc_feature (1)..(218): Homolog of NCBI NO: 15233464 NR Description: expressed protein [Arabidopsis thaliana]
MFSRMFGKPKQETNAVATLDKLNETLEMLEKKEKVLLKKVAAEVEKAKEFTRGKNKRAAIQCLKRKRLYEQQIEQLGNFQLRIHDQMILLEGAKATTETVDALRTGAAAMKAMQKATNIDDVDKTMDEINEQTENMKQIQDALSAPIGAAADFDEDELEAELEELEGAELEEQLLQPATTAPAAPVQVPAGRQPTRPVPAKRTPEEDELAALQAEMAL

SEQ ID NO: 55628 - protein, 214 aa, Glycine max
  peptide (1)..(214): Ceres Seq. ID no. 15224568
  misc_feature (14)..(192): Pfam Name: SNF7 Pfam Description: SNF7
  misc_feature (15)..(204): Homolog of NCBI NO: 28827795 NR Description: Snf7 homologue associated with Alix 1 [Homo
  misc_feature (1)..(214): Homolog of NCBI NO: 28850339 NR Description: similar to C56C10.3.p
  misc_feature (15)..(204): Homolog of NCBI NO: 28077049 NR Description: RIKEN cDNA 2010012F05 [Mus musculus]
  misc_feature (1)..(214): Homolog of NCBI NO: 19115183 NR Description: similar to yeast Snf7 protein involved in glucose
  misc_feature (1)..(211): Homolog of NCBI NO: 31212691 NR Description: ENSANGP00000020979 [Anopheles gambiae]
  misc_feature (1)..(204): Homolog of NCBI NO: 28278647 NR Description: Similar to RIKEN cDNA 2010012F05 gene [Danio
  misc_feature (1)..(210): Homolog of NCBI NO: 28277855 NR Description: Unknown (protein for MGC:56112) [Danio rerio]
  misc_feature (1)..(214): Homolog of NCBI NO: 15224854 NR Description: copia-related retroelement pol polyprotein
  misc_feature (1)..(214): Homolog of NCBI NO: 21594892 NR Description: copia-like retroelement pol polyprotein
  misc_feature (1)..(214): Homolog of NCBI NO: 15233464 NR Description: expressed protein [Arabidopsis thaliana]
MFGKPKQETNAVATLDKLNETLEMLEKKEKVLLKKVAAEVEKAKEFTRGKNKRAAIQCLKRKRLYEQQIEQLGNFQLRIHDQMILLEGAKATTETVDALRTGAAAMKAMQKATNIDDVDKTMDEINEQTENMKQIQDALSAPIGAAADFDEDELEAELEELEGAELEEQLLQPATTAPAAPVQVPAGRQPTRPVPAKRTPEEDELAALQAEMAL

SEQ ID NO: 55629 - protein, 191 aa, Glycine max
  peptide (1)..(191): Ceres Seq. ID no. 15224569
  misc_feature (1)..(169): Pfam Name: SNF7 Pfam Description: SNF7
  misc_feature (1)..(181): Homolog of NCBI NO: 28827795 NR Description: Snf7 homologue associated with Alix 1 [Homo
  misc_feature (1)..(191): Homolog of NCBI NO: 28850339 NR Description: similar to C56C10.3.p
  misc_feature (1)..(181): Homolog of NCBI NO: 28077049 NR Description: RIKEN cDNA 2010012F05 [Mus musculus]
  misc_feature (1)..(191): Homolog of NCBI NO: 19115183 NR Description: similar to yeast Snf7 protein involved in glucose
  misc_feature (1)..(188): Homolog of NCBI NO: 31212691 NR Description: ENSANGP00000020979 [Anopheles gambiae]
  misc_feature (1)..(181): Homolog of NCBI NO: 28278647 NR Description: Similar to RIKEN cDNA 2010012F05 gene [Danio
  misc_feature (1)..(187): Homolog of NCBI NO: 28277855 NR Description: Unknown (protein for MGC:56112) [Danio rerio]
  misc_feature (1)..(191): Homolog of NCBI NO: 15224854 NR Description: copia-related retroelement pol polyprotein
  misc_feature (1)..(191): Homolog of NCBI NO: 21594892 NR Description: copia-like retroelement pol polyprotein
  misc_feature (1)..(191): Homolog of NCBI NO: 15233464 NR Description: expressed protein [Arabidopsis thaliana]
MLEKKEKVLLKKVAAEVEKAKEFTRGKNKRAAIQCLKRKRLYEQQIEQLGNFQLRIHDQMILLEGAKATTETVDALRTGAAAMKAMQKATNIDDVDKTMDEINEQTENMKQIQDALSAPIGAAADFDEDELEAELEELEGAELEEQLLQPATTAPAAPVQVPAGRQPTRPVPAKRTPEEDELAALQAEMAL

SEQ ID NO: 55630 - DNA, 1475 bp, Glycine max
  misc_feature (1)..(1475): Ceres Seq. ID no. 14312866
aagatttccaacaacccctctctgcaaaacgcttcgcataaggtacttatgcgcgataagactgtactggtaaccggcggagccggttacatcggcagccacaccgttcttcagctcttgctcggaggtttcagagccgtcgtcctcgacaacctcgaaaattcctccgaggttgccatccacagagtcagggagctcgccggcgaatttgggaacaacctctcctttcacaaggtggacctacgggacagagctgctctagaccaaatattttcttccacacaattcgatgctgtcatacattttgctggactgaaagcagtaggagaaagtgtgcaaaaacctttactatactataacaacaacttgactgggacaatcactctattggaagtcatggctgcccatggatgcaagaagctcgtgttttcatcttcagcaactgtatatggttggccaaaggaggttccatgcacagaagagttccctctgtcagcaatgaacccatatggacgaactaagcttatcattgaagaaatttgccgtgatgtccactgtgcagagccagattgtaaaataattttgttaagatacttcaacccagttggtgcacaccttagtggttatattggggaggatcctcgtggaattccaaacaatctcatgccatttgttcagcaagtagcagttggccgacggcctgcactgacagtttttggaaatgattataatacaagtgatggcactggggttcgggattacattcatgttgttgatttagcagatgggcacattgctgcattgcttaaactagatgaacctaatataggttgtgaggtttataacctgggaacaggaaagggaacatcagttttggagatggttagagcttttgaaatggcatctggaaagaaaattccacttgtgatggctggccgtagacctggtgatgctgaaattgtttatgcatcaacaaagaaagcggaaagagagcttaaatggaaggcaaaatatggcattgatgagatgtgccgtgatcaatggaactgggctagcaaaaacccttatggctatggagatcagggctccaccgattaaccacttagttttctctttgggttcttttctgaactcacccacaccgtagtccgtaggtcttgtgaatttagttttcccaaaagcttttctttctttagtgatcttaaggtgacaaagtacttgtattattactattcatagttacatagtaagtaagtagtggtttactatactgtaatttaaaggttctctaggttccttcttacaggttattgattattagattcggattctctcatgttccacatgagcagcatcctgttttgtaaatctaaatcacatgtttgtttaaagtgtgactaacaggtatccttacctcattattgagattaatttattttgaatgttacctttagtaataaatagcatttttcatg

SEQ ID NO: 55631 - protein, 365 aa, Glycine max
  peptide (1)..(365): Ceres Seq. ID no. 14312867
  misc_feature (22)..(355): Pfam Name: NAD dependent epimerase/dehydratase family Pfam Description: NAD dependent epimerase/dehydratase family
  misc_feature (20)..(364): Homolog of NCBI NO: 25553520 NR Description: putative UDP-glucose 4-epimerase
  misc_feature (22)..(359): Homolog of NCBI NO: 15217653 NR Description: UDP-glucose 4-epimerase (UDP-galactose
  misc_feature (20)..(363): Homolog of NCBI NO: 21536846 NR Description: UDPglucose 4-epimerase-like protein [Arabidopsis
  misc_feature (20)..(363): Homolog of NCBI NO: 15236663 NR Description: UDP-glucose 4-epimerase (UDP-galactose
  misc_feature (20)..(365): Homolog of NCBI NO: 32130594 NR Description: UDP-glucose-4-epimerase [Zea mays]
  misc_feature (20)..(364): Homolog of NCBI NO: 21553659 NR Description: UDP-galactose 4-epimerase-like protein
  misc_feature (20)..(365): Homolog of NCBI NO: 12643850 NR Description: Probable UDP-glucose 4-epimerase At4g10960
  misc_feature (17)..(365): Homolog of NCBI NO: 15236988 NR Description: UDP-glucose 4-epimerase (UDP-galactose
  misc_feature (20)..(365): Homolog of NCBI NO: 21715990 NR Description: UDP-glucose 4-epimerase [Oryza sativa (japonica
  misc_feature (17)..(365): Homolog of NCBI NO: 11386775 NR Description: UDP-glucose 4-epimerase GEPI48 (Galactowaldenase)
KISNNPSLQNASHKVLMRDKTVLVTGGAGYIGSHTVLQLLLGGFRAVVLDNLENSSEVAIHRVRELAGEFGNNLSFHKVDLRDRAALDQIFSSTQFDAVIHFAGLKAVGESVQKPLLYYNNNLTGTITLLEVMAAHGCKKLVFSSSATVYGWPKEVPCTEEFPLSAMNPYGRTKLIIEEICRDVHCAEPDCKIILLRYFNPVGAHLSGYIGEDPRGIPNNLMPFVQQVAVGRRPALTVFGNDYNTSDGTGVRDYIHVVDLADGHIAALLKLDEPNIGCEVYNLGTGKGTSVLEMVRAFEMASGKKIPLVMAGRRPGDAEIVYASTKKAERELKWKAKYGIDEMCRDQWNWASKNPYGYGDQGSTD

SEQ ID NO: 55632 - protein, 349 aa, Glycine max
  peptide (1)..(349): Ceres Seq. ID no. 14312868
  misc_feature (6)..(339): Pfam Name: NAD dependent epimerase/dehydratase family Pfam Description: NAD dependent epimerase/dehydratase family
  misc_feature (4)..(348): Homolog of NCBI NO: 25553520 NR Description: putative UDP-glucose 4-epimerase
  misc_feature (6)..(343): Homolog of NCBI NO: 15217653 NR Description: UDP-glucose 4-epimerase (UDP-galactose
  misc_feature (4)..(347): Homolog of NCBI NO: 21536846 NR Description: UDPglucose 4-epimerase-like protein [Arabidopsis
  misc_feature (4)..(347): Homolog of NCBI NO: 15236663 NR Description: UDP-glucose 4-epimerase (UDP-galactose
  misc_feature (4)..(349): Homolog of NCBI NO: 32130594 NR Description: UDP-glucose-4-epimerase [Zea mays]
  misc_feature (4)..(348): Homolog of NCBI NO: 21553659 NR Description: UDP-galactose 4-epimerase-like protein
  misc_feature (4)..(349): Homolog of NCBI NO: 12643850 NR Description: Probable UDP-glucose 4-epimerase At4g10960
  misc_feature (1)..(349): Homolog of NCBI NO: 15236988 NR Description: UDP-glucose 4-epimerase (UDP-galactose
  misc_feature (4)..(349): Homolog of NCBI NO: 21715990 NR Description: UDP-glucose 4-epimerase [Oryza sativa (japonica
  misc_feature (1)..(349): Homolog of NCBI NO: 11386775 NR Description: UDP-glucose 4-epimerase GEPI48 (Galactowaldenase)
MRDKTVLVTGGAGYIGSHTVLQLLLGGFRAVVLDNLENSSEVAIHRVRELAGEFGNNLSFHKVDLRDRAALDQIFSSTQFDAVIHFAGLKAVGESVQKPLLYYNNNLTGTITLLEVMAAHGCKKLVFSSSATVYGWPKEVPCTEEFPLSAMNPYGRTKLIIEEICRDVHCAEPDCKIILLRYFNPVGAHLSGYIGEDPRGIPNNLMPFVQQVAVGRRPALTVFGNDYNTSDGTGVRDYIHVVDLADGHIAALLKLDEPNIGCEVYNLGTGKGTSVLEMVRAFEMASGKKIPLVMAGRRPGDAEIVYASTKKAERELKWKAKYGIDEMCRDQWNWASKNPYGYGDQGSTD

SEQ ID NO: 55633 - protein, 233 aa, Glycine max
  peptide (1)..(233): Ceres Seq. ID no. 14312869
  misc_feature (1)..(223): Pfam Name: NAD dependent epimerase/dehydratase family Pfam Description: NAD dependent epimerase/dehydratase family
  misc_feature (1)..(232): Homolog of NCBI NO: 25553520 NR Description: putative UDP-glucose 4-epimerase
  misc_feature (1)..(227): Homolog of NCBI NO: 15217653 NR Description: UDP-glucose 4-epimerase (UDP-galactose
  misc_feature (1)..(231): Homolog of NCBI NO: 21536846 NR Description: UDPglucose 4-epimerase-like protein [Arabidopsis
  misc_feature (1)..(231): Homolog of NCBI NO: 15236663 NR Description: UDP-glucose 4-epimerase (UDP-galactose
  misc_feature (1)..(233): Homolog of NCBI NO: 32130594 NR Description: UDP-glucose-4-epimerase [Zea mays]
  misc_feature (1)..(232): Homolog of NCBI NO: 21553659 NR Description: UDP-galactose 4-epimerase-like protein
  misc_feature (1)..(233): Homolog of NCBI NO: 12643850 NR Description: Probable UDP-glucose 4-epimerase At4g10960
  misc_feature (1)..(233): Homolog of NCBI NO: 15236988 NR Description: UDP-glucose 4-epimerase (UDP-galactose
  misc_feature (1)..(233): Homolog of NCBI NO: 21715990 NR Description: UDP-glucose 4-epimerase [Oryza sativa (japonica
  misc_feature (1)..(233): Homolog of NCBI NO: 11386775 NR Description: UDP-glucose 4-epimerase GEPI48 (Galactowaldenase)
MAAHGCKKLVFSSSATVYGWPKEVPCTEEFPLSAMNPYGRTKLIIEEICRDVHCAEPDCKIILLRYFNPVGAHLSGYIGEDPRGIPNNLMPFVQQVAVGRRPALTVFGNDYNTSDGTGVRDYIHVVDLADGHIAALLKLDEPNIGCEVYNLGTGKGTSVLEMVRAFEMASGKKIPLVMAGRRPGDAEIVYASTKKAERELKWKAKYGIDEMCRDQWNWASKNPYGYGDQGSTD

SEQ ID NO: 55634 - DNA, 1317 bp, Glycine max
  misc_feature (1)..(1317): Ceres Seq. ID no. 15178027
cgttcagcttcaccaacaataaataaataaaaaatcataacaccgttcatcaatggcggttccgctgcattcctagactactctctttttccgcaatttttcattggctgcgttcgttcgttcgttgcgtgctttagttgttacttttccgttacggcgatggagttggagcacccgaccgcgacgccgctcaactccgccatgacctacgacgaagcctccatggagcgcagcaagagcttcgtcaacgccttgcaggaacttaagaacctaaggcctcaactttattctgctgcagaatactgtgaaaaatcttatctccatagtgaacagaaacaaatggtacttgacaacctgaaagactatgctgtaagagcccttgtgaatgctgttgatcatctaggaacagttgcatacaagttaactgaccttcttgagcagcaaacatttgatgtctcaactatggatttgaaggtcgctaccataaatcagaaacttcttacatgccaaatttacactgataaagaaggtctacggcagcagcaattgttagctttcattcccagacatcataagcactacattttgccaaattctgtcaataaaaaggtacatttcagtccacaaatacagattgatgcaaggcagaatccatttcaaaccagaacccgttttcaatcttcaggtacccctgcagcgaaaactctttcatggcatttagcatcagagacaaagtctaccttaaaagggtcttcgcatgcttccccttccccaaacactgagaacccaaagttttctgccaaggcctctggagttttccatctcttagataatgaagagaacacctggatgaaatcctcacctgcacaaatttactttccaaatggagttcctacctctagtacacccatgcatactttaggtggtacaggcaaggatgcattggagggatccaaaccattgacagcattcagatcatttgactaccaaaatcggcgtgagactgtccaagtccctactcgaagcaaaagtgtgctatcagctttctttgtcaagcagaaaacaccaaagttgaaagccggttctttcttatgaatacctctaaagccatcccctcccctatgcaaatcctcagaattaattagtttctgattcaagcctttgaataatgatcctgtaagtagccggttccctggcaatcataatggttgggatcttggtcttctaatcgctttatgttgctcttgtggattgtgatctagttcaggcacctgcaaaatgtatatttgttgtatgctatgcaaaaaaagtttcatt

SEQ ID NO: 55635 - protein, 311 aa, Glycine max
  peptide (1)..(311): Ceres Seq. ID no. 15178028
  misc_feature (8)..(144): Homolog of NCBI NO: 15238265 NR Description: expressed protein [Arabidopsis thaliana]
  misc_feature (13)..(144): Homolog of NCBI NO: 34913914 NR Description: OSJNBa0066C06.8 [Oryza sativa (japonica
  misc_feature (14)..(150): Homolog of NCBI NO: 10177091 NR Description: emb|CAB66408.1~gene_id:MOP9.13~strong similarity
  misc_feature (14)..(304): Homolog of NCBI NO: 30689382 NR Description: expressed protein [Arabidopsis thaliana]
  misc_feature (12)..(304): Homolog of NCBI NO: 15229112 NR Description: expressed protein [Arabidopsis thaliana]
  misc_feature (33)..(268): Homolog of NCBI NO: 25408977 NR Description: hypothetical protein At2g46220 [imported] -
  misc_feature (178)..(306): Homolog of NCBI NO: 34912804 NR Description: P0501G01.11 [Oryza sativa (japonica
  misc_feature (16)..(198): Homolog of NCBI NO: 34912804 NR Description: P0501G01.11 [Oryza sativa (japonica
  misc_feature (12)..(308): Homolog of NCBI NO: 26452761 NR Description: unknown protein [Arabidopsis thaliana]
  misc_feature (12)..(308): Homolog of NCBI NO: 18407012 NR Description: expressed protein [Arabidopsis thaliana]
MELEHPTATPLNSAMTYDEASMERSKSFVNALQELKNLRPQLYSAAEYCEKSYLHSEQKQMVLDNLKDYAVRALVNAVDHLGTVAYKLTDLLEQQTFDVSTMDLKVATINQKLLTCQIYTDKEGLRQQQLLAFIPRHHKHYILPNSVNKKVHFSPQIQIDARQNPFQTRTRFQSSGTPAAKTLSWHLASETKSTLKGSSHASPSPNTENPKFSAKASGVFHLLDNEENTWMKSSPAQIYFPNGVPTSSTPMHTLGGTGKDALEGSKPLTAFRSFDYQNRRETVQVPTRSKSVLSAFFVKQKTPKLKAGSFL

SEQ ID NO: 55636 - protein, 297 aa, Glycine max
  peptide (1)..(297): Ceres Seq. ID no. 15178029
  misc_feature (1)..(130): Homolog of NCBI NO: 15238265 NR Description: expressed protein [Arabidopsis thaliana]
  misc_feature (1)..(130): Homolog of NCBI NO: 34913914 NR Description: OSJNBa0066C06.8 [Oryza sativa (japonica
  misc_feature (1)..(136): Homolog of NCBI NO: 10177091 NR Description: emb|CAB66408.1~gene_id:MOP9.13~strong similarity
  misc_feature (1)..(290): Homolog of NCBI NO: 30689382 NR Description: expressed protein [Arabidopsis thaliana]
  misc_feature (1)..(290): Homolog of NCBI NO: 15229112 NR Description: expressed protein [Arabidopsis thaliana]
  misc_feature (19)..(254): Homolog of NCBI NO: 25408977 NR Description: hypothetical protein At2g46220 [imported] -
  misc_feature (164)..(292): Homolog of NCBI NO: 34912804 NR Description: P0501G01.11 [Oryza sativa (japonica
  misc_feature (2)..(184): Homolog of NCBI NO: 34912804 NR Description: P0501G01.11 [Oryza sativa (japonica
  misc_feature (1)..(294): Homolog of NCBI NO: 26452761 NR Description: unknown protein [Arabidopsis thaliana]
  misc_feature (1)..(294): Homolog of NCBI NO: 18407012 NR Description: expressed protein [Arabidopsis thaliana]
MTYDEASMERSKSFVNALQELKNLRPQLYSAAEYCEKSYLHSEQKQMVLDNLKDYAVRALVNAVDHLGTVAYKLTDLLEQQTFDVSTMDLKVATINQKLLTCQIYTDKEGLRQQQLLAFIPRHHKHYILPNSVNKKVHFSPQIQIDARQNPFQTRTRFQSSGTPAAKTLSWHLASETKSTLKGSSHASPSPNTENPKFSAKASGVFHLLDNEENTWMKSSPAQIYFPNGVPTSSTPMHTLGGTGKDALEGSKPLTAFRSFDYQNRRETVQVPTRSKSVLSAFFVKQKTPKLKAGSFL

SEQ ID NO: 55637 - protein, 290 aa, Glycine max
  peptide (1)..(290): Ceres Seq. ID no. 15178030
  misc_feature (1)..(123): Homolog of NCBI NO: 15238265 NR Description: expressed protein [Arabidopsis thaliana]
  misc_feature (1)..(123): Homolog of NCBI NO: 34913914 NR Description: OSJNBa0066C06.8 [Oryza sativa (japonica
  misc_feature (1)..(129): Homolog of NCBI NO: 10177091 NR Description: emb|CAB66408.1~gene_id:MOP9.13~strong similarity
  misc_feature (1)..(283): Homolog of NCBI NO: 30689382 NR Description: expressed protein [Arabidopsis thaliana]
  misc_feature (1)..(283): Homolog of NCBI NO: 15229112 NR Description: expressed protein [Arabidopsis thaliana]
  misc_feature (12)..(247): Homolog of NCBI NO: 25408977 NR Description: hypothetical protein At2g46220 [imported] -
  misc_feature (157)..(285): Homolog of NCBI NO: 34912804 NR Description: P0501G01.11 [Oryza sativa (japonica
  misc_feature (1)..(177): Homolog of NCBI NO: 34912804 NR Description: P0501G01.11 [Oryza sativa (japonica
  misc_feature (1)..(287): Homolog of NCBI NO: 26452761 NR Description: unknown protein [Arabidopsis thaliana]
  misc_feature (1)..(287): Homolog of NCBI NO: 18407012 NR Description: expressed protein [Arabidopsis thaliana]
MERSKSFVNALQELKNLRPQLYSAAEYCEKSYLHSEQKQMVLDNLKDYAVRALVNAVDHLGTVAYKLTDLLEQQTFDVSTMDLKVATINQKLLTCQIYTDKEGLRQQQLLAFIPRHHKHYILPNSVNKKVHFSPQIQIDARQNPFQTRTRFQSSGTPAAKTLSWHLASETKSTLKGSSHASPSPNTENPKFSAKASGVFHLLDNEENTWMKSSPAQIYFPNGVPTSSTPMHTLGGTGKDALEGSKPLTAFRSFDYQNRRETVQVPTRSKSVLSAFFVKQKTPKLKAGSFL

SEQ ID NO: 55638 - DNA, 1403 bp, Glycine max
  misc_feature (1)..(1403): Ceres Seq. ID no. 14312825
aaccttcactccgaccgttgtgcggagtcaggacagcaaccatatacgttcaaatctgttgcagctgggcaggaaaggttcaggactctacacagtacttactatagaaaagcacaacgaatcattctcgcttgtgggtcactttttggaagaaacctgtgtaaatcctacattcatcataaaccacctgagatcatgagtcctctagcaaagtggcacagatccaaaccaggcctgactgaacgttttcaattgtttgttaataaacgtgaactttgctatgcatatactgaattgaatgaccctgtagtacaacgacagagatttgctgaacaactcaaggatcggcaatctggcgatgatgaagcaatggccttagatgaaacattttgtacggctctagagtatggtttaccacctactggtggttggggtttgggcattgatcggttcaccatgttactgactgattcacagaatattaaggtttttgctttttctatatctgcataattactttgtttttgaaatttcttaccatcttctgtctttttggtgacgggaggttcttctcttccctgccatgaaacctcaagactgagccttcaaccaaaactatttgaatctctgagaagtaaaatcatcatacacaggtattttatacctcaagcttttaaattaaaagtatactccacattactgccaagtaccaagtatttccaaggaaattgtgagcacggtactgcgtaacttcattaacttgtaactagtagtgaaatggttaatcttgggtagcgatgttgagtggcaaaccccaataatgctagcagtttagtggactgtaaaaagctgctacataacgatagcagatagaaatcatataattcccaatacaaaatactcaaaaaatactaaaaaagcttcatatattcatcattacttctcaaaagtcacatcttatagacacaatcatcattaatacaaggcttaactaataacaattagaaaaataacaaaggctgggtgtggaagacctacaactcaggtgccaactgaagcctgctaaaaggggtgggcttggttagaaaatgggcgggcagcagaactgaggctagcaagcaggtgttctgtgtgtaattttgcgacaatacaaataactagataaaaatgcatcaaattgtatgcaatgggttaaggaacgatgatgggctagcttgaagttcctgagcttttacattgcagtctggtgagaaatagggctgctaactttgaaaattagtttccccatggcatgtgcatcaagtcatgaaaaacaaagaactcaatcgatggaagcagatgagtttgtgtgggcaaatagagattttgtttgtttaagcgagcataaaacacaacattaattc

SEQ ID NO: 55639 - protein, 170 aa, Glycine max
  peptide (1)..(170): Ceres Seq. ID no. 14312826
  misc_feature (58)..(162): Pfam Name: tRNA synthetases class II (D, K and N) Pfam Description: tRNA synthetases class II (D, K and N)
  misc_feature (63)..(162): Homolog of NCBI NO: 20072717 NR Description: Kars protein [Mus musculus]
  misc_feature (63)..(162): Homolog of NCBI NO: 34533120 NR Description: unnamed protein product [Homo sapiens]
  misc_feature (63)..(162): Homolog of NCBI NO: 23270695 NR Description: Kars protein [Mus musculus]
  misc_feature (63)..(162): Homolog of NCBI NO: 26355297 NR Description: unnamed protein product [Mus musculus]
  misc_feature (63)..(162): Homolog of NCBI NO: 26354188 NR Description: unnamed protein product [Mus musculus]
  misc_feature (63)..(162): Homolog of NCBI NO: 16716381 NR Description: lysyl-tRNA synthetase
  misc_feature (63)..(162): Homolog of NCBI NO: 586059 NR Description: LYSYL-TRNA SYNTHETASE (LYSINE--TRNA LIGASE)
  misc_feature (58)..(162): Homolog of NCBI NO: 2501025 NR Description: Lysyl-tRNA synthetase (Lysine--tRNA ligase)
  misc_feature (63)..(166): Homolog of NCBI NO: 15229833 NR Description: lysyl-tRNA synthetase, putative [Arabidopsis
  misc_feature (58)..(162): Homolog of NCBI NO: 10798642 NR Description: lysyl-tRNA synthetase [Nicotiana tabacum]
NLHSDRCAESGQQPYTFKSVAAGQERFRTLHSTYYRKAQRIILACGSLFGRNLCKSYIHHKPPEIMSPLAKWHRSKPGLTERFQLFVNKRELCYAYTELNDPVVQRQRFAEQLKDRQSGDDEAMALDETFCTALEYGLPPTGGWGLGIDRFTMLLTDSQNIKVFAFSISA

SEQ ID NO: 55640 - protein, 105 aa, Glycine max
  peptide (1)..(105): Ceres Seq. ID no. 14312827
  misc_feature (1)..(97): Pfam Name: tRNA synthetases class II (D, K and N) Pfam Description: tRNA synthetases class II (D, K and N)
  misc_feature (1)..(97): Homolog of NCBI NO: 20072717 NR Description: Kars protein [Mus musculus]
  misc_feature (1)..(97): Homolog of NCBI NO: 34533120 NR Description: unnamed protein product [Homo sapiens]
  misc_feature (1)..(97): Homolog of NCBI NO: 23270695 NR Description: Kars protein [Mus musculus]
  misc_feature (1)..(97): Homolog of NCBI NO: 26355297 NR Description: unnamed protein product [Mus musculus]
  misc_feature (1)..(97): Homolog of NCBI NO: 26354188 NR Description: unnamed protein product [Mus musculus]
  misc_feature (1)..(97): Homolog of NCBI NO: 16716381 NR Description: lysyl-tRNA synthetase
  misc_feature (1)..(97): Homolog of NCBI NO: 586059 NR Description: LYSYL-TRNA SYNTHETASE (LYSINE--TRNA LIGASE)
  misc_feature (1)..(97): Homolog of NCBI NO: 2501025 NR Description: Lysyl-tRNA synthetase (Lysine--tRNA ligase)
  misc_feature (1)..(101): Homolog of NCBI NO: 15229833 NR Description: lysyl-tRNA synthetase, putative [Arabidopsis
  misc_feature (1)..(97): Homolog of NCBI NO: 10798642 NR Description: lysyl-tRNA synthetase [Nicotiana tabacum]
MSPLAKWHRSKPGLTERFQLFVNKRELCYAYTELNDPVVQRQRFAEQLKDRQSGDDEAMALDETFCTALEYGLPPTGGWGLGIDRFTMLLTDSQNIKVFAFSISA

SEQ ID NO: 55641 - DNA, 1528 bp, Glycine max
  misc_feature (1)..(1528): Ceres Seq. ID no. 15177994
attttgcttcatttttttttttactttgttgagacttgagagtgttggaaaatgttggggactgctctgcaatttggttgtgttcgtggtgatgatcggttttacattccggtgaaggcaaggaagaaccagaaccagcgtaaaccggttcagagagagaagggtgttggtgaaactgagagaactgattcagtttcaaagagggaacttgttgcttctgagaatgggaattccaatgagtcttcctactcgttgaagaaacccatctcttgcccttctgtagagcctgctagtaacattgataggtttctggaatccacaactcctttagtcacagctcaatatttggccaagacaacaatgagaggttggaagacttgtgatgtggagtatcaatcttactttgctcttgatgatctctgggaatcgtttaaggagtggagtgcgtatggagcaggagtccctttggtacttgatcaaagacaatctgttgtgcaatattatgttccgtatttgtcggctattcaactatatggtcaatcagataagaagtcaaatgctaagccaaggtacaccagtgaagatagtgacggtgattactgccgagattcaagcagcgatggaagcagtgacagtgaatttggaaaaaggactgaactttttacagcacaaagaaatagtcactatcatataggtgatgcttcgtttcaaatgagcaggctatctgtacatgatcacaatacaatgcaagagggattttctagtgacgatagtgaaactgggaatcctaaagatcttctttttgagtattttgatcatgatcctccttatagccgtgaacctttgtctgacaagatacttgatcttgcacgcgactatcctagcctcaagtctgtaagaagttgtgatttattaccggccagttggatgtgtgtagcatggtatcctatatatcgaatacccaccggtccaacattaaaagatttagatgcctgctttcttacataccatacactccatacacccttgacaggaaatggaggtactcaggccccaattttggtttatccaaatgacattgatggcggtgtgccaaagatttccttaccaacttttgcaatggcttcctataagttaaagggatctatttggacacaaaatggagttagtgagagtcaagtagtaaattctctcttgcaggctgcagataactggttaaggctgcttcaggtgaatcaccctgattatcagttcttcgtatcgcatggcacataccacaggtgaatcaaatgagatgccttaaatttctgtgttcattgctctttgcaaacttggtatggtccttctatccatcaatccatcaatccatccatagagactgatgatggagttgggatttctaatgtggattcttgttactcattgcataagcagcacaaaagatgagcttgtctcaagtgaagaatgaaatagagattgctaaagtaaaaaaaaaaaaaacagaaaaaaaaaaaagattgctaaagtg

SEQ ID NO: 55642 - protein, 410 aa, Glycine max
  peptide (1)..(410): Ceres Seq. ID no. 15177995
  misc_feature (81)..(402): Pfam Name: Protein of unknown function (DUF789) Pfam Description: Protein of unknown function (DUF789)
  misc_feature (220)..(410): Homolog of NCBI NO: 10177151 NR Description: gb|AAF31026.1~gene_id:K21P3.10~similar to unknown
  misc_feature (12)..(195): Homolog of NCBI NO: 22327664 NR Description: expressed protein [Arabidopsis thaliana]
  misc_feature (220)..(410): Homolog of NCBI NO: 22327664 NR Description: expressed protein [Arabidopsis thaliana]
  misc_feature (44)..(196): Homolog of NCBI NO: 34897254 NR Description: hypothetical protein [Oryza sativa (japonica
  misc_feature (229)..(404): Homolog of NCBI NO: 34897254 NR Description: hypothetical protein [Oryza sativa (japonica
  misc_feature (44)..(196): Homolog of NCBI NO: 31249743 NR Description: hypothetical protein [Oryza sativa (japonica
  misc_feature (229)..(408): Homolog of NCBI NO: 31249743 NR Description: hypothetical protein [Oryza sativa (japonica
  misc_feature (235)..(405): Homolog of NCBI NO: 15450996 NR Description: Unknown protein [Arabidopsis thaliana]
  misc_feature (11)..(218): Homolog of NCBI NO: 15450996 NR Description: Unknown protein [Arabidopsis thaliana]
  misc_feature (55)..(402): Homolog of NCBI NO: 22329567 NR Description: expressed protein [Arabidopsis thaliana]
MLGTALQFGCVRGDDRFYIPVKARKNQNQRKPVQREKGVGETERTDSVSKRELVASENGNSNESSYSLKKPISCPSVEPASNIDRFLESTTPLVTAQYLAKTTMRGWKTCDVEYQSYFALDDLWESFKEWSAYGAGVPLVLDQRQSVVQYYVPYLSAIQLYGQSDKKSNAKPRYTSEDSDGDYCRDSSSDGSSDSEFGKRTELFTAQRNSHYHIGDASFQMSRLSVHDHNTMQEGFSSDDSETGNPKDLLFEYFDHDPPYSREPLSDKILDLARDYPSLKSVRSCDLLPASWMCVAWYPIYRIPTGPTLKDLDACFLTYHTLHTPLTGNGGTQAPILVYPNDIDGGVPKISLPTFAMASYKLKGSIWTQNGVSESQVVNSLLQAADNWLRLLQVNHPDYQFFVSHGTYHR

SEQ ID NO: 55643 - protein, 307 aa, Glycine max
  peptide (1)..(307): Ceres Seq. ID no. 15177996
  misc_feature (1)..(299): Pfam Name: Protein of unknown function (DUF789) Pfam Description: Protein of unknown function (DUF789)
  misc_feature (117)..(307): Homolog of NCBI NO: 10177151 NR Description: gb|AAF31026.1~gene_id:K21P3.10~similar to unknown
  misc_feature (1)..(92): Homolog of NCBI NO: 22327664 NR Description: expressed protein [Arabidopsis thaliana]
  misc_feature (117)..(307): Homolog of NCBI NO: 22327664 NR Description: expressed protein [Arabidopsis thaliana]
  misc_feature (1)..(93): Homolog of NCBI NO: 34897254 NR Description: hypothetical protein [Oryza sativa (japonica
  misc_feature (126)..(301): Homolog of NCBI NO: 34897254 NR Description: hypothetical protein [Oryza sativa (japonica
  misc_feature (1)..(93): Homolog of NCBI NO: 31249743 NR Description: hypothetical protein [Oryza sativa (japonica
  misc_feature (126)..(305): Homolog of NCBI NO: 31249743 NR Description: hypothetical protein [Oryza sativa (japonica
  misc_feature (132)..(302): Homolog of NCBI NO: 15450996 NR Description: Unknown protein [Arabidopsis thaliana]
  misc_feature (1)..(115): Homolog of NCBI NO: 15450996 NR Description: Unknown protein [Arabidopsis thaliana]
  misc_feature (1)..(299): Homolog of NCBI NO: 22329567 NR Description: expressed protein [Arabidopsis thaliana]
MRGWKTCDVEYQSYFALDDLWESFKEWSAYGAGVPLVLDQRQSVVQYYVPYLSAIQLYGQSDKKSNAKPRYTSEDSDGDYCRDSSSDGSSDSEFGKRTELFTAQRNSHYHIGDASFQMSRLSVHDHNTMQEGFSSDDSETGNPKDLLFEYFDHDPPYSREPLSDKILDLARDYPSLKSVRSCDLLPASWMCVAWYPIYRIPTGPTLKDLDACFLTYHTLHTPLTGNGGTQAPILVYPNDIDGGVPKISLPTFAMASYKLKGSIWTQNGVSESQVVNSLLQAADNWLRLLQVNHPDYQFFVSHGTYHR

SEQ ID NO: 55644 - DNA, 1904 bp, Glycine max
  misc_feature (1)..(1904): Ceres Seq. ID no. 15175849
attttaccggcggtggaagagagatagaccaataatctgaatctgaaacctccgtgttggtgttgcatatccaaaccctaatttggaaattgaattgttgaagggaagaagatcaagatggttctggcggagttaggtgggagcatttcgcgtgctctccagctgatgagcaatgcgacagtaatcgacgagaaggtgctcaacgattgcctcaacgacatcactcgcgctcttcttcaatccgatgttcaattcaagcttgtccgcgacatgcagaccaacatcaagaacattgtcaacctcgacgatctcgctgccggtcacaacaaacgcaggatcatccaacaagctgtgtttaacgaactctgcaaaattctggaccctgggaagccctctttcactcccaaaaagggcaaaacaagtgttgtcatgtttgttggtttgcaaggttctggaaaaaccacaacgtgtacaaagtatgcatattatcatcagaagaaaggctggaagccggctctagtatgtgcagatacattcagagctggtgcatttgatcaattgaagcaaaatgcaactaaagctaagatccctttctatggaagctatatggaatccgatccggtaaaaattgctgtggaaggtgtggagagattcaagaaagaaaactgtgatcttataattgttgatactagtgggaggcacaaacaagaagcttctctttttgaagaaatgcgccaagtttcggaagcaacgaaaccagatcttgttatatttgttatggatagcagtattggtcaggctgcttttgatcaagcccaagcatttaagcagagtgttgcagttggagctgtaattgttaccaaaatggatggccatgcaaaaggtggtggtgctcttagtgctgttgcagcaacaaagagtcctgtcatattcattggaactggagaacatatggacgagtttgaagtttttgatgttaagccatttgtcagtcgtctattaggaatgggcgactggtctgggtttatggacaaaattcatgaagtcgttcctatggatcaacaacctgaactgcttcagaagctgtcagaaggaaacttcaccttgaggattatgtatgagcagtttcagaacatacttaaaatgggtcctatcagccaggttttttctatgcttcccggatttagtgctgaattaatgccaaaaggccgtgagaaagaaagccaggcaaaaattaagcgttacatgacaatgatggattcaatgacaaacgaagagttggatagttcaaaccccaagctcatgaatgagtcacgcatgatgcggatagctcgaggtgcaggtcgtcagattagggaagtgatggagatgttggaagagtacaaacgtcttgcaaagatatggagcaaaatgaaagggcttaaaataccaaagaaaggtgatatgagtgccctatcccgaaatatgaatgcccaacacatgagcaaagtccttcctcctcagatgctgaagcaaattgggtggcatgggtgggttacaaaacttgatgaagcagatgggatccgccaaagacatgatgggaatgggaggaatgtttggtggtggtggtggtggtgattagttaattggcttgtgagctgaggattgttcctgaccatagccactgtcattgcattgtggtgttttacaactagactcgattgagcaggttatgcagttcaatcggtgttggagtgccatctgcaatagccgcaatgggtgcaagtgtctctttttgtaaaattaaatccttcttccctttttgggtatatttacttatttattattcagagcaatcaaagtaatcttattagaaattttcatagtctaggaacattaaaaacaaaagctatattcctcggatc

SEQ ID NO: 55645 - protein, 499 aa, Glycine max
  peptide (1)..(499): Ceres Seq. ID no. 15175850
  misc_feature (327)..(429): Pfam Name: Signal peptide binding domain Pfam Description: Signal peptide binding domain
  misc_feature (1)..(476): Homolog of NCBI NO: 1711508 NR Description: SIGNAL RECOGNITION PARTICLE 54 KD PROTEIN 1
  misc_feature (1)..(476): Homolog of NCBI NO: 1711511 NR Description: SIGNAL RECOGNITION PARTICLE 54 KD PROTEIN 2
  misc_feature (1)..(476): Homolog of NCBI NO: 1711509 NR Description: SIGNAL RECOGNITION PARTICLE 54 KD PROTEIN 1
  misc_feature (1)..(163): Homolog of NCBI NO: 25294409 NR Description: hypothetical protein F27K7.8 [imported] -
  misc_feature (163)..(476): Homolog of NCBI NO: 25294409 NR Description: hypothetical protein F27K7.8 [imported] -
  misc_feature (1)..(476): Homolog of NCBI NO: 515681 NR Description: signal recognition particle 54 kDa subunit
  misc_feature (1)..(476): Homolog of NCBI NO: 18402407 NR Description: signal recognition particle 54 kDa protein 2
  misc_feature (1)..(476): Homolog of NCBI NO: 2119055 NR Description: signal recognition particle 54K protein - tomato
  misc_feature (1)..(484): Homolog of NCBI NO: 34909956 NR Description: putative signal recognition particle 54K protein
  misc_feature (1)..(476): Homolog of NCBI NO: 1711512 NR Description: SIGNAL RECOGNITION PARTICLE 54 KD PROTEIN 2
MVLAELGGSISRALQLMSNATVIDEKVLNDCLNDITRALLQSDVQFKLVRDMQTNIKNIVNLDDLAAGHNKRRIIQQAVFNELCKILDPGKPSFTPKKGKTSVVMFVGLQGSGKTTTCTKYAYYHQKKGWKPALVCADTFRAGAFDQLKQNATKAKIPFYGSYMESDPVKIAVEGVERFKKENCDLIIVDTSGRHKQEASLFEEMRQVSEATKPDLVIFVMDSSIGQAAFDQAQAFKQSVAVGAVIVTKMDGHAKGGGALSAVAATKSPVIFIGTGEHMDEFEVFDVKPFVSRLLGMGDWSGFMDKIHEVVPMDQQPELLQKLSEGNFTLRIMYEQFQNILKMGPISQVFSMLPGFSAELMPKGREKESQAKIKRYMTMMDSMTNEELDSSNPKLMNESRMMRIARGAGRQIREVMEMLEEYKRLAKIWSKMKGLKIPKKGDMSALSRNMNAQHMSKVLPPQMLKQIGWHGWVTKLDEADGIRQRHDGNGRNVWWWWWW

SEQ ID NO: 55646 - protein, 483 aa, Glycine max
  peptide (1)..(483): Ceres Seq. ID no. 15175851
  misc_feature (311)..(413): Pfam Name: Signal peptide binding domain Pfam Description: Signal peptide binding domain
  misc_feature (1)..(460): Homolog of NCBI NO: 1711508 NR Description: SIGNAL RECOGNITION PARTICLE 54 KD PROTEIN 1
  misc_feature (1)..(460): Homolog of NCBI NO: 1711511 NR Description: SIGNAL RECOGNITION PARTICLE 54 KD PROTEIN 2
  misc_feature (1)..(460): Homolog of NCBI NO: 1711509 NR Description: SIGNAL RECOGNITION PARTICLE 54 KD PROTEIN 1
  misc_feature (1)..(147): Homolog of NCBI NO: 25294409 NR Description: hypothetical protein F27K7.8 [imported] -
  misc_feature (147)..(460): Homolog of NCBI NO: 25294409 NR Description: hypothetical protein F27K7.8 [imported] -
  misc_feature (1)..(460): Homolog of NCBI NO: 515681 NR Description: signal recognition particle 54 kDa subunit
  misc_feature (1)..(460): Homolog of NCBI NO: 18402407 NR Description: signal recognition particle 54 kDa protein 2
  misc_feature (1)..(460): Homolog of NCBI NO: 2119055 NR Description: signal recognition particle 54K protein - tomato
  misc_feature (1)..(468): Homolog of NCBI NO: 34909956 NR Description: putative signal recognition particle 54K protein
  misc_feature (1)..(460): Homolog of NCBI NO: 1711512 NR Description: SIGNAL RECOGNITION PARTICLE 54 KD PROTEIN 2
MSNATVIDEKVLNDCLNDITRALLQSDVQFKLVRDMQTNIKNIVNLDDLAAGHNKRRIIQQAVFNELCKILDPGKPSFTPKKGKTSVVMFVGLQGSGKTTTCTKYAYYHQKKGWKPALVCADTFRAGAFDQLKQNATKAKIPFYGSYMESDPVKIAVEGVERFKKENCDLIIVDTSGRHKQEASLFEEMRQVSEATKPDLVIFVMDSSIGQAAFDQAQAFKQSVAVGAVIVTKMDGHAKGGGALSAVAATKSPVIFIGTGEHMDEFEVFDVKPFVSRLLGMGDWSGFMDKIHEVVPMDQQPELLQKLSEGNFTLRIMYEQFQNILKMGPISQVFSMLPGFSAELMPKGREKESQAKIKRYMTMMDSMTNEELDSSNPKLMNESRMMRIARGAGRQIREVMEMLEEYKRLAKIWSKMKGLKIPKKGDMSALSRNMNAQHMSKVLPPQMLKQIGWHGWVTKLDEADGIRQRHDGNGRNVWWWWWW

SEQ ID NO: 55647 - protein, 448 aa, Glycine max
  peptide (1)..(448): Ceres Seq. ID no. 15175852
  misc_feature (276)..(378): Pfam Name: Signal peptide binding domain Pfam Description: Signal peptide binding domain
  misc_feature (1)..(425): Homolog of NCBI NO: 1711508 NR Description: SIGNAL RECOGNITION PARTICLE 54 KD PROTEIN 1
  misc_feature (1)..(425): Homolog of NCBI NO: 1711511 NR Description: SIGNAL RECOGNITION PARTICLE 54 KD PROTEIN 2
  misc_feature (1)..(425): Homolog of NCBI NO: 1711509 NR Description: SIGNAL RECOGNITION PARTICLE 54 KD PROTEIN 1
  misc_feature (1)..(112): Homolog of NCBI NO: 25294409 NR Description: hypothetical protein F27K7.8 [imported] -
  misc_feature (112)..(425): Homolog of NCBI NO: 25294409 NR Description: hypothetical protein F27K7.8 [imported] -
  misc_feature (1)..(425): Homolog of NCBI NO: 515681 NR Description: signal recognition particle 54 kDa subunit
  misc_feature (1)..(425): Homolog of NCBI NO: 18402407 NR Description: signal recognition particle 54 kDa protein 2
  misc_feature (1)..(425): Homolog of NCBI NO: 2119055 NR Description: signal recognition particle 54K protein - tomato
  misc_feature (1)..(433): Homolog of NCBI NO: 34909956 NR Description: putative signal recognition particle 54K protein
  misc_feature (1)..(425): Homolog of NCBI NO: 1711512 NR Description: SIGNAL RECOGNITION PARTICLE 54 KD PROTEIN 2
MQTNIKNIVNLDDLAAGHNKRRIIQQAVFNELCKILDPGKPSFTPKKGKTSVVMFVGLQGSGKTTTCTKYAYYHQKKGWKPALVCADTFRAGAFDQLKQNATKAKIPFYGSYMESDPVKIAVEGVERFKKENCDLIIVDTSGRHKQEASLFEEMRQVSEATKPDLVIFVMDSSIGQAAFDQAQAFKQSVAVGAVIVTKMDGHAKGGGALSAVAATKSPVIFIGTGEHMDEFEVFDVKPFVSRLLGMGDWSGFMDKIHEVVPMDQQPELLQKLSEGNFTLRIMYEQFQNILKMGPISQVFSMLPGFSAELMPKGREKESQAKIKRYMTMMDSMTNEELDSSNPKLMNESRMMRIARGAGRQIREVMEMLEEYKRLAKIWSKMKGLKIPKKGDMSALSRNMNAQHMSKVLPPQMLKQIGWHGWVTKLDEADGIRQRHDGNGRNVWWWWWW

SEQ ID NO: 55648 - DNA, 836 bp, Glycine max
  misc_feature (1)..(836): Ceres Seq. ID no. 12607763
aacattttttaaaccttagtagatattgaactagcaagatctctaggtcacaattgatttgttaaactggttaaattagtggttgaaccatggttgaactggataatatgatttaacagaagtctacgaaaatgtagtctacaaggaggtattcctgattccagttcaatacccaagctttcctatttgtatgtttgagtatatttgttggctttgctttatattgtgcctaatgatagagaaatcatttttttctgccattttggctacaaactcatttgtgactggttcatgttttctagagatcttagctggaatcaaatcactagacccatatcatcaaataaagtggcagacgacaatatgacaactttttgaaggttggtaagaatgatgattgcatcccccataacagaaggtggaattttaataagaagttgtgatactagttacatatcaagggagctgatcagatgtggaatgagcaagggcattaacatcgaacgaccatatactttgatagaggaggaaccacagttgagaaaatctaaccctgctgcatgggttgaaagaatgtttgacctgcttgcatcaaaactgaatagagaaccaaagttgattctttgtgtcttgccatagagtaaaatttgtgatatatatgggccttggaaaaagaagtgtctgagtgaaattggtgttatcacttagtacatttgcccctgtcaagatcactgatcaataccttaccaatgtacttcttaaaatcaattctaaggaatgaattctttgttggcaataaagcattatgagcatcttcccttgattaaagatacccc

SEQ ID NO: 55649 - protein, 82 aa, Glycine max
  peptide (1)..(82): Ceres Seq. ID no. 12607764
  misc_feature (62)..(82): Homolog of NCBI NO: 33087071 NR Description: zwille pinhead-like protein
  misc_feature (17)..(82): Homolog of NCBI NO: 25335829 NR Description: Argonaute (AGO1)-like protein [imported] -
  misc_feature (17)..(82): Homolog of NCBI NO: 18401305 NR Description: Argonaute (AGO1)-like protein
  misc_feature (1)..(82): Homolog of NCBI NO: 28396616 NR Description: ARGONAUTE9 protein [Arabidopsis thaliana]
  misc_feature (1)..(82): Homolog of NCBI NO: 15242170 NR Description: zwille/pinhead-like protein; protein id:
  misc_feature (1)..(82): Homolog of NCBI NO: 34903256 NR Description: unnamed protein product [Oryza sativa (japonica
  misc_feature (17)..(82): Homolog of NCBI NO: 34395088 NR Description: putative ARGONAUTE9 protein
  misc_feature (17)..(82): Homolog of NCBI NO: 15225759 NR Description: Argonaute (AGO1)-like protein; protein id:
MMIASPITEGGILIRSCDTSYISRELIRCGMSKGINIERPYTLIEEEPQLRKSNPAAWVERMFDLLASKLNREPKLILCVLP

SEQ ID NO: 55650 - protein, 81 aa, Glycine max
  peptide (1)..(81): Ceres Seq. ID no. 12607765
  misc_feature (61)..(81): Homolog of NCBI NO: 33087071 NR Description: zwille pinhead-like protein
  misc_feature (16)..(81): Homolog of NCBI NO: 25335829 NR Description: Argonaute (AGO1)-like protein [imported] -
  misc_feature (16)..(81): Homolog of NCBI NO: 18401305 NR Description: Argonaute (AGO1)-like protein
  misc_feature (1)..(81): Homolog of NCBI NO: 28396616 NR Description: ARGONAUTE9 protein [Arabidopsis thaliana]
  misc_feature (1)..(81): Homolog of NCBI NO: 15242170 NR Description: zwille/pinhead-like protein; protein id:
  misc_feature (1)..(81): Homolog of NCBI NO: 34903256 NR Description: unnamed protein product [Oryza sativa (japonica
  misc_feature (16)..(81): Homolog of NCBI NO: 34395088 NR Description: putative ARGONAUTE9 protein
  misc_feature (16)..(81): Homolog of NCBI NO: 15225759 NR Description: Argonaute (AGO1)-like protein; protein id:
MIASPITEGGILIRSCDTSYISRELIRCGMSKGINIERPYTLIEEEPQLRKSNPAAWVERMFDLLASKLNREPKLILCVLP

SEQ ID NO: 55651 - protein, 58 aa, Glycine max
  peptide (1)..(58): Ceres Seq. ID no. 12607766
MFEYICWLCFILCLMIEKSFFSAILATNSFVTGSCFLEILAGIKSLDPYHQIKWQTTI

SEQ ID NO: 55652 - DNA, 1323 bp, Glycine max
  misc_feature (1)..(1323): Ceres Seq. ID no. 15168374
gacatgatatcagcacactttcactcactgtgctttcccgtgacacgcatctatacttgtccagaagaagtaagatccatgaactaacattcccacacgctcgcttcaccatatttgccacccttttaacctcacttcttagggttattttgctcccttttccttgtttgggaattgggtttggtttggtttttcttggttgtaaaaggtaaagaagaactaattggttaagttactatatatctagctagggtatataatattatataattattgttattaaaggaaacaaagaaagaactaagatgggaagaggtagggtacagctgaagaggatagagaacaagatcaatcgccaggtaactttctccaaaaggagaggtgggttgctcaagaaagctcatgaaatatctgtactctgtgatgctgaggtagctttgattatcttctctcacaaaggaaagctctttgagtatgctactgattcatgcatggagaagatactggaacgccatgaaaggtatgcctatgcagagaggcagctagtagcaaatgattctgagacacaggaaaactggaccattgaatacactagactgaaggcaaaaattgaccttttacagagaaaccacaggcactatatgggagaagatttggcttcaatgagcctcaaagagcttcagagtttggagcagcagttggttactggtatcaaaaacatccgcacaaggagggtacatatataacacataattcattatgttaatttcactttcatgcttcatgtgtgtgtgttagtttgacacttatcattgaaatttgttatgttttaatagaatgatctcatgtccgagtccatttctgagcttcagaaaaaggagaaaaggatacaagaggagaataacacccttgcaaagaagatcaaggagaaagagcaggctgtagcacagcaagctgcacaatgggagcagccaaactacagggttgatacatctttcatgccacagcagcaaccccttcccaccagtttgaacatatgtggcaataattactgccaggaagctgcaccagaactaggaaggaacggtctagacctgaccctggaaccactctattcttgcaaccttggatgcttctgaaaagttgtttcttctgagttggattatattatataagtgctggcatatatgaactactataagtagtctgtttgaatgttttatatgtattttggtctatggcttttccctctactttgaagacattattttgaattgcttctgttgtaaacaaattgaatttgaaatctaattgtgtattttt

SEQ ID NO: 55653 - protein, 146 aa, Glycine max
  peptide (1)..(146): Ceres Seq. ID no. 15168375
  misc_feature (75)..(143): Pfam Name: K-box region Pfam Description: K-box region
  misc_feature (1)..(146): Homolog of NCBI NO: 28381535 NR Description: PTM1 [Populus tremuloides]
  misc_feature (1)..(146): Homolog of NCBI NO: 5070140 NR Description: MADS-box protein MADS5 [Nicotiana tabacum]
  misc_feature (1)..(143): Homolog of NCBI NO: 22091473 NR Description: MADS box transcription factor [Daucus carota
  misc_feature (1)..(146): Homolog of NCBI NO: 28381537 NR Description: PTM2 [Populus tremuloides]
  misc_feature (1)..(146): Homolog of NCBI NO: 4102113 NR Description: NAP1-2 [Nicotiana tabacum]
  misc_feature (1)..(146): Homolog of NCBI NO: 37542848 NR Description: AP1-like protein [Malus x domestica]
  misc_feature (1)..(143): Homolog of NCBI NO: 3646320 NR Description: MADS-box protein [Malus x domestica]
  misc_feature (1)..(143): Homolog of NCBI NO: 82313 NR Description: MADS box protein squa - garden snapdragon
  misc_feature (1)..(143): Homolog of NCBI NO: 1483228 NR Description: MADS3 protein [Betula pendula]
  misc_feature (1)..(143): Homolog of NCBI NO: 13446154 NR Description: MADS-box transcription factor [Pisum sativum]
MGRGRVQLKRIENKINRQVTFSKRRGGLLKKAHEISVLCDAEVALIIFSHKGKLFEYATDSCMEKILERHERYAYAERQLVANDSETQENWTIEYTRLKAKIDLLQRNHRHYMGEDLASMSLKELQSLEQQLVTGIKNIRTRRVHI

SEQ ID NO: 55654 - protein, 97 aa, Glycine max
  peptide (1)..(97): Ceres Seq. ID no. 15168376
  misc_feature (1)..(95): Homolog of NCBI NO: 28381535 NR Description: PTM1 [Populus tremuloides]
  misc_feature (1)..(97): Homolog of NCBI NO: 5070140 NR Description: MADS-box protein MADS5 [Nicotiana tabacum]
  misc_feature (1)..(97): Homolog of NCBI NO: 22091473 NR Description: MADS box transcription factor [Daucus carota
  misc_feature (1)..(97): Homolog of NCBI NO: 28381537 NR Description: PTM2 [Populus tremuloides]
  misc_feature (1)..(97): Homolog of NCBI NO: 4102113 NR Description: NAP1-2 [Nicotiana tabacum]
  misc_feature (1)..(97): Homolog of NCBI NO: 37542848 NR Description: AP1-like protein [Malus x domestica]
  misc_feature (1)..(97): Homolog of NCBI NO: 3646320 NR Description: MADS-box protein [Malus x domestica]
  misc_feature (1)..(97): Homolog of NCBI NO: 82313 NR Description: MADS box protein squa - garden snapdragon
  misc_feature (1)..(97): Homolog of NCBI NO: 1483228 NR Description: MADS3 protein [Betula pendula]
  misc_feature (1)..(97): Homolog of NCBI NO: 13446154 NR Description: MADS-box transcription factor [Pisum sativum]
MSESISELQKKEKRIQEENNTLAKKIKEKEQAVAQQAAQWEQPNYRVDTSFMPQQQPLPTSLNICGNNYCQEAAPELGRNGLDLTLEPLYSCNLGCF

SEQ ID NO: 55655 - protein, 84 aa, Glycine max
  peptide (1)..(84): Ceres Seq. ID no. 15168377
  misc_feature (13)..(81): Pfam Name: K-box region Pfam Description: K-box region
  misc_feature (1)..(84): Homolog of NCBI NO: 28381535 NR Description: PTM1 [Populus tremuloides]
  misc_feature (1)..(84): Homolog of NCBI NO: 5070140 NR Description: MADS-box protein MADS5 [Nicotiana tabacum]
  misc_feature (1)..(81): Homolog of NCBI NO: 22091473 NR Description: MADS box transcription factor [Daucus carota
  misc_feature (1)..(84): Homolog of NCBI NO: 28381537 NR Description: PTM2 [Populus tremuloides]
  misc_feature (1)..(84): Homolog of NCBI NO: 4102113 NR Description: NAP1-2 [Nicotiana tabacum]
  misc_feature (1)..(84): Homolog of NCBI NO: 37542848 NR Description: AP1-like protein [Malus x domestica]
  misc_feature (1)..(81): Homolog of NCBI NO: 3646320 NR Description: MADS-box protein [Malus x domestica]
  misc_feature (1)..(81): Homolog of NCBI NO: 82313 NR Description: MADS box protein squa - garden snapdragon
  misc_feature (1)..(81): Homolog of NCBI NO: 1483228 NR Description: MADS3 protein [Betula pendula]
  misc_feature (1)..(81): Homolog of NCBI NO: 13446154 NR Description: MADS-box transcription factor [Pisum sativum]
MEKILERHERYAYAERQLVANDSETQENWTIEYTRLKAKIDLLQRNHRHYMGEDLASMSLKELQSLEQQLVTGIKNIRTRRVHI

SEQ ID NO: 55656 - DNA, 1396 bp, Glycine max
  misc_feature (1)..(1396): Ceres Seq. ID no. 14312047
acgtttcaaatcgcagtctcagagcaaagcagagccaagaagaagaagaagaaaaccaacataatcaacaacaacaacaacaaaaagcttgcaaattagaagaatcttcagttaaaagggaagaagaacacacaagaagaaagagaagaagaaacgcgcgcgaatgaagggagaattagagttgccacctgggttcagatttcaccccactgatgaagaattggtgaatcactacttgtgtaggaagtgcgctggtcaaccaatcgcggttcccgtcatcaaagaggtcgatttgtacaagtttgatccatggcagcttccagaaattggtttttacggcgagaaagaatggtacttcttttctcctcgggaccggaaatacccgaacggttcacggccgaaccgcgccgccggaagcggctattggaaagccaccggcgctgataaaccgatcggaaaaccgaaagcgcttgggatcaagaaagctctggttttttacgccggaaaagcccccaaaggtgtgaaaaccaattggattatgcacgaatatcgcctcgccaatgttgaccgatctgcctccaagaaaaaaaacaacaacttgaggcttgatgattgggtgttgtgtcgaatctacaacaagaaagggaagattgagaaatacaacacaggcgcagcgaagatgaatgttgagatggttcatagttttgagcacgagaacgagacgaagccagagattcataagctaggaaatgagcaattgtacatggagacttcggattcggtgccaaggttgaacacggactcgagcagttcggagcacgtggtttcgcccgatgtcacgtgcgagagggaggtgcagagcgaccccaagtggaacgatgatctggacctaaagctagaaaacgcgtttgattttcagtttaattacttggacgataataacctttccgtggatgattacctttttggcactgttcagtatcaaatgggccagctctcgcccttgcaggacatgttcatgtacctacagaagatgtgaaaactgaaaacgaaacgttttgagcaacatgggacccgcaaatatctttgttttattatttttttaaaaggaaaagtcagcatttgtatgcaattgcattgcacctaacatgtgatgtgggctaggccaagcttagcaactattcttattctttgttctagagagatgagggaatgttgaattcggctgaaatgggctatttggattggttcttggtgtaaagaaaaaatgagagaaggagattaggtgctgcagtaagtaaaaagtaagtgagcaaattgatgataggttattggagggttaatgtgtgggtgtaaggactcacttaggaaaattcttgttcattgctattccagc

SEQ ID NO: 55657 - protein, 291 aa, Glycine max
  peptide (1)..(291): Ceres Seq. ID no. 14312048
  misc_feature (7)..(132): Pfam Name: No apical meristem (NAM) protein Pfam Description: No apical meristem (NAM) protein
  misc_feature (4)..(290): Homolog of NCBI NO: 21105734 NR Description: nam-like protein 3 [Petunia x hybrida]
  misc_feature (1)..(283): Homolog of NCBI NO: 22326685 NR Description: No apical meristem (NAM) protein family
  misc_feature (197)..(266): Homolog of NCBI NO: 31322570 NR Description: NAC-domain protein 5-1 [Brassica napus]
  misc_feature (1)..(178): Homolog of NCBI NO: 31322570 NR Description: NAC-domain protein 5-1 [Brassica napus]
  misc_feature (4)..(287): Homolog of NCBI NO: 31322578 NR Description: NAC-domain protein 18 [Brassica napus]
  misc_feature (5)..(290): Homolog of NCBI NO: 15223456 NR Description: No apical meristem (NAM) protein family
  misc_feature (4)..(287): Homolog of NCBI NO: 31322576 NR Description: NAC-domain protein 5-11 [Brassica napus]
  misc_feature (1)..(290): Homolog of NCBI NO: 14485513 NR Description: putative NAC domain protein [Solanum tuberosum]
  misc_feature (1)..(290): Homolog of NCBI NO: 40647397 NR Description: NAC domain protein [Lycopersicon esculentum]
  misc_feature (4)..(290): Homolog of NCBI NO: 21105748 NR Description: nam-like protein 10 [Petunia x hybrida]
MKGELELPPGFRFHPTDEELVNHYLCRKCAGQPIAVPVIKEVDLYKFDPWQLPEIGFYGEKEWYFFSPRDRKYPNGSRPNRAAGSGYWKATGADKPIGKPKALGIKKALVFYAGKAPKGVKTNWIMHEYRLANVDRSASKKKNNNLRLDDWVLCRIYNKKGKIEKYNTGAAKMNVEMVHSFEHENETKPEIHKLGNEQLYMETSDSVPRLNTDSSSSEHVVSPDVTCEREVQSDPKWNDDLDLKLENAFDFQFNYLDDNNLSVDDYLFGTVQYQMGQLSPLQDMFMYLQKM

SEQ ID NO: 55658 - protein, 166 aa, Glycine max
  peptide (1)..(166): Ceres Seq. ID no. 14312049
  misc_feature (1)..(165): Homolog of NCBI NO: 21105734 NR Description: nam-like protein 3 [Petunia x hybrida]
  misc_feature (1)..(158): Homolog of NCBI NO: 22326685 NR Description: No apical meristem (NAM) protein family
  misc_feature (72)..(141): Homolog of NCBI NO: 31322570 NR Description: NAC-domain protein 5-1 [Brassica napus]
  misc_feature (1)..(53): Homolog of NCBI NO: 31322570 NR Description: NAC-domain protein 5-1 [Brassica napus]
  misc_feature (1)..(162): Homolog of NCBI NO: 31322578 NR Description: NAC-domain protein 18 [Brassica napus]
  misc_feature (1)..(165): Homolog of NCBI NO: 15223456 NR Description: No apical meristem (NAM) protein family
  misc_feature (1)..(162): Homolog of NCBI NO: 31322576 NR Description: NAC-domain protein 5-11 [Brassica napus]
  misc_feature (1)..(165): Homolog of NCBI NO: 14485513 NR Description: putative NAC domain protein [Solanum tuberosum]
  misc_feature (1)..(165): Homolog of NCBI NO: 40647397 NR Description: NAC domain protein [Lycopersicon esculentum]
  misc_feature (1)..(165): Homolog of NCBI NO: 21105748 NR Description: nam-like protein 10 [Petunia x hybrida]
MHEYRLANVDRSASKKKNNNLRLDDWVLCRIYNKKGKIEKYNTGAAKMNVEMVHSFEHENETKPEIHKLGNEQLYMETSDSVPRLNTDSSSSEHVVSPDVTCEREVQSDPKWNDDLDLKLENAFDFQFNYLDDNNLSVDDYLFGTVQYQMGQLSPLQDMFMYLQKM

SEQ ID NO: 55659 - DNA, 945 bp, Glycine max
  misc_feature (1)..(945): Ceres Seq. ID no. 12607767
aatatagatttaacttcgttaataatttaaagatattacatgtttctgttacatgttggcttttatataaacaagatatataagaggattcttttagcttattttttttaaagaagaataaacatatttaaagataatcttacatcacaatttaatttattcaccataaatctaatatgtaatttatatatctaaatatattcatttgttataaatatcaattgtaatacaatttatatttatatatttagaaaattttaattatacgaaaataaacatttatgtggtataatatatattctaaaatgttaatattatcattgaaatatatttattataacgaaaaatactttatttaattgtataagaatatatttatcaaaaagaaaatattagaatttgatttgattcgtctttctctctctctgactcgaaattttgcagatctggaaatggcgacggcaacgtaccctccaccgccaccttattacagactttacaaagattacttgcaaaaccctaagtctgctcccgaccctccaccgcctattgaaggcacttatctttgttttggagccaattacaccactagtgatgttctaccaaccttggaagaacaaggggtgcgccagctctattctaagggccctaatgttggtaagctttaacctttcaatgcttctgctgatccttgcttcctaatgttggtaagctttgtctgctctttgttgccataggttcggaattttatattatcattattatgttgcaaaatactcggtcacattttcatccttttttggaaattccattatgggaaagtggaatcactgaggcacgaacctagaacagaaacaaatcaattacagctttgcatgctctgctttttcaaattgggtattcattcccttactttgtaggttgggatattacatggtgagctac

SEQ ID NO: 55660 - protein, 71 aa, Glycine max
  peptide (1)..(71): Ceres Seq. ID no. 12607768
  misc_feature (1)..(68): Pfam Name: MED7 protein Pfam Description: MED7 protein
  misc_feature (1)..(68): Homolog of NCBI NO: 32489035 NR Description: OSJNBa0084K01.4 [Oryza sativa (japonica
  misc_feature (1)..(68): Homolog of NCBI NO: 15242771 NR Description: putative protein; protein id: At5g03500.1
  misc_feature (1)..(68): Homolog of NCBI NO: 11282322 NR Description: transcription co-activator-like protein
  misc_feature (1)..(68): Homolog of NCBI NO: 21618057 NR Description: transcription co-activator-like protein
  misc_feature (1)..(68): Homolog of NCBI NO: 15242681 NR Description: putative protein
MATATYPPPPPYYRLYKDYLQNPKSAPDPPPPIEGTYLCFGANYTTSDVLPTLEEQGVRQLYSKGPNVGKL

SEQ ID NO: 55661 - protein, 35 aa, Glycine max
  peptide (1)..(35): Ceres Seq. ID no. 12607769
MFYQPWKNKGCASSILRALMLVSFNLSMLLLILAS

SEQ ID NO: 55662 - DNA, 1411 bp, Glycine max
  misc_feature (1)..(1411): Ceres Seq. ID no. 14313429
aacacacaaccaaaccctcttgaccttgtgatatctctctcttttaatttctaggatcaaaccaaaaaatggtcttagaagagagtgtagtgcatgatgtgaggctatcctcagttgggccgggccgggccaccgggtcggacgtattccacaacccgggtggcttggacttggccatgaagcttcactaccttagagtggtgtacttctttgatagtgaggctgcacaagacctaaccatcatgaaaattaaggatggcatgttcactttgttcaaccattacttcatcacctgtggccggttccggcgatcggattccggtcgacccttaatcaagtgcaatgattgtggagcaaggttcattgaggccaagtgcaacaaaaccctagatgagtggctagccatgaaggattggcccttgtacaagttgctcgtctctcaccaagtcattggcccagaactatctttttctcctcctgttttgttccaggtgactaaatttaagtgcggcggaatttcattgggtcttagttgggcccacgtattgggggatcctctttcggcttcagaattcattaactcttggggtctaatattgaaaaatatgggcctaaaaatgctttttaacatcccaagatccatcccaacacccggacagcccggacctgaaaaggatccagtttcagcaaaacggatcgacccggtgggagatcattggattccagccaacaacaaaaaaatggagacattctccttccacctaactagctcccagttgaactacttgcaagcacaaatttggggtacaagtcttgaccaaacccctccttttgaatcactatgtgccatgatttggcgttgcatggcccgaattcgaccaggatccgaacccaaaaccgtaactgtgtgtagaagcaacccctataagaggggcaatcatatcattggtaacaaccaagtgatatgcaaggttgatgctgcaagtgaatcctcaattcttgacactgatttgacagttttagctagcatgcttgtggatcaaggtgtggatgagaggaagcaaattgaggaagcagttgagagagaccaaggtgtgagtgatttcttcgtctatggtgtcaacttgacatttctagacttacaagaaaccaatgtgtatgacttgcaattgaagggacacacaccaaagtttgtttactacacccttcaaggtgttggagatgaaggggttgttttggtgtatccattgcccaaaggttctatggagaatggtgttgatgggaagtttctgaccatgatttttccggaggatgaaatggtgaagcttaaatctgagctcaagataattggtcttttgcttgagaataattaagttttaatgagattaaaagcatgtttgactttccgttc

SEQ ID NO: 55663 - protein, 434 aa, Glycine max
  peptide (1)..(434): Ceres Seq. ID no. 14313430
  misc_feature (8)..(425): Pfam Name: Transferase family Pfam Description: Transferase family
  misc_feature (33)..(274): Homolog of NCBI NO: 40644899 NR Description: hydroxycinnamoyl CoA quinate transferase
  misc_feature (33)..(270): Homolog of NCBI NO: 40644084 NR Description: hydroxycinnamoyl CoA quinate transferase
  misc_feature (6)..(142): Homolog of NCBI NO: 38568009 NR Description: OSJNBa0070C17.1 [Oryza sativa (japonica
  misc_feature (150)..(433): Homolog of NCBI NO: 38568010 NR Description: OSJNBa0070C17.2 [Oryza sativa (japonica
  misc_feature (1)..(424): Homolog of NCBI NO: 2130139 NR Description: hypothetical protein - maize
  misc_feature (3)..(424): Homolog of NCBI NO: 15233851 NR Description: CER2 [Arabidopsis thaliana]
  misc_feature (6)..(433): Homolog of NCBI NO: 38345799 NR Description: OSJNBa0085I10.16 [Oryza sativa (japonica
  misc_feature (1)..(393): Homolog of NCBI NO: 18403923 NR Description: transferase family [Arabidopsis thaliana]
  misc_feature (1)..(393): Homolog of NCBI NO: 21593424 NR Description: fatty acid elongase-like protein (cer2-like)
  misc_feature (1)..(430): Homolog of NCBI NO: 15236357 NR Description: transferase family [Arabidopsis thaliana]
MVLEESVVHDVRLSSVGPGRATGSDVFHNPGGLDLAMKLHYLRVVYFFDSEAAQDLTIMKIKDGMFTLFNHYFITCGRFRRSDSGRPLIKCNDCGARFIEAKCNKTLDEWLAMKDWPLYKLLVSHQVIGPELSFSPPVLFQVTKFKCGGISLGLSWAHVLGDPLSASEFINSWGLILKNMGLKMLFNIPRSIPTPGQPGPEKDPVSAKRIDPVGDHWIPANNKKMETFSFHLTSSQLNYLQAQIWGTSLDQTPPFESLCAMIWRCMARIRPGSEPKTVTVCRSNPYKRGNHIIGNNQVICKVDAASESSILDTDLTVLASMLVDQGVDERKQIEEAVERDQGVSDFFVYGVNLTFLDLQETNVYDLQLKGHTPKFVYYTLQGVGDEGVVLVYPLPKGSMENGVDGKFLTMIFPEDEMVKLKSELKIIGLLLENN

SEQ ID NO: 55664 - protein, 398 aa, Glycine max
  peptide (1)..(398): Ceres Seq. ID no. 14313431
  misc_feature (1)..(389): Pfam Name: Transferase family Pfam Description: Transferase family
  misc_feature (1)..(238): Homolog of NCBI NO: 40644899 NR Description: hydroxycinnamoyl CoA quinate transferase
  misc_feature (1)..(234): Homolog of NCBI NO: 40644084 NR Description: hydroxycinnamoyl CoA quinate transferase
  misc_feature (1)..(106): Homolog of NCBI NO: 38568009 NR Description: OSJNBa0070C17.1 [Oryza sativa (japonica
  misc_feature (114)..(397): Homolog of NCBI NO: 38568010 NR Description: OSJNBa0070C17.2 [Oryza sativa (japonica
  misc_feature (1)..(388): Homolog of NCBI NO: 2130139 NR Description: hypothetical protein - maize
  misc_feature (1)..(388): Homolog of NCBI NO: 15233851 NR Description: CER2 [Arabidopsis thaliana]
  misc_feature (1)..(397): Homolog of NCBI NO: 38345799 NR Description: OSJNBa0085I10.16 [Oryza sativa (japonica
  misc_feature (1)..(357): Homolog of NCBI NO: 18403923 NR Description: transferase family [Arabidopsis thaliana]
  misc_feature (1)..(357): Homolog of NCBI NO: 21593424 NR Description: fatty acid elongase-like protein (cer2-like)
  misc_feature (1)..(394): Homolog of NCBI NO: 15236357 NR Description: transferase family [Arabidopsis thaliana]
MKLHYLRVVYFFDSEAAQDLTIMKIKDGMFTLFNHYFITCGRFRRSDSGRPLIKCNDCGARFIEAKCNKTLDEWLAMKDWPLYKLLVSHQVIGPELSFSPPVLFQVTKFKCGGISLGLSWAHVLGDPLSASEFINSWGLILKNMGLKMLFNIPRSIPTPGQPGPEKDPVSAKRIDPVGDHWIPANNKKMETFSFHLTSSQLNYLQAQIWGTSLDQTPPFESLCAMIWRCMARIRPGSEPKTVTVCRSNPYKRGNHIIGNNQVICKVDAASESSILDTDLTVLASMLVDQGVDERKQIEEAVERDQGVSDFFVYGVNLTFLDLQETNVYDLQLKGHTPKFVYYTLQGVGDEGVVLVYPLPKGSMENGVDGKFLTMIFPEDEMVKLKSELKIIGLLLENN

SEQ ID NO: 55665 - protein, 376 aa, Glycine max
  peptide (1)..(376): Ceres Seq. ID no. 14313432
  misc_feature (1)..(367): Pfam Name: Transferase family Pfam Description: Transferase family
  misc_feature (1)..(216): Homolog of NCBI NO: 40644899 NR Description: hydroxycinnamoyl CoA quinate transferase
  misc_feature (1)..(212): Homolog of NCBI NO: 40644084 NR Description: hydroxycinnamoyl CoA quinate transferase
  misc_feature (1)..(84): Homolog of NCBI NO: 38568009 NR Description: OSJNBa0070C17.1 [Oryza sativa (japonica
  misc_feature (92)..(375): Homolog of NCBI NO: 38568010 NR Description: OSJNBa0070C17.2 [Oryza sativa (japonica
  misc_feature (1)..(366): Homolog of NCBI NO: 2130139 NR Description: hypothetical protein - maize
  misc_feature (1)..(366): Homolog of NCBI NO: 15233851 NR Description: CER2 [Arabidopsis thaliana]
  misc_feature (1)..(375): Homolog of NCBI NO: 38345799 NR Description: OSJNBa0085I10.16 [Oryza sativa (japonica
  misc_feature (1)..(335): Homolog of NCBI NO: 18403923 NR Description: transferase family [Arabidopsis thaliana]
  misc_feature (1)..(335): Homolog of NCBI NO: 21593424 NR Description: fatty acid elongase-like protein (cer2-like)
  misc_feature (1)..(372): Homolog of NCBI NO: 15236357 NR Description: transferase family [Arabidopsis thaliana]
MKIKDGMFTLFNHYFITCGRFRRSDSGRPLIKCNDCGARFIEAKCNKTLDEWLAMKDWPLYKLLVSHQVIGPELSFSPPVLFQVTKFKCGGISLGLSWAHVLGDPLSASEFINSWGLILKNMGLKMLFNIPRSIPTPGQPGPEKDPVSAKRIDPVGDHWIPANNKKMETFSFHLTSSQLNYLQAQIWGTSLDQTPPFESLCAMIWRCMARIRPGSEPKTVTVCRSNPYKRGNHIIGNNQVICKVDAASESSILDTDLTVLASMLVDQGVDERKQIEEAVERDQGVSDFFVYGVNLTFLDLQETNVYDLQLKGHTPKFVYYTLQGVGDEGVVLVYPLPKGSMENGVDGKFLTMIFPEDEMVKLKSELKIIGLLLENN

SEQ ID NO: 55666 - DNA, 1191 bp, Glycine max
  misc_feature (1)..(1191): Ceres Seq. ID no. 13594037
cccccatgtttttattaatttgattttctctttcgtggttttttttttatacataacttgagagaattgttttttgttttggcattatgtggctttaaattgtttgacatgacaataattgagtggtaattaaatttgatgtgaacgagtgtagatttgtgatacacataaaagccggggcatacttcgagaatgtggaggtaatcaggaagaagaccaatctgatgttcgtcggagatgggattggaaagactgttgtgaaggccagtaggaatgttgtggatggctggaccactttccaatcagccactgttgctgtggttggagacggattcatagcaaagggtataacctttgaaaattctgctgggccaagcaaacaccaagccgtggccctaaggagtggttctgatttctcagccttctataaatgcagcttcgttgcctaccaagatactctctatgtccactccctgcgccaattctaccgcgattgtgacgtttatggcacagtcgacttcatcttcggcaatgcagcaacagtgctccagaactgcaacttgtacgcacgcaagcccaatgaaaaccaaaggaacttgttcactgcacaaggaagagaagaccctaaccaaaacaccggcatttccatcttgaactgcaaggttgcagcagctgctgatttaatcccggtcaaatctcagttcaagaactacttgggtcgtccttggaagaagtattcgagaactgtttatcttaattcttacatggaggatctgatagaccccaaagggtggttggagtggaatggcacgtttgcattggatacgttgtattatggagagtacaacaataggggtcccggttcaaacacaagtgcaagagttacgtggcctggttatagggttatcaagaacgccactgaggcaaaccagttcacagttcgcaatttcattcaagggaatgaatggttgagttccaccgacattccattcttctctgatttcagttgaatacgttatggttattagtggcttcatgctcttttggtatccccatttaataaagtattagatgtttgttgtggaaatagaattcaaggaatgttattgttccttgcgacaaaagcactaactaaaataaaaaagtattttatattaattttttatcgataaawawtaatttattaatttt

SEQ ID NO: 55667 - protein, 261 aa, Glycine max
  peptide (1)..(261): Ceres Seq. ID no. 15221289
  misc_feature (1)..(246): Pfam Name: Pectinesterase Pfam Description: Pectinesterase
  misc_feature (1)..(258): Homolog of NCBI NO: 18406733 NR Description: pectinesterase family [Arabidopsis thaliana]
  misc_feature (1)..(256): Homolog of NCBI NO: 15220955 NR Description: pectin methylesterase (PMEU1) -related
  misc_feature (1)..(256): Homolog of NCBI NO: 2129667 NR Description: pectinesterase (EC 3.1.1.11) 2 precursor -
  misc_feature (1)..(256): Homolog of NCBI NO: 24250746 NR Description: putative thermostable pectinesterase [Citrus
  misc_feature (1)..(258): Homolog of NCBI NO: 7447381 NR Description: pectinesterase (EC 3.1.1.11) PECS-c2 - sweet
  misc_feature (1)..(258): Homolog of NCBI NO: 6174914 NR Description: Pectinesterase 2.1 precursor (Pectin
  misc_feature (1)..(259): Homolog of NCBI NO: 15235323 NR Description: pectinesterase family [Arabidopsis thaliana]
  misc_feature (1)..(260): Homolog of NCBI NO: 15235315 NR Description: pectinesterase family [Arabidopsis thaliana]
  misc_feature (1)..(261): Homolog of NCBI NO: 34393863 NR Description: putative pectinesterase [Oryza sativa (japonica
  misc_feature (1)..(258): Homolog of NCBI NO: 7025485 NR Description: pectin methylesterase isoform alpha [Vigna
MFVGDGIGKTVVKASRNVVDGWTTFQSATVAVVGDGFIAKGITFENSAGPSKHQAVALRSGSDFSAFYKCSFVAYQDTLYVHSLRQFYRDCDVYGTVDFIFGNAATVLQNCNLYARKPNENQRNLFTAQGREDPNQNTGISILNCKVAAAADLIPVKSQFKNYLGRPWKKYSRTVYLNSYMEDLIDPKGWLEWNGTFALDTLYYGEYNNRGPGSNTSARVTWPGYRVIKNATEANQFTVRNFIQGNEWLSSTDIPFFSDFS

SEQ ID NO: 55668 - DNA, 1288 bp, Glycine max
  misc_feature (1)..(1288): Ceres Seq. ID no. 15170521
aaaagttggcacctggcagcaagtagtagtaacaatttaggattgtggtgtgttgttgttgttgtagctatcagtaggtgaatccaaaaccctagccctcactctcaccaccattttttcaattcttgagctatgtttcagggataatagggcagggatgtacaaagaacgagagcgaggtggtgtttccgtttccgcctctaaatccgaggatcggaagcgaatcaacgacgttctcgataagcacttggaacgatcctctccttccacttcccgccccatcaacaccgcttccaagaattccaacctccaagtggaggaatctgagacggagagtgaagagtctgatgttagtggctctgatggggatgacacctcttggatctcgtggttctgtaatctaagagggaatgagttcttttgtgaggtggatgatgattacatacaggatgactttaacctctgtggattgagcagtcaagtgccctactttgattatgcccttgatttgattctcgacgttgagtcatcccatggtgacatgttcacggaggaacagaatgagttgattgaatcggcggcggaaatgctttatggtatgattcatgctcgatatgtgttgaccagcaaaggaatggctgccatgcttgacaaatacaagagctatgattttggtagatgcccaagagtttactgctctggacagccctgccttccagttggtcaatcggacattcctaggtcaagtactgtgaaaatatactgccctaggtgtgaagatctttactatccgcgttccaagtatcaaggcaacattgatggagcttactttggaacaacatttccacacctcttcttgatgacttatggacaactgaagccacagaaaccagcacaaggctatgttccgagagtttttgggttcaaagttcacaagccataaagccgaagttgaagctttcatgaaagtaaaaatctccccgtgtctcatttaactcttcttatggttctctttgcaacaacaggcgaatcatatgctttccaaaccagtacaatctaggcatctgttttacttgttataggagcttgttgtaaagaaatatgcagacatgtgaagcaagtgcttagtttcagcttctgattcaatgagcaagtgcttaggtactcgatggtacttcttaatggctttttacaaattgtattcttgcaattaacttaatattgtctatggttatgtctcgaattacaaataccctgctatttttatattgttttattccatttcaag

SEQ ID NO: 55669 - protein, 261 aa, Glycine max
  peptide (1)..(261): Ceres Seq. ID no. 15170522
  misc_feature (71)..(249): Pfam Name: Casein kinase II regulatory subunit Pfam Description: Casein kinase II regulatory subunit
  misc_feature (55)..(261): Homolog of NCBI NO: 34901776 NR Description: OJ1058_B11.17 [Oryza sativa (japonica
  misc_feature (38)..(261): Homolog of NCBI NO: 15236597 NR Description: casein kinase II beta chain, putative
  misc_feature (46)..(261): Homolog of NCBI NO: 15238013 NR Description: casein kinase II beta chain, putative
  misc_feature (19)..(261): Homolog of NCBI NO: 11527002 NR Description: protein kinase CK2 regulatory subunit CK2B2 [Zea
  misc_feature (1)..(261): Homolog of NCBI NO: 15232283 NR Description: casein kinase II beta chain, putative
  misc_feature (19)..(259): Homolog of NCBI NO: 30689795 NR Description: casein kinase II beta chain, putative
  misc_feature (32)..(260): Homolog of NCBI NO: 21261784 NR Description: protein kinase Ck2 regulatory subunit 2
  misc_feature (19)..(259): Homolog of NCBI NO: 15224934 NR Description: casein kinase II beta chain, putative
  misc_feature (1)..(51): Homolog of NCBI NO: 37536920 NR Description: putative casein kinase II beta subunit
  misc_feature (41)..(260): Homolog of NCBI NO: 37536920 NR Description: putative casein kinase II beta subunit
MYKERERGGVSVSASKSEDRKRINDVLDKHLERSSPSTSRPINTASKNSNLQVEESETESEESDVSGSDGDDTSWISWFCNLRGNEFFCEVDDDYIQDDFNLCGLSSQVPYFDYALDLILDVESSHGDMFTEEQNELIESAAEMLYGMIHARYVLTSKGMAAMLDKYKSYDFGRCPRVYCSGQPCLPVGQSDIPRSSTVKIYCPRCEDLYYPRSKYQGNIDGAYFGTTFPHLFLMTYGQLKPQKPAQGYVPRVFGFKVHKP

SEQ ID NO: 55670 - protein, 133 aa, Glycine max
  peptide (1)..(133): Ceres Seq. ID no. 15170523
  misc_feature (1)..(121): Pfam Name: Casein kinase II regulatory subunit Pfam Description: Casein kinase II regulatory subunit
  misc_feature (1)..(133): Homolog of NCBI NO: 11527000 NR Description: protein kinase CK2 regulatory subunit CK2B1 [Zea
  misc_feature (1)..(133): Homolog of NCBI NO: 34901776 NR Description: OJ1058_B11.17 [Oryza sativa (japonica
  misc_feature (1)..(133): Homolog of NCBI NO: 15236597 NR Description: casein kinase II beta chain, putative
  misc_feature (1)..(133): Homolog of NCBI NO: 15238013 NR Description: casein kinase II beta chain, putative
  misc_feature (1)..(133): Homolog of NCBI NO: 11527002 NR Description: protein kinase CK2 regulatory subunit CK2B2 [Zea
  misc_feature (1)..(133): Homolog of NCBI NO: 15232283 NR Description: casein kinase II beta chain, putative
  misc_feature (1)..(131): Homolog of NCBI NO: 30689795 NR Description: casein kinase II beta chain, putative
  misc_feature (1)..(132): Homolog of NCBI NO: 21261784 NR Description: protein kinase Ck2 regulatory subunit 2
  misc_feature (1)..(131): Homolog of NCBI NO: 15224934 NR Description: casein kinase II beta chain, putative
  misc_feature (1)..(132): Homolog of NCBI NO: 37536920 NR Description: putative casein kinase II beta subunit
MFTEEQNELIESAAEMLYGMIHARYVLTSKGMAAMLDKYKSYDFGRCPRVYCSGQPCLPVGQSDIPRSSTVKIYCPRCEDLYYPRSKYQGNIDGAYFGTTFPHLFLMTYGQLKPQKPAQGYVPRVFGFKVHKP

SEQ ID NO: 55671 - DNA, 1773 bp, Glycine max
  misc_feature (1)..(1773): Ceres Seq. ID no. 15170532
agttcttcatctcttctttctctttctctctactcagttcttcatctcttctttctctctctctctctcccctcacaacacacattgagaaaaacaaccctcactccctagatggggccttccgagaacgagccacttgtaaattcccaatttttcagttgaattttaactgcaattggtagattacgatttcccctacctgaaaccctagccatttgtagatgactcacttgtaaattcgcaattttgttgctgaatttcagctgtgattggtagtttcattgcatcttcgcgaccaattttcgggagaaaatggcagaactcgatctgtccaagaaagtagccgataggtatctcaagcgtgaagtccttggtgagggtacatacggtgtcgtttacaaagccattgataccaagacagggcagacggttgcaattaagaagatccggcttggcaagcagaaagaaggggtcaattttacggctctcagagaaattaaactgcttaaagagctcaaagatccaaacattattgagttgattgatgcctttccacataaagggaatttgcatcttgtgtttgagttcatggagacggacctcgaagctgttatacgggacaggaatattgttctttcacctagtgatataaaatcttaccttcagatgacattaaaaggccttgctatttgccacaagaaatgggtgttgcatagggatatgaagccaaataacttgttgataggatccaacggacagctgaaacttgcagattttggtttagcacgggtatttggaagcccagatcgcaggttcactcatcaggtgtttgctcggtggtatagagcacctgagctattatttggcaccaagcagtatggtcctggggtagatgtttgggctgcagcttgtatatttgctgaatttcttcttcgtcgacccttcctgcagggttcaagtgatattgatcaattaggaaagatttttgcagcatttggaactccatctgcttctcagtggcctgatatgattttccttcctgattatgttgaatatcaacatgttcctgccccacctttgcgttctttatttccaatggctagtgacgatgccttagatttgttgtcaaagatgtttacttatgatccaaaggctagaatatctgtaccgcaggcattagagcacaggtacttctcatctgcgcctctgcccacagatcctgttaagctttcaagacctgctcctaagaaggaatctaaggtttcagatgtaatttcaaacgaaggtcctactgtcttgtcacctccaagaaagtccaggagagtaatgccagggcgtgatgggtctgaaggaaattctttgcaaggagataagtttgatgacagtgttgttagtgtcagacaggcagctggtgataatatgggaaagaatgagccagctccaatgtcactagatttttctctttttggattaaaacctccaaatagacctacaattaccagtgctgacagatcacatttaaaaagaaaattagatctagagttctagcagccagaatgaatattctatgatggttccatcagtaagagaggggtctgatgcatttgagaaaattctgtgaatcagcttcgcttgtatgccattccctatatttttctctctgcataaagttcccatgaatatgttgatgtttaaaggaagaagtatctgtgacagcagattagcatctcacttgaatagtagttcagagagctgaaagtaactatcatagac

SEQ ID NO: 55672 - protein, 411 aa, Glycine max
  peptide (1)..(411): Ceres Seq. ID no. 15170533
  misc_feature (14)..(294): Pfam Name: Protein kinase domain Pfam Description: Protein kinase domain
  misc_feature (4)..(309): Homolog of NCBI NO: 2125816 NR Description: serine/threonine protein kinase [Homo sapiens]
  misc_feature (4)..(309): Homolog of NCBI NO: 33304107 NR Description: cyclin-dependent kinase 7 [synthetic construct]
  misc_feature (4)..(309): Homolog of NCBI NO: 4502743 NR Description: cyclin-dependent kinase 7
  misc_feature (4)..(309): Homolog of NCBI NO: 13529020 NR Description: cyclin-dependent kinase 7 (homolog of Xenopus
  misc_feature (12)..(344): Homolog of NCBI NO: 15219730 NR Description: cell division protein kinase, putative
  misc_feature (369)..(411): Homolog of NCBI NO: 15220917 NR Description: cell division protein kinase, putative
  misc_feature (8)..(383): Homolog of NCBI NO: 15220917 NR Description: cell division protein kinase, putative
  misc_feature (4)..(411): Homolog of NCBI NO: 15219522 NR Description: cell division protein kinase, putative
  misc_feature (8)..(410): Homolog of NCBI NO: 266410 NR Description: CDC2+/CDC28-related protein kinase R2
  misc_feature (1)..(411): Homolog of NCBI NO: 15419985 NR Description: CDK-activating kinase [Medicago sativa subsp. x
MAELDLSKKVADRYLKREVLGEGTYGVVYKAIDTKTGQTVAIKKIRLGKQKEGVNFTALREIKLLKELKDPNIIELIDAFPHKGNLHLVFEFMETDLEAVIRDRNIVLSPSDIKSYLQMTLKGLAICHKKWVLHRDMKPNNLLIGSNGQLKLADFGLARVFGSPDRRFTHQVFARWYRAPELLFGTKQYGPGVDVWAAACIFAEFLLRRPFLQGSSDIDQLGKIFAAFGTPSASQWPDMIFLPDYVEYQHVPAPPLRSLFPMASDDALDLLSKMFTYDPKARISVPQALEHRYFSSAPLPTDPVKLSRPAPKKESKVSDVISNEGPTVLSPPRKSRRVMPGRDGSEGNSLQGDKFDDSVVSVRQAAGDNMGKNEPAPMSLDFSLFGLKPPNRPTITSADRSHLKRKLDLEF

SEQ ID NO: 55673 - protein, 319 aa, Glycine max
  peptide (1)..(319): Ceres Seq. ID no. 15170534
  misc_feature (1)..(202): Pfam Name: Protein kinase domain Pfam Description: Protein kinase domain
  misc_feature (1)..(217): Homolog of NCBI NO: 2125816 NR Description: serine/threonine protein kinase [Homo sapiens]
  misc_feature (1)..(217): Homolog of NCBI NO: 33304107 NR Description: cyclin-dependent kinase 7 [synthetic construct]
  misc_feature (1)..(217): Homolog of NCBI NO: 4502743 NR Description: cyclin-dependent kinase 7
  misc_feature (1)..(217): Homolog of NCBI NO: 13529020 NR Description: cyclin-dependent kinase 7 (homolog of Xenopus
  misc_feature (1)..(252): Homolog of NCBI NO: 15219730 NR Description: cell division protein kinase, putative
  misc_feature (277)..(319): Homolog of NCBI NO: 15220917 NR Description: cell division protein kinase, putative
  misc_feature (1)..(291): Homolog of NCBI NO: 15220917 NR Description: cell division protein kinase, putative
  misc_feature (1)..(319): Homolog of NCBI NO: 15219522 NR Description: cell division protein kinase, putative
  misc_feature (1)..(318): Homolog of NCBI NO: 266410 NR Description: CDC2+/CDC28-related protein kinase R2
  misc_feature (1)..(319): Homolog of NCBI NO: 15419985 NR Description: CDK-activating kinase [Medicago sativa subsp. x
METDLEAVIRDRNIVLSPSDIKSYLQMTLKGLAICHKKWVLHRDMKPNNLLIGSNGQLKLADFGLARVFGSPDRRFTHQVFARWYRAPELLFGTKQYGPGVDVWAAACIFAEFLLRRPFLQGSSDIDQLGKIFAAFGTPSASQWPDMIFLPDYVEYQHVPAPPLRSLFPMASDDALDLLSKMFTYDPKARISVPQALEHRYFSSAPLPTDPVKLSRPAPKKESKVSDVISNEGPTVLSPPRKSRRVMPGRDGSEGNSLQGDKFDDSVVSVRQAAGDNMGKNEPAPMSLDFSLFGLKPPNRPTITSADRSHLKRKLDLEF

SEQ ID NO: 55674 - protein, 293 aa, Glycine max
  peptide (1)..(293): Ceres Seq. ID no. 15170535
  misc_feature (1)..(176): Pfam Name: Protein kinase domain Pfam Description: Protein kinase domain
  misc_feature (1)..(191): Homolog of NCBI NO: 2125816 NR Description: serine/threonine protein kinase [Homo sapiens]
  misc_feature (1)..(191): Homolog of NCBI NO: 33304107 NR Description: cyclin-dependent kinase 7 [synthetic construct]
  misc_feature (1)..(191): Homolog of NCBI NO: 4502743 NR Description: cyclin-dependent kinase 7
  misc_feature (1)..(191): Homolog of NCBI NO: 13529020 NR Description: cyclin-dependent kinase 7 (homolog of Xenopus
  misc_feature (1)..(226): Homolog of NCBI NO: 15219730 NR Description: cell division protein kinase, putative
  misc_feature (251)..(293): Homolog of NCBI NO: 15220917 NR Description: cell division protein kinase, putative
  misc_feature (1)..(265): Homolog of NCBI NO: 15220917 NR Description: cell division protein kinase, putative
  misc_feature (1)..(293): Homolog of NCBI NO: 15219522 NR Description: cell division protein kinase, putative
  misc_feature (1)..(292): Homolog of NCBI NO: 266410 NR Description: CDC2+/CDC28-related protein kinase R2
  misc_feature (1)..(293): Homolog of NCBI NO: 15419985 NR Description: CDK-activating kinase [Medicago sativa subsp. x
MTLKGLAICHKKWVLHRDMKPNNLLIGSNGQLKLADFGLARVFGSPDRRFTHQVFARWYRAPELLFGTKQYGPGVDVWAAACIFAEFLLRRPFLQGSSDIDQLGKIFAAFGTPSASQWPDMIFLPDYVEYQHVPAPPLRSLFPMASDDALDLLSKMFTYDPKARISVPQALEHRYFSSAPLPTDPVKLSRPAPKKESKVSDVISNEGPTVLSPPRKSRRVMPGRDGSEGNSLQGDKFDDSVVSVRQAAGDNMGKNEPAPMSLDFSLFGLKPPNRPTITSADRSHLKRKLDLEF

SEQ ID NO: 55675 - DNA, 1095 bp, Glycine max
  misc_feature (1)..(1095): Ceres Seq. ID no. 15169749
ggagacggtagcagataagcctaaacacgaaactcgcaaattccctcaacactggagtcgctggaaaattcattctgggactcagctgagctgaccaagcatgattcaaaatggttgcattgtatcccaagggtgtgcccctctgaattctaggtcacgcaaccatggcatacctagtacctctgcctttcgttgcgcttctctaatgcctcccaaggttgccgtctctaacatccggagcttttggggacataatctggaatgtaaacccttgttgccaagaggaatgacattgacaaacacgtttgctgtatcaagcctgcgtgtaagggagggtcaaaatcatctctttcgtgctctccctcttttaccccggttgcgcaagtctaatatggcccctcgagcatcaaaggatgtcccaactagcttccgttatcctccaatgaccaagaaaccgcaatggtggtggagatcattagcatgcctcccttacctcatgcctctccatgagacatggatgtatgccgagacagcatacaatcttcacccatttttggaatgctttgaattctatacttacccttttcttatggccattggaagccttcctagctggtttctcatggcatacttctttgttgcatatcttggaattgtgaggagaaaagagtggcctcatttcttcagatttcatgttgtgatgggaatgttattggagattgccctgcaggttatagggactgtgagccgctggatgccgctatcactctactggggtaaactgggaatgcatttttggactgccgtatcatttggttatctatttaccgtcttggagtccataaggtgtgctcttgccggtatgtatgctgacattcctttcatctgtgacgcagcatatatccagataccatatgattaacaaggcagatgtaaggaagtttaagtttacattatgtatcacttttcgttgtatcagaatttttcttgagcagaattgaaggattactagtctattagtgattatgcccaaaaaaaaatgtgtttgagatttcccttgcgtacattttgtttatatgaattgactttatctgc

SEQ ID NO: 55676 - protein, 273 aa, Glycine max
  peptide (1)..(273): Ceres Seq. ID no. 15169750
  misc_feature (190)..(253): Homolog of NCBI NO: 25406822 NR Description: hypothetical protein [imported] - Arabidopsis
  misc_feature (20)..(268): Homolog of NCBI NO: 15236283 NR Description: chloroplast protein import component -related
  misc_feature (69)..(268): Homolog of NCBI NO: 34899836 NR Description: putative Tic20 protein [Oryza sativa (japonica
  misc_feature (69)..(268): Homolog of NCBI NO: 34393290 NR Description: putative Tic20 protein [Oryza sativa (japonica
  misc_feature (92)..(253): Homolog of NCBI NO: 15220356 NR Description: expressed protein [Arabidopsis thaliana]
  misc_feature (1)..(273): Homolog of NCBI NO: 6984128 NR Description: Tic20-like protein [Euphorbia esula]
  misc_feature (20)..(273): Homolog of NCBI NO: 3769673 NR Description: Tic20 [Pisum sativum]
  misc_feature (57)..(273): Homolog of NCBI NO: 26449432 NR Description: unknown protein [Arabidopsis thaliana]
MIQNGCIVSQGCAPLNSRSRNHGIPSTSAFRCASLMPPKVAVSNIRSFWGHNLECKPLLPRGMTLTNTFAVSSLRVREGQNHLFRALPLLPRLRKSNMAPRASKDVPTSFRYPPMTKKPQWWWRSLACLPYLMPLHETWMYAETAYNLHPFLECFEFYTYPFLMAIGSLPSWFLMAYFFVAYLGIVRRKEWPHFFRFHVVMGMLLEIALQVIGTVSRWMPLSLYWGKLGMHFWTAVSFGYLFTVLESIRCALAGMYADIPFICDAAYIQIPYD

SEQ ID NO: 55677 - protein, 238 aa, Glycine max
  peptide (1)..(238): Ceres Seq. ID no. 15169751
  misc_feature (155)..(218): Homolog of NCBI NO: 25406822 NR Description: hypothetical protein [imported] - Arabidopsis
  misc_feature (1)..(233): Homolog of NCBI NO: 15236283 NR Description: chloroplast protein import component -related
  misc_feature (34)..(233): Homolog of NCBI NO: 34899836 NR Description: putative Tic20 protein [Oryza sativa (japonica
  misc_feature (34)..(233): Homolog of NCBI NO: 34393290 NR Description: putative Tic20 protein [Oryza sativa (japonica
  misc_feature (57)..(218): Homolog of NCBI NO: 15220356 NR Description: expressed protein [Arabidopsis thaliana]
  misc_feature (1)..(238): Homolog of NCBI NO: 6984128 NR Description: Tic20-like protein [Euphorbia esula]
  misc_feature (1)..(238): Homolog of NCBI NO: 3769673 NR Description: Tic20 [Pisum sativum]
  misc_feature (22)..(238): Homolog of NCBI NO: 26449432 NR Description: unknown protein [Arabidopsis thaliana]
MPPKVAVSNIRSFWGHNLECKPLLPRGMTLTNTFAVSSLRVREGQNHLFRALPLLPRLRKSNMAPRASKDVPTSFRYPPMTKKPQWWWRSLACLPYLMPLHETWMYAETAYNLHPFLECFEFYTYPFLMAIGSLPSWFLMAYFFVAYLGIVRRKEWPHFFRFHVVMGMLLEIALQVIGTVSRWMPLSLYWGKLGMHFWTAVSFGYLFTVLESIRCALAGMYADIPFICDAAYIQIPYD

SEQ ID NO: 55678 - protein, 211 aa, Glycine max
  peptide (1)..(211): Ceres Seq. ID no. 15169752
  misc_feature (128)..(191): Homolog of NCBI NO: 25406822 NR Description: hypothetical protein [imported] - Arabidopsis
  misc_feature (1)..(206): Homolog of NCBI NO: 15236283 NR Description: chloroplast protein import component -related
  misc_feature (7)..(206): Homolog of NCBI NO: 34899836 NR Description: putative Tic20 protein [Oryza sativa (japonica
  misc_feature (7)..(206): Homolog of NCBI NO: 34393290 NR Description: putative Tic20 protein [Oryza sativa (japonica
  misc_feature (30)..(191): Homolog of NCBI NO: 15220356 NR Description: expressed protein [Arabidopsis thaliana]
  misc_feature (1)..(211): Homolog of NCBI NO: 6984128 NR Description: Tic20-like protein [Euphorbia esula]
  misc_feature (1)..(211): Homolog of NCBI NO: 3769673 NR Description: Tic20 [Pisum sativum]
  misc_feature (1)..(211): Homolog of NCBI NO: 26449432 NR Description: unknown protein [Arabidopsis thaliana]
MTLTNTFAVSSLRVREGQNHLFRALPLLPRLRKSNMAPRASKDVPTSFRYPPMTKKPQWWWRSLACLPYLMPLHETWMYAETAYNLHPFLECFEFYTYPFLMAIGSLPSWFLMAYFFVAYLGIVRRKEWPHFFRFHVVMGMLLEIALQVIGTVSRWMPLSLYWGKLGMHFWTAVSFGYLFTVLESIRCALAGMYADIPFICDAAYIQIPYD

SEQ ID NO: 55679 - DNA, 1124 bp, Glycine max
  misc_feature (1)..(1124): Ceres Seq. ID no. 14305409
atagtagcagcctcacattacattctgtgttactctgtgttaacatgacaacagatgataagaaggaagtttaaaatgattgtatgtatgggcgctaagttgtatatatatatatatataaagatctaagtaaaaataagttctaaactaaaattaagtttgtggcaatacagaattctcagttgtgctgaattgtgttttcaggtggaatcagatccatgatcatggtacaagtcatttaagtataatagatcctgagagaaatgccatttccatgactagcactgtgaatgcatattttggttcaaagatcctttcaccaagtacaggaatagtactgaacaatgaaatggatgatttttccatgcctagaaatgttaccaaggatgttccaccaccagctcctgccaatttcatcatgccaggaaagcggccactatcatccatgtcacccactattgcccttaaggatgggaagctaaaagctgtagtaggtgcaagtggaggtgctttcatcattggtggaactgcagaagttcttttgaatcacttcgttaaaggaatggatcctttttcttctgtaacagctccaagggtctatcatcagctactacctaacgtggttaattatgagaattggaccactttaggtgaacactttgaacttcctgctgatatcagggaagcccttaaaagtaagggtcatgtcctaaagggccttgccggtgggactatttgccaatttattgttctagacaattctgtgccgtccagacaaaataaagggattggaaatggaaagcttgtggcagtgagtgacccaagaaagggtggttttcctgcaggcttttgagataattcattgatgttgtgatatcttcatctcatctatgcaagttttctcctttgcatgattcttatactgcttgctgtattttattaatggggataaaaaatctacacaatttggcttctggttatctcaagtatctacaagtacaactactaccctgcttgttctcgtctattcaagttttcctttacatgattctcgtactgctaaatgctaattgtattgaaattaaataatgggaatgaaaaatctacacaattttcttctggtt

SEQ ID NO: 55680 - protein, 192 aa, Glycine max
  peptide (1)..(192): Ceres Seq. ID no. 14305410
  misc_feature (1)..(187): Pfam Name: Gamma-glutamyltranspeptidase Pfam Description: Gamma-glutamyltranspeptidase
  misc_feature (1)..(190): Homolog of NCBI NO: 15233493 NR Description: gamma-glutamyltransferase-related protein
  misc_feature (1)..(191): Homolog of NCBI NO: 34895870 NR Description: putative gamma-glutamyltransferase
  misc_feature (1)..(121): Homolog of NCBI NO: 15222461 NR Description: gamma-glutamyltransferase (light chain II)
  misc_feature (1)..(192): Homolog of NCBI NO: 27348118 NR Description: gamma-glutamyl transferase [Raphanus sativus]
  misc_feature (1)..(192): Homolog of NCBI NO: 15235951 NR Description: gamma-glutamyltransferase -related [Arabidopsis
  misc_feature (1)..(192): Homolog of NCBI NO: 38567882 NR Description: OSJNBa0036B21.10 [Oryza sativa (japonica
  misc_feature (1)..(192): Homolog of NCBI NO: 22329258 NR Description: gamma-glutamyltransferase -related [Arabidopsis
  misc_feature (1)..(192): Homolog of NCBI NO: 7433816 NR Description: probable gamma-glutamyltransferase (EC 2.3.2.2)
  misc_feature (1)..(192): Homolog of NCBI NO: 2129587 NR Description: gamma-glutamyltransferase (EC 2.3.2.2) -
  misc_feature (1)..(192): Homolog of NCBI NO: 28208262 NR Description: gamma-glutamyl transferase [Raphanus sativus]
MTSTVNAYFGSKILSPSTGIVLNNEMDDFSMPRNVTKDVPPPAPANFIMPGKRPLSSMSPTIALKDGKLKAVVGASGGAFIIGGTAEVLLNHFVKGMDPFSSVTAPRVYHQLLPNVVNYENWTTLGEHFELPADIREALKSKGHVLKGLAGGTICQFIVLDNSVPSRQNKGIGNGKLVAVSDPRKGGFPAGF

SEQ ID NO: 55681 - protein, 167 aa, Glycine max
  peptide (1)..(167): Ceres Seq. ID no. 14305411
  misc_feature (1)..(162): Pfam Name: Gamma-glutamyltranspeptidase Pfam Description: Gamma-glutamyltranspeptidase
  misc_feature (1)..(165): Homolog of NCBI NO: 15233493 NR Description: gamma-glutamyltransferase-related protein
  misc_feature (1)..(166): Homolog of NCBI NO: 34895870 NR Description: putative gamma-glutamyltransferase
  misc_feature (1)..(96): Homolog of NCBI NO: 15222461 NR Description: gamma-glutamyltransferase (light chain II)
  misc_feature (1)..(167): Homolog of NCBI NO: 27348118 NR Description: gamma-glutamyl transferase [Raphanus sativus]
  misc_feature (1)..(167): Homolog of NCBI NO: 15235951 NR Description: gamma-glutamyltransferase -related [Arabidopsis
  misc_feature (1)..(167): Homolog of NCBI NO: 38567882 NR Description: OSJNBa0036B21.10 [Oryza sativa (japonica
  misc_feature (1)..(167): Homolog of NCBI NO: 7433816 NR Description: probable gamma-glutamyltransferase (EC 2.3.2.2)
  misc_feature (1)..(167): Homolog of NCBI NO: 22329258 NR Description: gamma-glutamyltransferase -related [Arabidopsis
  misc_feature (1)..(167): Homolog of NCBI NO: 2129587 NR Description: gamma-glutamyltransferase (EC 2.3.2.2) -
  misc_feature (1)..(167): Homolog of NCBI NO: 28208262 NR Description: gamma-glutamyl transferase [Raphanus sativus]
MDDFSMPRNVTKDVPPPAPANFIMPGKRPLSSMSPTIALKDGKLKAVVGASGGAFIIGGTAEVLLNHFVKGMDPFSSVTAPRVYHQLLPNVVNYENWTTLGEHFELPADIREALKSKGHVLKGLAGGTICQFIVLDNSVPSRQNKGIGNGKLVAVSDPRKGGFPAGF

SEQ ID NO: 55682 - protein, 162 aa, Glycine max
  peptide (1)..(162): Ceres Seq. ID no. 14305412
  misc_feature (1)..(157): Pfam Name: Gamma-glutamyltranspeptidase Pfam Description: Gamma-glutamyltranspeptidase
  misc_feature (1)..(160): Homolog of NCBI NO: 15233493 NR Description: gamma-glutamyltransferase-related protein
  misc_feature (1)..(161): Homolog of NCBI NO: 34895870 NR Description: putative gamma-glutamyltransferase
  misc_feature (1)..(91): Homolog of NCBI NO: 15222461 NR Description: gamma-glutamyltransferase (light chain II)
  misc_feature (1)..(162): Homolog of NCBI NO: 27348118 NR Description: gamma-glutamyl transferase [Raphanus sativus]
  misc_feature (1)..(162): Homolog of NCBI NO: 15235951 NR Description: gamma-glutamyltransferase -related [Arabidopsis
  misc_feature (1)..(162): Homolog of NCBI NO: 38567882 NR Description: OSJNBa0036B21.10 [Oryza sativa (japonica
  misc_feature (1)..(162): Homolog of NCBI NO: 7433816 NR Description: probable gamma-glutamyltransferase (EC 2.3.2.2)
  misc_feature (1)..(162): Homolog of NCBI NO: 22329258 NR Description: gamma-glutamyltransferase -related [Arabidopsis
  misc_feature (1)..(162): Homolog of NCBI NO: 2129587 NR Description: gamma-glutamyltransferase (EC 2.3.2.2) -
  misc_feature (1)..(162): Homolog of NCBI NO: 28208262 NR Description: gamma-glutamyl transferase [Raphanus sativus]
MPRNVTKDVPPPAPANFIMPGKRPLSSMSPTIALKDGKLKAVVGASGGAFIIGGTAEVLLNHFVKGMDPFSSVTAPRVYHQLLPNVVNYENWTTLGEHFELPADIREALKSKGHVLKGLAGGTICQFIVLDNSVPSRQNKGIGNGKLVAVSDPRKGGFPAGF

SEQ ID NO: 55683 - DNA, 1351 bp, Glycine max
  misc_feature (1)..(1351): Ceres Seq. ID no. 15226049
gtctgtggcagccacacgtcttggcagttctcttctctgattacgaaattttttcagcaaaagcaggcaatggacttcttttttaagggaatgaacagggatggatctgagtgtccctttgatgtgaaagacatccaacggtgtccgtttttaagaaacatcaatgaacctacaaacttctctttctcctcaactaaaatctccattcctgttcatggatccaagggtcctatatttgaagatggtcctagttttggcatggcatttaagctatttcatgggaaggatggagtcattcccctatctgagaaatctgactttcacaatggcagcacagaagcagattctctgcctgttttcaaccctttggcaggaagagctgcctccataagtctgtctggaccaggtggcccatttagtttttggaatttttctgagaaatggaagaagcagaagaattccgaatcatcaaataaaaaggaatactcacctcagaatggagatgtatcaaagcatgaggcacttggaaatgaatggttggccaaaggaacttgcccaattgccaagtcttatagagctgtaagcaatgttctaccccttgttgcaacagcttttcggccaccgagtggagtgaagcttagatgtccacatgcaattgttgctgcaagggctgcccttgcccgtacaacctttgtgaaaaacatgcgccctcagcctcttcctgcaaaaatgcttgttattgcagcgttaggcatggcggttaatgtgccctttggcatgtggaaggagcataccaagaaattttcattatcttggtttgtagccgtgcatgctgctgttccctttatagccatgcttcggaagtcagtggtgatgcctaaatcagcaatggcactgaccattgcagcttctatacttggacaagttattggctcaagagctgagcgaatccggctgaaaacaatagctgttgagatgggaaaagtgaaaacagagacagtatgcagcatggaaagctataatagtcccatgcaacttggtgatattagggccaatcactgtggtgctgaaggaatggtcctcaagtcgtcacttcctgtgaaggatactggttcaacttcaactgctggcgtgtgttattgatctataaagattggaaagaaatccattcaggttctatttgaacatattgatgaactggaattgtaataaaattgattaatataaataagatccttatgagctatgtataacttgaacagaaattaagacatgctgttactatgcatgcagaaatgtatatggagaattgatcgcttaattctgataaaagttgagttcgtcttaaatt

SEQ ID NO: 55684 - protein, 380 aa, Glycine max
  peptide (1)..(380): Ceres Seq. ID no. 15226050
  misc_feature (26)..(337): Homolog of NCBI NO: 34899856 NR Description: OJ1714_H10.10 [Oryza sativa (japonica
  misc_feature (26)..(337): Homolog of NCBI NO: 33146734 NR Description: unknown protein [Oryza sativa (japonica
  misc_feature (44)..(175): Homolog of NCBI NO: 34897958 NR Description: contains ESTs AU068434(C30250)~similar to Oryza sativa chromosome 7,
  misc_feature (165)..(337): Homolog of NCBI NO: 34897958 NR Description: contains ESTs AU068434(C30250)~similar to Oryza sativa chromosome 7,
  misc_feature (44)..(377): Homolog of NCBI NO: 15234866 NR Description: expressed protein [Arabidopsis thaliana]
  misc_feature (24)..(348): Homolog of NCBI NO: 37537220 NR Description: unknown protein [Oryza sativa (japonica
  misc_feature (45)..(380): Homolog of NCBI NO: 21954084 NR Description: unknown protein [Arabidopsis thaliana]
  misc_feature (37)..(380): Homolog of NCBI NO: 30694759 NR Description: expressed protein [Arabidopsis thaliana]
  misc_feature (37)..(380): Homolog of NCBI NO: 21595083 NR Description: unknown [Arabidopsis thaliana]
VCGSHTSWQFSSLITKFFQQKQAMDFFFKGMNRDGSECPFDVKDIQRCPFLRNINEPTNFSFSSTKISIPVHGSKGPIFEDGPSFGMAFKLFHGKDGVIPLSEKSDFHNGSTEADSLPVFNPLAGRAASISLSGPGGPFSFWNFSEKWKKQKNSESSNKKEYSPQNGDVSKHEALGNEWLAKGTCPIAKSYRAVSNVLPLVATAFRPPSGVKLRCPHAIVAARAALARTTFVKNMRPQPLPAKMLVIAALGMAVNVPFGMWKEHTKKFSLSWFVAVHAAVPFIAMLRKSVVMPKSAMALTIAASILGQVIGSRAERIRLKTIAVEMGKVKTETVCSMESYNSPMQLGDIRANHCGAEGMVLKSSLPVKDTGSTSTAGVCY

SEQ ID NO: 55685 - protein, 357 aa, Glycine max
  peptide (1)..(357): Ceres Seq. ID no. 15226051
  misc_feature (3)..(314): Homolog of NCBI NO: 34899856 NR Description: OJ1714_H10.10 [Oryza sativa (japonica
  misc_feature (3)..(314): Homolog of NCBI NO: 33146734 NR Description: unknown protein [Oryza sativa (japonica
  misc_feature (21)..(152): Homolog of NCBI NO: 34897958 NR Description: contains ESTs AU068434(C30250)~similar to Oryza sativa chromosome 7,
  misc_feature (142)..(314): Homolog of NCBI NO: 34897958 NR Description: contains ESTs AU068434(C30250)~similar to Oryza sativa chromosome 7,
  misc_feature (21)..(354): Homolog of NCBI NO: 15234866 NR Description: expressed protein [Arabidopsis thaliana]
  misc_feature (1)..(325): Homolog of NCBI NO: 37537220 NR Description: unknown protein [Oryza sativa (japonica
  misc_feature (22)..(357): Homolog of NCBI NO: 21954084 NR Description: unknown protein [Arabidopsis thaliana]
  misc_feature (14)..(357): Homolog of NCBI NO: 30694759 NR Description: expressed protein [Arabidopsis thaliana]
  misc_feature (14)..(357): Homolog of NCBI NO: 21595083 NR Description: unknown [Arabidopsis thaliana]
MDFFFKGMNRDGSECPFDVKDIQRCPFLRNINEPTNFSFSSTKISIPVHGSKGPIFEDGPSFGMAFKLFHGKDGVIPLSEKSDFHNGSTEADSLPVFNPLAGRAASISLSGPGGPFSFWNFSEKWKKQKNSESSNKKEYSPQNGDVSKHEALGNEWLAKGTCPIAKSYRAVSNVLPLVATAFRPPSGVKLRCPHAIVAARAALARTTFVKNMRPQPLPAKMLVIAALGMAVNVPFGMWKEHTKKFSLSWFVAVHAAVPFIAMLRKSVVMPKSAMALTIAASILGQVIGSRAERIRLKTIAVEMGKVKTETVCSMESYNSPMQLGDIRANHCGAEGMVLKSSLPVKDTGSTSTAGVCY

SEQ ID NO: 55686 - protein, 350 aa, Glycine max
  peptide (1)..(350): Ceres Seq. ID no. 15226052
  misc_feature (1)..(307): Homolog of NCBI NO: 34899856 NR Description: OJ1714_H10.10 [Oryza sativa (japonica
  misc_feature (1)..(307): Homolog of NCBI NO: 33146734 NR Description: unknown protein [Oryza sativa (japonica
  misc_feature (14)..(145): Homolog of NCBI NO: 34897958 NR Description: contains ESTs AU068434(C30250)~similar to Oryza sativa chromosome 7,
  misc_feature (135)..(307): Homolog of NCBI NO: 34897958 NR Description: contains ESTs AU068434(C30250)~similar to Oryza sativa chromosome 7,
  misc_feature (14)..(347): Homolog of NCBI NO: 15234866 NR Description: expressed protein [Arabidopsis thaliana]
  misc_feature (1)..(318): Homolog of NCBI NO: 37537220 NR Description: unknown protein [Oryza sativa (japonica
  misc_feature (15)..(350): Homolog of NCBI NO: 21954084 NR Description: unknown protein [Arabidopsis thaliana]
  misc_feature (7)..(350): Homolog of NCBI NO: 30694759 NR Description: expressed protein [Arabidopsis thaliana]
  misc_feature (7)..(350): Homolog of NCBI NO: 21595083 NR Description: unknown [Arabidopsis thaliana]
MNRDGSECPFDVKDIQRCPFLRNINEPTNFSFSSTKISIPVHGSKGPIFEDGPSFGMAFKLFHGKDGVIPLSEKSDFHNGSTEADSLPVFNPLAGRAASISLSGPGGPFSFWNFSEKWKKQKNSESSNKKEYSPQNGDVSKHEALGNEWLAKGTCPIAKSYRAVSNVLPLVATAFRPPSGVKLRCPHAIVAARAALARTTFVKNMRPQPLPAKMLVIAALGMAVNVPFGMWKEHTKKFSLSWFVAVHAAVPFIAMLRKSVVMPKSAMALTIAASILGQVIGSRAERIRLKTIAVEMGKVKTETVCSMESYNSPMQLGDIRANHCGAEGMVLKSSLPVKDTGSTSTAGVCY

SEQ ID NO: 55687 - DNA, 1023 bp, Glycine max
  misc_feature (1)..(1023): Ceres Seq. ID no. 15168370
ttgctacgtaggccccccccccttgttgcatcgcatcgcagtgtatctgagtaataacacggtcccgctccctctccatcccatcacaaagaaaacagagattcgcattattagcagatcggactcaaccgatgaagttgaagccgcagtgaaacaaaccagaataattgacgcatcatcaattagatcgagctgctagaaatgaaggatgaggacgggcttccgacgaccgccgccacgaagaaggaaagcatggattcgagtctgtttgggaaagggaggtacaaattctgggcgttagcggccatcttgcttctggcgttctggtccatgttcaccggcaccgtctcgctccgctggtccggcactctcaattccctttccagcgacatcgacactcccatccacgacgacctcgatgttctcgaaatggaggagagggagaaggtggtgaggcacatgtgggatgtgtacaccaacagtcgcagggtgaggttgccgaggttctggcaagaggccttcgaggctgcctatgaggatttgacgagcgatgtcactgaggtcagagacgctgccgtcaccgagatcgccaagatgtctgttcgctccattcattttgatccacctcctcttcaatccacgagtgcccgagaatttagcaagagccttaagcaagccgagaaaggaaaagatgcaacaacctaaaggggtgcttaaaggttagtgtgtggagcattcaagcgtatgcaatgtacttgaaaatgctcgagtgctaccagaagattgtgaagagagagtaatggacgaactcaactcagacttagatttgcatgtttcaatcacagggataatgatgtattttaataggctgtgtggttctttccaattttgcagtcttcacgaagtgaggagtagtaaatcgaaacacgaccttttgaacagacaaattgaactgagcatgctcttctgtttagctttattccacaacatctaaattataaatctctcatgtttctataaagt

SEQ ID NO: 55688 - protein, 167 aa, Glycine max
  peptide (1)..(167): Ceres Seq. ID no. 15168371
  misc_feature (28)..(150): Homolog of NCBI NO: 15222008 NR Description: expressed protein [Arabidopsis thaliana]
  misc_feature (23)..(150): Homolog of NCBI NO: 28209490 NR Description: unknown protein [Oryza sativa (japonica
  misc_feature (1)..(147): Homolog of NCBI NO: 9858772 NR Description: BAC19.4 [Lycopersicon esculentum]
  misc_feature (1)..(146): Homolog of NCBI NO: 15234477 NR Description: expressed protein [Arabidopsis thaliana]
  misc_feature (1)..(163): Homolog of NCBI NO: 18424975 NR Description: expressed protein [Arabidopsis thaliana]
MKDEDGLPTTAATKKESMDSSLFGKGRYKFWALAAILLLAFWSMFTGTVSLRWSGTLNSLSSDIDTPIHDDLDVLEMEEREKVVRHMWDVYTNSRRVRLPRFWQEAFEAAYEDLTSDVTEVRDAAVTEIAKMSVRSIHFDPPPLQSTSAREFSKSLKQAEKGKDATT

SEQ ID NO: 55689 - protein, 150 aa, Glycine max
  peptide (1)..(150): Ceres Seq. ID no. 15168372
  misc_feature (11)..(133): Homolog of NCBI NO: 15222008 NR Description: expressed protein [Arabidopsis thaliana]
  misc_feature (6)..(133): Homolog of NCBI NO: 28209490 NR Description: unknown protein [Oryza sativa (japonica
  misc_feature (1)..(130): Homolog of NCBI NO: 9858772 NR Description: BAC19.4 [Lycopersicon esculentum]
  misc_feature (1)..(129): Homolog of NCBI NO: 15234477 NR Description: expressed protein [Arabidopsis thaliana]
  misc_feature (1)..(146): Homolog of NCBI NO: 18424975 NR Description: expressed protein [Arabidopsis thaliana]
MDSSLFGKGRYKFWALAAILLLAFWSMFTGTVSLRWSGTLNSLSSDIDTPIHDDLDVLEMEEREKVVRHMWDVYTNSRRVRLPRFWQEAFEAAYEDLTSDVTEVRDAAVTEIAKMSVRSIHFDPPPLQSTSAREFSKSLKQAEKGKDATT

SEQ ID NO: 55690 - protein, 124 aa, Glycine max
  peptide (1)..(124): Ceres Seq. ID no. 15168373
  misc_feature (1)..(107): Homolog of NCBI NO: 15222008 NR Description: expressed protein [Arabidopsis thaliana]
  misc_feature (1)..(107): Homolog of NCBI NO: 28209490 NR Description: unknown protein [Oryza sativa (japonica
  misc_feature (1)..(104): Homolog of NCBI NO: 9858772 NR Description: BAC19.4 [Lycopersicon esculentum]
  misc_feature (1)..(103): Homolog of NCBI NO: 15234477 NR Description: expressed protein [Arabidopsis thaliana]
  misc_feature (1)..(120): Homolog of NCBI NO: 18424975 NR Description: expressed protein [Arabidopsis thaliana]
MFTGTVSLRWSGTLNSLSSDIDTPIHDDLDVLEMEEREKVVRHMWDVYTNSRRVRLPRFWQEAFEAAYEDLTSDVTEVRDAAVTEIAKMSVRSIHFDPPPLQSTSAREFSKSLKQAEKGKDATT

SEQ ID NO: 55691 - DNA, 1338 bp, Glycine max
  misc_feature (1)..(1338): Ceres Seq. ID no. 13594056
ttttttttttttgccttcttttcattcctttcttttcttcaaatcaaggaactcagctatgactaccagagaaatccttcaaaagatgaaggtaaaagttggtttgggttcatcagaccctgactcagggaaaggaaagagcaagatgtcaaagaacataactcatggttatcatttggtgaaaggaaaatcatatcatgacatggaggattacgttgtggctcaatttaagcaaatagataacaatgaattgggtttgtttgcaatattcgacggccatgcgggtcagaacgtacctaattacttgcggtcccatttgtttgataatatcttacatgagcctgacttctggaaagaacctgcagatgctgtgaagagagcatacagtaaaactgattctaatattttagatatgtcgggtgaattaggtagagggggttcaactgcagttacagcaatattagtcaattgtcagaagttaatagtagccaacattggggattctagggccgtcttatgcaagaagggtgtggccaagcaactatcagtggatcatgagccaaccgcagaacatgaggatattaaaaatagaggtggttttgtatcaaactttccaggggatgttcctcgtgttgatggacggctggcagtgtcaagggcatttggtgacaaaagcttgaagaaacacttgagttcagagccatttgtgactgtggagaatataggtgatgatgcagagtttgttatattagccagtgatggattatggaaggtaatgtcaaatcaagaagcagctaattgtataaaaaatataaaggatgctcggtcttcagcaaagcgccttactgaagaagcagttaacaggaaaagcaccgatgatatctcctgcatcgttgtgaaatttcagtgatctcaaggctcgcatgatagactttgatccagcaacttgcaagtgtaacataaacttcggtgtaatgaataaaacgataatgcttcatagccatcaggtggtgttattatgttgagtcattcatgcaaattaaatgggacaactgtgttatttaaagtaataatgtgggaaagatgtagattctgattatgtatagaccaaactttaatatgtgagtttgcaaggaagtttgtcagtgatcttgaaagcttgctttcagatcactgcctaggcccataagattttagattaagttattcgattgtattattggccaacactcctacctttgttggataattagagtctagagtgtgtgggaagctttctcacaatttcttgtaatttttcagaacgaacctgggaatgaccttcaacgatatcttttc

SEQ ID NO: 55692 - protein, 302 aa, Glycine max
  peptide (1)..(302): Ceres Seq. ID no. 13594057
  misc_feature (35)..(294): Pfam Name: Protein phosphatase 2C Pfam Description: Protein phosphatase 2C
  misc_feature (35)..(302): Homolog of NCBI NO: 15218759 NR Description: protein phosphatase 2C (PP2C), putative
  misc_feature (33)..(302): Homolog of NCBI NO: 18395099 NR Description: protein phosphatase 2C (PP2C), putative
  misc_feature (49)..(301): Homolog of NCBI NO: 7488280 NR Description: protein phosphatase 2C homolog F20O9.80 -
  misc_feature (20)..(302): Homolog of NCBI NO: 25411985 NR Description: probable protein phosphatase 2C [imported] -
  misc_feature (20)..(302): Homolog of NCBI NO: 18399423 NR Description: protein phosphatase 2C (PP2C), putative
  misc_feature (20)..(301): Homolog of NCBI NO: 23307574 NR Description: putative protein phosphatase 2C homolog
  misc_feature (20)..(301): Homolog of NCBI NO: 18417190 NR Description: protein phosphatase 2C (PP2C), putative
  misc_feature (20)..(302): Homolog of NCBI NO: 21539551 NR Description: putative protein phosphatase type 2C [Arabidopsis
  misc_feature (20)..(302): Homolog of NCBI NO: 15232538 NR Description: protein phosphatase 2C (PP2C), putative
  misc_feature (20)..(302): Homolog of NCBI NO: 4336436 NR Description: protein phosphatase type 2C [Lotus japonicus]
FFFLPSFHSFLFFKSRNSAMTTREILQKMKVKVGLGSSDPDSGKGKSKMSKNITHGYHLVKGKSYHDMEDYVVAQFKQIDNNELGLFAIFDGHAGQNVPNYLRSHLFDNILHEPDFWKEPADAVKRAYSKTDSNILDMSGELGRGGSTAVTAILVNCQKLIVANIGDSRAVLCKKGVAKQLSVDHEPTAEHEDIKNRGGFVSNFPGDVPRVDGRLAVSRAFGDKSLKKHLSSEPFVTVENIGDDAEFVILASDGLWKVMSNQEAANCIKNIKDARSSAKRLTEEAVNRKSTDDISCIVVKFQ

SEQ ID NO: 55693 - protein, 283 aa, Glycine max
  peptide (1)..(283): Ceres Seq. ID no. 13594058
  misc_feature (16)..(275): Pfam Name: Protein phosphatase 2C Pfam Description: Protein phosphatase 2C
  misc_feature (16)..(283): Homolog of NCBI NO: 15218759 NR Description: protein phosphatase 2C (PP2C), putative
  misc_feature (14)..(283): Homolog of NCBI NO: 18395099 NR Description: protein phosphatase 2C (PP2C), putative
  misc_feature (30)..(282): Homolog of NCBI NO: 7488280 NR Description: protein phosphatase 2C homolog F20O9.80 -
  misc_feature (1)..(283): Homolog of NCBI NO: 25411985 NR Description: probable protein phosphatase 2C [imported] -
  misc_feature (1)..(283): Homolog of NCBI NO: 18399423 NR Description: protein phosphatase 2C (PP2C), putative
  misc_feature (1)..(282): Homolog of NCBI NO: 23307574 NR Description: putative protein phosphatase 2C homolog
  misc_feature (1)..(282): Homolog of NCBI NO: 18417190 NR Description: protein phosphatase 2C (PP2C), putative
  misc_feature (1)..(283): Homolog of NCBI NO: 21539551 NR Description: putative protein phosphatase type 2C [Arabidopsis
  misc_feature (1)..(283): Homolog of NCBI NO: 15232538 NR Description: protein phosphatase 2C (PP2C), putative
  misc_feature (1)..(283): Homolog of NCBI NO: 4336436 NR Description: protein phosphatase type 2C [Lotus japonicus]
MTTREILQKMKVKVGLGSSDPDSGKGKSKMSKNITHGYHLVKGKSYHDMEDYVVAQFKQIDNNELGLFAIFDGHAGQNVPNYLRSHLFDNILHEPDFWKEPADAVKRAYSKTDSNILDMSGELGRGGSTAVTAILVNCQKLIVANIGDSRAVLCKKGVAKQLSVDHEPTAEHEDIKNRGGFVSNFPGDVPRVDGRLAVSRAFGDKSLKKHLSSEPFVTVENIGDDAEFVILASDGLWKVMSNQEAANCIKNIKDARSSAKRLTEEAVNRKSTDDISCIVVKFQ

SEQ ID NO: 55694 - protein, 274 aa, Glycine max
  peptide (1)..(274): Ceres Seq. ID no. 13594059
  misc_feature (7)..(266): Pfam Name: Protein phosphatase 2C Pfam Description: Protein phosphatase 2C
  misc_feature (7)..(274): Homolog of NCBI NO: 15218759 NR Description: protein phosphatase 2C (PP2C), putative
  misc_feature (5)..(274): Homolog of NCBI NO: 18395099 NR Description: protein phosphatase 2C (PP2C), putative
  misc_feature (21)..(273): Homolog of NCBI NO: 7488280 NR Description: protein phosphatase 2C homolog F20O9.80 -
  misc_feature (1)..(274): Homolog of NCBI NO: 25411985 NR Description: probable protein phosphatase 2C [imported] -
  misc_feature (1)..(274): Homolog of NCBI NO: 18399423 NR Description: protein phosphatase 2C (PP2C), putative
  misc_feature (1)..(273): Homolog of NCBI NO: 23307574 NR Description: putative protein phosphatase 2C homolog
  misc_feature (1)..(273): Homolog of NCBI NO: 18417190 NR Description: protein phosphatase 2C (PP2C), putative
  misc_feature (1)..(274): Homolog of NCBI NO: 21539551 NR Description: putative protein phosphatase type 2C [Arabidopsis
  misc_feature (1)..(274): Homolog of NCBI NO: 15232538 NR Description: protein phosphatase 2C (PP2C), putative
  misc_feature (1)..(274): Homolog of NCBI NO: 4336436 NR Description: protein phosphatase type 2C [Lotus japonicus]
MKVKVGLGSSDPDSGKGKSKMSKNITHGYHLVKGKSYHDMEDYVVAQFKQIDNNELGLFAIFDGHAGQNVPNYLRSHLFDNILHEPDFWKEPADAVKRAYSKTDSNILDMSGELGRGGSTAVTAILVNCQKLIVANIGDSRAVLCKKGVAKQLSVDHEPTAEHEDIKNRGGFVSNFPGDVPRVDGRLAVSRAFGDKSLKKHLSSEPFVTVENIGDDAEFVILASDGLWKVMSNQEAANCIKNIKDARSSAKRLTEEAVNRKSTDDISCIVVKFQ

SEQ ID NO: 55695 - DNA, 1969 bp, Glycine max
  misc_feature (1)..(1969): Ceres Seq. ID no. 15170524
aaattttcagatctacgattctctctctcttcgatggcttccacggttgttgcggccgccgtgaggagtgacgtgccgcctcggcagccggtggatccttcggcgtcgtcctcccccgacgtcgctgatcggagcgattccttcaattcctctcccaaccacttctccgacactgaaattcagttacaaactccagacgtattgaagagtgaagagtatcgccaattgttccgtcttccactggaggaagtcctcattgaagattttaattgtgccctccaggaaaacctacttattcagggtcatatgtacctctttgtcaacttcatttgtttctactcaaacatatttggatatgagacaaagaaaataatcccattccctgaagtcacaagtgtaaggagggcaaagacggctgggctctttcccaatgccattgagattctagccggaaacaagaagtacttctttgcatccttcctatcccgtgatgaagctttcaggattattaatgagggatggtcgcgacatggcaatggagccatagcaattatggaacagaaggaatcaatgtcagagtccagctgccaagagaatggatttgtagctgttgaaaatgtcaaaagttcttatataactaacaacggatcactttctactgatctgagcaaagatacggcgcttccatccattgtagatgatccattattgacggaagattcagcgaagcaatgcagtgtaaaacaggttgctgaacctgaattgaatattgatgccccaaatgctgcaagtgtgagttggaagtggaacgaggaggatattgatgccccatcaatccttgaagcatatacatgtgttgcagattcagtgtttccgataaaggttgaagacttctttaggtacttattctcagatgatgctctaaattttcttgagtcttttcgccaaaaatgtggtgataaagactttaggtgttcttcgtggcatcctcaagagaaatttgggtatgctcgtgaactgtcatttcaacatccaataaaaatttatcttggagcgaaatttggtggctgccatgaggtccagaaatttcgtgtttataggaacagtcatttggttatagagacgtcgcaagaagtcagtgatgtaccttacgcagattatttccgggttgagggactgtggagtgtagagagagacaaggatgaatcaaaagaatgctgctttttgcgggtatatgtgaatgtggcattttctaaaaaaactatttggaaaggcaaaataatacaatcaacaattgaagaatgtcgagatgcttatgcgacatggataaacatggcacatgaaatgttgaagcagaagaaccttgaaaaacaagctcaaaatggtgaaatcaatttagatagagaagtgaagactggagaatcttcagaagggtcacaggagcaaagtaaccatacaaagatactagctacttccaatgcctttgatgctactacccacaatgtcggctctcatttgccgggaaatttcatcgaaccatcatctgttccactgtttaaagagtttatgacgaagttcagatcatctttgagaagtcatagcaatctttctctgctccttattactgttgtcgctctgattttcttcattcagcagtgtagcatacttgtgctgttggctagacctcaacacatacatatgaacactcctgtagacatcacgaataggatgaacaatgaggtcactagaagtccttcagacatagcgtggttggagaaaagaattcatcacctcaaagatgaaatgtacatggttgagagtaggcttgaaaggatgcggtatgaacatttacttttaaaaaaccaactaaaggacctagaacacaagtagctaccaaatttcattgttgaatcatatccttcttatagcatttttttgtatattcatgtgatatatagatatgacattc

SEQ ID NO: 55696 - protein, 629 aa, Glycine max
  peptide (1)..(629): Ceres Seq. ID no. 15170525
  misc_feature (71)..(137): Pfam Name: GRAM domain Pfam Description: GRAM domain
  misc_feature (69)..(264): Homolog of NCBI NO: 25012696 NR Description: RE58243p [Drosophila melanogaster]
  misc_feature (69)..(174): Homolog of NCBI NO: 26665873 NR Description: DNA segment, Chr 7, Brigham & Women's Genetics
  misc_feature (69)..(174): Homolog of NCBI NO: 26350799 NR Description: unnamed protein product [Mus musculus]
  misc_feature (86)..(434): Homolog of NCBI NO: 31746594 NR Description: Hypothetical protein ZC328.3 [Caenorhabditis
  misc_feature (72)..(484): Homolog of NCBI NO: 39595679 NR Description: Hypothetical protein CBG12618 [Caenorhabditis
  misc_feature (372)..(627): Homolog of NCBI NO: 34393622 NR Description: unknown protein [Oryza sativa (japonica
  misc_feature (21)..(376): Homolog of NCBI NO: 18086353 NR Description: At1g02120/T7I23_26 [Arabidopsis thaliana]
  misc_feature (351)..(429): Homolog of NCBI NO: 15217621 NR Description: expressed protein [Arabidopsis thaliana]
  misc_feature (520)..(627): Homolog of NCBI NO: 15217621 NR Description: expressed protein [Arabidopsis thaliana]
  misc_feature (2)..(334): Homolog of NCBI NO: 15217621 NR Description: expressed protein [Arabidopsis thaliana]
KFSDLRFSLSSMASTVVAAAVRSDVPPRQPVDPSASSSPDVADRSDSFNSSPNHFSDTEIQLQTPDVLKSEEYRQLFRLPLEEVLIEDFNCALQENLLIQGHMYLFVNFICFYSNIFGYETKKIIPFPEVTSVRRAKTAGLFPNAIEILAGNKKYFFASFLSRDEAFRIINEGWSRHGNGAIAIMEQKESMSESSCQENGFVAVENVKSSYITNNGSLSTDLSKDTALPSIVDDPLLTEDSAKQCSVKQVAEPELNIDAPNAASVSWKWNEEDIDAPSILEAYTCVADSVFPIKVEDFFRYLFSDDALNFLESFRQKCGDKDFRCSSWHPQEKFGYARELSFQHPIKIYLGAKFGGCHEVQKFRVYRNSHLVIETSQEVSDVPYADYFRVEGLWSVERDKDESKECCFLRVYVNVAFSKKTIWKGKIIQSTIEECRDAYATWINMAHEMLKQKNLEKQAQNGEINLDREVKTGESSEGSQEQSNHTKILATSNAFDATTHNVGSHLPGNFIEPSSVPLFKEFMTKFRSSLRSHSNLSLLLITVVALIFFIQQCSILVLLARPQHIHMNTPVDITNRMNNEVTRSPSDIAWLEKRIHHLKDEMYMVESRLERMRYEHLLLKNQLKDLEHK

SEQ ID NO: 55697 - protein, 618 aa, Glycine max
  peptide (1)..(618): Ceres Seq. ID no. 15170526
  misc_feature (60)..(126): Pfam Name: GRAM domain Pfam Description: GRAM domain
  misc_feature (58)..(253): Homolog of NCBI NO: 25012696 NR Description: RE58243p [Drosophila melanogaster]
  misc_feature (58)..(163): Homolog of NCBI NO: 26665873 NR Description: DNA segment, Chr 7, Brigham & Women's Genetics
  misc_feature (58)..(163): Homolog of NCBI NO: 26350799 NR Description: unnamed protein product [Mus musculus]
  misc_feature (75)..(423): Homolog of NCBI NO: 31746594 NR Description: Hypothetical protein ZC328.3 [Caenorhabditis
  misc_feature (61)..(473): Homolog of NCBI NO: 39595679 NR Description: Hypothetical protein CBG12618 [Caenorhabditis
  misc_feature (361)..(616): Homolog of NCBI NO: 34393622 NR Description: unknown protein [Oryza sativa (japonica
  misc_feature (10)..(365): Homolog of NCBI NO: 18086353 NR Description: At1g02120/T7I23_26 [Arabidopsis thaliana]
  misc_feature (340)..(418): Homolog of NCBI NO: 15217621 NR Description: expressed protein [Arabidopsis thaliana]
  misc_feature (509)..(616): Homolog of NCBI NO: 15217621 NR Description: expressed protein [Arabidopsis thaliana]
  misc_feature (1)..(323): Homolog of NCBI NO: 15217621 NR Description: expressed protein [Arabidopsis thaliana]
MASTVVAAAVRSDVPPRQPVDPSASSSPDVADRSDSFNSSPNHFSDTEIQLQTPDVLKSEEYRQLFRLPLEEVLIEDFNCALQENLLIQGHMYLFVNFICFYSNIFGYETKKIIPFPEVTSVRRAKTAGLFPNAIEILAGNKKYFFASFLSRDEAFRIINEGWSRHGNGAIAIMEQKESMSESSCQENGFVAVENVKSSYITNNGSLSTDLSKDTALPSIVDDPLLTEDSAKQCSVKQVAEPELNIDAPNAASVSWKWNEEDIDAPSILEAYTCVADSVFPIKVEDFFRYLFSDDALNFLESFRQKCGDKDFRCSSWHPQEKFGYARELSFQHPIKIYLGAKFGGCHEVQKFRVYRNSHLVIETSQEVSDVPYADYFRVEGLWSVERDKDESKECCFLRVYVNVAFSKKTIWKGKIIQSTIEECRDAYATWINMAHEMLKQKNLEKQAQNGEINLDREVKTGESSEGSQEQSNHTKILATSNAFDATTHNVGSHLPGNFIEPSSVPLFKEFMTKFRSSLRSHSNLSLLLITVVALIFFIQQCSILVLLARPQHIHMNTPVDITNRMNNEVTRSPSDIAWLEKRIHHLKDEMYMVESRLERMRYEHLLLKNQLKDLEHK

SEQ ID NO: 55698 - protein, 527 aa, Glycine max
  peptide (1)..(527): Ceres Seq. ID no. 15170527
  misc_feature (1)..(162): Homolog of NCBI NO: 25012696 NR Description: RE58243p [Drosophila melanogaster]
  misc_feature (1)..(72): Homolog of NCBI NO: 26665873 NR Description: DNA segment, Chr 7, Brigham & Women's Genetics
  misc_feature (1)..(72): Homolog of NCBI NO: 26350799 NR Description: unnamed protein product [Mus musculus]
  misc_feature (1)..(332): Homolog of NCBI NO: 31746594 NR Description: Hypothetical protein ZC328.3 [Caenorhabditis
  misc_feature (1)..(382): Homolog of NCBI NO: 39595679 NR Description: Hypothetical protein CBG12618 [Caenorhabditis
  misc_feature (270)..(525): Homolog of NCBI NO: 34393622 NR Description: unknown protein [Oryza sativa (japonica
  misc_feature (1)..(274): Homolog of NCBI NO: 18086353 NR Description: At1g02120/T7I23_26 [Arabidopsis thaliana]
  misc_feature (249)..(327): Homolog of NCBI NO: 15217621 NR Description: expressed protein [Arabidopsis thaliana]
  misc_feature (418)..(525): Homolog of NCBI NO: 15217621 NR Description: expressed protein [Arabidopsis thaliana]
  misc_feature (1)..(232): Homolog of NCBI NO: 15217621 NR Description: expressed protein [Arabidopsis thaliana]
MYLFVNFICFYSNIFGYETKKIIPFPEVTSVRRAKTAGLFPNAIEILAGNKKYFFASFLSRDEAFRIINEGWSRHGNGAIAIMEQKESMSESSCQENGFVAVENVKSSYITNNGSLSTDLSKDTALPSIVDDPLLTEDSAKQCSVKQVAEPELNIDAPNAASVSWKWNEEDIDAPSILEAYTCVADSVFPIKVEDFFRYLFSDDALNFLESFRQKCGDKDFRCSSWHPQEKFGYARELSFQHPIKIYLGAKFGGCHEVQKFRVYRNSHLVIETSQEVSDVPYADYFRVEGLWSVERDKDESKECCFLRVYVNVAFSKKTIWKGKIIQSTIEECRDAYATWINMAHEMLKQKNLEKQAQNGEINLDREVKTGESSEGSQEQSNHTKILATSNAFDATTHNVGSHLPGNFIEPSSVPLFKEFMTKFRSSLRSHSNLSLLLITVVALIFFIQQCSILVLLARPQHIHMNTPVDITNRMNNEVTRSPSDIAWLEKRIHHLKDEMYMVESRLERMRYEHLLLKNQLKDLEHK

SEQ ID NO: 55699 - DNA, 1278 bp, Glycine max
  misc_feature (1)..(1278): Ceres Seq. ID no. 14310616
attcccaacgaaccaacacagcctcacaagtaacaaacttataacacacactctctctctctctctctgcaatggctggaatggttcccctttgcattgcatcattggtcactctttttgttgcaacaagtgctagaattcctggggttttcaatggtggtgcatggcagggtgcccacgccactttctacggtggaaatgatgcctctggaacaatgggtggggcatgtgggtacgggaacctatacagccaagggtatggcgtgaacaccgcggccttgagcacggcgctgttcaacaacgggttgagctgcggcgcgtgcttcgagataaagtgcgaccaagatccgaggtggtgcaacccgggaagcccttccatcgtcatcaccgccacgaatttttgccctcccaactttgcccttcccagcgacaacggcggctggtgcaaccctcctcggccccacttcgacctcgccatgcccatgttcctcaagatcgctcagtataaagccggcatcgtgcccgtcagttaccgccgggttccatgcagaaaggtcggtggaatcagatttacgatcaacggttttcgttacttcaacttggttctaatcaccaacgtggcgggtgcaggggatatcgcgcgcgtgagcgttaaaggttccaaaaccgggtggaacagcatgagcagaaactgggggcaaaattggcaatcaaacgcgaatttagtgggccaggccctttccttcagagtcacgggcagtgacagacgcacctcaacctcttggaacgtggcaccttctcattggaagttcggccagaccttcacgggcaagaatttccgcgtctgaaaaaaataacaaaatttaaacatggatgtttgtttttgtagttgcgttttggttttttagttttcccgcgttcaactttccctctattttcccgggaaagtttgaagccgtgttttggtttaagtgtgtagtaggggacagaaagtaagagaagggtagataaggtaaaatgaaagtgactttactataaatgctagtagtgggtgtgagtagatgtttctaccaccttttgttattggagggtgaatttgtgtgatattaattattactaaagtgtattgggtgttgctggcaatatttattacccagcaatgctttttgttgacttggtgggggctgaggaggctgcaaggttcatgtagcccgcatctcctttattatgaactagaaacattatattatgtaatatctttcagttataatgcatgcc

SEQ ID NO: 55700 - protein, 258 aa, Glycine max
  peptide (1)..(258): Ceres Seq. ID no. 14310617
  misc_feature (165)..(242): Pfam Name: Pollen allergen Pfam Description: Pollen allergen
  misc_feature (1)..(258): Homolog of NCBI NO: 29467509 NR Description: expansin [Pyrus communis]
  misc_feature (1)..(258): Homolog of NCBI NO: 1076531 NR Description: pollen allergen homolog, hypothetical (clone
MAGMVPLCIASLVTLFVATSARIPGVFNGGAWQGAHATFYGGNDASGTMGGACGYGNLYSQGYGVNTAALSTALFNNGLSCGACFEIKCDQDPRWCNPGSPSIVITATNFCPPNFALPSDNGGWCNPPRPHFDLAMPMFLKIAQYKAGIVPVSYRRVPCRKVGGIRFTINGFRYFNLVLITNVAGAGDIARVSVKGSKTGWNSMSRNWGQNWQSNANLVGQALSFRVTGSDRRTSTSWNVAPSHWKFGQTFTGKNFRV

SEQ ID NO: 55701 - protein, 255 aa, Glycine max
  peptide (1)..(255): Ceres Seq. ID no. 14310618
  misc_feature (162)..(239): Pfam Name: Pollen allergen Pfam Description: Pollen allergen
  misc_feature (1)..(255): Homolog of NCBI NO: 29467509 NR Description: expansin [Pyrus communis]
  misc_feature (1)..(255): Homolog of NCBI NO: 1076531 NR Description: pollen allergen homolog, hypothetical (clone
MVPLCIASLVTLFVATSARIPGVFNGGAWQGAHATFYGGNDASGTMGGACGYGNLYSQGYGVNTAALSTALFNNGLSCGACFEIKCDQDPRWCNPGSPSIVITATNFCPPNFALPSDNGGWCNPPRPHFDLAMPMFLKIAQYKAGIVPVSYRRVPCRKVGGIRFTINGFRYFNLVLITNVAGAGDIARVSVKGSKTGWNSMSRNWGQNWQSNANLVGQALSFRVTGSDRRTSTSWNVAPSHWKFGQTFTGKNFRV

SEQ ID NO: 55702 - protein, 210 aa, Glycine max
  peptide (1)..(210): Ceres Seq. ID no. 14310619
  misc_feature (117)..(194): Pfam Name: Pollen allergen Pfam Description: Pollen allergen
  misc_feature (1)..(210): Homolog of NCBI NO: 29467509 NR Description: expansin [Pyrus communis]
  misc_feature (1)..(210): Homolog of NCBI NO: 1076531 NR Description: pollen allergen homolog, hypothetical (clone
MGGACGYGNLYSQGYGVNTAALSTALFNNGLSCGACFEIKCDQDPRWCNPGSPSIVITATNFCPPNFALPSDNGGWCNPPRPHFDLAMPMFLKIAQYKAGIVPVSYRRVPCRKVGGIRFTINGFRYFNLVLITNVAGAGDIARVSVKGSKTGWNSMSRNWGQNWQSNANLVGQALSFRVTGSDRRTSTSWNVAPSHWKFGQTFTGKNFRV

SEQ ID NO: 55703 - DNA, 1355 bp, Glycine max
  misc_feature (1)..(1355): Ceres Seq. ID no. 14311981
tcaagccaaagtcttgtgcttttcacatccccattttcccatttccctttctgcttcctctttcgccaaatgggtctcccataacacaatcttcacctttttttttcctctttctttcttcttcgcttctcggtggggcttcaagtttcaccataggatgttttctaggttgatacatcctcatgaagggcaggaagacatgcagggtggctccaatcacgctcacctcggagacccttgtcttgttttaacctccgatcccaaacctcgtcttcgttggaccgctgaccttcatgaacgctttgttgatgctgtcactcaacttgggggtgccagtaaagccactccaaaagcaatcatgaggaccatgaatgtcaagggtttgacgctctatcatttgaagagtcatcttcagaagtacaggctaggtaagcaatcaggaaaagattctgatgagggatgcaaagatgcttcatatcttcaagaaagccctggtactgataactcttctccaaagttaccagatgctaacgagggtcatgaagtcaaggaggcattaagagcacagatggaagtgcaaagtaaactacacttactagtggaggcagagaagcacttgcaaattcgccaggatgcagagcgaagatacatgggcatgcttgagcgagcgtgtaagatgttggcagatcaatttattggggatgtaactattgacatggacggccaaaaatttcaagggctggaaagcaaaacatcccagaagttccctagttgatcacgttggcttttatccccaagcgtgtactgaggtcggcggaatgcatgcttcagtagtatcacctattcttcaacctcaaggggctgactgtttcactgaaagttgcctaacatcacttgagagtctgggagggttgacactagaagaatctcctggcggatcgaagaagaggatgctgaacttggactcgatggtagcacctttgatctggagtgaagccaacaccagaactcaaggaattcatttagccaaagttaatccttcaggaatgactaggtacggcatgtaggtagggtagggaaggttagttcctcatgaagagagtttatgacattgtgctttgtcccaagcttttaggattaagtactgagtagggaaggttagctcctcatgaagagagttcatgacattgtgctttgccccaagcttttaggattaagtactgagttagattattatcggttgttgtccattaagttggtgagaatcaacttatctcacatcattgtgtaaattgaaatactatatggcttaacttggcccgtcactaaatgttggcgctgaccatttatgatcg

SEQ ID NO: 55704 - protein, 257 aa, Glycine max
  peptide (1)..(257): Ceres Seq. ID no. 14311982
  misc_feature (90)..(141): Pfam Name: Myb-like DNA-binding domain Pfam Description: Myb-like DNA-binding domain
  misc_feature (77)..(256): Homolog of NCBI NO: 28059694 NR Description: transfactor-like protein [Arabidopsis thaliana]
  misc_feature (77)..(256): Homolog of NCBI NO: 14596181 NR Description: transfactor-like protein [Arabidopsis thaliana]
  misc_feature (77)..(257): Homolog of NCBI NO: 6223653 NR Description: transfactor-like [Arabidopsis thaliana]
  misc_feature (78)..(252): Homolog of NCBI NO: 7485694 NR Description: hypothetical protein F18A5.30 - Arabidopsis
  misc_feature (77)..(236): Homolog of NCBI NO: 30699418 NR Description: transfactor -related [Arabidopsis thaliana]
  misc_feature (77)..(236): Homolog of NCBI NO: 25406584 NR Description: hypothetical protein T8K14.15 [imported] -
  misc_feature (77)..(230): Homolog of NCBI NO: 11994231 NR Description: contains similarity to transfactor~gene_id:MUJ8.2
  misc_feature (78)..(252): Homolog of NCBI NO: 18414049 NR Description: expressed protein [Arabidopsis thaliana]
  misc_feature (61)..(230): Homolog of NCBI NO: 18404044 NR Description: transfactor -related [Arabidopsis thaliana]
  misc_feature (53)..(240): Homolog of NCBI NO: 29647444 NR Description: P0410E11.32 [Oryza sativa (japonica
QAKVLCFSHPHFPISLSASSFAKWVSHNTIFTFFFPLSFFFASRWGFKFHHRMFSRLIHPHEGQEDMQGGSNHAHLGDPCLVLTSDPKPRLRWTADLHERFVDAVTQLGGASKATPKAIMRTMNVKGLTLYHLKSHLQKYRLGKQSGKDSDEGCKDASYLQESPGTDNSSPKLPDANEGHEVKEALRAQMEVQSKLHLLVEAEKHLQIRQDAERRYMGMLERACKMLADQFIGDVTIDMDGQKFQGLESKTSQKFPS

SEQ ID NO: 55705 - protein, 205 aa, Glycine max
  peptide (1)..(205): Ceres Seq. ID no. 14311983
  misc_feature (38)..(89): Pfam Name: Myb-like DNA-binding domain Pfam Description: Myb-like DNA-binding domain
  misc_feature (25)..(204): Homolog of NCBI NO: 28059694 NR Description: transfactor-like protein [Arabidopsis thaliana]
  misc_feature (25)..(204): Homolog of NCBI NO: 14596181 NR Description: transfactor-like protein [Arabidopsis thaliana]
  misc_feature (25)..(205): Homolog of NCBI NO: 6223653 NR Description: transfactor-like [Arabidopsis thaliana]
  misc_feature (26)..(200): Homolog of NCBI NO: 7485694 NR Description: hypothetical protein F18A5.30 - Arabidopsis
  misc_feature (25)..(184): Homolog of NCBI NO: 30699418 NR Description: transfactor -related [Arabidopsis thaliana]
  misc_feature (25)..(184): Homolog of NCBI NO: 25406584 NR Description: hypothetical protein T8K14.15 [imported] -
  misc_feature (25)..(178): Homolog of NCBI NO: 11994231 NR Description: contains similarity to transfactor~gene_id:MUJ8.2
  misc_feature (26)..(200): Homolog of NCBI NO: 18414049 NR Description: expressed protein [Arabidopsis thaliana]
  misc_feature (9)..(178): Homolog of NCBI NO: 18404044 NR Description: transfactor -related [Arabidopsis thaliana]
  misc_feature (1)..(188): Homolog of NCBI NO: 29647444 NR Description: P0410E11.32 [Oryza sativa (japonica
MFSRLIHPHEGQEDMQGGSNHAHLGDPCLVLTSDPKPRLRWTADLHERFVDAVTQLGGASKATPKAIMRTMNVKGLTLYHLKSHLQKYRLGKQSGKDSDEGCKDASYLQESPGTDNSSPKLPDANEGHEVKEALRAQMEVQSKLHLLVEAEKHLQIRQDAERRYMGMLERACKMLADQFIGDVTIDMDGQKFQGLESKTSQKFPS

SEQ ID NO: 55706 - protein, 191 aa, Glycine max
  peptide (1)..(191): Ceres Seq. ID no. 14311984
  misc_feature (24)..(75): Pfam Name: Myb-like DNA-binding domain Pfam Description: Myb-like DNA-binding domain
  misc_feature (11)..(190): Homolog of NCBI NO: 15238770 NR Description: transfactor-related protein [Arabidopsis
  misc_feature (11)..(190): Homolog of NCBI NO: 14596181 NR Description: transfactor-like protein [Arabidopsis thaliana]
  misc_feature (11)..(191): Homolog of NCBI NO: 6223653 NR Description: transfactor-like [Arabidopsis thaliana]
  misc_feature (12)..(186): Homolog of NCBI NO: 7485694 NR Description: hypothetical protein F18A5.30 - Arabidopsis
  misc_feature (11)..(170): Homolog of NCBI NO: 30699418 NR Description: transfactor -related [Arabidopsis thaliana]
  misc_feature (11)..(170): Homolog of NCBI NO: 25406584 NR Description: hypothetical protein T8K14.15 [imported] -
  misc_feature (11)..(164): Homolog of NCBI NO: 11994231 NR Description: contains similarity to transfactor~gene_id:MUJ8.2
  misc_feature (12)..(186): Homolog of NCBI NO: 18414049 NR Description: expressed protein [Arabidopsis thaliana]
  misc_feature (1)..(164): Homolog of NCBI NO: 18404044 NR Description: transfactor -related [Arabidopsis thaliana]
  misc_feature (1)..(174): Homolog of NCBI NO: 29647444 NR Description: P0410E11.32 [Oryza sativa (japonica
MQGGSNHAHLGDPCLVLTSDPKPRLRWTADLHERFVDAVTQLGGASKATPKAIMRTMNVKGLTLYHLKSHLQKYRLGKQSGKDSDEGCKDASYLQESPGTDNSSPKLPDANEGHEVKEALRAQMEVQSKLHLLVEAEKHLQIRQDAERRYMGMLERACKMLADQFIGDVTIDMDGQKFQGLESKTSQKFPS

SEQ ID NO: 55707 - DNA, 1413 bp, Glycine max
  misc_feature (1)..(1413): Ceres Seq. ID no. 14309674
gagtgtatgaaatgacccagtactcagaaggtgaagggagtaagtgagaactgagaacttctaagaaacgccgccaatggcgcatcgctcactcttcctctctctcagacgaaatagcggtttagcttgtgtcctgaacagaacaagattcgtgtcttcgggtgctgtgagcagtgatttggtggaagagagtgtggaaggtgatgatgacctaaggagcagaatcttcaggcttaggctccccaagcgaagcgccaccaacgttcttcagaaatgggtcctccaagggaatcctattacgctctctcagcttcgggatatatccaaagagcttcgaagatctcaacgttacaaacacgctttggagatatcagagtggatggttagcaatgaggaatatgagttatcagactctgattatgcagtccgcatagatttgatgacccaagtttttggcattgatgctgcagagcgctactttgagggtctacctcttgctacaaagactactgaaacatacacagcactcctccattcttacgcaggagcaaaattgactgaaaaggctgaggaactttatcaaaggataaaggattcaaacctttcctttgatgctcttacttacaatgaaatgatgactctttacatgtcagtggggcagtttgaaaaggtccctatagttgttgaagaactgaaacaacaaaaggtttcccctgatatctttacttacaatctatggataagttcctgtgccgctattcttaatatcgatgaagttaggaggattcttgatgaaatgagtcacggtgctggttctaatgaaagttggatcagatatttgaacctggccaatatatatattagtgtagctcatcttgataatgcaagttccaacacacttgttgagactgagaaaaggatcacccaaaggcaatggataacttatgacttcttaatcattctttatggtgggttgggaagtaaggataaacttgatcagatatggaattccttgggaatgaccaaacagaaaatgattagcaggaattacatgtgcatcatttcttcctatctgatgcttggtcttacgaaagaagtgggtgaagttattgatcaatggaagcaatcaacgaccacggattttgatatgcttgcctgtaaaaagattttggttgcttttagggacattggcttagctgaaatagccaacaacttgaatgtgattctcattgagaagaacctcagtcttggaagtgattaactaggagttctctgagcatgaatgtaatatagaatatatatagatttgagatcaattttgcaacttcggaagggaaaatatatttcatttgaaatttgttaatccatcccgaatgaataaatatgctgtgtgaatggaagtcttgcaatgct

SEQ ID NO: 55708 - protein, 394 aa, Glycine max
  peptide (1)..(394): Ceres Seq. ID no. 14309675
  misc_feature (181)..(215): Pfam Name: PPR repeat Pfam Description: PPR repeat
  misc_feature (49)..(348): Homolog of NCBI NO: 20453085 NR Description: At1g02150/T7I23.8 [Arabidopsis thaliana]
  misc_feature (49)..(348): Homolog of NCBI NO: 22329290 NR Description: pentatricopeptide (PPR) repeat-containing protein
  misc_feature (44)..(387): Homolog of NCBI NO: 15225409 NR Description: pentatricopeptide (PPR) repeat-containing protein
  misc_feature (16)..(387): Homolog of NCBI NO: 15240937 NR Description: pentatricopeptide (PPR) repeat-containing protein
  misc_feature (29)..(354): Homolog of NCBI NO: 17064738 NR Description: Unknown protein [Arabidopsis thaliana]
  misc_feature (29)..(354): Homolog of NCBI NO: 15235508 NR Description: pentatricopeptide (PPR) repeat-containing protein
  misc_feature (29)..(393): Homolog of NCBI NO: 21740710 NR Description: OSJNBa0086B14.3 [Oryza sativa (japonica
  misc_feature (1)..(394): Homolog of NCBI NO: 9955532 NR Description: putative protein [Arabidopsis thaliana]
  misc_feature (1)..(394): Homolog of NCBI NO: 21592522 NR Description: unknown [Arabidopsis thaliana]
  misc_feature (1)..(394): Homolog of NCBI NO: 18415979 NR Description: pentatricopeptide (PPR) repeat-containing protein
MAHRSLFLSLRRNSGLACVLNRTRFVSSGAVSSDLVEESVEGDDDLRSRIFRLRLPKRSATNVLQKWVLQGNPITLSQLRDISKELRRSQRYKHALEISEWMVSNEEYELSDSDYAVRIDLMTQVFGIDAAERYFEGLPLATKTTETYTALLHSYAGAKLTEKAEELYQRIKDSNLSFDALTYNEMMTLYMSVGQFEKVPIVVEELKQQKVSPDIFTYNLWISSCAAILNIDEVRRILDEMSHGAGSNESWIRYLNLANIYISVAHLDNASSNTLVETEKRITQRQWITYDFLIILYGGLGSKDKLDQIWNSLGMTKQKMISRNYMCIISSYLMLGLTKEVGEVIDQWKQSTTTDFDMLACKKILVAFRDIGLAEIANNLNVILIEKNLSLGSD

SEQ ID NO: 55709 - protein, 293 aa, Glycine max
  peptide (1)..(293): Ceres Seq. ID no. 14309676
  misc_feature (80)..(114): Pfam Name: PPR repeat Pfam Description: PPR repeat
  misc_feature (1)..(247): Homolog of NCBI NO: 20453085 NR Description: At1g02150/T7I23.8 [Arabidopsis thaliana]
  misc_feature (1)..(247): Homolog of NCBI NO: 22329290 NR Description: pentatricopeptide (PPR) repeat-containing protein
  misc_feature (1)..(286): Homolog of NCBI NO: 15225409 NR Description: pentatricopeptide (PPR) repeat-containing protein
  misc_feature (1)..(286): Homolog of NCBI NO: 15240937 NR Description: pentatricopeptide (PPR) repeat-containing protein
  misc_feature (1)..(253): Homolog of NCBI NO: 17064738 NR Description: Unknown protein [Arabidopsis thaliana]
  misc_feature (1)..(253): Homolog of NCBI NO: 15235508 NR Description: pentatricopeptide (PPR) repeat-containing protein
  misc_feature (1)..(292): Homolog of NCBI NO: 21740710 NR Description: OSJNBa0086B14.3 [Oryza sativa (japonica
  misc_feature (1)..(293): Homolog of NCBI NO: 9955532 NR Description: putative protein [Arabidopsis thaliana]
  misc_feature (1)..(293): Homolog of NCBI NO: 21592522 NR Description: unknown [Arabidopsis thaliana]
  misc_feature (1)..(293): Homolog of NCBI NO: 18415979 NR Description: pentatricopeptide (PPR) repeat-containing protein
MVSNEEYELSDSDYAVRIDLMTQVFGIDAAERYFEGLPLATKTTETYTALLHSYAGAKLTEKAEELYQRIKDSNLSFDALTYNEMMTLYMSVGQFEKVPIVVEELKQQKVSPDIFTYNLWISSCAAILNIDEVRRILDEMSHGAGSNESWIRYLNLANIYISVAHLDNASSNTLVETEKRITQRQWITYDFLIILYGGLGSKDKLDQIWNSLGMTKQKMISRNYMCIISSYLMLGLTKEVGEVIDQWKQSTTTDFDMLACKKILVAFRDIGLAEIANNLNVILIEKNLSLGSD

SEQ ID NO: 55710 - protein, 273 aa, Glycine max
  peptide (1)..(273): Ceres Seq. ID no. 14309677
  misc_feature (60)..(94): Pfam Name: PPR repeat Pfam Description: PPR repeat
  misc_feature (1)..(227): Homolog of NCBI NO: 20453085 NR Description: At1g02150/T7I23.8 [Arabidopsis thaliana]
  misc_feature (1)..(227): Homolog of NCBI NO: 22329290 NR Description: pentatricopeptide (PPR) repeat-containing protein
  misc_feature (1)..(266): Homolog of NCBI NO: 15225409 NR Description: pentatricopeptide (PPR) repeat-containing protein
  misc_feature (1)..(266): Homolog of NCBI NO: 15240937 NR Description: pentatricopeptide (PPR) repeat-containing protein
  misc_feature (1)..(233): Homolog of NCBI NO: 17064738 NR Description: Unknown protein [Arabidopsis thaliana]
  misc_feature (1)..(233): Homolog of NCBI NO: 15235508 NR Description: pentatricopeptide (PPR) repeat-containing protein
  misc_feature (1)..(272): Homolog of NCBI NO: 21740710 NR Description: OSJNBa0086B14.3 [Oryza sativa (japonica
  misc_feature (1)..(273): Homolog of NCBI NO: 9955532 NR Description: putative protein [Arabidopsis thaliana]
  misc_feature (1)..(273): Homolog of NCBI NO: 21592522 NR Description: unknown [Arabidopsis thaliana]
  misc_feature (1)..(273): Homolog of NCBI NO: 18415979 NR Description: pentatricopeptide (PPR) repeat-containing protein
MTQVFGIDAAERYFEGLPLATKTTETYTALLHSYAGAKLTEKAEELYQRIKDSNLSFDALTYNEMMTLYMSVGQFEKVPIVVEELKQQKVSPDIFTYNLWISSCAAILNIDEVRRILDEMSHGAGSNESWIRYLNLANIYISVAHLDNASSNTLVETEKRITQRQWITYDFLIILYGGLGSKDKLDQIWNSLGMTKQKMISRNYMCIISSYLMLGLTKEVGEVIDQWKQSTTTDFDMLACKKILVAFRDIGLAEIANNLNVILIEKNLSLGSD

SEQ ID NO: 55711 - DNA, 1194 bp, Glycine max
  misc_feature (1)..(1194): Ceres Seq. ID no. 14308660
gaattttactttggctgtgaaaatgtatcaaaactgcttgcggaagttttatcataacacagactctcaaatacttctatatttagctcgtacacattacgaggctgaacagtggcaagactgtataaaaactctactgagggccatacatttggcaccctcaaactataccttaaggtttgatgcaggggttgcaatgcaaaagttttcagcatcaacactacaaaaagcaaagaggactgcagatgaggtaagagcaactgttgctgagcttcaaaatgctgttcgtgtatttagtcagttgtctgctgcttccaatctacatattcacgggtttgatgagaagaaaattgacacacatgttggatactgcaaccacttactttcggctgcaaaagttcatcttgaagcagctgagcatgaagagcagcaagtacggcaaagacaagaacttgctcgtcaggttgcattggctgaggaagcccggcgaaaggctgaagagcaaaggaaatttcagatggaaaggggaaaacaagaagacgagctaaagcgtgtgcaaaaacaggaggaacattttaggcgtgttaaggagcaatggaagagcagcagtcattcaaaacggagagaaagatcagacgatgaagagggagggactggtgagaagaagagaaaaaaaggtggaaaacggagaaaaaaggataagcactctaaattgcgctatgacgcagaggaaccagaagatgatttgatggatgaacagggaatggaggatgaagaagctgatataaactacagagaggagccccaaactcagatgaatgatgatgctgaggaaaatgctcagggtcttcttgcagcggctgggcttgaagattctgatgcagatgaggaaacagctgcaccttcctcaagcatagcccgacgaaggcaagcattatcggaatctgatgatgacgaaccattattacaaaggcagtcaagtccagtaagacaaaactctgctgatatgcagttgagtgatggagaaataagggatggggataagacaaatggagatgatggcaatgatgaggagaaacaatattgaccctacaggttagtctttaatatccgccaagtgattttgtaagagtgataacattatttaaattttatgtatatatacttgaaaaattttaaaaaaaggttttattc

SEQ ID NO: 55712 - protein, 361 aa, Glycine max
  peptide (1)..(361): Ceres Seq. ID no. 14308661
  misc_feature (22)..(55): Pfam Name: TPR Domain Pfam Description: TPR Domain
  misc_feature (10)..(360): Homolog of NCBI NO: 26006103 NR Description: mKIAA0155 protein [Mus musculus]
  misc_feature (5)..(249): Homolog of NCBI NO: 31753133 NR Description: Unknown (protein for IMAGE:30058591) [Mus
  misc_feature (9)..(270): Homolog of NCBI NO: 34901616 NR Description: putative TPR-containing nuclear phosphoprotein
  misc_feature (5)..(359): Homolog of NCBI NO: 6678441 NR Description: SH2 domain binding protein 1 (tetratricopeptide
  misc_feature (5)..(359): Homolog of NCBI NO: 34858978 NR Description: similar to phosphoprotein [Rattus norvegicus]
  misc_feature (5)..(360): Homolog of NCBI NO: 40788884 NR Description: KIAA0155 [Homo sapiens]
  misc_feature (5)..(360): Homolog of NCBI NO: 7661950 NR Description: SH2 domain binding protein 1
  misc_feature (84)..(340): Homolog of NCBI NO: 34901616 NR Description: putative TPR-containing nuclear phosphoprotein
  misc_feature (2)..(340): Homolog of NCBI NO: 23095913 NR Description: putative TPR-containing nuclear phosphoprotein
  misc_feature (1)..(358): Homolog of NCBI NO: 25411225 NR Description: probable TPR repeat nuclear phosphoprotein
NFTLAVKMYQNCLRKFYHNTDSQILLYLARTHYEAEQWQDCIKTLLRAIHLAPSNYTLRFDAGVAMQKFSASTLQKAKRTADEVRATVAELQNAVRVFSQLSAASNLHIHGFDEKKIDTHVGYCNHLLSAAKVHLEAAEHEEQQVRQRQELARQVALAEEARRKAEEQRKFQMERGKQEDELKRVQKQEEHFRRVKEQWKSSSHSKRRERSDDEEGGTGEKKRKKGGKRRKKDKHSKLRYDAEEPEDDLMDEQGMEDEEADINYREEPQTQMNDDAEENAQGLLAAAGLEDSDADEETAAPSSSIARRRQALSESDDDEPLLQRQSSPVRQNSADMQLSDGEIRDGDKTNGDDGNDEEKQY

SEQ ID NO: 55713 - protein, 354 aa, Glycine max
  peptide (1)..(354): Ceres Seq. ID no. 14308662
  misc_feature (15)..(48): Pfam Name: TPR Domain Pfam Description: TPR Domain
  misc_feature (3)..(353): Homolog of NCBI NO: 26006103 NR Description: mKIAA0155 protein [Mus musculus]
  misc_feature (1)..(242): Homolog of NCBI NO: 31753133 NR Description: Unknown (protein for IMAGE:30058591) [Mus
  misc_feature (2)..(263): Homolog of NCBI NO: 34901616 NR Description: putative TPR-containing nuclear phosphoprotein
  misc_feature (1)..(352): Homolog of NCBI NO: 6678441 NR Description: SH2 domain binding protein 1 (tetratricopeptide
  misc_feature (1)..(352): Homolog of NCBI NO: 34858978 NR Description: similar to phosphoprotein [Rattus norvegicus]
  misc_feature (1)..(353): Homolog of NCBI NO: 40788884 NR Description: KIAA0155 [Homo sapiens]
  misc_feature (1)..(353): Homolog of NCBI NO: 7661950 NR Description: SH2 domain binding protein 1
  misc_feature (77)..(333): Homolog of NCBI NO: 34901616 NR Description: putative TPR-containing nuclear phosphoprotein
  misc_feature (1)..(333): Homolog of NCBI NO: 23095913 NR Description: putative TPR-containing nuclear phosphoprotein
  misc_feature (1)..(351): Homolog of NCBI NO: 25411225 NR Description: probable TPR repeat nuclear phosphoprotein
MYQNCLRKFYHNTDSQILLYLARTHYEAEQWQDCIKTLLRAIHLAPSNYTLRFDAGVAMQKFSASTLQKAKRTADEVRATVAELQNAVRVFSQLSAASNLHIHGFDEKKIDTHVGYCNHLLSAAKVHLEAAEHEEQQVRQRQELARQVALAEEARRKAEEQRKFQMERGKQEDELKRVQKQEEHFRRVKEQWKSSSHSKRRERSDDEEGGTGEKKRKKGGKRRKKDKHSKLRYDAEEPEDDLMDEQGMEDEEADINYREEPQTQMNDDAEENAQGLLAAAGLEDSDADEETAAPSSSIARRRQALSESDDDEPLLQRQSSPVRQNSADMQLSDGEIRDGDKTNGDDGNDEEKQY

SEQ ID NO: 55714 - protein, 296 aa, Glycine max
  peptide (1)..(296): Ceres Seq. ID no. 14308663
  misc_feature (76)..(295): Pfam Name: Caldesmon Pfam Description: Caldesmon
  misc_feature (1)..(295): Homolog of NCBI NO: 26006103 NR Description: mKIAA0155 protein [Mus musculus]
  misc_feature (1)..(184): Homolog of NCBI NO: 31753133 NR Description: Unknown (protein for IMAGE:30058591) [Mus
  misc_feature (1)..(205): Homolog of NCBI NO: 34901616 NR Description: putative TPR-containing nuclear phosphoprotein
  misc_feature (1)..(294): Homolog of NCBI NO: 6678441 NR Description: SH2 domain binding protein 1 (tetratricopeptide
  misc_feature (1)..(294): Homolog of NCBI NO: 34858978 NR Description: similar to phosphoprotein [Rattus norvegicus]
  misc_feature (1)..(295): Homolog of NCBI NO: 40788884 NR Description: KIAA0155 [Homo sapiens]
  misc_feature (1)..(295): Homolog of NCBI NO: 7661950 NR Description: SH2 domain binding protein 1
  misc_feature (19)..(275): Homolog of NCBI NO: 34901616 NR Description: putative TPR-containing nuclear phosphoprotein
  misc_feature (1)..(275): Homolog of NCBI NO: 23095913 NR Description: putative TPR-containing nuclear phosphoprotein
  misc_feature (1)..(293): Homolog of NCBI NO: 25411225 NR Description: probable TPR repeat nuclear phosphoprotein
MQKFSASTLQKAKRTADEVRATVAELQNAVRVFSQLSAASNLHIHGFDEKKIDTHVGYCNHLLSAAKVHLEAAEHEEQQVRQRQELARQVALAEEARRKAEEQRKFQMERGKQEDELKRVQKQEEHFRRVKEQWKSSSHSKRRERSDDEEGGTGEKKRKKGGKRRKKDKHSKLRYDAEEPEDDLMDEQGMEDEEADINYREEPQTQMNDDAEENAQGLLAAAGLEDSDADEETAAPSSSIARRRQALSESDDDEPLLQRQSSPVRQNSADMQLSDGEIRDGDKTNGDDGNDEEKQY

SEQ ID NO: 55715 - DNA, 1700 bp, Glycine max
  misc_feature (1)..(1700): Ceres Seq. ID no. 14307534
aaaaccctgctagtgttgttccgttgagataaacataaacctgagtgagtgaggctaagggagaaagctagaactaaaaatgtcatcagcttctaagctcacactgtacggaatcggaaccgcactgttccgcacccgtcgaactgcacctgtaagtgtaactccctttctcttcttcaaacccattcccttacctcggccgccgcgcttcctcctcctccgcgattcctcttcctcctccgccgccgccgcagaaatcctaccctccgttgaccacccctggccggaatgggtctccttcgtcgaccgcttgagcaccaaaggctacctccccaaaccctcctcttcttccgatgacaccgtaagcctttacaccaacatgaactctctcaaggacgcttgtctcagcttctcgcgtgaccgttacgaccttttcaagttgctgcctacgcacgatatccaagcagtagttgagggtgggtgccctaatcttctccgtaaagctgttaattcggccaagagactgagagcacacctgcaattagatgaaggggatgtttgtggtgcttgcaatctacgaagctcttgtgatagagcttatgtgattctaaaggattttgaaactgatgctcgaactattgatatagttcgaatacttttgttctacgcactagatccactagtgctttctagtggagacaaaccaccaggccgagaagttattgaatcatccgccagaaaacttctctctcagctaattgagttgagtgagtcccctgctccagcccctgcttctgctcgttcaaagcctactgcacaggatgctgtgggagaaggccaatctctaagtgttacgactaatcaattgtttaaagatgctgagatgaagaaaggtgactggatgtgtccaaaatgcaatttcatgaacttttctagaaatacgcaatgcctgaattgtaacgaagacaagcctaaggatattaacccatctactgttcaaatgaagccaggagattggacctgtcctgaatgcaattttttaaattttgccagaaacacacgatgtctaaaatgcaaaacagcggggccgacaaaggaagccaatactaatgaagttgaaaggaaaaaaggagattggacttgcccacaatgtgggttcatgaattatgctaggaacacgaaatgtttgcgttgtcctgagacaaggcctaagaaacatcctggtgactggaattgtcccgggtgtgggttcatgaattttggtagtaaaatgaagtgcttgcactgtcaagagccaaacccaagttccaagaaatataacggggattggagttgtcccaaatgtgatttctacaattatgcaagaaatatggcttgcctgaagtgcaatactgaacgccctaaagaacaaccaaccgttgactatgatggccatgaatggagacgatcaaattgattaaaaaaaaaccgccatcgagggaggtcacaattttggtcttggctgtaacaaatattttgattgcatatgaattaattctccaattaatggtgctgagtgcttcttaacttaattagagatactttaaagttatttgattgcatatgaatttgtgttttaatttaatcatgtacagatctaaaagcaaatttacagagattgaatcttgtgaatgttatagctttattttgcttctgattcc

SEQ ID NO: 55716 - protein, 458 aa, Glycine max
  peptide (1)..(458): Ceres Seq. ID no. 14307535
  misc_feature (270)..(299): Pfam Name: Zn-finger in Ran binding protein and others Pfam Description: Zn-finger in Ran binding protein and others
  misc_feature (95)..(337): Homolog of NCBI NO: 15293147 NR Description: unknown protein [Arabidopsis thaliana]
  misc_feature (31)..(351): Homolog of NCBI NO: 25372841 NR Description: hypothetical protein F5A18.17 [imported] -
  misc_feature (56)..(83): Homolog of NCBI NO: 34393925 NR Description: unknown protein [Oryza sativa (japonica
  misc_feature (103)..(347): Homolog of NCBI NO: 34393925 NR Description: unknown protein [Oryza sativa (japonica
  misc_feature (37)..(435): Homolog of NCBI NO: 13324787 NR Description: hypothetical protein [Oryza sativa]
  misc_feature (31)..(378): Homolog of NCBI NO: 21593408 NR Description: unknown [Arabidopsis thaliana]
  misc_feature (31)..(378): Homolog of NCBI NO: 18409643 NR Description: expressed protein [Arabidopsis thaliana]
  misc_feature (38)..(91): Homolog of NCBI NO: 13702809 NR Description: putative ARP protein [Oryza sativa]
  misc_feature (87)..(353): Homolog of NCBI NO: 13702809 NR Description: putative ARP protein [Oryza sativa]
  misc_feature (3)..(456): Homolog of NCBI NO: 15221905 NR Description: expressed protein [Arabidopsis thaliana]
MSSASKLTLYGIGTALFRTRRTAPVSVTPFLFFKPIPLPRPPRFLLLRDSSSSSAAAAEILPSVDHPWPEWVSFVDRLSTKGYLPKPSSSSDDTVSLYTNMNSLKDACLSFSRDRYDLFKLLPTHDIQAVVEGGCPNLLRKAVNSAKRLRAHLQLDEGDVCGACNLRSSCDRAYVILKDFETDARTIDIVRILLFYALDPLVLSSGDKPPGREVIESSARKLLSQLIELSESPAPAPASARSKPTAQDAVGEGQSLSVTTNQLFKDAEMKKGDWMCPKCNFMNFSRNTQCLNCNEDKPKDINPSTVQMKPGDWTCPECNFLNFARNTRCLKCKTAGPTKEANTNEVERKKGDWTCPQCGFMNYARNTKCLRCPETRPKKHPGDWNCPGCGFMNFGSKMKCLHCQEPNPSSKKYNGDWSCPKCDFYNYARNMACLKCNTERPKEQPTVDYDGHEWRRSN

SEQ ID NO: 55717 - protein, 358 aa, Glycine max
  peptide (1)..(358): Ceres Seq. ID no. 14307536
  misc_feature (170)..(199): Pfam Name: Zn-finger in Ran binding protein and others Pfam Description: Zn-finger in Ran binding protein and others
  misc_feature (234)..(314): Homolog of NCBI NO: 13702809 NR Description: putative ARP protein [Oryza sativa]
  misc_feature (1)..(237): Homolog of NCBI NO: 18405190 NR Description: expressed protein [Arabidopsis thaliana]
  misc_feature (1)..(237): Homolog of NCBI NO: 15293147 NR Description: unknown protein [Arabidopsis thaliana]
  misc_feature (1)..(251): Homolog of NCBI NO: 25372841 NR Description: hypothetical protein F5A18.17 [imported] -
  misc_feature (3)..(247): Homolog of NCBI NO: 34393925 NR Description: unknown protein [Oryza sativa (japonica
  misc_feature (1)..(335): Homolog of NCBI NO: 13324787 NR Description: hypothetical protein [Oryza sativa]
  misc_feature (1)..(278): Homolog of NCBI NO: 21593408 NR Description: unknown [Arabidopsis thaliana]
  misc_feature (1)..(278): Homolog of NCBI NO: 18409643 NR Description: expressed protein [Arabidopsis thaliana]
  misc_feature (1)..(253): Homolog of NCBI NO: 13702809 NR Description: putative ARP protein [Oryza sativa]
  misc_feature (1)..(356): Homolog of NCBI NO: 15221905 NR Description: expressed protein [Arabidopsis thaliana]
MNSLKDACLSFSRDRYDLFKLLPTHDIQAVVEGGCPNLLRKAVNSAKRLRAHLQLDEGDVCGACNLRSSCDRAYVILKDFETDARTIDIVRILLFYALDPLVLSSGDKPPGREVIESSARKLLSQLIELSESPAPAPASARSKPTAQDAVGEGQSLSVTTNQLFKDAEMKKGDWMCPKCNFMNFSRNTQCLNCNEDKPKDINPSTVQMKPGDWTCPECNFLNFARNTRCLKCKTAGPTKEANTNEVERKKGDWTCPQCGFMNYARNTKCLRCPETRPKKHPGDWNCPGCGFMNFGSKMKCLHCQEPNPSSKKYNGDWSCPKCDFYNYARNMACLKCNTERPKEQPTVDYDGHEWRRSN

SEQ ID NO: 55718 - DNA, 1396 bp, Glycine max
  misc_feature (1)..(1396): Ceres Seq. ID no. 15170345
actgatctttcttttggtgttgaagaagagaagatcaatgatctacctgatcaatggacgactccaactcacctgatcccaccgcatcctttgcttttagatccacaaccacaaccacaacacctcagagcaacttcttgagaagccattctactaaagaaacccctttctcaaacttcattcactccccaccacgcctctcttgtcccactctttctcgtagcctccaaaactctcctatttcctctccacttcaccaccgtcaattctcaccccctccctctcctccttctcccacaaaactctctgattctgaacctcaaaccacttaccactgtgcctcttcagtcctcagaaacgatggacagatcctctccattgccctgtcatcaaatggtttggtctacactggctctgactcaaaccttgtgagggtgtggaagctccctgagttcaccgaatgtggacaactcaggaccaaggcttgcagggtggtggccctcgaagtgtccaatgacacggtttatgcagcatatggtgatggcaaaataagggtatggagaagaacttgggataaggtgttgaagcatgttcggttggctaccatcccaaagacactcggctatgttcgcagctacatcgccggcaaagacaagacaatgcacaaggggctaatcacggcaatggcaataaacacagcagaggacattctatacacagcttccctggacaaaacggtgaaagtgtggagaatctcagacctgaagtgcatagagaccatcaaggcacacactgagccaatcaacgccatcatagtggcagatgatggagtcctctaaacttgacttttatagaatttagttcacctattttcatctttatttcatgctttgaataatcataattttgatttttataaattatagttttatttatataaaatttttctaaaaaatttataagtcaataatgtccaatataaagagaagctaaatttatataaaactttaatataaaataggtctttaaaaagactcatcaaactagatattcaaataggtgaacaaaattatcaattaaaaattcacctattcccaattgccttccctatccacaactcatgaattaagaattttcaaagtagcaacatctattgaactaactctcttacttcatggaaatctttcataaaaaaatttagtaaaaaaaaaatctttcacaaatattactaattaatcctaaagatccatgctgaacaatttatataacattttttaaaaataaattttatcatgtcactatttttttatatttgattttttaaataatatgatagtaataaatgattgtattaaaagacttccgtttacatagagacagtgtgtggcagttggtt

SEQ ID NO: 55719 - protein, 261 aa, Glycine max
  peptide (1)..(261): Ceres Seq. ID no. 15170346
  misc_feature (49)..(261): Homolog of NCBI NO: 34906600 NR Description: hypothetical protein~similar to Arabidopsis
  misc_feature (61)..(261): Homolog of NCBI NO: 34904338 NR Description: unnamed protein product [Oryza sativa (japonica
  misc_feature (25)..(261): Homolog of NCBI NO: 15230244 NR Description: transducin / WD-40 repeat protein family
  misc_feature (15)..(261): Homolog of NCBI NO: 17979259 NR Description: At1g49450/F13F21_11 [Arabidopsis thaliana]
  misc_feature (98)..(261): Homolog of NCBI NO: 15225317 NR Description: transducin / WD-40 repeat protein family
  misc_feature (15)..(261): Homolog of NCBI NO: 15222143 NR Description: transducin / WD-40 repeat protein family
  misc_feature (98)..(261): Homolog of NCBI NO: 31126785 NR Description: putative WD repeat-protein
  misc_feature (99)..(257): Homolog of NCBI NO: 15220271 NR Description: transducin / WD-40 repeat protein family
  misc_feature (40)..(261): Homolog of NCBI NO: 15235354 NR Description: transducin / WD-40 repeat protein family
  misc_feature (45)..(261): Homolog of NCBI NO: 15229740 NR Description: transducin / WD-40 repeat protein family
MDDSNSPDPTASFAFRSTTTTTTPQSNFLRSHSTKETPFSNFIHSPPRLSCPTLSRSLQNSPISSPLHHRQFSPPPSPPSPTKLSDSEPQTTYHCASSVLRNDGQILSIALSSNGLVYTGSDSNLVRVWKLPEFTECGQLRTKACRVVALEVSNDTVYAAYGDGKIRVWRRTWDKVLKHVRLATIPKTLGYVRSYIAGKDKTMHKGLITAMAINTAEDILYTASLDKTVKVWRISDLKCIETIKAHTEPINAIIVADDGVL

SEQ ID NO: 55720 - DNA, 1779 bp, Glycine max
  misc_feature (1)..(1779): Ceres Seq. ID no. 14310772
attccaaaatggtggaaacattaccacaccatactcctcctcctcctaaccatcaccaagtcttggttctaaaatctgcaatatgttcgagactcctcctcgtaaccctaatcatcctcttccgaaccctcgtttccccctacgacacatccgcatccttaaaccctccatgcctctccacccccaaccccaactccaccacccacccttcccccctcgaaaacggcgtcgtttgggactccgtctacttcctccgcatcgcccaatgcggctacgagtacgaacaaaccttcgccttcttacccctccttcctctctctctctccctctcttctcacaccctcttcgcctttctctctccctttctaaaccaaaggcccctcctcgctctctccgcttacgtcatcaacaacatggctttcgttctcgccgctctctacttctacaagctctccctcaccgtcttgaaggacccccaaatagcgcttcgggccaccgttttcttctgctttaatcctgcctctatattttattcatccatatactcggagagtttgtacgcgcttctgtgtttcggaggaatgtaccacttcatgtctggtgggaacaatttggctgttcttttctttgcgctctccggttgtgctaggtctaatggggtgctgaatgctggctatctctgctttcagactatgcatcgcgcttatcatgctatgtttcaagaaaagcgtgttactttggctttgcagattgttattgctggagctttacgtactgcatgtatttttgctccatttgtagctttccaggcttatggctactacaatatgtgtgttggacgttctcctgatgaaataaggccatggtgcaaggcaagaataccattactttacaattacatccaaagtcattattggggtgtaggtttcttgagatattttcagctgaaacagttgcctaactttcttcttgcttccccaatactgtctctggcactttgctcagttgtccattatgctaagtcaaggcctcaaaactttctctcactgggttttttagctcctatggaagaaaagagccgtggagttgtgtttttattagatgaactctcaaggtccaaagaagcccgaagtgtgaagaaatcctctgttagggtagaagcagaacattccaatcttaggagaagaaagaatgtgagcaagggagatgctgctaatgttcacctagaatctgagccagcagcaatttggccaggatacttgtctgcttctgttcttccatttgtgttacacttgggattcatggcatgcactgctttcttcatcatgcatgtacaggtttcaactcgtttcttgtctgccagccctccactttattggtttgcttcatatataatggcatatcctggaaaatactctagatggggatacgtgatgtgggcatactctatagcatatatttttcttggcagtttgctgttttcaaacttctatccttttacttaacgagaagaaaggtagatggttcttgaaagctgttggtcttcttattccatgcaatgcacaaaggcataactatccaccctgaagcgttgctgctgaatttcagatttctgctggttgctgtttgatctttacacgcctgagtagtggagaaaatgcccccttccctccctcaaattagcaatttttttttacgttggtcaaccgggattcttatcatctagatgagtaaactaatagaaatccttttcctttgttgtaattttcatttttgtct

SEQ ID NO: 55721 - protein, 500 aa, Glycine max
  peptide (1)..(500): Ceres Seq. ID no. 14310773
  misc_feature (19)..(500): Pfam Name: Protein of unknown function (DUF409) Pfam Description: Protein of unknown function (DUF409)
  misc_feature (418)..(465): Homolog of NCBI NO: 32822771 NR Description: Unknown (protein for MGC:62865) [Mus musculus]
  misc_feature (287)..(350): Homolog of NCBI NO: 32822771 NR Description: Unknown (protein for MGC:62865) [Mus musculus]
  misc_feature (22)..(287): Homolog of NCBI NO: 32822771 NR Description: Unknown (protein for MGC:62865) [Mus musculus]
  misc_feature (418)..(465): Homolog of NCBI NO: 31542474 NR Description: RIKEN cDNA D430024F16 gene [Mus musculus]
  misc_feature (287)..(350): Homolog of NCBI NO: 31542474 NR Description: RIKEN cDNA D430024F16 gene [Mus musculus]
  misc_feature (22)..(287): Homolog of NCBI NO: 31542474 NR Description: RIKEN cDNA D430024F16 gene [Mus musculus]
  misc_feature (417)..(465): Homolog of NCBI NO: 34871896 NR Description: similar to hypothetical protein FLJ20477 [Rattus
  misc_feature (287)..(359): Homolog of NCBI NO: 34871896 NR Description: similar to hypothetical protein FLJ20477 [Rattus
  misc_feature (22)..(277): Homolog of NCBI NO: 34871896 NR Description: similar to hypothetical protein FLJ20477 [Rattus
  misc_feature (19)..(500): Homolog of NCBI NO: 15221122 NR Description: hypothetical protein [Arabidopsis thaliana]
SKMVETLPHHTPPPPNHHQVLVLKSAICSRLLLVTLIILFRTLVSPYDTSASLNPPCLSTPNPNSTTHPSPLENGVVWDSVYFLRIAQCGYEYEQTFAFLPLLPLSLSLSSHTLFAFLSPFLNQRPLLALSAYVINNMAFVLAALYFYKLSLTVLKDPQIALRATVFFCFNPASIFYSSIYSESLYALLCFGGMYHFMSGGNNLAVLFFALSGCARSNGVLNAGYLCFQTMHRAYHAMFQEKRVTLALQIVIAGALRTACIFAPFVAFQAYGYYNMCVGRSPDEIRPWCKARIPLLYNYIQSHYWGVGFLRYFQLKQLPNFLLASPILSLALCSVVHYAKSRPQNFLSLGFLAPMEEKSRGVVFLLDELSRSKEARSVKKSSVRVEAEHSNLRRRKNVSKGDAANVHLESEPAAIWPGYLSASVLPFVLHLGFMACTAFFIMHVQVSTRFLSASPPLYWFASYIMAYPGKYSRWGYVMWAYSIAYIFLGSLLFSNFYPFT

SEQ ID NO: 55722 - protein, 498 aa, Glycine max
  peptide (1)..(498): Ceres Seq. ID no. 14310774
  misc_feature (17)..(498): Pfam Name: Protein of unknown function (DUF409) Pfam Description: Protein of unknown function (DUF409)
  misc_feature (416)..(463): Homolog of NCBI NO: 32822771 NR Description: Unknown (protein for MGC:62865) [Mus musculus]
  misc_feature (285)..(348): Homolog of NCBI NO: 32822771 NR Description: Unknown (protein for MGC:62865) [Mus musculus]
  misc_feature (20)..(285): Homolog of NCBI NO: 32822771 NR Description: Unknown (protein for MGC:62865) [Mus musculus]
  misc_feature (416)..(463): Homolog of NCBI NO: 31542474 NR Description: RIKEN cDNA D430024F16 gene [Mus musculus]
  misc_feature (285)..(348): Homolog of NCBI NO: 31542474 NR Description: RIKEN cDNA D430024F16 gene [Mus musculus]
  misc_feature (20)..(285): Homolog of NCBI NO: 31542474 NR Description: RIKEN cDNA D430024F16 gene [Mus musculus]
  misc_feature (415)..(463): Homolog of NCBI NO: 34871896 NR Description: similar to hypothetical protein FLJ20477 [Rattus
  misc_feature (285)..(357): Homolog of NCBI NO: 34871896 NR Description: similar to hypothetical protein FLJ20477 [Rattus
  misc_feature (20)..(275): Homolog of NCBI NO: 34871896 NR Description: similar to hypothetical protein FLJ20477 [Rattus
  misc_feature (17)..(498): Homolog of NCBI NO: 15221122 NR Description: hypothetical protein [Arabidopsis thaliana]
MVETLPHHTPPPPNHHQVLVLKSAICSRLLLVTLIILFRTLVSPYDTSASLNPPCLSTPNPNSTTHPSPLENGVVWDSVYFLRIAQCGYEYEQTFAFLPLLPLSLSLSSHTLFAFLSPFLNQRPLLALSAYVINNMAFVLAALYFYKLSLTVLKDPQIALRATVFFCFNPASIFYSSIYSESLYALLCFGGMYHFMSGGNNLAVLFFALSGCARSNGVLNAGYLCFQTMHRAYHAMFQEKRVTLALQIVIAGALRTACIFAPFVAFQAYGYYNMCVGRSPDEIRPWCKARIPLLYNYIQSHYWGVGFLRYFQLKQLPNFLLASPILSLALCSVVHYAKSRPQNFLSLGFLAPMEEKSRGVVFLLDELSRSKEARSVKKSSVRVEAEHSNLRRRKNVSKGDAANVHLESEPAAIWPGYLSASVLPFVLHLGFMACTAFFIMHVQVSTRFLSASPPLYWFASYIMAYPGKYSRWGYVMWAYSIAYIFLGSLLFSNFYPFT

SEQ ID NO: 55723 - protein, 363 aa, Glycine max
  peptide (1)..(363): Ceres Seq. ID no. 14310775
  misc_feature (1)..(363): Pfam Name: Protein of unknown function (DUF409) Pfam Description: Protein of unknown function (DUF409)
  misc_feature (281)..(328): Homolog of NCBI NO: 32822771 NR Description: Unknown (protein for MGC:62865) [Mus musculus]
  misc_feature (150)..(213): Homolog of NCBI NO: 32822771 NR Description: Unknown (protein for MGC:62865) [Mus musculus]
  misc_feature (1)..(150): Homolog of NCBI NO: 32822771 NR Description: Unknown (protein for MGC:62865) [Mus musculus]
  misc_feature (281)..(328): Homolog of NCBI NO: 31542474 NR Description: RIKEN cDNA D430024F16 gene [Mus musculus]
  misc_feature (150)..(213): Homolog of NCBI NO: 31542474 NR Description: RIKEN cDNA D430024F16 gene [Mus musculus]
  misc_feature (1)..(150): Homolog of NCBI NO: 31542474 NR Description: RIKEN cDNA D430024F16 gene [Mus musculus]
  misc_feature (280)..(328): Homolog of NCBI NO: 34871896 NR Description: similar to hypothetical protein FLJ20477 [Rattus
  misc_feature (150)..(222): Homolog of NCBI NO: 34871896 NR Description: similar to hypothetical protein FLJ20477 [Rattus
  misc_feature (1)..(140): Homolog of NCBI NO: 34871896 NR Description: similar to hypothetical protein FLJ20477 [Rattus
  misc_feature (1)..(363): Homolog of NCBI NO: 15221122 NR Description: hypothetical protein [Arabidopsis thaliana]
MAFVLAALYFYKLSLTVLKDPQIALRATVFFCFNPASIFYSSIYSESLYALLCFGGMYHFMSGGNNLAVLFFALSGCARSNGVLNAGYLCFQTMHRAYHAMFQEKRVTLALQIVIAGALRTACIFAPFVAFQAYGYYNMCVGRSPDEIRPWCKARIPLLYNYIQSHYWGVGFLRYFQLKQLPNFLLASPILSLALCSVVHYAKSRPQNFLSLGFLAPMEEKSRGVVFLLDELSRSKEARSVKKSSVRVEAEHSNLRRRKNVSKGDAANVHLESEPAAIWPGYLSASVLPFVLHLGFMACTAFFIMHVQVSTRFLSASPPLYWFASYIMAYPGKYSRWGYVMWAYSIAYIFLGSLLFSNFYPFT

SEQ ID NO: 55724 - DNA, 2113 bp, Glycine max
  misc_feature (1)..(2113): Ceres Seq. ID no. 12582251
cagctacgtaggccccccccccgagttgttgttgttgtttgtgccgcgaaagagaaggcaagcaaaaaaggtgatcctgggcgtacaagaccataacaccaccttccagctcactctccataaaccctaacgcttcgtctagggtttcgctgaattccccaattttcccaacccccgaccggacatgctccttctccgatggccgtcgtaactagcaacggcaagcgccgccaacattggccctccgcgaattaccactttccatctcccaattccaaaagacccagacttccaacaatgtcccaaaaccacgcgcaatccgtgttatcctccagtagtatcatttctagaatttctacgtaccccgaaaccaagccacccctccatagggaggttcacgccccgtgtagaccacgtaagtttgattctcctgccttcaatagaagtgctcattattatcgcaaggaagagattagtcacgatgtgggcaacttgttaagtaaaaattaccaaagggcgaaaaattccgcgttagctagcattaggtttggggaaaagggcaaggaggtgatagaagtggatgctgatagttccaaggatatggtttcggaggaggattcgagtgtggaagaggttcgttttgtggaagaagatggacgagaagtgcgctccgtggtgacggagcacaagtggcaagagggtgatttggttgtgactgaggttaaggatttggatgctaaggatatgtgtggtggccctcagcagcagtcaacttcatccgtggtttctgagttgactaatggtgatctgaatgtggttaatgctgagaagatgttggacattctttctttgactccggatcatgatctttcctccgttcaagcctacaagaagttgctcgatgctcttggccagcgaacggatacccttaacaggctggaggctgaaattaaagttaacgagaagcgtatgtccacgtttgaattgttgcgcccgaagaaggaactagtagaggaagttccattggaaccttttattcctcttactaaagaggaagaagttgaggttgcacatgccttttctaccaaccggaaaaagatcttggtttcccatgagaaatctggcattgagatctcgggagaaaagtttcaatgccttagaccgggtgcatggttaaacgatgaggtaataaatgtgtaccttgaattgctgaaagagagggagagaagagagccacagaagtttctgaactgtcattttttcagtacctttttctacaagaggttaataagtggcaagaatgggtatgatttcaaatctgtgaggagatggaccagccaaaagaaattgggatatggcctacatgaatgtgataaaatatttgttcctatccataaagagattcattggtgcttggctgttatcaataagaaagataagaaatttcagtatctggactcactaagaggaacagatgcccaagtaatgaaagttctggctagctatattgtagatgaagtaaaggacaagactggaaaagatattgatgtaagttcttggaaaaaagaatttgttgaagaccttcctgagcagcagaacgggtatgattgtggggtgtttatgatcaaatatgccgacttctatagcagaaacttggggctatgtttcaaccaggaacacatgtcttactttcggcgcagaacagctaaagaaatcttgagattaaaagctaactaagcaaaagaatattcatttgtatttccatattggattttggtcatcagaaattgaaacaatcattaatgtaaaatcagtagagcactttttgatgaaggatccttcactcctgtcactatctcgaccttaaccattcaaaagttctggcatttgttagattgtggactggactgattatacatatcatcccgatatccaggtacaccatgttggtagtgtagtgtgtagtgggttgtatatgctacgcaaaggtgaaatcatagatgagatgaggcattaggttgtggttttaattatgtaatcataaatgtgctccctcaccttttttggtgtctggttactaaaaaaaaaaaaaaaagaaaaaaaaaaaaaaaaa

SEQ ID NO: 55725 - protein, 512 aa, Glycine max
  peptide (1)..(512): Ceres Seq. ID no. 12582252
  misc_feature (310)..(510): Pfam Name: Ulp1 protease family, C-terminal catalytic domain Pfam Description: Ulp1 protease family, C-terminal catalytic
  misc_feature (297)..(512): Homolog of NCBI NO: 15236895 NR Description: hypothetical protein; protein id: At4g00690.1
  misc_feature (115)..(464): Homolog of NCBI NO: 7485126 NR Description: hypothetical protein - Arabidopsis thaliana
  misc_feature (115)..(464): Homolog of NCBI NO: 2326343 NR Description: G14587-5 [Arabidopsis thaliana]
  misc_feature (115)..(469): Homolog of NCBI NO: 25371728 NR Description: hypothetical protein AT4g15880 [imported] -
  misc_feature (227)..(511): Homolog of NCBI NO: 34915036 NR Description: P0458A05.23 [Oryza sativa (japonica
  misc_feature (69)..(511): Homolog of NCBI NO: 26450144 NR Description: unknown protein [Arabidopsis thaliana]
  misc_feature (69)..(511): Homolog of NCBI NO: 30680058 NR Description: Ulp1 protease family [Arabidopsis thaliana]
  misc_feature (69)..(511): Homolog of NCBI NO: 6728998 NR Description: hypothetical protein [Arabidopsis thaliana]
  misc_feature (115)..(512): Homolog of NCBI NO: 34787206 NR Description: SUMO protease [Arabidopsis thaliana]
  misc_feature (115)..(512): Homolog of NCBI NO: 18414542 NR Description: Expressed protein
MAVVTSNGKRRQHWPSANYHFPSPNSKRPRLPTMSQNHAQSVLSSSSIISRISTYPETKPPLHREVHAPCRPRKFDSPAFNRSAHYYRKEEISHDVGNLLSKNYQRAKNSALASIRFGEKGKEVIEVDADSSKDMVSEEDSSVEEVRFVEEDGREVRSVVTEHKWQEGDLVVTEVKDLDAKDMCGGPQQQSTSSVVSELTNGDLNVVNAEKMLDILSLTPDHDLSSVQAYKKLLDALGQRTDTLNRLEAEIKVNEKRMSTFELLRPKKELVEEVPLEPFIPLTKEEEVEVAHAFSTNRKKILVSHEKSGIEISGEKFQCLRPGAWLNDEVINVYLELLKERERREPQKFLNCHFFSTFFYKRLISGKNGYDFKSVRRWTSQKKLGYGLHECDKIFVPIHKEIHWCLAVINKKDKKFQYLDSLRGTDAQVMKVLASYIVDEVKDKTGKDIDVSSWKKEFVEDLPEQQNGYDCGVFMIKYADFYSRNLGLCFNQEHMSYFRRRTAKEILRLKAN

SEQ ID NO: 55726 - protein, 479 aa, Glycine max
  peptide (1)..(479): Ceres Seq. ID no. 12582253
  misc_feature (277)..(477): Pfam Name: Ulp1 protease family, C-terminal catalytic domain Pfam Description: Ulp1 protease family, C-terminal catalytic
  misc_feature (264)..(479): Homolog of NCBI NO: 15236895 NR Description: hypothetical protein; protein id: At4g00690.1
  misc_feature (82)..(431): Homolog of NCBI NO: 7485126 NR Description: hypothetical protein - Arabidopsis thaliana
  misc_feature (82)..(431): Homolog of NCBI NO: 2326343 NR Description: G14587-5 [Arabidopsis thaliana]
  misc_feature (82)..(436): Homolog of NCBI NO: 25371728 NR Description: hypothetical protein AT4g15880 [imported] -
  misc_feature (194)..(478): Homolog of NCBI NO: 34915036 NR Description: P0458A05.23 [Oryza sativa (japonica
  misc_feature (36)..(478): Homolog of NCBI NO: 26450144 NR Description: unknown protein [Arabidopsis thaliana]
  misc_feature (36)..(478): Homolog of NCBI NO: 30680058 NR Description: Ulp1 protease family [Arabidopsis thaliana]
  misc_feature (36)..(478): Homolog of NCBI NO: 6728998 NR Description: hypothetical protein [Arabidopsis thaliana]
  misc_feature (82)..(479): Homolog of NCBI NO: 34787206 NR Description: SUMO protease [Arabidopsis thaliana]
  misc_feature (82)..(479): Homolog of NCBI NO: 18414542 NR Description: Expressed protein
MSQNHAQSVLSSSSIISRISTYPETKPPLHREVHAPCRPRKFDSPAFNRSAHYYRKEEISHDVGNLLSKNYQRAKNSALASIRFGEKGKEVIEVDADSSKDMVSEEDSSVEEVRFVEEDGREVRSVVTEHKWQEGDLVVTEVKDLDAKDMCGGPQQQSTSSVVSELTNGDLNVVNAEKMLDILSLTPDHDLSSVQAYKKLLDALGQRTDTLNRLEAEIKVNEKRMSTFELLRPKKELVEEVPLEPFIPLTKEEEVEVAHAFSTNRKKILVSHEKSGIEISGEKFQCLRPGAWLNDEVINVYLELLKERERREPQKFLNCHFFSTFFYKRLISGKNGYDFKSVRRWTSQKKLGYGLHECDKIFVPIHKEIHWCLAVINKKDKKFQYLDSLRGTDAQVMKVLASYIVDEVKDKTGKDIDVSSWKKEFVEDLPEQQNGYDCGVFMIKYADFYSRNLGLCFNQEHMSYFRRRTAKEILRLKAN

SEQ ID NO: 55727 - protein, 378 aa, Glycine max
  peptide (1)..(378): Ceres Seq. ID no. 12582254
  misc_feature (176)..(376): Pfam Name: Ulp1 protease family, C-terminal catalytic domain Pfam Description: Ulp1 protease family, C-terminal catalytic
  misc_feature (163)..(378): Homolog of NCBI NO: 15236895 NR Description: hypothetical protein; protein id: At4g00690.1
  misc_feature (1)..(330): Homolog of NCBI NO: 7485126 NR Description: hypothetical protein - Arabidopsis thaliana
  misc_feature (1)..(330): Homolog of NCBI NO: 2326343 NR Description: G14587-5 [Arabidopsis thaliana]
  misc_feature (1)..(335): Homolog of NCBI NO: 25371728 NR Description: hypothetical protein AT4g15880 [imported] -
  misc_feature (93)..(377): Homolog of NCBI NO: 34915036 NR Description: P0458A05.23 [Oryza sativa (japonica
  misc_feature (1)..(377): Homolog of NCBI NO: 26450144 NR Description: unknown protein [Arabidopsis thaliana]
  misc_feature (1)..(377): Homolog of NCBI NO: 30680058 NR Description: Ulp1 protease family [Arabidopsis thaliana]
  misc_feature (1)..(377): Homolog of NCBI NO: 6728998 NR Description: hypothetical protein [Arabidopsis thaliana]
  misc_feature (1)..(378): Homolog of NCBI NO: 34787206 NR Description: SUMO protease [Arabidopsis thaliana]
  misc_feature (1)..(378): Homolog of NCBI NO: 18414542 NR Description: Expressed protein
MVSEEDSSVEEVRFVEEDGREVRSVVTEHKWQEGDLVVTEVKDLDAKDMCGGPQQQSTSSVVSELTNGDLNVVNAEKMLDILSLTPDHDLSSVQAYKKLLDALGQRTDTLNRLEAEIKVNEKRMSTFELLRPKKELVEEVPLEPFIPLTKEEEVEVAHAFSTNRKKILVSHEKSGIEISGEKFQCLRPGAWLNDEVINVYLELLKERERREPQKFLNCHFFSTFFYKRLISGKNGYDFKSVRRWTSQKKLGYGLHECDKIFVPIHKEIHWCLAVINKKDKKFQYLDSLRGTDAQVMKVLASYIVDEVKDKTGKDIDVSSWKKEFVEDLPEQQNGYDCGVFMIKYADFYSRNLGLCFNQEHMSYFRRRTAKEILRLKAN

SEQ ID NO: 55728 - DNA, 1604 bp, Glycine max
  misc_feature (1)..(1604): Ceres Seq. ID no. 15175677
gagttctctgcattcttcaaacacacacacacacacacagaatgggtgacatgtaccactttgacaagaacctctcctcacaagacgaaatctcactttttctgcgtcagattctgctccgttcatctttaccttcccactccatgcctgctggatcctgcacctccaacgctgctcaacaaaacgtaaatgcacaccacccttctttcacggcgtcacagctccaagatgggaagatcttggccgttgattccaccgcttcttttgtctccggttctgctgcttgcagttccttcaagggccatggtgcttctgctgcaaatgtgtcttcttcttctgctggagtgagtgagaacgagaatgatgactatgattgtgagagtgaggagggtgttgaggctccggccgaagaagttccaacaaaggctgcttcttctaggagttcatctaaaagatcaagagctgcagaagttcataatttgtcagagaagcggagaaggggtaggatcaacgagaaaatgaaggctttgcaaaacctaattccaaattctaacaagacagataaggcttcaatgctcgatgaagctattgaataccttaaacagcttcagctacaagtacagatgctgtcaatgagaaatgggttgagtttgcatcctatgtgctttcctgaaggcttgcagcctctgcagttgtctcagatgggtatggaattaagtgaaagaaacaggtttacctctttaaacatgtcagctactctgcctctgcaccaagacaacaatcccttgcactatgcatccaatctacctaacaaacacaatctcccaaatcagccatcagtgccctatcctccatacattgacaacccagaaacttctttcggtctggaaccccgaatccaaacggatatgaaacctcttcaacacaaaggaggatcttctgagccaatacgaggggaagacattttgcagcaccagcaatcaagtggtatccattcagatgccaatacattaggtggttctcaagttgtcaaagaattcgaatcaggcacgagactatcattcccttttgacacgcaagcatgtgaacccaaagacaacagcaactcttcgcaaccatgcattggcggaagagatcattcaggagtgatcataagaaatagtgagaccaacattgttggtaggtaggtatatgatgcttatgtgaatgatatgtagctaggttcgtgcatgcaatgcaacatgtcttgaaaagcttttcaccagagactgcagaagggagaaagtggtcagtggcaactcgaagaccgaaaagtcagatttttgaagtttactgccagtaatgccttctgaattttggtttcgtaaaagcaggaatctcaatattatcccttgagcattttgtaatgttctcaaaaagcctctggcctacgtgacatgagagcagattttttttttttctctttctagcttctcgagttgataaaattatgtatgtataatgtatgcagagaatataactacccattgttatgcggattatataaccactgtagaatatcctatggtggttttatttcagttcacgataaaaacaaattgccc

SEQ ID NO: 55729 - protein, 394 aa, Glycine max
  peptide (1)..(394): Ceres Seq. ID no. 15175678
  misc_feature (154)..(203): Pfam Name: Helix-loop-helix DNA-binding domain Pfam Description: Helix-loop-helix DNA-binding domain
  misc_feature (127)..(224): Homolog of NCBI NO: 15240202 NR Description: bHLH protein family [Arabidopsis thaliana]
  misc_feature (62)..(236): Homolog of NCBI NO: 4093153 NR Description: phytochrome-associated protein 3 [Arabidopsis
  misc_feature (62)..(236): Homolog of NCBI NO: 15217533 NR Description: phytochrome interacting factor 3 (PIF3)
  misc_feature (99)..(288): Homolog of NCBI NO: 34899612 NR Description: putative phytochrome interacting factor 4
  misc_feature (21)..(297): Homolog of NCBI NO: 30680909 NR Description: (bHLH015) putative bHLH transcription factor
  misc_feature (21)..(297): Homolog of NCBI NO: 30680903 NR Description: (bHLH015) putative bHLH transcription factor
  misc_feature (21)..(349): Homolog of NCBI NO: 25411969 NR Description: hypothetical protein At2g20180 [imported] -
  misc_feature (125)..(332): Homolog of NCBI NO: 15451582 NR Description: Putative SPATULA [Oryza sativa]
  misc_feature (90)..(234): Homolog of NCBI NO: 25407777 NR Description: hypothetical protein AT4g36930 [imported] -
  misc_feature (90)..(234): Homolog of NCBI NO: 18419937 NR Description: bHLH protein SPATULA (SPT) [Arabidopsis thaliana]
VLCILQTHTHTHRMGDMYHFDKNLSSQDEISLFLRQILLRSSLPSHSMPAGSCTSNAAQQNVNAHHPSFTASQLQDGKILAVDSTASFVSGSAACSSFKGHGASAANVSSSSAGVSENENDDYDCESEEGVEAPAEEVPTKAASSRSSSKRSRAAEVHNLSEKRRRGRINEKMKALQNLIPNSNKTDKASMLDEAIEYLKQLQLQVQMLSMRNGLSLHPMCFPEGLQPLQLSQMGMELSERNRFTSLNMSATLPLHQDNNPLHYASNLPNKHNLPNQPSVPYPPYIDNPETSFGLEPRIQTDMKPLQHKGGSSEPIRGEDILQHQQSSGIHSDANTLGGSQVVKEFESGTRLSFPFDTQACEPKDNSNSSQPCIGGRDHSGVIIRNSETNIVGR

SEQ ID NO: 55730 - protein, 381 aa, Glycine max
  peptide (1)..(381): Ceres Seq. ID no. 15175679
  misc_feature (141)..(190): Pfam Name: Helix-loop-helix DNA-binding domain Pfam Description: Helix-loop-helix DNA-binding domain
  misc_feature (114)..(211): Homolog of NCBI NO: 15240202 NR Description: bHLH protein family [Arabidopsis thaliana]
  misc_feature (49)..(223): Homolog of NCBI NO: 4093153 NR Description: phytochrome-associated protein 3 [Arabidopsis
  misc_feature (49)..(223): Homolog of NCBI NO: 15217533 NR Description: phytochrome interacting factor 3 (PIF3)
  misc_feature (86)..(275): Homolog of NCBI NO: 34899612 NR Description: putative phytochrome interacting factor 4
  misc_feature (8)..(284): Homolog of NCBI NO: 30680909 NR Description: (bHLH015) putative bHLH transcription factor
  misc_feature (8)..(284): Homolog of NCBI NO: 30680903 NR Description: (bHLH015) putative bHLH transcription factor
  misc_feature (8)..(336): Homolog of NCBI NO: 25411969 NR Description: hypothetical protein At2g20180 [imported] -
  misc_feature (112)..(319): Homolog of NCBI NO: 15451582 NR Description: Putative SPATULA [Oryza sativa]
  misc_feature (77)..(221): Homolog of NCBI NO: 25407777 NR Description: hypothetical protein AT4g36930 [imported] -
  misc_feature (77)..(221): Homolog of NCBI NO: 18419937 NR Description: bHLH protein SPATULA (SPT) [Arabidopsis thaliana]
MGDMYHFDKNLSSQDEISLFLRQILLRSSLPSHSMPAGSCTSNAAQQNVNAHHPSFTASQLQDGKILAVDSTASFVSGSAACSSFKGHGASAANVSSSSAGVSENENDDYDCESEEGVEAPAEEVPTKAASSRSSSKRSRAAEVHNLSEKRRRGRINEKMKALQNLIPNSNKTDKASMLDEAIEYLKQLQLQVQMLSMRNGLSLHPMCFPEGLQPLQLSQMGMELSERNRFTSLNMSATLPLHQDNNPLHYASNLPNKHNLPNQPSVPYPPYIDNPETSFGLEPRIQTDMKPLQHKGGSSEPIRGEDILQHQQSSGIHSDANTLGGSQVVKEFESGTRLSFPFDTQACEPKDNSNSSQPCIGGRDHSGVIIRNSETNIVGR

SEQ ID NO: 55731 - protein, 378 aa, Glycine max
  peptide (1)..(378): Ceres Seq. ID no. 15175680
  misc_feature (138)..(187): Pfam Name: Helix-loop-helix DNA-binding domain Pfam Description: Helix-loop-helix DNA-binding domain
  misc_feature (111)..(208): Homolog of NCBI NO: 15240202 NR Description: bHLH protein family [Arabidopsis thaliana]
  misc_feature (46)..(220): Homolog of NCBI NO: 4093153 NR Description: phytochrome-associated protein 3 [Arabidopsis
  misc_feature (46)..(220): Homolog of NCBI NO: 15217533 NR Description: phytochrome interacting factor 3 (PIF3)
  misc_feature (83)..(272): Homolog of NCBI NO: 34899612 NR Description: putative phytochrome interacting factor 4
  misc_feature (5)..(281): Homolog of NCBI NO: 30680909 NR Description: (bHLH015) putative bHLH transcription factor
  misc_feature (5)..(281): Homolog of NCBI NO: 30680903 NR Description: (bHLH015) putative bHLH transcription factor
  misc_feature (5)..(333): Homolog of NCBI NO: 25411969 NR Description: hypothetical protein At2g20180 [imported] -
  misc_feature (109)..(316): Homolog of NCBI NO: 15451582 NR Description: Putative SPATULA [Oryza sativa]
  misc_feature (74)..(218): Homolog of NCBI NO: 25407777 NR Description: hypothetical protein AT4g36930 [imported] -
  misc_feature (74)..(218): Homolog of NCBI NO: 18419937 NR Description: bHLH protein SPATULA (SPT) [Arabidopsis thaliana]
MYHFDKNLSSQDEISLFLRQILLRSSLPSHSMPAGSCTSNAAQQNVNAHHPSFTASQLQDGKILAVDSTASFVSGSAACSSFKGHGASAANVSSSSAGVSENENDDYDCESEEGVEAPAEEVPTKAASSRSSSKRSRAAEVHNLSEKRRRGRINEKMKALQNLIPNSNKTDKASMLDEAIEYLKQLQLQVQMLSMRNGLSLHPMCFPEGLQPLQLSQMGMELSERNRFTSLNMSATLPLHQDNNPLHYASNLPNKHNLPNQPSVPYPPYIDNPETSFGLEPRIQTDMKPLQHKGGSSEPIRGEDILQHQQSSGIHSDANTLGGSQVVKEFESGTRLSFPFDTQACEPKDNSNSSQPCIGGRDHSGVIIRNSETNIVGR

SEQ ID NO: 55732 - DNA, 1386 bp, Glycine max
  misc_feature (1)..(1386): Ceres Seq. ID no. 15226511
aatctttaataaaagatattaaaatcctatggcttccagcaacaagattcacgttgttatcgacaacaagctctatgacttgaccaagtttggcaagacccatccaggtggcagtctcatccttgaaaacttccacgactgtgatgtcactgattatttctatgccatccactctaagcaagcccaaaagatgctcaagaacatgccctcatctgacattgctgaagaggacaaagtcccccaaaccgattatttgaagctcttgttccaactcgaaaagaccgatcttttcaaggcagattatgttgttgagtttgttcaaatcttccacacaatcgttttgttcttcttggcaacttggtatggtcaaacctaccctgtcttttccgctatttgcctcggtttcggtaccctcatcggtggttgggttggccatcaatgcgatcatcagagagataacattatgagagacgtcaacttggtttacgccactgtttgcgacggcctttctccccactggtggtccaccaagcacaaccgtcaccacttgagcaccaacgaaactgaacatgatggtgatattcaactcttccctttcatctacctctggacccccaagaaggaccaagattcctggaacagagccatccaacacatctatttcaccgcattatacactatccttcaaattaaatggcaaattgactctgttcaatgggccatttctcaaagaaactacaaggagatggttggtttggctatccactgggcctggtacatcttcttcttgccttggcaagtctggactttgggagtccttattgctggtaccatttccgcttttgtcgtcacagctagtcaccaagctgagcacaaatacgaaggaaagaaggaattcgaaggagaagcagcaaatgttcgtagatccaaataccaaatccacgactatttcacccatcaagtcgtcaccaccagaaacatcgacctccacaactggttccttaattacatctgcggaggtatgcaataccaaatcgaacaccacgtcttccccagaatccctctttataaacttcctcttgtcaagggtgttgttcaagaatattgccaaaagcatggtgtagaatatagagatgaaggtttcatggatatcatgatgagaaactattatcacattgaaacaatcgctaaggtcaaagcccaagcctaaggttacaaagtataagaagaatttaataaattcatattttcttatatatgcttgcttgttctttctttatataatgcgtgaataaatttgcctatcccatttgttggaagtaagcagaatttgattttttttatcaaacgataattcaaacattattttaaaaaaaaaaaaaaaaa

SEQ ID NO: 55733 - protein, 393 aa, Glycine max
  peptide (1)..(393): Ceres Seq. ID no. 15226512
  misc_feature (121)..(359): Pfam Name: Fatty acid desaturase Pfam Description: Fatty acid desaturase
  misc_feature (239)..(373): Homolog of NCBI NO: 34221930 NR Description: delta6 fatty acid desaturase [Mortierella alpina]
  misc_feature (9)..(232): Homolog of NCBI NO: 34221930 NR Description: delta6 fatty acid desaturase [Mortierella alpina]
  misc_feature (239)..(392): Homolog of NCBI NO: 18483175 NR Description: delta 6 fatty acid desaturase [Mortierella alpina]
  misc_feature (9)..(195): Homolog of NCBI NO: 18483175 NR Description: delta 6 fatty acid desaturase [Mortierella alpina]
  misc_feature (239)..(392): Homolog of NCBI NO: 11559824 NR Description: delta6-fatty acid desaturase [Mortierella
  misc_feature (9)..(195): Homolog of NCBI NO: 11559824 NR Description: delta6-fatty acid desaturase [Mortierella
  misc_feature (239)..(392): Homolog of NCBI NO: 6070340 NR Description: delta-6 fatty acid desaturase [Mortierella
  misc_feature (9)..(232): Homolog of NCBI NO: 6070340 NR Description: delta-6 fatty acid desaturase [Mortierella
  misc_feature (239)..(392): Homolog of NCBI NO: 18483177 NR Description: delta 6 fatty acid desaturase [Mortierella
  misc_feature (9)..(195): Homolog of NCBI NO: 18483177 NR Description: delta 6 fatty acid desaturase [Mortierella
MASSNKIHVVIDNKLYDLTKFGKTHPGGSLILENFHDCDVTDYFYAIHSKQAQKMLKNMPSSDIAEEDKVPQTDYLKLLFQLEKTDLFKADYVVEFVQIFHTIVLFFLATWYGQTYPVFSAICLGFGTLIGGWVGHQCDHQRDNIMRDVNLVYATVCDGLSPHWWSTKHNRHHLSTNETEHDGDIQLFPFIYLWTPKKDQDSWNRAIQHIYFTALYTILQIKWQIDSVQWAISQRNYKEMVGLAIHWAWYIFFLPWQVWTLGVLIAGTISAFVVTASHQAEHKYEGKKEFEGEAANVRRSKYQIHDYFTHQVVTTRNIDLHNWFLNYICGGMQYQIEHHVFPRIPLYKLPLVKGVVQEYCQKHGVEYRDEGFMDIMMRNYYHIETIAKVKAQA

SEQ ID NO: 55734 - protein, 339 aa, Glycine max
  peptide (1)..(339): Ceres Seq. ID no. 15226513
  misc_feature (67)..(305): Pfam Name: Fatty acid desaturase Pfam Description: Fatty acid desaturase
  misc_feature (185)..(319): Homolog of NCBI NO: 34221930 NR Description: delta6 fatty acid desaturase [Mortierella alpina]
  misc_feature (1)..(178): Homolog of NCBI NO: 34221930 NR Description: delta6 fatty acid desaturase [Mortierella alpina]
  misc_feature (185)..(338): Homolog of NCBI NO: 18483175 NR Description: delta 6 fatty acid desaturase [Mortierella alpina]
  misc_feature (1)..(141): Homolog of NCBI NO: 18483175 NR Description: delta 6 fatty acid desaturase [Mortierella alpina]
  misc_feature (185)..(338): Homolog of NCBI NO: 11559824 NR Description: delta6-fatty acid desaturase [Mortierella
  misc_feature (1)..(141): Homolog of NCBI NO: 11559824 NR Description: delta6-fatty acid desaturase [Mortierella
  misc_feature (185)..(338): Homolog of NCBI NO: 6070340 NR Description: delta-6 fatty acid desaturase [Mortierella
  misc_feature (1)..(178): Homolog of NCBI NO: 6070340 NR Description: delta-6 fatty acid desaturase [Mortierella
  misc_feature (185)..(338): Homolog of NCBI NO: 18483177 NR Description: delta 6 fatty acid desaturase [Mortierella
  misc_feature (1)..(141): Homolog of NCBI NO: 18483177 NR Description: delta 6 fatty acid desaturase [Mortierella
MLKNMPSSDIAEEDKVPQTDYLKLLFQLEKTDLFKADYVVEFVQIFHTIVLFFLATWYGQTYPVFSAICLGFGTLIGGWVGHQCDHQRDNIMRDVNLVYATVCDGLSPHWWSTKHNRHHLSTNETEHDGDIQLFPFIYLWTPKKDQDSWNRAIQHIYFTALYTILQIKWQIDSVQWAISQRNYKEMVGLAIHWAWYIFFLPWQVWTLGVLIAGTISAFVVTASHQAEHKYEGKKEFEGEAANVRRSKYQIHDYFTHQVVTTRNIDLHNWFLNYICGGMQYQIEHHVFPRIPLYKLPLVKGVVQEYCQKHGVEYRDEGFMDIMMRNYYHIETIAKVKAQA

SEQ ID NO: 55735 - protein, 335 aa, Glycine max
  peptide (1)..(335): Ceres Seq. ID no. 15226514
  misc_feature (63)..(301): Pfam Name: Fatty acid desaturase Pfam Description: Fatty acid desaturase
  misc_feature (181)..(315): Homolog of NCBI NO: 34221930 NR Description: delta6 fatty acid desaturase [Mortierella alpina]
  misc_feature (1)..(174): Homolog of NCBI NO: 34221930 NR Description: delta6 fatty acid desaturase [Mortierella alpina]
  misc_feature (181)..(334): Homolog of NCBI NO: 18483175 NR Description: delta 6 fatty acid desaturase [Mortierella alpina]
  misc_feature (1)..(137): Homolog of NCBI NO: 18483175 NR Description: delta 6 fatty acid desaturase [Mortierella alpina]
  misc_feature (181)..(334): Homolog of NCBI NO: 11559824 NR Description: delta6-fatty acid desaturase [Mortierella
  misc_feature (1)..(137): Homolog of NCBI NO: 11559824 NR Description: delta6-fatty acid desaturase [Mortierella
  misc_feature (181)..(334): Homolog of NCBI NO: 6070340 NR Description: delta-6 fatty acid desaturase [Mortierella
  misc_feature (1)..(174): Homolog of NCBI NO: 6070340 NR Description: delta-6 fatty acid desaturase [Mortierella
  misc_feature (181)..(334): Homolog of NCBI NO: 18483177 NR Description: delta 6 fatty acid desaturase [Mortierella
  misc_feature (1)..(137): Homolog of NCBI NO: 18483177 NR Description: delta 6 fatty acid desaturase [Mortierella
MPSSDIAEEDKVPQTDYLKLLFQLEKTDLFKADYVVEFVQIFHTIVLFFLATWYGQTYPVFSAICLGFGTLIGGWVGHQCDHQRDNIMRDVNLVYATVCDGLSPHWWSTKHNRHHLSTNETEHDGDIQLFPFIYLWTPKKDQDSWNRAIQHIYFTALYTILQIKWQIDSVQWAISQRNYKEMVGLAIHWAWYIFFLPWQVWTLGVLIAGTISAFVVTASHQAEHKYEGKKEFEGEAANVRRSKYQIHDYFTHQVVTTRNIDLHNWFLNYICGGMQYQIEHHVFPRIPLYKLPLVKGVVQEYCQKHGVEYRDEGFMDIMMRNYYHIETIAKVKAQA

SEQ ID NO: 55736 - DNA, 1358 bp, Glycine max
  misc_feature (1)..(1358): Ceres Seq. ID no. 13639514
gctctttctctcttagaaaacaccctctaccgcctctaagtcctacaagaacccatcccctccccagccgctcccaaaatctcactcttcttactcttcttcctccaagagaagtaaacaaccctcacattcaccacagcagcacacacagacaaagacaaccttgtttgtctccaatcaaaacctttcaagctggcgttcgaaaaccaagacaaccctgtccgagaaatcaagcccaagaataggagaatcatgggtgctggaggccctgatgatgaggacaacaacaggtggccaccgtggctgaagcctctgctaaaagaaagtttctttgttcaatgcaagcttcacgctgattcgcacaagagcgagtgcaacatgtactgcttggattgtatgaacggtgctctctgctctctctgcctcgcttaccataaagatcatcgtgctattcagataaggaggtcctcataccatgatgtgattagggtgaatgagattcagaaggtgttggacatcacaggggtccaaacctacattatcaacagcgcgagggttgttttcttgaatgagaggccgcagccaaggcctggtaaaggtgtcaccaacacttgtgaagtctgcgagcgtagccttcttgattcctaccgattctgttctctaggttgtaagattgttgggacttcaaggaacttcctgaagaaaaagtcagcggcaatggtatcagactcagaggattcttacagcagcaacagcagccatgggaagaagaacagcttcacaccttccacaccgccaccaacttttgttaattacagaacggccaagagaagaaagggaattccacaccgtgccccaatgggagggctagtcatagaatactagaaagttagtaacttttggttatttgctataatgcccctgatatattttacctcaaaatgcaactttctccgtgcagtttcacccgttccaacatacgtgagctttttgctgaaaaaggccggtgctggaagtgtttccttctctgttccttacttgttaatagcgtttgtctatatgggaaaattccaatagaagtgggaaaaaaggttgagaaagtagaaaaaataagacatctgtgaaatagtttgagaaaaagaatggtgtagcaaaataagcaaagttcctttcaaccaaagtacaagaagatgaggaacattataggtttggtttctagagctattatacctaagttttgggtggtgggtgtaaatagtggcttggggaagaagacagtgacaatgtactctttacaaataggtggattgtctatatatggaatggtgaaataataaatagtactaatagtttttctc

SEQ ID NO: 55737 - protein, 210 aa, Glycine max
  peptide (1)..(210): Ceres Seq. ID no. 13639515
  misc_feature (14)..(197): Pfam Name: Protein of unknown function, DUF597 Pfam Description: Protein of unknown function, DUF597
  misc_feature (162)..(202): Homolog of NCBI NO: 25337907 NR Description: hypothetical protein F9H16.1 - Arabidopsis
  misc_feature (162)..(202): Homolog of NCBI NO: 18394936 NR Description: expressed protein [Arabidopsis thaliana]
  misc_feature (7)..(149): Homolog of NCBI NO: 25337907 NR Description: hypothetical protein F9H16.1 - Arabidopsis
  misc_feature (7)..(149): Homolog of NCBI NO: 18394936 NR Description: expressed protein [Arabidopsis thaliana]
  misc_feature (1)..(210): Homolog of NCBI NO: 37537092 NR Description: unknown protein [Oryza sativa (japonica
  misc_feature (1)..(184): Homolog of NCBI NO: 38346725 NR Description: OSJNBa0086O06.23 [Oryza sativa (japonica
  misc_feature (1)..(145): Homolog of NCBI NO: 15236696 NR Description: expressed protein [Arabidopsis thaliana]
  misc_feature (5)..(210): Homolog of NCBI NO: 21554139 NR Description: unknown [Arabidopsis thaliana]
  misc_feature (5)..(210): Homolog of NCBI NO: 18398555 NR Description: expressed protein [Arabidopsis thaliana]
  misc_feature (1)..(210): Homolog of NCBI NO: 6714272 NR Description: F6N18.8 [Arabidopsis thaliana]
MGAGGPDDEDNNRWPPWLKPLLKESFFVQCKLHADSHKSECNMYCLDCMNGALCSLCLAYHKDHRAIQIRRSSYHDVIRVNEIQKVLDITGVQTYIINSARVVFLNERPQPRPGKGVTNTCEVCERSLLDSYRFCSLGCKIVGTSRNFLKKKSAAMVSDSEDSYSSNSSHGKKNSFTPSTPPPTFVNYRTAKRRKGIPHRAPMGGLVIEY

SEQ ID NO: 55738 - protein, 168 aa, Glycine max
  peptide (1)..(168): Ceres Seq. ID no. 13639516
  misc_feature (1)..(155): Pfam Name: Protein of unknown function, DUF597 Pfam Description: Protein of unknown function, DUF597
  misc_feature (120)..(160): Homolog of NCBI NO: 25337907 NR Description: hypothetical protein F9H16.1 - Arabidopsis
  misc_feature (120)..(160): Homolog of NCBI NO: 18394936 NR Description: expressed protein [Arabidopsis thaliana]
  misc_feature (1)..(107): Homolog of NCBI NO: 25337907 NR Description: hypothetical protein F9H16.1 - Arabidopsis
  misc_feature (1)..(107): Homolog of NCBI NO: 18394936 NR Description: expressed protein [Arabidopsis thaliana]
  misc_feature (1)..(168): Homolog of NCBI NO: 37537092 NR Description: unknown protein [Oryza sativa (japonica
  misc_feature (1)..(142): Homolog of NCBI NO: 38346725 NR Description: OSJNBa0086O06.23 [Oryza sativa (japonica
  misc_feature (1)..(103): Homolog of NCBI NO: 15236696 NR Description: expressed protein [Arabidopsis thaliana]
  misc_feature (1)..(168): Homolog of NCBI NO: 21554139 NR Description: unknown [Arabidopsis thaliana]
  misc_feature (1)..(168): Homolog of NCBI NO: 18398555 NR Description: expressed protein [Arabidopsis thaliana]
  misc_feature (1)..(168): Homolog of NCBI NO: 6714272 NR Description: F6N18.8 [Arabidopsis thaliana]
MYCLDCMNGALCSLCLAYHKDHRAIQIRRSSYHDVIRVNEIQKVLDITGVQTYIINSARVVFLNERPQPRPGKGVTNTCEVCERSLLDSYRFCSLGCKIVGTSRNFLKKKSAAMVSDSEDSYSSNSSHGKKNSFTPSTPPPTFVNYRTAKRRKGIPHRAPMGGLVIEY

SEQ ID NO: 55739 - protein, 162 aa, Glycine max
  peptide (1)..(162): Ceres Seq. ID no. 13639517
  misc_feature (1)..(149): Pfam Name: Protein of unknown function, DUF597 Pfam Description: Protein of unknown function, DUF597
  misc_feature (114)..(154): Homolog of NCBI NO: 25337907 NR Description: hypothetical protein F9H16.1 - Arabidopsis
  misc_feature (114)..(154): Homolog of NCBI NO: 18394936 NR Description: expressed protein [Arabidopsis thaliana]
  misc_feature (1)..(101): Homolog of NCBI NO: 25337907 NR Description: hypothetical protein F9H16.1 - Arabidopsis
  misc_feature (1)..(101): Homolog of NCBI NO: 18394936 NR Description: expressed protein [Arabidopsis thaliana]
  misc_feature (1)..(162): Homolog of NCBI NO: 37537092 NR Description: unknown protein [Oryza sativa (japonica
  misc_feature (1)..(136): Homolog of NCBI NO: 38346725 NR Description: OSJNBa0086O06.23 [Oryza sativa (japonica
  misc_feature (1)..(97): Homolog of NCBI NO: 15236696 NR Description: expressed protein [Arabidopsis thaliana]
  misc_feature (1)..(162): Homolog of NCBI NO: 21554139 NR Description: unknown [Arabidopsis thaliana]
  misc_feature (1)..(162): Homolog of NCBI NO: 18398555 NR Description: expressed protein [Arabidopsis thaliana]
  misc_feature (1)..(162): Homolog of NCBI NO: 6714272 NR Description: F6N18.8 [Arabidopsis thaliana]
MNGALCSLCLAYHKDHRAIQIRRSSYHDVIRVNEIQKVLDITGVQTYIINSARVVFLNERPQPRPGKGVTNTCEVCERSLLDSYRFCSLGCKIVGTSRNFLKKKSAAMVSDSEDSYSSNSSHGKKNSFTPSTPPPTFVNYRTAKRRKGIPHRAPMGGLVIEY

SEQ ID NO: 55740 - DNA, 823 bp, Glycine max
  misc_feature (1)..(823): Ceres Seq. ID no. 12610381
aacccaaacccccgctaagcatcagcagcagtgcagcacctcccttctacctcctctgctctgcattcctccttccagctccagccgcaatcaatggccgccatgaagatcaccctcctcgccgtggccgcgatggccgtcttactaggcagcgcgtcagcggtaacctacaacgtcggcgatcagggcggttgggccctcagcaccgactacagcaactgggtgtccggcaagaagttcaacgtgggtgatgacatcgtcttcaagtactcgaccccgacgcacgacgtggtcgaggtcagcaaggccggctacgactcctgcagcaccgacggcgccatcaacaccttaacctccggcaacgacgtcatctccctcaacgccaccggcacccgctacttcatctgtggcgtccctaaccattgcagccccgccgccgccgccagcatgaaggtcgtgatcgacgtcgcctcgggctcctcctcgccgtcgtcacccatgccagctgcaggtcctggcgcgagcaactctcccccggcgccgccctccaacgccgctacctccgtcggtgccacagcaggatttggcctcgtcgccctcctggcggccggtctcatggcttgaacgcatatattgatcagctgccgcgcgcacatacgactttatcttttgttattaactactatactgtagttattatcacgggtgaatacatgtattcttttttagagcgagaatgtgatagttacttgtatctatcacgtctatatgtaatctgcaggccttcatgtctttttatataatgattctagactattatttt

SEQ ID NO: 55741 - protein, 176 aa, Glycine max
  peptide (1)..(176): Ceres Seq. ID no. 12610382
  misc_feature (34)..(115): Pfam Name: Plastocyanin-like domain Pfam Description: Plastocyanin-like domain
  misc_feature (8)..(174): Homolog of NCBI NO: 34915492 NR Description: contains ESTs
  misc_feature (1)..(175): Homolog of NCBI NO: 34900010 NR Description: P0039H02.23 [Oryza sativa (japonica
  misc_feature (1)..(163): Homolog of NCBI NO: 38346158 NR Description: OSJNBa0079A21.5 [Oryza sativa (japonica
  misc_feature (1)..(175): Homolog of NCBI NO: 38636838 NR Description: putative blue copper binding protein
  misc_feature (2)..(175): Homolog of NCBI NO: 38636764 NR Description: putative blue copper binding protein
  misc_feature (1)..(175): Homolog of NCBI NO: 38636761 NR Description: putative blue copper binding protein
  misc_feature (1)..(176): Homolog of NCBI NO: 38636760 NR Description: putative blue copper binding protein
  misc_feature (2)..(176): Homolog of NCBI NO: 38636763 NR Description: putative blue copper binding protein
  misc_feature (1)..(176): Homolog of NCBI NO: 37651973 NR Description: blue copper binding protein [Hordeum vulgare
  misc_feature (1)..(176): Homolog of NCBI NO: 4104058 NR Description: blue copper-binding protein homolog [Triticum
MAAMKITLLAVAAMAVLLGSASAVTYNVGDQGGWALSTDYSNWVSGKKFNVGDDIVFKYSTPTHDVVEVSKAGYDSCSTDGAINTLTSGNDVISLNATGTRYFICGVPNHCSPAAAASMKVVIDVASGSSSPSSPMPAAGPGASNSPPAPPSNAATSVGATAGFGLVALLAAGLMA

SEQ ID NO: 55742 - protein, 173 aa, Glycine max
  peptide (1)..(173): Ceres Seq. ID no. 12610383
  misc_feature (31)..(112): Pfam Name: Plastocyanin-like domain Pfam Description: Plastocyanin-like domain
  misc_feature (5)..(171): Homolog of NCBI NO: 34915492 NR Description: contains ESTs
  misc_feature (1)..(172): Homolog of NCBI NO: 34900010 NR Description: P0039H02.23 [Oryza sativa (japonica
  misc_feature (1)..(160): Homolog of NCBI NO: 38346158 NR Description: OSJNBa0079A21.5 [Oryza sativa (japonica
  misc_feature (1)..(172): Homolog of NCBI NO: 38636838 NR Description: putative blue copper binding protein
  misc_feature (1)..(172): Homolog of NCBI NO: 38636764 NR Description: putative blue copper binding protein
  misc_feature (1)..(172): Homolog of NCBI NO: 38636761 NR Description: putative blue copper binding protein
  misc_feature (1)..(173): Homolog of NCBI NO: 38636760 NR Description: putative blue copper binding protein
  misc_feature (1)..(173): Homolog of NCBI NO: 38636763 NR Description: putative blue copper binding protein
  misc_feature (1)..(173): Homolog of NCBI NO: 37651973 NR Description: blue copper binding protein [Hordeum vulgare
  misc_feature (1)..(173): Homolog of NCBI NO: 4104058 NR Description: blue copper-binding protein homolog [Triticum
MKITLLAVAAMAVLLGSASAVTYNVGDQGGWALSTDYSNWVSGKKFNVGDDIVFKYSTPTHDVVEVSKAGYDSCSTDGAINTLTSGNDVISLNATGTRYFICGVPNHCSPAAAASMKVVIDVASGSSSPSSPMPAAGPGASNSPPAPPSNAATSVGATAGFGLVALLAAGLMA

SEQ ID NO: 55743 - protein, 163 aa, Glycine max
  peptide (1)..(163): Ceres Seq. ID no. 12610384
  misc_feature (21)..(102): Pfam Name: Plastocyanin-like domain Pfam Description: Plastocyanin-like domain
  misc_feature (1)..(161): Homolog of NCBI NO: 34915492 NR Description: contains ESTs
  misc_feature (1)..(162): Homolog of NCBI NO: 34900010 NR Description: P0039H02.23 [Oryza sativa (japonica
  misc_feature (1)..(150): Homolog of NCBI NO: 38346158 NR Description: OSJNBa0079A21.5 [Oryza sativa (japonica
  misc_feature (1)..(162): Homolog of NCBI NO: 38636838 NR Description: putative blue copper binding protein
  misc_feature (1)..(162): Homolog of NCBI NO: 38636764 NR Description: putative blue copper binding protein
  misc_feature (1)..(162): Homolog of NCBI NO: 38636761 NR Description: putative blue copper binding protein
  misc_feature (1)..(163): Homolog of NCBI NO: 38636760 NR Description: putative blue copper binding protein
  misc_feature (1)..(163): Homolog of NCBI NO: 38636763 NR Description: putative blue copper binding protein
  misc_feature (1)..(163): Homolog of NCBI NO: 37651973 NR Description: blue copper binding protein [Hordeum vulgare
  misc_feature (1)..(163): Homolog of NCBI NO: 4104058 NR Description: blue copper-binding protein homolog [Triticum
MAVLLGSASAVTYNVGDQGGWALSTDYSNWVSGKKFNVGDDIVFKYSTPTHDVVEVSKAGYDSCSTDGAINTLTSGNDVISLNATGTRYFICGVPNHCSPAAAASMKVVIDVASGSSSPSSPMPAAGPGASNSPPAPPSNAATSVGATAGFGLVALLAAGLMA

SEQ ID NO: 55744 - DNA, 764 bp, Glycine max
  misc_feature (1)..(764): Ceres Seq. ID no. 13595055
attttaggaggatctctctctctctctgcttctctccatctctctcttagccatggctgctttcacctgtacctctcgtcctcccgtttccctccgttcggagtcaagaatcgcttcctctccatcagcttcactctctgctcggcggatgttcgccgtctcgcctgactcagcaggattgagaatccgtctttcccagtctccctcctcgttgacctcgaaggttcctcgaccacgaagaggcatcgtctgtgaggctcaggaaaccactacagatatagtttcaatagtcaacgacacaacatgggactctctagttctcaaggcggacgggcctgtattggttgacttttgggcaccatggtgtgggccttgcaaaatgattgacccgctcgtgaacgagctagcaaaagagtacaccgggaaggtcaagttctacaaactgaacacggacgactctccttcaaccccaagcaagtacaatgttagaagcatcccaacgatcatgatctttgtcaatggggagaagaaggatgcaatcataggtgcagtgcctagatctacgctcgcgtctagcattgataaattcttgcaatgagatttagactggtgagtctgtgagatctgtttctcctcctcttctgtcttgtgttctcattctctcttgtaatttgtgcttctttgtagctatctgtttcttctattgtatcttttattcatcactgaacatggataaataagatgatgtcatgtttttttatgtt

SEQ ID NO: 55745 - protein, 181 aa, Glycine max
  peptide (1)..(181): Ceres Seq. ID no. 15221468
  misc_feature (38)..(180): Homolog of NCBI NO: 21354 NR Description: thioredoxin M precursor (AA -67 to 114) [Spinacia
  misc_feature (13)..(180): Homolog of NCBI NO: 15232567 NR Description: thioredoxin M-type 4, chloroplast precursor
  misc_feature (13)..(180): Homolog of NCBI NO: 6539614 NR Description: thioredoxin m4 [Arabidopsis thaliana]
  misc_feature (18)..(181): Homolog of NCBI NO: 38346628 NR Description: OSJNBa0074L08.22 [Oryza sativa (japonica
  misc_feature (12)..(180): Homolog of NCBI NO: 15594012 NR Description: putative thioredoxin m2 [Pisum sativum]
  misc_feature (1)..(181): Homolog of NCBI NO: 11135407 NR Description: Thioredoxin M-type, chloroplast precursor (TRX-M)
  misc_feature (1)..(180): Homolog of NCBI NO: 30678634 NR Description: thioredoxin M-type 1, chloroplast precursor
  misc_feature (1)..(180): Homolog of NCBI NO: 21618235 NR Description: putative M-type thioredoxin [Arabidopsis thaliana]
  misc_feature (1)..(180): Homolog of NCBI NO: 6539610 NR Description: thioredoxin m2 [Arabidopsis thaliana]
  misc_feature (1)..(180): Homolog of NCBI NO: 15236327 NR Description: thioredoxin M-type 2, chloroplast precursor
MAAFTCTSRPPVSLRSESRIASSPSASLSARRMFAVSPDSAGLRIRLSQSPSSLTSKVPRPRRGIVCEAQETTTDIVSIVNDTTWDSLVLKADGPVLVDFWAPWCGPCKMIDPLVNELAKEYTGKVKFYKLNTDDSPSTPSKYNVRSIPTIMIFVNGEKKDAIIGAVPRSTLASSIDKFLQ

SEQ ID NO: 55746 - protein, 149 aa, Glycine max
  peptide (1)..(149): Ceres Seq. ID no. 15221469
  misc_feature (6)..(148): Homolog of NCBI NO: 21354 NR Description: thioredoxin M precursor (AA -67 to 114) [Spinacia
  misc_feature (1)..(148): Homolog of NCBI NO: 15232567 NR Description: thioredoxin M-type 4, chloroplast precursor
  misc_feature (1)..(148): Homolog of NCBI NO: 6539614 NR Description: thioredoxin m4 [Arabidopsis thaliana]
  misc_feature (1)..(149): Homolog of NCBI NO: 38346628 NR Description: OSJNBa0074L08.22 [Oryza sativa (japonica
  misc_feature (1)..(148): Homolog of NCBI NO: 15594012 NR Description: putative thioredoxin m2 [Pisum sativum]
  misc_feature (1)..(149): Homolog of NCBI NO: 11135407 NR Description: Thioredoxin M-type, chloroplast precursor (TRX-M)
  misc_feature (1)..(148): Homolog of NCBI NO: 30678634 NR Description: thioredoxin M-type 1, chloroplast precursor
  misc_feature (1)..(148): Homolog of NCBI NO: 21618235 NR Description: putative M-type thioredoxin [Arabidopsis thaliana]
  misc_feature (1)..(148): Homolog of NCBI NO: 6539610 NR Description: thioredoxin m2 [Arabidopsis thaliana]
  misc_feature (1)..(148): Homolog of NCBI NO: 15236327 NR Description: thioredoxin M-type 2, chloroplast precursor
MFAVSPDSAGLRIRLSQSPSSLTSKVPRPRRGIVCEAQETTTDIVSIVNDTTWDSLVLKADGPVLVDFWAPWCGPCKMIDPLVNELAKEYTGKVKFYKLNTDDSPSTPSKYNVRSIPTIMIFVNGEKKDAIIGAVPRSTLASSIDKFLQ

SEQ ID NO: 55747 - DNA, 959 bp, Glycine max
  misc_feature (1)..(959): Ceres Seq. ID no. 13594918
catcctaatcgaaaaagagtactaaacggaatttgaaaaccaaggctgaagaagttttaagagacatggagctctccgtggttgcaagagacatggaagaagttgtattgctggttgatgatttgagatcactttctgggatttctcgctgtagaatatgtcatgaagaagaatttgagagctccaaaaccttggaagctccttgtgcttgttctgggacagttaagtttgctcacagagattgcattcagacatggtgcgatgagaaaggaaatacaacttgtgaaatatgtctccagcaatatgaacctggatatacagcagccccaaagaaatcgcaaataactgatgcagcaatgaccattagggatagcctgcaaatttcaaggaatgaacaagaaccgttaaacacaagaatagtgggtatcgttgaaggaaacaattactctgaatgcacgtatgctgcagataggaccgcggcttgttgtcgatctctggctctagcttttacactcatcttgcttgtaagacatctttttgcactccttacagatggaatggaagattatccatttacaattcttacggtctttttactaagggccagtggaattattatacccatgtacataattattaaggcgatcggagctattcatgacaatattaagcgtcaccatcatgaggattctgacgatgactcatcgatatctgatggagatgatgaagaaaatgagacaccaaatgatgaaattttaagacattcacaatcataggtcattatttgatttaatttgtatcagagcattatgctgatgctctgtcaagttttaccattttggaggcataattttttattgtaaaaaaaaagaagaacgaaattcacattgaaatacatatagctttgcagtatttatactgtttcctaccaacccaagtatataaaacaaccaaatttc
